United States Patent Application Publication US 2025/0327063 A1 - sequence listing, part 4

SEQ ID NO: 41184 - DNA, 80 bp, synthetic construct
  misc_feature 1..80: note = Artificially Synthesized Probe
  source 1..80: mol_type = other DNA
ctttttgtagccaatatttttgcacagaactcttacttacatgtctcatcgaaactccagaacaaacatcaaaaggtaca

SEQ ID NO: 41185 - DNA, 80 bp, synthetic construct
  misc_feature 1..80: note = Artificially Synthesized Probe
  source 1..80: mol_type = other DNA
ctgcgatctctgcctcctgggtttaaacgattctcctgcctcagcttcccaagtagctggggttacaggcgcctgccacc

SEQ ID NO: 41186 - DNA, 80 bp, synthetic construct
  misc_feature 1..80: note = Artificially Synthesized Probe
  source 1..80: mol_type = other DNA
cgcctggctaattttttgtatttttcatgaagttggggttttaccattttggcctggctggtcttgaactcctgacctca

SEQ ID NO: 41187 - DNA, 80 bp, synthetic construct
  misc_feature 1..80: note = Artificially Synthesized Probe
  source 1..80: mol_type = other DNA
tgtctactccattatttgatttttgccagcattcagcatgctttttctgtaaaggaccagtaaatagtaattattttagg

SEQ ID NO: 41188 - DNA, 80 bp, synthetic construct
  misc_feature 1..80: note = Artificially Synthesized Probe
  source 1..80: mol_type = other DNA
aacaccacgtcctgctaaaaagtacacatttaaaatctaagttccattttcccgtcatgtttattaatttgtcccattgc

SEQ ID NO: 41189 - DNA, 80 bp, synthetic construct
  misc_feature 1..80: note = Artificially Synthesized Probe
  source 1..80: mol_type = other DNA
tgtgctttactctttctagaagtattcaacttctataggctaacactgccccaacaaagtaaaaatataggtcacgagaa

SEQ ID NO: 41190 - DNA, 80 bp, synthetic construct
  misc_feature 1..80: note = Artificially Synthesized Probe
  source 1..80: mol_type = other DNA
tattgaagttttcagtaactctaaaggtaaagagagaagctttttttcccttaagatctttactatggaggctcttctca

SEQ ID NO: 41191 - DNA, 80 bp, synthetic construct
  misc_feature 1..80: note = Artificially Synthesized Probe
  source 1..80: mol_type = other DNA
gaatacctaccaagtataaggcactatgccagcactgcatagctttccttgaagaagagcaattactgcccttcaggaat

SEQ ID NO: 41192 - DNA, 80 bp, synthetic construct
  misc_feature 1..80: note = Artificially Synthesized Probe
  source 1..80: mol_type = other DNA
tatagtatatgtgctaggtactgtggcagggacttcacaatatcacgtatcttgtaagttattctcaaatatgagagggg

SEQ ID NO: 41193 - DNA, 80 bp, synthetic construct
  misc_feature 1..80: note = Artificially Synthesized Probe
  source 1..80: mol_type = other DNA
aaaatacagactgtagtaagatcctggtctgacctccctgcttcttttctcctgaccacattaaaagtttgccctatagt

SEQ ID NO: 41194 - DNA, 80 bp, synthetic construct
  misc_feature 1..80: note = Artificially Synthesized Probe
  source 1..80: mol_type = other DNA
ttctcctgcctcagcctcccaagtagcagggattacaggtgcccggcatcacaccgaactaattttttcttgaactcctg

SEQ ID NO: 41195 - DNA, 80 bp, synthetic construct
  misc_feature 1..80: note = Artificially Synthesized Probe
  source 1..80: mol_type = other DNA
aaaagatgataaatctttgttgttccataacattagttagtagaagttaatatcttaaatcgtacacaaaagtatctctc

SEQ ID NO: 41196 - DNA, 80 bp, synthetic construct
  misc_feature 1..80: note = Artificially Synthesized Probe
  source 1..80: mol_type = other DNA
agcctccctagtagctgggattatatgcatgccctaccacgtccaactaatttttgtatttttagtagagacagggtttc

SEQ ID NO: 41197 - DNA, 80 bp, synthetic construct
  misc_feature 1..80: note = Artificially Synthesized Probe
  source 1..80: mol_type = other DNA
tgtgtagtggtatatgctagcaggattctagggattcttatgctgtcctaccaattttggaattatcttttttttgttgc

SEQ ID NO: 41198 - DNA, 80 bp, synthetic construct
  misc_feature 1..80: note = Artificially Synthesized Probe
  source 1..80: mol_type = other DNA
gcccgcatgcccagcctcaattttttttttttttttttttggagactgagtctcgccctgttgccaggctggagtgcagt

SEQ ID NO: 41199 - DNA, 80 bp, synthetic construct
  misc_feature 1..80: note = Artificially Synthesized Probe
  source 1..80: mol_type = other DNA
tgtgagtgtataaaacaggagaaccagctttcatttgaggtgttagatttgggaataatgacgatcagggaaggcatctc

SEQ ID NO: 41200 - DNA, 80 bp, synthetic construct
  misc_feature 1..80: note = Artificially Synthesized Probe
  source 1..80: mol_type = other DNA
attgcaattgtgcgatcatgactcactttacccttgacctcctggcctcaaatgatcctcctgcctcagcctaccgaata

SEQ ID NO: 41201 - DNA, 80 bp, synthetic construct
  misc_feature 1..80: note = Artificially Synthesized Probe
  source 1..80: mol_type = other DNA
tcttctaacattagaccagtagtacatatgatggttaggattgtaatctgagttccaggagcaggatgctgctcttcggt

SEQ ID NO: 41202 - DNA, 80 bp, synthetic construct
  misc_feature 1..80: note = Artificially Synthesized Probe
  source 1..80: mol_type = other DNA
acttccacctcccaggctcaagcgattcttctgcctcagcctcccgagtagccgggattacaggtgcctgccaccacgcc

SEQ ID NO: 41203 - DNA, 80 bp, synthetic construct
  misc_feature 1..80: note = Artificially Synthesized Probe
  source 1..80: mol_type = other DNA
tttttgtagagatgaggtttcaccgttttgcccagtgtgacctcgaactactgagttcaagtgatctgcccactttgtcc

SEQ ID NO: 41204 - DNA, 80 bp, synthetic construct
  misc_feature 1..80: note = Artificially Synthesized Probe
  source 1..80: mol_type = other DNA
cagtcttgagtttttgttcttttttcagaacctggctatacatttctttttgcatacttactcttgaaggtgcctcatca

SEQ ID NO: 41205 - DNA, 80 bp, synthetic construct
  misc_feature 1..80: note = Artificially Synthesized Probe
  source 1..80: mol_type = other DNA
gaaaactttgcccttttccttggaacaaaccacctatggaagggatcattggtacactttattctagtacatatcagagt

SEQ ID NO: 41206 - DNA, 80 bp, synthetic construct
  misc_feature 1..80: note = Artificially Synthesized Probe
  source 1..80: mol_type = other DNA
ctcccagctattcaggaggctgaggcaggagaatggcttgaaccctgggaggcagaagttacagtgagccgagatcacgc

SEQ ID NO: 41207 - DNA, 80 bp, synthetic construct
  misc_feature 1..80: note = Artificially Synthesized Probe
  source 1..80: mol_type = other DNA
atagcgagaccctgtctctaaaagaaaaaaaaaataattgaattaaaaccttaaacaggccaggcgcagtggctcacacc

SEQ ID NO: 41208 - DNA, 80 bp, synthetic construct
  misc_feature 1..80: note = Artificially Synthesized Probe
  source 1..80: mol_type = other DNA
gttttgggttttagctaattctgctatgtaaggtagtatttatggaacttcttctagaataatgctgtctttttagtaaa

SEQ ID NO: 41209 - DNA, 80 bp, synthetic construct
  misc_feature 1..80: note = Artificially Synthesized Probe
  source 1..80: mol_type = other DNA
gcaccggccctctgctttctaactctgcttggacccttatagttctactcttccataataattttgtcctctactgatag

SEQ ID NO: 41210 - DNA, 80 bp, synthetic construct
  misc_feature 1..80: note = Artificially Synthesized Probe
  source 1..80: mol_type = other DNA
tcttccatggaaatgtctttcttacttgcctcttatttctctatcttagaaaaagaggaatccagtcgggctcggtggct

SEQ ID NO: 41211 - DNA, 80 bp, synthetic construct
  misc_feature 1..80: note = Artificially Synthesized Probe
  source 1..80: mol_type = other DNA
caacttggtagtctgatttttttctgccttggtctggtgtttttgtggttttgttcttactttttgtgagttgtgagggg

SEQ ID NO: 41212 - DNA, 80 bp, synthetic construct
  misc_feature 1..80: note = Artificially Synthesized Probe
  source 1..80: mol_type = other DNA
tcctgacctcgtgatccacccgccttggcctcccaagggggcgtgagccaccacgcctggctaatgatgaagattttaac

SEQ ID NO: 41213 - DNA, 80 bp, synthetic construct
  misc_feature 1..80: note = Artificially Synthesized Probe
  source 1..80: mol_type = other DNA
tggtatgtcctgtagttctaggtacttggaagtccaagatggcaggatggcgtaagctcaggaattcaaggttacagtga

SEQ ID NO: 41214 - DNA, 80 bp, synthetic construct
  misc_feature 1..80: note = Artificially Synthesized Probe
  source 1..80: mol_type = other DNA
gcgttcccaccatgcctggctaattaaaaaaaattttttttgttaagatggaatctcactacatttcccaggctggtctc

SEQ ID NO: 41215 - DNA, 80 bp, synthetic construct
  misc_feature 1..80: note = Artificially Synthesized Probe
  source 1..80: mol_type = other DNA
agatggggtttctccacgttggtcaggttggtctcttgaactcccgatctcaggtgatttgcccacctcggcctcccaaa

SEQ ID NO: 41216 - DNA, 80 bp, synthetic construct
  misc_feature 1..80: note = Artificially Synthesized Probe
  source 1..80: mol_type = other DNA
ttatcctggatgcaacttccgaagaaactgatcaaatgtgttttacacacacacccccaataagaatgtttttaagtaga

SEQ ID NO: 41217 - DNA, 80 bp, synthetic construct
  misc_feature 1..80: note = Artificially Synthesized Probe
  source 1..80: mol_type = other DNA
tgttttttgaaatccattttttatccttttggccacaagtcttggtcagatcaagaactttttagtttagttgtctctgt

SEQ ID NO: 41218 - DNA, 80 bp, synthetic construct
  misc_feature 1..80: note = Artificially Synthesized Probe
  source 1..80: mol_type = other DNA
aatgtgtagatgtgttttagagacaggatctcactccttcgcccagactagagggcagtgacaggatcatagctcactgc

SEQ ID NO: 41219 - DNA, 80 bp, synthetic construct
  misc_feature 1..80: note = Artificially Synthesized Probe
  source 1..80: mol_type = other DNA
gattttctatttagataagccatcaccaaactcagaaaatgaacaaaattctgttaccctggaagtcctgcttgtgaaag

SEQ ID NO: 41220 - DNA, 80 bp, synthetic construct
  misc_feature 1..80: note = Artificially Synthesized Probe
  source 1..80: mol_type = other DNA
cccagtaagtcgaggctgcagtgagccatgattgcaccactgagctccagcctgtgcgacagagtgaaactgtctcaaga

SEQ ID NO: 41221 - DNA, 80 bp, synthetic construct
  misc_feature 1..80: note = Artificially Synthesized Probe
  source 1..80: mol_type = other DNA
agtttgcagaactatggttagaattttaacattccatttggtgatcatggcctatctcccgtgtttcctatagctgtgat

SEQ ID NO: 41222 - DNA, 80 bp, synthetic construct
  misc_feature 1..80: note = Artificially Synthesized Probe
  source 1..80: mol_type = other DNA
ccacgagtgagaaggagtttgcctagcaaagataattctaaacagaaacattagcatttgcaaagatgtggggttaatgt

SEQ ID NO: 41223 - DNA, 80 bp, synthetic construct
  misc_feature 1..80: note = Artificially Synthesized Probe
  source 1..80: mol_type = other DNA
gctcagttaaacttacttatttggcgaatattttctgagtgtctactctttgccagacactgttctagacattaagaagg

SEQ ID NO: 41224 - DNA, 80 bp, synthetic construct
  misc_feature 1..80: note = Artificially Synthesized Probe
  source 1..80: mol_type = other DNA
tagtgaaaatatcaccagtgaaagaatgtctgggaagcaaatccagcattttttctttttgggattggagaaagaaacct

SEQ ID NO: 41225 - DNA, 80 bp, synthetic construct
  misc_feature 1..80: note = Artificially Synthesized Probe
  source 1..80: mol_type = other DNA
cttgtaagaaaaagataatgcttttattttaaagaaaaagtgccaagaagaaactgggagaatttccccacagcagctta

SEQ ID NO: 41226 - DNA, 80 bp, synthetic construct
  misc_feature 1..80: note = Artificially Synthesized Probe
  source 1..80: mol_type = other DNA
tcttcccatagcctttcacccaatagttttagcattgattgattatttttgcttgaataaattattcctttggcagttgg

SEQ ID NO: 41227 - DNA, 80 bp, synthetic construct
  misc_feature 1..80: note = Artificially Synthesized Probe
  source 1..80: mol_type = other DNA
gctctgaagttgtgatttcttcaaggagtcctgattccttatagaagaatagtatttttaagccaaaatctgcatgttag

SEQ ID NO: 41228 - DNA, 80 bp, synthetic construct
  misc_feature 1..80: note = Artificially Synthesized Probe
  source 1..80: mol_type = other DNA
gagacagacacctggattcatttgctggatctggctatttacggtttgattttaaggcaagttatttaaccttttcttgc

SEQ ID NO: 41229 - DNA, 80 bp, synthetic construct
  misc_feature 1..80: note = Artificially Synthesized Probe
  source 1..80: mol_type = other DNA
cttacgctttatatttaatgttgacaacgtaccaggttttgagacctcaggcatattatactttacatgtttagagttat

SEQ ID NO: 41230 - DNA, 80 bp, synthetic construct
  misc_feature 1..80: note = Artificially Synthesized Probe
  source 1..80: mol_type = other DNA
tgcctgattcaaatgtctgctcctagctatgtggcgtttggcaagttacttatccatgtctcagtttcttctcctgtaac

SEQ ID NO: 41231 - DNA, 80 bp, synthetic construct
  misc_feature 1..80: note = Artificially Synthesized Probe
  source 1..80: mol_type = other DNA
ctccagtcatctggaaataatcttagacctaatacattctgcaaggctcataaacatgtaaaaatgaacattcataagca

SEQ ID NO: 41232 - DNA, 80 bp, synthetic construct
  misc_feature 1..80: note = Artificially Synthesized Probe
  source 1..80: mol_type = other DNA
gttaacaaaagatgtaggtaacaggttttctcagcattttttaaataatgaaacattagaaacatgttaaatctaaaaag

SEQ ID NO: 41233 - DNA, 80 bp, synthetic construct
  misc_feature 1..80: note = Artificially Synthesized Probe
  source 1..80: mol_type = other DNA
ctcttaaccctgtaaaatgggcatccttttaagtcagagcatatagatttacttctttttaaaagttctgagattttttg

SEQ ID NO: 41234 - DNA, 80 bp, synthetic construct
  misc_feature 1..80: note = Artificially Synthesized Probe
  source 1..80: mol_type = other DNA
ccaatttgggatcatcagcttaataggtaaattcttgaggatggttgagtgattcggtcagatggctaaaagttagctat

SEQ ID NO: 41235 - DNA, 80 bp, synthetic construct
  misc_feature 1..80: note = Artificially Synthesized Probe
  source 1..80: mol_type = other DNA
cagtctttgcatgttttttattttttagaggctgcctccattcgaaacattttctcagggacctacgttgcagttcactc

SEQ ID NO: 41236 - DNA, 80 bp, synthetic construct
  misc_feature 1..80: note = Artificially Synthesized Probe
  source 1..80: mol_type = other DNA
ctctgctggcctctatgtgattagcctttcagaatattatctggcttattgggtaggttatgaatcatggtaaattaagg

SEQ ID NO: 41237 - DNA, 80 bp, synthetic construct
  misc_feature 1..80: note = Artificially Synthesized Probe
  source 1..80: mol_type = other DNA
cacatataagtttttctgtttgtttgttttgtttgttgttttcttttttgagatggagtctcgcccaggctggagtgcag

SEQ ID NO: 41238 - DNA, 80 bp, synthetic construct
  misc_feature 1..80: note = Artificially Synthesized Probe
  source 1..80: mol_type = other DNA
agaaggcagaaggcgtaagttgtcctccttgaccactcatgtacactcattgtgtgcaggtgacagtaatggtcagatta

SEQ ID NO: 41239 - DNA, 80 bp, synthetic construct
  misc_feature 1..80: note = Artificially Synthesized Probe
  source 1..80: mol_type = other DNA
gaggccgagatgagcagattgcctgaactcaggagttcaagaccagcctgggcaatatggtgaaaccctgtctctactaa

SEQ ID NO: 41240 - DNA, 80 bp, synthetic construct
  misc_feature 1..80: note = Artificially Synthesized Probe
  source 1..80: mol_type = other DNA
ctttttaaggaaaaaaataagtcctgccaatagaccttaacatcagattagggatgctgaattatgggtatttttcctgc

SEQ ID NO: 41241 - DNA, 80 bp, synthetic construct
  misc_feature 1..80: note = Artificially Synthesized Probe
  source 1..80: mol_type = other DNA
gggattaacaggcgtgagtgacctcgcgtcactgggcatatttaattaaagagaatatctctaatttgattttccgctta

SEQ ID NO: 41242 - DNA, 80 bp, synthetic construct
  misc_feature 1..80: note = Artificially Synthesized Probe
  source 1..80: mol_type = other DNA
aaaaggtgctaggatagatgtttctatcaatgagtgttatgatggctcctatgcaggaaatcctcaggatattcatcgcc

SEQ ID NO: 41243 - DNA, 80 bp, synthetic construct
  misc_feature 1..80: note = Artificially Synthesized Probe
  source 1..80: mol_type = other DNA
aatcgtctgtatttccatagtgatacctgcttacctctccgtccacaagaaatggaagtagatagtgaagatgaaaagga

SEQ ID NO: 41244 - DNA, 80 bp, synthetic construct
  misc_feature 1..80: note = Artificially Synthesized Probe
  source 1..80: mol_type = other DNA
tcgtgccactgtacttcagcctgggcgatagagcaagactctgtctctaactaaataaataaattaaattaaatgactac

SEQ ID NO: 41245 - DNA, 80 bp, synthetic construct
  misc_feature 1..80: note = Artificially Synthesized Probe
  source 1..80: mol_type = other DNA
gaaagggtgtcatcatcatagaacctcctcagaaatcactggtgcccatcctaactctcgtagtagtgtttctcccatgc

SEQ ID NO: 41246 - DNA, 80 bp, synthetic construct
  misc_feature 1..80: note = Artificially Synthesized Probe
  source 1..80: mol_type = other DNA
ccaaatattttatgcttttaagactgcttatgtaattgaagaacagaaattatatctgctgttctaatggtacctgttta

SEQ ID NO: 41247 - DNA, 80 bp, synthetic construct
  misc_feature 1..80: note = Artificially Synthesized Probe
  source 1..80: mol_type = other DNA
catttatgaacggctgtttttctactttgtaattgtgagacattttcttggggagggaaaattggaatggttcccttttt

SEQ ID NO: 41248 - DNA, 80 bp, synthetic construct
  misc_feature 1..80: note = Artificially Synthesized Probe
  source 1..80: mol_type = other DNA
tcattttgagcaattttgccctgtgttatatgtgtttcacgcacatatttgcagttggattttctccaacagaaagtgga

SEQ ID NO: 41249 - DNA, 80 bp, synthetic construct
  misc_feature 1..80: note = Artificially Synthesized Probe
  source 1..80: mol_type = other DNA
ctgagactatgtcagggggtttgtgagattttataacaaaattaagatgttagtacaatatcgtgtttcgccgccgggcg

SEQ ID NO: 41250 - DNA, 80 bp, synthetic construct
  misc_feature 1..80: note = Artificially Synthesized Probe
  source 1..80: mol_type = other DNA
gtgtacagtggagtttttcagaagctacatgatatgtattgacaccatggttcccacgatgaatagaatgtgtgcctatg

SEQ ID NO: 41251 - DNA, 80 bp, synthetic construct
  misc_feature 1..80: note = Artificially Synthesized Probe
  source 1..80: mol_type = other DNA
taatattttctgccctccagacactgctgagtgctgtatctcctgcatcttcttaaggagatacactgtcttccttaatc

SEQ ID NO: 41252 - DNA, 80 bp, synthetic construct
  misc_feature 1..80: note = Artificially Synthesized Probe
  source 1..80: mol_type = other DNA
aaaatcccacagctgccctcatgtgatgggtcacatatattattaaaaatattgtggtcgggtgcagcggttcacacctg

SEQ ID NO: 41253 - DNA, 80 bp, synthetic construct
  misc_feature 1..80: note = Artificially Synthesized Probe
  source 1..80: mol_type = other DNA
tatagattaagtagcatgctcaaagagtcctacagttaggatatagtgccaggttttaacccagatcagtgtgaattcca

SEQ ID NO: 41254 - DNA, 80 bp, synthetic construct
  misc_feature 1..80: note = Artificially Synthesized Probe
  source 1..80: mol_type = other DNA
ttcctcagaactaaagaaggttaggtttcttctcctgaaatagggaacccactgtctctccattggtgcgtcacagaaat

SEQ ID NO: 41255 - DNA, 80 bp, synthetic construct
  misc_feature 1..80: note = Artificially Synthesized Probe
  source 1..80: mol_type = other DNA
ttctgacacaacctgaaccactctatctccaagcaccacccttgaggaaccaggcctttcttgattacaggcgaagacaa

SEQ ID NO: 41256 - DNA, 80 bp, synthetic construct
  misc_feature 1..80: note = Artificially Synthesized Probe
  source 1..80: mol_type = other DNA
aaacaaagtgactacaagtctgatcccatcacctacctgtttaaaaatcccaaatatgggccagacgcagtggttcatgc

SEQ ID NO: 41257 - DNA, 80 bp, synthetic construct
  misc_feature 1..80: note = Artificially Synthesized Probe
  source 1..80: mol_type = other DNA
acatggtgaaaccccatctctaccaaaaatacaaaaattagctgggcactgtggcgggcgcatgtaatcccagcttctcg

SEQ ID NO: 41258 - DNA, 80 bp, synthetic construct
  misc_feature 1..80: note = Artificially Synthesized Probe
  source 1..80: mol_type = other DNA
tttacattgtctttcccattttctcccaaacatctatcaagcttgtccaacctccagcccagggaccacatgcagccaag

SEQ ID NO: 41259 - DNA, 80 bp, synthetic construct
  misc_feature 1..80: note = Artificially Synthesized Probe
  source 1..80: mol_type = other DNA
ggctggagtgcagtggcatgatcttggctcactgcaacctccgcctcccaggttcaagcaattctcttgcctcagccttc

SEQ ID NO: 41260 - DNA, 80 bp, synthetic construct
  misc_feature 1..80: note = Artificially Synthesized Probe
  source 1..80: mol_type = other DNA
tttacatcagtacaacagctttcattttcttaaatccctgatcaagcagaaatgcttgaaaagaaagagcacagcaggcc

SEQ ID NO: 41261 - DNA, 80 bp, synthetic construct
  misc_feature 1..80: note = Artificially Synthesized Probe
  source 1..80: mol_type = other DNA
ctgatttaatcggccaagctaagcatgggattgaatcaggtttcagtatattttagaaacctccaacagtgtggactgag

SEQ ID NO: 41262 - DNA, 80 bp, synthetic construct
  misc_feature 1..80: note = Artificially Synthesized Probe
  source 1..80: mol_type = other DNA
acacagatctgggaagagcagagaaaaaacgctcctgcttctgaacccctcccacctcgcatcacctgacaagtctctca

SEQ ID NO: 41263 - DNA, 80 bp, synthetic construct
  misc_feature 1..80: note = Artificially Synthesized Probe
  source 1..80: mol_type = other DNA
agtcaccgccgggaaaggggctggaagggcagcgttcggggaacttcaaatgcacagactaccccgtagtgagactcact

SEQ ID NO: 41264 - DNA, 80 bp, synthetic construct
  misc_feature 1..80: note = Artificially Synthesized Probe
  source 1..80: mol_type = other DNA
atgtttacacagagaacagattaacagcagaaaagatatcagggtcagagtgaagggaactaagtttgctaggatggtta

SEQ ID NO: 41265 - DNA, 80 bp, synthetic construct
  misc_feature 1..80: note = Artificially Synthesized Probe
  source 1..80: mol_type = other DNA
aaatatgctgaggctagtagcaagccagttgctgaaatggttgattactgcccagacattgtaagcagtaattcttactt

SEQ ID NO: 41266 - DNA, 80 bp, synthetic construct
  misc_feature 1..80: note = Artificially Synthesized Probe
  source 1..80: mol_type = other DNA
aattattttctttaaaaaaatttttttgaaaaccatcttgaggcactcagatcacaccccccaccccccataattgtggt

SEQ ID NO: 41267 - DNA, 80 bp, synthetic construct
  misc_feature 1..80: note = Artificially Synthesized Probe
  source 1..80: mol_type = other DNA
ggggtcactggtcccaacaaaatgccccatttcagagagctgtgcaggttccaagggagagcagcttaggggggcctggg

SEQ ID NO: 41268 - DNA, 80 bp, synthetic construct
  misc_feature 1..80: note = Artificially Synthesized Probe
  source 1..80: mol_type = other DNA
ccacagcatcccccttgagtgatatgtttccatttctccgctttttatagttaaggcatttttttcttctctgacaaagt

SEQ ID NO: 41269 - DNA, 80 bp, synthetic construct
  misc_feature 1..80: note = Artificially Synthesized Probe
  source 1..80: mol_type = other DNA
ctgttagtgatgcgccaaggctgggtgggagggcagggctgggttgtggagagggtatccagctacttgtgtttgtgctg

SEQ ID NO: 41270 - DNA, 80 bp, synthetic construct
  misc_feature 1..80: note = Artificially Synthesized Probe
  source 1..80: mol_type = other DNA
agtacgggtccacatgctgatgtgtgtgttgtcacatgcgtgaaaatgtgcttctctgtgcacgcggcgaatgtgctccc

SEQ ID NO: 41271 - DNA, 80 bp, synthetic construct
  misc_feature 1..80: note = Artificially Synthesized Probe
  source 1..80: mol_type = other DNA
cttcctacttggtagaatggatgccggtccccatcagggcacccactgctctaggttgtggtgaagatgaaatgggtgaa

SEQ ID NO: 41272 - DNA, 80 bp, synthetic construct
  misc_feature 1..80: note = Artificially Synthesized Probe
  source 1..80: mol_type = other DNA
gagccccgtggagctgggagatacagttctgagccacagagcccaggcctgaaggactaggggtccagaaagagtccagt

SEQ ID NO: 41273 - DNA, 80 bp, synthetic construct
  misc_feature 1..80: note = Artificially Synthesized Probe
  source 1..80: mol_type = other DNA
aaaaataaaaacaaaaaaccaacaaccagaactggatccctacctcacgccatgtgtagctaccaatgccagacagatta

SEQ ID NO: 41274 - DNA, 80 bp, synthetic construct
  misc_feature 1..80: note = Artificially Synthesized Probe
  source 1..80: mol_type = other DNA
cagatgtagccaaccaggaggtgatctcccacaatcaatgggaaaggacaaaaagaaagtaactcagtagaaaaataagc

SEQ ID NO: 41275 - DNA, 80 bp, synthetic construct
  misc_feature 1..80: note = Artificially Synthesized Probe
  source 1..80: mol_type = other DNA
cttctcctgggcctctcatgggtgtctgagacactcaacaatccccaggcccaggtccagatttgtccccaaccttttcc

SEQ ID NO: 41276 - DNA, 80 bp, synthetic construct
  misc_feature 1..80: note = Artificially Synthesized Probe
  source 1..80: mol_type = other DNA
ctcatgggccaccatcttcaaagccatacaaaacccccaacccaccgcagccacttcgttccttctccctggcacctgta

SEQ ID NO: 41277 - DNA, 80 bp, synthetic construct
  misc_feature 1..80: note = Artificially Synthesized Probe
  source 1..80: mol_type = other DNA
aggcctcaataacagcttggggcttatttacaagaaactaacaaaaaggtttctccttctcaaggagcgtctgtcctgca

SEQ ID NO: 41278 - DNA, 80 bp, synthetic construct
  misc_feature 1..80: note = Artificially Synthesized Probe
  source 1..80: mol_type = other DNA
gcctgtgctgtgacctaacctggacgccacctcccagccctccctcactgcctggttatgtgctatagccttggagggct

SEQ ID NO: 41279 - DNA, 80 bp, synthetic construct
  misc_feature 1..80: note = Artificially Synthesized Probe
  source 1..80: mol_type = other DNA
tgggtgggtgagtccctctctgagcctctttcccagctgtaaggcgggaaagccgctcctcaaagatctgtttccagaca

SEQ ID NO: 41280 - DNA, 80 bp, synthetic construct
  misc_feature 1..80: note = Artificially Synthesized Probe
  source 1..80: mol_type = other DNA
ccttgttccccagctggaatcaatcttccagtgctgagcttcccttggtcccagagcaacattcgtccttcactaaagta

SEQ ID NO: 41281 - DNA, 80 bp, synthetic construct
  misc_feature 1..80: note = Artificially Synthesized Probe
  source 1..80: mol_type = other DNA
ttctaaaggggcctcagccaccaggactgcctttctctcaaaacaagacagacagaggctggacctagggaaggacttcc

SEQ ID NO: 41282 - DNA, 80 bp, synthetic construct
  misc_feature 1..80: note = Artificially Synthesized Probe
  source 1..80: mol_type = other DNA
agtacaatggtgcgatcgcagctcattgcagcctcgaactcccagggtcaaaccatcctcctgcctcagcctcctgagta

SEQ ID NO: 41283 - DNA, 80 bp, synthetic construct
  misc_feature 1..80: note = Artificially Synthesized Probe
  source 1..80: mol_type = other DNA
gacacctgctgtgtttttctgacttgagactgaccgcatcccacactgctgttttcacgaagaacgaaagactgagaaac

SEQ ID NO: 41284 - DNA, 80 bp, synthetic construct
  misc_feature 1..80: note = Artificially Synthesized Probe
  source 1..80: mol_type = other DNA
actatggctactgttgctctggcttgggcacagtgagcacacagacggccccacctgtgacaaggccgagccccaccgag

SEQ ID NO: 41285 - DNA, 80 bp, synthetic construct
  misc_feature 1..80: note = Artificially Synthesized Probe
  source 1..80: mol_type = other DNA
ccatgtgcctacaataggctctcagtaagtgcacacgactgagagcgccacggcaggatgctggcagagcctgaccccag

SEQ ID NO: 41286 - DNA, 80 bp, synthetic construct
  misc_feature 1..80: note = Artificially Synthesized Probe
  source 1..80: mol_type = other DNA
cccagggggtggggcggaaaggggacagcagagctcacggggtgaggtgggaaggggacagcagagctcacagggggtga

SEQ ID NO: 41287 - DNA, 80 bp, synthetic construct
  misc_feature 1..80: note = Artificially Synthesized Probe
  source 1..80: mol_type = other DNA
accccgattactcaggacctgagccacttaaatccccttctggctgacactgggcacggaatgtgactggggctgctgtg

SEQ ID NO: 41288 - DNA, 80 bp, synthetic construct
  misc_feature 1..80: note = Artificially Synthesized Probe
  source 1..80: mol_type = other DNA
acccccactgcaccacgaaaagccagcagaaacactgcctcaaaccgtcgggttccagagaagggaaggatcccgcatcc

SEQ ID NO: 41289 - DNA, 80 bp, synthetic construct
  misc_feature 1..80: note = Artificially Synthesized Probe
  source 1..80: mol_type = other DNA
cgattctctcggttaacaggagggccccccagggaaagagggcgggcgggcggtctgcggaagggcatgggctctgacca

SEQ ID NO: 41290 - DNA, 80 bp, synthetic construct
  misc_feature 1..80: note = Artificially Synthesized Probe
  source 1..80: mol_type = other DNA
acccagcccgactcatgaggacaccagtcagcagctaacacccagacaccctgggactcggagcacttacaggtccataa

SEQ ID NO: 41291 - DNA, 80 bp, synthetic construct
  misc_feature 1..80: note = Artificially Synthesized Probe
  source 1..80: mol_type = other DNA
cttctttcaaatcgcatccttctatttcggtgcctttgtgttaatcattccccccggggagtattggtgtttaattgctg

SEQ ID NO: 41292 - DNA, 80 bp, synthetic construct
  misc_feature 1..80: note = Artificially Synthesized Probe
  source 1..80: mol_type = other DNA
ccccccaccgattaatgatgcattttaataacccaccatgaatattcataatgcatccattgctcctgttctaattaaaa

SEQ ID NO: 41293 - DNA, 80 bp, synthetic construct
  misc_feature 1..80: note = Artificially Synthesized Probe
  source 1..80: mol_type = other DNA
gcaaaacttggctcttctccctccctctaccctctctcatggctccccaccgtcctcaggataaagaccaaactctttcc

SEQ ID NO: 41294 - DNA, 80 bp, synthetic construct
  misc_feature 1..80: note = Artificially Synthesized Probe
  source 1..80: mol_type = other DNA
ggtgagatcagacagaggtttgaatccgggggtggcctttccttgggtggagcagtattttaaaaaattttttttttctt

SEQ ID NO: 41295 - DNA, 80 bp, synthetic construct
  misc_feature 1..80: note = Artificially Synthesized Probe
  source 1..80: mol_type = other DNA
ctgtgcgggcaacacaggcaacctcctccgccagaaccggggacgcctcgcaacctcctccaccagcacgggggacaacc

SEQ ID NO: 41296 - DNA, 80 bp, synthetic construct
  misc_feature 1..80: note = Artificially Synthesized Probe
  source 1..80: mol_type = other DNA
aagaagttcaatgatttaccctaaaaaacgagaagactgtcttaagcctgtaagccccatggatcctcaaagaaatggca

SEQ ID NO: 41297 - DNA, 80 bp, synthetic construct
  misc_feature 1..80: note = Artificially Synthesized Probe
  source 1..80: mol_type = other DNA
acaaagatctgccaagccacaccaacaaaaaggaagggttgcaaccttcatatcgaagtttcaattcaagggaggtttct

SEQ ID NO: 41298 - DNA, 80 bp, synthetic construct
  misc_feature 1..80: note = Artificially Synthesized Probe
  source 1..80: mol_type = other DNA
gaacaaatgtcagtaatatgagaaaaacatgcattatggaaaccaatgggatggggttcacggggtggaaccctcaacac

SEQ ID NO: 41299 - DNA, 80 bp, synthetic construct
  misc_feature 1..80: note = Artificially Synthesized Probe
  source 1..80: mol_type = other DNA
tagggaggctaggcaggagaatggcgtgaacctgggaggcggagcttgcagtgagctgagatcacgccactgcaccccag

SEQ ID NO: 41300 - DNA, 80 bp, synthetic construct
  misc_feature 1..80: note = Artificially Synthesized Probe
  source 1..80: mol_type = other DNA
gtgctggggattaccagtgtgagccgctgacccagccctctacaaaatacatatttttttaattaggtggtcgcagctgc

SEQ ID NO: 41301 - DNA, 80 bp, synthetic construct
  misc_feature 1..80: note = Artificially Synthesized Probe
  source 1..80: mol_type = other DNA
ataaaaagtggatcaacttcaaggacgagggcccaagagagtaacagaaaattcaccagagagccattcacagggtcaat

SEQ ID NO: 41302 - DNA, 80 bp, synthetic construct
  misc_feature 1..80: note = Artificially Synthesized Probe
  source 1..80: mol_type = other DNA
aaggtgtgagccaccttgcccagtacctaactcctctctcgacaccaatttttaaatatttataaatatcgaagaacagg

SEQ ID NO: 41303 - DNA, 80 bp, synthetic construct
  misc_feature 1..80: note = Artificially Synthesized Probe
  source 1..80: mol_type = other DNA
ctgcaaacattggcaggttcctgctgggaccgggctgggcgtccagggagaggcaacccagagggagcattctcaggtcc

SEQ ID NO: 41304 - DNA, 80 bp, synthetic construct
  misc_feature 1..80: note = Artificially Synthesized Probe
  source 1..80: mol_type = other DNA
ggggcacccgccccaacctcccccaccaaatcctgtcgacagccagcctgggccgcccaaatgcacatcagactagaccc

SEQ ID NO: 41305 - DNA, 80 bp, synthetic construct
  misc_feature 1..80: note = Artificially Synthesized Probe
  source 1..80: mol_type = other DNA
cttcaacagacccttgatctcctcactccacgagcgctggcaggaaggcggggtcctacctgaacctccgaactgcgccc

SEQ ID NO: 41306 - DNA, 80 bp, synthetic construct
  misc_feature 1..80: note = Artificially Synthesized Probe
  source 1..80: mol_type = other DNA
cccgtacccagaacactaagtccctaaagattaacgggctcagcggcattaaccggaaaagccaacggcaacaaaccctt

SEQ ID NO: 41307 - DNA, 80 bp, synthetic construct
  misc_feature 1..80: note = Artificially Synthesized Probe
  source 1..80: mol_type = other DNA
gggttagcgttctccctcgtatttatttggagttccctgttctctcactttatacgcatctggtccagggaagtaagtgc

SEQ ID NO: 41308 - DNA, 80 bp, synthetic construct
  misc_feature 1..80: note = Artificially Synthesized Probe
  source 1..80: mol_type = other DNA
atccaaccacctaagactctgaagaagccgccccgccctccccaccgggcctgcctgctccgcagtgataaccgtggcag

SEQ ID NO: 41309 - DNA, 80 bp, synthetic construct
  misc_feature 1..80: note = Artificially Synthesized Probe
  source 1..80: mol_type = other DNA
tcccatccaaacagctgaggctccatcgctgaagtattcagcaaacactctcccctgaaaaccttcccgtgaactgtgga

SEQ ID NO: 41310 - DNA, 80 bp, synthetic construct
  misc_feature 1..80: note = Artificially Synthesized Probe
  source 1..80: mol_type = other DNA
ccaagaaaaccccaacagtattcaggaaagaaaaaaaaaacagccctagattgctttactgtcgcgatgtatccgggaat

SEQ ID NO: 41311 - DNA, 80 bp, synthetic construct
  misc_feature 1..80: note = Artificially Synthesized Probe
  source 1..80: mol_type = other DNA
gattcaaacatgagatttttttcaaaactgaaaaactcatatattcagtattttactcccacagcacctccccccaattt

SEQ ID NO: 41312 - DNA, 80 bp, synthetic construct
  misc_feature 1..80: note = Artificially Synthesized Probe
  source 1..80: mol_type = other DNA
agagaacttgctcaggaccccaggagctcagggcagcagccagggaagaggctgtgagaggacacaggtcaggggtcaga

SEQ ID NO: 41313 - DNA, 80 bp, synthetic construct
  misc_feature 1..80: note = Artificially Synthesized Probe
  source 1..80: mol_type = other DNA
acagtggttgggttaaaccacttcctgatgcgaaaaggggtaagaacttcctaagcccagattcactcagtctcctgaca

SEQ ID NO: 41314 - DNA, 80 bp, synthetic construct
  misc_feature 1..80: note = Artificially Synthesized Probe
  source 1..80: mol_type = other DNA
cttctgtgtgtaggttaagttcctactaaatgtttctttccaagaaactgcatttgtcagtcttctttgttgttgttgag

SEQ ID NO: 41315 - DNA, 80 bp, synthetic construct
  misc_feature 1..80: note = Artificially Synthesized Probe
  source 1..80: mol_type = other DNA
acatgggtggggaaactcagccgccctgccctgagcccaggccctctacgggagctcctcggagctagagaccctggtgg

SEQ ID NO: 41316 - DNA, 80 bp, synthetic construct
  misc_feature 1..80: note = Artificially Synthesized Probe
  source 1..80: mol_type = other DNA
agctcccagtggctcgggaggcctgttgaggtggaggcccgggcctgtggtgcccgactgccctttggtacagccccgag

SEQ ID NO: 41317 - DNA, 80 bp, synthetic construct
  misc_feature 1..80: note = Artificially Synthesized Probe
  source 1..80: mol_type = other DNA
accctgggcgagtcaagactctgtgtcatctgcctgcccccgaggctcggccaagacaggaaggaaccaggagagggagt

SEQ ID NO: 41318 - DNA, 80 bp, synthetic construct
  misc_feature 1..80: note = Artificially Synthesized Probe
  source 1..80: mol_type = other DNA
gctgcagcttcagagcctcagcccaccaaggcctgggaccccgtctcatcctgtaaggagtggcactggtgctgaggacc

SEQ ID NO: 41319 - DNA, 80 bp, synthetic construct
  misc_feature 1..80: note = Artificially Synthesized Probe
  source 1..80: mol_type = other DNA
gaacacaggtgtgactcaggttttttgtgggagaacactgagttgggcgtggggaatctcactgtgtttgaatctcaggg

SEQ ID NO: 41320 - DNA, 80 bp, synthetic construct
  misc_feature 1..80: note = Artificially Synthesized Probe
  source 1..80: mol_type = other DNA
ttaggagaacaaagtgagaggatgaatgtgcaggacctcacagggcgccttaaataaatcacgtgcacaaacgctccagg

SEQ ID NO: 41321 - DNA, 80 bp, synthetic construct
  misc_feature 1..80: note = Artificially Synthesized Probe
  source 1..80: mol_type = other DNA
aaccaggggtgcctgtcctaaaaaatacatttcatggggagcaaaataagcagtggacagttcacagctgactggtatgg

SEQ ID NO: 41322 - DNA, 80 bp, synthetic construct
  misc_feature 1..80: note = Artificially Synthesized Probe
  source 1..80: mol_type = other DNA
gttgatactttttattcataaaagaaacagcacagatttctgcatctgtgtccatcttcaattcatttgtgtctgagcct

SEQ ID NO: 41323 - DNA, 80 bp, synthetic construct
  misc_feature 1..80: note = Artificially Synthesized Probe
  source 1..80: mol_type = other DNA
tggaaaaccccagagaagtggtgatttggagcagggtgctgggcctggcaggagctctgaggagcctggacccagccctg

SEQ ID NO: 41324 - DNA, 80 bp, synthetic construct
  misc_feature 1..80: note = Artificially Synthesized Probe
  source 1..80: mol_type = other DNA
agttctgcccccggtgggaccccaacatacactctgagccacctccctggccagcaccctcaggaacttgccacacagaa

SEQ ID NO: 41325 - DNA, 80 bp, synthetic construct
  misc_feature 1..80: note = Artificially Synthesized Probe
  source 1..80: mol_type = other DNA
gtctacgagggactgaatgtcaaacaatttacacagccataaataaagtaacattctccaaagcggttaaatgaaaaact

SEQ ID NO: 41326 - DNA, 80 bp, synthetic construct
  misc_feature 1..80: note = Artificially Synthesized Probe
  source 1..80: mol_type = other DNA
gcttcctgacgcatccttcactaactgtctgcttgttcagtgatactattttcataaaaaaataactgctgtccacatcc

SEQ ID NO: 41327 - DNA, 80 bp, synthetic construct
  misc_feature 1..80: note = Artificially Synthesized Probe
  source 1..80: mol_type = other DNA
ctgcaaccttgtctggttcctcaagacagagcagtcatggtctccagagcaccaggaatattaacactgaatgcatcaaa

SEQ ID NO: 41328 - DNA, 80 bp, synthetic construct
  misc_feature 1..80: note = Artificially Synthesized Probe
  source 1..80: mol_type = other DNA
gcatgaccaacgagaagcagaaactctccaaacaaggatgccaagggtgcgttttcagacaaacagtgagagcagaatag

SEQ ID NO: 41329 - DNA, 80 bp, synthetic construct
  misc_feature 1..80: note = Artificially Synthesized Probe
  source 1..80: mol_type = other DNA
gtgacttgatccatcttaataaaattcacgaccacgaaggaggcccgtggtggcttctctggggaggtgactttgtcagc

SEQ ID NO: 41330 - DNA, 80 bp, synthetic construct
  misc_feature 1..80: note = Artificially Synthesized Probe
  source 1..80: mol_type = other DNA
tcagggaggagctctgcgaaagcagacgggagacacatgggagtgagccggtgggtgctgagacaggcaggaccacgtgg

SEQ ID NO: 41331 - DNA, 80 bp, synthetic construct
  misc_feature 1..80: note = Artificially Synthesized Probe
  source 1..80: mol_type = other DNA
acatttagcaaatcatgaacaaaggcactgcggaactggagagaggccgcgcagtcaaacgtgagcaggtgcctgaatgc

SEQ ID NO: 41332 - DNA, 80 bp, synthetic construct
  misc_feature 1..80: note = Artificially Synthesized Probe
  source 1..80: mol_type = other DNA
gccatccacagtcaccacatcagaccccacgaccgccatccacagtcaccacacatcagaccccacgaccgccatccaca

SEQ ID NO: 41333 - DNA, 80 bp, synthetic construct
  misc_feature 1..80: note = Artificially Synthesized Probe
  source 1..80: mol_type = other DNA
catgggtctgaggtcggcggaaagcatcacagaaatccgtaattattctggactcaacacagaaaagccaatatatcaac

SEQ ID NO: 41334 - DNA, 80 bp, synthetic construct
  misc_feature 1..80: note = Artificially Synthesized Probe
  source 1..80: mol_type = other DNA
tggagaaacctcgtctctactaaaattacaaaaattagtcagcatggtggtgggcgcctataattccagctacttgggag

SEQ ID NO: 41335 - DNA, 80 bp, synthetic construct
  misc_feature 1..80: note = Artificially Synthesized Probe
  source 1..80: mol_type = other DNA
gcataaaaaccaatcccacagatccccacctaccccacggatgaaaaccaattcacatatccccacctaccccacacata

SEQ ID NO: 41336 - DNA, 80 bp, synthetic construct
  misc_feature 1..80: note = Artificially Synthesized Probe
  source 1..80: mol_type = other DNA
acccctgggacactcccagaacccagcaggctcacagcaggcgcagccgtgcagtccgcacccaggagcctccacagcag

SEQ ID NO: 41337 - DNA, 80 bp, synthetic construct
  misc_feature 1..80: note = Artificially Synthesized Probe
  source 1..80: mol_type = other DNA
aggggccacacacacccatgccatagacacgcatatgtcacggacacatgcacacacacacaccacaaataggcacatca

SEQ ID NO: 41338 - DNA, 80 bp, synthetic construct
  misc_feature 1..80: note = Artificially Synthesized Probe
  source 1..80: mol_type = other DNA
aggcaccggggcctggtggctgagccgttgcggttccttctctgacggaaactggaatccagtgggaccctccttgggaa

SEQ ID NO: 41339 - DNA, 80 bp, synthetic construct
  misc_feature 1..80: note = Artificially Synthesized Probe
  source 1..80: mol_type = other DNA
acgtagtccatgttcacaatcggccgcagcccgtcaggcttggggatgaagcggagtctggacgtcagcagggcgggcct

SEQ ID NO: 41340 - DNA, 80 bp, synthetic construct
  misc_feature 1..80: note = Artificially Synthesized Probe
  source 1..80: mol_type = other DNA
ctttccaaaatactggtcaaatgaccatgttgggtcgcacaccattaaatacgtgtaaagtctaagtaaggtgcattgtg

SEQ ID NO: 41341 - DNA, 80 bp, synthetic construct
  misc_feature 1..80: note = Artificially Synthesized Probe
  source 1..80: mol_type = other DNA
aaatccaatagattgaagattcatacagaacagcatgaattaaaagagaatcgggggctgggcacggtggcttagcctgt

SEQ ID NO: 41342 - DNA, 80 bp, synthetic construct
  misc_feature 1..80: note = Artificially Synthesized Probe
  source 1..80: mol_type = other DNA
agctcaccaaaggcctggcgacctcaccccagacctgcaccatccggacacggcacatccagcccaccaagggcctagcg

SEQ ID NO: 41343 - DNA, 80 bp, synthetic construct; identical to SEQ ID NO: 41342
  misc_feature 1..80: note = Artificially Synthesized Probe
  source 1..80: mol_type = other DNA

SEQ ID NO: 41344 - DNA, 80 bp, synthetic construct
  misc_feature 1..80: note = Artificially Synthesized Probe
  source 1..80: mol_type = other DNA
cctgacctgcaccatccagacaccacacatccagctcacagcagggcctggcgacctcatcccagacgtgcaccatccgg

SEQ ID NO: 41345 - DNA, 80 bp, synthetic construct
  misc_feature 1..80: note = Artificially Synthesized Probe
  source 1..80: mol_type = other DNA
tgggcgacaacggctcggagcctcatcctttgtcctggttcccaagcagaagggaggaagcagacactcccccgccaggc

SEQ ID NO: 41346 - DNA, 80 bp, synthetic construct
  misc_feature 1..80: note = Artificially Synthesized Probe
  source 1..80: mol_type = other DNA
tctcaataaacaaaagcaaacaacgacaataaaaagatcagggggtaacactaagcaaagagaaataaaagcaaatgccc

SEQ ID NO: 41347 - DNA, 80 bp, synthetic construct
  misc_feature 1..80: note = Artificially Synthesized Probe
  source 1..80: mol_type = other DNA
acatagaagtctccaaaagattcactcatcaggaagataaaaattctaccacgtgcatgcacctaacaatgcctcacata

SEQ ID NO: 41348 - DNA, 80 bp, synthetic construct
  misc_feature 1..80: note = Artificially Synthesized Probe
  source 1..80: mol_type = other DNA
ccatgtgagggggcgactggaggcagagcccagcctaagcaatgagcggcaggtgcccagaataaggtgacaagcgttgc

SEQ ID NO: 41349 - DNA, 80 bp, synthetic construct
  misc_feature 1..80: note = Artificially Synthesized Probe
  source 1..80: mol_type = other DNA
acggcgcctcactcaccctgcacgtgacagggacacccggggacagtgcctcattcaccctacacgtgacagggacaccc

SEQ ID NO: 41350 - DNA, 80 bp, synthetic construct
  misc_feature 1..80: note = Artificially Synthesized Probe
  source 1..80: mol_type = other DNA
ggggacagtgcctcactcaccctacacgggacagggacacccggggaccgtgcctcactcaccctgcacgtgacagggac

SEQ ID NO: 41351 - DNA, 80 bp, synthetic construct
  misc_feature 1..80: note = Artificially Synthesized Probe
  source 1..80: mol_type = other DNA
accctgcacgtgacagggacacccggggacagtgcctcactcaccctatacctgggagggacacccagggacggtgcctc

SEQ ID NO: 41352 - DNA, 80 bp, synthetic construct
  misc_feature 1..80: note = Artificially Synthesized Probe
  source 1..80: mol_type = other DNA
catacctaaagatgggaccaggatctgtgctggagaacagtcttatctccctccctctaccctgtcctggcacaatcaac

SEQ ID NO: 41353 - DNA, 80 bp, synthetic construct
  misc_feature 1..80: note = Artificially Synthesized Probe
  source 1..80: mol_type = other DNA
tcttccacgtcagctcctgcagcgagagcttggcatgcttccccagggagatgaacttcttggtgttcctgaggaagcgg

SEQ ID NO: 41354 - DNA, 80 bp, synthetic construct
  misc_feature 1..80: note = Artificially Synthesized Probe
  source 1..80: mol_type = other DNA
ggctggcaggcccagggggaccccggcctccctgacgctatggttccaggcccgttcgcatcccagacgccttcggggtc

SEQ ID NO: 41355 - DNA, 80 bp, synthetic construct
  misc_feature 1..80: note = Artificially Synthesized Probe
  source 1..80: mol_type = other DNA
ctctttccctttccaactttgcctcctttttacccaagcctttaccccactttttccaactacttccctgcctgatccta

SEQ ID NO: 41356 - DNA, 80 bp, synthetic construct
  misc_feature 1..80: note = Artificially Synthesized Probe
  source 1..80: mol_type = other DNA
tggagccccagtccctccccttgagttcccgccttcctcacctgcaccggggccagctctggagtcagcgcatttcctgc

SEQ ID NO: 41357 - DNA, 80 bp, synthetic construct
  misc_feature 1..80: note = Artificially Synthesized Probe
  source 1..80: mol_type = other DNA
gcctatttcaacttaagtgaaaatctcacctgtggccagcggctaccgtgctggacagcacaggtacggacagaggaacc

SEQ ID NO: 41358 - DNA, 80 bp, synthetic construct
  misc_feature 1..80: note = Artificially Synthesized Probe
  source 1..80: mol_type = other DNA
acttactccccactccaagtcttaggtcaactgttacctgctcagagagcctgaacctcccattaagtcgaaacacacca

SEQ ID NO: 41359 - DNA, 80 bp, synthetic construct
  misc_feature 1..80: note = Artificially Synthesized Probe
  source 1..80: mol_type = other DNA
agaaggcccgtgggcccagacttgaataaggaggagacaaaggggtgacaggaggaaagtatgccaggctgaggggacag

SEQ ID NO: 41360 - DNA, 80 bp, synthetic construct
  misc_feature 1..80: note = Artificially Synthesized Probe
  source 1..80: mol_type = other DNA
agcgaaaatccatctaaaaaaaaagagttcaagttttggctctggcttggcacagtggctcatgcctataatcccagcac

SEQ ID NO: 41361 - DNA, 80 bp, synthetic construct
  misc_feature 1..80: note = Artificially Synthesized Probe
  source 1..80: mol_type = other DNA
aaaaaaagttgaattatttcccccaaaagagggtgttgaggctttaacccccagtacctcaggatcaccttatatggaga

SEQ ID NO: 41362 - DNA, 80 bp, synthetic construct
  misc_feature 1..80: note = Artificially Synthesized Probe
  source 1..80: mol_type = other DNA
ggcacagggccagacacataatgcatgctaaatgactgaatatataagctaaatgactgaatatatcagcaagccaagaa

SEQ ID NO: 41363 - DNA, 80 bp, synthetic construct
  misc_feature 1..80: note = Artificially Synthesized Probe
  source 1..80: mol_type = other DNA
ccataaaagggttctaaggtaaagcagttgcatgaactacaacccccatcagacctcagcgtaaaagctcatatggttgc

SEQ ID NO: 41364 - DNA, 80 bp, synthetic construct
  misc_feature 1..80: note = Artificially Synthesized Probe
  source 1..80: mol_type = other DNA
catagaaatgtgatgactattaacagaaaggggaaaaagatttgccccctatccatcatcagacagacagacttctctta

SEQ ID NO: 41365 - DNA, 80 bp, synthetic construct
  misc_feature 1..80: note = Artificially Synthesized Probe
  source 1..80: mol_type = other DNA
tcacacccatttgcaaggatgtttgttctttgatgaaactgcatctctactgcacatgagggctttcattgtaggacaag

SEQ ID NO: 41366 - DNA, 80 bp, synthetic construct
  misc_feature 1..80: note = Artificially Synthesized Probe
  source 1..80: mol_type = other DNA
aaatggatgggtgggtggatgaaatgggtgggtggatggatgggtggatggatggggtgggtgggtggatgagatggatg

SEQ ID NO: 41367 - DNA, 80 bp, synthetic construct
  misc_feature 1..80: note = Artificially Synthesized Probe
  source 1..80: mol_type = other DNA
gtgggttggtggatgagatggatgagtgcatgggtgggtggctgagatggatggatggatggataagatggatggataag

SEQ ID NO: 41368 - DNA, 80 bp, synthetic construct
  misc_feature 1..80: note = Artificially Synthesized Probe
  source 1..80: mol_type = other DNA
gaggatgggtgggacctgtaaataattggaaagtgttctaccagaggcatccaaatgcaattaaaaacaaaacaatccaa

SEQ ID NO: 41369 - DNA, 80 bp, synthetic construct
  misc_feature 1..80: note = Artificially Synthesized Probe
  source 1..80: mol_type = other DNA
ctctattgccagggactcacacactcctggcatctgtgcagagtccagcctgatcttggtgcttattaactttgaaaaaa

SEQ ID NO: 41370 - DNA, 80 bp, synthetic construct
  misc_feature 1..80: note = Artificially Synthesized Probe
  source 1..80: mol_type = other DNA
tctgtaacaccaagcaggaagcaaaaacatgactttgcaagttcatgcttaaggctcatggtgctccatatctctctgat

SEQ ID NO: 41371 - DNA, 80 bp, synthetic construct
  misc_feature 1..80: note = Artificially Synthesized Probe
  source 1..80: mol_type = other DNA
gtagaatgtgccactgaagtccacagacccaaactcgtcaaaacctggatgcaacgccataaggtttcgttagaaacacc

SEQ ID NO: 41372 - DNA, 80 bp, synthetic construct
  misc_feature 1..80: note = Artificially Synthesized Probe
  source 1..80: mol_type = other DNA
ctgatggcattgttttcaggacacacatcatcaatatctgggatgttgtcattgtcaaaatcatctttacaaatatcacc

SEQ ID NO: 41373 - DNA, 80 bp, synthetic construct
  misc_feature 1..80: note = Artificially Synthesized Probe
  source 1..80: mol_type = other DNA
aagccccagagcacagctgtgcccttgtttattactcagggacgctgacttagaggactgcagcccatccagctccttcc

SEQ ID NO: 41374 - DNA, 80 bp, synthetic construct
  misc_feature 1..80: note = Artificially Synthesized Probe
  source 1..80: mol_type = other DNA
acaagcactggggccaggcctctcggtccaggaatctctccaccctctgccacctctccacagtaattcacttcactaaa

SEQ ID NO: 41375 - DNA, 80 bp, synthetic construct
  misc_feature 1..80: note = Artificially Synthesized Probe
  source 1..80: mol_type = other DNA
tacctttcatttgaaatagaaccaacttttggagatttctgggtaatgttgcaggaggggtagttgaatgtgctgtcgcc

SEQ ID NO: 41376 - DNA, 80 bp, synthetic construct
  misc_feature 1..80: note = Artificially Synthesized Probe
  source 1..80: mol_type = other DNA
ctccggataaagcagcaaccgggatcagtggcagaggtaaccacaatacacccacgttattctaactcctagaagctcag

SEQ ID NO: 41377 - DNA, 80 bp, synthetic construct
  misc_feature 1..80: note = Artificially Synthesized Probe
  source 1..80: mol_type = other DNA
ctttaacgaagatcataggaatgtgtgtcgggccgtttagcacttataagttatgtactcaaggttgatgaaaatcaata

SEQ ID NO: 41378 - DNA, 80 bp, synthetic construct
  misc_feature 1..80: note = Artificially Synthesized Probe
  source 1..80: mol_type = other DNA
gtgtcagccttgcccatcactggctcctcagcagaaggagaggaggtcttctatttttttgcagttaaaatagaaaaaat

SEQ ID NO: 41379 - DNA, 80 bp, synthetic construct
  misc_feature 1..80: note = Artificially Synthesized Probe
  source 1..80: mol_type = other DNA
gaaaccagggctgagaacttgaaattatctgctaactcagcttttcacggtgagtgggtaatgcatgtaattgggcaaaa

SEQ ID NO: 41380 - DNA, 80 bp, synthetic construct
  misc_feature 1..80: note = Artificially Synthesized Probe
  source 1..80: mol_type = other DNA
caaggggtgtaacataggttgggatcagtgcctcgttgattttaaaacatactcatattttgtttcagtgagtatttggc

SEQ ID NO: 41381 - DNA, 80 bp, synthetic construct
  misc_feature 1..80: note = Artificially Synthesized Probe
  source 1..80: mol_type = other DNA
cgagcgtggagccggcgtcctccctctgctcagtttcaggcgttaacgatgcgcgcaattgcaaatatgggccgacgtgc

SEQ ID NO: 41382 - DNA, 80 bp, synthetic construct
  misc_feature 1..80: note = Artificially Synthesized Probe
  source 1..80: mol_type = other DNA
agccgctcgcaacacacaaggaaggccggccttgcgtacttgcttttccgtcttggctgcttccaggccgaccccgacgg

SEQ ID NO: 41383 - DNA, 80 bp, synthetic construct
  misc_feature 1..80: note = Artificially Synthesized Probe
  source 1..80: mol_type = other DNA
ccaccttccacaacacacaactgcccacacgtcaggtgctataccacacaactacctacatgccacattctagaccacac

SEQ ID NO: 41384 - DNA, 80 bp, synthetic construct
  misc_feature 1..80: note = Artificially Synthesized Probe
  source 1..80: mol_type = other DNA
ccacacaactacccacattccacaggccacgccacctggcatcttttttgtttttacattagaaatacaggaggactgaa

SEQ ID NO: 41385 - DNA, 80 bp, synthetic construct
  misc_feature 1..80: note = Artificially Synthesized Probe
  source 1..80: mol_type = other DNA
ggtggcctcaactcagaagcctggtatgacaccgaatgtcctcacaggcagttcccatgaggcgtgagcacagctgaagg

SEQ ID NO: 41386 - DNA, 80 bp, synthetic construct
  misc_feature 1..80: note = Artificially Synthesized Probe
  source 1..80: mol_type = other DNA
ccacactcactccccatccacactcactcccccatccacactcactcccatgacagagctgcggtgctggatcattcttc

SEQ ID NO: 41387 - DNA, 80 bp, synthetic construct
  misc_feature 1..80: note = Artificially Synthesized Probe
  source 1..80: mol_type = other DNA
aagaccaaggtgaccagtggctccagccgccgtcctgccggactaacacaagaagcggagagagatcaggctgtgccgcc

SEQ ID NO: 41388 - DNA, 80 bp, synthetic construct
  misc_feature 1..80: note = Artificially Synthesized Probe
  source 1..80: mol_type = other DNA
tcttttcctggtcatgatgctcctgataacataaaatgtctccttctagtctaatgtgggccctttgattatcaagatta

SEQ ID NO: 41389 - DNA, 80 bp, synthetic construct
  misc_feature 1..80: note = Artificially Synthesized Probe
  source 1..80: mol_type = other DNA
tttggtttttgtttgtctgattttctattgttttttccaggagtgtgtgtacagtgatcacttgctgccataacacagtc

SEQ ID NO: 41390 - DNA, 80 bp, synthetic construct
  misc_feature 1..80: note = Artificially Synthesized Probe
  source 1..80: mol_type = other DNA
cttctgtgtttcttacactgaaatttcctcacatagctgaaccggtttcacacatcagcactgaacgctggcatttccag

SEQ ID NO: 41391 - DNA, 80 bp, synthetic construct
  misc_feature 1..80: note = Artificially Synthesized Probe
  source 1..80: mol_type = other DNA
gcatcgctctctcttcctggccgcgctgtgccgctcaaacccatttcactcctgccagcctcacaggaacttcccgtcct

SEQ ID NO: 41392 - DNA, 80 bp, synthetic construct
  misc_feature 1..80: note = Artificially Synthesized Probe
  source 1..80: mol_type = other DNA
tctgctttaaagaaaattcactatcctcttgctcaaacagccagtccccttgagactgtgccttgctcctcctggccttc

SEQ ID NO: 41393 - DNA, 80 bp, synthetic construct
  misc_feature 1..80: note = Artificially Synthesized Probe
  source 1..80: mol_type = other DNA
gaagatcccatctttgaaatgcctgacttctctcggacagtccattattgaggaaagacttagacattttacagcgctgt

SEQ ID NO: 41394 - DNA, 80 bp, synthetic construct
  misc_feature 1..80: note = Artificially Synthesized Probe
  source 1..80: mol_type = other DNA
taggttagttttactcactgaccattatgacaactgactcaacatgccatggacaaccttagctctagtttaactgaacc

SEQ ID NO: 41395 - DNA, 80 bp, synthetic construct
  misc_feature 1..80: note = Artificially Synthesized Probe
  source 1..80: mol_type = other DNA
gattagatgatgtacggcatttaatgaacctgtcatagtgaccttcagaattaaatgctcaagaaaatattggaaagtgt

SEQ ID NO: 41396 - DNA, 80 bp, synthetic construct
  misc_feature 1..80: note = Artificially Synthesized Probe
  source 1..80: mol_type = other DNA
acgttctgaagcaaaccctgtaagtatacacaagcagaaaaatagagcaacagataaacatccaatgtttgatgccaagc

SEQ ID NO: 41397 - DNA, 80 bp, synthetic construct
  misc_feature 1..80: note = Artificially Synthesized Probe
  source 1..80: mol_type = other DNA
ctcataaatcactagccctttcccttggaaaagggcacctgctactttgctctcccatcatttcgctactaaagcaaaca

SEQ ID NO: 41398 - DNA, 80 bp, synthetic construct
  misc_feature 1..80: note = Artificially Synthesized Probe
  source 1..80: mol_type = other DNA
tctgcatgtgcgtgcccatgtatggtgtttgtgtgcacatgggcatgcatatgtgagggtgtgttcacatgcatgtgtat

SEQ ID NO: 41399 - DNA, 80 bp, synthetic construct
  misc_feature 1..80: note = Artificially Synthesized Probe
  source 1..80: mol_type = other DNA
caatggtcttgcggttgatgttgctgatactgaaaaggtcgaaggtcgtgtctttgtcctggtgaccagctgcaaaggga

SEQ ID NO: 41400 - DNA, 80 bp, synthetic construct
  misc_feature 1..80: note = Artificially Synthesized Probe
  source 1..80: mol_type = other DNA
ttagaacaggataatacacagggttgctgacagaagtgggcaatggaccactttccatagagttacttggcaagaattaa

SEQ ID NO: 41401 - DNA, 80 bp, synthetic construct
  misc_feature 1..80: note = Artificially Synthesized Probe
  source 1..80: mol_type = other DNA
gtttgcatataaaactcagcaccaactggatttgtggcaaactgagagcgaaggaggaaatttactcttcaagcaggatt

SEQ ID NO: 41402 - DNA, 80 bp, synthetic construct
  misc_feature 1..80: note = Artificially Synthesized Probe
  source 1..80: mol_type = other DNA
gaagggaagactgagaccccaattcttcccatatttagaatatcaaaggccgttaacttctcattgttaatccaaggact

SEQ ID NO: 41403 - DNA, 80 bp, synthetic construct
  misc_feature 1..80: note = Artificially Synthesized Probe
  source 1..80: mol_type = other DNA
ggttagaaaaactaaatcaaactcctttgacgaaaccagatcctactgtctctgccttgaggtagattcttacaagagca

SEQ ID NO: 41404 - DNA, 80 bp, synthetic construct
  misc_feature 1..80: note = Artificially Synthesized Probe
  source 1..80: mol_type = other DNA
gtttaagaaataatcgtacctggtttgccaaaaagatgcagtgatgactggtttcagtgttccggaccgagtcagaaagg

SEQ ID NO: 41405 - DNA, 80 bp, synthetic construct
  misc_feature 1..80: note = Artificially Synthesized Probe
  source 1..80: mol_type = other DNA
cactcaagggatggaaactgtttcactttctgctgagcttctcttttacccgattaaaagggcctttgaatttctgttgg

SEQ ID NO: 41406 - DNA, 80 bp, synthetic construct
  misc_feature 1..80: note = Artificially Synthesized Probe
  source 1..80: mol_type = other DNA
aaaaggccactgaattccaggcattcttcgagcttgagaagggcattttcaagactattttgaagtttgcacgagggctt

SEQ ID NO: 41407 - DNA, 80 bp, synthetic construct
  misc_feature 1..80: note = Artificially Synthesized Probe
  source 1..80: mol_type = other DNA
agaatgtatagtaaatgtgtagtagaatcacgctggcagaatatgaacaaacatttgggaattcctgggtagacaaaagc

SEQ ID NO: 41408 - DNA, 80 bp, synthetic construct
  misc_feature 1..80: note = Artificially Synthesized Probe
  source 1..80: mol_type = other DNA
tttctgtagattgggttcttgctttgctgcccaggctagtcttgaactcctggctttaagccatcctcccgccttggcct

SEQ ID NO: 41409 - DNA, 80 bp, synthetic construct
  misc_feature 1..80: note = Artificially Synthesized Probe
  source 1..80: mol_type = other DNA
cgcttagctaatttttgtatttttagtagagatggggtttctccatgttggtcaggctggtctcaaactcctgacctcag

SEQ ID NO: 41410 - DNA, 80 bp, synthetic construct
  misc_feature 1..80: note = Artificially Synthesized Probe
  source 1..80: mol_type = other DNA
gagaaaattgaggccactttgggtcttcttgcttgaaaccatggttcttttcctggtcctcccattgtagaataagaaat

SEQ ID NO: 41411 - DNA, 80 bp, synthetic construct
  misc_feature 1..80: note = Artificially Synthesized Probe
  source 1..80: mol_type = other DNA
gttgttaaccatcaccactgtcaatattaagatattttcaaggctagatgtggtagctcatgcctgtaatcccagcagtt

SEQ ID NO: 41412 - DNA, 80 bp, synthetic construct
  misc_feature 1..80: note = Artificially Synthesized Probe
  source 1..80: mol_type = other DNA
atccattgcatggacatgtcatagtttgcttatccattcatccattatgggcatctggattgtttctgctttctggctat

SEQ ID NO: 41413 - DNA, 80 bp, synthetic construct
  misc_feature 1..80: note = Artificially Synthesized Probe
  source 1..80: mol_type = other DNA
ggggttgatggggagtacgtaagcagggacttactattctacctgctgatttaatgtccatgaaaataatcatacactaa

SEQ ID NO: 41414 - DNA, 80 bp, synthetic construct
  misc_feature 1..80: note = Artificially Synthesized Probe
  source 1..80: mol_type = other DNA
caacatggtgaaaccctgtctctactaaaaataaaaaaattagctgggcgtggtggcgtgcctgtaatcccagctgcttg

SEQ ID NO: 41415 - DNA, 80 bp, synthetic construct
  misc_feature 1..80: note = Artificially Synthesized Probe
  source 1..80: mol_type = other DNA
catgtggactttcctgtaagaaagggaattcttttagtctttctggccgtagtcccagggatcatgactaagttctctcc

SEQ ID NO: 41416 - DNA, 80 bp, synthetic construct
  misc_feature 1..80: note = Artificially Synthesized Probe
  source 1..80: mol_type = other DNA
acagtactcagcacagagttgtactcatggctatgatttattatggctcaaagatgcaaagcaaaataagccaaggggag

SEQ ID NO: 41417 - DNA, 80 bp, synthetic construct
  misc_feature 1..80: note = Artificially Synthesized Probe
  source 1..80: mol_type = other DNA
tttgcacctagatcctgggttcagaatgataactgggattcctgcactacacggatagagaagggtggaaaagagttcaa

SEQ ID NO: 41418 - DNA, 80 bp, synthetic construct
  misc_feature 1..80: note = Artificially Synthesized Probe
  source 1..80: mol_type = other DNA
ttctccggaaagactggcgtctgctgcatcttcactctgcaagtcacttcagaggcatccccttcagccctgggctcatg

SEQ ID NO: 41419 - DNA, 80 bp, synthetic construct
  misc_feature 1..80: note = Artificially Synthesized Probe
  source 1..80: mol_type = other DNA
gatggtgcacaggtaaacataaatataacaattagagactaagcagtgacacaagtcccacagcaggtgcagggagtctc

SEQ ID NO: 41420 - DNA, 80 bp, synthetic construct
  misc_feature 1..80: note = Artificially Synthesized Probe
  source 1..80: mol_type = other DNA
taacgatttgctgagtaaataatcatggctggcactcttaatagctctttgaatgggacaggacctaaatgttttgcata

SEQ ID NO: 41421 - DNA, 80 bp, synthetic construct
  misc_feature 1..80: note = Artificially Synthesized Probe
  source 1..80: mol_type = other DNA
catagaaccaatagcagaggaaagtgttttgcaatttcaaatgtgtctcgtggctgaactgctgacaaaaaaatatgttt

SEQ ID NO: 41422 - DNA, 80 bp, synthetic construct
  misc_feature 1..80: note = Artificially Synthesized Probe
  source 1..80: mol_type = other DNA
ccttagctctgcctgatccctgaattatgtggctcgagtttcattgttctgttggttattctctttctcaggtcggcagc

SEQ ID NO: 41423 - DNA, 80 bp, synthetic construct
  misc_feature 1..80: note = Artificially Synthesized Probe
  source 1..80: mol_type = other DNA
tctgttctgttcttccacagggttagtatagaattgatttttctctcccacttggttggtcagaggcatgcttgactttg

SEQ ID NO: 41424 - DNA, 80 bp, synthetic construct
  misc_feature 1..80: note = Artificially Synthesized Probe
  source 1..80: mol_type = other DNA
tccatctcaaaaaaaataaagggggctgggtgcagtggctcgggcctataatcccagcattttgggaggccaaggcaggc

SEQ ID NO: 41425 - DNA, 80 bp, synthetic construct
  misc_feature 1..80: note = Artificially Synthesized Probe
  source 1..80: mol_type = other DNA
tgaagcccaaagtatgtgagagggcagaataggaacaccaaacccagtctggggattcaacgaaagaaagctttttggaa

SEQ ID NO: 41426 - DNA, 80 bp, synthetic construct
  misc_feature 1..80: note = Artificially Synthesized Probe
  source 1..80: mol_type = other DNA
ctacaattctaggctcatagtagaaacagcgtaggatcaatttctaccaacagtaatagggagcggtgttccctcacata

SEQ ID NO: 41427 - DNA, 80 bp, synthetic construct
  misc_feature 1..80: note = Artificially Synthesized Probe
  source 1..80: mol_type = other DNA
aacagaggttcagaaaggtcagtaacttgttcaaggtcaccaggtcttaaacagtagaggtgggattcaaaccaagtctt

SEQ ID NO: 41428 - DNA, 80 bp, synthetic construct
  misc_feature 1..80: note = Artificially Synthesized Probe
  source 1..80: mol_type = other DNA
ttttatacttccaaagcacagtaactgttaaaacacccagtgaagaagcatggccactgtctttctccagaagaaataaa

SEQ ID NO: 41429 - DNA, 80 bp, synthetic construct
  misc_feature 1..80: note = Artificially Synthesized Probe
  source 1..80: mol_type = other DNA
ctgtagccaaccaagttcagcctataaaagaattcctgggactaactggtactaattgtttgcagaacaaccagtgggag

SEQ ID NO: 41430 - DNA, 80 bp, synthetic construct
  misc_feature 1..80: note = Artificially Synthesized Probe
  source 1..80: mol_type = other DNA
gtttttctcaactattgtaatactagtgaagagccctctccatgtggcggggcacatgactactatcaagagctccaact

SEQ ID NO: 41431 - DNA, 80 bp, synthetic construct
  misc_feature 1..80: note = Artificially Synthesized Probe
  source 1..80: mol_type = other DNA
ccattaaagattagttcagttgcttcaggtgaacagtgactgaaatttacaggaccttgtaccgagagagacaagatgag

SEQ ID NO: 41432 - DNA, 80 bp, synthetic construct
  misc_feature 1..80: note = Artificially Synthesized Probe
  source 1..80: mol_type = other DNA
aatacagaaaaataagggggaaaattacccattgtcctatctccccaagagaactactagaatcgtttaggtcagtggtt

SEQ ID NO: 41433 - DNA, 80 bp, synthetic construct
  misc_feature 1..80: note = Artificially Synthesized Probe
  source 1..80: mol_type = other DNA
ttagtttctgcctcagggtctttcatgaagggattcggcctaaacaagctcccatgattcagatgtgcaagttgattgct

SEQ ID NO: 41434 - DNA, 80 bp, synthetic construct
  misc_feature 1..80: note = Artificially Synthesized Probe
  source 1..80: mol_type = other DNA
ggactacagataccaccatgcctagctatttttgtattctcagtagagatgcagttttaccatgttggccgggctagtct

SEQ ID NO: 41435 - DNA, 80 bp, synthetic construct
  misc_feature 1..80: note = Artificially Synthesized Probe
  source 1..80: mol_type = other DNA
gtaagccatttatttatctttggaagtaataatagaaaccatgtatgggctgggctttaatcccgttgcttgctttgtag

SEQ ID NO: 41436 - DNA, 80 bp, synthetic construct
  misc_feature 1..80: note = Artificially Synthesized Probe
  source 1..80: mol_type = other DNA
aaaacaaaaccataaacacaagccagtgttataaatgctatgaaaaacaaattcccttttggtttaaaatgttttctctg

SEQ ID NO: 41437 - DNA, 80 bp, synthetic construct
  misc_feature 1..80: note = Artificially Synthesized Probe
  source 1..80: mol_type = other DNA
cagagagagaattgggggctcagggaatgatggctaatggttatggggcttttcttgtggggttaatgaagatcttctaa

SEQ ID NO: 41438 - DNA, 80 bp, synthetic construct
  misc_feature 1..80: note = Artificially Synthesized Probe
  source 1..80: mol_type = other DNA
cctaaattggcatttggtgctgatgatgtctgggattggaggtcattttaataggttatattttttcattatcattgagg

SEQ ID NO: 41439 - DNA, 80 bp, synthetic construct
  misc_feature 1..80: note = Artificially Synthesized Probe
  source 1..80: mol_type = other DNA
cctcattttccactgaattaacagggctggatgtgggttttgtttactgaaatgttctctctggagctcttttttttttt

SEQ ID NO: 41440 - DNA, 80 bp, synthetic construct
  misc_feature 1..80: note = Artificially Synthesized Probe
  source 1..80: mol_type = other DNA
ttcagatccagcaaacactcattaagggccttttatgtgccaagcaaggggcaaggtgctttcacccatatggttcctcc

SEQ ID NO: 41441 - DNA, 80 bp, synthetic construct
  misc_feature 1..80: note = Artificially Synthesized Probe
  source 1..80: mol_type = other DNA
ggcaatttagataccttaaagttatcactgactcaccccatcatataggcttagaaaagtgagttgaggttggggtcagt

SEQ ID NO: 41442 - DNA, 80 bp, synthetic construct
  misc_feature 1..80: note = Artificially Synthesized Probe
  source 1..80: mol_type = other DNA
gtagaggaatattaagcttgtccctggtagactttggagcctaatttggaatcagtaaattgcattgctgtgtgtaaagt

SEQ ID NO: 41443 - DNA, 80 bp, synthetic construct
  misc_feature 1..80: note = Artificially Synthesized Probe
  source 1..80: mol_type = other DNA
aggaggtcctaacgacatgtgcccagggtggtcagagtacagcttgcttttatacattttagggagacataatacatcaa

SEQ ID NO: 41444 - DNA, 80 bp, synthetic construct
  misc_feature 1..80: note = Artificially Synthesized Probe
  source 1..80: mol_type = other DNA
caaacatgttacttccatcgtcttatttctcatacccatcccatgaggtggaggtccaactctaatccccatttgtagta

SEQ ID NO: 41445 - DNA, 80 bp, synthetic construct
  misc_feature 1..80: note = Artificially Synthesized Probe
  source 1..80: mol_type = other DNA
aaaagctgacccagagccctagatctcttaacttttcacagccaaatcttaaaaggcttctctgtgctttttgttccttt

SEQ ID NO: 41446 - DNA, 80 bp, synthetic construct
  misc_feature 1..80: note = Artificially Synthesized Probe
  source 1..80: mol_type = other DNA
ctgaggtgggcagattgcttgagctcaggagttcgagaccaacctgggcaacatggagaaactctgtctctacaaaaaat

SEQ ID NO: 41447 - DNA, 80 bp, synthetic construct
  misc_feature 1..80: note = Artificially Synthesized Probe
  source 1..80: mol_type = other DNA
gaacaagaaatcaaaatactttagcaactgaaggatgattcaagcaaaggcagaactcgatcaagaagggagaagatatg

SEQ ID NO: 41448 - DNA, 80 bp, synthetic construct
  misc_feature 1..80: note = Artificially Synthesized Probe
  source 1..80: mol_type = other DNA
acatgcgtgctgtgtcggagggatgcaaggtagtatgcctggccaatagctgtaggtcatcagtgatgtgtgtgtgtgtg

SEQ ID NO: 41449 - DNA, 80 bp, synthetic construct
  misc_feature 1..80: note = Artificially Synthesized Probe
  source 1..80: mol_type = other DNA
cctgaggtcaggaatttgagaccagcctggccaacatggtggaaccctgtctgtactaaaaaatacaaaattagccggcg

SEQ ID NO: 41450 - DNA, 80 bp, synthetic construct
  misc_feature 1..80: note = Artificially Synthesized Probe
  source 1..80: mol_type = other DNA
agttggctctggatggtgacattttagttgtactttaccactttttggtgatctacttactgcatagtttgagtgaataa

SEQ ID NO: 41451 - DNA, 80 bp, synthetic construct
  misc_feature 1..80: note = Artificially Synthesized Probe
  source 1..80: mol_type = other DNA
taggacactggttttaacaagtgcctctggtgattcctatcatcagagaaatttaggacactgtcttatagaaccataaa

SEQ ID NO: 41452 - DNA, 80 bp, synthetic construct
  misc_feature 1..80: note = Artificially Synthesized Probe
  source 1..80: mol_type = other DNA
caataacagccacacctctcctcccaccccatgcaattgttttactgggtagaggcaaagaatagaggggccggaaagcc

SEQ ID NO: 41453 - DNA, 80 bp, synthetic construct
  misc_feature 1..80: note = Artificially Synthesized Probe
  source 1..80: mol_type = other DNA
gaaaagagagtgtggctttcatatattctgcagtgtaaacagcagtaaaatagtaaaagctgtcatactttggagcacct

SEQ ID NO: 41454 - DNA, 80 bp, synthetic construct
  misc_feature 1..80: note = Artificially Synthesized Probe
  source 1..80: mol_type = other DNA
ggaggctgctgtgagctatgattgtgccactgcactccagcctgggccagagtgagactttttctgaaaaataaataaaa

SEQ ID NO: 41455 - DNA, 80 bp, synthetic construct
  misc_feature 1..80: note = Artificially Synthesized Probe
  source 1..80: mol_type = other DNA
actatggaacaatgtaaatagccttacaccttaagttacttgctttaataaatagaagaatgtctacctggcctggtgtg

SEQ ID NO: 41456 - DNA, 80 bp, synthetic construct
  misc_feature 1..80: note = Artificially Synthesized Probe
  source 1..80: mol_type = other DNA
tctgtgtacaactgaaaacagtgtcgaagctatttaggatctgggaagtgtacaagttaattacccccaccctcaaaaaa

SEQ ID NO: 41457 - DNA, 80 bp, synthetic construct
  misc_feature 1..80: note = Artificially Synthesized Probe
  source 1..80: mol_type = other DNA
ggtttgttaaaggagagttacgattccagtctactttacagtgtacacgttaactaaattgtttggtgaacctgtaaact

SEQ ID NO: 41458 - DNA, 80 bp, synthetic construct
  misc_feature 1..80: note = Artificially Synthesized Probe
  source 1..80: mol_type = other DNA
ggtctgctatgccaattatgttgatttactgtaatttaatagcccagcccaccatcattggacattggtggtttccatca

SEQ ID NO: 41459 - DNA, 80 bp, synthetic construct
  misc_feature 1..80: note = Artificially Synthesized Probe
  source 1..80: mol_type = other DNA
taactaaactcatcatctttcttcaagctcctcccaagatctgctcccactcctgtgttctgttttgataaaagccaccg

SEQ ID NO: 41460 - DNA, 80 bp, synthetic construct
  misc_feature 1..80: note = Artificially Synthesized Probe
  source 1..80: mol_type = other DNA
agagttgtattgatttacactgccaccagcaaaaaagctaatatatcaactgaaccgtgtttctaacaaccatttactga

SEQ ID NO: 41461 - DNA, 80 bp, synthetic construct
  misc_feature 1..80: note = Artificially Synthesized Probe
  source 1..80: mol_type = other DNA
ctggacttgtttttccacgaaacttctagacttgttttgatcaggcaggaagtgaagcaacttttcagggagagagccca

SEQ ID NO: 41462 - DNA, 80 bp, synthetic construct
  misc_feature 1..80: note = Artificially Synthesized Probe
  source 1..80: mol_type = other DNA
caggatgcccccgcgacctcaccggggaaacaccgcggacagtcgggccagcagcgcccggagctcactccaggtctcca

SEQ ID NO: 41463 - DNA, 80 bp, synthetic construct
  misc_feature 1..80: note = Artificially Synthesized Probe
  source 1..80: mol_type = other DNA
aggtttggaaggacccacaaaagaggagtgtgatgaatgctttgtattctagtactagcctacctgtcaccagttctttt

SEQ ID NO: 41464 - DNA, 80 bp, synthetic construct
  misc_feature 1..80: note = Artificially Synthesized Probe
  source 1..80: mol_type = other DNA
tgatgaaggggaactttcccctctgaaatgctgctgtaactttttcagtaccatccagatattataatactgaatgagcc

SEQ ID NO: 41465 - DNA, 80 bp, synthetic construct
  misc_feature 1..80: note = Artificially Synthesized Probe
  source 1..80: mol_type = other DNA
caccccataactatttttgaggcattcataggcttaagaccaatgaatttttacatcacccccgggggaattgcatttgc

SEQ ID NO: 41466 - DNA, 80 bp, synthetic construct
  misc_feature 1..80: note = Artificially Synthesized Probe
  source 1..80: mol_type = other DNA
agtgagccaccgtgcccggccactagttttaattttggatggtacctaggaaagcagttgagctagtatgctgcatacat

SEQ ID NO: 41467 - DNA, 80 bp, synthetic construct
  misc_feature 1..80: note = Artificially Synthesized Probe
  source 1..80: mol_type = other DNA
gtgcatcctgctcttatccactcagatctcttagatgtggttgcagacagtgtatttgtagagctagctgtttgttttaa

SEQ ID NO: 41468 - DNA, 80 bp, synthetic construct
  misc_feature 1..80: note = Artificially Synthesized Probe
  source 1..80: mol_type = other DNA
tagctttccttaaccatttacacaccattgtatattgcagaccatagtcagatacattttgttataatgaatgtttattt

SEQ ID NO: 41469 - DNA, 80 bp, synthetic construct
  misc_feature 1..80: note = Artificially Synthesized Probe
  source 1..80: mol_type = other DNA
ctttgccatcgtattaaaagctttggtggagacgtgagaacattgcagatactttggattttgtcacttgagttgaaggt

SEQ ID NO: 41470 - DNA, 80 bp, synthetic construct
  misc_feature 1..80: note = Artificially Synthesized Probe
  source 1..80: mol_type = other DNA
gaccatttttgtaatggcatggaagcagcattagctgcaccactgattagctgggtggcttttgctgtcttgtgactcta

SEQ ID NO: 41471 - DNA, 80 bp, synthetic construct
  misc_feature 1..80: note = Artificially Synthesized Probe
  source 1..80: mol_type = other DNA
tctgatttgttcttcacaaatgtgttgaagatgagcctactggtcactgctgcaaaaaaccacattgttcactggtgtaa

SEQ ID NO: 41472 - DNA, 80 bp, synthetic construct
  misc_feature 1..80: note = Artificially Synthesized Probe
  source 1..80: mol_type = other DNA
ttaccacctagattaaaaactagaattttccatcactctggaaggttctctcttgccacttttccaatgattaccacacc

SEQ ID NO: 41473 - DNA, 80 bp, synthetic construct
  misc_feature 1..80: note = Artificially Synthesized Probe
  source 1..80: mol_type = other DNA
ataaatgcgagccaccacgcccagccaggttacagatgtttaactttgattctttacctctgaagtcaaataaacctggg

SEQ ID NO: 41474 - DNA, 80 bp, synthetic construct
  misc_feature 1..80: note = Artificially Synthesized Probe
  source 1..80: mol_type = other DNA
gcctccgattagctgtaaccacgggcatgcgccaccatacctggctaatttttaaatattttgtagagatgaggtctgtc

SEQ ID NO: 41475 - DNA, 80 bp, synthetic construct
  misc_feature 1..80: note = Artificially Synthesized Probe
  source 1..80: mol_type = other DNA
gcggagggaacactgtagtctaccaaaacagctggcagaagtgtctgtcctattataagtttattttatgaaacatgagc

SEQ ID NO: 41476 - DNA, 80 bp, synthetic construct
  misc_feature 1..80: note = Artificially Synthesized Probe
  source 1..80: mol_type = other DNA
aatttctctgtgggcgtttctgctgagaaatgtggggaaacaggactgggctaaaaataaaattagttcaggcattgcta

SEQ ID NO: 41477 - DNA, 80 bp, synthetic construct
  misc_feature 1..80: note = Artificially Synthesized Probe
  source 1..80: mol_type = other DNA
ccttttcttagagtattccttgcctcctgaaaaaagcactttgcaggaaatatggagatcttctgaacctgtggctttgt

SEQ ID NO: 41478 - DNA, 80 bp, synthetic construct
  misc_feature 1..80: note = Artificially Synthesized Probe
  source 1..80: mol_type = other DNA
tcattcatcagagacctctgtgtgttcattactgtatgagaccccaaagactctaagttgcctctaagacacagccttac

SEQ ID NO: 41479 - DNA, 80 bp, synthetic construct
  misc_feature 1..80: note = Artificially Synthesized Probe
  source 1..80: mol_type = other DNA
taactcagttgtgacaaacggtggatatatggttctgaccacattctaaattggacttgatggtgggcaagggaaacttc

SEQ ID NO: 41480 - DNA, 80 bp, synthetic construct
  misc_feature 1..80: note = Artificially Synthesized Probe
  source 1..80: mol_type = other DNA
gcaagattttgaccttaggtcagcttcccctgaagtatgtgattggaaactgaacgagttcagattttagtttaggtaaa

SEQ ID NO: 41481 - DNA, 80 bp, synthetic construct
  misc_feature 1..80: note = Artificially Synthesized Probe
  source 1..80: mol_type = other DNA
tgtcagaggaaacttcagagtaacaataaagtgctggtgtggcttcaaaggcttggagaaatgaaaagcagtggagaaat

SEQ ID NO: 41482 - DNA, 80 bp, synthetic construct
  misc_feature 1..80: note = Artificially Synthesized Probe
  source 1..80: mol_type = other DNA
taaattctcacttgatcctcaccaagaaccctgtgaggtgagtgttattcactggatgcttagagaacctagagatcata

SEQ ID NO: 41483 - DNA, 80 bp, synthetic construct
  misc_feature 1..80: note = Artificially Synthesized Probe
  source 1..80: mol_type = other DNA
attttcaattcgtagggaaccggcagtctctccctttttatttctgcatgactgcaccacctagtggataatacatctgt

SEQ ID NO: 41484 - DNA, 80 bp, synthetic construct
  misc_feature 1..80: note = Artificially Synthesized Probe
  source 1..80: mol_type = other DNA
cagtcttcctctgcgctcccacagcctttttatttttccttcccaggaaaaattttagagacaccaaaaggattcttaaa

SEQ ID NO: 41485 - DNA, 80 bp, synthetic construct
  misc_feature 1..80: note = Artificially Synthesized Probe
  source 1..80: mol_type = other DNA
tcttgcctttattctccaattctaataggaaaggcatgtgtttgaagctcaggactccgtatgtaggctcactggcttta

SEQ ID NO: 41486 - DNA, 80 bp, synthetic construct
  misc_feature 1..80: note = Artificially Synthesized Probe
  source 1..80: mol_type = other DNA
actgttcaaacagccagaaataaaatccgactcgactccctttctgcaccctcttcttaccaactcactgcagaagactt

SEQ ID NO: 41487 - DNA, 80 bp, synthetic construct
  misc_feature 1..80: note = Artificially Synthesized Probe
  source 1..80: mol_type = other DNA
ctcccatagtcttagggaaccagtaatctttcagcctctgtggatttgcccctccttgacatttcacataaatttgtcat

SEQ ID NO: 41488 - DNA, 80 bp, synthetic construct
  misc_feature 1..80: note = Artificially Synthesized Probe
  source 1..80: mol_type = other DNA
gtttttctttttttctaccatgtgttcgtaatgctcttctgagaggaagaaaacagactttcttacttgggagtggtcag

SEQ ID NO: 41489 - DNA, 80 bp, synthetic construct
  misc_feature 1..80: note = Artificially Synthesized Probe
  source 1..80: mol_type = other DNA
tgttaaacttggtcataagcaagctgtgtccattgtgaagtgtgtgctgtgagcacatcgcatacactagatttaatcat

SEQ ID NO: 41490 - DNA, 80 bp, synthetic construct
  misc_feature 1..80: note = Artificially Synthesized Probe
  source 1..80: mol_type = other DNA
cgcatgcacgtacgcacgcaccagagggaaacatcatgcagaaaaccattggcccatttattggatggtgtcctcccgaa

SEQ ID NO: 41491 - DNA, 80 bp, synthetic construct
  misc_feature 1..80: note = Artificially Synthesized Probe
  source 1..80: mol_type = other DNA
atgcagaatgcccacccacctgaccagttagtcatccttcagcatggagctgtgggagagggagcctccctgtggttggg

SEQ ID NO: 41492 - DNA, 80 bp, synthetic construct
  misc_feature 1..80: note = Artificially Synthesized Probe
  source 1..80: mol_type = other DNA
tctttctgtccacagggccaggtgcatggttgcttttgggtctgtaagtatggaagctaggaatctttgagaaggcacat

SEQ ID NO: 41493 - DNA, 80 bp, synthetic construct
  misc_feature 1..80: note = Artificially Synthesized Probe
  source 1..80: mol_type = other DNA
ccctcttaatcacctcctaaaagctcctccccttaacacttactgtattgggtcttaggttccagcacatgagttttggt

SEQ ID NO: 41494 - DNA, 80 bp, synthetic construct
  misc_feature 1..80: note = Artificially Synthesized Probe
  source 1..80: mol_type = other DNA
cacatgtctgcatagcctaggttgaggtttggacacttgcttagattccaaggtcctcctttgtacccatttatttatat

SEQ ID NO: 41495 - DNA, 80 bp, synthetic construct
  misc_feature 1..80: note = Artificially Synthesized Probe
  source 1..80: mol_type = other DNA
tgacaggacaaggatctcactccagatcttgtgactttaaaaatcactttcttggctctgcttctccttgtttcctagat

SEQ ID NO: 41496 - DNA, 80 bp, synthetic construct
  misc_feature 1..80: note = Artificially Synthesized Probe
  source 1..80: mol_type = other DNA
gtgagatgacaacaggatttgctggaaatgtgggccactattgtatccgccttacgtaaccacatggagtgatggaaatg

SEQ ID NO: 41497 - DNA, 80 bp, synthetic construct
  misc_feature 1..80: note = Artificially Synthesized Probe
  source 1..80: mol_type = other DNA
gtttactttgatggcttgagacttttatgaagcatgtcccttacgtggacagcttgcgattaatctttggttttagcttt

SEQ ID NO: 41498 - DNA, 80 bp, synthetic construct
  misc_feature 1..80: note = Artificially Synthesized Probe
  source 1..80: mol_type = other DNA
gcccggcctcatctccctattttttaaacttatgaaatgtttggtaccataaaagaattaaatatctaaatcatggagca

SEQ ID NO: 41499 - DNA, 80 bp, synthetic construct
  misc_feature 1..80: note = Artificially Synthesized Probe
  source 1..80: mol_type = other DNA
tgcccagggatgttcctagagctgatgttctgaggaataaggatgattatgtggggtgctctgtgtttctgaaaaattat

SEQ ID NO: 41500 - DNA, 80 bp, synthetic construct
  misc_feature 1..80: note = Artificially Synthesized Probe
  source 1..80: mol_type = other DNA
tttaatttaaattacgcttgcaggcatcacaggacacttaaagatggtagcatcccattattgaagggctgtgaatttca

SEQ ID NO: 41501 - DNA, 80 bp, synthetic construct
  misc_feature 1..80: note = Artificially Synthesized Probe
  source 1..80: mol_type = other DNA
ctcccaaagtgttgggattataggcgtgaaccatcacgcccgacccggtttctgctttctgtttccatttaagaaaactt

SEQ ID NO: 41502 - DNA, 80 bp, synthetic construct
  misc_feature 1..80: note = Artificially Synthesized Probe
  source 1..80: mol_type = other DNA
tgatgaatgaatagtgtatccatctctagatgtattaaaaagaaaaaactttgagtgcctactctgtgtgccagacactg

SEQ ID NO: 41503 - DNA, 80 bp, synthetic construct
  misc_feature 1..80: note = Artificially Synthesized Probe
  source 1..80: mol_type = other DNA
ggtgatgtgcatgtttaaattgtgggctcatttccttggatacatactatctggggaatctttgagggctgtgtttgagt

SEQ ID NO: 41504 - DNA, 80 bp, synthetic construct
  misc_feature 1..80: note = Artificially Synthesized Probe
  source 1..80: mol_type = other DNA
ggagaaaaagccgaaagatcccgcagatcacccaattgggcataccctatgataaggctaaggatatttttagacataaa

SEQ ID NO: 41505 - DNA, 80 bp, synthetic construct
  misc_feature 1..80: note = Artificially Synthesized Probe
  source 1..80: mol_type = other DNA
tagcatccaagagactgtaagtcatttgtgtgaggctgagctggagaactgcactcgtggttctgcattttttttttttt

SEQ ID NO: 41506 - DNA, 80 bp, synthetic construct
  misc_feature 1..80: note = Artificially Synthesized Probe
  source 1..80: mol_type = other DNA
cctgttttgagtttgtaattgtgtataatcagtcagcatagtgggcctcacgtgggaaactttccttggaaaggaagatt

SEQ ID NO: 41507 - DNA, 80 bp, synthetic construct
  misc_feature 1..80: note = Artificially Synthesized Probe
  source 1..80: mol_type = other DNA
agaaagaacgaaatatgtcctttgcagcaacacgaatgtacctggaggccattatcctaagcaaattaatgctgaaacag

SEQ ID NO: 41508 - DNA, 80 bp, synthetic construct
  misc_feature 1..80: note = Artificially Synthesized Probe
  source 1..80: mol_type = other DNA
tttagtacaggttcagtttttactgaagttgttccagctcgggccagcatgatgcaaagaggtacaactggtgcttcaaa

SEQ ID NO: 41509 - DNA, 80 bp, synthetic construct
  misc_feature 1..80: note = Artificially Synthesized Probe
  source 1..80: mol_type = other DNA
gaaaagtcttcaagctggaatggaagccataacacaccatgtttgaataatgcccaaaccttgggaacaccccagctttg

SEQ ID NO: 41510 - DNA, 80 bp, synthetic construct
  misc_feature 1..80: note = Artificially Synthesized Probe
  source 1..80: mol_type = other DNA
ctggaacaataggattctgtgatctcaaaatttcttaagaatccaaggcaagcccttttcctgcacaaaagcacaaatgg

SEQ ID NO: 41511 - DNA, 80 bp, synthetic construct
  misc_feature 1..80: note = Artificially Synthesized Probe
  source 1..80: mol_type = other DNA
ccgctgttcttggatcctcagtacttttggaggggtgtgaagatatgtgtaagttatcttcctacttttccttgtgtctt

SEQ ID NO: 41512 - DNA, 80 bp, synthetic construct
  misc_feature 1..80: note = Artificially Synthesized Probe
  source 1..80: mol_type = other DNA
gatgtctttttcatttttagagatgggatcttgttgtgtttcccaggctgatcttgatctcctgggttcaagcgatcctt

SEQ ID NO: 41513 - DNA, 80 bp, synthetic construct
  misc_feature 1..80: note = Artificially Synthesized Probe
  source 1..80: mol_type = other DNA
aatcaacttctctttatccgcctttgcccccttggcagctatgtatagaatgtcacactttctggatttttgttttttga

SEQ ID NO: 41514 - DNA, 80 bp, synthetic construct
  misc_feature 1..80: note = Artificially Synthesized Probe
  source 1..80: mol_type = other DNA
ctcctgatgaaaagcagagcgaacgaaggtaggcatgcttgatgtgggaagaaaagcactgttgtgatatgaataacctt

SEQ ID NO: 41515 - DNA, 80 bp, synthetic construct
  misc_feature 1..80: note = Artificially Synthesized Probe
  source 1..80: mol_type = other DNA
cacaaagttgtgtcatcattggaagagccaggcttcagaattttggctttaaactaggagaccagtggttctcaaagcag

SEQ ID NO: 41516 - DNA, 80 bp, synthetic construct
  misc_feature 1..80: note = Artificially Synthesized Probe
  source 1..80: mol_type = other DNA
gagcccccatgcttggccaatgagtgcattttttaagaggattgaggaattgttgaaaaatgccagagagatgttatcac

SEQ ID NO: 41517 - DNA, 80 bp, synthetic construct
  misc_feature 1..80: note = Artificially Synthesized Probe
  source 1..80: mol_type = other DNA
agcctcattgtcagcagaacatgcctattaaggtgtgctgaattgtttttttttctccccaacattttatttgaaaagtg

SEQ ID NO: 41518 - DNA, 80 bp, synthetic construct
  misc_feature 1..80: note = Artificially Synthesized Probe
  source 1..80: mol_type = other DNA
tcagtggtaagacagaggtggcaagagcagcataatgagacgatttttatcagaaaaaccagacattgagggtcgtaaca

SEQ ID NO: 41519 - DNA, 80 bp, synthetic construct
  misc_feature 1..80: note = Artificially Synthesized Probe
  source 1..80: mol_type = other DNA
ccccattcttctatttagtgtagctatccagctggaagttaaatttctaaggaaagaccccttgaaaccttaatctccaa

SEQ ID NO: 41520 - DNA, 80 bp, synthetic construct
  misc_feature 1..80: note = Artificially Synthesized Probe
  source 1..80: mol_type = other DNA
taactggatagaattgcagaatctcagtctcccctcaactgccccacaacaactgcatcctaacaagatttgtatgcacc

SEQ ID NO: 41521 - DNA, 80 bp, synthetic construct
  misc_feature 1..80: note = Artificially Synthesized Probe
  source 1..80: mol_type = other DNA
gtacaaatggacatagaggtggcagtaacagaaactggggacaactagaggggaaactactaaaggaggagatggaaagg

SEQ ID NO: 41522 - DNA, 80 bp, synthetic construct
  misc_feature 1..80: note = Artificially Synthesized Probe
  source 1..80: mol_type = other DNA
ctttgttttcccttcttccttacagctctgtctctgtaactgaaatccagaagagtggtggtttttgcctagatggtgat

SEQ ID NO: 41523 - DNA, 80 bp, synthetic construct
  misc_feature 1..80: note = Artificially Synthesized Probe
  source 1..80: mol_type = other DNA
gaaggtaagaacagcccagctctgtttctagaagttacttgtaaggagtgcacttttctgggtgttctttctgtaaggga

SEQ ID NO: 41524 - DNA, 80 bp, synthetic construct
  misc_feature 1..80: note = Artificially Synthesized Probe
  source 1..80: mol_type = other DNA
acccaggctggagtgcagtggtgctatctcagatcaccgcaacctccgcctcctgggttcaagcaattcttagtcctcag

SEQ ID NO: 41525 - DNA, 80 bp, synthetic construct
  misc_feature 1..80: note = Artificially Synthesized Probe
  source 1..80: mol_type = other DNA
cagcatttatacttaaggtgttttgtttcttgttatcaccctggcaacacggaaggaactctgggaactggcttcttttg

SEQ ID NO: 41526 - DNA, 80 bp, synthetic construct
  misc_feature 1..80: note = Artificially Synthesized Probe
  source 1..80: mol_type = other DNA
atggcacaagaaaggataccaaaatgggatgattcctaattgggggacagagaggtacaaatgacagtaccttaaatact

SEQ ID NO: 41527 - DNA, 80 bp, synthetic construct
  misc_feature 1..80: note = Artificially Synthesized Probe
  source 1..80: mol_type = other DNA
agtgacattaaggactcatttgcatcttggctttgctctggacaggccctgatgaaaacaaacaaaagggtcagtggcat

SEQ ID NO: 41528 - DNA, 80 bp, synthetic construct
  misc_feature 1..80: note = Artificially Synthesized Probe
  source 1..80: mol_type = other DNA
tcagggaaaagagctgatgtcgccttttgaaggccatcaggcaggaagagtagtttcctcctaattttttatttatttat

SEQ ID NO: 41529 - DNA, 80 bp, synthetic construct
  misc_feature 1..80: note = Artificially Synthesized Probe
  source 1..80: mol_type = other DNA
ataggagaagctgtgttgagtgtctagtactgtaacttgtactaagctgaatgcaacaaacgatgcttttgtctttcagt

SEQ ID NO: 41530 - DNA, 80 bp, synthetic construct
  misc_feature 1..80: note = Artificially Synthesized Probe
  source 1..80: mol_type = other DNA
ttgactggatttgattaatgaaatgcatgttagctgcgttttctggctttagagatttacttcccgtggtttcttctcag

SEQ ID NO: 41531 - DNA, 80 bp, synthetic construct
  misc_feature 1..80: note = Artificially Synthesized Probe
  source 1..80: mol_type = other DNA
gctgaattggggagaaaccacagtttctttcgtttagttatgttatcaaaagcccatacaatacttttactgcttatcat

SEQ ID NO: 41532 - DNA, 80 bp, synthetic construct
  misc_feature 1..80: note = Artificially Synthesized Probe
  source 1..80: mol_type = other DNA
gaaacggaaccaaaagatgcaggatctgagaaatccactggagtggtccggttaaataccgtgaggcaaattattgaaca

SEQ ID NO: 41533 - DNA, 80 bp, synthetic construct
  misc_feature 1..80: note = Artificially Synthesized Probe
  source 1..80: mol_type = other DNA
tctctaacttttccccttttgtaaacaggataagcatgcactactggatgtgactccgaaagctgtggacctgttgaatt

SEQ ID NO: 41534 - DNA, 80 bp, synthetic construct
  misc_feature 1..80: note = Artificially Synthesized Probe
  source 1..80: mol_type = other DNA
cttggacactctgaatattggatgatttaaagatttattatttctctttgttaggtgtgataataatattgtgatttttt

SEQ ID NO: 41535 - DNA, 80 bp, synthetic construct
  misc_feature 1..80: note = Artificially Synthesized Probe
  source 1..80: mol_type = other DNA
tattaggccataagaaaggccagcacttttgcataatcacaattctgatgtatgactgagcccagactaaactatagcgt

SEQ ID NO: 41536 - DNA, 80 bp, synthetic construct
  misc_feature 1..80: note = Artificially Synthesized Probe
  source 1..80: mol_type = other DNA
acagtactcttccagacttcaaagtttgactccctacagctgtgtggatgactgcactaataattgcttttattccccat

SEQ ID NO: 41537 - DNA, 80 bp, synthetic construct
  misc_feature 1..80: note = Artificially Synthesized Probe
  source 1..80: mol_type = other DNA
gaatcttcaaagtactcagtgcatggttcgaagatcatttaagttgacttatggatttagagacccaagtggggctaccc

SEQ ID NO: 41538 - DNA, 80 bp, synthetic construct
  misc_feature 1..80: note = Artificially Synthesized Probe
  source 1..80: mol_type = other DNA
gtctatccaaggggatataggcataacccagaggttaggagcaacagataattaactactattgctctaaggcaaagaat

SEQ ID NO: 41539 - DNA, 80 bp, synthetic construct
  misc_feature 1..80: note = Artificially Synthesized Probe
  source 1..80: mol_type = other DNA
tgttgtactttgttggtattttatatctgtgctctaaatttctgtttttagatgggccatgtagtgtggtggctgagacc

SEQ ID NO: 41540 - DNA, 80 bp, synthetic construct
  misc_feature 1..80: note = Artificially Synthesized Probe
  source 1..80: mol_type = other DNA
ggcatctgtggattttggtatccaagtggggggtgtcccggaaccaatcctctacagataccaagggacaactttatgtt

SEQ ID NO: 41541 - DNA, 80 bp, synthetic construct
  misc_feature 1..80: note = Artificially Synthesized Probe
  source 1..80: mol_type = other DNA
agagagggagattctattacctgtggccgcttttattttagaagcttttggtgttagtatcctgttcaccagctgaactg

SEQ ID NO: 41542 - DNA, 80 bp, synthetic construct
  misc_feature 1..80: note = Artificially Synthesized Probe
  source 1..80: mol_type = other DNA
tttccttgcactctcgtggacagctgtgtgttcagggtgctgtggaaggcattcctaagggttggagcagatgacttcca

SEQ ID NO: 41543 - DNA, 80 bp, synthetic construct
  misc_feature 1..80: note = Artificially Synthesized Probe
  source 1..80: mol_type = other DNA
cagccagtttttaaaaatgtgtctgaagcatttggtgatggtttctgcctgttcagtaaagaagcaccggctcagaacct

SEQ ID NO: 41544 - DNA, 80 bp, synthetic construct
  misc_feature 1..80: note = Artificially Synthesized Probe
  source 1..80: mol_type = other DNA
tacccagaatcaccaatcgcagaacgtgtttttcttttgctgtccagctaaagttttctgcccagtctgatttagatgca

SEQ ID NO: 41545 - DNA, 80 bp, synthetic construct
  misc_feature 1..80: note = Artificially Synthesized Probe
  source 1..80: mol_type = other DNA
ctgagatcttctccaagatgctgatctcctctagaacaaaattattccaggtctgatcttacctccagcaatcacagccc

SEQ ID NO: 41546 - DNA, 80 bp, synthetic construct
  misc_feature 1..80: note = Artificially Synthesized Probe
  source 1..80: mol_type = other DNA
aaaacttgacaatataggggaagaagattctgctctttatacacagaactttgtatagagttctggaatgaggaagtgtg

SEQ ID NO: 41547 - DNA, 80 bp, synthetic construct
  misc_feature 1..80: note = Artificially Synthesized Probe
  source 1..80: mol_type = other DNA
ccagcaagcagagtgcccagtggttcattctttcactcttattcttttcttttttaattaccacagatcgaaattgccca

SEQ ID NO: 41548 - DNA, 80 bp, synthetic construct
  misc_feature 1..80: note = Artificially Synthesized Probe
  source 1..80: mol_type = other DNA
gaagttttatactggattgcttcctgcttccgagaatagaaaaaaaaaagtcacattttcttgtggccattcttttgttt

SEQ ID NO: 41549 - DNA, 80 bp, synthetic construct
  misc_feature 1..80: note = Artificially Synthesized Probe
  source 1..80: mol_type = other DNA
tttttgttcagaattaagcagaacactgcagtcagatcctgttacttgcttcagtggaccgaaatctgtattctgtttgc

SEQ ID NO: 41550 - DNA, 80 bp, synthetic construct
  misc_feature 1..80: note = Artificially Synthesized Probe
  source 1..80: mol_type = other DNA
cagagcaatatatcccatggctgcttcataagtgaacaattctgttgttggctgttcggattatttccagttgtttgcct

SEQ ID NO: 41551 - DNA, 80 bp, synthetic construct
  misc_feature 1..80: note = Artificially Synthesized Probe
  source 1..80: mol_type = other DNA
agggtcttttatgatatgaattgacacaaaggagttaggcttgtgttttagtggtggcagaaatttggcttactggtaac

SEQ ID NO: 41552 - DNA, 80 bp, synthetic construct
  misc_feature 1..80: note = Artificially Synthesized Probe
  source 1..80: mol_type = other DNA
ttggatgaggccgacctacatttcagagggcaatctgctttactcaaagtccaccaatttgagtgttaatctcctaaata

SEQ ID NO: 41553 - DNA, 80 bp, synthetic construct
  misc_feature 1..80: note = Artificially Synthesized Probe
  source 1..80: mol_type = other DNA
gttttaaataaagatgagcaaatttgatgaatagaaaagcattaaaaatgggctggcgtggtggcttatgcctgtaatcc

SEQ ID NO: 41554 - DNA, 80 bp, synthetic construct
  misc_feature 1..80: note = Artificially Synthesized Probe
  source 1..80: mol_type = other DNA
gccaacatggcgaaaccccatctctactaaaaatacaaaaattagccaggtgtaatggtgcttgcttgtaatcccagcta

SEQ ID NO: 41555 - DNA, 80 bp, synthetic construct
  misc_feature 1..80: note = Artificially Synthesized Probe
  source 1..80: mol_type = other DNA
gagcttcccctctctcctccccctccttccctaatctcccaccacatgctctttcttttccgctttaattcccttccctc

SEQ ID NO: 41556 - DNA, 80 bp, synthetic construct
  misc_feature 1..80: note = Artificially Synthesized Probe
  source 1..80: mol_type = other DNA
gtgctcaataaaagcagctagtattattatcactgtcaatggttttgccacatcaatttagaaacctgagtggtgtcttt

SEQ ID NO: 41557 - DNA, 80 bp, synthetic construct
  misc_feature 1..80: note = Artificially Synthesized Probe
  source 1..80: mol_type = other DNA
agatcagccaacccacagatgtatgagaaataataaacaagggttgttttaagccaccgagttggggggtgagttgttat

SEQ ID NO: 41558 - DNA, 80 bp, synthetic construct
  misc_feature 1..80: note = Artificially Synthesized Probe
  source 1..80: mol_type = other DNA
ttgacaccactgacacaaactggaaaacattagtagaagtggagaaaatctgctaagatcttaatttgaccagactaatg

SEQ ID NO: 41559 - DNA, 80 bp, synthetic construct
  misc_feature 1..80: note = Artificially Synthesized Probe
  source 1..80: mol_type = other DNA
gcactttagagctgagtctgcaaactgacagaacccatggaactaacctagctcaaaatacgatttatttggcctgagtg

SEQ ID NO: 41560 - DNA, 80 bp, synthetic construct
  misc_feature 1..80: note = Artificially Synthesized Probe
  source 1..80: mol_type = other DNA
tggtgggaactaatgagcatatgttttcaggtcctgttctctgtggctattacagtttaaatgggttgaaataagacata

SEQ ID NO: 41561 - DNA, 80 bp, synthetic construct
  misc_feature 1..80: note = Artificially Synthesized Probe
  source 1..80: mol_type = other DNA
ctgggcaattgacattgtcgggtgcgattgaacagaacttggttttagggctagtttatagggggtgatatttatctgga

SEQ ID NO: 41562 - DNA, 80 bp, synthetic construct
  misc_feature 1..80: note = Artificially Synthesized Probe
  source 1..80: mol_type = other DNA
gtataaaaattgcacctatctcaaagggttgattgtgaggattatatactatagtgcaggtaagcactgagcacagggcc

SEQ ID NO: 41563 - DNA, 80 bp, synthetic construct
  misc_feature 1..80: note = Artificially Synthesized Probe
  source 1..80: mol_type = other DNA
accctgtacccgttaagcagtcacttcctatgcacccctcccctagccttggcaactactgatctacttcccgtctctat

SEQ ID NO: 41564 - DNA, 80 bp, synthetic construct
  misc_feature 1..80: note = Artificially Synthesized Probe
  source 1..80: mol_type = other DNA
aagaaagtcatcaacctgacaaaccagtcataggtcctttcctgtaatatgcacttattgagtgcctggctaccagggtc

SEQ ID NO: 41565 - DNA, 80 bp, synthetic construct
  misc_feature 1..80: note = Artificially Synthesized Probe
  source 1..80: mol_type = other DNA
ccatctcaaaaataaataaatagccagattttgcaagaagtcactatcgcgaggaaggtaccaagtcattcacgagagat

SEQ ID NO: 41566 - DNA, 80 bp, synthetic construct
  misc_feature 1..80: note = Artificially Synthesized Probe
  source 1..80: mol_type = other DNA
tagttggaagtataaattggcacaaattttctgcaggacaacatagcaatatacatcaaaacccctaaaatagattcacc

SEQ ID NO: 41567 - DNA, 80 bp, synthetic construct
  misc_feature 1..80: note = Artificially Synthesized Probe
  source 1..80: mol_type = other DNA
aagggtgatgtgataaagagtgactgggggtagggttactttaggtaggtagggaaaagtctgaagaagtatcacttaag

SEQ ID NO: 41568 - DNA, 80 bp, synthetic construct
  misc_feature 1..80: note = Artificially Synthesized Probe
  source 1..80: mol_type = other DNA
ccaaattccttggccagggcagtgggctatgatgattgacttaaaccattgaggacccaaccacagagctgagagtgagt

SEQ ID NO: 41569 - DNA, 80 bp, synthetic construct
  misc_feature 1..80: note = Artificially Synthesized Probe
  source 1..80: mol_type = other DNA
gtgctattctgggccatggtaattattcagccagtggagagttctcttctgtgacaactgagatacctcaggctaagaat

SEQ ID NO: 41570 - DNA, 80 bp, synthetic construct
  misc_feature 1..80: note = Artificially Synthesized Probe
  source 1..80: mol_type = other DNA
caaggcgagatggccataaatgaacaaaaacagcagagtattctgaagttgtttgtagctacacttcgcaggagttagca

SEQ ID NO: 41571 - DNA, 80 bp, synthetic construct
  misc_feature 1..80: note = Artificially Synthesized Probe
  source 1..80: mol_type = other DNA
tattgtttttcgaatcgctgtcatgttctgtactatatgcagttcctgaaagaatggaggcaagaaggagtcagctaacc

SEQ ID NO: 41572 - DNA, 80 bp, synthetic construct
  misc_feature 1..80: note = Artificially Synthesized Probe
  source 1..80: mol_type = other DNA
gacagaaccgtgcctctgagcctgggagagggaggcacccctgtgttctggaagcccccagtgcttcagcaactcctcac

SEQ ID NO: 41573 - DNA, 80 bp, synthetic construct
  misc_feature 1..80: note = Artificially Synthesized Probe
  source 1..80: mol_type = other DNA
ctctgactctcctcaccacccagcccgacctgactgaaaaccccgcagtgggagagcaggaggcccctgcttctaggtgc

SEQ ID NO: 41574 - DNA, 80 bp, synthetic construct
  misc_feature 1..80: note = Artificially Synthesized Probe
  source 1..80: mol_type = other DNA
agtgctcagattacaggtgtgagccattgcgcccagtctcatttaaccttaattactaatttaaaggtgccatcatggcc

SEQ ID NO: 41575 - DNA, 80 bp, synthetic construct
  misc_feature 1..80: note = Artificially Synthesized Probe
  source 1..80: mol_type = other DNA
acttctctatgtgtaacaaatggccaactttatgggattgtcaagaagctgaaatgagaccctggctggaggatatttta

SEQ ID NO: 41576 - DNA, 80 bp, synthetic construct
  misc_feature 1..80: note = Artificially Synthesized Probe
  source 1..80: mol_type = other DNA
agtatcagaggagcaagatgctaggatgtgtgacccaaaggagcttgtagttcgtctgtgtgtctttttgtctctctctc

SEQ ID NO: 41577 - DNA, 80 bp, synthetic construct
  misc_feature 1..80: note = Artificially Synthesized Probe
  source 1..80: mol_type = other DNA
tgctcccactgccctcccagaaaataactgggtttccttccttgacaggtttctagcctgcttctacattggcttctttc

SEQ ID NO: 41578 - DNA, 80 bp, synthetic construct
  misc_feature 1..80: note = Artificially Synthesized Probe
  source 1..80: mol_type = other DNA
tatttgattttttaacatgtaactgagtcagtgggcttcccaacatgtgggctgcagatatcagagcaggctgtggagtt

SEQ ID NO: 41579 - DNA, 80 bp, synthetic construct
  misc_feature 1..80: note = Artificially Synthesized Probe
  source 1..80: mol_type = other DNA
tcccaagctaggcttcctgtctcttagagcttctacagacccaagatcagcttgttagaataaacttttctgcaaggaat

SEQ ID NO: 41580 - DNA, 80 bp, synthetic construct
  misc_feature 1..80: note = Artificially Synthesized Probe
  source 1..80: mol_type = other DNA
gttgtactggtcctggccagtgcaatacgaaaataaaaggaagcaaaagccacacagataggaaagaaagaagtaatatt

SEQ ID NO: 41581 - DNA, 80 bp, synthetic construct
  misc_feature 1..80: note = Artificially Synthesized Probe
  source 1..80: mol_type = other DNA
gtgatttcaagacttacaaagctacagtaattgaagacactgaagccacgcgtaaggaaacacatatggactactggaac

SEQ ID NO: 41582 - DNA, 80 bp, synthetic construct
  misc_feature 1..80: note = Artificially Synthesized Probe
  source 1..80: mol_type = other DNA
ttcaaaataacaactttatagagaaagaaagtagactggaggttatcagggactgtggggagggaggagagaatggggag

SEQ ID NO: 41583 - DNA, 80 bp, synthetic construct
  misc_feature 1..80: note = Artificially Synthesized Probe
  source 1..80: mol_type = other DNA
agaatgggaaagaggattagtatggggcatgggaagctttctgaaggggtggaagcattctgtgtctagattctggtggt

SEQ ID NO: 41584 - DNA, 80 bp, synthetic construct
  misc_feature 1..80: note = Artificially Synthesized Probe
  source 1..80: mol_type = other DNA
actccttggctcaagggccctcccacttcagacacctaaagtgctaggatgacaggcgtgagccactgcacttggccact

SEQ ID NO: 41585 - DNA, 80 bp, synthetic construct
  misc_feature 1..80: note = Artificially Synthesized Probe
  source 1..80: mol_type = other DNA
cccgttgtaagtcaaaatatcctaagttcaaaaggcatttaatgctggcaacacagtagactgtccctgactcacaatgg

SEQ ID NO: 41586 - DNA, 80 bp, synthetic construct
  misc_feature 1..80: note = Artificially Synthesized Probe
  source 1..80: mol_type = other DNA
gaatcactcataccctaacctcaacatcacacaatagacacggaacaagcctgtatatgtatccccggatctaaaataaa

SEQ ID NO: 41587 - DNA, 80 bp, synthetic construct
  misc_feature 1..80: note = Artificially Synthesized Probe
  source 1..80: mol_type = other DNA
tttcttttctttttctttttttttttgagatggagtcttgctctgtctcccaggctggagctcagaaacagacccggtcc

SEQ ID NO: 41588 - DNA, 80 bp, synthetic construct
  misc_feature 1..80: note = Artificially Synthesized Probe
  source 1..80: mol_type = other DNA
tcctaccccaggggcccaagggtcctggggcagggtggggtcaggaatcgggagggatggggtgtctcttcccccatcaa

SEQ ID NO: 41589 - DNA, 80 bp, synthetic construct
  misc_feature 1..80: note = Artificially Synthesized Probe
  source 1..80: mol_type = other DNA
tttggatgagtggaattcagagccctggctgtccgccaatcaaacactaaaagcacttgccgcactgcggcttcgtgtga

SEQ ID NO: 41590 - DNA, 80 bp, synthetic construct
  misc_feature 1..80: note = Artificially Synthesized Probe
  source 1..80: mol_type = other DNA
cccggctaattttgtatttttagtagtgatgggttttcgccatgtgggtcaggctggccaaaaagtaattctaatcaagt

SEQ ID NO: 41591 - DNA, 80 bp, synthetic construct
  misc_feature 1..80: note = Artificially Synthesized Probe
  source 1..80: mol_type = other DNA
caggctcactggagtggaagcgtgcactctcatctgtgaggctaggctgttccctggccgtcacctcaccctttcatctc

SEQ ID NO: 41592 - DNA, 80 bp, synthetic construct
  misc_feature 1..80: note = Artificially Synthesized Probe
  source 1..80: mol_type = other DNA
gaggagtgccactcacttttgcctagggtccagttggggcttaaaaaatatttggagagaagagtaatgaggattttttg

SEQ ID NO: 41593 - DNA, 80 bp, synthetic construct
  misc_feature 1..80: note = Artificially Synthesized Probe
  source 1..80: mol_type = other DNA
catggaggaggtggcatttgccctgggcctgggagaccaggttggattttgacagactgggaactcgggggacaggaggg

SEQ ID NO: 41594 - DNA, 80 bp, synthetic construct
  misc_feature 1..80: note = Artificially Synthesized Probe
  source 1..80: mol_type = other DNA
agcaggggttctcaaccttggcccattagaattacctgaaaatttttaagataattcacatccggccaggcatggtggct

SEQ ID NO: 41595 - DNA, 80 bp, synthetic construct
  misc_feature 1..80: note = Artificially Synthesized Probe
  source 1..80: mol_type = other DNA
caagtaccagtgtttttaaaacctccctggtagattccgttgtgcagcccaggccgagaagcatcgcggagtcttgtcat

SEQ ID NO: 41596 - DNA, 80 bp, synthetic construct
  misc_feature 1..80: note = Artificially Synthesized Probe
  source 1..80: mol_type = other DNA
gactagcacacacggtaattctccagaaatatccaggccaagttcttccactttcctgtcataagcagctagtactgtcc

SEQ ID NO: 41597 - DNA, 80 bp, synthetic construct
  misc_feature 1..80: note = Artificially Synthesized Probe
  source 1..80: mol_type = other DNA
ccaccccccagccagctgctggcagccagaagcagggggccagccccacctcaccaagccctgttcgcctccaagcacag

SEQ ID NO: 41598 - DNA, 80 bp, synthetic construct
  misc_feature 1..80: note = Artificially Synthesized Probe
  source 1..80: mol_type = other DNA
tctcctgagatgtattttaggtccctgtcaaaatggccaggctccggaggccagagaaggctctagagagagtgaaggtg

SEQ ID NO: 41599 - DNA, 80 bp, synthetic construct
  misc_feature 1..80: note = Artificially Synthesized Probe
  source 1..80: mol_type = other DNA
ctgtaaagggggataataacacaaggcacagggtttacattagtttcctgctgctgtcgtaacgaactgtcatcaacttc

SEQ ID NO: 41600 - DNA, 80 bp, synthetic construct
  misc_feature 1..80: note = Artificially Synthesized Probe
  source 1..80: mol_type = other DNA
tcagctctatgtggtgaaacgggaaaggcaggagatgggacagtgtgtactacagtgtttacaacccaagcaatgtggga

SEQ ID NO: 41601 - DNA, 80 bp, synthetic construct
  misc_feature 1..80: note = Artificially Synthesized Probe
  source 1..80: mol_type = other DNA
ggggctgcctctccggtatggggtccgacccccttctgcaactcactcccatgacacagcatgagggcctcagcaactcg

SEQ ID NO: 41602 - DNA, 80 bp, synthetic construct
  misc_feature 1..80: note = Artificially Synthesized Probe
  source 1..80: mol_type = other DNA
aaaaaaaaagttttaagtcctaactctcaaccttaatccacctgtttgtaaaatgagtgaagagtccatagggacccaaa

SEQ ID NO: 41603 - DNA, 80 bp, synthetic construct
  misc_feature 1..80: note = Artificially Synthesized Probe
  source 1..80: mol_type = other DNA
gtccagggtccggaaggggccgcaggtgctcgagggcttcaccctggggaagatgccgaccaggaaccctcaccccgagc

SEQ ID NO: 41604 - DNA, 80 bp, synthetic construct
  misc_feature 1..80: note = Artificially Synthesized Probe
  source 1..80: mol_type = other DNA
taaaataaaataaaaagacaggagccaggatgggaagaaaggtcccagttctcagccactgggcatgacccagttgcgga

SEQ ID NO: 41605 - DNA, 80 bp, synthetic construct
  misc_feature 1..80: note = Artificially Synthesized Probe
  source 1..80: mol_type = other DNA
aagagacagccaccagcctgggggaccccaccaggtgcttggtcacaccagcctcatcctaagtaggttcggatacaccc

SEQ ID NO: 41606 - DNA, 80 bp, synthetic construct
  misc_feature 1..80: note = Artificially Synthesized Probe
  source 1..80: mol_type = other DNA
gagccaccatgcctggccatacacatcactttgaaacctgttttcctttccaatctaaaaatgagttcggttctatttcc

SEQ ID NO: 41607 - DNA, 80 bp, synthetic construct
  misc_feature 1..80: note = Artificially Synthesized Probe
  source 1..80: mol_type = other DNA
ggaggggtacaagtagtggaaaagaaaccagaaaccaaaaaataaaaccgtgagacaggacaaggggctgagaagtgggg

SEQ ID NO: 41608 - DNA, 80 bp, synthetic construct
  misc_feature 1..80: note = Artificially Synthesized Probe
  source 1..80: mol_type = other DNA
ttcagctcacggacagctggccctccctctagaccatggttctggtcacatggtcctaagtggacccagggccaggcctg

SEQ ID NO: 41609 - DNA, 80 bp, synthetic construct
  misc_feature 1..80: note = Artificially Synthesized Probe
  source 1..80: mol_type = other DNA
tgcgaatggatggatgcgtggatgaatgagtgggtggatggatgaatgggtggatgggtgggttaaactgagtggatgga

SEQ ID NO: 41610 - DNA, 80 bp, synthetic construct
  misc_feature 1..80: note = Artificially Synthesized Probe
  source 1..80: mol_type = other DNA
cacctggagtcacagcggggcaagggttgggggccccaggggagctgggacaagaagggaacacggtaccagggtagcag

SEQ ID NO: 41611 - DNA, 80 bp, synthetic construct
  misc_feature 1..80: note = Artificially Synthesized Probe
  source 1..80: mol_type = other DNA
tcccgagacacctcggtgcccttatttgagcttcagtcgccaatcagccgtgtgtttgcttcagtcagcgacaagcagga

SEQ ID NO: 41612 - DNA, 80 bp, synthetic construct
  misc_feature 1..80: note = Artificially Synthesized Probe
  source 1..80: mol_type = other DNA
tgctctgggtgccctcgggccgccagagtgtctgctggctacttcctacaaagcaagaaagactcaccaggggtcctgga

SEQ ID NO: 41613 - DNA, 80 bp, synthetic construct
  misc_feature 1..80: note = Artificially Synthesized Probe
  source 1..80: mol_type = other DNA
gtcagagtaggctgtaggccttctctgcgtctgccctgtgacctcaaagaacttcctctagcaggaaattagctgctgga

SEQ ID NO: 41614 - DNA, 80 bp, synthetic construct
  misc_feature 1..80: note = Artificially Synthesized Probe
  source 1..80: mol_type = other DNA
ccctagagctggaatcccttcctccagacaggcccttctaagctcagggaacccggggactcgggcacccagcgccccag

SEQ ID NO: 41615 - DNA, 80 bp, synthetic construct
  misc_feature 1..80: note = Artificially Synthesized Probe
  source 1..80: mol_type = other DNA
tgaagtccccaatttttctgacgctcagtttccccaagttccaaaaaggggcaatatttccagactcatctgcttcccat

SEQ ID NO: 41616 - DNA, 80 bp, synthetic construct
  misc_feature 1..80: note = Artificially Synthesized Probe
  source 1..80: mol_type = other DNA
aattcctgagcacttactaccggccaggtgctaggcctgggtcttggcacaaccataacgccaatgacaggggctggaag

SEQ ID NO: 41617 - DNA, 80 bp, synthetic construct
  misc_feature 1..80: note = Artificially Synthesized Probe
  source 1..80: mol_type = other DNA
agggcaaactgccacgtggagaagagagggaattgtctctccttggggtgacggtgggcccaggcacaggtggatgcggg

SEQ ID NO: 41618 - DNA, 80 bp, synthetic construct
  misc_feature 1..80: note = Artificially Synthesized Probe
  source 1..80: mol_type = other DNA
cccagatcggaaaaaggagagtggcatcatcccacctgccttcacccgggtcccccgaccaatcggcccctcccccctcc

SEQ ID NO: 41619 - DNA, 80 bp, synthetic construct
  misc_feature 1..80: note = Artificially Synthesized Probe
  source 1..80: mol_type = other DNA
ggagttcgagaccagcctggacagcatggtgtgactgtctctacaaaaaaaaaaaaaaaaaaaaacttcgctggtcatgg

SEQ ID NO: 41620 - DNA, 80 bp, synthetic construct
  misc_feature 1..80: note = Artificially Synthesized Probe
  source 1..80: mol_type = other DNA
tgattattaaatagcgtatttgtgagttgcgattttttttagttacttccacttttttcagtttgggtgttcggtcacaa

SEQ ID NO: 41621 - DNA, 80 bp, synthetic construct
  misc_feature 1..80: note = Artificially Synthesized Probe
  source 1..80: mol_type = other DNA
gtttcaccacgttgaccaggctggtcttgaactctcgacctcagcctaaggtgatccacccgcctcagcctcccaaagtg

SEQ ID NO: 41622 - DNA, 80 bp, synthetic construct
  misc_feature 1..80: note = Artificially Synthesized Probe
  source 1..80: mol_type = other DNA
tggagagtaaagtttgagctgagatggaactcaggttaaaagactaagcagcaggtgcaaagtccctgtggcaaagacat

SEQ ID NO: 41623 - DNA, 80 bp, synthetic construct
  misc_feature 1..80: note = Artificially Synthesized Probe
  source 1..80: mol_type = other DNA
ataaactaaagagaacccaacataagccactatattccttgcctgtctgtgtatggggttacttggcagagggttccact

SEQ ID NO: 41624 - DNA, 80 bp, synthetic construct
  misc_feature 1..80: note = Artificially Synthesized Probe
  source 1..80: mol_type = other DNA
gagtgtgctttgtaaataagcaacctaggtgcactattcagaagcactacactaaatgagccttggaaggaacaggggaa

SEQ ID NO: 41625 - DNA, 80 bp, synthetic construct
  misc_feature 1..80: note = Artificially Synthesized Probe
  source 1..80: mol_type = other DNA
atggactgtatcaccctatattgcatgaacccacctgtctctctcctcctgtagaatgtgaatgtatcattcatttctat

SEQ ID NO: 41626 - DNA, 80 bp, synthetic construct
  misc_feature 1..80: note = Artificially Synthesized Probe
  source 1..80: mol_type = other DNA
ggaagtaaagggggtgatatttgagcagggtcttaatggatatgtaggggttcaccagtagaagaaacaaaacctgctga

SEQ ID NO: 41627 - DNA, 80 bp, synthetic construct
  misc_feature 1..80: note = Artificially Synthesized Probe
  source 1..80: mol_type = other DNA
ggctactcaaatacagattgctgggtgtcattcccagagtttctaattcagtagatcattagtggggtctgagaatttgc

SEQ ID NO: 41628 - DNA, 80 bp, synthetic construct
  misc_feature 1..80: note = Artificially Synthesized Probe
  source 1..80: mol_type = other DNA
ctttaggtttacatgtttacctgagacactgaatgtaccgacagtagccagactctatataaagatgaaccctgacccaa

SEQ ID NO: 41629 - DNA, 80 bp, synthetic construct
  misc_feature 1..80: note = Artificially Synthesized Probe
  source 1..80: mol_type = other DNA
atacttgtatgtacaagacccattagaatgtttatccagtctgcatataatggttgctgcaggtaagtgtcctcaggctc

SEQ ID NO: 41630 - DNA, 80 bp, synthetic construct
  misc_feature 1..80: note = Artificially Synthesized Probe
  source 1..80: mol_type = other DNA
tccacccctggattttctcatttgtgaaaaggacataatatgagttcctgcctctcagggttgctgtgaaatgattcatt

SEQ ID NO: 41631 - DNA, 80 bp, synthetic construct
  misc_feature 1..80: note = Artificially Synthesized Probe
  source 1..80: mol_type = other DNA
actgttaaaaagaaataaagcatcttccaatttaataaagggagtgagagagagagatccagttgttgcctgggttaaga

SEQ ID NO: 41632 - DNA, 80 bp, synthetic construct
  misc_feature 1..80: note = Artificially Synthesized Probe
  source 1..80: mol_type = other DNA
atgcggggttctgtgtctgtgtgctcaggtggtggctgaattgatagacttacttgccatgatgaagagtaagtaacaga

SEQ ID NO: 41633 - DNA, 80 bp, synthetic construct
  misc_feature 1..80: note = Artificially Synthesized Probe
  source 1..80: mol_type = other DNA
tgagagaaccgcagtagaagactgagcaaaacattcctgggcacagctattctgcatctcaccttgtacttgatttgcag

SEQ ID NO: 41634 - DNA, 80 bp, synthetic construct
  misc_feature 1..80: note = Artificially Synthesized Probe
  source 1..80: mol_type = other DNA
gccataactgtgcaaaactgagagccacccaaatgtccttcactaggttattggatacacaaactatactacatcagaac

SEQ ID NO: 41635 - DNA, 80 bp, synthetic construct
  misc_feature 1..80: note = Artificially Synthesized Probe
  source 1..80: mol_type = other DNA
agaaatttgcacaaaactgcacacacacacacacacacacaaagataagatctgtagtttaactaacagtattgcaatgt

SEQ ID NO: 41636 - DNA, 80 bp, synthetic construct
  misc_feature 1..80: note = Artificially Synthesized Probe
  source 1..80: mol_type = other DNA
gcagtggcactatctaggctcactgcagtctcagcttttctttcttttttttttgagacggagtctcgctgtgtcaccca

SEQ ID NO: 41637 - DNA, 80 bp, synthetic construct
  misc_feature 1..80: note = Artificially Synthesized Probe
  source 1..80: mol_type = other DNA
tggagttaattaagcccaaggagtgaggccaggttcaaaatcctggaaatgagtcaaataagaatcctaaaagcagctga

SEQ ID NO: 41638 - DNA, 80 bp, synthetic construct
  misc_feature 1..80: note = Artificially Synthesized Probe
  source 1..80: mol_type = other DNA
agctcagggcagttttgcagtcgtctttatacccacttttaatgatatactaattaaggagcagcctttcagaatcagct

SEQ ID NO: 41639 - DNA, 80 bp, synthetic construct
  misc_feature 1..80: note = Artificially Synthesized Probe
  source 1..80: mol_type = other DNA
ctccatagaactccccactgggtttccttttgggttgaaaaggggtgaaaacattcatccttttcatcctttggggatga

SEQ ID NO: 41640 - DNA, 80 bp, synthetic construct
  misc_feature 1..80: note = Artificially Synthesized Probe
  source 1..80: mol_type = other DNA
gaccacaagcaatatacaagggtcactagttttggccactacatcttgggtaatttattaggcagctacgaagaaatgta

SEQ ID NO: 41641 - DNA, 80 bp, synthetic construct
  misc_feature 1..80: note = Artificially Synthesized Probe
  source 1..80: mol_type = other DNA
aaagaaaaagaaaaaaaacaaagttcaaaatcaaggtgtcaggtgggccatgcaccctctgaggactccagtggaggatc

SEQ ID NO: 41642 - DNA, 80 bp, synthetic construct
  misc_feature 1..80: note = Artificially Synthesized Probe
  source 1..80: mol_type = other DNA
tgcttccatcgcacagatcaggaccaacgtcccagctgtggagaaaaaaacaatggctgcttcaagcattacaggtgaat

SEQ ID NO: 41643 - DNA, 80 bp, synthetic construct
  misc_feature 1..80: note = Artificially Synthesized Probe
  source 1..80: mol_type = other DNA
gcccagcatgcccagtgatcttggatgcatccttgacctccctgagtttctgttggcttgtccatcagtgggagcgaggg

SEQ ID NO: 41644 - DNA, 80 bp, synthetic construct
  misc_feature 1..80: note = Artificially Synthesized Probe
  source 1..80: mol_type = other DNA
gcaacacttattgagctagttaatcaaggcaaaattaggaggaagagtttctggtctctcaaaagactggacaggacatt

SEQ ID NO: 41645 - DNA, 80 bp, synthetic construct
  misc_feature 1..80: note = Artificially Synthesized Probe
  source 1..80: mol_type = other DNA
gagtgagtaagtgaatgagtgaatgagggagggagggaatgagtgagtgaatgagtgagtatatgaatgagtaaatgagt

SEQ ID NO: 41646 - DNA, 80 bp, synthetic construct
  misc_feature 1..80: note = Artificially Synthesized Probe
  source 1..80: mol_type = other DNA
gaatgagtgaatgagtgagtgaatgagtaaatgagtgagtgagtgaattagtgagtaaatgagtgagtgaatgagtgaga

SEQ ID NO: 41647 - DNA, 80 bp, synthetic construct
  misc_feature 1..80: note = Artificially Synthesized Probe
  source 1..80: mol_type = other DNA
tgagtgaatgagtgaggaaataagtaagtgaatgagtgagttagtgaatgagtgagtgaatgagttagtgaatgagtgag

SEQ ID NO: 41648 - DNA, 80 bp, synthetic construct
  misc_feature 1..80: note = Artificially Synthesized Probe
  source 1..80: mol_type = other DNA
tgagtgagtgagtgaatgagtgagtgagtgaatgagtaaattaatgactgagtgaataagtgagtgagtgagtgggtaag

SEQ ID NO: 41649 - DNA, 80 bp, synthetic construct
  misc_feature 1..80: note = Artificially Synthesized Probe
  source 1..80: mol_type = other DNA
gaacaaaatggatcagaatagaacagaaccaatccaatggattaaaatacggcaggacagatcgaaacagaatggatcgg

SEQ ID NO: 41650 - DNA, 80 bp, synthetic construct
  misc_feature 1..80: note = Artificially Synthesized Probe
  source 1..80: mol_type = other DNA
catcaccctgttttgttttcttcataacactaatcactgtctgaatctctcagatagattattggttcatgggtttatca

SEQ ID NO: 41651 - DNA, 80 bp, synthetic construct
  misc_feature 1..80: note = Artificially Synthesized Probe
  source 1..80: mol_type = other DNA
ggttgccctcactttgcaaaaactttgttttccccagcattgtaactgattttccaacagcgctcatttagccccatgtg

SEQ ID NO: 41652 - DNA, 80 bp, synthetic construct
  misc_feature 1..80: note = Artificially Synthesized Probe
  source 1..80: mol_type = other DNA
cagccctagagaatatcagatcaaggatgtagacagcagcaggatttttggaagatacccaggtgattctaagagcagca

SEQ ID NO: 41653 - DNA, 80 bp, synthetic construct
  misc_feature 1..80: note = Artificially Synthesized Probe
  source 1..80: mol_type = other DNA
ggctcatatggcctggtcctgcctccgtctcaggctgagctcgcgggctgctgccaggaaggctgccccggtgagcagct

SEQ ID NO: 41654 - DNA, 80 bp, synthetic construct
  misc_feature 1..80: note = Artificially Synthesized Probe
  source 1..80: mol_type = other DNA
accatcacagaaacttctaccaggcagtgctggtttcgagaatttgtcactgggtgaactattaatgctaatagtaataa

SEQ ID NO: 41655 - DNA, 80 bp, synthetic construct
  misc_feature 1..80: note = Artificially Synthesized Probe
  source 1..80: mol_type = other DNA
tcacgagtttgggcaaaggtaatacatgcggcttctttggtgaagtaatgaaaaggattcttggaagctgctccctctgc

SEQ ID NO: 41656 - DNA, 80 bp, synthetic construct
  misc_feature 1..80: note = Artificially Synthesized Probe
  source 1..80: mol_type = other DNA
cagatgatcacacgcatcattaattattcattacaagagccagggtgttaggaagaacttgggattgggggatggctggc

SEQ ID NO: 41657 - DNA, 80 bp, synthetic construct
  misc_feature 1..80: note = Artificially Synthesized Probe
  source 1..80: mol_type = other DNA
tctaaggtttcagggtctatacctctgtcactatttgactctgagcttcccagcagccaaagaaaaaagggaaacaagtg

SEQ ID NO: 41658 - DNA, 80 bp, synthetic construct
  misc_feature 1..80: note = Artificially Synthesized Probe
  source 1..80: mol_type = other DNA
ctccactctgaccaaaatgttttgccttcagtccctcaattggcactaactttggtgagtcaagaaaacaagactgaact

SEQ ID NO: 41659 - DNA, 80 bp, synthetic construct
  misc_feature 1..80: note = Artificially Synthesized Probe
  source 1..80: mol_type = other DNA
acctgcccactgatctagaacttattaaattcagcaaacatattaagagtgtctgctgtgagtctagctccacactgagc

SEQ ID NO: 41660 - DNA, 80 bp, synthetic construct
  misc_feature 1..80: note = Artificially Synthesized Probe
  source 1..80: mol_type = other DNA
taaacaaggtctctgtgccacccacaaaatatcaaacgcctccttctcccagctcatatgactgtccctgctttctcaat

SEQ ID NO: 41661 - DNA, 80 bp, synthetic construct
  misc_feature 1..80: note = Artificially Synthesized Probe
  source 1..80: mol_type = other DNA
ggcagtaaattttaaaggaaagcatggagtatttagagtcagacctgagcgtggttcttactagccatgtgacttcagag

SEQ ID NO: 41662 - DNA, 80 bp, synthetic construct
  misc_feature 1..80: note = Artificially Synthesized Probe
  source 1..80: mol_type = other DNA
ggtatgtatttcctgtggccactgtaacacatgaaggcaaactgggtggcttccaagcaacaggaatttagtctcttaca

SEQ ID NO: 41663 - DNA, 80 bp, synthetic construct
  misc_feature 1..80: note = Artificially Synthesized Probe
  source 1..80: mol_type = other DNA
agagatattttagacgcaaaaatgctttgctacaagtcaagggaaaagcaaccccagaaagaagcaaagatgttcacacc

SEQ ID NO: 41664 - DNA, 80 bp, synthetic construct
  misc_feature 1..80: note = Artificially Synthesized Probe
  source 1..80: mol_type = other DNA
ttgaggttcaaggaacttatatcaactaccccaagagccaatggccatgaagtgtcagagctggaatgagattacaaaag

SEQ ID NO: 41665 - DNA, 80 bp, synthetic construct
  misc_feature 1..80: note = Artificially Synthesized Probe
  source 1..80: mol_type = other DNA
tccagagtgaccctctgtaaatgactcagtgtgcatcttcccagtttttgtccatatatttataatttttctatatattc

SEQ ID NO: 41666 - DNA, 80 bp, synthetic construct
  misc_feature 1..80: note = Artificially Synthesized Probe
  source 1..80: mol_type = other DNA
taaatttgaacttttgttagtttaaaatgtggcctttattttttaatgggcacctcagaaaggcagcctgaagctcaggc

SEQ ID NO: 41667 - DNA, 80 bp, synthetic construct
  misc_feature 1..80: note = Artificially Synthesized Probe
  source 1..80: mol_type = other DNA
aaacaggctaggagctcctctggtctaccatgacctctaatcttaatatacacacatcacactgaaactatactcagagt

SEQ ID NO: 41668 - DNA, 80 bp, synthetic construct
  misc_feature 1..80: note = Artificially Synthesized Probe
  source 1..80: mol_type = other DNA
agtccagggctggctgctttgtttatgtgatctcatttcatcttagaacagcccatttgtggatgcaggtgactcatcag

SEQ ID NO: 41669 - DNA, 80 bp, synthetic construct
  misc_feature 1..80: note = Artificially Synthesized Probe
  source 1..80: mol_type = other DNA
ctttaatctacactgtgctgaatttgaagacctcctttccaccaaaaataattccagtccctagcccaagaaacaaaccc

SEQ ID NO: 41670 - DNA, 80 bp, synthetic construct
  misc_feature 1..80: note = Artificially Synthesized Probe
  source 1..80: mol_type = other DNA
cctctgcagcaggtccttaaaggaatgaaacatcttcatataatagaagagcttggaccaaactcaaaattcattttgga

SEQ ID NO: 41671 - DNA, 80 bp, synthetic construct
  misc_feature 1..80: note = Artificially Synthesized Probe
  source 1..80: mol_type = other DNA
ctttctgacaagtctggtcattcctttatgactggtcctaggcaaggtccgttttgtttatccatttttattccctctca

SEQ ID NO: 41672 - DNA, 80 bp, synthetic construct
  misc_feature 1..80: note = Artificially Synthesized Probe
  source 1..80: mol_type = other DNA
gagtcagatttaaaccccaccccacaaaaaagtcatacaatttgcacttagcagttagccaagtcaagttggtgggataa

SEQ ID NO: 41673 - DNA, 80 bp, synthetic construct
  misc_feature 1..80: note = Artificially Synthesized Probe
  source 1..80: mol_type = other DNA
agcctggctaacattgtgaaactccatttgtactagaaatatgaaaaattagcccgacgtggaggcaggcacctgtagtt

SEQ ID NO: 41674 - DNA, 80 bp, synthetic construct
  misc_feature 1..80: note = Artificially Synthesized Probe
  source 1..80: mol_type = other DNA
cggtgcaaagaaagccattagtcaacgtgagctgaatgaaccctaaaccacaaaacgttacaggtggatcaggagagacc

SEQ ID NO: 41675 - DNA, 80 bp, synthetic construct
  misc_feature 1..80: note = Artificially Synthesized Probe
  source 1..80: mol_type = other DNA
cccagctccaccgccgccagagccgcggagctcagatctgaaagcctttcctttggaccccgggccctagcttagaccct

SEQ ID NO: 41676 - DNA, 80 bp, synthetic construct
  misc_feature 1..80: note = Artificially Synthesized Probe
  source 1..80: mol_type = other DNA
gtcatccacctcacctcatctcagcacataggcactgtcattttacatcacaaggaaaagaagggtgattacagtgctat

SEQ ID NO: 41677 - DNA, 80 bp, synthetic construct
  misc_feature 1..80: note = Artificially Synthesized Probe
  source 1..80: mol_type = other DNA
gattacaggcatgagccaccacgcccaaccttcttttgttgttatttattgttaatctcttactgtgtctaatttagaaa

SEQ ID NO: 41678 - DNA, 80 bp, synthetic construct
  misc_feature 1..80: note = Artificially Synthesized Probe
  source 1..80: mol_type = other DNA
aaacttgcctcgaaggtcaaagatcttctgagtcagatctgcaatctgggggcacacgagggggtgggtacttctccttc

SEQ ID NO: 41679 - DNA, 80 bp, synthetic construct
  misc_feature 1..80: note = Artificially Synthesized Probe
  source 1..80: mol_type = other DNA
gctggggcctggacttcagggtctgagggaggaggggctgagggcctcgattccagggtctgagggaggaggggctgggg

SEQ ID NO: 41680 - DNA, 80 bp, synthetic construct
  misc_feature 1..80: note = Artificially Synthesized Probe
  source 1..80: mol_type = other DNA
ccatatataattgggtaaggacagccatattggacgcctgggtcccgagcagaagaggggatagaggctgtactgctgaa

SEQ ID NO: 41681 - DNA, 80 bp, synthetic construct
  misc_feature 1..80: note = Artificially Synthesized Probe
  source 1..80: mol_type = other DNA
ccatccaccaatctgggtctcttcctttggataggcacttcccatctatccctaagcaagtccgagggcaacggagttcc

SEQ ID NO: 41682 - DNA, 80 bp, synthetic construct
  misc_feature 1..80: note = Artificially Synthesized Probe
  source 1..80: mol_type = other DNA
cccagggaccgtcagtctcctccgggctgcttgagactccccgaggacactgagataaagggcgaggacacagactaaat

SEQ ID NO: 41683 - DNA, 80 bp, synthetic construct
  misc_feature 1..80: note = Artificially Synthesized Probe
  source 1..80: mol_type = other DNA
gttcagcctgccgtactttaatgattattggtgacactctttcaagtaacttgttggtaataagaagtcaattaaccagg

SEQ ID NO: 41684 - DNA, 80 bp, synthetic construct
  misc_feature 1..80: note = Artificially Synthesized Probe
  source 1..80: mol_type = other DNA
gacaagagcaagggcttgagacggtcacactcacaacttctgggcgtggctgatgcggttgtacagcacgttgatctgcg

SEQ ID NO: 41685 - DNA, 80 bp, synthetic construct
  misc_feature 1..80: note = Artificially Synthesized Probe
  source 1..80: mol_type = other DNA
ttagcccttctccctttcttctagaaatagcctcttgtgcattaggctgagttgaaaaactactttgcccaatctccctt

SEQ ID NO: 41686 - DNA, 80 bp, synthetic construct
  misc_feature 1..80: note = Artificially Synthesized Probe
  source 1..80: mol_type = other DNA
gtggaagtatttacgccctgggaatgggcatgtgctaaatctagacattttgccccctggagagcagctgttaaacattt

SEQ ID NO: 41687 - DNA, 80 bp, synthetic construct
  misc_feature 1..80: note = Artificially Synthesized Probe
  source 1..80: mol_type = other DNA
gcaggctgtcttggctatagatgcgagggactcagctggaaaattctcacccgcattcctggcttgaatttaggtaaaag

SEQ ID NO: 41688 - DNA, 80 bp, synthetic construct
  misc_feature 1..80: note = Artificially Synthesized Probe
  source 1..80: mol_type = other DNA
agcccctcctccgttaggaaccagaggtctggcccccagcccctgccccctcagaactcagacctcaggctcctgcaggc

SEQ ID NO: 41689 - DNA, 80 bp, synthetic construct
  misc_feature 1..80: note = Artificially Synthesized Probe
  source 1..80: mol_type = other DNA
taatatcctcccagaaaaaatcgaaatgaaggagaagaagaaatgcctgctttttctgcatgtctccaccctgaaatagc

SEQ ID NO: 41690 - DNA, 80 bp, synthetic construct
  misc_feature 1..80: note = Artificially Synthesized Probe
  source 1..80: mol_type = other DNA
gatcacttgagcccaggagtttgggaacaacgtgggcaacatagaaagaccctatctcaaataaaaaaaaataataataa

SEQ ID NO: 41691 - DNA, 80 bp, synthetic construct
  misc_feature 1..80: note = Artificially Synthesized Probe
  source 1..80: mol_type = other DNA
gcacttcagcctgggtgacagagcaagaccctatttccaaataaacgaataaaaaataataataggccggatgcggtggc

SEQ ID NO: 41692 - DNA, 80 bp, synthetic construct
  misc_feature 1..80: note = Artificially Synthesized Probe
  source 1..80: mol_type = other DNA
gcctcccagcacctcccccatgcaggatggtgaactgaaccgtttcccaggacggtatccagcaggtggcagcaatgcct

SEQ ID NO: 41693 - DNA, 80 bp, synthetic construct
  misc_feature 1..80: note = Artificially Synthesized Probe
  source 1..80: mol_type = other DNA
accaagcctggctaatttttctgtatttttagtagagacggggcttcactgtgttagccaggatggtctcgatctcctga

SEQ ID NO: 41694 - DNA, 80 bp, synthetic construct
  misc_feature 1..80: note = Artificially Synthesized Probe
  source 1..80: mol_type = other DNA
agggagactctatctcaaaaaaaaaaaaaaagagatggcgtttcactatgttgtccagggtggtcttgaacttctgagct

SEQ ID NO: 41695 - DNA, 80 bp, synthetic construct
  misc_feature 1..80: note = Artificially Synthesized Probe
  source 1..80: mol_type = other DNA
taggtaatccgcccccctcagcctcccaaagtgctggaattacaggcatgaaccactgcgcccggccccattcccttatt

SEQ ID NO: 41696 - DNA, 80 bp, synthetic construct
  misc_feature 1..80: note = Artificially Synthesized Probe
  source 1..80: mol_type = other DNA
caagatgttgaggcagtgggccaggattgggtcactgcactctagcctgggtaacagggtggagactatgaccacgatga

SEQ ID NO: 41697 - DNA, 80 bp, synthetic construct
  misc_feature 1..80: note = Artificially Synthesized Probe
  source 1..80: mol_type = other DNA
aggcgaagataaggggggatggggtggtgcttctccgcaaacatccaacccttctgtaaagattcctccagactggggaa

SEQ ID NO: 41698 - DNA, 80 bp, synthetic construct
  misc_feature 1..80: note = Artificially Synthesized Probe
  source 1..80: mol_type = other DNA
tgtggggagagaggagggaggggagagttagacctggggtgggagagcctctccaccactgcacgccccaacccctccca

SEQ ID NO: 41699 - DNA, 80 bp, synthetic construct
  misc_feature 1..80: note = Artificially Synthesized Probe
  source 1..80: mol_type = other DNA
tctgagggagggggccggctgtcctaaagcatgcatgaggacagaccttggtaggtgtggtcctggcacagccaggaggc

SEQ ID NO: 41700 - DNA, 80 bp, synthetic construct
  misc_feature 1..80: note = Artificially Synthesized Probe
  source 1..80: mol_type = other DNA
gattcccagaaccccaagatcctaggaggttttattctgggacatccaagtcctggcagccccgggttaggatttgtgta

SEQ ID NO: 41701 - DNA, 80 bp, synthetic construct
  misc_feature 1..80: note = Artificially Synthesized Probe
  source 1..80: mol_type = other DNA
agcgtccggagagtctgggatgcggacatggtggtgtgatggtctcagcaccgggaggatgcagaagaaggcagagtgtg

SEQ ID NO: 41702 - DNA, 80 bp, synthetic construct
  misc_feature 1..80: note = Artificially Synthesized Probe
  source 1..80: mol_type = other DNA
gcaacagaggcaatgacacaggccatactggggggaacagaacagccttgtgttgcttccaggcgctcagcagaaaacca

SEQ ID NO: 41703 - DNA, 80 bp, synthetic construct
  misc_feature 1..80: note = Artificially Synthesized Probe
  source 1..80: mol_type = other DNA
gttttccttatacaacactcccaggggggaccgtagctattgtcttcgagtaatctgtactgtgttgtaatgaactttgt

SEQ ID NO: 41704 - DNA, 80 bp, synthetic construct
  misc_feature 1..80: note = Artificially Synthesized Probe
  source 1..80: mol_type = other DNA
aagtgtgagtacccagctggtggctgccccctgcctggctcgggaccctggccccttggcttctgtggggctggagcatg

SEQ ID NO: 41705 - DNA, 80 bp, synthetic construct
  misc_feature 1..80: note = Artificially Synthesized Probe
  source 1..80: mol_type = other DNA
ccctgtctctttaatcgattaatatgcattcacgatccttcattaatccttcatcctccgtgtgccatggtgtgtggagt

SEQ ID NO: 41706 - DNA, 80 bp, synthetic construct
  misc_feature 1..80: note = Artificially Synthesized Probe
  source 1..80: mol_type = other DNA
ggctaccctaacaacgtgagcaaaacatttatttttctgccgaaaaggtggaaagactcatttctgcgagggaaatatgg

SEQ ID NO: 41707 - DNA, 80 bp, synthetic construct
  misc_feature 1..80: note = Artificially Synthesized Probe
  source 1..80: mol_type = other DNA
taacccactaaccgcggccaatgcttgaccagagagagaatggggtctcgagggtgggcccccttccccacagcccccca

SEQ ID NO: 41708 - DNA, 80 bp, synthetic construct
  misc_feature 1..80: note = Artificially Synthesized Probe
  source 1..80: mol_type = other DNA
gctcgctccccgcacgcaccccaccctcggcctcgagtggcgacgggcttttccattaacctcggacgcttctccattga

SEQ ID NO: 41709 - DNA, 80 bp, synthetic construct
  misc_feature 1..80: note = Artificially Synthesized Probe
  source 1..80: mol_type = other DNA
cgtgactcgagcctcggagaggcccctggacaagaagggacatgctgggagggggatgggactccagccatgcagggagg

SEQ ID NO: 41710 - DNA, 80 bp, synthetic construct
  misc_feature 1..80: note = Artificially Synthesized Probe
  source 1..80: mol_type = other DNA
gggcatcgtgtgtcaacggccttgctgccacctaaggcccagagcagggactgaagggacaggatgggcgggtgccacta

SEQ ID NO: 41711 - DNA, 80 bp, synthetic construct
  misc_feature 1..80: note = Artificially Synthesized Probe
  source 1..80: mol_type = other DNA
tgtgccttttgccacctggaagacaccgcagaggaggacgcggaaggtaagggcccgtccctgccgccggaggtgcagga

SEQ ID NO: 41712 - DNA, 80 bp, synthetic construct
  misc_feature 1..80: note = Artificially Synthesized Probe
  source 1..80: mol_type = other DNA
ctggccaccgcaacaccccacggccttcgggggaccacaccaagccccgccatacttctaggactcccagagtcctagat

SEQ ID NO: 41713 - DNA, 80 bp, synthetic construct
  misc_feature 1..80: note = Artificially Synthesized Probe
  source 1..80: mol_type = other DNA
cataattttcctaaccattcccctattgcaggctttccccaatattttactatcataaataacgctggttggaaagcgtt

SEQ ID NO: 41714 - DNA, 80 bp, synthetic construct
  misc_feature 1..80: note = Artificially Synthesized Probe
  source 1..80: mol_type = other DNA
ctatggtttgttggaaaaaattgttgttgttttaactctttgctgcatctggaatgtattggtgagaggaggggactgca

SEQ ID NO: 41715 - DNA, 80 bp, synthetic construct
  misc_feature 1..80: note = Artificially Synthesized Probe
  source 1..80: mol_type = other DNA
acccatccatccatccattcataccactcattcatctactcatccatccatcgatccatctatcatccactcactcacat

SEQ ID NO: 41716 - DNA, 80 bp, synthetic construct
  misc_feature 1..80: note = Artificially Synthesized Probe
  source 1..80: mol_type = other DNA
cccctgcccacaggacatccagaagaagcgtcagaacaaagacctaatggagctccaggccctcatcgacagccactttg

SEQ ID NO: 41717 - DNA, 80 bp, synthetic construct
  misc_feature 1..80: note = Artificially Synthesized Probe
  source 1..80: mol_type = other DNA
tgcaccagctggagattgacaagttcgagtttggggagaagctgaaacgccagaaatatgacgtgagtcccggcacctcc

SEQ ID NO: 41718 - DNA, 80 bp, synthetic construct
  misc_feature 1..80: note = Artificially Synthesized Probe
  source 1..80: mol_type = other DNA
agggactggggtacaatgtgggagctagggtggaagccaagctgcttcccaccctcccaaacacccgtttgggctccagg

SEQ ID NO: 41719 - DNA, 80 bp, synthetic construct
  misc_feature 1..80: note = Artificially Synthesized Probe
  source 1..80: mol_type = other DNA
tggccagctacgggctgctgtgtgtggcagtccaggccagtacaggctggcgagagtaagtccaggcatgagcccagggg

SEQ ID NO: 41720 - DNA, 80 bp, synthetic construct
  misc_feature 1..80: note = Artificially Synthesized Probe
  source 1..80: mol_type = other DNA
catttccccaaggatcgcagtgtttgggggctacttggagtttcgatgttttctgggattcttctccctcctcctgtcgc

SEQ ID NO: 41721 - DNA, 80 bp, synthetic construct
  misc_feature 1..80: note = Artificially Synthesized Probe
  source 1..80: mol_type = other DNA
ccgctcgtgggactccacatcctccagcccccacaatcctgtcaggggctccctgacagtcctgggggtggagaggccat

SEQ ID NO: 41722 - DNA, 80 bp, synthetic construct
  misc_feature 1..80: note = Artificially Synthesized Probe
  source 1..80: mol_type = other DNA
ccgcccctcgctgacaccaggggaatgagattctggattaagaggtggaaggaccttagcttcacttcacagatgaggaa

SEQ ID NO: 41723 - DNA, 80 bp, synthetic construct
  misc_feature 1..80: note = Artificially Synthesized Probe
  source 1..80: mol_type = other DNA
cacagggcccggcgggctggtgtgggggccagtggccgtcctgggtaagctctgtgatcattgcaggtcctccctggcag

SEQ ID NO: 41724 - DNA, 80 bp, synthetic construct
  misc_feature 1..80: note = Artificially Synthesized Probe
  source 1..80: mol_type = other DNA
gagctgtcccaagggagtccctggactcacaaattgggggatggtgctcctggcagaagcagcagcctgagtaaagggtt

SEQ ID NO: 41725 - DNA, 80 bp, synthetic construct
  misc_feature 1..80: note = Artificially Synthesized Probe
  source 1..80: mol_type = other DNA
tttattcatgggatatatcagctttgagtcctgtgtgcttgacttctgggctctgcagatacagcagggaacaaaacagt

SEQ ID NO: 41726 - DNA, 80 bp, synthetic construct
  misc_feature 1..80: note = Artificially Synthesized Probe
  source 1..80: mol_type = other DNA
gggcgttcctgcagctctgaccctgggagtgatttgggtgggcttgcctgggcccatggaccgggacagtgagggaatgg

SEQ ID NO: 41727 - DNA, 80 bp, synthetic construct
  misc_feature 1..80: note = Artificially Synthesized Probe
  source 1..80: mol_type = other DNA
cccggaggacttgtcttctgcatcctggacgcatttgctgctttgatgcaccgtgttctgaggcctgttgtggaccaccc

SEQ ID NO: 41728 - DNA, 80 bp, synthetic construct
  misc_feature 1..80: note = Artificially Synthesized Probe
  source 1..80: mol_type = other DNA
tggtttattgctgattctctggagtgagctgccttttccccagactttgtactttgacccggtgagcaaggcacactttc

SEQ ID NO: 41729 - DNA, 80 bp, synthetic construct
  misc_feature 1..80: note = Artificially Synthesized Probe
  source 1..80: mol_type = other DNA
catgtggttagcaggtctgggggtttttcaactggaactgaaactggcaagaggttgtcattagcgttttttgaatggtt

SEQ ID NO: 41730 - DNA, 80 bp, synthetic construct
  misc_feature 1..80: note = Artificially Synthesized Probe
  source 1..80: mol_type = other DNA
ttttccagagtgcattccatgtcttctcagcctgcacaaggtggttgttagataggcagaacaggcaggagcctcccatt

SEQ ID NO: 41731 - DNA, 80 bp, synthetic construct
  misc_feature 1..80: note = Artificially Synthesized Probe
  source 1..80: mol_type = other DNA
agcagaatccactggggtctgtcgggaagcagagccccacaggtgccttgtggagagaatgaacagagggccttaaacag

SEQ ID NO: 41732 - DNA, 80 bp, synthetic construct
  misc_feature 1..80: note = Artificially Synthesized Probe
  source 1..80: mol_type = other DNA
aggctaaattgtaagccacaccaagaatccttatatgaaattaggatggggaaggagacaggaaaaagagacacaggtct

SEQ ID NO: 41733 - DNA, 80 bp, synthetic construct
  misc_feature 1..80: note = Artificially Synthesized Probe
  source 1..80: mol_type = other DNA
caaaccaggcctgaggttttcctctgtggccagctgtccagtcataaagaactcctacaggcatggggtggcttgcaggg

SEQ ID NO: 41734 - DNA, 80 bp, synthetic construct
  misc_feature 1..80: note = Artificially Synthesized Probe
  source 1..80: mol_type = other DNA
ttgcagatgttctggagggcctgccgtgctgctgctggctggaccttggtgaacagaataggcaggtctcttgtcctctg

SEQ ID NO: 41735 - DNA, 80 bp, synthetic construct
  misc_feature 1..80: note = Artificially Synthesized Probe
  source 1..80: mol_type = other DNA
gtgtgagtgtgagtgtgtgtgtgagtctgttttgcgtgtccataaagcaagacctgaggctgggtattaatagagaaggg

SEQ ID NO: 41736 - DNA, 80 bp, synthetic construct
  misc_feature 1..80: note = Artificially Synthesized Probe
  source 1..80: mol_type = other DNA
gccggcttctccgtcccttcttcctgctgcagaactcctctatgatgaagaagaccttgaaatgcatccgctggtcgctg

SEQ ID NO: 41737 - DNA, 80 bp, synthetic construct
  misc_feature 1..80: note = Artificially Synthesized Probe
  source 1..80: mol_type = other DNA
atctggggtccaggagtctgcctttgggtggccacagtgctccaccaccccactgcccagacacctgtctgccctggggt

SEQ ID NO: 41738 - DNA, 80 bp, synthetic construct
  misc_feature 1..80: note = Artificially Synthesized Probe
  source 1..80: mol_type = other DNA
tctgcatgtctgtgtgcatgtttgtttgtatgtgtaggtgtatggtgtttatgtctgtgtgcgtgtttgtatgtgtgcat

SEQ ID NO: 41739 - DNA, 80 bp, synthetic construct
  misc_feature 1..80: note = Artificially Synthesized Probe
  source 1..80: mol_type = other DNA
tggtctcccagcagccgtgatggtgctgtcccattttacagatgtttctcaggtcggggctgtgggctggctcgggtcca

SEQ ID NO: 41740 - DNA, 80 bp, synthetic construct
  misc_feature 1..80: note = Artificially Synthesized Probe
  source 1..80: mol_type = other DNA
ctgcccccacagttcatacaaccagtctggtttgcgggaaccacccatcttccagctggggggtctggaggcttggtagg

SEQ ID NO: 41741 - DNA, 80 bp, synthetic construct
  misc_feature 1..80: note = Artificially Synthesized Probe
  source 1..80: mol_type = other DNA
gtttctgaggcctttttttcgataagtggagaagaaagggtgacattttccttcctccccttcttttcctatctcttctt

SEQ ID NO: 41742 - DNA, 80 bp, synthetic construct
  misc_feature 1..80: note = Artificially Synthesized Probe
  source 1..80: mol_type = other DNA
ggaccgtctgagtcctaggaagtgaccgcactgggagcaggaccgtctgagtcctaggaagttaccgcactgggagcagg

SEQ ID NO: 41743 - DNA, 80 bp, synthetic construct
  misc_feature 1..80: note = Artificially Synthesized Probe
  source 1..80: mol_type = other DNA
ggaggtttcagctctgtgtgcagagggacatccttgataggtagggagttccccgtcctggagggtgtgcgagcagaggc

SEQ ID NO: 41744 - DNA, 80 bp, synthetic construct
  misc_feature 1..80: note = Artificially Synthesized Probe
  source 1..80: mol_type = other DNA
aacagcttcaccccagggatcccccatgccacggcttcaccccagggatcccccaccaacagcttcaccccagggatccc

SEQ ID NO: 41745 - DNA, 80 bp, synthetic construct
  misc_feature 1..80: note = Artificially Synthesized Probe
  source 1..80: mol_type = other DNA
ctcaggcgtgagtgctgggcatggaccctcttctccctgagggtgggtgctgtggctgctgggcaggggccgggtgttca

SEQ ID NO: 41746 - DNA, 80 bp, synthetic construct
  misc_feature 1..80: note = Artificially Synthesized Probe
  source 1..80: mol_type = other DNA
ttctgctctcagctgaggagtttcagaagctcttcaacgagcttgacagaagtgtggttaaagaggtaactggggccaca

SEQ ID NO: 41747 - DNA, 80 bp, synthetic construct
  misc_feature 1..80: note = Artificially Synthesized Probe
  source 1..80: mol_type = other DNA
ttttctcgtttgctcaggctcctgggacggcaccacagactggggcgggggcagggctgaagcagcagacatttgttatc

SEQ ID NO: 41748 - DNA, 80 bp, synthetic construct
  misc_feature 1..80: note = Artificially Synthesized Probe
  source 1..80: mol_type = other DNA
ataaattttaccaggtgcagatttcacagaaactgtggagatggtcctcagataacagaaagttaagaagcaccattcta

SEQ ID NO: 41749 - DNA, 80 bp, synthetic construct
  misc_feature 1..80: note = Artificially Synthesized Probe
  source 1..80: mol_type = other DNA
tagcacctaggaatgcagtgggagtttggggaataagggtaagaaaacctgtacatgctccgtacagatgctttttccct

SEQ ID NO: 41750 - DNA, 80 bp, synthetic construct
  misc_feature 1..80: note = Artificially Synthesized Probe
  source 1..80: mol_type = other DNA
ctggtttccacattgaggactgtgggaagctgggaaattttcaggaggtcaggctgtggctgtaggtcccctggggacta

SEQ ID NO: 41751 - DNA, 80 bp, synthetic construct
  misc_feature 1..80: note = Artificially Synthesized Probe
  source 1..80: mol_type = other DNA
tggatattttggtgttttccttccagacttttccctgtgtaatttcaggcatttgtagttacctggggaaacagttgctt

SEQ ID NO: 41752 - DNA, 80 bp, synthetic construct
  misc_feature 1..80: note = Artificially Synthesized Probe
  source 1..80: mol_type = other DNA
cagttgcttctatttctctttgggtgttacaaagaccactgagatgaacacctttgtgtataaagcgatttctgtgtctg

SEQ ID NO: 41753 - DNA, 80 bp, synthetic construct
  misc_feature 1..80: note = Artificially Synthesized Probe
  source 1..80: mol_type = other DNA
gcatgccacacttggtgtgtgtgtcacaagcagccacatgagagtgacgtttgctgtagccagcaggcccctcggcacat

SEQ ID NO: 41754 - DNA, 80 bp, synthetic construct
  misc_feature 1..80: note = Artificially Synthesized Probe
  source 1..80: mol_type = other DNA
ctttagcctccttaaaatagtggagctaggggcccggggctcactgaactctgaggctgtgtgctgattcaccactgccc

SEQ ID NO: 41755 - DNA, 80 bp, synthetic construct
  misc_feature 1..80: note = Artificially Synthesized Probe
  source 1..80: mol_type = other DNA
gctggagcaagtctcagtgtctggaacctccatgccctcccgtgtggacagagggtctgtgtagaaggagggctgcagcc

SEQ ID NO: 41756 - DNA, 80 bp, synthetic construct
  misc_feature 1..80: note = Artificially Synthesized Probe
  source 1..80: mol_type = other DNA
acgtgttcacacataattacagccatacaagcacaatcatacatatatacaatacagccaagcacacgtgatctcacaca

SEQ ID NO: 41757 - DNA, 80 bp, synthetic construct
  misc_feature 1..80: note = Artificially Synthesized Probe
  source 1..80: mol_type = other DNA
atgtgaacttgtgcccgtgtaagatgcatgatcgtgtgtgcacacatccacagtaaggcctcagtgctatccacaggttc

SEQ ID NO: 41758 - DNA, 80 bp, synthetic construct
  misc_feature 1..80: note = Artificially Synthesized Probe
  source 1..80: mol_type = other DNA
gtgtagaggcgtgtgggggtggctgtgggtccaggtgtgtgtgtgtgggttggtggtcattggcctgccccatcttgcct

SEQ ID NO: 41759 - DNA, 80 bp, synthetic construct
  misc_feature 1..80: note = Artificially Synthesized Probe
  source 1..80: mol_type = other DNA
cagctgtgcctcgcgcctctggaaatagacgctgggaagagaatcttgcctcaggtgctgtctgcccagccccctaactt

SEQ ID NO: 41760 - DNA, 80 bp, synthetic construct
  misc_feature 1..80: note = Artificially Synthesized Probe
  source 1..80: mol_type = other DNA
gtcactctgtggaacttgatggtggtgaacaactggcaggtgtttctggatgcatatcggcgctactcaggcccgtgagt

SEQ ID NO: 41761 - DNA, 80 bp, synthetic construct
  misc_feature 1..80: note = Artificially Synthesized Probe
  source 1..80: mol_type = other DNA
attttgtattgtggtggctggtgtcgtctgtcatctgggtcaacctgtttctggccctgattctggaggtatcagagatc

SEQ ID NO: 41762 - DNA, 80 bp, synthetic construct
  misc_feature 1..80: note = Artificially Synthesized Probe
  source 1..80: mol_type = other DNA
atccttcagggtccattggatcctgttggatgtaaacaagggacctgaggaaaacgcacccatctcttctcctggcagct

SEQ ID NO: 41763 - DNA, 80 bp, synthetic construct
  misc_feature 1..80: note = Artificially Synthesized Probe
  source 1..80: mol_type = other DNA
atttcatggcttgtatgagtgtgactgggtgtgtttctttagggttctgattgccagttattttcatcaataagtcttgc

SEQ ID NO: 41764 - DNA, 80 bp, synthetic construct
  misc_feature 1..80: note = Artificially Synthesized Probe
  source 1..80: mol_type = other DNA
taacaataacaatatggaaaccaccgcaaacttggagaaaagttgtaagcacagtaaagagaagcttccttctgagtcac

SEQ ID NO: 41765 - DNA, 80 bp, synthetic construct
  misc_feature 1..80: note = Artificially Synthesized Probe
  source 1..80: mol_type = other DNA
gctgccaaaaccttcagcaaacagctttccaaatggaagttgtcactgtcagggcctttacaatcagcaacagcaaaatc

SEQ ID NO: 41766 - DNA, 80 bp, synthetic construct
  misc_feature 1..80: note = Artificially Synthesized Probe
  source 1..80: mol_type = other DNA
tcactgcacctggcctgccctgagattatatactgaaatcaattgcttttctagacactagcaataagcttataaattat

SEQ ID NO: 41767 - DNA, 80 bp, synthetic construct
  misc_feature 1..80: note = Artificially Synthesized Probe
  source 1..80: mol_type = other DNA
aaaaacaagagcaaaaatcctttctgtgggagaatccagttgagggaattgctgctccattattcctgacttacattgct

SEQ ID NO: 41768 - DNA, 80 bp, synthetic construct
  misc_feature 1..80: note = Artificially Synthesized Probe
  source 1..80: mol_type = other DNA
gtgtcatttcttgcaattgaataggacataccttggtaattctctgctagatacactcacaagagaaactgctgcccgtg

SEQ ID NO: 41769 - DNA, 80 bp, synthetic construct
  misc_feature 1..80: note = Artificially Synthesized Probe
  source 1..80: mol_type = other DNA
ctcatggtcatggtattaaccttaggaacatgcacatgttacatgtgttcttttgcatgtgccaaatattaaaaggagag

SEQ ID NO: 41770 - DNA, 80 bp, synthetic construct
  misc_feature 1..80: note = Artificially Synthesized Probe
  source 1..80: mol_type = other DNA
aagctgagacctatgcagtgccgggcaggtgtctgccagcgcccctcagacatgagcgtgcgtcagaactccctggggaa

SEQ ID NO: 41771 - DNA, 80 bp, synthetic construct
  misc_feature 1..80: note = Artificially Synthesized Probe
  source 1..80: mol_type = other DNA
atttgtagatatgcatgccatcgaatgccagaaagaacagaaggtagcttacatctggtgctgtagcatgcagtcagtgt

SEQ ID NO: 41772 - DNA, 80 bp, synthetic construct
  misc_feature 1..80: note = Artificially Synthesized Probe
  source 1..80: mol_type = other DNA
gcaggtgacacttggcctagagtctgaggcttggcctgggtcctgcctgctactggctgtggtcttggacttgaaatcgg

SEQ ID NO: 41773 - DNA, 80 bp, synthetic construct
  misc_feature 1..80: note = Artificially Synthesized Probe
  source 1..80: mol_type = other DNA
actcctctgctgtgcccttcattggcccagcacgtcaggcactggggatcctggtcctcccatgggtccttaagccagtc

SEQ ID NO: 41774 - DNA, 80 bp, synthetic construct
  misc_feature 1..80: note = Artificially Synthesized Probe
  source 1..80: mol_type = other DNA
gtagccagttgggtgtcagggcctctaggcatgtactgaatccgtggccctttcttcgaataatgtctttattttattct

SEQ ID NO: 41775 - DNA, 80 bp, synthetic construct
  misc_feature 1..80: note = Artificially Synthesized Probe
  source 1..80: mol_type = other DNA
tcagcggtagcttagctctgattttaagctcagctgtacctcagctctggtgtagtttagtggcttagccgtggcaggga

SEQ ID NO: 41776 - DNA, 80 bp, synthetic construct
  misc_feature 1..80: note = Artificially Synthesized Probe
  source 1..80: mol_type = other DNA
tggtgatttgttgtggcagacaggagaacagtgcagcccccgaattgtgctcattagcagccacttcccggtgccaagct

SEQ ID NO: 41777 - DNA, 80 bp, synthetic construct
  misc_feature 1..80: note = Artificially Synthesized Probe
  source 1..80: mol_type = other DNA
acctacaagatgccctcagagcataatttgcatacaggtgagggcctgcgacagaggccctgcatgtccagaggcatggc

SEQ ID NO: 41778 - DNA, 80 bp, synthetic construct
  misc_feature 1..80: note = Artificially Synthesized Probe
  source 1..80: mol_type = other DNA
actgagaggggaaactgaggcccagacatccaggcaattgctgaggtcaccccaatgtctgttccttgagtgcagcagtg

SEQ ID NO: 41779 - DNA, 80 bp, synthetic construct
  misc_feature 1..80: note = Artificially Synthesized Probe
  source 1..80: mol_type = other DNA
ccgagcacaggggtggcgagttctggcatttattattattatttgttccagaacaaaattcaactcccatcctcagttgg

SEQ ID NO: 41780 - DNA, 80 bp, synthetic construct
  misc_feature 1..80: note = Artificially Synthesized Probe
  source 1..80: mol_type = other DNA
aatgggcccgttatttctctgcactgcactggcatcagttgctggttctctgtagcgaatggagatgacagagtcggttt

SEQ ID NO: 41781 - DNA, 80 bp, synthetic construct
  misc_feature 1..80: note = Artificially Synthesized Probe
  source 1..80: mol_type = other DNA
ccatggatcttttgtaacgtgagccattgccccgtgggttggggtttccatggattggtggggcacaccgcacctgtggt

SEQ ID NO: 41782 - DNA, 80 bp, synthetic construct
  misc_feature 1..80: note = Artificially Synthesized Probe
  source 1..80: mol_type = other DNA
tcctgctctcagagttcagaagggacttaatctatttttgtcctgttcagccaggatgattatctttaataaggccatct

SEQ ID NO: 41783 - DNA, 80 bp, synthetic construct
  misc_feature 1..80: note = Artificially Synthesized Probe
  source 1..80: mol_type = other DNA
tttctaaattggaaagtccctgattttttgggagctggagaactttaaagtgggaagggcctgtggagaacttagcatca

SEQ ID NO: 41784 - DNA, 80 bp, synthetic construct
  misc_feature 1..80: note = Artificially Synthesized Probe
  source 1..80: mol_type = other DNA
atagtggtccctgatggtccacctgtttctccactgctgacttctctgctctgtctttgcacccgcagcagctattggat

SEQ ID NO: 41785 - DNA, 80 bp, synthetic construct
  misc_feature 1..80: note = Artificially Synthesized Probe
  source 1..80: mol_type = other DNA
attgaaaatgcgaactatgtctggtttacctttgaatcccagcatctgtgaagagccggctcctgctattattattgtta

SEQ ID NO: 41786 - DNA, 80 bp, synthetic construct
  misc_feature 1..80: note = Artificially Synthesized Probe
  source 1..80: mol_type = other DNA
gagacaactgatcactttaatcaggcactgcaaactctttagatcaagagctgggagatgtggccattttcttgctcact

SEQ ID NO: 41787 - DNA, 80 bp, synthetic construct
  misc_feature 1..80: note = Artificially Synthesized Probe
  source 1..80: mol_type = other DNA
ccatccattcatccatccatccatccaaacatccatctattcatccaaacatccatccatccatctaaacatccatctat

SEQ ID NO: 41788 - DNA, 80 bp, synthetic construct
  misc_feature 1..80: note = Artificially Synthesized Probe
  source 1..80: mol_type = other DNA
gggcctgcgcagctctcctctgtctgttaatggtacagtctgttcagacctttggaacattcctcagcttttatttaatg

SEQ ID NO: 41789 - DNA, 80 bp, synthetic construct
  misc_feature 1..80: note = Artificially Synthesized Probe
  source 1..80: mol_type = other DNA
agactgtgggcgtctgccctaaaaaggcaccaatgatttgattctgacattcctactttggtgtgtttcccccagaataa

SEQ ID NO: 41790 - DNA, 80 bp, synthetic construct
  misc_feature 1..80: note = Artificially Synthesized Probe
  source 1..80: mol_type = other DNA
gcagagcttccagaaatgtcgttctcttgcagaatcaaaggcaattgcaaggcattaaaaaccaatgtgccttcagtgtg

SEQ ID NO: 41791 - DNA, 80 bp, synthetic construct
  misc_feature 1..80: note = Artificially Synthesized Probe
  source 1..80: mol_type = other DNA
aacaagttacctaacctttctgagcccggttttttcatgttagcaaacaggctgtgcgacagcccttctggaaggtcagg

SEQ ID NO: 41792 - DNA, 80 bp, synthetic construct
  misc_feature 1..80: note = Artificially Synthesized Probe
  source 1..80: mol_type = other DNA
tattgatgtacgttatcttatttaatcagagcctgccaaacatcccagtctgccccaaagtcccgggcgacacctgtcgc

SEQ ID NO: 41793 - DNA, 80 bp, synthetic construct
  misc_feature 1..80: note = Artificially Synthesized Probe
  source 1..80: mol_type = other DNA
agctgggagatttcttgcggctgccgtaacaaaagatcacaaactggtgggggctggaaaccacagaaatgccttctctc

SEQ ID NO: 41794 - DNA, 80 bp, synthetic construct
  misc_feature 1..80: note = Artificially Synthesized Probe
  source 1..80: mol_type = other DNA
ggtatagccctaggtagtgttactttgaaggctgagagagagaatgtgaaagcgttttggagcctgaagaatacagaagg

SEQ ID NO: 41795 - DNA, 80 bp, synthetic construct
  misc_feature 1..80: note = Artificially Synthesized Probe
  source 1..80: mol_type = other DNA
agtccagtgcctagactgtactagtactataggcacatgccaccacctctggctgatttttgtattttttgtagagattg

SEQ ID NO: 41796 - DNA, 80 bp, synthetic construct
  misc_feature 1..80: note = Artificially Synthesized Probe
  source 1..80: mol_type = other DNA
aacaaaccacctcaaaacattgtggcttaaaacagcgagggttcattatttctccaggttctgtgagttggctaagcaag

SEQ ID NO: 41797 - DNA, 80 bp, synthetic construct
  misc_feature 1..80: note = Artificially Synthesized Probe
  source 1..80: mol_type = other DNA
ataccaaccatgggtttcttgggagagatactctggaggaacctctggagttagggcactagggacaaactggctttgaa

SEQ ID NO: 41798 - DNA, 80 bp, synthetic construct
  misc_feature 1..80: note = Artificially Synthesized Probe
  source 1..80: mol_type = other DNA
aagtgtgacatactccaaggtgttataatttaaggaactttcttatgtgagccacacatatacttgcccacatgcacaca

SEQ ID NO: 41799 - DNA, 80 bp, synthetic construct
  misc_feature 1..80: note = Artificially Synthesized Probe
  source 1..80: mol_type = other DNA
agtcaagcccctgcccatctgtctcagcccgatccccagggactctggggaggcccctggtggagtgtactgctccgagg

SEQ ID NO: 41800 - DNA, 80 bp, synthetic construct
  misc_feature 1..80: note = Artificially Synthesized Probe
  source 1..80: mol_type = other DNA
gaatactcttcaaatctacaaggtttcatttatatccagggacagccatgcccaggcagcgcttggccaagagagagcac

SEQ ID NO: 41801 - DNA, 80 bp, synthetic construct
  misc_feature 1..80: note = Artificially Synthesized Probe
  source 1..80: mol_type = other DNA
acggtagcccagggtcacatagtggggcccagctagagtttgaacccagaactttgtgaccttgcaccctgcaagcattc

SEQ ID NO: 41802 - DNA, 80 bp, synthetic construct
  misc_feature 1..80: note = Artificially Synthesized Probe
  source 1..80: mol_type = other DNA
cagtaagtggaagtggatcatcataaaggtttccatccttgtcatcttacatcaaagaggctaagtcagaggaggagggg

SEQ ID NO: 41803 - DNA, 80 bp, synthetic construct
  misc_feature 1..80: note = Artificially Synthesized Probe
  source 1..80: mol_type = other DNA
ttgagagcacctcttacttcagacactacatgttgaatgtcctacctagacaataaagttgtgttgaacaagaggctatt

SEQ ID NO: 41804 - DNA, 80 bp, synthetic construct
  misc_feature 1..80: note = Artificially Synthesized Probe
  source 1..80: mol_type = other DNA
tggacattcgagggctgatcagatggggcttcaggcttctcaaaagggaggcaggcaggggaggggctttgcctcagagc

SEQ ID NO: 41805 - DNA, 80 bp, synthetic construct
  misc_feature 1..80: note = Artificially Synthesized Probe
  source 1..80: mol_type = other DNA
ccgagcccaggtgccaacgtgcttggtaactggcttgctatttgaaaaattaaagcggtgtcaagaatatctaacctttg

SEQ ID NO: 41806 - DNA, 80 bp, synthetic construct
  misc_feature 1..80: note = Artificially Synthesized Probe
  source 1..80: mol_type = other DNA
caaaaagctcaaaatggattaaagacttattatgaaactactagaagaaagcataggggaaacacttcaggctattggtc

SEQ ID NO: 41807 - DNA, 80 bp, synthetic construct
  misc_feature 1..80: note = Artificially Synthesized Probe
  source 1..80: mol_type = other DNA
tatgacccagcaattctgctagtgggtatgtatacaaagactaggagatcagcatgtgaaagagacatctgcacccacat

SEQ ID NO: 41808 - DNA, 80 bp, synthetic construct
  misc_feature 1..80: note = Artificially Synthesized Probe
  source 1..80: mol_type = other DNA
ttcccacaattctgagccacctgtggtaattggttatggcgggcccaggaaataatacaatgtataatattgatctgtct

SEQ ID NO: 41809 - DNA, 80 bp, synthetic construct
  misc_feature 1..80: note = Artificially Synthesized Probe
  source 1..80: mol_type = other DNA
cggttctactgcctgctcagggatcggggcacctcataaataaggatatctgtcttctggagttttccatccatgtttca

SEQ ID NO: 41810 - DNA, 80 bp, synthetic construct
  misc_feature 1..80: note = Artificially Synthesized Probe
  source 1..80: mol_type = other DNA
ttgcattttctgactcccataactgttggtcagaaccgaggtggggtgtagaggtcctgaagccagcccagaaaggtctg

SEQ ID NO: 41811 - DNA, 80 bp, synthetic construct
  misc_feature 1..80: note = Artificially Synthesized Probe
  source 1..80: mol_type = other DNA
ttttttgggtggagtgttattgagccataattagcacacagcaaaagtggctctttttacagtttggtgacttctgacaa

SEQ ID NO: 41812 - DNA, 80 bp, synthetic construct
  misc_feature 1..80: note = Artificially Synthesized Probe
  source 1..80: mol_type = other DNA
cttggtattgtcagttttaaattttagccactttagtaagtgtatggtggttttaatttgcctttcctgactctctaatg

SEQ ID NO: 41813 - DNA, 80 bp, synthetic construct
  misc_feature 1..80: note = Artificially Synthesized Probe
  source 1..80: mol_type = other DNA
gaaatccacccccatgacccagtcacctcccaccaggcctttctttttctttttctttcttttttttttttttttttttt

SEQ ID NO: 41814 - DNA, 80 bp, synthetic construct
  misc_feature 1..80: note = Artificially Synthesized Probe
  source 1..80: mol_type = other DNA
gtggtcccataaatgtttgtggcacaagtgaatgaacttggaaccatccatctagtggaaattgtaaattataacaaaac

SEQ ID NO: 41815 - DNA, 80 bp, synthetic construct
  misc_feature 1..80: note = Artificially Synthesized Probe
  source 1..80: mol_type = other DNA
gaagatgtgtcttgcttctcctttgccttctgccatgattgtgaggcctccctggccatgtgcaactgtgagtcaattaa

SEQ ID NO: 41816 - DNA, 80 bp, synthetic construct
  misc_feature 1..80: note = Artificially Synthesized Probe
  source 1..80: mol_type = other DNA
accgtccacctggtaggatctctgtgttttccttttcctttttactgaacgggctgaatttttgagcaagttaatctttt

SEQ ID NO: 41817 - DNA, 80 bp, synthetic construct
  misc_feature 1..80: note = Artificially Synthesized Probe
  source 1..80: mol_type = other DNA
tcaattagaagtttatgttgctaagattgagaatgtgcccggaaaaaacaaacacaagtcccagtgggacctgtgacccg

SEQ ID NO: 41818 - DNA, 80 bp, synthetic construct
  misc_feature 1..80: note = Artificially Synthesized Probe
  source 1..80: mol_type = other DNA
tcctttccagtgaaagctcccacatgcgttgatgtgaactggattgaccagacattttgctcttttaaacaatggtttag

SEQ ID NO: 41819 - DNA, 80 bp, synthetic construct
  misc_feature 1..80: note = Artificially Synthesized Probe
  source 1..80: mol_type = other DNA
atggcccttttgtgattgctgtcacagttttatgaaaggcattttcaaaagttagcctcgaggagattctggagatttct

SEQ ID NO: 41820 - DNA, 80 bp, synthetic construct
  misc_feature 1..80: note = Artificially Synthesized Probe
  source 1..80: mol_type = other DNA
tactgttctcatagcagttaataagtctcacaagatctgatggttttatcagggaaaccccgtttgcttggttctcattg

SEQ ID NO: 41821 - DNA, 80 bp, synthetic construct
  misc_feature 1..80: note = Artificially Synthesized Probe
  source 1..80: mol_type = other DNA
tggatcagttccagcacttggcattgactttggaaatctgaaatgtctgtgataagccaaataaacttagatttgtttta

SEQ ID NO: 41822 - DNA, 80 bp, synthetic construct
  misc_feature 1..80: note = Artificially Synthesized Probe
  source 1..80: mol_type = other DNA
atccaagtactgagagtcgagagttttaagagcagtatagttcacagtttggtgataaatggcattaaatgtctcattac

SEQ ID NO: 41823 - DNA, 80 bp, synthetic construct
  misc_feature 1..80: note = Artificially Synthesized Probe
  source 1..80: mol_type = other DNA
cctcaggaagcttccaatcctgggggaaggcagagggtaagcaggtgtctcacatggtgggggcaggagcaagagaaaac

SEQ ID NO: 41824 - DNA, 80 bp, synthetic construct
  misc_feature 1..80: note = Artificially Synthesized Probe
  source 1..80: mol_type = other DNA
gagctccatgactcacgggtgctgcagccttaatgtcctcatttgcaaaattagaataacaattgtctctacctcatgaa

SEQ ID NO: 41825 - DNA, 80 bp, synthetic construct
  misc_feature 1..80: note = Artificially Synthesized Probe
  source 1..80: mol_type = other DNA
ggaaagaaccttgctaggattgtcacaaccaggaattccaggaagacctggactacatagatatgtaaagaaaaagatgc

SEQ ID NO: 41826 - DNA, 80 bp, synthetic construct
  misc_feature 1..80: note = Artificially Synthesized Probe
  source 1..80: mol_type = other DNA
tgtttgagttctttgtagattctgggtatcagccctttgtcagatgagtagattgcaaaaattttctcccattctgtagg

SEQ ID NO: 41827 - DNA, 80 bp, synthetic construct
  misc_feature 1..80: note = Artificially Synthesized Probe
  source 1..80: mol_type = other DNA
acattgattttgtatcctgagactttgctgaagttgcttatcagcttaaggagattttgggctgagatgatggggttttc

SEQ ID NO: 41828 - DNA, 80 bp, synthetic construct
  misc_feature 1..80: note = Artificially Synthesized Probe
  source 1..80: mol_type = other DNA
tagtctctgatggtcgtttgtatttctgtgggatcggtggtgatatcccctttatcattttttattgcatctatttgatt

SEQ ID NO: 41829 - DNA, 80 bp, synthetic construct
  misc_feature 1..80: note = Artificially Synthesized Probe
  source 1..80: mol_type = other DNA
ttctttgtctcttttgatctttgttggtttaaagtctgttttatctgagactaggattgcaacccctgcctttttttgtt

SEQ ID NO: 41830 - DNA, 80 bp, synthetic construct
  misc_feature 1..80: note = Artificially Synthesized Probe
  source 1..80: mol_type = other DNA
ttggagaagtttgattatctgaagctttcttctctcagctcgtcaaagtcattctttgtccagctttgttccattgctgg

SEQ ID NO: 41831 - DNA, 80 bp, synthetic construct
  misc_feature 1..80: note = Artificially Synthesized Probe
  source 1..80: mol_type = other DNA
gggaatttccctgacctcttgcacttcccaggtgaggtgatgcctcgccctgctttggctcacactcggtgtgctgcatg

SEQ ID NO: 41832 - DNA, 80 bp, synthetic construct
  misc_feature 1..80: note = Artificially Synthesized Probe
  source 1..80: mol_type = other DNA
aacagtcttggtgggtggaaatgtctgcaaatgttagtccttaccatggtgataatgatttgctcagtagggcttcctcc

SEQ ID NO: 41833 - DNA, 80 bp, synthetic construct
  misc_feature 1..80: note = Artificially Synthesized Probe
  source 1..80: mol_type = other DNA
tggttttctgtccttgtatagtttgctgagaatgatggtttcgagcttcatccatgtccctgcaaaggacatgaactcat

SEQ ID NO: 41834 - DNA, 80 bp, synthetic construct
  misc_feature 1..80: note = Artificially Synthesized Probe
  source 1..80: mol_type = other DNA
ttgcttaggattgttttggcaatgtgggctcttttttgcttccatatgaactttaaagtagttttttccaattctgtgaa

SEQ ID NO: 41835 - DNA, 80 bp, synthetic construct
  misc_feature 1..80: note = Artificially Synthesized Probe
  source 1..80: mol_type = other DNA
ttattgagagtttttagcaggaaaggctgctgaatttcatcaaaggccttttctgcatctattgagataatcctgtggtt

SEQ ID NO: 41836 - DNA, 80 bp, synthetic construct
  misc_feature 1..80: note = Artificially Synthesized Probe
  source 1..80: mol_type = other DNA
cccctcttccaaccctggggattgtaattcaacgtgaggtttgggtggggacacagattcaagccatatcagtgactttg

SEQ ID NO: 41837 - DNA, 80 bp, synthetic construct
  misc_feature 1..80: note = Artificially Synthesized Probe
  source 1..80: mol_type = other DNA
cctgtaatataagaaccttgtaatggaacgtataaaggggaaattgactctcagacagtttcattttgacgaccatggag

SEQ ID NO: 41838 - DNA, 80 bp, synthetic construct
  misc_feature 1..80: note = Artificially Synthesized Probe
  source 1..80: mol_type = other DNA
actacttttcctccattgcctgtcagtgcaaaacaaacacaaacaaagcatcagccacttctctttctctaaatctccag

SEQ ID NO: 41839 - DNA, 80 bp, synthetic construct
  misc_feature 1..80: note = Artificially Synthesized Probe
  source 1..80: mol_type = other DNA
cgtgaaaacagactaatacaatgaggaagtaagaagaggctgaattcctacataatccagatgcttcctgtgagctgcca

SEQ ID NO: 41840 - DNA, 80 bp, synthetic construct
  misc_feature 1..80: note = Artificially Synthesized Probe
  source 1..80: mol_type = other DNA
gctatgtgtgggcaaatgaatccatccttgctccgttgtgcctcaggaaaacatgcaattttaaaataaagccgcagaag

SEQ ID NO: 41841 - DNA, 80 bp, synthetic construct
  misc_feature 1..80: note = Artificially Synthesized Probe
  source 1..80: mol_type = other DNA
agagccgtgctccagtgcagagggactcccatctcaaagtttgtagctccagctgcagctcaaattcaggctggaaagac

SEQ ID NO: 41842 - DNA, 80 bp, synthetic construct
  misc_feature 1..80: note = Artificially Synthesized Probe
  source 1..80: mol_type = other DNA
cccactgcaaacaaggctggccaccacccggcaccagctcagaagcaaagaccactccatgggttctcagacctcaccca

SEQ ID NO: 41843 - DNA, 80 bp, synthetic construct
  misc_feature 1..80: note = Artificially Synthesized Probe
  source 1..80: mol_type = other DNA
gaagccatggagagaacaagtcctatgtatgctgtgttttcctacacacatacccacggtgaagcttagtttataaatta

SEQ ID NO: 41844 - DNA, 80 bp, synthetic construct
  misc_feature 1..80: note = Artificially Synthesized Probe
  source 1..80: mol_type = other DNA
taaagagctgagatcgcaccattgcactccagcctgggtaaagagctgagattgcaccactgcactccagcctggataaa

SEQ ID NO: 41845 - DNA, 80 bp, synthetic construct
  misc_feature 1..80: note = Artificially Synthesized Probe
  source 1..80: mol_type = other DNA
caggggagttggtggtttctgattagtaaagtcgctagttctctttttctgtttacaatgggctttggtttgctcactca

SEQ ID NO: 41846 - DNA, 80 bp, synthetic construct
  misc_feature 1..80: note = Artificially Synthesized Probe
  source 1..80: mol_type = other DNA
ctccatcctgtggattccgtatgcagccaagtgggccccaagcctctccacctaaccaatgcctcagatgcaagtggccc

SEQ ID NO: 41847 - DNA, 80 bp, synthetic construct
  misc_feature 1..80: note = Artificially Synthesized Probe
  source 1..80: mol_type = other DNA
agatatatttgcattttttcctttgttttatgaattgcctgctcatgacctaagccctttttttaagtggtgtatttaag

SEQ ID NO: 41848 - DNA, 80 bp, synthetic construct
  misc_feature 1..80: note = Artificially Synthesized Probe
  source 1..80: mol_type = other DNA
ctcaactttcagttttggatatatgcaatcttgcgtgaacttatgcatggagcggagaatctaatgtacccatagctatg

SEQ ID NO: 41849 - DNA, 80 bp, synthetic construct
  misc_feature 1..80: note = Artificially Synthesized Probe
  source 1..80: mol_type = other DNA
atccattcatccatccactcattcattcatccatccttccatttatccatccatccatccatcatccacccacccattaa

SEQ ID NO: 41850 - DNA, 80 bp, synthetic construct
  misc_feature 1..80: note = Artificially Synthesized Probe
  source 1..80: mol_type = other DNA
gacctttgtggttttttctacagtcaccacaatacaatcccaaatcagctagaaagaaaacacgcatcctttcaaactgt

SEQ ID NO: 41851 - DNA, 80 bp, synthetic construct
  misc_feature 1..80: note = Artificially Synthesized Probe
  source 1..80: mol_type = other DNA
ggaccagatcattatttgaaagatcatcagcctggagggaacatgagtatgtatttagtcctcaccacactgtttcataa

SEQ ID NO: 41852 - DNA, 80 bp, synthetic construct
  misc_feature 1..80: note = Artificially Synthesized Probe
  source 1..80: mol_type = other DNA
acgtaatttggaaactactagaaggctcttgaatggaaccagggattcttcacacttcatagagcagctgaaagggactt

SEQ ID NO: 41853 - DNA, 80 bp, synthetic construct
  misc_feature 1..80: note = Artificially Synthesized Probe
  source 1..80: mol_type = other DNA
aaaaacttttgatgttcaatcggcctactcagacattcctcaccaaatagaagtaggaaggacacggggaaatgcaactt

SEQ ID NO: 41854 - DNA, 80 bp, synthetic construct
  misc_feature 1..80: note = Artificially Synthesized Probe
  source 1..80: mol_type = other DNA
caagccaggcaccaaaagacaaacacctcatgatctccctcctatatggaatctaaaagtgtcgagctcatggaagcaga

SEQ ID NO: 41855 - DNA, 80 bp, synthetic construct
  misc_feature 1..80: note = Artificially Synthesized Probe
  source 1..80: mol_type = other DNA
ccatgtgtgagttggcttcttactgtatcatgcgttccttgcagatttctgtcttctttggagctccttgatttttctca

SEQ ID NO: 41856 - DNA, 80 bp, synthetic construct
  misc_feature 1..80: note = Artificially Synthesized Probe
  source 1..80: mol_type = other DNA
ctttacattttaatgctttcttcttcaaactcttccttgagtatttgccccacgctgtctcattttaccacccacctttc

SEQ ID NO: 41857 - DNA, 80 bp, synthetic construct
  misc_feature 1..80: note = Artificially Synthesized Probe
  source 1..80: mol_type = other DNA
ggctgaatcctcagaggctctgtgcttttcttctgttcccaacagtaactcatcattgagccatggaatcctctttaatg

SEQ ID NO: 41858 - DNA, 80 bp, synthetic construct
  misc_feature 1..80: note = Artificially Synthesized Probe
  source 1..80: mol_type = other DNA
agtctggatttagttggtttattctttctccctgtataatttttcccctcttcttcctaactcattcggccagaggctgg

SEQ ID NO: 41859 - DNA, 80 bp, synthetic construct
  misc_feature 1..80: note = Artificially Synthesized Probe
  source 1..80: mol_type = other DNA
cacatagatgcattaggggaaacagatttttttcattcccaataattattcccagtactgttacactatttgacattacc

SEQ ID NO: 41860 - DNA, 80 bp, synthetic construct
  misc_feature 1..80: note = Artificially Synthesized Probe
  source 1..80: mol_type = other DNA
atcaagctctttgcttttcttttaataaaataaataaagttccaaaccctgagaacaagtttcactggagtgaatactgc

SEQ ID NO: 41861 - DNA, 80 bp, synthetic construct
  misc_feature 1..80: note = Artificially Synthesized Probe
  source 1..80: mol_type = other DNA
tgggggccacattttaccccaatttttctgcatctcaggacttcacaaccatattaggagtggcagtgaagtccataaca

SEQ ID NO: 41862 - DNA, 80 bp, synthetic construct
  misc_feature 1..80: note = Artificially Synthesized Probe
  source 1..80: mol_type = other DNA
gggcacatgcttctgcctgctccaatatttcaaagctgacttattgtttgcttgaaatgtgaatgagttactgaaaaaat

SEQ ID NO: 41863 - DNA, 80 bp, synthetic construct
  misc_feature 1..80: note = Artificially Synthesized Probe
  source 1..80: mol_type = other DNA
agtgccgtgactcacatctgcaatcccaacacagtatcaggccagtgccgtgactcacatctgcaatcccaacacagtat

SEQ ID NO: 41864 - DNA, 80 bp, synthetic construct
  misc_feature 1..80: note = Artificially Synthesized Probe
  source 1..80: mol_type = other DNA
accattgttgtctaagagaagtttgctatcaatccctcctctaacgccctgaacagaatgttcttcaccagaaccctgtg

SEQ ID NO: 41865 - DNA, 80 bp, synthetic construct
  misc_feature 1..80: note = Artificially Synthesized Probe
  source 1..80: mol_type = other DNA
tctgccctgcctctattgcctaaaagtagaacataaatccgcaaaagtgaccatttccctctccaacagaaaggacagaa

SEQ ID NO: 41866 - DNA, 80 bp, synthetic construct
  misc_feature 1..80: note = Artificially Synthesized Probe
  source 1..80: mol_type = other DNA
acaggtggtgtgagtgacagagctaattttttttctggtacctaaagatcagcaggatcaaaatttcataaaggaagagc

SEQ ID NO: 41867 - DNA, 80 bp, synthetic construct
  misc_feature 1..80: note = Artificially Synthesized Probe
  source 1..80: mol_type = other DNA
cacagaatacaaaatgtgagttgagttgcctgggcagttgcagtgggtttagaaggaaataagaggaaaataaaggaaaa

SEQ ID NO: 41868 - DNA, 80 bp, synthetic construct
  misc_feature 1..80: note = Artificially Synthesized Probe
  source 1..80: mol_type = other DNA
gttaccgcgtccggaacttcacggtgatacccagaaatgggatcttaacctcttacacattccaggtgctaaaacaaata

SEQ ID NO: 41869 - DNA, 80 bp, synthetic construct
  misc_feature 1..80: note = Artificially Synthesized Probe
  source 1..80: mol_type = other DNA
acctgaagcttgccattgttaatttacttccccagtgtcatgtgcaagcagcagacagaactggtatttaatctccaatc

SEQ ID NO: 41870 - DNA, 80 bp, synthetic construct
  misc_feature 1..80: note = Artificially Synthesized Probe
  source 1..80: mol_type = other DNA
ggggagcttccaggtcataagtagatgtaacagttttctgactgacaatcagctgaaggaattattatcagtaggacgga

SEQ ID NO: 41871 - DNA, 80 bp, synthetic construct
  misc_feature 1..80: note = Artificially Synthesized Probe
  source 1..80: mol_type = other DNA
tcatttcatatcctcaaaagtctgagctccttctatgcagtcattgttctagatgccaggatacagagatgcattagatc

SEQ ID NO: 41872 - DNA, 80 bp, synthetic construct
  misc_feature 1..80: note = Artificially Synthesized Probe
  source 1..80: mol_type = other DNA
cgggatacagaggtgagtttgatcatttcatatactcagaagtccatgctccttctataaagtcattgttctagatgcca

SEQ ID NO: 41873 - DNA, 80 bp, synthetic construct
  misc_feature 1..80: note = Artificially Synthesized Probe
  source 1..80: mol_type = other DNA
aataatatccaaaactagagtgtgcctaaatcatttcttccactcactcatggacagtggtatggccctaggcttttgga

SEQ ID NO: 41874 - DNA, 80 bp, synthetic construct
  misc_feature 1..80: note = Artificially Synthesized Probe
  source 1..80: mol_type = other DNA
tagcattcagggaccatttccaatattcacaatttgctgtgagttccagggtgtattcagcctggaatatctgcatctag

SEQ ID NO: 41875 - DNA, 80 bp, synthetic construct
  misc_feature 1..80: note = Artificially Synthesized Probe
  source 1..80: mol_type = other DNA
ctcagatagattttagataaatgtctccaaggaaagcacgcgttttggggagggttgctatcctgtctaccatggcgagt

SEQ ID NO: 41876 - DNA, 80 bp, synthetic construct
  misc_feature 1..80: note = Artificially Synthesized Probe
  source 1..80: mol_type = other DNA
agagcttggctgcattgtgtccaagtcgtgggcatctatggaaatttgaacttacgagtgatgacttggagtatctggca

SEQ ID NO: 41877 - DNA, 80 bp, synthetic construct
  misc_feature 1..80: note = Artificially Synthesized Probe
  source 1..80: mol_type = other DNA
tttaagatttaatgaattgcctgctgagtgtagactggtgtggggcctatcaagccttcctgttggctgatttctccctt

SEQ ID NO: 41878 - DNA, 80 bp, synthetic construct
  misc_feature 1..80: note = Artificially Synthesized Probe
  source 1..80: mol_type = other DNA
tagtattcaatattattaactacggaaggaatacaagtgcttagcacagcacctaaaactttattttcactcagtaagca

SEQ ID NO: 41879 - DNA, 80 bp, synthetic construct
  misc_feature 1..80: note = Artificially Synthesized Probe
  source 1..80: mol_type = other DNA
gaaaccttggattggttccgtgtagctgctgctgctgagaatctaaaaaggccaggtgcttgtgtgggagaccaggagta

SEQ ID NO: 41880 - DNA, 80 bp, synthetic construct
  misc_feature 1..80: note = Artificially Synthesized Probe
  source 1..80: mol_type = other DNA
tacaagcgatgaaaagaaaagtcaacctgaaaactcaacaatcacagcatccaacgggtaatgtgtgcccctctccccac

SEQ ID NO: 41881 - DNA, 80 bp, synthetic construct
  misc_feature 1..80: note = Artificially Synthesized Probe
  source 1..80: mol_type = other DNA
accactttgaaatgtcctttctttcaaaccatatggctgaacgatgtttctaagaactctcggtccactgtcctgttacg

SEQ ID NO: 41882 - DNA, 80 bp, synthetic construct
  misc_feature 1..80: note = Artificially Synthesized Probe
  source 1..80: mol_type = other DNA
ctcagctttttgaagaatgcgtaatcctccactaactgaatgcacactgcagtccaaggtttacttaactgttcccatag

SEQ ID NO: 41883 - DNA, 80 bp, synthetic construct
  misc_feature 1..80: note = Artificially Synthesized Probe
  source 1..80: mol_type = other DNA
atggtttcctatttttcacagatgctttatcagaagatctgctgagcatcattgcaaacatgtctggatgtctcccttac

SEQ ID NO: 41884 - DNA, 80 bp, synthetic construct
  misc_feature 1..80: note = Artificially Synthesized Probe
  source 1..80: mol_type = other DNA
gaatggttttctgaagaaggtgatatgcgagtgagccaaatcttaaaggatgagtgggcatttctcaaatggtccacagg

SEQ ID NO: 41885 - DNA, 80 bp, synthetic construct
  misc_feature 1..80: note = Artificially Synthesized Probe
  source 1..80: mol_type = other DNA
gctggaagaggcagcctgtgctgaacacagagatgggtcagggccacacaggaggctgctgtccacccctcctgccctga

SEQ ID NO: 41886 - DNA, 80 bp, synthetic construct
  misc_feature 1..80: note = Artificially Synthesized Probe
  source 1..80: mol_type = other DNA
gtggagggtgaattacagtgcttggggaatccctgagcaaagccagtaggcctcacacatgatctaaatcttgcttgatt

SEQ ID NO: 41887 - DNA, 80 bp, synthetic construct
  misc_feature 1..80: note = Artificially Synthesized Probe
  source 1..80: mol_type = other DNA
caagctcaaatttactcatgcccaattgtgataaaaatagcccaaacaagcagacttttagccacttggagcctacctct

SEQ ID NO: 41888 - DNA, 80 bp, synthetic construct
  misc_feature 1..80: note = Artificially Synthesized Probe
  source 1..80: mol_type = other DNA
atgtcacaagtggatggcagggtttctaaggcttgtttttcctttgttggtattttcctaattgcctaggacgtatcaca

SEQ ID NO: 41889 - DNA, 80 bp, synthetic construct
  misc_feature 1..80: note = Artificially Synthesized Probe
  source 1..80: mol_type = other DNA
tgttttggtagtatcatttaaaggatttccagcttctttctgtttctgttaccaacctgtggagacctcttcatcatcct

SEQ ID NO: 41890 - DNA, 80 bp, synthetic construct
  misc_feature 1..80: note = Artificially Synthesized Probe
  source 1..80: mol_type = other DNA
ggagggctactgaagaaatgaagcctctcagctactggaaatagatgcaatcagggtggaattactcacggacagtcctc

SEQ ID NO: 41891 - DNA, 80 bp, synthetic construct
  misc_feature 1..80: note = Artificially Synthesized Probe
  source 1..80: mol_type = other DNA
gatctgatgaactactgcagtaaaccactgtgtctcacagtgttggaagggaatggagccagctccttcttgttgtatgg

SEQ ID NO: 41892 - DNA, 80 bp, synthetic construct
  misc_feature 1..80: note = Artificially Synthesized Probe
  source 1..80: mol_type = other DNA
tccagtcattgctgcaggaggtaccatgttggaagggaacggggcaggctcgttcttgtttgtatgatccagtcactgct

SEQ ID NO: 41893 - DNA, 80 bp, synthetic construct
  misc_feature 1..80: note = Artificially Synthesized Probe
  source 1..80: mol_type = other DNA
accatgttggaaggaaatggggcaggctccttcctgtttgtatgatccagtcactgctgcaggagtcaccatgttggaag

SEQ ID NO: 41894 - DNA, 80 bp, synthetic construct
  misc_feature 1..80: note = Artificially Synthesized Probe
  source 1..80: mol_type = other DNA
tctacccagaggtgaccattgctttgatcttcatcaccatagttagttttccctgacctggcttttataggaaggaagtt

SEQ ID NO: 41895 - DNA, 80 bp, synthetic construct
  misc_feature 1..80: note = Artificially Synthesized Probe
  source 1..80: mol_type = other DNA
ttacatgtcacatttagatctgtgacccatctcattttatgttttctgcaacatacgaggtggcaaccatgaggggtgtg

SEQ ID NO: 41896 - DNA, 80 bp, synthetic construct
  misc_feature 1..80: note = Artificially Synthesized Probe
  source 1..80: mol_type = other DNA
aacaattagccacatttctctttaagcctactgagaaaaagacacagggacccagcagacatcagaacaccttgttgggg

SEQ ID NO: 41897 - DNA, 80 bp, synthetic construct
  misc_feature 1..80: note = Artificially Synthesized Probe
  source 1..80: mol_type = other DNA
accacagaatgtcataaacagcccagtgtgtttttccacgagagcagtggtcggaggctcctgcaggtaaatggctggag

SEQ ID NO: 41898 - DNA, 80 bp, synthetic construct
  misc_feature 1..80: note = Artificially Synthesized Probe
  source 1..80: mol_type = other DNA
aaaaagctgagctcatgccgattatagaaagcatttgcatcttttgaagggttttcctctgagggttcaaatgtccctca

SEQ ID NO: 41899 - DNA, 80 bp, synthetic construct
  misc_feature 1..80: note = Artificially Synthesized Probe
  source 1..80: mol_type = other DNA
tgctgccattaattcagatctaagaaaggaacagtgtggtacaatagatttccactgggaaaggatctttccaacaggag

SEQ ID NO: 41900 - DNA, 80 bp, synthetic construct
  misc_feature 1..80: note = Artificially Synthesized Probe
  source 1..80: mol_type = other DNA
actccttgtattttttaagtgtgtacatatcagatacatgggaggattttcaaagcctgcatcctagtcacgcctgactc

SEQ ID NO: 41901 - DNA, 80 bp, synthetic construct
  misc_feature 1..80: note = Artificially Synthesized Probe
  source 1..80: mol_type = other DNA
caaggggccatgcaccctggttacccgagatccttcctatttatgccttctgtcccaggaaattattaataactaatagt

SEQ ID NO: 41902 - DNA, 80 bp, synthetic construct
  misc_feature 1..80: note = Artificially Synthesized Probe
  source 1..80: mol_type = other DNA
cttcatggtgctttgattaaaggatgttttatgccacaggatttcaaatgatctctttgtttggagtaccagaagtttct

SEQ ID NO: 41903 - DNA, 80 bp, synthetic construct
  misc_feature 1..80: note = Artificially Synthesized Probe
  source 1..80: mol_type = other DNA
actgctttactcccagaggtgaatttatttgctggacactcatagcctagtagaatctactggtctatttggtcaaaaaa

SEQ ID NO: 41904 - DNA, 80 bp, synthetic construct
  misc_feature 1..80: note = Artificially Synthesized Probe
  source 1..80: mol_type = other DNA
atgttgtgcgagaggcatttttctgcctccacagatgacccactgaccctcaaagattcatatccagtccacatgcctaa

SEQ ID NO: 41905 - DNA, 80 bp, synthetic construct
  misc_feature 1..80: note = Artificially Synthesized Probe
  source 1..80: mol_type = other DNA
ggctgactgccagatgacttgtgagaaccaaaacccatgttttcccatacaagtaagttttagaaaacgtttctatgttt

SEQ ID NO: 41906 - DNA, 80 bp, synthetic construct
  misc_feature 1..80: note = Artificially Synthesized Probe
  source 1..80: mol_type = other DNA
gatgtgtacatagcatgtatgatactgtgggtacacatatatatatagcatgtatgatagtgtgtgggcacatgtgtaca

SEQ ID NO: 41907 - DNA, 80 bp, synthetic construct
  misc_feature 1..80: note = Artificially Synthesized Probe
  source 1..80: mol_type = other DNA
gtatatggcatataagacagtgtgtgggaacgtgtttatatggcatatgagattgtgggcacgtgcgtttatggcacata

SEQ ID NO: 41908 - DNA, 80 bp, synthetic construct
  misc_feature 1..80: note = Artificially Synthesized Probe
  source 1..80: mol_type = other DNA
ccatgtgcacacctgatagatccaggggtaagattgctaagtcacggtggaggtgcctgtggaattttgataaatattgc

SEQ ID NO: 41909 - DNA, 80 bp, synthetic construct
  misc_feature 1..80: note = Artificially Synthesized Probe
  source 1..80: mol_type = other DNA
tgctgcatgtacctctaacctgggattctttctttctttttttttttttttgagctggagtcttgcccaggctggagtgt

SEQ ID NO: 41910 - DNA, 80 bp, synthetic construct
  misc_feature 1..80: note = Artificially Synthesized Probe
  source 1..80: mol_type = other DNA
gctcccctggagctgcactgagagaatcactgtgcgtgggggctccacctttggggatctcctggagtttcgctggtttg

SEQ ID NO: 41911 - DNA, 80 bp, synthetic construct
  misc_feature 1..80: note = Artificially Synthesized Probe
  source 1..80: mol_type = other DNA
tccctactggatctcaagggaaaggcgggtgctctcatcagccatgtcactctccagtgtcctcctttctttttagggct

SEQ ID NO: 41912 - DNA, 80 bp, synthetic construct
  misc_feature 1..80: note = Artificially Synthesized Probe
  source 1..80: mol_type = other DNA
tgagggtattgagaaatcatttgcatccatgcattgctgtgcaaaagtaaactggtgaatacattcgggacacgatgtga

SEQ ID NO: 41913 - DNA, 80 bp, synthetic construct
  misc_feature 1..80: note = Artificially Synthesized Probe
  source 1..80: mol_type = other DNA
tgtatcgacaacctcaaagctatgcaagcctcctcatgcacaccaatgtgtatctctaggtacatattacaaagtggagt

SEQ ID NO: 41914 - DNA, 80 bp, synthetic construct
  misc_feature 1..80: note = Artificially Synthesized Probe
  source 1..80: mol_type = other DNA
taccagcagggtagaagtgttgttcccttttcaccatatccacaccaacatctattattcgttgattttttttattatgg

SEQ ID NO: 41915 - DNA, 80 bp, synthetic construct
  misc_feature 1..80: note = Artificially Synthesized Probe
  source 1..80: mol_type = other DNA
gtatagaagagctactgatttctgtacattaattttgtatccagaaatttttctgaattatttgatcagttctaggagct

SEQ ID NO: 41916 - DNA, 80 bp, synthetic construct
  misc_feature 1..80: note = Artificially Synthesized Probe
  source 1..80: mol_type = other DNA
ttctctatcttgtggagtagtgtcaataggattggtaacaattcttctttgaatgtctggcagaattcttctgtgaatct

SEQ ID NO: 41917 - DNA, 80 bp, synthetic construct
  misc_feature 1..80: note = Artificially Synthesized Probe
  source 1..80: mol_type = other DNA
actgtgcctggccccgaagaattttttaatttccatcttgatttcatttttaacccagtgtcattcaggagcagattatt

SEQ ID NO: 41918 - DNA, 80 bp, synthetic construct
  misc_feature 1..80: note = Artificially Synthesized Probe
  source 1..80: mol_type = other DNA
tttttactttataggttacctggtgtttttgtttcacagctcttaagattcttttcatcatcttaactttaggtaacctg

SEQ ID NO: 41919 - DNA, 80 bp, synthetic construct
  misc_feature 1..80: note = Artificially Synthesized Probe
  source 1..80: mol_type = other DNA
tacaggtgcctctggcagccctcctgaaggacccctgtgaggcaaggtggaaatggcttcctaggggacccagagatccc

SEQ ID NO: 41920 - DNA, 80 bp, synthetic construct
  misc_feature 1..80: note = Artificially Synthesized Probe
  source 1..80: mol_type = other DNA
agctgcccggaatacttagatccaaataactttggacgtgagctttgttagatctttgctgcaaacaggtttcaaaggcg

SEQ ID NO: 41921 - DNA, 80 bp, synthetic construct
  misc_feature 1..80: note = Artificially Synthesized Probe
  source 1..80: mol_type = other DNA
ctcaccctcttatgctgaaagcgagttgagttacgttcactgtgtcgtgctttttgacaagtgtagttaagactatgtat

SEQ ID NO: 41922 - DNA, 80 bp, synthetic construct
  misc_feature 1..80: note = Artificially Synthesized Probe
  source 1..80: mol_type = other DNA
cttcccatgatctgaatgttcatagcatacccatcccattctttgagtgctcatagtatgttcttcctgtgatctgagtg

SEQ ID NO: 41923 - DNA, 80 bp, synthetic construct
  misc_feature 1..80: note = Artificially Synthesized Probe
  source 1..80: mol_type = other DNA
tgaagcactttcatattttataaggccaggtctacttatgtgttgatggcttctaggctcagttttggttcaggaatctc

SEQ ID NO: 41924 - DNA, 80 bp, synthetic construct
  misc_feature 1..80: note = Artificially Synthesized Probe
  source 1..80: mol_type = other DNA
ctttaccagctcttattttattttctagactttggtctaactgagatagtactaagtaccaacaatgatagcgggagttt

SEQ ID NO: 41925 - DNA, 80 bp, synthetic construct
  misc_feature 1..80: note = Artificially Synthesized Probe
  source 1..80: mol_type = other DNA
atttcttcttggaaaagctgtggttatttctattttgttagggagtcatcgatctgttcttcattttccaatgtgctgcc

SEQ ID NO: 41926 - DNA, 80 bp, synthetic construct
  misc_feature 1..80: note = Artificially Synthesized Probe
  source 1..80: mol_type = other DNA
ttcttttttttgagacggaatctcgctctgtcacccaggcaggagtacagtggcccaatctcggctcactgcaagctccg

SEQ ID NO: 41927 - DNA, 80 bp, synthetic construct
  misc_feature 1..80: note = Artificially Synthesized Probe
  source 1..80: mol_type = other DNA
tgcagcccacagagctcgactcttcccaggaaacctgtaaatctggaaaaaatattttagatctccatgttacagatgag

SEQ ID NO: 41928 - DNA, 80 bp, synthetic construct
  misc_feature 1..80: note = Artificially Synthesized Probe
  source 1..80: mol_type = other DNA
cctagagaggcagctgcggaactggaccagtgccgaagggctgctccgcgtccacgcgcgcctccgggactccggccgcg

SEQ ID NO: 41929 - DNA, 80 bp, synthetic construct
  misc_feature 1..80: note = Artificially Synthesized Probe
  source 1..80: mol_type = other DNA
tcttgaatggagagtcaagttggccttttattaattgtgtgatggagaaaagcacttatgcacctggaaatgcggtccct

SEQ ID NO: 41930 - DNA, 80 bp, synthetic construct
  misc_feature 1..80: note = Artificially Synthesized Probe
  source 1..80: mol_type = other DNA
aatttgccaggttgcttcataaatatatgtagagtttgtgaatgaagtagaatctcaaaaataattctggaagtcctgcc

SEQ ID NO: 41931 - DNA, 80 bp, synthetic construct
  misc_feature 1..80: note = Artificially Synthesized Probe
  source 1..80: mol_type = other DNA
gtcctctttggtgctttttgcaaaaacctttgatacattaaaataataagttgtgtttaacgtgtcgatagagccactgc

SEQ ID NO: 41932 - DNA, 80 bp, synthetic construct
  misc_feature 1..80: note = Artificially Synthesized Probe
  source 1..80: mol_type = other DNA
tcttgctcttcaatcccagaaaaccctagctgctttaggtgtgtcataagacaagaactcacaatcagttgctcactttg

SEQ ID NO: 41933 - DNA, 80 bp, synthetic construct
  misc_feature 1..80: note = Artificially Synthesized Probe
  source 1..80: mol_type = other DNA
aggtgactttgaaagcagtcgagagtcagaaagttcagaggagcctgtgccaggggctacgcggctgtttcccaccgtcg

SEQ ID NO: 41934 - DNA, 80 bp, synthetic construct
  misc_feature 1..80: note = Artificially Synthesized Probe
  source 1..80: mol_type = other DNA
acctggctaatttttaattttttaaatttttttgtagaaacagagtctgactgtgttgcccaggctggtcttgatcttgg

SEQ ID NO: 41935 - DNA, 80 bp, synthetic construct
  misc_feature 1..80: note = Artificially Synthesized Probe
  source 1..80: mol_type = other DNA
aacttgacactgatttttctgtctgaaagaaacactgttaaacctgaaagtagaatcttggtacataattctcctgggac

SEQ ID NO: 41936 - DNA, 80 bp, synthetic construct
  misc_feature 1..80: note = Artificially Synthesized Probe
  source 1..80: mol_type = other DNA
ggctatgactccaccgccaaccccactgtgtccaacgtgttctccacagccgccttccgcttcggccatgccacgatcca

SEQ ID NO: 41937 - DNA, 80 bp, synthetic construct
  misc_feature 1..80: note = Artificially Synthesized Probe
  source 1..80: mol_type = other DNA
ttgatttgcatttctctgatggccagtgatgatgaacattttttcatgtgtctgttggctgcataaatgtcttctttggg

SEQ ID NO: 41938 - DNA, 80 bp, synthetic construct
  misc_feature 1..80: note = Artificially Synthesized Probe
  source 1..80: mol_type = other DNA
tttttctttatattcctttcccagtagtctgtaagtccttctgggagcttctaacctgtctcaaaagttgaccggctcca

SEQ ID NO: 41939 - DNA, 80 bp, synthetic construct
  misc_feature 1..80: note = Artificially Synthesized Probe
  source 1..80: mol_type = other DNA
gccaagcatggtagcgggcgcctgtagtcccaattactcgggaggctgaggcaggagcatggcgtgaacccgggaggcag

SEQ ID NO: 41940 - DNA, 80 bp, synthetic construct
  misc_feature 1..80: note = Artificially Synthesized Probe
  source 1..80: mol_type = other DNA
caactccctgacctcaggcccacctcagccttccctcctctgggctcctaggtggttcggttgtctggtcaacctgcagc

SEQ ID NO: 41941 - DNA, 80 bp, synthetic construct
  misc_feature 1..80: note = Artificially Synthesized Probe
  source 1..80: mol_type = other DNA
gcacagcccgacttgtgttcagaagacctgggattggacctgaggagttcaattttggatgaatctcttaattaacctgt

SEQ ID NO: 41942 - DNA, 80 bp, synthetic construct
  misc_feature 1..80: note = Artificially Synthesized Probe
  source 1..80: mol_type = other DNA
acctggcagaggcttcattagatctgatcagttcgatctgaggataaatcagataaaagagaaacgctcatgtctcagca

SEQ ID NO: 41943 - DNA, 80 bp, synthetic construct
  misc_feature 1..80: note = Artificially Synthesized Probe
  source 1..80: mol_type = other DNA
ctatataaaccaagtgtctacaggttacctattcctggagctgagaaatttgtggggtatgtttgggatggtctaggcta

SEQ ID NO: 41944 - DNA, 80 bp, synthetic construct
  misc_feature 1..80: note = Artificially Synthesized Probe
  source 1..80: mol_type = other DNA
tggtctaaacatgagacaccaagaggcccaaccttctgtcccatgaaagcctcactgtccctggggggaaccagcccagt

SEQ ID NO: 41945 - DNA, 80 bp, synthetic construct
  misc_feature 1..80: note = Artificially Synthesized Probe
  source 1..80: mol_type = other DNA
aactaagtgcaggctgggcaataacaggaatgcacttagatgtcacggactcagcattcttgctgtctccagctccttta

SEQ ID NO: 41946 - DNA, 80 bp, synthetic construct
  misc_feature 1..80: note = Artificially Synthesized Probe
  source 1..80: mol_type = other DNA
cttctttaacctagaacagtgtttttataacaatgaagcaactacgaagcacgtagcacttagaatgggagctagcactg

SEQ ID NO: 41947 - DNA, 80 bp, synthetic construct
  misc_feature 1..80: note = Artificially Synthesized Probe
  source 1..80: mol_type = other DNA
gtgggacttcatttcttcacattgcaatttttctgattaatcatggcctggaggaagaagctgaaggtagagagactgtg

SEQ ID NO: 41948 - DNA, 80 bp, synthetic construct
  misc_feature 1..80: note = Artificially Synthesized Probe
  source 1..80: mol_type = other DNA
gctgattttaacttttcactgtttagaaaatagtgtcaacgccctgccttacaccctcagggcagctcctggggcggggc

SEQ ID NO: 41949 - DNA, 80 bp, synthetic construct
  misc_feature 1..80: note = Artificially Synthesized Probe
  source 1..80: mol_type = other DNA
tggacaagtgtggcttcctggcggtaatttgagagcaggatggggaggcacctttcaggccgcaaggcaagacagccgtg

SEQ ID NO: 41950 - DNA, 80 bp, synthetic construct
  misc_feature 1..80: note = Artificially Synthesized Probe
  source 1..80: mol_type = other DNA
attttgaaagtccaaaatgtttctccttgaagggttgcagtggtcaactgcttccagaccctcagtcataaagggagagg

SEQ ID NO: 41951 - DNA, 80 bp, synthetic construct
  misc_feature 1..80: note = Artificially Synthesized Probe
  source 1..80: mol_type = other DNA
taagtatgaatgaccccaaagtgctactcacaggcatcttcaaggtgcaaataaaagatgggtgagaccttagagtggat

SEQ ID NO: 41952 - DNA, 80 bp, synthetic construct
  misc_feature 1..80: note = Artificially Synthesized Probe
  source 1..80: mol_type = other DNA
tcaaatgtgaaatgaggacaggaataaggcattgatttaaattagttataaatgcacagtacaaagagcggggtgcaggc

SEQ ID NO: 41953 - DNA, 80 bp, synthetic construct
  misc_feature 1..80: note = Artificially Synthesized Probe
  source 1..80: mol_type = other DNA
tgcggctacagaaaggaaggctacgggcttaactgaatatttgatacagaaaaacaaatagtattcgctgctctcttctc

SEQ ID NO: 41954 - DNA, 80 bp, synthetic construct
  misc_feature 1..80: note = Artificially Synthesized Probe
  source 1..80: mol_type = other DNA
gtcgggtgcatcctgctccaatgtgcagtgccctcataggaagcagagacaagacacagacgggaccctgtgaagaccca

SEQ ID NO: 41955 - DNA, 80 bp, synthetic construct
  misc_feature 1..80: note = Artificially Synthesized Probe
  source 1..80: mol_type = other DNA
agctgctgctagatagagacaattaacagccgatagtcaatagctccaatcccttgaaatttcttgacccttttcttata

SEQ ID NO: 41956 - DNA, 80 bp, synthetic construct
  misc_feature 1..80: note = Artificially Synthesized Probe
  source 1..80: mol_type = other DNA
tatttgaacaaaatgtacagcaggttatctggaaacatacgcctaggggatgagatactaggttgtaggattcttgtgca

SEQ ID NO: 41957 - DNA, 80 bp, synthetic construct
  misc_feature 1..80: note = Artificially Synthesized Probe
  source 1..80: mol_type = other DNA
catttgcgagtttttgtaaaatgaagaaaagtgtgttcaagttaggcaactgtcaatcaccatcttgattgggaagggcg

SEQ ID NO: 41958 - DNA, 80 bp, synthetic construct
  misc_feature 1..80: note = Artificially Synthesized Probe
  source 1..80: mol_type = other DNA
cgaagggcacaagggccagggtcaaggccagttatcaagcaagtgagtctgaaaagagatggccaggacgcggctgcccg

SEQ ID NO: 41959 - DNA, 80 bp, synthetic construct
  misc_feature 1..80: note = Artificially Synthesized Probe
  source 1..80: mol_type = other DNA
tcctaatttaacatttggtatatctcctaatgctatccttcccccctcccccaaccccacaacaggccctggtgtgtgat

SEQ ID NO: 41960 - DNA, 80 bp, synthetic construct
  misc_feature 1..80: note = Artificially Synthesized Probe
  source 1..80: mol_type = other DNA
tgtagatatgtggcattattactgagggctctgttctgttccattggtctatatctctgttttggtaccagtaccatgct

SEQ ID NO: 41961 - DNA, 80 bp, synthetic construct
  misc_feature 1..80: note = Artificially Synthesized Probe
  source 1..80: mol_type = other DNA
ttttgtctttgattctgtttatatgctggattacatttatcgatttgcgtatgttgaaccagccttgcatcccagggatg

SEQ ID NO: 41962 - DNA, 80 bp, synthetic construct
  misc_feature 1..80: note = Artificially Synthesized Probe
  source 1..80: mol_type = other DNA
gtatctctatttccttcagttctgctctgatcttcgttatttcttgccttctgctagcttttgaatgtgtttgctcttgc

SEQ ID NO: 41963 - DNA, 80 bp, synthetic construct
  misc_feature 1..80: note = Artificially Synthesized Probe
  source 1..80: mol_type = other DNA
tgttttttctccatatgaaatagtatcctctcttcctttcaaaccagagcactctcaatcatggaaaattagaaacagca

SEQ ID NO: 41964 - DNA, 80 bp, synthetic construct
  misc_feature 1..80: note = Artificially Synthesized Probe
  source 1..80: mol_type = other DNA
ccctacataagtttagatgtagatacacatatagattcaggcgctgatataattatagagggagctctgcttttgcagtg

SEQ ID NO: 41965 - DNA, 80 bp, synthetic construct
  misc_feature 1..80: note = Artificially Synthesized Probe
  source 1..80: mol_type = other DNA
ctttagaagaagtgtatacaacaggagcatgagttgcataaactaatttccaatattttgtttcaaacgtcttgttttag

SEQ ID NO: 41966 - DNA, 80 bp, synthetic construct
  misc_feature 1..80: note = Artificially Synthesized Probe
  source 1..80: mol_type = other DNA
cagcacccttatgattatactgctgcccctgcaaaaatgaccatggaaaattaggatgctgggcatgacctttctgcatc

SEQ ID NO: 41967 - DNA, 80 bp, synthetic construct
  misc_feature 1..80: note = Artificially Synthesized Probe
  source 1..80: mol_type = other DNA
ctgatcgtattagacggagtctccagagaaacaggagcaatcagagatgcagatgtatgtatagaaatagttatagatta

SEQ ID NO: 41968 - DNA, 80 bp, synthetic construct
  misc_feature 1..80: note = Artificially Synthesized Probe
  source 1..80: mol_type = other DNA
aaattgaaaatgccaagaaacaaaaatttggagcaaagaataaaggaaagtttctgctgtgcggcatctggccttccccc

SEQ ID NO: 41969 - DNA, 80 bp, synthetic construct
  misc_feature 1..80: note = Artificially Synthesized Probe
  source 1..80: mol_type = other DNA
aggacaggatcgttttggagaaacagtcaggatgcgcatttagggtttattcattcattcttgtatccaacaaatgcttg

SEQ ID NO: 41970 - DNA, 80 bp, synthetic construct
  misc_feature 1..80: note = Artificially Synthesized Probe
  source 1..80: mol_type = other DNA
ctgctggctctccccacacacgtcacattcggatctggacttagtggtctaaatggcttttctgggcagataaatgtccc

SEQ ID NO: 41971 - DNA, 80 bp, synthetic construct
  misc_feature 1..80: note = Artificially Synthesized Probe
  source 1..80: mol_type = other DNA
attcttcagttttattccctcccttgagggcagaaattggaagttgaactttcatgttaaaaatggcgctgctgttgaaa

SEQ ID NO: 41972 - DNA, 80 bp, synthetic construct
  misc_feature 1..80: note = Artificially Synthesized Probe
  source 1..80: mol_type = other DNA
ccaataatagaaactcaacattctagcaaacttcatttttctagcaacttctcagtacactgaggaacatctgccccttg

SEQ ID NO: 41973 - DNA, 80 bp, synthetic construct
  misc_feature 1..80: note = Artificially Synthesized Probe
  source 1..80: mol_type = other DNA
gagaagattatattccacatgccagggctgttgtttcaaataatcattaccagtgaagattgaataatcacctactctct

SEQ ID NO: 41974 - DNA, 80 bp, synthetic construct
  misc_feature 1..80: note = Artificially Synthesized Probe
  source 1..80: mol_type = other DNA
gcctcgcctccctgtgtcttattcttcagcttttaaaaacatgatcttatttccaccttagggcattattgtgcggtgag

SEQ ID NO: 41975 - DNA, 80 bp, synthetic construct
  misc_feature 1..80: note = Artificially Synthesized Probe
  source 1..80: mol_type = other DNA
tcaagaaagtttgaatcatttgcattaatttccagcaaatccatgggaaagccgcgaggtccttccctaggatgcagcca

SEQ ID NO: 41976 - DNA, 80 bp, synthetic construct
  misc_feature 1..80: note = Artificially Synthesized Probe
  source 1..80: mol_type = other DNA
gcctcccaccccagtccccccgtgggttcagctaaacgcattgtccagtttccagcccagaacccaagcctggctgccag

SEQ ID NO: 41977 - DNA, 80 bp, synthetic construct
  misc_feature 1..80: note = Artificially Synthesized Probe
  source 1..80: mol_type = other DNA
cccgacactgtgtgcaacctccccaaatcctgcgcactctgtgcaacctccccaaatccgccccaccctgtgcatcctcc

SEQ ID NO: 41978 - DNA, 80 bp, synthetic construct
  misc_feature 1..80: note = Artificially Synthesized Probe
  source 1..80: mol_type = other DNA
cttcccaaatcccccccattgtgggcaacaacaccaaatcctgccactgtgtgcaacctcaccaaattccccccactccg

SEQ ID NO: 41979 - DNA, 80 bp, synthetic construct
  misc_feature 1..80: note = Artificially Synthesized Probe
  source 1..80: mol_type = other DNA
caaatccacccaactctgagcaacctcgccaaatcccccaactctgtgcaacctccccctatccctcccactgtgtgcaa

SEQ ID NO: 41980 - DNA, 80 bp, synthetic construct
  misc_feature 1..80: note = Artificially Synthesized Probe
  source 1..80: mol_type = other DNA
aaatccccccactgtgcgcaacctcctcatatcccccgactgtttacaaccttcccaaatctccccactgtgagcaacct

SEQ ID NO: 41981 - DNA, 80 bp, synthetic construct
  misc_feature 1..80: note = Artificially Synthesized Probe
  source 1..80: mol_type = other DNA
ctttgtgggcaatgtcacaaaatcccccggtgtgtgcaacctccccaaatcccctccactctgtgcaacctccacaaatc

SEQ ID NO: 41982 - DNA, 80 bp, synthetic construct
  misc_feature 1..80: note = Artificially Synthesized Probe
  source 1..80: mol_type = other DNA
ccccaccactctgtgcaacctctccaagtcacccctactctctgcagactccccaaatccccccccaatctgtgcaacct

SEQ ID NO: 41983 - DNA, 80 bp, synthetic construct
  misc_feature 1..80: note = Artificially Synthesized Probe
  source 1..80: mol_type = other DNA
ctctttgcaaactccccaaatcgccccactctgtgcaaccgccccaaatctaccccagtctgtgaaacctccccaaatcc

SEQ ID NO: 41984 - DNA, 80 bp, synthetic construct
  misc_feature 1..80: note = Artificially Synthesized Probe
  source 1..80: mol_type = other DNA
caacctccccaaatccccccactgtgagcaatctccccaaatgccccaccgtgtgcaacctcctcaaatcccccaccact

SEQ ID NO: 41985 - DNA, 80 bp, synthetic construct
  misc_feature 1..80: note = Artificially Synthesized Probe
  source 1..80: mol_type = other DNA
caacatcctcaaatccccctcactctgtgcaacctccccaaatctcccccactctgtgcaacccccccaaatccccccca

SEQ ID NO: 41986 - DNA, 80 bp, synthetic construct
  misc_feature 1..80: note = Artificially Synthesized Probe
  source 1..80: mol_type = other DNA
ctgtgagcaacctccccaaatccctcccactgtgtgcagcctccccaaatcctcccgactctgtgcaacctcccaaaatt

SEQ ID NO: 41987 - DNA, 80 bp, synthetic construct
  misc_feature 1..80: note = Artificially Synthesized Probe
  source 1..80: mol_type = other DNA
ctgtacaacctccccaaacccccccaactgtgtacaacttcctcacaaccacccactctgtgcaacctccccaaatcccc

SEQ ID NO: 41988 - DNA, 80 bp, synthetic construct
  misc_feature 1..80: note = Artificially Synthesized Probe
  source 1..80: mol_type = other DNA
tcccaaatccccccactgtgtgcaacctcctcaaatccccacactgtttgcaacctcctcaaatccccccaaatgtgtgc

SEQ ID NO: 41989 - DNA, 80 bp, synthetic construct
  misc_feature 1..80: note = Artificially Synthesized Probe
  source 1..80: mol_type = other DNA
ctaccactctgtgcaacttccccaaatccgcccacactgtgcaaccgcaccaaatcgcgccactgtgtgcaacctccaca

SEQ ID NO: 41990 - DNA, 80 bp, synthetic construct
  misc_feature 1..80: note = Artificially Synthesized Probe
  source 1..80: mol_type = other DNA
gcaacctccccaaatccccgtgtgccacttccccaaatcaccacattgtgagcaacctccccaaatccccccactgcgaa

SEQ ID NO: 41991 - DNA, 80 bp, synthetic construct
  misc_feature 1..80: note = Artificially Synthesized Probe
  source 1..80: mol_type = other DNA
cccactgtgagcaacctcctgaaatccctctcactgcgtgcaacttcctcaaattcctcccccactctgagtagcctcct

SEQ ID NO: 41992 - DNA, 80 bp, synthetic construct
  misc_feature 1..80: note = Artificially Synthesized Probe
  source 1..80: mol_type = other DNA
atccccccactgtgagcaacctccccaaaccctcccattgtgtgcaaactcccaaatctccccactgtgtgcaacctcct

SEQ ID NO: 41993 - DNA, 80 bp, synthetic construct
  misc_feature 1..80: note = Artificially Synthesized Probe
  source 1..80: mol_type = other DNA
tcaaatccccgcactgtgttcaaccttctcaaataccccatactgtgtacaacctcctcaaatcccccctgcagggagtg

SEQ ID NO: 41994 - DNA, 80 bp, synthetic construct
  misc_feature 1..80: note = Artificially Synthesized Probe
  source 1..80: mol_type = other DNA
ccaggttccaccctaccccagtatagactcaccctaactaattacatctgaaaaaaaccttacttccaggcaaggtaaca

SEQ ID NO: 41995 - DNA, 80 bp, synthetic construct
  misc_feature 1..80: note = Artificially Synthesized Probe
  source 1..80: mol_type = other DNA
tggaaaagctgttttgtacttacagttaaatcccacagtatttgtgatgtatttccgggtaacttgctcttccctcctca

SEQ ID NO: 41996 - DNA, 80 bp, synthetic construct
  misc_feature 1..80: note = Artificially Synthesized Probe
  source 1..80: mol_type = other DNA
gtttatgttttacccccttaccttgtatgcagaaccccaagggaggccatatcaaaaactcacttgtgtaagtctgactt

SEQ ID NO: 41997 - DNA, 80 bp, synthetic construct
  misc_feature 1..80: note = Artificially Synthesized Probe
  source 1..80: mol_type = other DNA
tacaaattttaatttaaacaaagtcacttacttgcatacaggaggggggcattgccaacatgatcggtctcccttctgaa

SEQ ID NO: 41998 - DNA, 80 bp, synthetic construct
  misc_feature 1..80: note = Artificially Synthesized Probe
  source 1..80: mol_type = other DNA
aatgtatttacagattacacatctttattttgtgaaccctggaaacaccactcttgcaatcctcctgtctccaccttctg

SEQ ID NO: 41999 - DNA, 80 bp, synthetic construct
  misc_feature 1..80: note = Artificially Synthesized Probe
  source 1..80: mol_type = other DNA
atcctgttctgtgtgttcccaaactcttagttttgttcatgtaaaactcatgatttcataattaaaacaatattaaaata

SEQ ID NO: 42000 - DNA, 80 bp, synthetic construct
  misc_feature 1..80: note = Artificially Synthesized Probe
  source 1..80: mol_type = other DNA
tcctttaatgcatacacaaaggaactgtttttctgttacgggaaaaatgttccctaaattttagaagtgtgactctccag

SEQ ID NO: 42001 - DNA, 80 bp, synthetic construct
  misc_feature 1..80: note = Artificially Synthesized Probe
  source 1..80: mol_type = other DNA
tttttcctccccagaatatttgtcagctgaaagtcttttcctactctgcaccttcagccccagagggcagatgtgggtag

SEQ ID NO: 42002 - DNA, 80 bp, synthetic construct
  misc_feature 1..80: note = Artificially Synthesized Probe
  source 1..80: mol_type = other DNA
attcattggagtctcagaagagaagggggcttcagtagactgtcaaagttaacttgaaaaatgatcactttaaaagtgaa

SEQ ID NO: 42003 - DNA, 80 bp, synthetic construct
  misc_feature 1..80: note = Artificially Synthesized Probe
  source 1..80: mol_type = other DNA
ggccttcttaaactcagaactagttacagcttgtaaatactgaagagtgtatgtgaaatgtgcagggatgggagctgaac

SEQ ID NO: 42004 - DNA, 80 bp, synthetic construct
  misc_feature 1..80: note = Artificially Synthesized Probe
  source 1..80: mol_type = other DNA
caggttaaagtttttaaatttgcacattgaaattttctactaaacctgaaaatgtggtgcttgcgatttaaccatcacta

SEQ ID NO: 42005 - DNA, 80 bp, synthetic construct
  misc_feature 1..80: note = Artificially Synthesized Probe
  source 1..80: mol_type = other DNA
ccctgatctgatgttgacactgtgaataccttgtgtggggttcctacaccacaagcattgctgtttccctcataaattta

SEQ ID NO: 42006 - DNA, 80 bp, synthetic construct
  misc_feature 1..80: note = Artificially Synthesized Probe
  source 1..80: mol_type = other DNA
gtgattgtgtggctcactctggctgagttggttatcttttaatggaaatacaaataactgacttaaggatttttttgtcg

SEQ ID NO: 42007 - DNA, 80 bp, synthetic construct
  misc_feature 1..80: note = Artificially Synthesized Probe
  source 1..80: mol_type = other DNA
ggcctgcctggataatctgggataatcacatcttgagctcctgaacttaattaagtctacaaagacccctttcccaaata

SEQ ID NO: 42008 - DNA, 80 bp, synthetic construct
  misc_feature 1..80: note = Artificially Synthesized Probe
  source 1..80: mol_type = other DNA
tatttttaactgagatctgttagcagtttgaagcgattgtatacatttcagagttagctgggcatggtggtgcgtgcttc

SEQ ID NO: 42009 - DNA, 80 bp, synthetic construct
  misc_feature 1..80: note = Artificially Synthesized Probe
  source 1..80: mol_type = other DNA
tttcacccaactacagcaattaggtgaactgcccaatcttgcttctctatacccctcattctccccagtcttatattatt

SEQ ID NO: 42010 - DNA, 80 bp, synthetic construct
  misc_feature 1..80: note = Artificially Synthesized Probe
  source 1..80: mol_type = other DNA
aagtagctgggattacaggcacatggcaccatgcctggctaaattttttttttttttttttttttttgagatggaatttc

SEQ ID NO: 42011 - DNA, 80 bp, synthetic construct
  misc_feature 1..80: note = Artificially Synthesized Probe
  source 1..80: mol_type = other DNA
tgagttggttcactggcatctttcagaggtgatcggttggcgtgtttttgttgttcgtttagtatggctgtgaacttaat

SEQ ID NO: 42012 - DNA, 80 bp, synthetic construct
  misc_feature 1..80: note = Artificially Synthesized Probe
  source 1..80: mol_type = other DNA
gttcttattggcatttggatgtatcccataaggaatgaacagtcaaattactgtagttttaaagttacttgtcatagctc

SEQ ID NO: 42013 - DNA, 80 bp, synthetic construct
  misc_feature 1..80: note = Artificially Synthesized Probe
  source 1..80: mol_type = other DNA
ttttaaactcttgaattttaagtttgctctctgagggctagagaaggcaacttgtttccttgattagaagagttcattca

SEQ ID NO: 42014 - DNA, 80 bp, synthetic construct
  misc_feature 1..80: note = Artificially Synthesized Probe
  source 1..80: mol_type = other DNA
cggatgtttttatcgtccatttgaaagcccgttttaccaaaagccattgaagagaaatgaatgtatggcctatgggcaag

SEQ ID NO: 42015 - DNA, 80 bp, synthetic construct
  misc_feature 1..80: note = Artificially Synthesized Probe
  source 1..80: mol_type = other DNA
ggctttgcacgttcaagaattggttcagtaaaaaacagatgacagaaatgttcactctgtctgcggaaggccttttggaa

SEQ ID NO: 42016 - DNA, 80 bp, synthetic construct
  misc_feature 1..80: note = Artificially Synthesized Probe
  source 1..80: mol_type = other DNA
gtaacagaaaatccaattgcaactgcataaataatccaaaaactgattggtccatgtaatcagaccccagagctctgccc

SEQ ID NO: 42017 - DNA, 80 bp, synthetic construct
  misc_feature 1..80: note = Artificially Synthesized Probe
  source 1..80: mol_type = other DNA
tctagtgacttttctgcttaatggttgggttagttcaggaaactacaaagtctgtgttgttaatttaattacctaccgcg

SEQ ID NO: 42018 - DNA, 80 bp, synthetic construct
  misc_feature 1..80: note = Artificially Synthesized Probe
  source 1..80: mol_type = other DNA
ttgaagaccttatctgcatatggttatattctgaggtactggattttagggcttcaacaggtaggtttttgtgggacaca

SEQ ID NO: 42019 - DNA, 80 bp, synthetic construct
  misc_feature 1..80: note = Artificially Synthesized Probe
  source 1..80: mol_type = other DNA
catcacgcctggcctcttttattgatttctaagatgactaccaaataaatgaacaagataaaaagtgataagttcaaaca

SEQ ID NO: 42020 - DNA, 80 bp, synthetic construct
  misc_feature 1..80: note = Artificially Synthesized Probe
  source 1..80: mol_type = other DNA
ggggagccacctataaattttagctcctcctggcacttggttgaacagtgagttgattttggtgaagttttggtttcttt

SEQ ID NO: 42021 - DNA, 80 bp, synthetic construct
  misc_feature 1..80: note = Artificially Synthesized Probe
  source 1..80: mol_type = other DNA
tataggaatgatctgtgattcttcatggttgaccagaatgtcttaaaggcacaggcgttttgcaaaggagacacgtgctc

SEQ ID NO: 42022 - DNA, 80 bp, synthetic construct
  misc_feature 1..80: note = Artificially Synthesized Probe
  source 1..80: mol_type = other DNA
gaggaggcccagtgctgtgaaagagagaaaagagtttagcaaatggagtaatctgtaagggcattctgatagataaaggg

SEQ ID NO: 42023 - DNA, 80 bp, synthetic construct
  misc_feature 1..80: note = Artificially Synthesized Probe
  source 1..80: mol_type = other DNA
attggatggccccagggaaaagactacgtttttcagaaacaaccttaaaatttgggaaagaaatgtgttaccttagggaa

SEQ ID NO: 42024 - DNA, 80 bp, synthetic construct
  misc_feature 1..80: note = Artificially Synthesized Probe
  source 1..80: mol_type = other DNA
ggtgggcggtgaggaggaagagagggagagagagaaaagcttttcagtactctttgtattgaagtacttatctcaggtca

SEQ ID NO: 42025 - DNA, 80 bp, synthetic construct
  misc_feature 1..80: note = Artificially Synthesized Probe
  source 1..80: mol_type = other DNA
ccagaagggagttgggatactgcaggagcctagtgaatgtcaagcagaatgaagaaaacaaagcaaacagaaaatcatgc

SEQ ID NO: 42026 - DNA, 80 bp, synthetic construct
  misc_feature 1..80: note = Artificially Synthesized Probe
  source 1..80: mol_type = other DNA
gtgtgggatttcttgatgggttccttcttcttgggttgagaataaagtagaggtttgtcctgctattttatttgtgctct

SEQ ID NO: 42027 - DNA, 80 bp, synthetic construct
  misc_feature 1..80: note = Artificially Synthesized Probe
  source 1..80: mol_type = other DNA
aacaaagctctgctcacgtttcccttcctccatatttactggacagagtgctgtgtgagtaccagcaggggaagaggatg

SEQ ID NO: 42028 - DNA, 80 bp, synthetic construct
  misc_feature 1..80: note = Artificially Synthesized Probe
  source 1..80: mol_type = other DNA
tttctctgctgactttgctccgcctcctttcccacgggctccacacagccagtgaggacacacgtgaggagatttccacc

SEQ ID NO: 42029 - DNA, 80 bp, synthetic construct
  misc_feature 1..80: note = Artificially Synthesized Probe
  source 1..80: mol_type = other DNA
acaactaggagcagacctactgagaacagctccaaatttgcaactaaacttttccttttggacagtatgtatcatagtgt

SEQ ID NO: 42030 - DNA, 80 bp, synthetic construct
  misc_feature 1..80: note = Artificially Synthesized Probe
  source 1..80: mol_type = other DNA
tggtataaatcccacttagtcatagtattattttcttaatgtggtattagagtctatcacttgaattttatttaggagtt

SEQ ID NO: 42031 - DNA, 80 bp, synthetic construct
  misc_feature 1..80: note = Artificially Synthesized Probe
  source 1..80: mol_type = other DNA
tggggtttcaccatgttggccaggctggtctcaaactcctgacatcaggcgatctcccaaagtgctgggattacaggcat

SEQ ID NO: 42032 - DNA, 80 bp, synthetic construct
  misc_feature 1..80: note = Artificially Synthesized Probe
  source 1..80: mol_type = other DNA
tatggagtgaaatatgtcatttacagaatggcttctgggcagtgtatcttgcttagggaggccttgtctgtctgaagaga

SEQ ID NO: 42033 - DNA, 80 bp, synthetic construct
  misc_feature 1..80: note = Artificially Synthesized Probe
  source 1..80: mol_type = other DNA
agtggcctgttacacagcagtagataactggaatatcagttgaaaaagagaaggctggaggcattttgattgggattgcc

SEQ ID NO: 42034 - DNA, 80 bp, synthetic construct
  misc_feature 1..80: note = Artificially Synthesized Probe
  source 1..80: mol_type = other DNA
cccaggttcaatcgatactcctgcctcagcctctgaagtagctgagattacaggcgtctgccaccacgcctggctaattt

SEQ ID NO: 42035 - DNA, 80 bp, synthetic construct
  misc_feature 1..80: note = Artificially Synthesized Probe
  source 1..80: mol_type = other DNA
ttttttttttcttttttgtgggggtggatatgacctttattgagcatatccaccggagaggaaatcatgtttgtacaaaa

SEQ ID NO: 42036 - DNA, 80 bp, synthetic construct
  misc_feature 1..80: note = Artificially Synthesized Probe
  source 1..80: mol_type = other DNA
gctgtgttgtacacagcggcagtcgcgcccacacgtccatgactggccgtcctacatttcaggtgtcgatgaatatggcc

SEQ ID NO: 42037 - DNA, 80 bp, synthetic construct
  misc_feature 1..80: note = Artificially Synthesized Probe
  source 1..80: mol_type = other DNA
gtgtgtgtgtgtgcgcgcacacgctacatgaagttccataactcactgataatctgttgatattttttgtagtccttttt

SEQ ID NO: 42038 - DNA, 80 bp, synthetic construct
  misc_feature 1..80: note = Artificially Synthesized Probe
  source 1..80: mol_type = other DNA
aggggaggaatcattgtcctttgttccttggtgtcctggtcttgaaaaccactgattcatgtttcttggtttttggtgtt

SEQ ID NO: 42039 - DNA, 80 bp, synthetic construct
  misc_feature 1..80: note = Artificially Synthesized Probe
  source 1..80: mol_type = other DNA
tacatctgtatttcgtgtgtagctgcttgtgtacgtacatacatacatgtacacacgagcccatttcagtccagcactgc

SEQ ID NO: 42040 - DNA, 80 bp, synthetic construct
  misc_feature 1..80: note = Artificially Synthesized Probe
  source 1..80: mol_type = other DNA
cagagtcgtttttaacatgtcgttttgtttgctagctgggatgagtgataggctggatcttgccaaccggtttgccccag

SEQ ID NO: 42041 - DNA, 80 bp, synthetic construct
  misc_feature 1..80: note = Artificially Synthesized Probe
  source 1..80: mol_type = other DNA
actagcaaaagaggagaaagcactgatttagatggtagctgtgagttactgtgtccagatattgtcagtgcctaacttgg

SEQ ID NO: 42042 - DNA, 80 bp, synthetic construct
  misc_feature 1..80: note = Artificially Synthesized Probe
  source 1..80: mol_type = other DNA
ttttaggataccgaagtgtataaagctacagtaaaagatgacctcaccaagtggcagaatgttctgaaggctcatagctc

SEQ ID NO: 42043 - DNA, 80 bp, synthetic construct
  misc_feature 1..80: note = Artificially Synthesized Probe
  source 1..80: mol_type = other DNA
catggtcaccatgcttatggtggcgagggttcagatggaggtacatgctcattgtagaattattagaaaaaggtaatgag

SEQ ID NO: 42044 - DNA, 80 bp, synthetic construct
  misc_feature 1..80: note = Artificially Synthesized Probe
  source 1..80: mol_type = other DNA
tctggtcgggaataaatgttggtaattataatccttgagaatgccttaaggataaactacctaactcataggttctagca

SEQ ID NO: 42045 - DNA, 80 bp, synthetic construct
  misc_feature 1..80: note = Artificially Synthesized Probe
  source 1..80: mol_type = other DNA
gcaggcttgagctgggaagcagaggaagtaaagtgagacatcgtggtccttttgtgctgtgctgagaaatctaaatttat

SEQ ID NO: 42046 - DNA, 80 bp, synthetic construct
  misc_feature 1..80: note = Artificially Synthesized Probe
  source 1..80: mol_type = other DNA
gtgaatatttcatggttcaggtacttgactcattacagaactagacagttccttctctccttccctcctttgttccctcc

SEQ ID NO: 42047 - DNA, 80 bp, synthetic construct
  misc_feature 1..80: note = Artificially Synthesized Probe
  source 1..80: mol_type = other DNA
gcttctgcccatgagaagctgtgtccacctcatgaaatccttggtaagatgttctgagaaatacttagcgtcttttctct

SEQ ID NO: 42048 - DNA, 80 bp, synthetic construct
  misc_feature 1..80: note = Artificially Synthesized Probe
  source 1..80: mol_type = other DNA
ttcaacataacttagcagtttctcttgcaaaacacagcccaccactgttttcacgggaaacaggatacaaaggagagctc

SEQ ID NO: 42049 - DNA, 80 bp, synthetic construct
  misc_feature 1..80: note = Artificially Synthesized Probe
  source 1..80: mol_type = other DNA
cctggggatgtctcgaaaggatttaggagtctcttgaatgtgatgagcagtcgctgactgaaatggggaagaccgtgggt

SEQ ID NO: 42050 - DNA, 80 bp, synthetic construct
  misc_feature 1..80: note = Artificially Synthesized Probe
  source 1..80: mol_type = other DNA
taacgcatgcttttcttagtgtggctttctccaacttcagataggcttgaagcagccatttatttacctcaggagtacgc

SEQ ID NO: 42051 - DNA, 80 bp, synthetic construct
  misc_feature 1..80: note = Artificially Synthesized Probe
  source 1..80: mol_type = other DNA
agatcaggtctggatatctcactctcctgagatgccagtatagacacagaaccaaagcaaagtgtttactaagtaaaaaa

SEQ ID NO: 42052 - DNA, 80 bp, synthetic construct
  misc_feature 1..80: note = Artificially Synthesized Probe
  source 1..80: mol_type = other DNA
ttattttaattttaatttaatttaattttattttattttttgagacggagtcttgctctgtagcccaggctggagtgcag

SEQ ID NO: 42053 - DNA, 80 bp, synthetic construct
  misc_feature 1..80: note = Artificially Synthesized Probe
  source 1..80: mol_type = other DNA
atccctttttttatgatgcttacatgaaggggaaacaggcacagaaaagtaaatctatcacttgctgtccataatagtaa

SEQ ID NO: 42054 - DNA, 80 bp, synthetic construct
  misc_feature 1..80: note = Artificially Synthesized Probe
  source 1..80: mol_type = other DNA
tccctgtcccttcctccaggagcttgactcagggacgtgacgtggttgagttagggaaataaggaaggaatatgtaatct

SEQ ID NO: 42055 - DNA, 80 bp, synthetic construct
  misc_feature 1..80: note = Artificially Synthesized Probe
  source 1..80: mol_type = other DNA
attgctcaaaaatagaactctgttctcaacatgctggagtttgtgccggtccagagcaagcctcttagatgagcttctca

SEQ ID NO: 42056 - DNA, 80 bp, synthetic construct
  misc_feature 1..80: note = Artificially Synthesized Probe
  source 1..80: mol_type = other DNA
tcacctaatgaagcaaatgaggaaaagaaacattttccacctcgaaatgaccctctgggctgcctgtaatcacctggatt

SEQ ID NO: 42057 - DNA, 80 bp, synthetic construct
  misc_feature 1..80: note = Artificially Synthesized Probe
  source 1..80: mol_type = other DNA
gctgtgtttttctctcttgtgcagtagtttttactccagtctagttgttaggattttttggtgagagtcaggttttaggg

SEQ ID NO: 42058 - DNA, 80 bp, synthetic construct
  misc_feature 1..80: note = Artificially Synthesized Probe
  source 1..80: mol_type = other DNA
atatgttgttaatttgtcctccagaaaggtcttcccattttcagtcatgctagtgatgcctgttttcctgcacctttggt

SEQ ID NO: 42059 - DNA, 80 bp, synthetic construct
  misc_feature 1..80: note = Artificially Synthesized Probe
  source 1..80: mol_type = other DNA
tggtaaacatttgcaggtgcctgataggtgctagggaagctttctagaggaggccctatgtgaactccattaaaaagatt

SEQ ID NO: 42060 - DNA, 80 bp, synthetic construct
  misc_feature 1..80: note = Artificially Synthesized Probe
  source 1..80: mol_type = other DNA
gcaggctttgggggcaatgaagggaaattctgaagttctttgtgtgtcacgttgaagcttgccctttgttctgtagccag

SEQ ID NO: 42061 - DNA, 80 bp, synthetic construct
  misc_feature 1..80: note = Artificially Synthesized Probe
  source 1..80: mol_type = other DNA
aactcacatacatcaatgcagaaagactgacaaaccagtagaaaaacaggcaagagaggaaatccaaatggccgataaac

SEQ ID NO: 42062 - DNA, 80 bp, synthetic construct
  misc_feature 1..80: note = Artificially Synthesized Probe
  source 1..80: mol_type = other DNA
gtaggggtatcaaaagagagaagaacaagaatgcctttaattttatacttggaagtggcaagatggcacttgccattgct

SEQ ID NO: 42063 - DNA, 80 bp, synthetic construct
  misc_feature 1..80: note = Artificially Synthesized Probe
  source 1..80: mol_type = other DNA
atatgaagttcacaaatcagccagaaggaattgatggtggccgaagtcaggagccgggtgcctctttggggtggatcttg

SEQ ID NO: 42064 - DNA, 80 bp, synthetic construct
  misc_feature 1..80: note = Artificially Synthesized Probe
  source 1..80: mol_type = other DNA
ctttgcaggaaaaaaatatacaaagaactattctataatcatgccatgcagtaattaatgccactgttggcattttggtg

SEQ ID NO: 42065 - DNA, 80 bp, synthetic construct
  misc_feature 1..80: note = Artificially Synthesized Probe
  source 1..80: mol_type = other DNA
catttgatggcactctttggttcttccttgttggttccaggtcctttatttgtgctcagggtgccttgcaagagttctta

SEQ ID NO: 42066 - DNA, 80 bp, synthetic construct
  misc_feature 1..80: note = Artificially Synthesized Probe
  source 1..80: mol_type = other DNA
gttctttgcccctttctctctcctgtagctctgcatatcacagaactgttagatgaggtggctgcttgaaggatggaggg

SEQ ID NO: 42067 - DNA, 80 bp, synthetic construct
  misc_feature 1..80: note = Artificially Synthesized Probe
  source 1..80: mol_type = other DNA
gaccttttggcaggtttgggagctgagcgaccagaaacaggtacttttttgtatatacctgtgtgagtggtgaggtggac

SEQ ID NO: 42068 - DNA, 80 bp, synthetic construct
  misc_feature 1..80: note = Artificially Synthesized Probe
  source 1..80: mol_type = other DNA
aataaggctctttgaaaggaggattactcattgttttacgtaggaatatatgatgagtattatttagcaagactgttgct

SEQ ID NO: 42069 - DNA, 80 bp, synthetic construct
  misc_feature 1..80: note = Artificially Synthesized Probe
  source 1..80: mol_type = other DNA
ttctttggtacctggggagttgtggacaaaacatggagtagttcatcaaatgtgtattagtgcccatggtaccatgctag

SEQ ID NO: 42070 - DNA, 80 bp, synthetic construct
  misc_feature 1..80: note = Artificially Synthesized Probe
  source 1..80: mol_type = other DNA
gtagtatttgtccatcattaaaagttcaagtacataattgtgtttttacttccccacaggatttgtcccatgccaccatt

SEQ ID NO: 42071 - DNA, 80 bp, synthetic construct
  misc_feature 1..80: note = Artificially Synthesized Probe
  source 1..80: mol_type = other DNA
aaagggattcttagatcagctaagtgaactttctggttttccggatgtggttggagcagctttgccgattacccactggt

SEQ ID NO: 42072 - DNA, 80 bp, synthetic construct
  misc_feature 1..80: note = Artificially Synthesized Probe
  source 1..80: mol_type = other DNA
gttgattatccctagctgtaatgaaagctactgtttgttgactttgcaaggaggaaaaaggctccacaaaaggcagaaat

SEQ ID NO: 42073 - DNA, 80 bp, synthetic construct
  misc_feature 1..80: note = Artificially Synthesized Probe
  source 1..80: mol_type = other DNA
aatcatttttaatggagtccaacaggatatcacatattacatgtggttgttagatctcagttctcttttaatgtaaaaaa

SEQ ID NO: 42074 - DNA, 80 bp, synthetic construct
  misc_feature 1..80: note = Artificially Synthesized Probe
  source 1..80: mol_type = other DNA
aggaatctacacacctcggtctcccaaagtgctggaattacagatgtgagccaccatgcctggccaccacagtcaatttt

SEQ ID NO: 42075 - DNA, 80 bp, synthetic construct
  misc_feature 1..80: note = Artificially Synthesized Probe
  source 1..80: mol_type = other DNA
gacacctggggtttgtttccacatcacagcagggcacttgggcatcttcactgagcatgtttttaagtaggtgagaaaat

SEQ ID NO: 42076 - DNA, 80 bp, synthetic construct
  misc_feature 1..80: note = Artificially Synthesized Probe
  source 1..80: mol_type = other DNA
ggagcttacaagaactgtctggagtgtgctgtgaattgagtagagtcctttgttctcctaaccctgtttttgtctctgtc

SEQ ID NO: 42077 - DNA, 80 bp, synthetic construct
  misc_feature 1..80: note = Artificially Synthesized Probe
  source 1..80: mol_type = other DNA
aggagacctgctgagatgccaggcttctcataagttttagctgtgtctgcctttaagagatattttgggtaacataatgg

SEQ ID NO: 42078 - DNA, 80 bp, synthetic construct
  misc_feature 1..80: note = Artificially Synthesized Probe
  source 1..80: mol_type = other DNA
tatgcctggaaatggggttgaaaactacatgtgtattttacagtgtcacattaggccaagaagcagctaatgtctaccac

SEQ ID NO: 42079 - DNA, 80 bp, synthetic construct
  misc_feature 1..80: note = Artificially Synthesized Probe
  source 1..80: mol_type = other DNA
ctttacagtctcttcttaagcctcattatgtgattctcttctactactaatgggcaggcaaattttgtgaccctcagaga

SEQ ID NO: 42080 - DNA, 80 bp, synthetic construct
  misc_feature 1..80: note = Artificially Synthesized Probe
  source 1..80: mol_type = other DNA
tctgcggatgagctggaacgggagaaagtcatgcagggacctacacaggacttgggtgggccccgtgggaaatgcccttt

SEQ ID NO: 42081 - DNA, 80 bp, synthetic construct
  misc_feature 1..80: note = Artificially Synthesized Probe
  source 1..80: mol_type = other DNA
tgacagttacttgagaaagatgtgatttcggtcccagagccacaggatatcagctcatggaatgtgtcgctgcatcatgt

SEQ ID NO: 42082 - DNA, 80 bp, synthetic construct
  misc_feature 1..80: note = Artificially Synthesized Probe
  source 1..80: mol_type = other DNA
gggatgtaatagctttgtcctcactgtgcccctaaactgatttggttttcagttacatattcagcctcacatggattaaa

SEQ ID NO: 42083 - DNA, 80 bp, synthetic construct
  misc_feature 1..80: note = Artificially Synthesized Probe
  source 1..80: mol_type = other DNA
tcttcttatgtgaccacaaggccattgtttgtgtcttaaaatccacaattccctggtgtcctgtgacatccagttcatat

SEQ ID NO: 42084 - DNA, 80 bp, synthetic construct
  misc_feature 1..80: note = Artificially Synthesized Probe
  source 1..80: mol_type = other DNA
taatggaaatggatataagccccgcctatcatctctcaatggagagtcttcacctgtaatgaggagggctgctgctgtct

SEQ ID NO: 42085 - DNA, 80 bp, synthetic construct
  misc_feature 1..80: note = Artificially Synthesized Probe
  source 1..80: mol_type = other DNA
tcagaacttgactttcagctgtcagatagttatcttgtagataccggtgatagtaccgacctgcaactagtaccactgaa

SEQ ID NO: 42086 - DNA, 80 bp, synthetic construct
  misc_feature 1..80: note = Artificially Synthesized Probe
  source 1..80: mol_type = other DNA
taattgatgatatattcccctgttttggagctgcatgggatatgctatatattaattaatatcctttgggcatggtggct

SEQ ID NO: 42087 - DNA, 80 bp, synthetic construct
  misc_feature 1..80: note = Artificially Synthesized Probe
  source 1..80: mol_type = other DNA
tgagcagtgacccccaactctctttccagcccatctacagcaagcagtcggtgttcttcgtctgggaactcaagtggaca

SEQ ID NO: 42088 - DNA, 80 bp, synthetic construct
  misc_feature 1..80: note = Artificially Synthesized Probe
  source 1..80: mol_type = other DNA
tgaagagtagccttgagctaggtgagtagatacaggtgtgtgctgtgttcctttagggagatgatttgacttaatgtttt

SEQ ID NO: 42089 - DNA, 80 bp, synthetic construct
  misc_feature 1..80: note = Artificially Synthesized Probe
  source 1..80: mol_type = other DNA
aaagacctgagtggaatttctgggtcatagggtaactctgtggttagctttttgagcaactgccaactttttccagaggg

SEQ ID NO: 42090 - DNA, 80 bp, synthetic construct
  misc_feature 1..80: note = Artificially Synthesized Probe
  source 1..80: mol_type = other DNA
tctttgctggattcagaaacattcagactgtgccccagccagaagcttctgaggaggaggtatttcagtgggcctctagc

SEQ ID NO: 42091 - DNA, 80 bp, synthetic construct
  misc_feature 1..80: note = Artificially Synthesized Probe
  source 1..80: mol_type = other DNA
aggccttagtgtttagtaatgcatactgaagcagatggggcaaaataacaggttgtctgaaatttgctttatttttttat

SEQ ID NO: 42092 - DNA, 80 bp, synthetic construct
  misc_feature 1..80: note = Artificially Synthesized Probe
  source 1..80: mol_type = other DNA
gataaagatgaagcactgactgaatctgatgagcatttttcgacaaagcttatgtatgaaggtaggtggtctcgaaccca

SEQ ID NO: 42093 - DNA, 80 bp, synthetic construct
  misc_feature 1..80: note = Artificially Synthesized Probe
  source 1..80: mol_type = other DNA
tgtggttgttacacgaatctacacatgtgacaaatgccatagaattagacccaaagaatgcctgcgaaagctgctgaaat

SEQ ID NO: 42094 - DNA, 80 bp, synthetic construct
  misc_feature 1..80: note = Artificially Synthesized Probe
  source 1..80: mol_type = other DNA
cactaccatgtcccaggagtggtactaagtgctttacatacaaggggtcttcaaaaaaatcatggaagatacgttatgaa

SEQ ID NO: 42095 - DNA, 80 bp, synthetic construct
  misc_feature 1..80: note = Artificially Synthesized Probe
  source 1..80: mol_type = other DNA
gagcttcccatggaaacttcaaacacacgggatcaagatcctgaagcatttactcaaagaaccataacaggagatgcagt

SEQ ID NO: 42096 - DNA, 80 bp, synthetic construct
  misc_feature 1..80: note = Artificially Synthesized Probe
  source 1..80: mol_type = other DNA
acgtattctctttccatccttaaaaagcagctctgtgaggctggtggtggtctcagcactatacagcggtcattgagcct

SEQ ID NO: 42097 - DNA, 80 bp, synthetic construct
  misc_feature 1..80: note = Artificially Synthesized Probe
  source 1..80: mol_type = other DNA
tgcccgtccccaggtgagtgtcggcgcagcttgggtctaacttcctgtgtgttttgcagacagctggatagaaaacgaca

SEQ ID NO: 42098 - DNA, 80 bp, synthetic construct
  misc_feature 1..80: note = Artificially Synthesized Probe
  source 1..80: mol_type = other DNA
taagtcttagaaattaagatattccatcgtgaggatgagagaggtcctcagtgtgtttttggtctggttgtagggaagga

SEQ ID NO: 42099 - DNA, 80 bp, synthetic construct
  misc_feature 1..80: note = Artificially Synthesized Probe
  source 1..80: mol_type = other DNA
gtaaaaattgacgattgccctgcatttctaccaagtcctgtgaataaagagatgggagatttgattccgtcagaagagac

SEQ ID NO: 42100 - DNA, 80 bp, synthetic construct
  misc_feature 1..80: note = Artificially Synthesized Probe
  source 1..80: mol_type = other DNA
acaaaagggcaaactgggctgatgtaaatgttttactttcaactgtgttctttaaaataaatcctacctggtttttaaat

SEQ ID NO: 42101 - DNA, 80 bp, synthetic construct
  misc_feature 1..80: note = Artificially Synthesized Probe
  source 1..80: mol_type = other DNA
aacagttccctgacttgcactctgaactaaacctgagctctctggagctgggggactcagctttgtatttctgtgccagc

SEQ ID NO: 42102 - DNA, 80 bp, synthetic construct
  misc_feature 1..80: note = Artificially Synthesized Probe
  source 1..80: mol_type = other DNA
gcttactacagagacaccagccccaagctaggagatcctgccatgggcttcaggctcctctgctgtgtggccttttgtct

SEQ ID NO: 42103 - DNA, 80 bp, synthetic construct
  misc_feature 1..80: note = Artificially Synthesized Probe
  source 1..80: mol_type = other DNA
gaaggtgacgtgacatctctttattggttcagtctatgcctggcccagcggcagccccaggtccagggggggtctggttg

SEQ ID NO: 42104 - DNA, 80 bp, synthetic construct
  misc_feature 1..80: note = Artificially Synthesized Probe
  source 1..80: mol_type = other DNA
gtctaaaaaaaaataaaataaagatacagggtctcactctgctgcccaggctggagtgcagtggtgcgatcgccatcaaa

SEQ ID NO: 42105 - DNA, 80 bp, synthetic construct
  misc_feature 1..80: note = Artificially Synthesized Probe
  source 1..80: mol_type = other DNA
tctactaaaaatacaaaaaaaaaaaaaaaaaaattagccgggcgtagtggcaggtgcctgtaatcccagctactctggag

SEQ ID NO: 42106 - DNA, 80 bp, synthetic construct
  misc_feature 1..80: note = Artificially Synthesized Probe
  source 1..80: mol_type = other DNA
caaagcccaagctgaccagcgtaggtaagactaccttcggcaagggctcatggctacagagttcatttcttttcttttct

SEQ ID NO: 42107 - DNA, 80 bp, synthetic construct
  misc_feature 1..80: note = Artificially Synthesized Probe
  source 1..80: mol_type = other DNA
caccatgccaggctaatgggtgtgtgtgtgtgtgtgtgtgtgtatacatacgtatgtatgtgtgtgtatatgtatgtgtg

SEQ ID NO: 42108 - DNA, 80 bp, synthetic construct
  misc_feature 1..80: note = Artificially Synthesized Probe
  source 1..80: mol_type = other DNA
gggggtaccagtggccacgagttcccagcgtgaccacgacaccccaactcctcccttagactggctctgtcccttaagaa

SEQ ID NO: 42109 - DNA, 80 bp, synthetic construct
  misc_feature 1..80: note = Artificially Synthesized Probe
  source 1..80: mol_type = other DNA
tctcaaaaaagaaaaaaaagcaaaacggctagggctttcctgctagtgtgagactctgatatgggaaaggagacagcatt

SEQ ID NO: 42110 - DNA, 80 bp, synthetic construct
  misc_feature 1..80: note = Artificially Synthesized Probe
  source 1..80: mol_type = other DNA
gatcagatttcaccatgttagccaggatggtctcaatctcctgacctcatgatccgcccacctcgacttcccaaagtgct

SEQ ID NO: 42111 - DNA, 80 bp, synthetic construct
  misc_feature 1..80: note = Artificially Synthesized Probe
  source 1..80: mol_type = other DNA
gggatgcatctggccatcagcctggaggaagctgagcaggtctgaggagggggaaagtgtattgggaagggactcagaca

SEQ ID NO: 42112 - DNA, 80 bp, synthetic construct
  misc_feature 1..80: note = Artificially Synthesized Probe
  source 1..80: mol_type = other DNA
taggaaaagcaccatgtggaactcagtccacacatctaaaacaacaacaatactgatataagacgtatctgcctgacacc

SEQ ID NO: 42113 - DNA, 80 bp, synthetic construct
  misc_feature 1..80: note = Artificially Synthesized Probe
  source 1..80: mol_type = other DNA
gggcaacagagcgagactccgtgtcaaaaaataaataaataaataaaaataaaaattagccaggcgtggtggcacgtgcc

SEQ ID NO: 42114 - DNA, 80 bp, synthetic construct
  misc_feature 1..80: note = Artificially Synthesized Probe
  source 1..80: mol_type = other DNA
tggacattccggcgtatgagatccacagcccgggtggaggcatcgtttgcaaccacagatctgagcccaggcacctctag

SEQ ID NO: 42115 - DNA, 80 bp, synthetic construct
  misc_feature 1..80: note = Artificially Synthesized Probe
  source 1..80: mol_type = other DNA
tatgaggtagggactaggaaaacctgcggcctcggtaagctgatatcccctcgttttggggatgactggtccctgtggag

SEQ ID NO: 42116 - DNA, 80 bp, synthetic construct
  misc_feature 1..80: note = Artificially Synthesized Probe
  source 1..80: mol_type = other DNA
ttttgagcctgtgtttaaatcctggcacctaccatcacttccttgctgtgtgatgatcttgaccagctttcttcatttct

SEQ ID NO: 42117 - DNA, 80 bp, synthetic construct
  misc_feature 1..80: note = Artificially Synthesized Probe
  source 1..80: mol_type = other DNA
tctctgggtcccgtttctcatctgggcatcaaaagaggcttgatctcctggggttattatgagaattaaacaagttaatg

SEQ ID NO: 42118 - DNA, 80 bp, synthetic construct
  misc_feature 1..80: note = Artificially Synthesized Probe
  source 1..80: mol_type = other DNA
gatatgcgcttgttggacgtgagtgctcaaaacctttttactgataggtcagtgtggtcaagacaatttaggaaactctg

SEQ ID NO: 42119 - DNA, 80 bp, synthetic construct
  misc_feature 1..80: note = Artificially Synthesized Probe
  source 1..80: mol_type = other DNA
aaagaaagaaaaaagtgatttgaacagcatgtgcaaagtccttgctaaggaccatatggtttggcttgaatatgaatcaa

SEQ ID NO: 42120 - DNA, 80 bp, synthetic construct
  misc_feature 1..80: note = Artificially Synthesized Probe
  source 1..80: mol_type = other DNA
gcatgcaccaccatgcctggctaattttaaaattttttgtagaaaccgggtctccctttgataccagaccaggctggtat

SEQ ID NO: 42121 - DNA, 80 bp, synthetic construct
  misc_feature 1..80: note = Artificially Synthesized Probe
  source 1..80: mol_type = other DNA
tgtgcagaaggaatggctcctagcactgaatgtcagaattttccacgattttggaaacgttctatgtctacatccaatat

SEQ ID NO: 42122 - DNA, 80 bp, synthetic construct
  misc_feature 1..80: note = Artificially Synthesized Probe
  source 1..80: mol_type = other DNA
cagtggtgtgatcatggcttattgcagccttgaactcctgagctcaagtgatcctcctgctacagcctcctgagtagctg

SEQ ID NO: 42123 - DNA, 80 bp, synthetic construct
  misc_feature 1..80: note = Artificially Synthesized Probe
  source 1..80: mol_type = other DNA
ccttcctttctttccttagttttttttttttttttttttttttttttttttttgagatggagtttcgctcttgtctccca

SEQ ID NO: 42124 - DNA, 80 bp, synthetic construct
  misc_feature 1..80: note = Artificially Synthesized Probe
  source 1..80: mol_type = other DNA
gcctgcttttcttgttcaaaagagtagcaaagggttaggcattcaaaaatattctagcacccggctgagcctctctcctt

SEQ ID NO: 42125 - DNA, 80 bp, synthetic construct
  misc_feature 1..80: note = Artificially Synthesized Probe
  source 1..80: mol_type = other DNA
ttcacgggggccggccgcaagcacagcaatgtgaggcgggcctctgtgggcggggcccgggcaccagggggctgcatgct

SEQ ID NO: 42126 - DNA, 80 bp, synthetic construct
  misc_feature 1..80: note = Artificially Synthesized Probe
  source 1..80: mol_type = other DNA
tctgggtctctgtccctctctctctgggtctctgtcccatgtctctgggtctctgtccctctctctctgggtctctgtcc

SEQ ID NO: 42127 - DNA, 80 bp, synthetic construct
  misc_feature 1..80: note = Artificially Synthesized Probe
  source 1..80: mol_type = other DNA
gggggcaccaaggtggtggccatgggtgtggccccctggggtgtggtccggaatagagacaccctcatcaaccccaaggt

SEQ ID NO: 42128 - DNA, 80 bp, synthetic construct
  misc_feature 1..80: note = Artificially Synthesized Probe
  source 1..80: mol_type = other DNA
cttgatgcatttttttctttttttgagacggagttttgccctgttgcccaggctggagtgcagtggcgcgatctcggctc

SEQ ID NO: 42129 - DNA, 80 bp, synthetic construct
  misc_feature 1..80: note = Artificially Synthesized Probe
  source 1..80: mol_type = other DNA
tgatttcatttttttgcattattgagttagctcaaaactccaggatgaatacagtgttagtggtaatgtggtctagtttc

SEQ ID NO: 42130 - DNA, 80 bp, synthetic construct
  misc_feature 1..80: note = Artificially Synthesized Probe
  source 1..80: mol_type = other DNA
tgcactctatcctgggcgatagagtgacaccctgtttcagaaattaggctgatgcggtggctcatgcctataatcccagc

SEQ ID NO: 42131 - DNA, 80 bp, synthetic construct
  misc_feature 1..80: note = Artificially Synthesized Probe
  source 1..80: mol_type = other DNA
taatatttttcccctttggggctttgcatggtgctatttgggcagttttcccagatgctttcattatgttccagcatctg

SEQ ID NO: 42132 - DNA, 80 bp, synthetic construct
  misc_feature 1..80: note = Artificially Synthesized Probe
  source 1..80: mol_type = other DNA
atcttctcacctgtccatccatgcatccactgacaattcctgagaatgccatctgctcattcttctatccatccatcttc

SEQ ID NO: 42133 - DNA, 80 bp, synthetic construct
  misc_feature 1..80: note = Artificially Synthesized Probe
  source 1..80: mol_type = other DNA
taaacaaaaaaaaaattttttttttgtacagacgaggtcttgctctgttgcccatgctggtcatgaactcctggcctcaa

SEQ ID NO: 42134 - DNA, 80 bp, synthetic construct
  misc_feature 1..80: note = Artificially Synthesized Probe
  source 1..80: mol_type = other DNA
tggaccttgataagtcagtagaatttggatttagtaagctaacgagtgggacagataagtattcaggaagattcccaggg

SEQ ID NO: 42135 - DNA, 80 bp, synthetic construct
  misc_feature 1..80: note = Artificially Synthesized Probe
  source 1..80: mol_type = other DNA
gagtagttgggctctctatttttagtagagacggagtttcaccgtgttagccaggatggtctcgatctcctgaccttgtg

SEQ ID NO: 42136 - DNA, 80 bp, synthetic construct
  misc_feature 1..80: note = Artificially Synthesized Probe
  source 1..80: mol_type = other DNA
cttgaggaagcagcttcccctctctgagccccagtttctctctgtggaaagtggagataatatcttacaggagtgttata

SEQ ID NO: 42137 - DNA, 80 bp, synthetic construct
  misc_feature 1..80: note = Artificially Synthesized Probe
  source 1..80: mol_type = other DNA
agactgaggctcagagagaggaaaaatggcttgcccagggtcatccagctagtagcaggggtcaggcttttcatgtgagt

SEQ ID NO: 42138 - DNA, 80 bp, synthetic construct
  misc_feature 1..80: note = Artificially Synthesized Probe
  source 1..80: mol_type = other DNA
ggtgccagattaaggcggaatataaagcaaggtattattattattattatttttatttttttattttttttgagatggag

SEQ ID NO: 42139 - DNA, 80 bp, synthetic construct
  misc_feature 1..80: note = Artificially Synthesized Probe
  source 1..80: mol_type = other DNA
atgaacaattttgtttccttcttttgaaactgtggggaaagtaggagagcttcatagaatcgtagaaagtcgtggaaaag

SEQ ID NO: 42140 - DNA, 80 bp, synthetic construct
  misc_feature 1..80: note = Artificially Synthesized Probe
  source 1..80: mol_type = other DNA
ttttctgctgttgtcacctctttcccttcacaatataccccaagtttcagaaatcagagtgactcacgtttgtcatcatc

SEQ ID NO: 42141 - DNA, 80 bp, synthetic construct
  misc_feature 1..80: note = Artificially Synthesized Probe
  source 1..80: mol_type = other DNA
cccagtagcaacccctttatgcagagtttaaaagtcagacatgcaaaatagaggcaaaatagacattcagcagatgtccc

SEQ ID NO: 42142 - DNA, 80 bp, synthetic construct
  misc_feature 1..80: note = Artificially Synthesized Probe
  source 1..80: mol_type = other DNA
atccatacatccatccatctacctatccattcatccatccatccatccatctatccatccatccatctgtccatccattc

SEQ ID NO: 42143 - DNA, 80 bp, synthetic construct
  misc_feature 1..80: note = Artificially Synthesized Probe
  source 1..80: mol_type = other DNA
gagcgacctgcttctttgggcactgttgctgaacagggcacagatggccatgtacttctgggagatggtgagtgctgact

SEQ ID NO: 42144 - DNA, 80 bp, synthetic construct
  misc_feature 1..80: note = Artificially Synthesized Probe
  source 1..80: mol_type = other DNA
ccttttttatgaatctactgttgagtccctctagtggtttttatatttcagttattgtgctttttagcttcagagtttct

SEQ ID NO: 42145 - DNA, 80 bp, synthetic construct
  misc_feature 1..80: note = Artificially Synthesized Probe
  source 1..80: mol_type = other DNA
tgtattcttattctctaggtggtgagacatctttttcctggctccctttagttcttttttcatgatttcctttagctctt

SEQ ID NO: 42146 - DNA, 80 bp, synthetic construct
  misc_feature 1..80: note = Artificially Synthesized Probe
  source 1..80: mol_type = other DNA
gtgacttgacagagatatccttaaatgcctagaaccacagaagcaaatataacaagaaactccctataagtgctgggatt

SEQ ID NO: 42147 - DNA, 80 bp, synthetic construct
  misc_feature 1..80: note = Artificially Synthesized Probe
  source 1..80: mol_type = other DNA
ccaggaatgtgtgtctttgtcttcaaggttgccactgaactggggagctgggggtagtaagtgggtaggttaaaatgtca

SEQ ID NO: 42148 - DNA, 80 bp, synthetic construct
  misc_feature 1..80: note = Artificially Synthesized Probe
  source 1..80: mol_type = other DNA
ttacagtaatgatgttatccccaggagcaattgggggagccagaggctgcgtgacccctaaacttaatttctaatcttgt

SEQ ID NO: 42149 - DNA, 80 bp, synthetic construct
  misc_feature 1..80: note = Artificially Synthesized Probe
  source 1..80: mol_type = other DNA
ttaaattcccttacctctcccttcacaccctcaccctactccttcccatccctgtcacataactaactcctctgccccag

SEQ ID NO: 42150 - DNA, 80 bp, synthetic construct
  misc_feature 1..80: note = Artificially Synthesized Probe
  source 1..80: mol_type = other DNA
atttcaaacagctacccagagtcccttgctgtggatagtggttaaactcatggattccagctctaccacatacaaactgt

SEQ ID NO: 42151 - DNA, 80 bp, synthetic construct
  misc_feature 1..80: note = Artificially Synthesized Probe
  source 1..80: mol_type = other DNA
gttttgctggagaatgcctctccaccttctcttcccctcatttcttgctctgtgcttccccccttgctaggaaatcagaa

SEQ ID NO: 42152 - DNA, 80 bp, synthetic construct
  misc_feature 1..80: note = Artificially Synthesized Probe
  source 1..80: mol_type = other DNA
tgatcagcctgcctcagcctcccaagtaggtgggagtagaagtgcatgccactacgcccagctaatttttgtatctttaa

SEQ ID NO: 42153 - DNA, 80 bp, synthetic construct
  misc_feature 1..80: note = Artificially Synthesized Probe
  source 1..80: mol_type = other DNA
gaacgagatcatttcctttgcagtgacatggttggagctggaggccattatccataacaaactaacaggaacagaaaacc

SEQ ID NO: 42154 - DNA, 80 bp, synthetic construct
  misc_feature 1..80: note = Artificially Synthesized Probe
  source 1..80: mol_type = other DNA
cagtcacttgcctcagatcatgtggttggtaaatggtagagccgagatttgatcccagatcctcttgtacctgagtctgt

SEQ ID NO: 42155 - DNA, 80 bp, synthetic construct
  misc_feature 1..80: note = Artificially Synthesized Probe
  source 1..80: mol_type = other DNA
tctcctcatcctccttctcctgctcctcctcctcctgctcctctgccttctcttcatcctccttctccttctcctttctt

SEQ ID NO: 42156 - DNA, 80 bp, synthetic construct
  misc_feature 1..80: note = Artificially Synthesized Probe
  source 1..80: mol_type = other DNA
attcagtgcttcttggtgtactcacagaattgtgaaatcatttccacaattcattttcaaatattgtcatcactccaaca

SEQ ID NO: 42157 - DNA, 80 bp, synthetic construct
  misc_feature 1..80: note = Artificially Synthesized Probe
  source 1..80: mol_type = other DNA
tgagatgtgccaagccaaaagtctcgatgatggtggagatcaggactcagaggtcagagtgaggcctcctcccttctctt

SEQ ID NO: 42158 - DNA, 80 bp, synthetic construct
  misc_feature 1..80: note = Artificially Synthesized Probe
  source 1..80: mol_type = other DNA
tggcttcagggacggcaggattcaggagaaaaccccactgtccgccactcagcctctgctgctatttattgctaggcctg

SEQ ID NO: 42159 - DNA, 80 bp, synthetic construct
  misc_feature 1..80: note = Artificially Synthesized Probe
  source 1..80: mol_type = other DNA
taaagtgacttttgagatgaaagggctaaggccatatgctaccatgctctaggattgccagtgatattttggacagttta

SEQ ID NO: 42160 - DNA, 80 bp, synthetic construct
  misc_feature 1..80: note = Artificially Synthesized Probe
  source 1..80: mol_type = other DNA
tgacctctccttgttataatttatgcactcttgactaccagataggttggacatcttttcctaagcttaatggccatatg

SEQ ID NO: 42161 - DNA, 80 bp, synthetic construct
  misc_feature 1..80: note = Artificially Synthesized Probe
  source 1..80: mol_type = other DNA
tccagcttgattcttacagggaccagctctttgctaaggccatcgttcattcagtcattacttaataggcgcagccattt

SEQ ID NO: 42162 - DNA, 80 bp, synthetic construct
  misc_feature 1..80: note = Artificially Synthesized Probe
  source 1..80: mol_type = other DNA
ctgcagatcttcgggcagattccccaggaggacatggacggtaggggggatgacggcctgacagccttcctctgagtctc

SEQ ID NO: 42163 - DNA, 80 bp, synthetic construct
  misc_feature 1..80: note = Artificially Synthesized Probe
  source 1..80: mol_type = other DNA
gaatgtctctcttcacagtggccctcatggagcacagcaactgctcgtcggagcccggcttctgggcacaccctcctggg

SEQ ID NO: 42164 - DNA, 80 bp, synthetic construct
  misc_feature 1..80: note = Artificially Synthesized Probe
  source 1..80: mol_type = other DNA
actgcaacctccacttcccactcccccatacccagttaattttttgtatttgtagtagagatagggtttcaccatgttgg

SEQ ID NO: 42165 - DNA, 80 bp, synthetic construct
  misc_feature 1..80: note = Artificially Synthesized Probe
  source 1..80: mol_type = other DNA
ctccccacaggtcttagtaacctccagtgtattttctgtctctatggatttagtctagatgtttcatgtaagtggaatta

SEQ ID NO: 42166 - DNA, 80 bp, synthetic construct
  misc_feature 1..80: note = Artificially Synthesized Probe
  source 1..80: mol_type = other DNA
ttccttttgtaaaaattatagtcatccagctgggtgtagtggctcatgcctgtaatcccagcactttggggggctgaggt

SEQ ID NO: 42167 - DNA, 80 bp, synthetic construct
  misc_feature 1..80: note = Artificially Synthesized Probe
  source 1..80: mol_type = other DNA
ttcatcttccagatttccccttttaataaaacgttacttaaattggattagggaccatgctaataacttcattttaactt

SEQ ID NO: 42168 - DNA, 80 bp, synthetic construct
  misc_feature 1..80: note = Artificially Synthesized Probe
  source 1..80: mol_type = other DNA
agtatgagtctcctttgttatttttcaagattgttttggctattctgggcctcctgcaattctatatgaacttaaagatc

SEQ ID NO: 42169 - DNA, 80 bp, synthetic construct
  misc_feature 1..80: note = Artificially Synthesized Probe
  source 1..80: mol_type = other DNA
cggtagctgtgggtttttcagaagtaccttttctcatgttgagaaagtttatttctattcctagtttacgatttttaaaa

SEQ ID NO: 42170 - DNA, 80 bp, synthetic construct
  misc_feature 1..80: note = Artificially Synthesized Probe
  source 1..80: mol_type = other DNA
gtggaacatgaaagtgaaacaggagtgtgaccgctgaagcacagcatcacagggagacggttaggcccctggataactgc

SEQ ID NO: 42171 - DNA, 80 bp, synthetic construct
  misc_feature 1..80: note = Artificially Synthesized Probe
  source 1..80: mol_type = other DNA
ttaatgtgctgctgaattagatttgcttgtattttttcaggatgtttacatgtatattcataagggctactgctctgtaa

SEQ ID NO: 42172 - DNA, 80 bp, synthetic construct
  misc_feature 1..80: note = Artificially Synthesized Probe
  source 1..80: mol_type = other DNA
cgcatcctgtaacctctgactttagtgatcttgacttctgtctgctgctatagactgaacaattattgcctggcatctaa

SEQ ID NO: 42173 - DNA, 80 bp, synthetic construct
  misc_feature 1..80: note = Artificially Synthesized Probe
  source 1..80: mol_type = other DNA
aaaggtcagtgtgtagcatcagcctgtgcatctccagcctctgttcctgtatttttgcgtgtttttctctctcggcacct

SEQ ID NO: 42174 - DNA, 80 bp, synthetic construct
  misc_feature 1..80: note = Artificially Synthesized Probe
  source 1..80: mol_type = other DNA
agacattctggccactgttttagagtttctggaatctgataacactgattcgtgaatttcctttgctttaggcatgttgt

SEQ ID NO: 42175 - DNA, 80 bp, synthetic construct
  misc_feature 1..80: note = Artificially Synthesized Probe
  source 1..80: mol_type = other DNA
gtaactgggtggcaatttgagaagaaggcaacgaaagttaagggagaatgtgtgcacataaatgcaaaaaagaatgacct

SEQ ID NO: 42176 - DNA, 80 bp, synthetic construct
  misc_feature 1..80: note = Artificially Synthesized Probe
  source 1..80: mol_type = other DNA
taaagaaaacaagatgctgtatttttgttttatttcagaaagttcaagtctttccatcataattgaaggaattgcatgat

SEQ ID NO: 42177 - DNA, 80 bp, synthetic construct
  misc_feature 1..80: note = Artificially Synthesized Probe
  source 1..80: mol_type = other DNA
gcagatataaattgtttaaacgaagctaacatcagagagatgcacaattcattcaaattagtatagatgccaacattctg

SEQ ID NO: 42178 - DNA, 80 bp, synthetic construct
  misc_feature 1..80: note = Artificially Synthesized Probe
  source 1..80: mol_type = other DNA
agcctaggatgcttaatcttttataatggacaggaatatctaccctttgttctggagggagatactatctctgtcttcca

SEQ ID NO: 42179 - DNA, 80 bp, synthetic construct
  misc_feature 1..80: note = Artificially Synthesized Probe
  source 1..80: mol_type = other DNA
taatacaagaccagtgacaattcatgcatggacattctctcctttggtttaccagctggccatttttacttagccttgct

SEQ ID NO: 42180 - DNA, 80 bp, synthetic construct
  misc_feature 1..80: note = Artificially Synthesized Probe
  source 1..80: mol_type = other DNA
atgccaaagagccccagcttttgatgttctaatatcgaaaggagaatgtcataactaacccatggtaagatacaaactgt

SEQ ID NO: 42181 - DNA, 80 bp, synthetic construct
  misc_feature 1..80: note = Artificially Synthesized Probe
  source 1..80: mol_type = other DNA
ttgggctaggttttgaaggcgataaaaattatgggaggtgttaacaaagattattggggtagggggtgaaggggagatag

SEQ ID NO: 42182 - DNA, 80 bp, synthetic construct
  misc_feature 1..80: note = Artificially Synthesized Probe
  source 1..80: mol_type = other DNA
aactgataatgtagccttgtgttggggtcttttggttttgtttgtttctagaacccacatcacactgttggtgcctccta

SEQ ID NO: 42183 - DNA, 80 bp, synthetic construct
  misc_feature 1..80: note = Artificially Synthesized Probe
  source 1..80: mol_type = other DNA
atataaataatacaaagagtataattactacaaagagatttaagatctgatccctgctctaaaggagctataaaatgggg

SEQ ID NO: 42184 - DNA, 80 bp, synthetic construct
  misc_feature 1..80: note = Artificially Synthesized Probe
  source 1..80: mol_type = other DNA
actttttctgtgtccctggatgtaaattacattaggccccatgagtcttattccatttttcttacattcatccacaaata

SEQ ID NO: 42185 - DNA, 80 bp, synthetic construct
  misc_feature 1..80: note = Artificially Synthesized Probe
  source 1..80: mol_type = other DNA
gataactcctacaccaacccactctcaccactggcattgctcatttctggatctaacaaactctgagagtgttgctaatt

SEQ ID NO: 42186 - DNA, 80 bp, synthetic construct
  misc_feature 1..80: note = Artificially Synthesized Probe
  source 1..80: mol_type = other DNA
tggcccgggagagagtgagaaggcaagatctcagctcactgcatcccaacctcccgagctcaggtgattctcccacttct

SEQ ID NO: 42187 - DNA, 80 bp, synthetic construct
  misc_feature 1..80: note = Artificially Synthesized Probe
  source 1..80: mol_type = other DNA
gtagtagtaccaatgaattccctcagtatttgcttgcccttcacttatttagtttagtttcgtgggatatgaaattcttg

SEQ ID NO: 42188 - DNA, 80 bp, synthetic construct
  misc_feature 1..80: note = Artificially Synthesized Probe
  source 1..80: mol_type = other DNA
tcttggattattttaccggattccttggattgggttacaactttcccccaaatcttgacaagcttccttgccatccagat

SEQ ID NO: 42189 - DNA, 80 bp, synthetic construct
  misc_feature 1..80: note = Artificially Synthesized Probe
  source 1..80: mol_type = other DNA
cagctctgctccagggccttaggggaagccccctctgatcattcactccatgcccacattacttttgttaggtgatttgg

SEQ ID NO: 42190 - DNA, 80 bp, synthetic construct
  misc_feature 1..80: note = Artificially Synthesized Probe
  source 1..80: mol_type = other DNA
tggggcaaacaaaataaaatagtgaactacaattagttggccacattattattatttgtccattcactcaaaaccattta

SEQ ID NO: 42191 - DNA, 80 bp, synthetic construct
  misc_feature 1..80: note = Artificially Synthesized Probe
  source 1..80: mol_type = other DNA
tgttgctctatgtccatcacaaacccaaaatacaaagtgtatcaagaagccacactagaacacaatgaaacaacaggact

SEQ ID NO: 42192 - DNA, 80 bp, synthetic construct
  misc_feature 1..80: note = Artificially Synthesized Probe
  source 1..80: mol_type = other DNA
ggggcataactatatacaaaatccaaaacctttcaaagaataagtgaatttagcaaggtgctggaaagtcaacgtataaa

SEQ ID NO: 42193 - DNA, 80 bp, synthetic construct
  misc_feature 1..80: note = Artificially Synthesized Probe
  source 1..80: mol_type = other DNA
aatagaccaatggaaaataaggaggcctgaagacccatacatacacagctgatttatgacaaaggcatcactgtaattca

SEQ ID NO: 42194 - DNA, 80 bp, synthetic construct
  misc_feature 1..80: note = Artificially Synthesized Probe
  source 1..80: mol_type = other DNA
aattatggtacatgaaaccaccaaatgaatctcacagacatcctgttgagtgaaagtaaccagatacaaaagagtactac

SEQ ID NO: 42195 - DNA, 80 bp, synthetic construct
  misc_feature 1..80: note = Artificially Synthesized Probe
  source 1..80: mol_type = other DNA
atctagttgttgattaagtatctaaggtcagctagatgttctgaggtcaactagatgttgatcttaaatcctaaatctca

SEQ ID NO: 42196 - DNA, 80 bp, synthetic construct
  misc_feature 1..80: note = Artificially Synthesized Probe
  source 1..80: mol_type = other DNA
caggagtggtttacactgaacttgtctcaaaagtaagataacggctggctgatcagggttactttttaaattctagaaat

SEQ ID NO: 42197 - DNA, 80 bp, synthetic construct
  misc_feature 1..80: note = Artificially Synthesized Probe
  source 1..80: mol_type = other DNA
ctatcagagggcacatagcaactgtcaatttatgcttagtaaacacttactgtgtaataccctgtcctgaacttagatgg

SEQ ID NO: 42198 - DNA, 80 bp, synthetic construct
  misc_feature 1..80: note = Artificially Synthesized Probe
  source 1..80: mol_type = other DNA
acctataataagagcttgagtcctagagtcagacaaatgtgagttcaaatcacaactctatccattcctaattgtaagct

SEQ ID NO: 42199 - DNA, 80 bp, synthetic construct
  misc_feature 1..80: note = Artificially Synthesized Probe
  source 1..80: mol_type = other DNA
aaagttacatgtgccacatgtaccatagactatcctgacaagtggcaggtttctgaaaagtttcatggcaggagtatttg

SEQ ID NO: 42200 - DNA, 80 bp, synthetic construct
  misc_feature 1..80: note = Artificially Synthesized Probe
  source 1..80: mol_type = other DNA
gggaaaggataggaaagagacccctaacagtttacattcctaccatggactctgataattctagccataagacaacctcg

SEQ ID NO: 42201 - DNA, 80 bp, synthetic construct
  misc_feature 1..80: note = Artificially Synthesized Probe
  source 1..80: mol_type = other DNA
gctggatgcttcctgccctcaaacatcagacttcaagttcttcagtgtgggggctgggactggctctccttgctcctcag

SEQ ID NO: 42202 - DNA, 80 bp, synthetic construct
  misc_feature 1..80: note = Artificially Synthesized Probe
  source 1..80: mol_type = other DNA
acaacctagtgagacaaaaatgtaaaagaataagcaaagcctacatgacatatggaacaccataaaacacccaaatattt

SEQ ID NO: 42203 - DNA, 80 bp, synthetic construct
  misc_feature 1..80: note = Artificially Synthesized Probe
  source 1..80: mol_type = other DNA
gaaataaagaatataccaaaaaaaaaatcaactaattaaacaacagaaataaggcaacacacatcaatgacaaccttgaa

SEQ ID NO: 42204 - DNA, 80 bp, synthetic construct
  misc_feature 1..80: note = Artificially Synthesized Probe
  source 1..80: mol_type = other DNA
cccaagacaaaagtaggctaatctatttattaatttaagtaggttaatctatgtcacctttcagtgaagaaatttataga

SEQ ID NO: 42205 - DNA, 80 bp, synthetic construct
  misc_feature 1..80: note = Artificially Synthesized Probe
  source 1..80: mol_type = other DNA
caggctgccattagcccagcccagatagcaggatcacctgaaaacaggaaatacacagtgataagtcttgttaaaatcaa

SEQ ID NO: 42206 - DNA, 80 bp, synthetic construct
  misc_feature 1..80: note = Artificially Synthesized Probe
  source 1..80: mol_type = other DNA
acagcagcttcagggtagggagaaggagaaaagtccaacagcagtgagttggaagggaactttttatgcatagaaaagat

SEQ ID NO: 42207 - DNA, 80 bp, synthetic construct
  misc_feature 1..80: note = Artificially Synthesized Probe
  source 1..80: mol_type = other DNA
actcaatctctgaatattaacttaatcctaagattaaggggatagctactttagggatcttacagtattgtatagtttgc

SEQ ID NO: 42208 - DNA, 80 bp, synthetic construct
  misc_feature 1..80: note = Artificially Synthesized Probe
  source 1..80: mol_type = other DNA
tctgcttgagaactccaaaaataaaaaacctaccaatatatatataacatagacaaatcaaaatgtttagtctctttttg

SEQ ID NO: 42209 - DNA, 80 bp, synthetic construct
  misc_feature 1..80: note = Artificially Synthesized Probe
  source 1..80: mol_type = other DNA
acctggagaaaggagagctgccttctgaatggtctttagtgcagtatttttttcatcttctgctgaactgcttcccatag

SEQ ID NO: 42210 - DNA, 80 bp, synthetic construct
  misc_feature 1..80: note = Artificially Synthesized Probe
  source 1..80: mol_type = other DNA
caggtcctttgagccaacttactcactaaaaataactaaaaatatgaaataaaaccctgctgatcaaactgtggcttgtg

SEQ ID NO: 42211 - DNA, 80 bp, synthetic construct
  misc_feature 1..80: note = Artificially Synthesized Probe
  source 1..80: mol_type = other DNA
taacgtagtcccagattgatggacctcccaagcacccagcagaagcaagtacaaattatttctgtagaaaggcaccttaa

SEQ ID NO: 42212 - DNA, 80 bp, synthetic construct
  misc_feature 1..80: note = Artificially Synthesized Probe
  source 1..80: mol_type = other DNA
tgaaacgttactttacctttgcatttcgttgagcatactgtgcaacaactcgagacaacagagaccaaagagcagggtca

SEQ ID NO: 42213 - DNA, 80 bp, synthetic construct
  misc_feature 1..80: note = Artificially Synthesized Probe
  source 1..80: mol_type = other DNA
caaccatatcaagtataattaggttccaggttcacaaatacagaatttacctgtgaacagctttagatatttgtttttgc

SEQ ID NO: 42214 - DNA, 80 bp, synthetic construct
  misc_feature 1..80: note = Artificially Synthesized Probe
  source 1..80: mol_type = other DNA
atttggtactgtatagtgaattctcacgtgatctggttgtttaaaagtgtgcagcacttttctcttcctcctgctctggc

SEQ ID NO: 42215 - DNA, 80 bp, synthetic construct
  misc_feature 1..80: note = Artificially Synthesized Probe
  source 1..80: mol_type = other DNA
tgtaccaggaatcacaagttagaactgagtattctccaaagcggaaattctagagtgtagtatcactagagacaaagact

SEQ ID NO: 42216 - DNA, 80 bp, synthetic construct
  misc_feature 1..80: note = Artificially Synthesized Probe
  source 1..80: mol_type = other DNA
ccaaatatggaagtatgtcagtcagtgtcatgtctagcaaataaccacatggctaatgggtacaactaaaaaagccaaaa

SEQ ID NO: 42217 - DNA, 80 bp, synthetic construct
  misc_feature 1..80: note = Artificially Synthesized Probe
  source 1..80: mol_type = other DNA
ctgtaccatgaagattggtatcactcaaaaatgccaataaaacactcactgaggccactgtttaatagcatacattaatc

SEQ ID NO: 42218 - DNA, 80 bp, synthetic construct
  misc_feature 1..80: note = Artificially Synthesized Probe
  source 1..80: mol_type = other DNA
atcattaggattattatgtgacaatccctaacttctacgttcggaatctatatggggatctaggtcactgtctttacgag

SEQ ID NO: 42219 - DNA, 80 bp, synthetic construct
  misc_feature 1..80: note = Artificially Synthesized Probe
  source 1..80: mol_type = other DNA
acacttcaaggggtgttgacttaaaagcctggatagctttatcatattcaccagtggaactaagaagtaaagcacaactt

SEQ ID NO: 42220 - DNA, 80 bp, synthetic construct
  misc_feature 1..80: note = Artificially Synthesized Probe
  source 1..80: mol_type = other DNA
acttgtttttgcctaaagataaaaggaacttgtataagctcaactgccatcatctgaagagaaacactatatctttgaga

SEQ ID NO: 42221 - DNA, 80 bp, synthetic construct
  misc_feature 1..80: note = Artificially Synthesized Probe
  source 1..80: mol_type = other DNA
ctaaaaagaacagatactttattctacacaatatctgtcctctgcttcaacaaaatcttggaactgacagctctatcaac

SEQ ID NO: 42222 - DNA, 80 bp, synthetic construct
  misc_feature 1..80: note = Artificially Synthesized Probe
  source 1..80: mol_type = other DNA
aaaccatgagttctaactctgctccacataaagcacactggggttggttaccattataggtataggaaactgttaacaga

SEQ ID NO: 42223 - DNA, 80 bp, synthetic construct
  misc_feature 1..80: note = Artificially Synthesized Probe
  source 1..80: mol_type = other DNA
agggagaaatagccaagaaagattttttatctccctgatgttgcatgaaaaacaagaatttgctagagaagcctaaagac

SEQ ID NO: 42224 - DNA, 80 bp, synthetic construct
  misc_feature 1..80: note = Artificially Synthesized Probe
  source 1..80: mol_type = other DNA
ttaaactcacctgaaatgtcacttcctgccctgcattctctggcccttttccctactttaattttctttcttagcaatta

SEQ ID NO: 42225 - DNA, 80 bp, synthetic construct
  misc_feature 1..80: note = Artificially Synthesized Probe
  source 1..80: mol_type = other DNA
cctcctgcatctatcacaattaaatgtagtttacctttggtatgcatttgctgcttcctttttcagttgtagatgttcgt

SEQ ID NO: 42226 - DNA, 80 bp, synthetic construct
  misc_feature 1..80: note = Artificially Synthesized Probe
  source 1..80: mol_type = other DNA
ccccaaatgcttgttcggggagactgatttcggtaataataaaactctagtcctccacacagccggctctgcatgaattt

SEQ ID NO: 42227 - DNA, 80 bp, synthetic construct
  misc_feature 1..80: note = Artificially Synthesized Probe
  source 1..80: mol_type = other DNA
tgcttctttattagcattttgtcaaaagttaatgaaactaacatttcttgagcatctaggatatgccaggcaccctgcat

SEQ ID NO: 42228 - DNA, 80 bp, synthetic construct
  misc_feature 1..80: note = Artificially Synthesized Probe
  source 1..80: mol_type = other DNA
catctggaggatgttgtactggtacagctctgtttctctgttgcttttatcttgcaatgttgtgcagacccaatacgcat

SEQ ID NO: 42229 - DNA, 80 bp, synthetic construct
  misc_feature 1..80: note = Artificially Synthesized Probe
  source 1..80: mol_type = other DNA
actatgcctagcccaatatctattcattcccttaacaaggataacacttttctcattaatgaatcctcaagaagaatgtt

SEQ ID NO: 42230 - DNA, 80 bp, synthetic construct
  misc_feature 1..80: note = Artificially Synthesized Probe
  source 1..80: mol_type = other DNA
aataattttctgataagcaactgactgcttactaattcattataatttctcaaccaggcaagaacttcgaggccactcag

SEQ ID NO: 42231 - DNA, 80 bp, synthetic construct
  misc_feature 1..80: note = Artificially Synthesized Probe
  source 1..80: mol_type = other DNA
ggaggataagaactcacaaccaatgaagtcctaaccaatgaagtcctagacatgtgtatacctgctaccagagaaggagt

SEQ ID NO: 42232 - DNA, 80 bp, synthetic construct
  misc_feature 1..80: note = Artificially Synthesized Probe
  source 1..80: mol_type = other DNA
aggttaaatttaagctgctagagagtactaactgtctcccttgtgctcatccactccacctccaacactatctacatagg

SEQ ID NO: 42233 - DNA, 80 bp, synthetic construct
  misc_feature 1..80: note = Artificially Synthesized Probe
  source 1..80: mol_type = other DNA
aaagatttctccagcaactccttaagatcattcatgttgctgcctgtttctgctagatgttgtgcttggcgataataatt

SEQ ID NO: 42234 - DNA, 80 bp, synthetic construct
  misc_feature 1..80: note = Artificially Synthesized Probe
  source 1..80: mol_type = other DNA
actcaggtttttgcttttagatcttctctcatgctgtgtagttttgactacatccccacaaagctcatgagttgggaact

SEQ ID NO: 42235 - DNA, 80 bp, synthetic construct
  misc_feature 1..80: note = Artificially Synthesized Probe
  source 1..80: mol_type = other DNA
ctccatactgttctccacagtggctacactagtttgcattcccataaaccatataagagttctctcttctccacatcctt

SEQ ID NO: 42236 - DNA, 80 bp, synthetic construct
  misc_feature 1..80: note = Artificially Synthesized Probe
  source 1..80: mol_type = other DNA
gttacatgttatccagaataacatttcctaggctcagagaggcagtatttatagctaaggtactgtcacccaaaggttca

SEQ ID NO: 42237 - DNA, 80 bp, synthetic construct
  misc_feature 1..80: note = Artificially Synthesized Probe
  source 1..80: mol_type = other DNA
tctttcctatgcatctaggatgccagccactactaagagcagaagaaattatatctgtttccccaagtgcaaaattaata

SEQ ID NO: 42238 - DNA, 80 bp, synthetic construct
  misc_feature 1..80: note = Artificially Synthesized Probe
  source 1..80: mol_type = other DNA
gatgacacaaaaattcataaagcattccttaagaaaaacaaacagaaaaaaaaaaccagtttctttaaaaaggagaaaga

SEQ ID NO: 42239 - DNA, 80 bp, synthetic construct
  misc_feature 1..80: note = Artificially Synthesized Probe
  source 1..80: mol_type = other DNA
gtccatctcagtttgtcacatcagcccataatcccccaccagcaatccttttaccaaacagaaataccacagttaaaata

SEQ ID NO: 42240 - DNA, 80 bp, synthetic construct
  misc_feature 1..80: note = Artificially Synthesized Probe
  source 1..80: mol_type = other DNA
attcaaaggctttcctataacatccacgagctctgtttttatctcccactacgtctctataataatgacctaaatagcag

SEQ ID NO: 42241 - DNA, 80 bp, synthetic construct
  misc_feature 1..80: note = Artificially Synthesized Probe
  source 1..80: mol_type = other DNA
acacccacacgcaatataggagactcctagttggaacaatcaaagtttgagtgattcagaggtgccaaattagaaaccaa

SEQ ID NO: 42242 - DNA, 80 bp, synthetic construct
  misc_feature 1..80: note = Artificially Synthesized Probe
  source 1..80: mol_type = other DNA
tcaaatgaacctttgttccgataggccaagcttttgagaaccaaaagtcctgggatattatctgcatcagaaatctagaa

SEQ ID NO: 42243 - DNA, 80 bp, synthetic construct
  misc_feature 1..80: note = Artificially Synthesized Probe
  source 1..80: mol_type = other DNA
ggattttgctaaacgtattctcaaggtgtttaacatgttccttggttccctgtattttctgtatattagtagttgggttc

SEQ ID NO: 42244 - DNA, 80 bp, synthetic construct
  misc_feature 1..80: note = Artificially Synthesized Probe
  source 1..80: mol_type = other DNA
agtttcttgctttctagcatgacaaggtgttcttggttcatcttgtacattttctatctcagacctggactctgctagtt

SEQ ID NO: 42245 - DNA, 80 bp, synthetic construct
  misc_feature 1..80: note = Artificially Synthesized Probe
  source 1..80: mol_type = other DNA
ttcaaatgaagacaaagattcctctgataaagactgttaccagacgcaccaagattatctacgatcttcagagctgacaa

SEQ ID NO: 42246 - DNA, 80 bp, synthetic construct
  misc_feature 1..80: note = Artificially Synthesized Probe
  source 1..80: mol_type = other DNA
catctctcatatctcatcagtcacaaagtcacactgattctctgcctcaattcattccccaccatacatttttctccatc

SEQ ID NO: 42247 - DNA, 80 bp, synthetic construct
  misc_feature 1..80: note = Artificially Synthesized Probe
  source 1..80: mol_type = other DNA
agtgataagcagagtcagagttcaaacctaagcagagtccaaggtatgcaggtacattttttcccttccaccttagatag

SEQ ID NO: 42248 - DNA, 80 bp, synthetic construct
  misc_feature 1..80: note = Artificially Synthesized Probe
  source 1..80: mol_type = other DNA
cacatgtagaaccactgtttcagttacagatgtcaaaggtaaattatttgcataataccatgtagctcatatatttcaaa

SEQ ID NO: 42249 - DNA, 80 bp, synthetic construct
  misc_feature 1..80: note = Artificially Synthesized Probe
  source 1..80: mol_type = other DNA
tggtaacctctggagagtacagaccagcatggcatctgatatgtggtaggtgttcattaaatcttgtgacgatcctttaa

SEQ ID NO: 42250 - DNA, 80 bp, synthetic construct
  misc_feature 1..80: note = Artificially Synthesized Probe
  source 1..80: mol_type = other DNA
gcagaaaatcttaatccagctcttttctgcttgaatttgaagaaccaagcttttttatcctcccccatttcagtaacaaa

SEQ ID NO: 42251 - DNA, 80 bp, synthetic construct
  misc_feature 1..80: note = Artificially Synthesized Probe
  source 1..80: mol_type = other DNA
catttggcatgtgagcaaggccaaggctgaggtaatggtgaaaaccataaatagctgaataggaaataaagagaaaagag

SEQ ID NO: 42252 - DNA, 80 bp, synthetic construct
  misc_feature 1..80: note = Artificially Synthesized Probe
  source 1..80: mol_type = other DNA
ccactgatgggcatttctcattaactgccccattaacatctcctctcaataacctacatttcatacaaatcatcatgcca

SEQ ID NO: 42253 - DNA, 80 bp, synthetic construct
  misc_feature 1..80: note = Artificially Synthesized Probe
  source 1..80: mol_type = other DNA
gcgcccggccagtaacagcattttttaattcagacaccaggaaaaaaaaaaaagtaaaagaggactttaaaggagagtta

SEQ ID NO: 42254 - DNA, 80 bp, synthetic construct
  misc_feature 1..80: note = Artificially Synthesized Probe
  source 1..80: mol_type = other DNA
ccacatctctgctcatgccagctggaatatatttcacctactcctgtttacctagtttctataaaaaattcaagaccccc

SEQ ID NO: 42255 - DNA, 80 bp, synthetic construct
  misc_feature 1..80: note = Artificially Synthesized Probe
  source 1..80: mol_type = other DNA
agtgcctgctgtctcctacaaagtagtcaaccagagtatagtcttatatgctagtatagctgctactgctcacatatcat

SEQ ID NO: 42256 - DNA, 80 bp, synthetic construct
  misc_feature 1..80: note = Artificially Synthesized Probe
  source 1..80: mol_type = other DNA
acacaaaaaagaaatcttattctcacatttttatccccagctcttaggaccctgcctgacacataataggtagtcaataa

SEQ ID NO: 42257 - DNA, 80 bp, synthetic construct
  misc_feature 1..80: note = Artificially Synthesized Probe
  source 1..80: mol_type = other DNA
acttctacactgctggtgggagtgtaaactagtacaaccattatggaaaacagtgcggagactccttaaagaactaaaag

SEQ ID NO: 42258 - DNA, 80 bp, synthetic construct
  misc_feature 1..80: note = Artificially Synthesized Probe
  source 1..80: mol_type = other DNA
catcgtatgttctcactcatacgtgaacatatgataagaacattgtatgttctcactctaagctatgaggacacaaaggc

SEQ ID NO: 42259 - DNA, 80 bp, synthetic construct
  misc_feature 1..80: note = Artificially Synthesized Probe
  source 1..80: mol_type = other DNA
ttcttggtaatatagatccacaagtttcttgcagacatcacaccacttctgcttgtcaacacttagaacaaaacaaaaca

SEQ ID NO: 42260 - DNA, 80 bp, synthetic construct
  misc_feature 1..80: note = Artificially Synthesized Probe
  source 1..80: mol_type = other DNA
aatgatctgtctgagatttgcctctaaatataatagctgggggtcggagggcacaggtaaagtggatattgttgagtatg

SEQ ID NO: 42261 - DNA, 80 bp, synthetic construct
  misc_feature 1..80: note = Artificially Synthesized Probe
  source 1..80: mol_type = other DNA
gggcctgatcaggttgttctagttcagctgcagcaacgccaataaaaacccaggcattatagttatttttctcttgcttt

SEQ ID NO: 42262 - DNA, 80 bp, synthetic construct
  misc_feature 1..80: note = Artificially Synthesized Probe
  source 1..80: mol_type = other DNA
acacaaattgggtcattcttgtcacctaagtcagagtaaagggagcaccagggggaaaaggcactcaggcctcatagcac

SEQ ID NO: 42263 - DNA, 80 bp, synthetic construct
  misc_feature 1..80: note = Artificially Synthesized Probe
  source 1..80: mol_type = other DNA
gcagaaagtctacaggaagaagacagctatggtggtgctgtatataactgaaacgtgcatcaattagataaacctagtgc

SEQ ID NO: 42264 - DNA, 80 bp, synthetic construct
  misc_feature 1..80: note = Artificially Synthesized Probe
  source 1..80: mol_type = other DNA
tacagtctaccaccttcctaattcccctttccttcagtgaaaattctgtatccttcttttccacctcagtgcctgtattc

SEQ ID NO: 42265 - DNA, 80 bp, synthetic construct
  misc_feature 1..80: note = Artificially Synthesized Probe
  source 1..80: mol_type = other DNA
ctctcccccgagtccaatttctccctctgaatggaatcatacccatcagcataaaaataagctttataatcttggtcctc

SEQ ID NO: 42266 - DNA, 80 bp, synthetic construct
  misc_feature 1..80: note = Artificially Synthesized Probe
  source 1..80: mol_type = other DNA
ccacaagaagctaagttccatgcaggcaagaattttttttttcactgccgcatccccaggacctagtatcttaaattata

SEQ ID NO: 42267 - DNA, 80 bp, synthetic construct
  misc_feature 1..80: note = Artificially Synthesized Probe
  source 1..80: mol_type = other DNA
aaaccagtttcctttggttaaaaaaaaccctgcagactaaaaagaagaaaataacatcaaggatgatgacaactgatcta

SEQ ID NO: 42268 - DNA, 80 bp, synthetic construct
  misc_feature 1..80: note = Artificially Synthesized Probe
  source 1..80: mol_type = other DNA
aacatttaacacaatacgctagcactgaggtcctctctcactcatgcatacacacatatatgtacgtaagtttcagaagt

SEQ ID NO: 42269 - DNA, 80 bp, synthetic construct
  misc_feature 1..80: note = Artificially Synthesized Probe
  source 1..80: mol_type = other DNA
tttagcattgtagacacttaccttttaccaattattaccacctctatattcttcccgaattgaatttgattgttccttac

SEQ ID NO: 42270 - DNA, 80 bp, synthetic construct
  misc_feature 1..80: note = Artificially Synthesized Probe
  source 1..80: mol_type = other DNA
tagcatccctgaagtggcttctgtcaaacaaaaaacaatctagaatggtccctgcagagaatggaagtggttttgaaaaa

SEQ ID NO: 42271 - DNA, 80 bp, synthetic construct
  misc_feature 1..80: note = Artificially Synthesized Probe
  source 1..80: mol_type = other DNA
aatgggtttatcatggtgtaacccaccataagaagcatctgtattcctcaagacagctatcatcaaacatgagtaccctc

SEQ ID NO: 42272 - DNA, 80 bp, synthetic construct
  misc_feature 1..80: note = Artificially Synthesized Probe
  source 1..80: mol_type = other DNA
atgagacctatataaatgtggaatgaggtactcaatggaagtgtttcccatcactggagatgaaaaagcacaggctggac

SEQ ID NO: 42273 - DNA, 80 bp, synthetic construct
  misc_feature 1..80: note = Artificially Synthesized Probe
  source 1..80: mol_type = other DNA
cccgcagatctttatcatgctgcttgagtaacaattctgctacactaacagataaactaactgcagacagagcatttagt

SEQ ID NO: 42274 - DNA, 80 bp, synthetic construct
  misc_feature 1..80: note = Artificially Synthesized Probe
  source 1..80: mol_type = other DNA
aatgaacagccccggccccgatcctttctttctctaagtaccatttcaatcgcctttaggatcccttgtgcaaaaccgac

SEQ ID NO: 42275 - DNA, 80 bp, synthetic construct
  misc_feature 1..80: note = Artificially Synthesized Probe
  source 1..80: mol_type = other DNA
cacactcagctagagactctgccagtgtgacccacgccacccctccccattttctttttttttgagatggagtttcactc

SEQ ID NO: 42276 - DNA, 80 bp, synthetic construct; identical to SEQ ID NO: 42275
  misc_feature 1..80: note = Artificially Synthesized Probe
  source 1..80: mol_type = other DNA

SEQ ID NO: 42277 - DNA, 80 bp, synthetic construct
  misc_feature 1..80: note = Artificially Synthesized Probe
  source 1..80: mol_type = other DNA
gtggcaaactgggactgaaagagtaggtgggaagaaagcattttctgattcctttttttttttttaaacggtcacccaga

SEQ ID NO: 42278 - DNA, 80 bp, synthetic construct
  misc_feature 1..80: note = Artificially Synthesized Probe
  source 1..80: mol_type = other DNA
gaagttcctgttctagcaggcttttcttctggcttttcacagaaacaatctagtcactgttagggttttttaaaggctgt

SEQ ID NO: 42279 - DNA, 80 bp, synthetic construct
  misc_feature 1..80: note = Artificially Synthesized Probe
  source 1..80: mol_type = other DNA
tctgcccatcatcgcacccaccatgccctctgcttatcctttaatctccacttccccttcctgctctaatgggctcctgc

SEQ ID NO: 42280 - DNA, 80 bp, synthetic construct
  misc_feature 1..80: note = Artificially Synthesized Probe
  source 1..80: mol_type = other DNA
gtatacttccatctaaactccccttgcacctgctcctcctgttccagacaatgagctgtaacacgcacatccacaccaca

SEQ ID NO: 42281 - DNA, 80 bp, synthetic construct
  misc_feature 1..80: note = Artificially Synthesized Probe
  source 1..80: mol_type = other DNA
aaggaattgatactgtgtgtaaagcactctgcacagtttctgacacatgacaagccctcgaaagttagctatttccttcc

SEQ ID NO: 42282 - DNA, 80 bp, synthetic construct
  misc_feature 1..80: note = Artificially Synthesized Probe
  source 1..80: mol_type = other DNA
tgtcattagtaaatgaaacagtctgcccaaataaggagaatccacatatgcccagaaatccaagctgggctatggcacac

SEQ ID NO: 42283 - DNA, 80 bp, synthetic construct
  misc_feature 1..80: note = Artificially Synthesized Probe
  source 1..80: mol_type = other DNA
ggtaggattagaattaggatctacaaatcagcgatcgcacaaacattttgggccagtgtatatcacaaacgttatcagtg

SEQ ID NO: 42284 - DNA, 80 bp, synthetic construct
  misc_feature 1..80: note = Artificially Synthesized Probe
  source 1..80: mol_type = other DNA
tgttctaatgaccttggttagctgtttcaggccatgggggattagagggagcaaatttgtaagctgtttacatttctccc

SEQ ID NO: 42285 - DNA, 80 bp, synthetic construct
  misc_feature 1..80: note = Artificially Synthesized Probe
  source 1..80: mol_type = other DNA
caaaacactaggctctgcaaaagaggggagtgaagaagaaggcgagagtttaaaaactccgtattgaatactatgttcac

SEQ ID NO: 42286 - DNA, 80 bp, synthetic construct
  misc_feature 1..80: note = Artificially Synthesized Probe
  source 1..80: mol_type = other DNA
cgctcaggagttggagaccagcctgggcaacatggtgaaaccccgtctctgctaaaatacaaaaaattagccagggttgg

SEQ ID NO: 42287 - DNA, 80 bp, synthetic construct
  misc_feature 1..80: note = Artificially Synthesized Probe
  source 1..80: mol_type = other DNA
catggaggacaagaaagtacaaacactggctatctattccccgctcacacacccagctttggcggcataaggagttgcct

SEQ ID NO: 42288 - DNA, 80 bp, synthetic construct
  misc_feature 1..80: note = Artificially Synthesized Probe
  source 1..80: mol_type = other DNA
ctcgatcagccagggcttcagcttgtcgtcgatgatgatgtcgtagccatagcattcaaagcagtgcttgtcattgttca

SEQ ID NO: 42289 - DNA, 80 bp, synthetic construct
  misc_feature 1..80: note = Artificially Synthesized Probe
  source 1..80: mol_type = other DNA
gggtgacagagcaagaacctgtcacttaaaagcaaacaaacaaaaaaaagaaaactggctgggcgcagtggctgatgtct

SEQ ID NO: 42290 - DNA, 80 bp, synthetic construct
  misc_feature 1..80: note = Artificially Synthesized Probe
  source 1..80: mol_type = other DNA
tgtttccttgtctgcctcactctgaggacaacatgcctggtaaaaaccaggtgatgaaatatttgctaagtgaataaaaa

SEQ ID NO: 42291 - DNA, 80 bp, synthetic construct
  misc_feature 1..80: note = Artificially Synthesized Probe
  source 1..80: mol_type = other DNA
agacacaaaacgaacccacacactgtgctcacgcaccactttgaaagcaggaagagcttcacttaaagtgcagaaagtca

SEQ ID NO: 42292 - DNA, 80 bp, synthetic construct
  misc_feature 1..80: note = Artificially Synthesized Probe
  source 1..80: mol_type = other DNA
ctcaaagtgctgggattacaggcactgtgcctggccacgtctgtctatagttttctttcttttttttttgagacaaggtc

SEQ ID NO: 42293 - DNA, 80 bp, synthetic construct
  misc_feature 1..80: note = Artificially Synthesized Probe
  source 1..80: mol_type = other DNA
aaaaaaaaattgaaaaaaaaaaaaatgttcacacatcaaccttgatgccatcacactttctccagaacagcagtttcaca

SEQ ID NO: 42294 - DNA, 80 bp, synthetic construct
  misc_feature 1..80: note = Artificially Synthesized Probe
  source 1..80: mol_type = other DNA
aaaaaaaaaaaaaaaaaaagcagggtcttactttgttaccctcaagtcccaaacttttgggcttaagtgatcctccacct

SEQ ID NO: 42295 - DNA, 80 bp, synthetic construct
  misc_feature 1..80: note = Artificially Synthesized Probe
  source 1..80: mol_type = other DNA
gccccggaaatattaatagtagcaagcttgctggtgctcatatgttcatttctctcttttcccttaaaaacagatgtgca

SEQ ID NO: 42296 - DNA, 80 bp, synthetic construct
  misc_feature 1..80: note = Artificially Synthesized Probe
  source 1..80: mol_type = other DNA
gacctcaggtgatccgcctgcctcgccctcccagcgtgctgggattacaggcgttaaccaacgcgcccagcctgtttttt

SEQ ID NO: 42297 - DNA, 80 bp, synthetic construct
  misc_feature 1..80: note = Artificially Synthesized Probe
  source 1..80: mol_type = other DNA
ggccttccgtgggtattttaaaatgctcatctccctaatactctcaggcttaatcatttatgcctcacagcacaggctgt

SEQ ID NO: 42298 - DNA, 80 bp, synthetic construct
  misc_feature 1..80: note = Artificially Synthesized Probe
  source 1..80: mol_type = other DNA
cctactaactcttcgagcaaacaccactgactcaaagcagataaaaggagaattaaccatattttaaaagaaagtccagg

SEQ ID NO: 42299 - DNA, 80 bp, synthetic construct
  misc_feature 1..80: note = Artificially Synthesized Probe
  source 1..80: mol_type = other DNA
agggtgattatttgatgactatctcccctggaagctctgggatctgtgagagtaggtactaaggtaggctttgcctatca

SEQ ID NO: 42300 - DNA, 80 bp, synthetic construct
  misc_feature 1..80: note = Artificially Synthesized Probe
  source 1..80: mol_type = other DNA
taaagcgtgaaatacctcacataatttattgactactgtactcaaagtaaaaaaccaaacggttgcatgtgtacttgaag

SEQ ID NO: 42301 - DNA, 80 bp, synthetic construct
  misc_feature 1..80: note = Artificially Synthesized Probe
  source 1..80: mol_type = other DNA
tgtatttcactgtgcagaaccggcaaaacccaagcttgtacctaggagggaatgtagattaattcaaactctgaggagaa

SEQ ID NO: 42302 - DNA, 80 bp, synthetic construct
  misc_feature 1..80: note = Artificially Synthesized Probe
  source 1..80: mol_type = other DNA
gtaaaaagatctgtggttgccacagactagggataaacaggcagagcacagaggattttgagggcagtgaaactactccg

SEQ ID NO: 42303 - DNA, 80 bp, synthetic construct
  misc_feature 1..80: note = Artificially Synthesized Probe
  source 1..80: mol_type = other DNA
catgtgccacgacacccagctaatcagtttgctaactttaacaattctggtaggggatgctgataaggggggaggccgtg

SEQ ID NO: 42304 - DNA, 80 bp, synthetic construct
  misc_feature 1..80: note = Artificially Synthesized Probe
  source 1..80: mol_type = other DNA
agtccccaggagtccactcagggaaatgctcctcgggcctggccatctgggggctagcaaagtgtaattagatttaagca

SEQ ID NO: 42305 - DNA, 80 bp, synthetic construct
  misc_feature 1..80: note = Artificially Synthesized Probe
  source 1..80: mol_type = other DNA
ccccggtttactcagatggagaatgtaagacatggagagtctgaagaacaaaatacgctcagccacttcgtgtgagactg

SEQ ID NO: 42306 - DNA, 80 bp, synthetic construct
  misc_feature 1..80: note = Artificially Synthesized Probe
  source 1..80: mol_type = other DNA
gggctcttccggaactcctctacaaacaggttgtagtcagcgggcagcatataggtgactggaacaaagtctgcaaggca

SEQ ID NO: 42307 - DNA, 80 bp, synthetic construct
  misc_feature 1..80: note = Artificially Synthesized Probe
  source 1..80: mol_type = other DNA
aaaaaaaaaacgccatgccaggcaattcccaaggcactcacagaaactaggatgccacactcaggcccctccttctccct

SEQ ID NO: 42308 - DNA, 80 bp, synthetic construct
  misc_feature 1..80: note = Artificially Synthesized Probe
  source 1..80: mol_type = other DNA
gagtcagtatttgatattcttggagagtctgctgaaggggcaagttggggacgacagagttgaaagagaaatagattcct

SEQ ID NO: 42309 - DNA, 80 bp, synthetic construct
  misc_feature 1..80: note = Artificially Synthesized Probe
  source 1..80: mol_type = other DNA
caagcttcccttcatcaacaatctaggtgcctcaagaacagttcatacacaaaacacagaatcagtgcttgattctttcc

SEQ ID NO: 42310 - DNA, 80 bp, synthetic construct
  misc_feature 1..80: note = Artificially Synthesized Probe
  source 1..80: mol_type = other DNA
accttctcacaggacagctcagggcacccacatgtttccaacagaggaattggcctgggcccaggcatgtatgattttta

SEQ ID NO: 42311 - DNA, 80 bp, synthetic construct
  misc_feature 1..80: note = Artificially Synthesized Probe
  source 1..80: mol_type = other DNA
acaaattgggtatgtggcttttggggtatttttctgtttgcagttgtatgaacttataaattcaaatacatatgataagt

SEQ ID NO: 42312 - DNA, 80 bp, synthetic construct
  misc_feature 1..80: note = Artificially Synthesized Probe
  source 1..80: mol_type = other DNA
gcgcgatctcagctcactgcaacctccacctcctgggttcaagcgattctcctgcttcaatctcccgagttcctgggatt

SEQ ID NO: 42313 - DNA, 80 bp, synthetic construct
  misc_feature 1..80: note = Artificially Synthesized Probe
  source 1..80: mol_type = other DNA
accagcctaggcaacatagcaagaccctgtctctacaaaaaaagaaaaaaatgtggccaggcgcttggcttagacctgta

SEQ ID NO: 42314 - DNA, 80 bp, synthetic construct
  misc_feature 1..80: note = Artificially Synthesized Probe
  source 1..80: mol_type = other DNA
tctggttgtcatgaccaggggatgcctctggcatcgggcatgtccaggccagggatgctgctcgatgtccgactgcacag

SEQ ID NO: 42315 - DNA, 80 bp, synthetic construct
  misc_feature 1..80: note = Artificially Synthesized Probe
  source 1..80: mol_type = other DNA
gtggaggttgcagtgggcagagattgcgccactgcaccccagcttgggcgatagagcgagactccatctcaaaataataa

SEQ ID NO: 42316 - DNA, 80 bp, synthetic construct
  misc_feature 1..80: note = Artificially Synthesized Probe
  source 1..80: mol_type = other DNA
actctggacctcggtctgctctgaaaagtctcgttttcaaactgctcaggcagcccaagattcaaggctcccaccccggc

SEQ ID NO: 42317 - DNA, 80 bp, synthetic construct
  misc_feature 1..80: note = Artificially Synthesized Probe
  source 1..80: mol_type = other DNA
gagaagagaagagaagaaaaggaaacagactcaagggagtccgggtgccctgattcaaagccgggatgatactactctaa

SEQ ID NO: 42318 - DNA, 80 bp, synthetic construct
  misc_feature 1..80: note = Artificially Synthesized Probe
  source 1..80: mol_type = other DNA
tttcaggtgtgagaccccaaacctaccgaggcagacgggccaaacatcctcatccacatttcactaagcaactggggcag

SEQ ID NO: 42319 - DNA, 80 bp, synthetic construct
  misc_feature 1..80: note = Artificially Synthesized Probe
  source 1..80: mol_type = other DNA
aaaagatgctcttaagagtcttcccattacagtaagaatttctgaactgtattacttactggctccagctggccttctca

SEQ ID NO: 42320 - DNA, 80 bp, synthetic construct
  misc_feature 1..80: note = Artificially Synthesized Probe
  source 1..80: mol_type = other DNA
agtcgctcccatagagatgtgttacgggttaagttgtgtccccacaaacttatggggaagtcctaacttgtctgaaacaa

SEQ ID NO: 42321 - DNA, 80 bp, synthetic construct
  misc_feature 1..80: note = Artificially Synthesized Probe
  source 1..80: mol_type = other DNA
gtcaagcccagtcaagacagctacatttccaggagaggaaaagcctgtttctttttcagggtttctttttatgtgagaaa

SEQ ID NO: 42322 - DNA, 80 bp, synthetic construct
  misc_feature 1..80: note = Artificially Synthesized Probe
  source 1..80: mol_type = other DNA
atggtgtgaacctgggaggtagagcttgcagtgagccaagattgcaccactgcagtccagcctgggcgacagagcgagac

SEQ ID NO: 42323 - DNA, 80 bp, synthetic construct
  misc_feature 1..80: note = Artificially Synthesized Probe
  source 1..80: mol_type = other DNA
actgtgcccagctgacacctttttccttctttctttgcaggctccccacctgctttttctaggtttcttttctttttttg

SEQ ID NO: 42324 - DNA, 80 bp, synthetic construct
  misc_feature 1..80: note = Artificially Synthesized Probe
  source 1..80: mol_type = other DNA
ggtagtttatgaatattcttctccactgtgtatattatcgtctcatgtgatgcccaaaggcagatgatatgatttgtctg

SEQ ID NO: 42325 - DNA, 80 bp, synthetic construct
  misc_feature 1..80: note = Artificially Synthesized Probe
  source 1..80: mol_type = other DNA
ataaaaacctaaccaggaaaaacagagtgacatattgaccttttatgttgaatgcagctcacaattggagttggggctgt

SEQ ID NO: 42326 - DNA, 80 bp, synthetic construct
  misc_feature 1..80: note = Artificially Synthesized Probe
  source 1..80: mol_type = other DNA
agcaatcatttagtccagtgctactcaaagcatggcccacatgtgagcagcacctggagcttgttagaaatacagattct

SEQ ID NO: 42327 - DNA, 80 bp, synthetic construct
  misc_feature 1..80: note = Artificially Synthesized Probe
  source 1..80: mol_type = other DNA
aaataaagtaataacaatgtcagtgatgacttcatgttgagcagggcattcgttcacagcggtattgtcactgtccatct

SEQ ID NO: 42328 - DNA, 80 bp, synthetic construct
  misc_feature 1..80: note = Artificially Synthesized Probe
  source 1..80: mol_type = other DNA
tccacaggtacattgcgccctgcaaaagatgccaacagaaacaacacagattgcaaacgaatgggaaacgtgtaggaaca

SEQ ID NO: 42329 - DNA, 80 bp, synthetic construct
  misc_feature 1..80: note = Artificially Synthesized Probe
  source 1..80: mol_type = other DNA
cctcccagccagggtgggcctcacctttgaagagaaagtgggagtagtacttgaaggtgttgtaggactgctgcatgagt

SEQ ID NO: 42330 - DNA, 80 bp, synthetic construct
  misc_feature 1..80: note = Artificially Synthesized Probe
  source 1..80: mol_type = other DNA
accagcgggttgagcagctctccgggcgtttgcccagctccaagctaggcagaaaagggaccaccgtccccaggagtccc

SEQ ID NO: 42331 - DNA, 80 bp, synthetic construct
  misc_feature 1..80: note = Artificially Synthesized Probe
  source 1..80: mol_type = other DNA
accacctccccactgcacgctgtccccacaaccagcttgtgccaaaaaaaggaaaatcgcatgtgggacccacccgcgtg

SEQ ID NO: 42332 - DNA, 80 bp, synthetic construct
  misc_feature 1..80: note = Artificially Synthesized Probe
  source 1..80: mol_type = other DNA
gatgctggcgttggacacatgtccatggatgttccaccgtggccgagtgggagccacatctgacacagactcccctaagc

SEQ ID NO: 42333 - DNA, 80 bp, synthetic construct
  misc_feature 1..80: note = Artificially Synthesized Probe
  source 1..80: mol_type = other DNA
gccgagggctatgggaaaaccatagggcaccctgggttccactctgccgcttacctgggggtgcacgctcaagaggacgt

SEQ ID NO: 42334 - DNA, 80 bp, synthetic construct
  misc_feature 1..80: note = Artificially Synthesized Probe
  source 1..80: mol_type = other DNA
ccccttctacaggtacaaacctgagaactgaaaactaatgcaaaaaagcacatgaagcaaaaccaacacaaacgctttat

SEQ ID NO: 42335 - DNA, 80 bp, synthetic construct
  misc_feature 1..80: note = Artificially Synthesized Probe
  source 1..80: mol_type = other DNA
atgttcagaaagaagataaataaagagacaggaccccaaacagtacgcaggcctcgcctggaccctaatccatacaaacc

SEQ ID NO: 42336 - DNA, 80 bp, synthetic construct
  misc_feature 1..80: note = Artificially Synthesized Probe
  source 1..80: mol_type = other DNA
gatgctgcttcccgggcatgagcgattaattcttgttttgcaatttccatacgtaattcctgagaaagacaactggtaat

SEQ ID NO: 42337 - DNA, 80 bp, synthetic construct
  misc_feature 1..80: note = Artificially Synthesized Probe
  source 1..80: mol_type = other DNA
ctgggcttcaggctgagccacccagacccaggaggagaagtcagagcccctgcctggcatctggctccggacattcatct

SEQ ID NO: 42338 - DNA, 80 bp, synthetic construct
  misc_feature 1..80: note = Artificially Synthesized Probe
  source 1..80: mol_type = other DNA
acggagaggtgggtggggcgtggctgtcagtgaggggtgggacaggggcgtggctgtcagtgaggggcaagtgggggcgt

SEQ ID NO: 42339 - DNA, 80 bp, synthetic construct
  misc_feature 1..80: note = Artificially Synthesized Probe
  source 1..80: mol_type = other DNA
gggctgcacctgagagcccctcccatccacacagtggtaccaagcatctgccacaactcgcacccttcacagcccagctc

SEQ ID NO: 42340 - DNA, 80 bp, synthetic construct
  misc_feature 1..80: note = Artificially Synthesized Probe
  source 1..80: mol_type = other DNA
cctggctatgcctgccagatgaacaagaaccacagtccagcccttctcagcgtcccctgctctgaccccttctccaccat

SEQ ID NO: 42341 - DNA, 80 bp, synthetic construct
  misc_feature 1..80: note = Artificially Synthesized Probe
  source 1..80: mol_type = other DNA
tcaagagccactatcgggtttcagatgttagcaaggaaagaaaaggtttagactctctggtcctgcagaaggacctctga

SEQ ID NO: 42342 - DNA, 80 bp, synthetic construct
  misc_feature 1..80: note = Artificially Synthesized Probe
  source 1..80: mol_type = other DNA
aggaaaaaaaatatcccgcaatacaaaggaacaagataccaaaccacaacagcaccgtgtataccctaaagagatatttt

SEQ ID NO: 42343 - DNA, 80 bp, synthetic construct
  misc_feature 1..80: note = Artificially Synthesized Probe
  source 1..80: mol_type = other DNA
aaatacaaaaattagccaggcgtggtagtccatgcctgtagtcccagctacttgggaggctgaggcaggagaatcgcttg

SEQ ID NO: 42344 - DNA, 80 bp, synthetic construct
  misc_feature 1..80: note = Artificially Synthesized Probe
  source 1..80: mol_type = other DNA
agttcaacaccagcctgggcaacacggcaagaccccatctcttcaggcattttaaaaattagctgggtgggccgggcgtg

SEQ ID NO: 42345 - DNA, 80 bp, synthetic construct
  misc_feature 1..80: note = Artificially Synthesized Probe
  source 1..80: mol_type = other DNA
gtctaagaatggccaccataaaagaacatttaagacaaaggaaggggatgagcacttaaatgaaaaagctgcagagcaag

SEQ ID NO: 42346 - DNA, 80 bp, synthetic construct
  misc_feature 1..80: note = Artificially Synthesized Probe
  source 1..80: mol_type = other DNA
acagaagaatggaagtgattcaaaacaataaactctaagaaacatagccaggtatgaatgtcagctcaccacccagcctt

SEQ ID NO: 42347 - DNA, 80 bp, synthetic construct
  misc_feature 1..80: note = Artificially Synthesized Probe
  source 1..80: mol_type = other DNA
ccatggcagcatccacaccccctgtccacagcatcatcatccacacccctatccacagcagcatcacccacacccatcca

SEQ ID NO: 42348 - DNA, 80 bp, synthetic construct
  misc_feature 1..80: note = Artificially Synthesized Probe
  source 1..80: mol_type = other DNA
cactgtctccacagggacggcgctcgaggacgccaagtggagtaaaatgagccatcacaaaacactgtgcaactccactt

SEQ ID NO: 42349 - DNA, 80 bp, synthetic construct
  misc_feature 1..80: note = Artificially Synthesized Probe
  source 1..80: mol_type = other DNA
cacatgcaactctgaggaaatttgccttctgctggtgctgaggctgtgaaaccacatgtactggcactacacacactcac

SEQ ID NO: 42350 - DNA, 80 bp, synthetic construct
  misc_feature 1..80: note = Artificially Synthesized Probe
  source 1..80: mol_type = other DNA
gagctcatcacagcaggaaactagcaggtggctgggatttaaaatgaaacaagaccaaacgatttgccaaaggaacttga

SEQ ID NO: 42351 - DNA, 80 bp, synthetic construct
  misc_feature 1..80: note = Artificially Synthesized Probe
  source 1..80: mol_type = other DNA
aggagttgcctaattatggtgagctgaagaatgttccaggtgaagggaacctggtgttggaaggttctgagtttttacaa

SEQ ID NO: 42352 - DNA, 80 bp, synthetic construct
  misc_feature 1..80: note = Artificially Synthesized Probe
  source 1..80: mol_type = other DNA
ccgatacccacaggatcaccagtggactggatgtgaacggggcattccatggccaaacatttggggaagtgcgtgttttt

SEQ ID NO: 42353 - DNA, 80 bp, synthetic construct
  misc_feature 1..80: note = Artificially Synthesized Probe
  source 1..80: mol_type = other DNA
tgttagtgctttcccctctgcatctctcttaactcccaggactcagtcaattttggacactagcttaggttactaaccca

SEQ ID NO: 42354 - DNA, 80 bp, synthetic construct
  misc_feature 1..80: note = Artificially Synthesized Probe
  source 1..80: mol_type = other DNA
atatatgaacgttattaatcattagtttgtagcaattgctctttattccaagattataataatcttcgctctacaattgt

SEQ ID NO: 42355 - DNA, 80 bp, synthetic construct
  misc_feature 1..80: note = Artificially Synthesized Probe
  source 1..80: mol_type = other DNA
tttggggccactactggtctccacgtgttggtggtagtgatcccccgggcccagctgttttttcttctatctctgtcttg

SEQ ID NO: 42356 - DNA, 80 bp, synthetic construct
  misc_feature 1..80: note = Artificially Synthesized Probe
  source 1..80: mol_type = other DNA
gtggggctgaggaactgagtattttattttgttttaattaacttcaatttaaacggcagctctagaaggcagaggtggct

SEQ ID NO: 42357 - DNA, 80 bp, synthetic construct
  misc_feature 1..80: note = Artificially Synthesized Probe
  source 1..80: mol_type = other DNA
aaaggtcacaggaagcattttccaaaccccgagagagatgaaagaggaaaaactaaacattctaccttaatagccagccc

SEQ ID NO: 42358 - DNA, 80 bp, synthetic construct
  misc_feature 1..80: note = Artificially Synthesized Probe
  source 1..80: mol_type = other DNA
caccagaagccagctcggcgtttcttctaattcagtagccctcaacctttagggagtcacagaaccgtggcaaaaccgaa

SEQ ID NO: 42359 - DNA, 80 bp, synthetic construct
  misc_feature 1..80: note = Artificially Synthesized Probe
  source 1..80: mol_type = other DNA
gtttccaaaaaagttagaataacttcctctcccggagacctcggttttgcacaagccggccttgaaatcagagcctttcc

SEQ ID NO: 42360 - DNA, 80 bp, synthetic construct
  misc_feature 1..80: note = Artificially Synthesized Probe
  source 1..80: mol_type = other DNA
cttagacagatggtcgcagttttcattctcggtggtgtgtgggtgtccgtggttggcggtggaaggagcgagcatcagaa

SEQ ID NO: 42361 - DNA, 80 bp, synthetic construct
  misc_feature 1..80: note = Artificially Synthesized Probe
  source 1..80: mol_type = other DNA
tatttctctaggaaagtttggattggctgagtactaaacgctacagtggggtaatacattaattctggtttttgctgcct

SEQ ID NO: 42362 - DNA, 80 bp, synthetic construct
  misc_feature 1..80: note = Artificially Synthesized Probe
  source 1..80: mol_type = other DNA
ttcacgtatgtgaagaaaactgtcaagactaacagcaacagcagcacaaagcctaaattgtcctctgaaaggaagagaaa

SEQ ID NO: 42363 - DNA, 80 bp, synthetic construct
  misc_feature 1..80: note = Artificially Synthesized Probe
  source 1..80: mol_type = other DNA
ccatcaataagatctgatgtagggatttgacctgttaatgtgggtctttccccttaaatatcagcagtcctttcggcctt

SEQ ID NO: 42364 - DNA, 80 bp, synthetic construct
  misc_feature 1..80: note = Artificially Synthesized Probe
  source 1..80: mol_type = other DNA
ttcctgattatgataattgcaagatgtcatcactgggagaagggagtgaagatatgagaatctctgtataatatttcttg

SEQ ID NO: 42365 - DNA, 80 bp, synthetic construct
  misc_feature 1..80: note = Artificially Synthesized Probe
  source 1..80: mol_type = other DNA
gctgtccctcactgagcggttttctatcctaatattgttttcctctgttatttgaccagggaaagattcagatgacccag

SEQ ID NO: 42366 - DNA, 80 bp, synthetic construct
  misc_feature 1..80: note = Artificially Synthesized Probe
  source 1..80: mol_type = other DNA
ctgtatgtgaaaatgcaagcaggcagcgttttctttgaatcacgagatctacaagtaccgtttcctttccttcatctctg

SEQ ID NO: 42367 - DNA, 80 bp, synthetic construct
  misc_feature 1..80: note = Artificially Synthesized Probe
  source 1..80: mol_type = other DNA
agctaggagagaaagatgtgatcatttcgcattccttgttttctgtctggtgaacatttcttctccagcaagtgtttcct

SEQ ID NO: 42368 - DNA, 80 bp, synthetic construct
  misc_feature 1..80: note = Artificially Synthesized Probe
  source 1..80: mol_type = other DNA
tgaagaatttcacaagggatcagggctacggaagggactcaggtctcttaagaataggtcccattctgtatttatcttca

SEQ ID NO: 42369 - DNA, 80 bp, synthetic construct
  misc_feature 1..80: note = Artificially Synthesized Probe
  source 1..80: mol_type = other DNA
ttgctgaaagaagccaaacgaccatcttgtctgtctcgtaaagcatccttctgcttgaatagcagagctctttgaacggc

SEQ ID NO: 42370 - DNA, 80 bp, synthetic construct
  misc_feature 1..80: note = Artificially Synthesized Probe
  source 1..80: mol_type = other DNA
tgggggatccacggttcagaataagacttgactgaagttaagtcttgactcaagttaagcagtggagaacacttttctgc

SEQ ID NO: 42371 - DNA, 80 bp, synthetic construct
  misc_feature 1..80: note = Artificially Synthesized Probe
  source 1..80: mol_type = other DNA
ctgtttggaataatacaaaacgctccagaactaggtagtgatgatgccttcacaacaaggtgtatgcactaaattccact

SEQ ID NO: 42372 - DNA, 80 bp, synthetic construct
  misc_feature 1..80: note = Artificially Synthesized Probe
  source 1..80: mol_type = other DNA
gttcagcaccagttgtgtgttttccttcggttgctcatttttcttttcttcctccctgatctgtgcaccctttacatgct

SEQ ID NO: 42373 - DNA, 80 bp, synthetic construct
  misc_feature 1..80: note = Artificially Synthesized Probe
  source 1..80: mol_type = other DNA
gccgaggcgcagagcccagctgctttgattcatgagcacgatattcacattcgtagcacagcacacttgcttttcctggg

SEQ ID NO: 42374 - DNA, 80 bp, synthetic construct
  misc_feature 1..80: note = Artificially Synthesized Probe
  source 1..80: mol_type = other DNA
ctaatgcaggcctttccgaccatctgcttccaaaagctgaccattccaagtccagcaatcataaataaaatagcaaaata

SEQ ID NO: 42375 - DNA, 80 bp, synthetic construct
  misc_feature 1..80: note = Artificially Synthesized Probe
  source 1..80: mol_type = other DNA
tatgcagtcagcaaatgtgtgttgtaagtggatgtttaataaagtgacggccatgattgtaggatggagcagttcatacg

SEQ ID NO: 42376 - DNA, 80 bp, synthetic construct
  misc_feature 1..80: note = Artificially Synthesized Probe
  source 1..80: mol_type = other DNA
ctaattttcgttaagcctgtcttcctttacaccctgggctacatttgacgcatatttctggcaaattctgggaccacctt

SEQ ID NO: 42377 - DNA, 80 bp, synthetic construct
  misc_feature 1..80: note = Artificially Synthesized Probe
  source 1..80: mol_type = other DNA
tgcaaactgacataaagggtttgagaaacgatggcaaagccacacggggtcactccactcgttgaaagtccacccagcaa

SEQ ID NO: 42378 - DNA, 80 bp, synthetic construct
  misc_feature 1..80: note = Artificially Synthesized Probe
  source 1..80: mol_type = other DNA
tggtcttttggaacttttttttttttttgctgtggcattagacaggcatcccctaacccagagaaccctcactaccactg

SEQ ID NO: 42379 - DNA, 80 bp, synthetic construct
  misc_feature 1..80: note = Artificially Synthesized Probe
  source 1..80: mol_type = other DNA
acagagcgagactccaccatggaaaaaaaaaagaaaagcacggcgccttcatgttccatgccttcacgctgctctccctt

SEQ ID NO: 42380 - DNA, 80 bp, synthetic construct
  misc_feature 1..80: note = Artificially Synthesized Probe
  source 1..80: mol_type = other DNA
gccctgaaactagaaactgaaaaggcagtcacatcctcatcagaaagaaattgatggtgagttaggaggccaggagggaa

SEQ ID NO: 42381 - DNA, 80 bp, synthetic construct
  misc_feature 1..80: note = Artificially Synthesized Probe
  source 1..80: mol_type = other DNA
gtccgtgatcaccagctgccaccatgaccagtatcctctgttgcccacacactcgggcattgttggctgggctcagtgtg

SEQ ID NO: 42382 - DNA, 80 bp, synthetic construct
  misc_feature 1..80: note = Artificially Synthesized Probe
  source 1..80: mol_type = other DNA
acaacaatgaaatgacaacctgtggaatgggagaaagtatcggcaaattatccatctgataggagagaactatccagaag

SEQ ID NO: 42383 - DNA, 80 bp, synthetic construct
  misc_feature 1..80: note = Artificially Synthesized Probe
  source 1..80: mol_type = other DNA
cacacacacaccacacaccccacgcacacatcacataccacacacaaaccacacaccctacataccccacacaccccaca

SEQ ID NO: 42384 - DNA, 80 bp, synthetic construct
  misc_feature 1..80: note = Artificially Synthesized Probe
  source 1..80: mol_type = other DNA
cataccacacacaaaccacacccccccacacacacagcacacaccacacacaaaccacgcaccccatgcacacaccacac

SEQ ID NO: 42385 - DNA, 80 bp, synthetic construct
  misc_feature 1..80: note = Artificially Synthesized Probe
  source 1..80: mol_type = other DNA
gttctacttggaagtgatgcttacagattctcaagaaggttgaatccaaacccttgtaaaaattgggtcctgttgagtgt

SEQ ID NO: 42386 - DNA, 80 bp, synthetic construct
  misc_feature 1..80: note = Artificially Synthesized Probe
  source 1..80: mol_type = other DNA
caaggagacaaatctactgacagccattcataacactgcatgtagctgttgtacaacaatggttagcaaacaaagaagac

SEQ ID NO: 42387 - DNA, 80 bp, synthetic construct
  misc_feature 1..80: note = Artificially Synthesized Probe
  source 1..80: mol_type = other DNA
gaagtgcagctaccactgttcaagggaaacacaacttgggaacacggctacccagatgcttttattcaatcctcatcctt

SEQ ID NO: 42388 - DNA, 80 bp, synthetic construct
  misc_feature 1..80: note = Artificially Synthesized Probe
  source 1..80: mol_type = other DNA
ccttctttgtggaacatgtgtcctcttccaggctctgttgatgacttcatatagagtgcacaaaggaacaaaaacaatga

SEQ ID NO: 42389 - DNA, 80 bp, synthetic construct
  misc_feature 1..80: note = Artificially Synthesized Probe
  source 1..80: mol_type = other DNA
cctggaatagcacagctctgtcccgagtgaaagtttacttcagaagattctgatgcaatagagaaaaaataaatcgggtg

SEQ ID NO: 42390 - DNA, 80 bp, synthetic construct
  misc_feature 1..80: note = Artificially Synthesized Probe
  source 1..80: mol_type = other DNA
gcattcagatgcctttgccaggtttttgacacactttggcaatatgtgtcaaaagcattcagattgctcagattcttgga

SEQ ID NO: 42391 - DNA, 80 bp, synthetic construct
  misc_feature 1..80: note = Artificially Synthesized Probe
  source 1..80: mol_type = other DNA
aggttttgtgctgccagggactgtaatccagaactttaatattcaaattactgggtgcactgggggccaggcagaaaacg

SEQ ID NO: 42392 - DNA, 80 bp, synthetic construct
  misc_feature 1..80: note = Artificially Synthesized Probe
  source 1..80: mol_type = other DNA
tgttctctctttatagtcctccaccttcaggagctgactttcctctaatgtttctttaaatgttaatgttggagcctgca

SEQ ID NO: 42393 - DNA, 80 bp, synthetic construct
  misc_feature 1..80: note = Artificially Synthesized Probe
  source 1..80: mol_type = other DNA
cttgtggagtttcctaaaatgccccttccttgctctgccccactacccatcccctattctgacatgcccagctaggaagg

SEQ ID NO: 42394 - DNA, 80 bp, synthetic construct
  misc_feature 1..80: note = Artificially Synthesized Probe
  source 1..80: mol_type = other DNA
ttagtgtcagtgttagtgttagtgtcagcattagtattagtgtgttagtattggtattagtgttagtgttagtatttatt

SEQ ID NO: 42395 - DNA, 80 bp, synthetic construct
  misc_feature 1..80: note = Artificially Synthesized Probe
  source 1..80: mol_type = other DNA
attagcattagttagtatttattagcattagtgttagtattagtgccagcattagttctggctgggctgggctggtgtcc

SEQ ID NO: 42396 - DNA, 80 bp, synthetic construct
  misc_feature 1..80: note = Artificially Synthesized Probe
  source 1..80: mol_type = other DNA
catccagtgcctacctgtgttaactggacccaaaacctctgagaccattcaatagggtggtggctggaaaacagatcagt

SEQ ID NO: 42397 - DNA, 80 bp, synthetic construct
  misc_feature 1..80: note = Artificially Synthesized Probe
  source 1..80: mol_type = other DNA
gggccccacagggctgcagatgggctccgttcaccacattgctcattttaaaaattctctgctgatttaaaatccactca

SEQ ID NO: 42398 - DNA, 80 bp, synthetic construct
  misc_feature 1..80: note = Artificially Synthesized Probe
  source 1..80: mol_type = other DNA
catgccatagaagtacaggtttaagccccagaacaagattctaggcatggtctgattcacgggcacgttcaagggtgtgg

SEQ ID NO: 42399 - DNA, 80 bp, synthetic construct
  misc_feature 1..80: note = Artificially Synthesized Probe
  source 1..80: mol_type = other DNA
tgatgagtctgctatttcttgctagctatctactgtccttgacgtctactgcgtcagccatagcacacagaagatgtctg

SEQ ID NO: 42400 - DNA, 80 bp, synthetic construct
  misc_feature 1..80: note = Artificially Synthesized Probe
  source 1..80: mol_type = other DNA
tcagatacccacaactgagggtagactgtttggggaaaaagtggtttctttctgcatccttttgttttgctaaaagtttc

SEQ ID NO: 42401 - DNA, 80 bp, synthetic construct
  misc_feature 1..80: note = Artificially Synthesized Probe
  source 1..80: mol_type = other DNA
accctcatttcctctcttccaccccaccacatcatcttaataaaacatgaaggtaactgaatgagtacgactccctcatt

SEQ ID NO: 42402 - DNA, 80 bp, synthetic construct
  misc_feature 1..80: note = Artificially Synthesized Probe
  source 1..80: mol_type = other DNA
agaggagctcagttccgaaagacacttttcactcaagttttttacaaatcacaaaatgttcccaaggtgtaaccatagct

SEQ ID NO: 42403 - DNA, 80 bp, synthetic construct
  misc_feature 1..80: note = Artificially Synthesized Probe
  source 1..80: mol_type = other DNA
tatgcagcttgcataataacggcgaagtcctgttcaggatccctagatcttagctctgccatatttcaaccaaaatcagt

SEQ ID NO: 42404 - DNA, 80 bp, synthetic construct
  misc_feature 1..80: note = Artificially Synthesized Probe
  source 1..80: mol_type = other DNA
gcaggtagtaccagcccattttatagatgagaaatggattgccaaggatgatatataagtgtaagaacccacatgtcggc

SEQ ID NO: 42405 - DNA, 80 bp, synthetic construct
  misc_feature 1..80: note = Artificially Synthesized Probe
  source 1..80: mol_type = other DNA
tcacgactatatttctgtatctctttacttgacccttgaggctgcgagtcttctggggcagggggattagtctctaagct

SEQ ID NO: 42406 - DNA, 80 bp, synthetic construct
  misc_feature 1..80: note = Artificially Synthesized Probe
  source 1..80: mol_type = other DNA
cttgttctggtctgcatttcggcctggacttctgtgtctctgtgtgctgtcctgaggcctgcgggctcccaggtgtctgt

SEQ ID NO: 42407 - DNA, 80 bp, synthetic construct
  misc_feature 1..80: note = Artificially Synthesized Probe
  source 1..80: mol_type = other DNA
ctgtccagcctgggctgttcactcatcctgtcctgcccctgaaatttactttttccctctaatatggttttttgtttgtt

SEQ ID NO: 42408 - DNA, 80 bp, synthetic construct
  misc_feature 1..80: note = Artificially Synthesized Probe
  source 1..80: mol_type = other DNA
tacagatatggcttatggtcagcgttgtttaattattcagaacagttttatatcccccagttaaaaattgttcaagggag

SEQ ID NO: 42409 - DNA, 80 bp, synthetic construct
  misc_feature 1..80: note = Artificially Synthesized Probe
  source 1..80: mol_type = other DNA
ctgacagagagatctgatggtgtctgtggccccccaaacctttcctggcctccttgtcgctttggggagtcccaccaatt

SEQ ID NO: 42410 - DNA, 80 bp, synthetic construct
  misc_feature 1..80: note = Artificially Synthesized Probe
  source 1..80: mol_type = other DNA
ccatcatcttccactcatgggttttgtttggagactgaatttggtggcatctggagaagttgtgactcacgggttgaaag

SEQ ID NO: 42411 - DNA, 80 bp, synthetic construct
  misc_feature 1..80: note = Artificially Synthesized Probe
  source 1..80: mol_type = other DNA
caagccagtggtgccggaagtccctctggaggccgcctggccgagcagtgtcctttcagagatggaggaacctggggcac

SEQ ID NO: 42412 - DNA, 80 bp, synthetic construct
  misc_feature 1..80: note = Artificially Synthesized Probe
  source 1..80: mol_type = other DNA
ccatcgtcccacagaaatattcaccaaatcctccaacgccccctttgaaagtcgctgtcagggacggtatccctgcgttc

SEQ ID NO: 42413 - DNA, 80 bp, synthetic construct
  misc_feature 1..80: note = Artificially Synthesized Probe
  source 1..80: mol_type = other DNA
gttgtcacaggagatgaatgacaaggccggatatgttcagcctcatctttctgcccaaaaaacatcttagatgaactgga

SEQ ID NO: 42414 - DNA, 80 bp, synthetic construct
  misc_feature 1..80: note = Artificially Synthesized Probe
  source 1..80: mol_type = other DNA
aggcttcagctgctggtttctctctgctttcttcattgtagtccctctttcaacaaatatttagtgagcacttatgaagt

SEQ ID NO: 42415 - DNA, 80 bp, synthetic construct
  misc_feature 1..80: note = Artificially Synthesized Probe
  source 1..80: mol_type = other DNA
atggctatcgatacatttgggtttcctgctttttcttggatgagtttggtaacttggacagcatgagaattaagagtgtg

SEQ ID NO: 42416 - DNA, 80 bp, synthetic construct
  misc_feature 1..80: note = Artificially Synthesized Probe
  source 1..80: mol_type = other DNA
cctttgccttttgctcagcatgctgggagacttccaggagcactctctgatgtatttgtttttcttcatttttaaatttt

SEQ ID NO: 42417 - DNA, 80 bp, synthetic construct
  misc_feature 1..80: note = Artificially Synthesized Probe
  source 1..80: mol_type = other DNA
agatatggggtatgtgtgatgtggagtatgtgtgtgtgtgatgtgtgtggtaaggagtttgtatgaattggggtgtgtgt

SEQ ID NO: 42418 - DNA, 80 bp, synthetic construct
  misc_feature 1..80: note = Artificially Synthesized Probe
  source 1..80: mol_type = other DNA
tgtgaggtgtgtgtgatgtgtgtgtgatgtagtgtgtgtgatgtggggtgtgtgctgtggggtatgtgcgtgatgtgagg

SEQ ID NO: 42419 - DNA, 80 bp, synthetic construct
  misc_feature 1..80: note = Artificially Synthesized Probe
  source 1..80: mol_type = other DNA
ctttttcaacaactagcagcattcttggcacatgatagatgctcaattatgtcgcaggaatggaaggaagaaagggagga

SEQ ID NO: 42420 - DNA, 80 bp, synthetic construct
  misc_feature 1..80: note = Artificially Synthesized Probe
  source 1..80: mol_type = other DNA
tccccttggagggttggttcagctcatatatcaaaagctgtggtaattatttcctcccactgaggaaggcttccatttag

SEQ ID NO: 42421 - DNA, 80 bp, synthetic construct
  misc_feature 1..80: note = Artificially Synthesized Probe
  source 1..80: mol_type = other DNA
atggacacacactcactctggacattctttcatactcacactcactctcacactagtgggcacactcacagacacacaca

SEQ ID NO: 42422 - DNA, 80 bp, synthetic construct
  misc_feature 1..80: note = Artificially Synthesized Probe
  source 1..80: mol_type = other DNA
tacacacataaacacacaccacgcgccacacaaatataccacacactacacacacacccccacactgtacatacacacca

SEQ ID NO: 42423 - DNA, 80 bp, synthetic construct
  misc_feature 1..80: note = Artificially Synthesized Probe
  source 1..80: mol_type = other DNA
cataccacatacacacacatgcacacacatacaacataccatgtacactacacactatataccacacatacataccccac

SEQ ID NO: 42424 - DNA, 80 bp, synthetic construct
  misc_feature 1..80: note = Artificially Synthesized Probe
  source 1..80: mol_type = other DNA
gttgacagctcccgccagcggctgacccatttctctgcgtcctcctcgctggaacccagccctctgctgcccgaaacccc

SEQ ID NO: 42425 - DNA, 80 bp, synthetic construct
  misc_feature 1..80: note = Artificially Synthesized Probe
  source 1..80: mol_type = other DNA
cgagcctctgcatgattgtttcaagtcagcctggaattcttactttcacgccgctattcttttcctttctccgtgattgc

SEQ ID NO: 42426 - DNA, 80 bp, synthetic construct
  misc_feature 1..80: note = Artificially Synthesized Probe
  source 1..80: mol_type = other DNA
caatgcctatgagctcaaggaatttctacagtataaacaagacaagctcttttcaagaggcaatgaaaggcaggcacggt

SEQ ID NO: 42427 - DNA, 80 bp, synthetic construct
  misc_feature 1..80: note = Artificially Synthesized Probe
  source 1..80: mol_type = other DNA
aaaatagggtaataacatctgccacctgggattactgtgaacgttaaactaatattcatagagtaagcgtgagtcaggtg

SEQ ID NO: 42428 - DNA, 80 bp, synthetic construct
  misc_feature 1..80: note = Artificially Synthesized Probe
  source 1..80: mol_type = other DNA
gcgcttcactgggatcatgccctatcatgatacccagcatccgtctactccaccctgcctgttccaagtgaccccagcac

SEQ ID NO: 42429 - DNA, 80 bp, synthetic construct
  misc_feature 1..80: note = Artificially Synthesized Probe
  source 1..80: mol_type = other DNA
ggagggaaggccaagacccgcgcacactagacccagttctcaggtgggatggacccatccagaaccccattctcacttga

SEQ ID NO: 42430 - DNA, 80 bp, synthetic construct
  misc_feature 1..80: note = Artificially Synthesized Probe
  source 1..80: mol_type = other DNA
cccaggatccgattctagaggtaagaaaactttttcctgcaacagctgaaagagtccacttattgtacaaaatgatgcag

SEQ ID NO: 42431 - DNA, 80 bp, synthetic construct
  misc_feature 1..80: note = Artificially Synthesized Probe
  source 1..80: mol_type = other DNA
gtctttaaaacaaaaaagagaaagaaaaatgtgatatgaccagttgaaaatggcatattaggccgggcgtggtggctcac

SEQ ID NO: 42432 - DNA, 80 bp, synthetic construct
  misc_feature 1..80: note = Artificially Synthesized Probe
  source 1..80: mol_type = other DNA
tataggcatacagcagggatcccagccccgtcccacttccccagggtcccagcactgggatggagctcactgtggggctg

SEQ ID NO: 42433 - DNA, 80 bp, synthetic construct
  misc_feature 1..80: note = Artificially Synthesized Probe
  source 1..80: mol_type = other DNA
atgtgcctgtaatcccccctactcgggaggctgagacaggagaatcgcttgaacccaggaggcagaggttgcagtgagct

SEQ ID NO: 42434 - DNA, 80 bp, synthetic construct
  misc_feature 1..80: note = Artificially Synthesized Probe
  source 1..80: mol_type = other DNA
gccaatgtgaaaaggacaactgtgactatcactgggtttctttctgttttgttttttggggggttatttttttcttgttt

SEQ ID NO: 42435 - DNA, 80 bp, synthetic construct
  misc_feature 1..80: note = Artificially Synthesized Probe
  source 1..80: mol_type = other DNA
gaggtgtgggtggagtttggtctgggttgaaagtgagtttggggagagaagaaatgcggaatgcagcagaggcagcggtg

SEQ ID NO: 42436 - DNA, 80 bp, synthetic construct
  misc_feature 1..80: note = Artificially Synthesized Probe
  source 1..80: mol_type = other DNA
tttttaaaaatcagccgggtgtgatagcacacgcctgtcatcccaggtgctcaagaggctgaggcggaaggatcgcttga

SEQ ID NO: 42437 - DNA, 80 bp, synthetic construct
  misc_feature 1..80: note = Artificially Synthesized Probe
  source 1..80: mol_type = other DNA
gacgtgttgggatgtaagttatgggctggaatatcgttaggggttggggtctaggttgaaggtcaaggtgtagcccggga

SEQ ID NO: 42438 - DNA, 80 bp, synthetic construct
  misc_feature 1..80: note = Artificially Synthesized Probe
  source 1..80: mol_type = other DNA
ggggagagatgccacatcccacccagaggtccccctatcatcgtacctcctggttggggcaggcaacagcgacgcagaga

SEQ ID NO: 42439 - DNA, 80 bp, synthetic construct
  misc_feature 1..80: note = Artificially Synthesized Probe
  source 1..80: mol_type = other DNA
cttattgcaacctctgcccacctgggttcaagcaattctcttgcctcaacacctcaacctcccgagtagctgggattaca

SEQ ID NO: 42440 - DNA, 80 bp, synthetic construct
  misc_feature 1..80: note = Artificially Synthesized Probe
  source 1..80: mol_type = other DNA
cctgaatggtcaccagcgtcagggtaacacacagtcccatgaaaatcaccagttctgtgcaatgacaacctcaacacaca

SEQ ID NO: 42441 - DNA, 80 bp, synthetic construct
  misc_feature 1..80: note = Artificially Synthesized Probe
  source 1..80: mol_type = other DNA
ttgttgtcctgccggtggatgctgacacagtgctctttcagcaccacgtgggtgatgtcccggaagtcacagaagtaggc

SEQ ID NO: 42442 - DNA, 80 bp, synthetic construct
  misc_feature 1..80: note = Artificially Synthesized Probe
  source 1..80: mol_type = other DNA
acgttccgaaggcgcagccgggtcagggcgctgtgctgccggatatgccggcggaaggagcgcgggatgcagtccttgaa

SEQ ID NO: 42443 - DNA, 80 bp, synthetic construct
  misc_feature 1..80: note = Artificially Synthesized Probe
  source 1..80: mol_type = other DNA
aaaaaaaaaaaaaaagaatatcgcaagccgggcatggtggctcacgcctataatcccagcactttgggaggccaaggcgg

SEQ ID NO: 42444 - DNA, 80 bp, synthetic construct
  misc_feature 1..80: note = Artificially Synthesized Probe
  source 1..80: mol_type = other DNA
cccagatagcatgagttgaaacctattagctatattgaatcagggagggaaatgggggctcctcaactgcccctaagtct

SEQ ID NO: 42445 - DNA, 80 bp, synthetic construct
  misc_feature 1..80: note = Artificially Synthesized Probe
  source 1..80: mol_type = other DNA
cagcctcccttgcagctaggatggagccaattgcactgctggtttctggccaaagggctgggtacatttccaagcctgga

SEQ ID NO: 42446 - DNA, 80 bp, synthetic construct
  misc_feature 1..80: note = Artificially Synthesized Probe
  source 1..80: mol_type = other DNA
caaaccaggaacttggtccttatcttcaacctctcccacctgctccaaaacagatcggtcaccaagacctgctcttcctg

SEQ ID NO: 42447 - DNA, 80 bp, synthetic construct
  misc_feature 1..80: note = Artificially Synthesized Probe
  source 1..80: mol_type = other DNA
gcaagactgtctcaaaaaaaaaaaaaaaaatggtatctggctgggtgcagtggcccatgcctatagtcccagcactttcg

SEQ ID NO: 42448 - DNA, 80 bp, synthetic construct
  misc_feature 1..80: note = Artificially Synthesized Probe
  source 1..80: mol_type = other DNA
tgtaaatgtgtggtattatactgcagacgtccctctgcaatgtgctttttcaggctacgagaggttataaagcttcatgc

SEQ ID NO: 42449 - DNA, 80 bp, synthetic construct
  misc_feature 1..80: note = Artificially Synthesized Probe
  source 1..80: mol_type = other DNA
ggctggaatacagtggtgcaatcatggctcagtgcagccatgacctccctggctcaagcagtcctcctgcctcagtctcc

SEQ ID NO: 42450 - DNA, 80 bp, synthetic construct
  misc_feature 1..80: note = Artificially Synthesized Probe
  source 1..80: mol_type = other DNA
taagcgcaaggattacaagtgtgagctacggcacctggccaatgtttcatatttttgttttttgagaccgagtctctgtc

SEQ ID NO: 42451 - DNA, 80 bp, synthetic construct
  misc_feature 1..80: note = Artificially Synthesized Probe
  source 1..80: mol_type = other DNA
tctgtctcaaacaacacaacaaaacaaaacaaagaatcagccatggccaggctcgagggtgcacacttgtaatcccaaca

SEQ ID NO: 42452 - DNA, 80 bp, synthetic construct
  misc_feature 1..80: note = Artificially Synthesized Probe
  source 1..80: mol_type = other DNA
tataaaaattgattacaatgcccccatccagtcatggaaagctgggaatgggggaggtaagaggagtttctggaggaagg

SEQ ID NO: 42453 - DNA, 80 bp, synthetic construct
  misc_feature 1..80: note = Artificially Synthesized Probe
  source 1..80: mol_type = other DNA
gattacaggcatgagccaccgcacctggcctttttttatttttgaaacggagtctagctctgtcacccagcctggagtgc

SEQ ID NO: 42454 - DNA, 80 bp, synthetic construct
  misc_feature 1..80: note = Artificially Synthesized Probe
  source 1..80: mol_type = other DNA
tattatatttcttgctgtcctccctactaaaatttcagctctacaaaggcagtgatttgcagctgccacacagtagatgc

SEQ ID NO: 42455 - DNA, 80 bp, synthetic construct
  misc_feature 1..80: note = Artificially Synthesized Probe
  source 1..80: mol_type = other DNA
accccagtccccatggtgccaacgccccagactcaccaactttatgtgcaatgtggatgcagacttcctcagctgtcagc

SEQ ID NO: 42456 - DNA, 80 bp, synthetic construct
  misc_feature 1..80: note = Artificially Synthesized Probe
  source 1..80: mol_type = other DNA
ttatcttatcttatcttatcttatttttgagacagagtttcactcttgttgcccaggctggagtgcaatggtacaatctt

SEQ ID NO: 42457 - DNA, 80 bp, synthetic construct
  misc_feature 1..80: note = Artificially Synthesized Probe
  source 1..80: mol_type = other DNA
aacaagaataacataattgttattagtttcatcgtggtgatggcctctttcaggccacaattctcctctcccacatttac

SEQ ID NO: 42458 - DNA, 80 bp, synthetic construct
  misc_feature 1..80: note = Artificially Synthesized Probe
  source 1..80: mol_type = other DNA
caatccccacgaaccagctttcctcttaaaccttgaaaagagaaattcgggagttcgagtataagttcttagtcgtcctt

SEQ ID NO: 42459 - DNA, 80 bp, synthetic construct
  misc_feature 1..80: note = Artificially Synthesized Probe
  source 1..80: mol_type = other DNA
atataaactgtaccacaagcgagtgcggatgaacgaggactgcatttaaagataagtttttacactttcatttctctgtg

SEQ ID NO: 42460 - DNA, 80 bp, synthetic construct
  misc_feature 1..80: note = Artificially Synthesized Probe
  source 1..80: mol_type = other DNA
tgatttaaaactgtgactctcccccaacctccttggtgtttctccatagacgaacatcaccatctgatgtatgtcagcct

SEQ ID NO: 42461 - DNA, 80 bp, synthetic construct
  misc_feature 1..80: note = Artificially Synthesized Probe
  source 1..80: mol_type = other DNA
cttaatgcttcaattcaggattctaaggaatccttgccaggaatgtcagactcaccttgatagttggagttactccattg

SEQ ID NO: 42462 - DNA, 80 bp, synthetic construct
  misc_feature 1..80: note = Artificially Synthesized Probe
  source 1..80: mol_type = other DNA
tctcaaaaaacaaaaaaaaggatgggttccatatgggtggtgtcaagtgcccacctcctagcaagtcagcaggggccaga

SEQ ID NO: 42463 - DNA, 80 bp, synthetic construct
  misc_feature 1..80: note = Artificially Synthesized Probe
  source 1..80: mol_type = other DNA
ctatcattgttggacatttgggttggttccaagtctttgctattgtgaatagtgccacaataaacatacgtgtgcatgtg

SEQ ID NO: 42464 - DNA, 80 bp, synthetic construct
  misc_feature 1..80: note = Artificially Synthesized Probe
  source 1..80: mol_type = other DNA
gttatttctgagggctctgttctgttccattgatctatatgtctgttttggtaccagtaccatactgttttggttactgt

SEQ ID NO: 42465 - DNA, 80 bp, synthetic construct
  misc_feature 1..80: note = Artificially Synthesized Probe
  source 1..80: mol_type = other DNA
ggtatcaggatgatgctggcttcataaaatgagttagggaggattccctctttttctattgattggaatagtttcagaag

SEQ ID NO: 42466 - DNA, 80 bp, synthetic construct
  misc_feature 1..80: note = Artificially Synthesized Probe
  source 1..80: mol_type = other DNA
gattctggtatgttgtgtctctgttctcgttggtttcaaagaacatctttatttctgccttcatttcgttatgtacccag

SEQ ID NO: 42467 - DNA, 80 bp, synthetic construct
  misc_feature 1..80: note = Artificially Synthesized Probe
  source 1..80: mol_type = other DNA
ggaggaatttgggcctggtgatgtcagaattcttcaataaaagcctaaaatctatattttatgtgcggtcatgagatctg

SEQ ID NO: 42468 - DNA, 80 bp, synthetic construct
  misc_feature 1..80: note = Artificially Synthesized Probe
  source 1..80: mol_type = other DNA
tgtagggtgtccgtaggatgtgaggccagtccccgggcttaatgatgctttaaatcctgcctagtattcaattatttctt

SEQ ID NO: 42469 - DNA, 80 bp, synthetic construct
  misc_feature 1..80: note = Artificially Synthesized Probe
  source 1..80: mol_type = other DNA
acaagaatcgctgatgggtttagagcctaagtttgcgaggagcactggaagaaattaagattgttgagattggaaagggt

SEQ ID NO: 42470 - DNA, 80 bp, synthetic construct
  misc_feature 1..80: note = Artificially Synthesized Probe
  source 1..80: mol_type = other DNA
tgcctcagcctcccaaccagatgatcttaatttgtgtatttatactcattcttacaccaaaaagggttttaaattgccta

SEQ ID NO: 42471 - DNA, 80 bp, synthetic construct
  misc_feature 1..80: note = Artificially Synthesized Probe
  source 1..80: mol_type = other DNA
tatggacatcactgcagcccagtggctctctctcctggtctccaccatatgagttggcttctgtttctctcctgttttac

SEQ ID NO: 42472 - DNA, 80 bp, synthetic construct
  misc_feature 1..80: note = Artificially Synthesized Probe
  source 1..80: mol_type = other DNA
gggaagagccacattcaagccaggggattgtccaaaagggggcattttaactcattttaacttgaaggagaattgaagtg

SEQ ID NO: 42473 - DNA, 80 bp, synthetic construct
  misc_feature 1..80: note = Artificially Synthesized Probe
  source 1..80: mol_type = other DNA
tggtcgtttttagacatagtaataggttgtgacctgtcttcacatcctaattgccactgtctgttcatcccaggaatcct

SEQ ID NO: 42474 - DNA, 80 bp, synthetic construct
  misc_feature 1..80: note = Artificially Synthesized Probe
  source 1..80: mol_type = other DNA
tctgcattcgtccacgctttgttcattctgtactgccacttatctgctcagttccttcctaaaatagattaaagaactct

SEQ ID NO: 42475 - DNA, 80 bp, synthetic construct
  misc_feature 1..80: note = Artificially Synthesized Probe
  source 1..80: mol_type = other DNA
gccctaaaaccaacaagcaaaaccaaaagaaaccccagtggacatgtgaaatatgtaaagcaaaagcttgtccaacctgc

SEQ ID NO: 42476 - DNA, 80 bp, synthetic construct
  misc_feature 1..80: note = Artificially Synthesized Probe
  source 1..80: mol_type = other DNA
gcttgccatccacgctttaataagactttctcaattaccaatccaagtatatcagagagagatatacacactcaggtata

SEQ ID NO: 42477 - DNA, 80 bp, synthetic construct
  misc_feature 1..80: note = Artificially Synthesized Probe
  source 1..80: mol_type = other DNA
agaacatgttaaccgagtgaactcttgtgtttaaactcaaactgctacagtaacacacacgagattatctagagaaaagc

SEQ ID NO: 42478 - DNA, 80 bp, synthetic construct
  misc_feature 1..80: note = Artificially Synthesized Probe
  source 1..80: mol_type = other DNA
gggtcgatgattaaaagctgatgttcctaactagtcttttatggactgccagccatggtatgctctcaaattcttctgat

SEQ ID NO: 42479 - DNA, 80 bp, synthetic construct
  misc_feature 1..80: note = Artificially Synthesized Probe
  source 1..80: mol_type = other DNA
cccggcccactctatcaaattctagagttctctaaacctgagaaatcacagagctggtgtatcaacaaacatgttccaat

SEQ ID NO: 42480 - DNA, 80 bp, synthetic construct
  misc_feature 1..80: note = Artificially Synthesized Probe
  source 1..80: mol_type = other DNA
cttgaaaggcagagacaactgcattaagatacaattaaaaacttatttgtgactcagcctatgttaaatactacaacttg

SEQ ID NO: 42481 - DNA, 80 bp, synthetic construct
  misc_feature 1..80: note = Artificially Synthesized Probe
  source 1..80: mol_type = other DNA
tcccagtacaggaagatattggtaccatctactgaatgcccagttttgatctatttctaaatggagcaaaccaattccat

SEQ ID NO: 42482 - DNA, 80 bp, synthetic construct
  misc_feature 1..80: note = Artificially Synthesized Probe
  source 1..80: mol_type = other DNA
agctccttgccacctctagtgaaacgcggtccttgacactagcacggcagaccagatggagtggacactgagctctgaca

SEQ ID NO: 42483 - DNA, 80 bp, synthetic construct
  misc_feature 1..80: note = Artificially Synthesized Probe
  source 1..80: mol_type = other DNA
ttaataaaggccaggggttcagtcactgtaaagaccaatgaatggctcaaaatgttgaaatccgtttcacatggacggac

SEQ ID NO: 42484 - DNA, 80 bp, synthetic construct
  misc_feature 1..80: note = Artificially Synthesized Probe
  source 1..80: mol_type = other DNA
ctttaaactggatcaggcagacttgaaaccttacactgtaccgttcttcttaaaatcaagttgtctgaaaaaacaaacca

SEQ ID NO: 42485 - DNA, 80 bp, synthetic construct
  misc_feature 1..80: note = Artificially Synthesized Probe
  source 1..80: mol_type = other DNA
ccatggccactggtttagttaggggagattcggttcataaatcaaaacattaaagaaaaaacaattgcaatacacagaaa

SEQ ID NO: 42486 - DNA, 80 bp, synthetic construct
  misc_feature 1..80: note = Artificially Synthesized Probe
  source 1..80: mol_type = other DNA
atttaaataaaagaacacacttatgaacacaaatggaaaatacaactacgagagaaaaaatgacttgcttaatatgtaga

SEQ ID NO: 42487 - DNA, 80 bp, synthetic construct
  misc_feature 1..80: note = Artificially Synthesized Probe
  source 1..80: mol_type = other DNA
atctgtaaatgatgacaatgccaatgtggcactgttctgagagtcagacagaacgtatgtgtgcttcacatatggtgctc

SEQ ID NO: 42488 - DNA, 80 bp, synthetic construct
  misc_feature 1..80: note = Artificially Synthesized Probe
  source 1..80: mol_type = other DNA
tgtgttagttcttcaccctaaactcagaagagtctcttgttccgatagagctggtctattcattcgccaagatcataccg

SEQ ID NO: 42489 - DNA, 80 bp, synthetic construct
  misc_feature 1..80: note = Artificially Synthesized Probe
  source 1..80: mol_type = other DNA
tattaaaggcattttcgattcatgatgggtttatcggaacgcaatcccatggtaaatccaggagcacctgtatgttaaga

SEQ ID NO: 42490 - DNA, 80 bp, synthetic construct
  misc_feature 1..80: note = Artificially Synthesized Probe
  source 1..80: mol_type = other DNA
tctcataacacactactctcctacggtggctccctgatttgtttggtatatggaaatttgtgaatttgactcttccttac

SEQ ID NO: 42491 - DNA, 80 bp, synthetic construct
  misc_feature 1..80: note = Artificially Synthesized Probe
  source 1..80: mol_type = other DNA
gacagacaaaggaaattggcagtcagcattagtgagtcattttacagttctaagatgtaggcattgtgataattactctg

SEQ ID NO: 42492 - DNA, 80 bp, synthetic construct
  misc_feature 1..80: note = Artificially Synthesized Probe
  source 1..80: mol_type = other DNA
ctttaatgaataacagaatggagtacaaacacatccatatatatactctacactataccttgtgttcccagaggtggtat

SEQ ID NO: 42493 - DNA, 80 bp, synthetic construct
  misc_feature 1..80: note = Artificially Synthesized Probe
  source 1..80: mol_type = other DNA
gactagtcattaaagtcaaaaaaagatcatactgagccttgctgaagctcctaacccaccacttagctcatgaattatga

SEQ ID NO: 42494 - DNA, 80 bp, synthetic construct
  misc_feature 1..80: note = Artificially Synthesized Probe
  source 1..80: mol_type = other DNA
aagcaaaaagatacaacagtcaggcaggactcagaaatcatatagcacaatttaaactggaaggccataagtaatatttc

SEQ ID NO: 42495 - DNA, 80 bp, synthetic construct
  misc_feature 1..80: note = Artificially Synthesized Probe
  source 1..80: mol_type = other DNA
aaaatattgaaataatatttgaagtctttttttttgtttgtttttttttttgagactgagtcttgctcttttgcccaggc

SEQ ID NO: 42496 - DNA, 80 bp, synthetic construct
  misc_feature 1..80: note = Artificially Synthesized Probe
  source 1..80: mol_type = other DNA
aacagttacttaacttgtctattgtcccactgtacagcttttctttccccacagtcttaccaagaagatcattctggggt

SEQ ID NO: 42497 - DNA, 80 bp, synthetic construct
  misc_feature 1..80: note = Artificially Synthesized Probe
  source 1..80: mol_type = other DNA
ctgggcaagggctgaggcaataagattggccttttcttctgtaaggtttttgaccattgatcccagagaaaacaccacaa

SEQ ID NO: 42498 - DNA, 80 bp, synthetic construct
  misc_feature 1..80: note = Artificially Synthesized Probe
  source 1..80: mol_type = other DNA
tattttagaacaggataacaaagtgcatctccaactgtaatcacaatgatgcgtatgagacagtgcatctctttcttctt

SEQ ID NO: 42499 - DNA, 80 bp, synthetic construct
  misc_feature 1..80: note = Artificially Synthesized Probe
  source 1..80: mol_type = other DNA
gggaggaaaaacataatagggtgtcatgggtcattatccagtgacctatggatacgtcatgaatatttctgtgtctttat

SEQ ID NO: 42500 - DNA, 80 bp, synthetic construct
  misc_feature 1..80: note = Artificially Synthesized Probe
  source 1..80: mol_type = other DNA
gcagtatccttcgtaatttctatgatctggttttctgtcccaccaagtccagtatcaaggtgtagacacactgatatttg

SEQ ID NO: 42501 - DNA, 80 bp, synthetic construct
  misc_feature 1..80: note = Artificially Synthesized Probe
  source 1..80: mol_type = other DNA
aaccataaaccctttgaaaaaagtggtgggcagcagcctatcctgtgagccaggtgaaaaaccatgagtccccagagtgt

SEQ ID NO: 42502 - DNA, 80 bp, synthetic construct
  misc_feature 1..80: note = Artificially Synthesized Probe
  source 1..80: mol_type = other DNA
ggcatttttgagttttgagaggagtgtgcctggaatccagttacctgatgctagtggaatactgcaaatgtgagaactgc

SEQ ID NO: 42503 - DNA, 80 bp, synthetic construct
  misc_feature 1..80: note = Artificially Synthesized Probe
  source 1..80: mol_type = other DNA
aaggagggctgtaccacaaccatgcaacttgagaaattaaagggtagagtaaaactaagacaacttgaataattaatata

SEQ ID NO: 42504 - DNA, 80 bp, synthetic construct
  misc_feature 1..80: note = Artificially Synthesized Probe
  source 1..80: mol_type = other DNA
tcaagaccagtgtggccaagatggtgaaaccccgtctctactaaaaatacaaaaaaattagccgggcgtggtggcaggtg

SEQ ID NO: 42505 - DNA, 80 bp, synthetic construct
  misc_feature 1..80: note = Artificially Synthesized Probe
  source 1..80: mol_type = other DNA
gagaacgccacaaagatactcctcgagaagagcaactccaagacacataattgtcagactcaccaaagtagaaatgaagg

SEQ ID NO: 42506 - DNA, 80 bp, synthetic construct
  misc_feature 1..80: note = Artificially Synthesized Probe
  source 1..80: mol_type = other DNA
agataacaagtatatccaggaattgaactcagctctgcaccaagtagacctaatacacatctacagaattatccacccca

SEQ ID NO: 42507 - DNA, 80 bp, synthetic construct
  misc_feature 1..80: note = Artificially Synthesized Probe
  source 1..80: mol_type = other DNA
tctaccagaagtacaaggaggagctggtaccattccttctgaaactattccaagcaatagaaaaagagggaatcctcctt

SEQ ID NO: 42508 - DNA, 80 bp, synthetic construct
  misc_feature 1..80: note = Artificially Synthesized Probe
  source 1..80: mol_type = other DNA
cagtaaccaaaacagcatggtactggtaccaaaacagagataaagaccaatggaacagaacagagccctcagaaataatg

SEQ ID NO: 42509 - DNA, 80 bp, synthetic construct
  misc_feature 1..80: note = Artificially Synthesized Probe
  source 1..80: mol_type = other DNA
gacacaggaaggggaacatcacacaccggggcctgttgtggggtggggggaggggggaaggatagcgttgggaaatatac

SEQ ID NO: 42510 - DNA, 80 bp, synthetic construct
  misc_feature 1..80: note = Artificially Synthesized Probe
  source 1..80: mol_type = other DNA
actgttaataaaagtcagtaaatgaattgaatagtttgcagaacaatgggaaatataacaccctactcgtgaaagtataa

SEQ ID NO: 42511 - DNA, 80 bp, synthetic construct
  misc_feature 1..80: note = Artificially Synthesized Probe
  source 1..80: mol_type = other DNA
ggaatgcccatatgcagagaaaaagctatatgagaatataagatggtggccataaaaacttcaagaaaaaacagacctgg

SEQ ID NO: 42512 - DNA, 80 bp, synthetic construct
  misc_feature 1..80: note = Artificially Synthesized Probe
  source 1..80: mol_type = other DNA
aaaacttgaatggttcattctgaagatacacagtatgttttagggtgggaaagtaggaaagcctaatggattgccctagt

SEQ ID NO: 42513 - DNA, 80 bp, synthetic construct
  misc_feature 1..80: note = Artificially Synthesized Probe
  source 1..80: mol_type = other DNA
agatttaaatggaagacctcaaagtataaaaatctttgaagaaaacctaggatattatgtattgacatcagccatggcaa

SEQ ID NO: 42514 - DNA, 80 bp, synthetic construct
  misc_feature 1..80: note = Artificially Synthesized Probe
  source 1..80: mol_type = other DNA
tagctcaacattataaaagccataaaccgcaaacctacaggtagcatcatattgaatgagtacaaattgaaagcctttct

SEQ ID NO: 42515 - DNA, 80 bp, synthetic construct
  misc_feature 1..80: note = Artificially Synthesized Probe
  source 1..80: mol_type = other DNA
atgagaactcactatcacaagaagagcaagtggaaaaccagacctcatgatccaatcacctttcaacagatccctccccc

SEQ ID NO: 42516 - DNA, 80 bp, synthetic construct
  misc_feature 1..80: note = Artificially Synthesized Probe
  source 1..80: mol_type = other DNA
ggctgggaaaggtcttggggggtggggagggtataaagagggcatgattaatagctacaaaaatatagttagaatgaaaa

SEQ ID NO: 42517 - DNA, 80 bp, synthetic construct
  misc_feature 1..80: note = Artificially Synthesized Probe
  source 1..80: mol_type = other DNA
gcatcctttggcagttgctaaatgtagtccttaggttaaagttaaatctcacttgagactttctttttcttcaagcagtt

SEQ ID NO: 42518 - DNA, 80 bp, synthetic construct
  misc_feature 1..80: note = Artificially Synthesized Probe
  source 1..80: mol_type = other DNA
caggaactcatactaatcaatctaattgggagattccactacaggttggcaaaaggctttgtcacaagagaagagattta

SEQ ID NO: 42519 - DNA, 80 bp, synthetic construct
  misc_feature 1..80: note = Artificially Synthesized Probe
  source 1..80: mol_type = other DNA
ggtgggagaattgcttgagcctgggaggttgagactacagtgagccaacatcagtggcactgtacttcagcctgggtgac

SEQ ID NO: 42520 - DNA, 80 bp, synthetic construct
  misc_feature 1..80: note = Artificially Synthesized Probe
  source 1..80: mol_type = other DNA
actaataaaaaactacagtaaagtttcaggaaaaaaaatctatctacaaaaatcactgccattcctatacaccaacagcg

SEQ ID NO: 42521 - DNA, 80 bp, synthetic construct
  misc_feature 1..80: note = Artificially Synthesized Probe
  source 1..80: mol_type = other DNA
tgagagaaaatatttgcaaagtatgcatctgacaaagatctaatatccagtatttacagggaatttaaacaaacttacaa

SEQ ID NO: 42522 - DNA, 80 bp, synthetic construct
  misc_feature 1..80: note = Artificially Synthesized Probe
  source 1..80: mol_type = other DNA
atctcgaagtaacaccacaaaggcagtggataaaatgggatagggaaaagacaaaagccaatatgaatgcattaccaagt

SEQ ID NO: 42523 - DNA, 80 bp, synthetic construct
  misc_feature 1..80: note = Artificially Synthesized Probe
  source 1..80: mol_type = other DNA
tctaactattggtgagggttgtgagaactttacatttaatgtgattatctacatgtttgagttgggatttatcattttgc

SEQ ID NO: 42524 - DNA, 80 bp, synthetic construct
  misc_feature 1..80: note = Artificially Synthesized Probe
  source 1..80: mol_type = other DNA
aatttggggccattatttattttaatatttttttctgctgatgctccttcctttaggatattgaaatagtatatgttagg

SEQ ID NO: 42525 - DNA, 80 bp, synthetic construct
  misc_feature 1..80: note = Artificially Synthesized Probe
  source 1..80: mol_type = other DNA
aaaacagacttgaggatatttattgggtattatgctcactactgggtgatgggattattcatccatcaagccttagtgac

SEQ ID NO: 42526 - DNA, 80 bp, synthetic construct
  misc_feature 1..80: note = Artificially Synthesized Probe
  source 1..80: mol_type = other DNA
tccaaataagaaatattttttgttccataggcagacaggcaagcaggcaggcaggcaggcaggcaggcatgcaggaagga

SEQ ID NO: 42527 - DNA, 80 bp, synthetic construct
  misc_feature 1..80: note = Artificially Synthesized Probe
  source 1..80: mol_type = other DNA
ctccctagtttcaaaatacactacaaagtgacaagaatccaaacagtattaaagcacacgtatagaccaagggaacaaaa

SEQ ID NO: 42528 - DNA, 80 bp, synthetic construct
  misc_feature 1..80: note = Artificially Synthesized Probe
  source 1..80: mol_type = other DNA
atagcgttcattcaggaggtgtactgcaaagtgtttactttgcaggtctggatttctcaacttgtacattcccaaaaaag

SEQ ID NO: 42529 - DNA, 80 bp, synthetic construct
  misc_feature 1..80: note = Artificially Synthesized Probe
  source 1..80: mol_type = other DNA
tctctttgatttaatgaggatataccaatagtaatagctccatctgcagttggctacgattcatttttttctcctgcaat

SEQ ID NO: 42530 - DNA, 80 bp, synthetic construct
  misc_feature 1..80: note = Artificially Synthesized Probe
  source 1..80: mol_type = other DNA
aatgtgatctctgtgataggatgtcccagctctctagatatgaaatcatcgacataagctttctattgttctctttctta

SEQ ID NO: 42531 - DNA, 80 bp, synthetic construct
  misc_feature 1..80: note = Artificially Synthesized Probe
  source 1..80: mol_type = other DNA
tacgttatgcactagagattcttgatggcttacaaaccggacgtgggtgacaatttaatcatgatgttaaagttgaaatg

SEQ ID NO: 42532 - DNA, 80 bp, synthetic construct
  misc_feature 1..80: note = Artificially Synthesized Probe
  source 1..80: mol_type = other DNA
gaggagttatggattgcattcatgttttgtttattaatttgagtgctggttgcaagggtggggttacttcgtgaaacttc

SEQ ID NO: 42533 - DNA, 80 bp, synthetic construct
  misc_feature 1..80: note = Artificially Synthesized Probe
  source 1..80: mol_type = other DNA
tttatcagcaggaaatgcttgaggggatggataccccgtactccaggatgtgcttattttacattgcatgtctgtatcaa

SEQ ID NO: 42534 - DNA, 80 bp, synthetic construct
  misc_feature 1..80: note = Artificially Synthesized Probe
  source 1..80: mol_type = other DNA
ctgtttttcctacacagaactgaagaacaactattgtaatggaaacgccacaaaaatttgacatgttgttagctctcctg

SEQ ID NO: 42535 - DNA, 80 bp, synthetic construct
  misc_feature 1..80: note = Artificially Synthesized Probe
  source 1..80: mol_type = other DNA
aagagaagaaaaaagatatattcaaataccccttgtgaaaggtaagagtaagatcaagttagtttatgagtattcaagtt

SEQ ID NO: 42536 - DNA, 80 bp, synthetic construct
  misc_feature 1..80: note = Artificially Synthesized Probe
  source 1..80: mol_type = other DNA
atggttaacattattgtgtttgattctcataaggaatgtttcatgcaaggaaacatgaggctggccacaggatagagaga

SEQ ID NO: 42537 - DNA, 80 bp, synthetic construct
  misc_feature 1..80: note = Artificially Synthesized Probe
  source 1..80: mol_type = other DNA
aggaaacaggtatcacttcaaaattcacaggagaatcgggattggagttgatgaatagagttgctgatgaagccagtaca

SEQ ID NO: 42538 - DNA, 80 bp, synthetic construct
  misc_feature 1..80: note = Artificially Synthesized Probe
  source 1..80: mol_type = other DNA
tgtccttttataagatttctgacaccgggtaattattcagaccctcccattctcagttttctcaaagaaaaatgagaggt

SEQ ID NO: 42539 - DNA, 80 bp, synthetic construct
  misc_feature 1..80: note = Artificially Synthesized Probe
  source 1..80: mol_type = other DNA
aaaaatgatgatattagtcaacttccacttttacgtaatatctgcagggcaataaaatatttacctaatttagtgaagaa

SEQ ID NO: 42540 - DNA, 80 bp, synthetic construct
  misc_feature 1..80: note = Artificially Synthesized Probe
  source 1..80: mol_type = other DNA
ttttttaaatgatcaaattaatccgatctcattaccttgacccttctctactctttccctcctcctacactgacagactg

SEQ ID NO: 42541 - DNA, 80 bp, synthetic construct
  misc_feature 1..80: note = Artificially Synthesized Probe
  source 1..80: mol_type = other DNA
agttagaggtgacttagaaagctctcctaatgccaaaaatatatccctagacaatcctccccagacaacagaatcacatg

SEQ ID NO: 42542 - DNA, 80 bp, synthetic construct
  misc_feature 1..80: note = Artificially Synthesized Probe
  source 1..80: mol_type = other DNA
gggagttgttctatttatttactcaggtgaggctgttcgaggcctgagtggatataaatttgttgcaatgatttcattaa

SEQ ID NO: 42543 - DNA, 80 bp, synthetic construct
  misc_feature 1..80: note = Artificially Synthesized Probe
  source 1..80: mol_type = other DNA
taatgtgtcagtaggtatcactacacagaaatctcactttttcttttgccaacattcacgcaacccactgttttacacag

SEQ ID NO: 42544 - DNA, 80 bp, synthetic construct
  misc_feature 1..80: note = Artificially Synthesized Probe
  source 1..80: mol_type = other DNA
ttatcagaaatatccatcgcacctgtgctgttttgtcttcaactttgagcacacttttccttccccattcttaccttgca

SEQ ID NO: 42545 - DNA, 80 bp, synthetic construct
  misc_feature 1..80: note = Artificially Synthesized Probe
  source 1..80: mol_type = other DNA
acattttccggctttctccacacatcactgcagtttctaggcaatttctattttgagcataattatctacatgagatcca

SEQ ID NO: 42546 - DNA, 80 bp, synthetic construct
  misc_feature 1..80: note = Artificially Synthesized Probe
  source 1..80: mol_type = other DNA
ttagccaatgactaccttccattggccaaatcaaaacattcccaccaagagtggttcctatgagacttatctgaagggag

SEQ ID NO: 42547 - DNA, 80 bp, synthetic construct
  misc_feature 1..80: note = Artificially Synthesized Probe
  source 1..80: mol_type = other DNA
ccaaaagtgctgttcaaaaactatctagcctgcatgaaaaacagctacttgacatctagattcagccttcaacaactgct

SEQ ID NO: 42548 - DNA, 80 bp, synthetic construct
  misc_feature 1..80: note = Artificially Synthesized Probe
  source 1..80: mol_type = other DNA
cagttaggcagatagttagaacaaggtccgttggtaaaattctttttaacaaaagggcagcctgaagctgcacaaccttc

SEQ ID NO: 42549 - DNA, 80 bp, synthetic construct
  misc_feature 1..80: note = Artificially Synthesized Probe
  source 1..80: mol_type = other DNA
tcacacacagcagtacctactaggtagaagaggaatccaggagatctttctcatattaattttatagtctatcagtggaa

SEQ ID NO: 42550 - DNA, 80 bp, synthetic construct
  misc_feature 1..80: note = Artificially Synthesized Probe
  source 1..80: mol_type = other DNA
gaagttatattcacaacaaaaggcttaaagaggttgttaagtaaaaagatttggcctaaaatgtgggtctgaatttgtgt

SEQ ID NO: 42551 - DNA, 80 bp, synthetic construct
  misc_feature 1..80: note = Artificially Synthesized Probe
  source 1..80: mol_type = other DNA
ttctaaagcctttaaaataaacttccgctcctgctctgaaactcccgtcagtctcatctgcctgatgccccccagtcaaa

SEQ ID NO: 42552 - DNA, 80 bp, synthetic construct
  misc_feature 1..80: note = Artificially Synthesized Probe
  source 1..80: mol_type = other DNA
aatccctaaagaggactttgagttcacacttagacaaaactctcaacttactgctctgtccacacagttccctcgatatc

SEQ ID NO: 42553 - DNA, 80 bp, synthetic construct
  misc_feature 1..80: note = Artificially Synthesized Probe
  source 1..80: mol_type = other DNA
tacagaaagtttggtttttaaattggagttttatcactgacaaatacctttaaaaatgaaaaatggaattttcggtggga

SEQ ID NO: 42554 - DNA, 80 bp, synthetic construct
  misc_feature 1..80: note = Artificially Synthesized Probe
  source 1..80: mol_type = other DNA
tgatcatggctcagtgcagcctttccgtttcggtctcaggtaatcctccacctcagcctcatgagaagctggggctacag

SEQ ID NO: 42555 - DNA, 80 bp, synthetic construct
  misc_feature 1..80: note = Artificially Synthesized Probe
  source 1..80: mol_type = other DNA
gtttttgtttagcagttgtttaattgcactggtgtagagtattcagttgattgacaaagaccacagatctcttcatttat

SEQ ID NO: 42556 - DNA, 80 bp, synthetic construct
  misc_feature 1..80: note = Artificially Synthesized Probe
  source 1..80: mol_type = other DNA
ttacaggtgtgagccaccacacccagtctccataaactcttttaaaaatgtttattttctgtctacacacacacaaccag

SEQ ID NO: 42557 - DNA, 80 bp, synthetic construct
  misc_feature 1..80: note = Artificially Synthesized Probe
  source 1..80: mol_type = other DNA
ccaccaaaaatgtaaaagttttcctatatctccccagtttcaccagcatctgttgttttttgactttttaatcatctcca

SEQ ID NO: 42558 - DNA, 80 bp, synthetic construct
  misc_feature 1..80: note = Artificially Synthesized Probe
  source 1..80: mol_type = other DNA
cctctgttctgttccattggtctatatgtctgcttttgttccagtactatgctggtttggttactgtaaggtgtaaggaa

SEQ ID NO: 42559 - DNA, 80 bp, synthetic construct
  misc_feature 1..80: note = Artificially Synthesized Probe
  source 1..80: mol_type = other DNA
aggcaccccccagtaggggcagactgacacctcacacagccgggtactcctctgagaaaacttccagaggaacaatcaga

SEQ ID NO: 42560 - DNA, 80 bp, synthetic construct
  misc_feature 1..80: note = Artificially Synthesized Probe
  source 1..80: mol_type = other DNA
accaaagttgaaatgaaggaaaaaatgttaagtgcagcaagagagaaaggtcaggttacccacaaagggaagcccatcag

SEQ ID NO: 42561 - DNA, 80 bp, synthetic construct
  misc_feature 1..80: note = Artificially Synthesized Probe
  source 1..80: mol_type = other DNA
caccccaaatcaacagaatgtacattcttttcagcaccacaccacaccaactccaaaactgaccacatagttggaagtaa

SEQ ID NO: 42562 - DNA, 80 bp, synthetic construct
  misc_feature 1..80: note = Artificially Synthesized Probe
  source 1..80: mol_type = other DNA
atcaagaagaaatggataaattcctcgacacacacaccctcccaagactaaaccaggaagaagttgaatctctgaataga

SEQ ID NO: 42563 - DNA, 80 bp, synthetic construct
  misc_feature 1..80: note = Artificially Synthesized Probe
  source 1..80: mol_type = other DNA
tccaatgccatccccatcaagctaccaatgactttcttcacagaattggaaaaaactacttgaattcatatggaaccaaa

SEQ ID NO: 42564 - DNA, 80 bp, synthetic construct
  misc_feature 1..80: note = Artificially Synthesized Probe
  source 1..80: mol_type = other DNA
aaacaacctcatcagcttgtgggtgaaggaaatgaacagacacttctcaaaagaagacatttaggcagccaaaagacata

SEQ ID NO: 42565 - DNA, 80 bp, synthetic construct
  misc_feature 1..80: note = Artificially Synthesized Probe
  source 1..80: mol_type = other DNA
ctccttgaagaggtccttcacgtaccttgttaggcatattcctaggtattttattctctttgttgcaattgcaaatggga

SEQ ID NO: 42566 - DNA, 80 bp, synthetic construct
  misc_feature 1..80: note = Artificially Synthesized Probe
  source 1..80: mol_type = other DNA
gggaagagtgtgaagaaattagagccctcctatccagctggtggtaatgaaaaatgatgcaaatactttgaaaaacagtt

SEQ ID NO: 42567 - DNA, 80 bp, synthetic construct
  misc_feature 1..80: note = Artificially Synthesized Probe
  source 1..80: mol_type = other DNA
cccttcaaaattagtctcttaacaaagggttcaaactcatattcactgttgacaaaataatttgtaagtaccacctggtc

SEQ ID NO: 42568 - DNA, 80 bp, synthetic construct
  misc_feature 1..80: note = Artificially Synthesized Probe
  source 1..80: mol_type = other DNA
agacagaaaatccaggatgttatttaaaacctgtgagaggtaattacacctgaataaagagatttttattctgaccataa

SEQ ID NO: 42569 - DNA, 80 bp, synthetic construct
  misc_feature 1..80: note = Artificially Synthesized Probe
  source 1..80: mol_type = other DNA
tgatgtctcatgtatccctaaaatgtataaaaccaaactgtccccccaccaccttgggacacatgtcaccaggaccccct

SEQ ID NO: 42570 - DNA, 80 bp, synthetic construct
  misc_feature 1..80: note = Artificially Synthesized Probe
  source 1..80: mol_type = other DNA
agctctgttttcctatgttgaatgacctgatctctttggcttcgagattaccacagattaccttgtactgtgagaggatt

SEQ ID NO: 42571 - DNA, 80 bp, synthetic construct
  misc_feature 1..80: note = Artificially Synthesized Probe
  source 1..80: mol_type = other DNA
actgttttgattcaacaggtttttgtctgcaagctggtgatttttttttatctcatagctaaatttctgaagtaaaaacc

SEQ ID NO: 42572 - DNA, 80 bp, synthetic construct
  misc_feature 1..80: note = Artificially Synthesized Probe
  source 1..80: mol_type = other DNA
ctataaactaagttcctccttaagttagtttggcctacacccagaaataaacacggagagcttggaggttaaaagcaaga

SEQ ID NO: 42573 - DNA, 80 bp, synthetic construct
  misc_feature 1..80: note = Artificially Synthesized Probe
  source 1..80: mol_type = other DNA
ctcatgtaagttttttcctcaagttctgtttgttgtggcataatgctaacagtgttttctaaaagctattcaactcctca

SEQ ID NO: 42574 - DNA, 80 bp, synthetic construct
  misc_feature 1..80: note = Artificially Synthesized Probe
  source 1..80: mol_type = other DNA
aaaaaaagtttttgataattttggagattgtgacattagaatggaagaaaaactttcaggactcatggagaactaaaatg

SEQ ID NO: 42575 - DNA, 80 bp, synthetic construct
  misc_feature 1..80: note = Artificially Synthesized Probe
  source 1..80: mol_type = other DNA
gacaaagttccatcaaagccactttaaaagcctatgtaaataaaaaattattcttcctcctctgtatacaataatcaggc

SEQ ID NO: 42576 - DNA, 80 bp, synthetic construct
  misc_feature 1..80: note = Artificially Synthesized Probe
  source 1..80: mol_type = other DNA
actttctaaatgtactgagacctgtatcagatatttggggttcacaagattatcaatgaaatattcaaatatataagaat

SEQ ID NO: 42577 - DNA, 80 bp, synthetic construct
  misc_feature 1..80: note = Artificially Synthesized Probe
  source 1..80: mol_type = other DNA
tctgattcttagagcatagtctttgttgggccacatttaataatgcacatagtctaccctaaaagcaggattctatctcc

SEQ ID NO: 42578 - DNA, 80 bp, synthetic construct
  misc_feature 1..80: note = Artificially Synthesized Probe
  source 1..80: mol_type = other DNA
gtaaggaagaaatgaaacaaagctatgacactgcagtaggaggagataatgctagaaaatattacacccagacactttat

SEQ ID NO: 42579 - DNA, 80 bp, synthetic construct
  misc_feature 1..80: note = Artificially Synthesized Probe
  source 1..80: mol_type = other DNA
attattctgacttgtgtttcctgatgtgttcctgtttttaaacttaaatccattctctaatgccacatcagtcaatgtat

SEQ ID NO: 42580 - DNA, 80 bp, synthetic construct
  misc_feature 1..80: note = Artificially Synthesized Probe
  source 1..80: mol_type = other DNA
tcagttttaattggagattcagtgtatggctattagagttaattcatgaggcatccaggaactcagtgtaattgcagttg

SEQ ID NO: 42581 - DNA, 80 bp, synthetic construct
  misc_feature 1..80: note = Artificially Synthesized Probe
  source 1..80: mol_type = other DNA
tagagaatcggtttcacaattatttacttagattcaagtctaccttttgcaggttaacaacaacagccagtgccgggcac

SEQ ID NO: 42582 - DNA, 80 bp, synthetic construct
  misc_feature 1..80: note = Artificially Synthesized Probe
  source 1..80: mol_type = other DNA
ttgggattttttttgaaaggaaatctgatcatatctcttcatttcttaactcttttcagtagctctccattgtccttaat

SEQ ID NO: 42583 - DNA, 80 bp, synthetic construct
  misc_feature 1..80: note = Artificially Synthesized Probe
  source 1..80: mol_type = other DNA
tttttgggtctttctcatcccctcatcgtttcacctatctctgcacattattgagtactcactttaattgtcaatgagtt

SEQ ID NO: 42584 - DNA, 80 bp, synthetic construct
  misc_feature 1..80: note = Artificially Synthesized Probe
  source 1..80: mol_type = other DNA
aaaacagctttccaggaagtactctagtgtctacagtttattaagctagtcccttgatccttggttctcaaagtaaacca

SEQ ID NO: 42585 - DNA, 80 bp, synthetic construct
  misc_feature 1..80: note = Artificially Synthesized Probe
  source 1..80: mol_type = other DNA
ggattaacggcatctgccagaaggacatcaaattttgactcttgtagttttctcataagtttcttgttcaaaactgcatc

SEQ ID NO: 42586 - DNA, 80 bp, synthetic construct
  misc_feature 1..80: note = Artificially Synthesized Probe
  source 1..80: mol_type = other DNA
caataatcagtattatctccaaaagattctatacaatagcctctaaccccccactctgaaattttgcatccatcctaccc

SEQ ID NO: 42587 - DNA, 80 bp, synthetic construct
  misc_feature 1..80: note = Artificially Synthesized Probe
  source 1..80: mol_type = other DNA
tgtctgttggcatgctctcagggatcaaaccaattcaagaaccttatatctggtgccaaaacctgggtggggctcaggtc

SEQ ID NO: 42588 - DNA, 80 bp, synthetic construct
  misc_feature 1..80: note = Artificially Synthesized Probe
  source 1..80: mol_type = other DNA
ctttttattagtgggagttctcactcatttttttacttatgtctttttgtggaatagactgatagtgattcatatagtac

SEQ ID NO: 42589 - DNA, 80 bp, synthetic construct
  misc_feature 1..80: note = Artificially Synthesized Probe
  source 1..80: mol_type = other DNA
ccatgtgactgtttttgtggtactattatagagcttttgtctaagacagctaagctgccttacaggatgagtgaatcctt

SEQ ID NO: 42590 - DNA, 80 bp, synthetic construct
  misc_feature 1..80: note = Artificially Synthesized Probe
  source 1..80: mol_type = other DNA
tttgttgctatttaatttttttagagtcctcgggcgtccgtgatattagtgttagtcagttttgttgtgagtgttagaaa

SEQ ID NO: 42591 - DNA, 80 bp, synthetic construct
  misc_feature 1..80: note = Artificially Synthesized Probe
  source 1..80: mol_type = other DNA
cccaatggactaaggcacaaatgccactctagttatttggcagagtgcctagtaaaggtccaccacaatactaccacaca

SEQ ID NO: 42592 - DNA, 80 bp, synthetic construct
  misc_feature 1..80: note = Artificially Synthesized Probe
  source 1..80: mol_type = other DNA
cacagcacacacacaccacaaaacaaagaacgggtaaaagggcacacacaaacatttcagtttacaccaaaccaaaatca

SEQ ID NO: 42593 - DNA, 80 bp, synthetic construct
  misc_feature 1..80: note = Artificially Synthesized Probe
  source 1..80: mol_type = other DNA
gaatgattgcattgcaccaggatggctctgaagtggacttcagttcttctgctgatacatctcggttgttactttagctc

SEQ ID NO: 42594 - DNA, 80 bp, synthetic construct
  misc_feature 1..80: note = Artificially Synthesized Probe
  source 1..80: mol_type = other DNA
ctatctatataactgcagaaagttttccttgtaaacctcagttttcttttttaggtattaaaagatattcccatgtttcc

SEQ ID NO: 42595 - DNA, 80 bp, synthetic construct
  misc_feature 1..80: note = Artificially Synthesized Probe
  source 1..80: mol_type = other DNA
agtaggtggtgtaaagcagataccaaatagaaactcatgtatatgttaataccatcacatgtatgtgagttttatgcata

SEQ ID NO: 42596 - DNA, 80 bp, synthetic construct
  misc_feature 1..80: note = Artificially Synthesized Probe
  source 1..80: mol_type = other DNA
cacactgtaaagagccaaccatttaggaaattttccatggattcaggtagaagatgatggaaaagtggactagaaagttg

SEQ ID NO: 42597 - DNA, 80 bp, synthetic construct
  misc_feature 1..80: note = Artificially Synthesized Probe
  source 1..80: mol_type = other DNA
caacctcttaaaagaacatttttgcttacataaaactgatattttattccattgttaaaactcagtatctatgtttaatg

SEQ ID NO: 42598 - DNA, 80 bp, synthetic construct
  misc_feature 1..80: note = Artificially Synthesized Probe
  source 1..80: mol_type = other DNA
agtacaaggactctcacgttaacgtaagattaaaaatcatattttaaaaaacgctctgccatacgtggtgcactgttcac

SEQ ID NO: 42599 - DNA, 80 bp, synthetic construct
  misc_feature 1..80: note = Artificially Synthesized Probe
  source 1..80: mol_type = other DNA
gcttttcctcagtgctcatatttagggaagtagatcactaatggcttcaaactaaaagaattctacagaaaacatgcctg

SEQ ID NO: 42600 - DNA, 80 bp, synthetic construct
  misc_feature 1..80: note = Artificially Synthesized Probe
  source 1..80: mol_type = other DNA
gctgaaattaactcaatatatttcaggtaagtgaaaatggtgcctaatgtagtctttagatgactttcaagtgttttcaa

SEQ ID NO: 42601 - DNA, 80 bp, synthetic construct
  misc_feature 1..80: note = Artificially Synthesized Probe
  source 1..80: mol_type = other DNA
aaaaaatccaaaattaacgatactggtaatattctgaatttgtggcaaaaattgtcacttgaaatttttcttggaagtag

SEQ ID NO: 42602 - DNA, 80 bp, synthetic construct
  misc_feature 1..80: note = Artificially Synthesized Probe
  source 1..80: mol_type = other DNA
tctaatgatccgtgctgttaagttattttacttcatgtgatggttggccgcaggtaggtctttttttaaaaagtgtaaca

SEQ ID NO: 42603 - DNA, 80 bp, synthetic construct
  misc_feature 1..80: note = Artificially Synthesized Probe
  source 1..80: mol_type = other DNA
ctgtctctccgtctcctgtttctacaactttacacctgttttctcctctcctgcaggtttatttcaaatgccagtaaata

SEQ ID NO: 42604 - DNA, 80 bp, synthetic construct
  misc_feature 1..80: note = Artificially Synthesized Probe
  source 1..80: mol_type = other DNA
aatctgctttgttttttatctgttatttaaaaattgtgcttgaatcccatacatctaatgagtaaccagttagtgaagca

SEQ ID NO: 42605 - DNA, 80 bp, synthetic construct
  misc_feature 1..80: note = Artificially Synthesized Probe
  source 1..80: mol_type = other DNA
ccacactgttgtcaaaccccttattgtctgtctttttgttacagccttcttagtgggtgtaaaatgatctctcatcctgg

SEQ ID NO: 42606 - DNA, 80 bp, synthetic construct
  misc_feature 1..80: note = Artificially Synthesized Probe
  source 1..80: mol_type = other DNA
atcaacagtgttcaaaaattgttagcaacccaaatatctattcatcgtaaaatgaagacataatctgtggtttatcaatc

SEQ ID NO: 42607 - DNA, 80 bp, synthetic construct
  misc_feature 1..80: note = Artificially Synthesized Probe
  source 1..80: mol_type = other DNA
cttgccagtgtcttaaaatgtagggttctgtagaccaaataacagagttgaattttatgattaaaagaatgagaagccag

SEQ ID NO: 42608 - DNA, 80 bp, synthetic construct
  misc_feature 1..80: note = Artificially Synthesized Probe
  source 1..80: mol_type = other DNA
tcaaaatctaccttgtcaagtaaaaatttgtttttcagagatttaccacccaggtaatggttagaaatattctgtggcaa

SEQ ID NO: 42609 - DNA, 80 bp, synthetic construct
  misc_feature 1..80: note = Artificially Synthesized Probe
  source 1..80: mol_type = other DNA
caccttggaaattatcagaatccttactagcagtgatgtgcattataaagctgcagaccaccctcctgggtttatttctt

SEQ ID NO: 42610 - DNA, 80 bp, synthetic construct
  misc_feature 1..80: note = Artificially Synthesized Probe
  source 1..80: mol_type = other DNA
aaaaatgttttaaaggtgccttttttagcatttcgttttttaatatatttacttggactttaatctttatgggcatttgt

SEQ ID NO: 42611 - DNA, 80 bp, synthetic construct
  misc_feature 1..80: note = Artificially Synthesized Probe
  source 1..80: mol_type = other DNA
atgcccacacatagcctcttcacgtgacttgaacagtatggcggctaggttccgagaatacatgtttgaggagtcaggaa

SEQ ID NO: 42612 - DNA, 80 bp, synthetic construct
  misc_feature 1..80: note = Artificially Synthesized Probe
  source 1..80: mol_type = other DNA
tatagccgtactaattttttttttttttttttttttgagacggagtcttgctctgtcttctaggctggagtgcagtggtg

SEQ ID NO: 42613 - DNA, 80 bp, synthetic construct
  misc_feature 1..80: note = Artificially Synthesized Probe
  source 1..80: mol_type = other DNA
ccatagatcttagcaacctcagcatgaggtttttggttttttttcttattaggttgagaactttcacctttttgcttaaa

SEQ ID NO: 42614 - DNA, 80 bp, synthetic construct
  misc_feature 1..80: note = Artificially Synthesized Probe
  source 1..80: mol_type = other DNA
attctggaaaacagttacccttttgttagtttctgggaatggtccttaataaaacaaacagacattggcctggtttgcta

SEQ ID NO: 42615 - DNA, 80 bp, synthetic construct
  misc_feature 1..80: note = Artificially Synthesized Probe
  source 1..80: mol_type = other DNA
aattacctactttgctgtaaaccagtggttcttgttgggggtaattttgccttccaggacacattcggcaatgactgtag

SEQ ID NO: 42616 - DNA, 80 bp, synthetic construct
  misc_feature 1..80: note = Artificially Synthesized Probe
  source 1..80: mol_type = other DNA
cttttagttaaattcagctgacagggagaaacatttattaaagtggtgactatgtgaggactattgagataggtgccagg

SEQ ID NO: 42617 - DNA, 80 bp, synthetic construct
  misc_feature 1..80: note = Artificially Synthesized Probe
  source 1..80: mol_type = other DNA
ttatcacaaactgataacaaacagttccccaatcagcactggtcattggaccatacttggagttacattgctgtagtgtg

SEQ ID NO: 42618 - DNA, 80 bp, synthetic construct
  misc_feature 1..80: note = Artificially Synthesized Probe
  source 1..80: mol_type = other DNA
tagttgtttgtggcaccttatacagaacgagtgtagagtggattatgagatttaagacagcgagaagatacttatgttga

SEQ ID NO: 42619 - DNA, 80 bp, synthetic construct
  misc_feature 1..80: note = Artificially Synthesized Probe
  source 1..80: mol_type = other DNA
ttcacttttggagcactgctgtttgactaaggctgaagttctttgtcaggtttacacatcttaagaatttttattttttg

SEQ ID NO: 42620 - DNA, 80 bp, synthetic construct
  misc_feature 1..80: note = Artificially Synthesized Probe
  source 1..80: mol_type = other DNA
tctgtttgacttctgcagaaacgtgtgtgattgtagaggctcaaatagcaattaaaacaatactgaaagtatttttaaca

SEQ ID NO: 42621 - DNA, 80 bp, synthetic construct
  misc_feature 1..80: note = Artificially Synthesized Probe
  source 1..80: mol_type = other DNA
ttcccccaccaagactcaaatcaaatgttgtctctttgatgatgacttccaagatccttctagtcatacttaatcttctc

SEQ ID NO: 42622 - DNA, 80 bp, synthetic construct
  misc_feature 1..80: note = Artificially Synthesized Probe
  source 1..80: mol_type = other DNA
cccctgaagctccttatatgtatctccctgattacaactctccctctcccaagaaatataatgttgcgtttaacattttc

SEQ ID NO: 42623 - DNA, 80 bp, synthetic construct
  misc_feature 1..80: note = Artificially Synthesized Probe
  source 1..80: mol_type = other DNA
aattccagctacttggaggcttaggtaggaggattgcttgagctcgggaggtgaaggttacagtaagccgagattgtgcc

SEQ ID NO: 42624 - DNA, 80 bp, synthetic construct
  misc_feature 1..80: note = Artificially Synthesized Probe
  source 1..80: mol_type = other DNA
atcatacagatatgatctctaggtcataaagtttaagaggcaaagattatgaggcttctaaaaaaaaattcagccagaag

SEQ ID NO: 42625 - DNA, 80 bp, synthetic construct
  misc_feature 1..80: note = Artificially Synthesized Probe
  source 1..80: mol_type = other DNA
aagggcagaaagtaagagagggattgggctatttatcttgcgaagttgggaagttgatgaggtgacagaaaacaactcta

SEQ ID NO: 42626 - DNA, 80 bp, synthetic construct
  misc_feature 1..80: note = Artificially Synthesized Probe
  source 1..80: mol_type = other DNA
tgagccaagatagcccattgcactccagcctgggcaagaagagctagaccccatctcaaaaaaaaaaaaaaggagtgcac

SEQ ID NO: 42627 - DNA, 80 bp, synthetic construct
  misc_feature 1..80: note = Artificially Synthesized Probe
  source 1..80: mol_type = other DNA
ggtttagtctcttgtttttatgtgacagctttttatatatgactgacattgtacccatattacaaatgtcagtttgcaaa

SEQ ID NO: 42628 - DNA, 80 bp, synthetic construct
  misc_feature 1..80: note = Artificially Synthesized Probe
  source 1..80: mol_type = other DNA
ttgtgttgctgggtttacctttacttagaaacaatcttattacctgtcagtagtaacaaaatactgcctatagaattttc

SEQ ID NO: 42629 - DNA, 80 bp, synthetic construct
  misc_feature 1..80: note = Artificially Synthesized Probe
  source 1..80: mol_type = other DNA
tactaggttttaaatctgtctttgaagagggggccccttgcatttggaggttcattcatctgtccacaatggatgaatta

SEQ ID NO: 42630 - DNA, 80 bp, synthetic construct
  misc_feature 1..80: note = Artificially Synthesized Probe
  source 1..80: mol_type = other DNA
atcattttcatttgctctgtccagaggatctcatctgcttctgtcttagaactgttttttgtttgttctgagacagaatc

SEQ ID NO: 42631 - DNA, 80 bp, synthetic construct
  misc_feature 1..80: note = Artificially Synthesized Probe
  source 1..80: mol_type = other DNA
gctctctcaatagtagagaaggacactacattttattacttatcaaaaagtcatcttatgaataattctttcagggttat

SEQ ID NO: 42632 - DNA, 80 bp, synthetic construct
  misc_feature 1..80: note = Artificially Synthesized Probe
  source 1..80: mol_type = other DNA
atgattacattgtattttctgttgagagaattgcatcagtagtcaggacatggtgtgctaactgaaattattgtaatgtt

SEQ ID NO: 42633 - DNA, 80 bp, synthetic construct
  misc_feature 1..80: note = Artificially Synthesized Probe
  source 1..80: mol_type = other DNA
cgtctctactaaaagtacaaaaattagccaggcgtggaggcacgtgcctgtagtcccagctacttgggaggctgaggcag

SEQ ID NO: 42634 - DNA, 80 bp, synthetic construct
  misc_feature 1..80: note = Artificially Synthesized Probe
  source 1..80: mol_type = other DNA
atctaatgattgacctcttgtatctaatgattgacctcttggagtagtgatttaaaaaacaacaacaacaacttcattgt

SEQ ID NO: 42635 - DNA, 80 bp, synthetic construct
  misc_feature 1..80: note = Artificially Synthesized Probe
  source 1..80: mol_type = other DNA
agatttaccgatttatatctgacgattcatataatattccaatttttttttgagacagagtctcgcgctgtctgtcgccc

SEQ ID NO: 42636 - DNA, 80 bp, synthetic construct
  misc_feature 1..80: note = Artificially Synthesized Probe
  source 1..80: mol_type = other DNA
ttggtggattctgctcctggatactgtgcgtataggaatgaagtatttactgttacttttgatctgcttagttacagaag

SEQ ID NO: 42637 - DNA, 80 bp, synthetic construct
  misc_feature 1..80: note = Artificially Synthesized Probe
  source 1..80: mol_type = other DNA
ttatttagatatttacttcttatggcctgatagaatggcccatctttcagtgtaataaagtccctgttgctaaataacct

SEQ ID NO: 42638 - DNA, 80 bp, synthetic construct
  misc_feature 1..80: note = Artificially Synthesized Probe
  source 1..80: mol_type = other DNA
ctgaaattggaaagtaggagagacatcagctctatttaattagatttatggagactgtagaacaaatccaaggtaggggg

SEQ ID NO: 42639 - DNA, 80 bp, synthetic construct
  misc_feature 1..80: note = Artificially Synthesized Probe
  source 1..80: mol_type = other DNA
agaagtgggggaagtgagcataccagtaagcaaggtcctgctggagatttgagaatccattatccctggttattgcctaa

SEQ ID NO: 42640 - DNA, 80 bp, synthetic construct
  misc_feature 1..80: note = Artificially Synthesized Probe
  source 1..80: mol_type = other DNA
ctggcctccattgtttctgatattaagcatttttctgcctcatttttattttcttgctggaactccagctctacatacga

SEQ ID NO: 42641 - DNA, 80 bp, synthetic construct
  misc_feature 1..80: note = Artificially Synthesized Probe
  source 1..80: mol_type = other DNA
ggatggttctcccttcaaatactgactctttactttgtcatctccaattttgtgttgagtgaatttttttcagttatatg

SEQ ID NO: 42642 - DNA, 80 bp, synthetic construct
  misc_feature 1..80: note = Artificially Synthesized Probe
  source 1..80: mol_type = other DNA
tgtgaaaccataaaaaatgggaatcttactaatgcccttcctttctttcaagtgtcaacccccatctactttcttcctga

SEQ ID NO: 42643 - DNA, 80 bp, synthetic construct
  misc_feature 1..80: note = Artificially Synthesized Probe
  source 1..80: mol_type = other DNA
agaaaagaaattaactgcttaaatatttagaggagaagcactgttttccttatatttcttccacttgaggaatagcacag

SEQ ID NO: 42644 - DNA, 80 bp, synthetic construct
  misc_feature 1..80: note = Artificially Synthesized Probe
  source 1..80: mol_type = other DNA
agcattgataattagggcaaacaagattgcaggtctatgataacgtacagtctgtcctggcaataatagcaaacattgcc

SEQ ID NO: 42645 - DNA, 80 bp, synthetic construct
  misc_feature 1..80: note = Artificially Synthesized Probe
  source 1..80: mol_type = other DNA
cttgagaacatacagtttctttttaatagttctgggcaatttgaagtaaatctacagatggcctcaggtggcagatgtgt

SEQ ID NO: 42646 - DNA, 80 bp, synthetic construct
  misc_feature 1..80: note = Artificially Synthesized Probe
  source 1..80: mol_type = other DNA
ttggtaccaagccttttatctgtttctgaggtctcattctttttcctttgctttctccttctttttctcccccagttccc

SEQ ID NO: 42647 - DNA, 80 bp, synthetic construct
  misc_feature 1..80: note = Artificially Synthesized Probe
  source 1..80: mol_type = other DNA
atctatttagtgactacttgtggtcttttcagctacatcatctctttgctaaaagccatcagtgacttagtctgtagctg

SEQ ID NO: 42648 - DNA, 80 bp, synthetic construct
  misc_feature 1..80: note = Artificially Synthesized Probe
  source 1..80: mol_type = other DNA
ggataaaatgagttagtaccatacaggattatcccatgttgtcttggttaaaaaatgtaaactacataggccgggcacag

SEQ ID NO: 42649 - DNA, 80 bp, synthetic construct
  misc_feature 1..80: note = Artificially Synthesized Probe
  source 1..80: mol_type = other DNA
agcttgtacttgttttcttttcaacatgcagtttagcaataatggttaagagcatggactctcagaagtcaaactgccgg

SEQ ID NO: 42650 - DNA, 80 bp, synthetic construct
  misc_feature 1..80: note = Artificially Synthesized Probe
  source 1..80: mol_type = other DNA
atgtgacctaaacaagactttggaattcctcttcatctgctagagacgttttcctctctcagaaaaggtttaccttgtct

SEQ ID NO: 42651 - DNA, 80 bp, synthetic construct
  misc_feature 1..80: note = Artificially Synthesized Probe
  source 1..80: mol_type = other DNA
aacagagtcaataccaggtgtagctgtaaactcaacagaaagttttgatttttaagtctttgtaaacagagcatcgaact

SEQ ID NO: 42652 - DNA, 80 bp, synthetic construct
  misc_feature 1..80: note = Artificially Synthesized Probe
  source 1..80: mol_type = other DNA
cacttttgagagtgaggggtgcccaagtgggatttccctaaatctttgcttcttaaagacacactccaccctttttgaag

SEQ ID NO: 42653 - DNA, 80 bp, synthetic construct
  misc_feature 1..80: note = Artificially Synthesized Probe
  source 1..80: mol_type = other DNA
agaaggcctttaacctatgaaataatttaaagtgacttgcatgggtatattgtatattggaaatcatggcatagtggcag

SEQ ID NO: 42654 - DNA, 80 bp, synthetic construct
  misc_feature 1..80: note = Artificially Synthesized Probe
  source 1..80: mol_type = other DNA
agtctagtctgtattaatagagagctggtggtcgttattactgagtttacatggaagtttcccaaaatgtgagatttgga

SEQ ID NO: 42655 - DNA, 80 bp, synthetic construct
  misc_feature 1..80: note = Artificially Synthesized Probe
  source 1..80: mol_type = other DNA
cttggcctcccaaagtgctgggattacaggtgtgagccactgtacctggccttttttttttttttttttgagacagggtc

SEQ ID NO: 42656 - DNA, 80 bp, synthetic construct
  misc_feature 1..80: note = Artificially Synthesized Probe
  source 1..80: mol_type = other DNA
aatgcacccacttaattggcatccagaccaagaaacaatgttatcatcccccctgaacccgatataccccctgtaagtta

SEQ ID NO: 42657 - DNA, 80 bp, synthetic construct
  misc_feature 1..80: note = Artificially Synthesized Probe
  source 1..80: mol_type = other DNA
cttgccagtatcatcagttaaatattgaaatgccacgatatactaagtgctttgctaagaataatatggagctccttacc

SEQ ID NO: 42658 - DNA, 80 bp, synthetic construct
  misc_feature 1..80: note = Artificially Synthesized Probe
  source 1..80: mol_type = other DNA
tgtgtttagaaaggcctcacagagaagttattagcaaatcttgaagaaataagggaaatgagtgatgcagctatctgagg

SEQ ID NO: 42659 - DNA, 80 bp, synthetic construct
  misc_feature 1..80: note = Artificially Synthesized Probe
  source 1..80: mol_type = other DNA
gatttacagattggaacaactctccggagtctgaaagatgcacttttcaaggtttgcaagtttcattgttagtttattgt

SEQ ID NO: 42660 - DNA, 80 bp, synthetic construct
  misc_feature 1..80: note = Artificially Synthesized Probe
  source 1..80: mol_type = other DNA
ctttgggaagctgaggcgggcagatcacctgaggtcaggagttcaagaccagcttgaccaacatgcagaaacctcgtctc

SEQ ID NO: 42661 - DNA, 80 bp, synthetic construct
  misc_feature 1..80: note = Artificially Synthesized Probe
  source 1..80: mol_type = other DNA
tgttataccatattgtttggagaatagtgacaagaaaaaagtctgtacatgctcagtacagacataaccatcataggcct

SEQ ID NO: 42662 - DNA, 80 bp, synthetic construct
  misc_feature 1..80: note = Artificially Synthesized Probe
  source 1..80: mol_type = other DNA
tttgttaaattattaacaatgatagcactgaatgctggtgagcatgtggtgagaagaaaactcattctgctggtaggagg

SEQ ID NO: 42663 - DNA, 80 bp, synthetic construct
  misc_feature 1..80: note = Artificially Synthesized Probe
  source 1..80: mol_type = other DNA
tagcctttctgaagggcaactgggcatcatattaaaccagcaattctactcctaggtaattatcctaaagaaatacatat

SEQ ID NO: 42664 - DNA, 80 bp, synthetic construct
  misc_feature 1..80: note = Artificially Synthesized Probe
  source 1..80: mol_type = other DNA
gtcaatcagtcaaccagtagtcgaatattacctagcattgcaaatgatgatatagctctatagtgatgaaagatgttcat

SEQ ID NO: 42665 - DNA, 80 bp, synthetic construct
  misc_feature 1..80: note = Artificially Synthesized Probe
  source 1..80: mol_type = other DNA
tcaattccttctaaacctgctgcccagacgccacctgcatctatagaagtagatgaaaatatagaattgataagtggtca

SEQ ID NO: 42666 - DNA, 80 bp, synthetic construct
  misc_feature 1..80: note = Artificially Synthesized Probe
  source 1..80: mol_type = other DNA
accgccacgcctatattagagtagataattaaggggtttccaagccagttggcgatccatttgctacaaacaatgccaat

SEQ ID NO: 42667 - DNA, 80 bp, synthetic construct
  misc_feature 1..80: note = Artificially Synthesized Probe
  source 1..80: mol_type = other DNA
atgggttcttctgatgtttggaaggagagatctgtataaaatcagccacagcataaggcagaatatcataattgctctac

SEQ ID NO: 42668 - DNA, 80 bp, synthetic construct
  misc_feature 1..80: note = Artificially Synthesized Probe
  source 1..80: mol_type = other DNA
cttttattttctagtagaaaaacataaattcgttttgtaagaacactatgtagattgttattggcacatgttcttataag

SEQ ID NO: 42669 - DNA, 80 bp, synthetic construct
  misc_feature 1..80: note = Artificially Synthesized Probe
  source 1..80: mol_type = other DNA
tgagagcatagtgggtagcaaatcaaatttgttttaaaatgagtcctctggctataatgtggagaaacagattggggggc

SEQ ID NO: 42670 - DNA, 80 bp, synthetic construct
  misc_feature 1..80: note = Artificially Synthesized Probe
  source 1..80: mol_type = other DNA
ttctgatgccaagaaatctgtagaagatagggggaaaaggtgtccaaccccagaaatacagaaaaagtcaacaggagatg

SEQ ID NO: 42671 - DNA, 80 bp, synthetic construct
  misc_feature 1..80: note = Artificially Synthesized Probe
  source 1..80: mol_type = other DNA
ggaaggcgggataccatctttacagaatgtcaatttctatacttctcaaacacaattcaggcatgttaccaaaattaatt

SEQ ID NO: 42672 - DNA, 80 bp, synthetic construct
  misc_feature 1..80: note = Artificially Synthesized Probe
  source 1..80: mol_type = other DNA
agcactttgggaggcctagacgagcggatcacttggtcaggagatcaagatgatcctggctaacacggtaaaaccctgtc

SEQ ID NO: 42673 - DNA, 80 bp, synthetic construct
  misc_feature 1..80: note = Artificially Synthesized Probe
  source 1..80: mol_type = other DNA
gcttgtttttgcatgatcaatccatttatatgctaaaggaaatagtttgtcttcctgtttaaagtgtgacagcgtattct

SEQ ID NO: 42674 - DNA, 80 bp, synthetic construct
  misc_feature 1..80: note = Artificially Synthesized Probe
  source 1..80: mol_type = other DNA
tctccatagatctgccttctctgggatatatatacagtcttcccttggtatctgtagatgactggttccactacctccct

SEQ ID NO: 42675 - DNA, 80 bp, synthetic construct
  misc_feature 1..80: note = Artificially Synthesized Probe
  source 1..80: mol_type = other DNA
tgtttagatctaagattaactaaacataacacataacccattaaaaccatgttgtgtaagaatgatacaatggactttgg

SEQ ID NO: 42676 - DNA, 80 bp, synthetic construct
  misc_feature 1..80: note = Artificially Synthesized Probe
  source 1..80: mol_type = other DNA
ccatctctgcccttcaggaagcaagggtactcaatatatcttctggctgtcttaaatctcatactgtatgatccactcta

SEQ ID NO: 42677 - DNA, 80 bp, synthetic construct
  misc_feature 1..80: note = Artificially Synthesized Probe
  source 1..80: mol_type = other DNA
ttgacagaatttttttccagcacacatattctatttattacatgtttgtattcaacagaatttgtcaccaggcaggagta

SEQ ID NO: 42678 - DNA, 80 bp, synthetic construct
  misc_feature 1..80: note = Artificially Synthesized Probe
  source 1..80: mol_type = other DNA
acctccaccttgccacctgctatcattacaggcttagacatactcctctacaccttggtatagtaatatttgtactttga

SEQ ID NO: 42679 - DNA, 80 bp, synthetic construct
  misc_feature 1..80: note = Artificially Synthesized Probe
  source 1..80: mol_type = other DNA
tcttgacccaatcactggaacctttcgttattatcattcacccaccaacactgttcatatgtacccaccggaaatggctc

SEQ ID NO: 42680 - DNA, 80 bp, synthetic construct
  misc_feature 1..80: note = Artificially Synthesized Probe
  source 1..80: mol_type = other DNA
ccaaaatagtttcatttagctatacttctggcttcgtcccttttggaatcctcttagcttatgactgatagggctatgag

SEQ ID NO: 42681 - DNA, 80 bp, synthetic construct
  misc_feature 1..80: note = Artificially Synthesized Probe
  source 1..80: mol_type = other DNA
cattgagcccagctggaactgtatttttttactgtgattgtgtatccatccgtgaatagtcaacacactctagaatttaa

SEQ ID NO: 42682 - DNA, 80 bp, synthetic construct
  misc_feature 1..80: note = Artificially Synthesized Probe
  source 1..80: mol_type = other DNA
taatttgtaaagaacaaaaatttattttctcttagttcttgactgggaaggccatcgtctaggtgccggcatctggtgcg

SEQ ID NO: 42683 - DNA, 80 bp, synthetic construct
  misc_feature 1..80: note = Artificially Synthesized Probe
  source 1..80: mol_type = other DNA
ctcaaaaaagagtaaagccttctctgattagtaaaggacagacaggatgagagcagtgccagaaggcagaacctcgctgt

SEQ ID NO: 42684 - DNA, 80 bp, synthetic construct
  misc_feature 1..80: note = Artificially Synthesized Probe
  source 1..80: mol_type = other DNA
tcccagtcccttgctgaaagtggaacatgcctttattcttacacatccttctaaaataagaattacttggctgggcacag

SEQ ID NO: 42685 - DNA, 80 bp, synthetic construct
  misc_feature 1..80: note = Artificially Synthesized Probe
  source 1..80: mol_type = other DNA
gccacactcagtgagatcagaactcctttatgagaactacaggtgtttctaaatctggcaagtgtttgtattcactttta

SEQ ID NO: 42686 - DNA, 80 bp, synthetic construct
  misc_feature 1..80: note = Artificially Synthesized Probe
  source 1..80: mol_type = other DNA
gttgtctgttgactaacttaggcctacttttcataagcatttgctttacatggggatatcaaataaatatcctgttttcc

SEQ ID NO: 42687 - DNA, 80 bp, synthetic construct
  misc_feature 1..80: note = Artificially Synthesized Probe
  source 1..80: mol_type = other DNA
tgttgtactgcctgccatgggcacataacaaagggcgattatctggttacagtagatctagggaaataaagcagaaatga

SEQ ID NO: 42688 - DNA, 80 bp, synthetic construct
  misc_feature 1..80: note = Artificially Synthesized Probe
  source 1..80: mol_type = other DNA
cagtagtctcctactctcaatttctggctctagttttctctgaagtacaagcttgactcgagagcagctgtcattctttc

SEQ ID NO: 42689 - DNA, 80 bp, synthetic construct
  misc_feature 1..80: note = Artificially Synthesized Probe
  source 1..80: mol_type = other DNA
tagctaagcattattattcgactggtctaaaaactattgttatcttttttttttccttttcactgttatggccttttcac

SEQ ID NO: 42690 - DNA, 80 bp, synthetic construct
  misc_feature 1..80: note = Artificially Synthesized Probe
  source 1..80: mol_type = other DNA
tgccgggagtcaggcatgattgcaaagtgaactgcattataaactacatctttacagagtgatgtattaagagggttaaa

SEQ ID NO: 42691 - DNA, 80 bp, synthetic construct
  misc_feature 1..80: note = Artificially Synthesized Probe
  source 1..80: mol_type = other DNA
gtattcacatatgaacactaactactggaacagaaatgatagggccaagagatgctttttaaattgtcccttattctaaa

SEQ ID NO: 42692 - DNA, 80 bp, synthetic construct
  misc_feature 1..80: note = Artificially Synthesized Probe
  source 1..80: mol_type = other DNA
ttgctgacctctgctgtagaggaagaaaattgattatttgttaacttatttttaattttttgagatggagtctctctctg

SEQ ID NO: 42693 - DNA, 80 bp, synthetic construct
  misc_feature 1..80: note = Artificially Synthesized Probe
  source 1..80: mol_type = other DNA
cccttcaaccttcgtcttccccacctctctccttacaggtaatagaaatatctgaaattcacatttaaaagatcaaggtt

SEQ ID NO: 42694 - DNA, 80 bp, synthetic construct
  misc_feature 1..80: note = Artificially Synthesized Probe
  source 1..80: mol_type = other DNA
cataagagtcagaaggcaataagatttaaacccccaaggactttagataatagaattattaagcagaggctacaaataaa

SEQ ID NO: 42695 - DNA, 80 bp, synthetic construct
  misc_feature 1..80: note = Artificially Synthesized Probe
  source 1..80: mol_type = other DNA
gaggcatgaaaaattgaatgagaatattcagcgtatgtcctgtagaagttctaggaggagagaatcgagtaggggagcaa

SEQ ID NO: 42696 - DNA, 80 bp, synthetic construct
  misc_feature 1..80: note = Artificially Synthesized Probe
  source 1..80: mol_type = other DNA
agttcagtgatcagaattacagtgttctaagagctttccatttctttgggagcagagtataaagatcttgattaacttta

SEQ ID NO: 42697 - DNA, 80 bp, synthetic construct
  misc_feature 1..80: note = Artificially Synthesized Probe
  source 1..80: mol_type = other DNA
gagacttcatctcaaaaaaaaaaaaaaaaaaaaaaaaaaaaaaaaatccagttttaggccaagtgtggtggctcatgcct

SEQ ID NO: 42698 - DNA, 80 bp, synthetic construct
  misc_feature 1..80: note = Artificially Synthesized Probe
  source 1..80: mol_type = other DNA
agggaagttttgacaagtctaccatcataatggaagatttcaactattgatcaagcagacaaaaatattagtatagatac

SEQ ID NO: 42699 - DNA, 80 bp, synthetic construct
  misc_feature 1..80: note = Artificially Synthesized Probe
  source 1..80: mol_type = other DNA
accctaaaagagtagagggaagagataacactgtaagaggaataacccataaagcagaaaacaaagatgtaatacagaag

SEQ ID NO: 42700 - DNA, 80 bp, synthetic construct
  misc_feature 1..80: note = Artificially Synthesized Probe
  source 1..80: mol_type = other DNA
gaccttagatgaaatagacaaatatctggagaataagttaccaaaatgactgaagagaaatacatggctcacacctatat

SEQ ID NO: 42701 - DNA, 80 bp, synthetic construct
  misc_feature 1..80: note = Artificially Synthesized Probe
  source 1..80: mol_type = other DNA
gtggttaagggattattttgatctatgaagtgtcacgatacaagatttaaatcagcaaaaagttagatatacgtgtgtat

SEQ ID NO: 42702 - DNA, 80 bp, synthetic construct
  misc_feature 1..80: note = Artificially Synthesized Probe
  source 1..80: mol_type = other DNA
ccttagttccagttgctggtgggaacgtaaaatgctgctgccactttggaaaacaatttggcagttcctcaaaaaattaa

SEQ ID NO: 42703 - DNA, 80 bp, synthetic construct
  misc_feature 1..80: note = Artificially Synthesized Probe
  source 1..80: mol_type = other DNA
tggccaggcacagtggctcacacctgtaatcccagcactttgggaggccctgagatgggcagatcacttgaggtcaggag

SEQ ID NO: 42704 - DNA, 80 bp, synthetic construct
  misc_feature 1..80: note = Artificially Synthesized Probe
  source 1..80: mol_type = other DNA
tgagggaggtggatcacctgaggtcatgagttcgagacaagagcgaaactgtctaaaaaaaaaaaaaaaaaaaagagtga

SEQ ID NO: 42705 - DNA, 80 bp, synthetic construct
  misc_feature 1..80: note = Artificially Synthesized Probe
  source 1..80: mol_type = other DNA
tttatacgaagcataaaatcaggcaaaaatctataaatctgtcctgccagaagtcagtggttttccagactcgaaggcag

SEQ ID NO: 42706 - DNA, 80 bp, synthetic construct
  misc_feature 1..80: note = Artificially Synthesized Probe
  source 1..80: mol_type = other DNA
ctggtatttgtagcaatgggtggaaaagatggcttcagtcgatctgagttactgcagttttctccatcttctgctactct

SEQ ID NO: 42707 - DNA, 80 bp, synthetic construct
  misc_feature 1..80: note = Artificially Synthesized Probe
  source 1..80: mol_type = other DNA
cagttaacatatagcaataatgactctcttttcgccccctaggaatgggtgaatttaaggtccatcgagtacgtttcttt

SEQ ID NO: 42708 - DNA, 80 bp, synthetic construct
  misc_feature 1..80: note = Artificially Synthesized Probe
  source 1..80: mol_type = other DNA
agaggccctaactttacggagctcaaagaccagtgggagaaagataagtgtacagtttccaacctgtaaaataaatatga

SEQ ID NO: 42709 - DNA, 80 bp, synthetic construct
  misc_feature 1..80: note = Artificially Synthesized Probe
  source 1..80: mol_type = other DNA
gctttccctatattccctttcctactagatacgattgcttagctctgtcagtgactctcagagcaagaaaaaattagtac

SEQ ID NO: 42710 - DNA, 80 bp, synthetic construct
  misc_feature 1..80: note = Artificially Synthesized Probe
  source 1..80: mol_type = other DNA
gagcatatgagctaggagtaaggagaccttcatttgcctcatgcaattgactttggcacttttggcaacctacttaaccc

SEQ ID NO: 42711 - DNA, 80 bp, synthetic construct
  misc_feature 1..80: note = Artificially Synthesized Probe
  source 1..80: mol_type = other DNA
taatcctgctgtaaattcacaatgcacatcggtacatgaagagttctgagagtcccttcagcaagttaacctgtgcactt

SEQ ID NO: 42712 - DNA, 80 bp, synthetic construct
  misc_feature 1..80: note = Artificially Synthesized Probe
  source 1..80: mol_type = other DNA
tttttcatggggcggtaaatagccttaacaagaaattaagtttctgtgccactggggatgggatattttcccatgaatcc

SEQ ID NO: 42713 - DNA, 80 bp, synthetic construct
  misc_feature 1..80: note = Artificially Synthesized Probe
  source 1..80: mol_type = other DNA
gtgacccatcttctagaatagcaaatgtcctctgtgtccattagtaatacttatcctctgctaatcagattcttgcttcg

SEQ ID NO: 42714 - DNA, 80 bp, synthetic construct
  misc_feature 1..80: note = Artificially Synthesized Probe
  source 1..80: mol_type = other DNA
tcaaaagcttgagcctttgtcatggtttcatgacctttatggcctaacatgtcattaatcttctgagatgtccacaatta

SEQ ID NO: 42715 - DNA, 80 bp, synthetic construct
  misc_feature 1..80: note = Artificially Synthesized Probe
  source 1..80: mol_type = other DNA
ttattacaaaaaagagggagtccttctatatctctctcactctcctcgaggcaaccacttgtgacccttagctgattctt

SEQ ID NO: 42716 - DNA, 80 bp, synthetic construct
  misc_feature 1..80: note = Artificially Synthesized Probe
  source 1..80: mol_type = other DNA
ttctggacacctggtaggttcttctaatccaatacccacgtccttcagttctggggggaaattcttttactcttattttt

SEQ ID NO: 42717 - DNA, 80 bp, synthetic construct
  misc_feature 1..80: note = Artificially Synthesized Probe
  source 1..80: mol_type = other DNA
ttttggaaaagagcagagtgtaatgtgtgtgtgcagttgaccagctttaagtgaatgtcccaaatgtctctttccatttc

SEQ ID NO: 42718 - DNA, 80 bp, synthetic construct
  misc_feature 1..80: note = Artificially Synthesized Probe
  source 1..80: mol_type = other DNA
tacaggatactccaagagattagttagcagggagattttctttagacactgctcacttccagttcgtcttgtttgattgt

SEQ ID NO: 42719 - DNA, 80 bp, synthetic construct
  misc_feature 1..80: note = Artificially Synthesized Probe
  source 1..80: mol_type = other DNA
tctatgacgtaaatattgtagaggaatggtaacgtgaattctcattcagaaacctttgagtattttagcagtgagacatg

SEQ ID NO: 42720 - DNA, 80 bp, synthetic construct
  misc_feature 1..80: note = Artificially Synthesized Probe
  source 1..80: mol_type = other DNA
cacctaagagaaagagaatacagagtaaaggagaagtccttgtcttccaaatctctctctggatgggactttgagaaaac

SEQ ID NO: 42721 - DNA, 80 bp, synthetic construct
  misc_feature 1..80: note = Artificially Synthesized Probe
  source 1..80: mol_type = other DNA
tacttttaaactattttaaaagtgtacatttcagtggaataaagttcattcacgttgttgtacagctatcaccactatcc

SEQ ID NO: 42722 - DNA, 80 bp, synthetic construct
  misc_feature 1..80: note = Artificially Synthesized Probe
  source 1..80: mol_type = other DNA
gcgcctgtagtcccagctactcgggaggctgaggcaggagaatcgcttgaaccagggaggcggaggttgcagtgatctga

SEQ ID NO: 42723 - DNA, 80 bp, synthetic construct
  misc_feature 1..80: note = Artificially Synthesized Probe
  source 1..80: mol_type = other DNA
atccgcccgcctcggcttcccaaagtgttggaattacagatgtgagccactgcgcccggcctaatttttgtatttttaat

SEQ ID NO: 42724 - DNA, 80 bp, synthetic construct
  misc_feature 1..80: note = Artificially Synthesized Probe
  source 1..80: mol_type = other DNA
gcaaacgtggtaaaaccctgtctatactgaaaaataaatacaagcctgggcacggtgactcacacctgtaatcccagcac

SEQ ID NO: 42725 - DNA, 80 bp, synthetic construct
  misc_feature 1..80: note = Artificially Synthesized Probe
  source 1..80: mol_type = other DNA
ctctctctcaatgctattctaaggagatctatgttgggtatatgaagcgttgctgtactgtagacgttaattttgtcagt

SEQ ID NO: 42726 - DNA, 80 bp, synthetic construct
  misc_feature 1..80: note = Artificially Synthesized Probe
  source 1..80: mol_type = other DNA
ttatatctttagtagagactgggtttttccatgttggtcaggctgatctcggaactcccaacctcaggtgatctgcccgc

SEQ ID NO: 42727 - DNA, 80 bp, synthetic construct
  misc_feature 1..80: note = Artificially Synthesized Probe
  source 1..80: mol_type = other DNA
cattcatttctctttgtctacgctggcatcatcctagtttggatcagtgtcttttctcatctgggttcctttacagtagc

SEQ ID NO: 42728 - DNA, 80 bp, synthetic construct
  misc_feature 1..80: note = Artificially Synthesized Probe
  source 1..80: mol_type = other DNA
cccaggctagccattctcaaggtctttttgttccctcaaatactcttacctttgagctatgtcacatgccatcaccctcc

SEQ ID NO: 42729 - DNA, 80 bp, synthetic construct
  misc_feature 1..80: note = Artificially Synthesized Probe
  source 1..80: mol_type = other DNA
cagaattgcggttggaattctgcttatagaaaaactgaagtagacttttgtgtccattttaactaatggttttcccaccc

SEQ ID NO: 42730 - DNA, 80 bp, synthetic construct
  misc_feature 1..80: note = Artificially Synthesized Probe
  source 1..80: mol_type = other DNA
tgaatgaaggactgtgtcaccaggactgggtttcctgtgattataagtaggacgttgaggatttattagatggatgtata

SEQ ID NO: 42731 - DNA, 80 bp, synthetic construct
  misc_feature 1..80: note = Artificially Synthesized Probe
  source 1..80: mol_type = other DNA
tttaggtgctctgcctctgaaataatcatattaatgcagaccacacgaggatcgagattatgtgtagatatctgtgggta

SEQ ID NO: 42732 - DNA, 80 bp, synthetic construct
  misc_feature 1..80: note = Artificially Synthesized Probe
  source 1..80: mol_type = other DNA
aagcacccaccaccacacctggctgatttttgtatttttagtagagatggagtttcaccacccgttggccatgctggtcc

SEQ ID NO: 42733 - DNA, 80 bp, synthetic construct
  misc_feature 1..80: note = Artificially Synthesized Probe
  source 1..80: mol_type = other DNA
ctggccatggggagacttgtcgtgtctaagatgtaacttttttgcttttaagcctccatgtcgggggttccctcatgttc

SEQ ID NO: 42734 - DNA, 80 bp, synthetic construct
  misc_feature 1..80: note = Artificially Synthesized Probe
  source 1..80: mol_type = other DNA
gcctagtgaaagtcaactcttttatcttcaactctcactgttcataagctgatccagaagcctacaggagaagaaaccca

SEQ ID NO: 42735 - DNA, 80 bp, synthetic construct
  misc_feature 1..80: note = Artificially Synthesized Probe
  source 1..80: mol_type = other DNA
caaaagacagagtttcttgtgcccaggctggagtgcattggtgccatctcggctcactgcaacctttgcctcccaggttc

SEQ ID NO: 42736 - DNA, 80 bp, synthetic construct
  misc_feature 1..80: note = Artificially Synthesized Probe
  source 1..80: mol_type = other DNA
aatttgcacagtgatcagcaaattatcctggcagtgatttaaaactctaatggtctccttggcttttgccatcatctcca

SEQ ID NO: 42737 - DNA, 80 bp, synthetic construct
  misc_feature 1..80: note = Artificially Synthesized Probe
  source 1..80: mol_type = other DNA
aatcctgttttatttttatggaacccggaagctatactgtgtaacattaaaagcagctaatggaaacagtgaaacccatt

SEQ ID NO: 42738 - DNA, 80 bp, synthetic construct
  misc_feature 1..80: note = Artificially Synthesized Probe
  source 1..80: mol_type = other DNA
accacacctagctaatctttttttttagtagagatgaggttttgctgtgttgcccaggctggtcttgaactcctggactc

SEQ ID NO: 42739 - DNA, 80 bp, synthetic construct
  misc_feature 1..80: note = Artificially Synthesized Probe
  source 1..80: mol_type = other DNA
tttgaattatgaggagcagtatttaaacccctgacctagaccattcaatctttgctgaggaaaagtgtcacttagagttg

SEQ ID NO: 42740 - DNA, 80 bp, synthetic construct
  misc_feature 1..80: note = Artificially Synthesized Probe
  source 1..80: mol_type = other DNA
ctaaaagattgtatcattcacctttacgcttgccgatgaggaaatcaagccctaataagatcaggtacctaatctcagcc

SEQ ID NO: 42741 - DNA, 80 bp, synthetic construct
  misc_feature 1..80: note = Artificially Synthesized Probe
  source 1..80: mol_type = other DNA
gtggataagtaaatcatgatacatggacaaaatgagtggactattctgtgtttcagaatgggcatgaccgatatatatgt

SEQ ID NO: 42742 - DNA, 80 bp, synthetic construct
  misc_feature 1..80: note = Artificially Synthesized Probe
  source 1..80: mol_type = other DNA
ttcatcccaagagaccgatgcacatccttctccatgatgcctacatgttctgcatcattgacaagtcattggtgagttct

SEQ ID NO: 42743 - DNA, 80 bp, synthetic construct
  misc_feature 1..80: note = Artificially Synthesized Probe
  source 1..80: mol_type = other DNA
tcattttttccaaagcattggctttaagttcatcgcttccttacagtaggcatagctatttcccaggaagtcagagacaa

SEQ ID NO: 42744 - DNA, 80 bp, synthetic construct
  misc_feature 1..80: note = Artificially Synthesized Probe
  source 1..80: mol_type = other DNA
gtagtgagaaatgttggcgctgagggtagagtctttgttgtcatgagagctggctttaaattttacttgttggagtgttc

SEQ ID NO: 42745 - DNA, 80 bp, synthetic construct
  misc_feature 1..80: note = Artificially Synthesized Probe
  source 1..80: mol_type = other DNA
aaggctcccaatcttgagccaggcgcagccgtgcacacctacctattgtcccagctactcaggagactgaggcaggatga

SEQ ID NO: 42746 - DNA, 80 bp, synthetic construct
  misc_feature 1..80: note = Artificially Synthesized Probe
  source 1..80: mol_type = other DNA
ttctgtaggccgcaatctcagaagaaaagatatttgtgttctgttccctattacatgcctaaggcttcagagagctgata

SEQ ID NO: 42747 - DNA, 80 bp, synthetic construct
  misc_feature 1..80: note = Artificially Synthesized Probe
  source 1..80: mol_type = other DNA
ggtttgataagaaagaacagatatgataagatttataatggatgtctttgcctctgccccacctgttaggttttacagtg

SEQ ID NO: 42748 - DNA, 80 bp, synthetic construct
  misc_feature 1..80: note = Artificially Synthesized Probe
  source 1..80: mol_type = other DNA
cacttgcttttcactcgttgtagagctgtaaattcagagaatccttgtcaactggaatctagtttatggcttaacttact

SEQ ID NO: 42749 - DNA, 80 bp, synthetic construct
  misc_feature 1..80: note = Artificially Synthesized Probe
  source 1..80: mol_type = other DNA
aagttattcctattgggtggagatgaagcaggagtttgtaaaagaaacgtgactctcagtctcattttttttcctttttt

SEQ ID NO: 42750 - DNA, 80 bp, synthetic construct
  misc_feature 1..80: note = Artificially Synthesized Probe
  source 1..80: mol_type = other DNA
acccaccaaaaccaagaaggccgcaagagtgacctctggtcgtcctcactgctacactcccaccagcgccatgacagttt

SEQ ID NO: 42751 - DNA, 80 bp, synthetic construct
  misc_feature 1..80: note = Artificially Synthesized Probe
  source 1..80: mol_type = other DNA
actaattttagcctatccaatgggtgaaaaacgctatctcattttactctgcatttccctgtttactaatgaggttgctc

SEQ ID NO: 42752 - DNA, 80 bp, synthetic construct
  misc_feature 1..80: note = Artificially Synthesized Probe
  source 1..80: mol_type = other DNA
gcataaggtggctcatgcctgtaatcccagtgccttgggaggctgaggtgggcggatcacgaggtcaggagttgaagacc

SEQ ID NO: 42753 - DNA, 80 bp, synthetic construct
  misc_feature 1..80: note = Artificially Synthesized Probe
  source 1..80: mol_type = other DNA
gaagttatagaatttagtaacagctatacatttattgagtggctactatatgcaactcaccaaaaacagaagaaaaatac

SEQ ID NO: 42754 - DNA, 80 bp, synthetic construct
  misc_feature 1..80: note = Artificially Synthesized Probe
  source 1..80: mol_type = other DNA
acaggctgttgtgtaggtgacggggggtctatgttagggctgccataacaaagcactattgggatggcttcaacaacata

SEQ ID NO: 42755 - DNA, 80 bp, synthetic construct
  misc_feature 1..80: note = Artificially Synthesized Probe
  source 1..80: mol_type = other DNA
aggctggtgtcgaactcctggactcaagtgatcctcctgcctcctgatgtgctgtggttacaggcatgagccaccacgcc

SEQ ID NO: 42756 - DNA, 80 bp, synthetic construct
  misc_feature 1..80: note = Artificially Synthesized Probe
  source 1..80: mol_type = other DNA
ctcgctttgtcacccaggcttgagtgcagtggcacgatcatggcccactgcaacctccgcctcccgggttcaagcgattc

SEQ ID NO: 42757 - DNA, 80 bp, synthetic construct
  misc_feature 1..80: note = Artificially Synthesized Probe
  source 1..80: mol_type = other DNA
aacgttggaaccagccccagatccactaattcttttcctttgacggactcttggcaatctatactgtctttcagccaaag

SEQ ID NO: 42758 - DNA, 80 bp, synthetic construct
  misc_feature 1..80: note = Artificially Synthesized Probe
  source 1..80: mol_type = other DNA
taacagcaatgggtactcatttatttatttatttatttatttgagatggagtcttgctctgtcccccaggctggagtgca

SEQ ID NO: 42759 - DNA, 80 bp, synthetic construct
  misc_feature 1..80: note = Artificially Synthesized Probe
  source 1..80: mol_type = other DNA
actgtgcctggccgccatttcctttttttagaggtaaagtaacatgactcttcaaagagtgatcatagcttgtctcactg

SEQ ID NO: 42760 - DNA, 80 bp, synthetic construct
  misc_feature 1..80: note = Artificially Synthesized Probe
  source 1..80: mol_type = other DNA
tgtcttatgtaagtgccctcactattagttagcagatctgtgacttactccaactctattggcaaaaaggtcttgatagt

SEQ ID NO: 42761 - DNA, 80 bp, synthetic construct
  misc_feature 1..80: note = Artificially Synthesized Probe
  source 1..80: mol_type = other DNA
gggattttttgctactactgctgaagaaaagttagaggacaccttgacctcatgattttgctgagcacttgctttcttaa

SEQ ID NO: 42762 - DNA, 80 bp, synthetic construct
  misc_feature 1..80: note = Artificially Synthesized Probe
  source 1..80: mol_type = other DNA
agaacagcctgaccaacatggtgaaaccccacctttactaaaatacaaaaattagctggtgtgatggcacgcgcctgtaa

SEQ ID NO: 42763 - DNA, 80 bp, synthetic construct
  misc_feature 1..80: note = Artificially Synthesized Probe
  source 1..80: mol_type = other DNA
ttgtccccccaccccaactcccaccctcacccccttctcagactttctgttttgagacagggtcttgctttgtcacccgg

SEQ ID NO: 42764 - DNA, 80 bp, synthetic construct
  misc_feature 1..80: note = Artificially Synthesized Probe
  source 1..80: mol_type = other DNA
tgcaaatatccttgaggcctgccaattgtggcttcagggtttaagaagacatggttccctcttgaattacaggcaagtaa

SEQ ID NO: 42765 - DNA, 80 bp, synthetic construct
  misc_feature 1..80: note = Artificially Synthesized Probe
  source 1..80: mol_type = other DNA
aagagggaagcgccgaggctgcctgactggaatgagggtagctgcggcgactgcggcggctggagcggggccggccatgg

SEQ ID NO: 42766 - DNA, 80 bp, synthetic construct
  misc_feature 1..80: note = Artificially Synthesized Probe
  source 1..80: mol_type = other DNA
agcaagtctgtgtggttaacgaaccttgtttaacagtggaggctcacgtgtttgaacatttactgccaactagagttttg

SEQ ID NO: 42767 - DNA, 80 bp, synthetic construct
  misc_feature 1..80: note = Artificially Synthesized Probe
  source 1..80: mol_type = other DNA
gctggtgaagaaggaccaatcgtcaaaccgagaggccagaagtccaacttggcacaatggattttcactttcttataaat

SEQ ID NO: 42768 - DNA, 80 bp, synthetic construct
  misc_feature 1..80: note = Artificially Synthesized Probe
  source 1..80: mol_type = other DNA
taaaataggccacgtgtgcttttagaaagatggccgcataataacatgtttattgaatgcctttttacctaacatgcagg

SEQ ID NO: 42769 - DNA, 80 bp, synthetic construct
  misc_feature 1..80: note = Artificially Synthesized Probe
  source 1..80: mol_type = other DNA
agaagcaaggactttgtggtcagatgtgggtttgtttctggctagtggtttgtaacccctaggcaagttacttaatcttg

SEQ ID NO: 42770 - DNA, 80 bp, synthetic construct
  misc_feature 1..80: note = Artificially Synthesized Probe
  source 1..80: mol_type = other DNA
tggccttgttttgttttaaatgggaaaataattgggacagatttgtatagcaagagaaaagcccaaccaacagaaagagt

SEQ ID NO: 42771 - DNA, 80 bp, synthetic construct
  misc_feature 1..80: note = Artificially Synthesized Probe
  source 1..80: mol_type = other DNA
ttcaaacttggctttatttctgacccccaagacattgctagaatgctataattagttgagaatatgtgaaatgcaatttt

SEQ ID NO: 42772 - DNA, 80 bp, synthetic construct
  misc_feature 1..80: note = Artificially Synthesized Probe
  source 1..80: mol_type = other DNA
ccatttaaactagttcagataaaaggatggagatgttataaagaaccagacaggtctcgggacttcaggaagagctgcgc

SEQ ID NO: 42773 - DNA, 80 bp, synthetic construct
  misc_feature 1..80: note = Artificially Synthesized Probe
  source 1..80: mol_type = other DNA
cagtcattccagccaaaaatactgggccttactcatccatgttccaatcatgtggctgaggggtaccagatgttctattt

SEQ ID NO: 42774 - DNA, 80 bp, synthetic construct
  misc_feature 1..80: note = Artificially Synthesized Probe
  source 1..80: mol_type = other DNA
ctaatttaagcagaagtggaatgtattgccttatgtaactcctgagaccgggggtggatctaggtttaggttcagtggga

SEQ ID NO: 42775 - DNA, 80 bp, synthetic construct
  misc_feature 1..80: note = Artificially Synthesized Probe
  source 1..80: mol_type = other DNA
gcaatggagcaagaccctgtctcaaaaagagaaaaaacaaaagtggctaagttgtacatttttaaaaacaaaaggaatca

SEQ ID NO: 42776 - DNA, 80 bp, synthetic construct
  misc_feature 1..80: note = Artificially Synthesized Probe
  source 1..80: mol_type = other DNA
aacaagcagtgatgttcaaacttcagcaaacagatttgatgaaatagcccattttcaaggctctgtacccctttttaaaa

SEQ ID NO: 42777 - DNA, 80 bp, synthetic construct
  misc_feature 1..80: note = Artificially Synthesized Probe
  source 1..80: mol_type = other DNA
ctgggcaaatacaaattctgctaaaaacagcaatgaaagactaaagtgaattctggaaaccattcttcaccagagatgtt

SEQ ID NO: 42778 - DNA, 80 bp, synthetic construct
  misc_feature 1..80: note = Artificially Synthesized Probe
  source 1..80: mol_type = other DNA
tgattctcctgcctcagcctcccgagtagctgggattacaggcgcacgccaccatgcctggctaatttttgcatttttac

SEQ ID NO: 42779 - DNA, 80 bp, synthetic construct
  misc_feature 1..80: note = Artificially Synthesized Probe
  source 1..80: mol_type = other DNA
ggagaaagggggacttttaaaaaatgttttattttagatccatgctattactgggaagacagagactttttttttttgag

SEQ ID NO: 42780 - DNA, 80 bp, synthetic construct
  misc_feature 1..80: note = Artificially Synthesized Probe
  source 1..80: mol_type = other DNA
aatttctgggattacaggtgtgagccaccgagtctggccctgtgatccatcttgaagtaatgtttgtatattgactctat

SEQ ID NO: 42781 - DNA, 80 bp, synthetic construct
  misc_feature 1..80: note = Artificially Synthesized Probe
  source 1..80: mol_type = other DNA
aattgtcctcttcttctgtgcttcatacctggatggaaaattgcttcaggatatcagtctgcatgtctggagaaacgaat

SEQ ID NO: 42782 - DNA, 80 bp, synthetic construct
  misc_feature 1..80: note = Artificially Synthesized Probe
  source 1..80: mol_type = other DNA
aggctcaggtgatcctcccacctcagcctcctgagtagctgggattacagacacacactaccacattcagtaattttttt

SEQ ID NO: 42783 - DNA, 80 bp, synthetic construct
  misc_feature 1..80: note = Artificially Synthesized Probe
  source 1..80: mol_type = other DNA
agcctctcgagtagctggaattagtggtacatgtcaccatgcctggctaattttttaattgttttgcagagacaggatat

SEQ ID NO: 42784 - DNA, 80 bp, synthetic construct
  misc_feature 1..80: note = Artificially Synthesized Probe
  source 1..80: mol_type = other DNA
tgctcctcaaaagaaaaacatgttgagacagtagttattaagaagtcaggctttgccacaatcccttttaaatacagtac

SEQ ID NO: 42785 - DNA, 80 bp, synthetic construct
  misc_feature 1..80: note = Artificially Synthesized Probe
  source 1..80: mol_type = other DNA
cccaacagaattcatatttaacagatacctcttgtggccccttgtaaggcaagaataaaggtcttcagttttagtttctt

SEQ ID NO: 42786 - DNA, 80 bp, synthetic construct
  misc_feature 1..80: note = Artificially Synthesized Probe
  source 1..80: mol_type = other DNA
tttagtagagacagggttctcactatgttgcctagggtggtctcgaactcttgggctcaagtgatccttctgcctcagcc

SEQ ID NO: 42787 - DNA, 80 bp, synthetic construct
  misc_feature 1..80: note = Artificially Synthesized Probe
  source 1..80: mol_type = other DNA
cttttcttttctttctttcttttttttttttttttgagagatggtgtcttgctctgtcgttcaggctggagtgcagtggc

SEQ ID NO: 42788 - DNA, 80 bp, synthetic construct
  misc_feature 1..80: note = Artificially Synthesized Probe
  source 1..80: mol_type = other DNA
gagacttcatctcaaaaaaaaaaaaaaaaagccgggcacggtggctcatgcctgtaatcccagcactttgggaggccgag

SEQ ID NO: 42789 - DNA, 80 bp, synthetic construct
  misc_feature 1..80: note = Artificially Synthesized Probe
  source 1..80: mol_type = other DNA
tcccatgctgtttgggaagattttgaaattagcctgaactatcattgctgtattgctgcttctaccaattccattattat

SEQ ID NO: 42790 - DNA, 80 bp, synthetic construct
  misc_feature 1..80: note = Artificially Synthesized Probe
  source 1..80: mol_type = other DNA
gagatggaatatcgttctgttgcccaggctggagtgcagtggcgcagtcttggctcactgtaacctacacctcccaggtt

SEQ ID NO: 42791 - DNA, 80 bp, synthetic construct
  misc_feature 1..80: note = Artificially Synthesized Probe
  source 1..80: mol_type = other DNA
gcgagactccgtctcaaaaatatatatatattttgtagagacaggttcttgctgtgttgcccagggtggttttgaactcc

SEQ ID NO: 42792 - DNA, 80 bp, synthetic construct
  misc_feature 1..80: note = Artificially Synthesized Probe
  source 1..80: mol_type = other DNA
atgtttctttttccccttgcctctaagtctttgcctctgtgctgtaacactagccaggcaggcttatttctaggttatct

SEQ ID NO: 42793 - DNA, 80 bp, synthetic construct
  misc_feature 1..80: note = Artificially Synthesized Probe
  source 1..80: mol_type = other DNA
gtagagtatagtaatggttacatgcttgatctttccatctttgctatttaatggcagagtgacagtggcaagtctttttt

SEQ ID NO: 42794 - DNA, 80 bp, synthetic construct
  misc_feature 1..80: note = Artificially Synthesized Probe
  source 1..80: mol_type = other DNA
gttccacccgccttagcatcccaaagtactgggattacaggtgtgagccaccgtgcccagctgataaatactatcatttt

SEQ ID NO: 42795 - DNA, 80 bp, synthetic construct
  misc_feature 1..80: note = Artificially Synthesized Probe
  source 1..80: mol_type = other DNA
tagacttaagctattctcctgcctaagcctcccaggtagctgggattacaggcatgtgccaccatgcctgactaattctg

SEQ ID NO: 42796 - DNA, 80 bp, synthetic construct
  misc_feature 1..80: note = Artificially Synthesized Probe
  source 1..80: mol_type = other DNA
tgatgttagtgtgacaggttcatatatttaagaaggtgctgagaggaacatgtttctttagagtcctggcttgctttatg

SEQ ID NO: 42797 - DNA, 80 bp, synthetic construct
  misc_feature 1..80: note = Artificially Synthesized Probe
  source 1..80: mol_type = other DNA
tctctggtgccatttatctacttttagtttggctggggttgctgtgccacttttctaaccatgctcttcccctgtcattg

SEQ ID NO: 42798 - DNA, 80 bp, synthetic construct
  misc_feature 1..80: note = Artificially Synthesized Probe
  source 1..80: mol_type = other DNA
gccgtaggctggctgtgacttagaagaagttttctgatttctttaggcctcagatttcttaggtttcagtttaaatatct

SEQ ID NO: 42799 - DNA, 80 bp, synthetic construct
  misc_feature 1..80: note = Artificially Synthesized Probe
  source 1..80: mol_type = other DNA
caggcatgagtcactgtgcctggcctgttacaaacaattttttaaaatctcaaatcataagaggtctgaaggtagactct

SEQ ID NO: 42800 - DNA, 80 bp, synthetic construct
  misc_feature 1..80: note = Artificially Synthesized Probe
  source 1..80: mol_type = other DNA
taatggctggatcactggagatgtcaactcaaagaacattctaatatatctctggaatatgaggcagtccctccaaaggc

SEQ ID NO: 42801 - DNA, 80 bp, synthetic construct
  misc_feature 1..80: note = Artificially Synthesized Probe
  source 1..80: mol_type = other DNA
agtaacatccactctttaggcgtacagttccatgttttgtttttttttttgagacagggtcttactctgtcacccaagct

SEQ ID NO: 42802 - DNA, 80 bp, synthetic construct
  misc_feature 1..80: note = Artificially Synthesized Probe
  source 1..80: mol_type = other DNA
agtaaactttgtagtaacaaatactgatagttcacacttacatactccattgcatttagtgtttacatgtcccacttcct

SEQ ID NO: 42803 - DNA, 80 bp, synthetic construct
  misc_feature 1..80: note = Artificially Synthesized Probe
  source 1..80: mol_type = other DNA
ttttaaattaattatctcataccgcaagttccttgcaatagttattttctattatttctgcttttccttgacgtacaaca

SEQ ID NO: 42804 - DNA, 80 bp, synthetic construct
  misc_feature 1..80: note = Artificially Synthesized Probe
  source 1..80: mol_type = other DNA
tcttttgcttttagacttaaaagttatagaaataatacagagtttccagtttccccgaatgttaacatcttgcataacca

SEQ ID NO: 42805 - DNA, 80 bp, synthetic construct
  misc_feature 1..80: note = Artificially Synthesized Probe
  source 1..80: mol_type = other DNA
cattcttgggaaggaaaccagagaagtgatgtatcattctcagtgtatcatattgggcaggggtgggatatgacttcaat

SEQ ID NO: 42806 - DNA, 80 bp, synthetic construct
  misc_feature 1..80: note = Artificially Synthesized Probe
  source 1..80: mol_type = other DNA
gctgaccctttgaacacagctattgtgctgggttaatattgtatttccgtctatagtttatcattcagggtgctgatcta

SEQ ID NO: 42807 - DNA, 80 bp, synthetic construct
  misc_feature 1..80: note = Artificially Synthesized Probe
  source 1..80: mol_type = other DNA
ttttgtagttttagtagacatggggtttcaccatgttggctaggctggtctcaaactactgatctcaagtgatctgcccg

SEQ ID NO: 42808 - DNA, 80 bp, synthetic construct
  misc_feature 1..80: note = Artificially Synthesized Probe
  source 1..80: mol_type = other DNA
ccatggtgcatggccctaaggttatgtttttatgttactgcaggagcaaactgctcattcagaagccatttgtttaagct

SEQ ID NO: 42809 - DNA, 80 bp, synthetic construct
  misc_feature 1..80: note = Artificially Synthesized Probe
  source 1..80: mol_type = other DNA
aaaacaaaaactgtgacatatggcggatgccatgtcagtgatatgtagagtgttagaggaatatagatgaggaaggttat

SEQ ID NO: 42810 - DNA, 80 bp, synthetic construct
  misc_feature 1..80: note = Artificially Synthesized Probe
  source 1..80: mol_type = other DNA
caaaatcacaacgtttgtaattggcagaactggaattaaaatctggatctgttcagtttcacatatttgactctgtccac

SEQ ID NO: 42811 - DNA, 80 bp, synthetic construct
  misc_feature 1..80: note = Artificially Synthesized Probe
  source 1..80: mol_type = other DNA
cactgtggcctgcctgaattttttttttttttttttttaagagacatggtcttactctgtcacccaggctgaagtgtagt

SEQ ID NO: 42812 - DNA, 80 bp, synthetic construct
  misc_feature 1..80: note = Artificially Synthesized Probe
  source 1..80: mol_type = other DNA
tggccgggttcattttttcaaaaagtagcctctaatatttgagcaggagactaaaaggaatataaattattcctaaccaa

SEQ ID NO: 42813 - DNA, 80 bp, synthetic construct
  misc_feature 1..80: note = Artificially Synthesized Probe
  source 1..80: mol_type = other DNA
taatgagaactagtaacaacaaaaaaaaccacgctgtagaagacagagggaaactgctggatgggtgccttggaggaagc

SEQ ID NO: 42814 - DNA, 80 bp, synthetic construct
  misc_feature 1..80: note = Artificially Synthesized Probe
  source 1..80: mol_type = other DNA
cccccggcgcccgtacatgcggcccctttaaggactttctgcgccctcccgcctcttttttctcgtgcgtccccctcccc

SEQ ID NO: 42815 - DNA, 80 bp, synthetic construct
  misc_feature 1..80: note = Artificially Synthesized Probe
  source 1..80: mol_type = other DNA
tcagggtcctcccggagctttcggtttatagtggaacccagtaaacacgttaataacaccgagagctataaaatacagat

SEQ ID NO: 42816 - DNA, 80 bp, synthetic construct
  misc_feature 1..80: note = Artificially Synthesized Probe
  source 1..80: mol_type = other DNA
agcaaaacttcccctcggagggtggagcataagtcgaggacactgattattctgtatcctgtgtttgtaaaatggcagtt

SEQ ID NO: 42817 - DNA, 80 bp, synthetic construct
  misc_feature 1..80: note = Artificially Synthesized Probe
  source 1..80: mol_type = other DNA
ttgtggaggaactcttcgtcaggtctcaccagttccggatgctggttgtttccaacttccaggagttcctggagctcacg

SEQ ID NO: 42818 - DNA, 80 bp, synthetic construct
  misc_feature 1..80: note = Artificially Synthesized Probe
  source 1..80: mol_type = other DNA
ggccacgcatgggtgctgtcttttgttaggcctacttgagctttatcttcctcacattctgtatagatagctctagtttt

SEQ ID NO: 42819 - DNA, 80 bp, synthetic construct
  misc_feature 1..80: note = Artificially Synthesized Probe
  source 1..80: mol_type = other DNA
tttattttcaattgctcaggtggattttcaagacacgaatgctcggagtctggcagaaaggaagagagaagaggagaagc

SEQ ID NO: 42820 - DNA, 80 bp, synthetic construct
  misc_feature 1..80: note = Artificially Synthesized Probe
  source 1..80: mol_type = other DNA
ctcgtgcttgctacccagaggtacacagagattgccttgcaggcccagctgctgagctgggtgctctagtaagcggttaa

SEQ ID NO: 42821 - DNA, 80 bp, synthetic construct
  misc_feature 1..80: note = Artificially Synthesized Probe
  source 1..80: mol_type = other DNA
aggggtcaccaccaggtttttcctttctgtgtggcctctgcactgggctccccccacccatgccaggcctctgtggccac

SEQ ID NO: 42822 - DNA, 80 bp, synthetic construct
  misc_feature 1..80: note = Artificially Synthesized Probe
  source 1..80: mol_type = other DNA
acacaggcagtggagctgcgtgtgaggggaggctttggtgttaagccacagtgttcttttctaagataataaaacacttc

SEQ ID NO: 42823 - DNA, 80 bp, synthetic construct
  misc_feature 1..80: note = Artificially Synthesized Probe
  source 1..80: mol_type = other DNA
cccacggtggatgtttaaagcgtgccattgacctgaaggctgaattggagctcgtactgagaaaatacaaggagctggac

SEQ ID NO: 42824 - DNA, 80 bp, synthetic construct
  misc_feature 1..80: note = Artificially Synthesized Probe
  source 1..80: mol_type = other DNA
cagcagacgtgcggggccttggaagttggggggtggggaagctcctctcgattaaatgctgagcctgtcgttttccccag

SEQ ID NO: 42825 - DNA, 80 bp, synthetic construct
  misc_feature 1..80: note = Artificially Synthesized Probe
  source 1..80: mol_type = other DNA
ggtcagctggcttattggtgagggtccacagagcagagcggggctgatgggtggcatggtctggtctcatcaggcctggg

SEQ ID NO: 42826 - DNA, 80 bp, synthetic construct
  misc_feature 1..80: note = Artificially Synthesized Probe
  source 1..80: mol_type = other DNA
tgacccatctgtgtgcatcctcttgagatctgagtggtggcactgggcggggggtgtctgcggccaggactgacagtgct

SEQ ID NO: 42827 - DNA, 80 bp, synthetic construct
  misc_feature 1..80: note = Artificially Synthesized Probe
  source 1..80: mol_type = other DNA
agtcatgcctgatttaaatatgtttagaacttccaactaacatgtaggagatgggaacatggaacgctgctagctgcagg

SEQ ID NO: 42828 - DNA, 80 bp, synthetic construct
  misc_feature 1..80: note = Artificially Synthesized Probe
  source 1..80: mol_type = other DNA
ccaccaaagctctgatctttggagttagatgccagaagcattctgccctctgatgttcagtgggctccaggatgcagctg

SEQ ID NO: 42829 - DNA, 80 bp, synthetic construct
  misc_feature 1..80: note = Artificially Synthesized Probe
  source 1..80: mol_type = other DNA
ttttcccgagcccagagttagctttctccgcagagctcgggggcaggagctactaggtttggaggccccagatgttctaa

SEQ ID NO: 42830 - DNA, 80 bp, synthetic construct
  misc_feature 1..80: note = Artificially Synthesized Probe
  source 1..80: mol_type = other DNA
accgcgtaccaagttaattagatcgtacaaaatttatttaatggccccagctgtatctcccagcctgtgtgtggcggaca

SEQ ID NO: 42831 - DNA, 80 bp, synthetic construct
  misc_feature 1..80: note = Artificially Synthesized Probe
  source 1..80: mol_type = other DNA
cgttcctgtcctccgaacaggcctgtgaacagccacacagcttcctaggctcacggcttccccatcttcagcatccctgc

SEQ ID NO: 42832 - DNA, 80 bp, synthetic construct
  misc_feature 1..80: note = Artificially Synthesized Probe
  source 1..80: mol_type = other DNA
tgggacgtttcacaggtcagcggtggagacaggcttcccttttgatcagtgttagactgataacaaaaattacagtttcc

SEQ ID NO: 42833 - DNA, 80 bp, synthetic construct
  misc_feature 1..80: note = Artificially Synthesized Probe
  source 1..80: mol_type = other DNA
aggtgttgctgctgggaatgctttttagagatgcaggtgtgtgtcagagtgattctgtttttcggtttttctcttataaa

SEQ ID NO: 42834 - DNA, 80 bp, synthetic construct
  misc_feature 1..80: note = Artificially Synthesized Probe
  source 1..80: mol_type = other DNA
aaggaaatggaggtggttttcatacaagtcctcaaggacagaatgttccagaagtacttgtccctttctgtcacctgaca

SEQ ID NO: 42835 - DNA, 80 bp, synthetic construct
  misc_feature 1..80: note = Artificially Synthesized Probe
  source 1..80: mol_type = other DNA
tgtggtaactgctgctttggtttaaaatgctgcttttcctgctcacggtcgtagccacgaggccgagaagtcgtgtgtgt

SEQ ID NO: 42836 - DNA, 80 bp, synthetic construct
  misc_feature 1..80: note = Artificially Synthesized Probe
  source 1..80: mol_type = other DNA
tttgttaagagaacttagatgattagacaactcatgtgtgaagatatgacccattaagggtgtcatgccgaattagcaca

SEQ ID NO: 42837 - DNA, 80 bp, synthetic construct
  misc_feature 1..80: note = Artificially Synthesized Probe
  source 1..80: mol_type = other DNA
cacactttccctaaaacctgacttgtggctctaaattatctgaagcaaggccagaagcgaaactcaaacgaggtgacttt

SEQ ID NO: 42838 - DNA, 80 bp, synthetic construct
  misc_feature 1..80: note = Artificially Synthesized Probe
  source 1..80: mol_type = other DNA
gcagaggccctggtggttttattgccactgattgacttcttgaggtgagagggctaaccacgttctgccgttctgccgtt

SEQ ID NO: 42839 - DNA, 80 bp, synthetic construct
  misc_feature 1..80: note = Artificially Synthesized Probe
  source 1..80: mol_type = other DNA
cagattgatcttttggctgcgattgtatctaaatgtcacattgttcacttgtcagtcttgcctccgtcactgtgagcatg

SEQ ID NO: 42840 - DNA, 80 bp, synthetic construct
  misc_feature 1..80: note = Artificially Synthesized Probe
  source 1..80: mol_type = other DNA
ctgtaagtacttgtgtgtggacgtgtatgtgtgtgtatgtactcagtaagcctgcacaaaagaaggcctgcacgctctgc

SEQ ID NO: 42841 - DNA, 80 bp, synthetic construct
  misc_feature 1..80: note = Artificially Synthesized Probe
  source 1..80: mol_type = other DNA
cttagtttggtggttttgactgtgctgtacaaaccacccgtgatacggctcattctttccctaacagccacttcccaaga

SEQ ID NO: 42842 - DNA, 80 bp, synthetic construct
  misc_feature 1..80: note = Artificially Synthesized Probe
  source 1..80: mol_type = other DNA
ccctgccccctggcttttctttgtgactactggctctgaaggtgttttcaaagcggacctcaccatggcaaacctcaaaa

SEQ ID NO: 42843 - DNA, 80 bp, synthetic construct
  misc_feature 1..80: note = Artificially Synthesized Probe
  source 1..80: mol_type = other DNA
tctcctctgactctcagtgagccttccaattccaggaaaatgtggctcattgtttcttcaactgttttctgcactccaat

SEQ ID NO: 42844 - DNA, 80 bp, synthetic construct
  misc_feature 1..80: note = Artificially Synthesized Probe
  source 1..80: mol_type = other DNA
tcgcggtttgacgtcagcgtgagatgtgggttgaacccctgtgtggagctgtgcgtctcttctccttgaggaccatgtga

SEQ ID NO: 42845 - DNA, 80 bp, synthetic construct
  misc_feature 1..80: note = Artificially Synthesized Probe
  source 1..80: mol_type = other DNA
gggtttgagaggcagatgtcaggtcacctctgggccagggtgaaggactgcagaccagaggccagctgttggcgagggcc

SEQ ID NO: 42846 - DNA, 80 bp, synthetic construct
  misc_feature 1..80: note = Artificially Synthesized Probe
  source 1..80: mol_type = other DNA
cttcaggactgcacggttggctgaggcctggggcttcctgaccgtgttgcagctgctcacggtgaccgtgtgtccagacc

SEQ ID NO: 42847 - DNA, 80 bp, synthetic construct
  misc_feature 1..80: note = Artificially Synthesized Probe
  source 1..80: mol_type = other DNA
ggctgggcaggctgctcagcggccggagaggtcgggaagaaacagctgtccctgtcacacattgccaccaggggtgcccc

SEQ ID NO: 42848 - DNA, 80 bp, synthetic construct
  misc_feature 1..80: note = Artificially Synthesized Probe
  source 1..80: mol_type = other DNA
ggctcctgagtgttctcactgcgatccacggggcgtctctggtccgagttccgggtggcagaatgcatcgctgcttctcc

SEQ ID NO: 42849 - DNA, 80 bp, synthetic construct
  misc_feature 1..80: note = Artificially Synthesized Probe
  source 1..80: mol_type = other DNA
gcagtggaaggacgaccttcatgtggatgccccgttggccttcaaggtcacgcctcaaggacgcagcagctgtcgccctt

SEQ ID NO: 42850 - DNA, 80 bp, synthetic construct
  misc_feature 1..80: note = Artificially Synthesized Probe
  source 1..80: mol_type = other DNA
gagcactgagaagcccatggaaggggcttatccgtggtgggcagaaattgcttagccgttggccatcagagcatggtgtc

SEQ ID NO: 42851 - DNA, 80 bp, synthetic construct
  misc_feature 1..80: note = Artificially Synthesized Probe
  source 1..80: mol_type = other DNA
tgttttcaggcaggtgaaggccttaaggcgagagaagtgattgggctgagcccagagtggcttctaggaacccctctggc

SEQ ID NO: 42852 - DNA, 80 bp, synthetic construct
  misc_feature 1..80: note = Artificially Synthesized Probe
  source 1..80: mol_type = other DNA
ggctcacactcaggagcaaattaagtgcctattttttgtgtcaaccctgaagagtatctggttttccagcccttggtgac

SEQ ID NO: 42853 - DNA, 80 bp, synthetic construct
  misc_feature 1..80: note = Artificially Synthesized Probe
  source 1..80: mol_type = other DNA
cacagggcctcaagcagacaatgcacggcttgcttgggaagggcagttctgtctaggagagccccagcctgcatttctga

SEQ ID NO: 42854 - DNA, 80 bp, synthetic construct
  misc_feature 1..80: note = Artificially Synthesized Probe
  source 1..80: mol_type = other DNA
tgactgcaaaggcgggcagaacgggggtccacgcgtcagccccagcagagcccagccccagcatgtcttctctgagcact

SEQ ID NO: 42855 - DNA, 80 bp, synthetic construct
  misc_feature 1..80: note = Artificially Synthesized Probe
  source 1..80: mol_type = other DNA
ccagccttggtgctgatgcccaggaggaggaatggccagtgggcccatgccaggcctcctccctgtgtctcatggggaca

SEQ ID NO: 42856 - DNA, 80 bp, synthetic construct
  misc_feature 1..80: note = Artificially Synthesized Probe
  source 1..80: mol_type = other DNA
aggacagcagagtgggcgtgggtctgggcagtaaccatgctttgtctattactgtgtttgatgtaaagaaatggtgtgtt

SEQ ID NO: 42857 - DNA, 80 bp, synthetic construct
  misc_feature 1..80: note = Artificially Synthesized Probe
  source 1..80: mol_type = other DNA
tgtgatttgcaaaaactttatttatttatttatttatttttgaaatggaatcttgctctgtcgccaggctggagtgcaat

SEQ ID NO: 42858 - DNA, 80 bp, synthetic construct
  misc_feature 1..80: note = Artificially Synthesized Probe
  source 1..80: mol_type = other DNA
taatcagttgaccaaaaatgtacaggcttatttctgggcacttgactctattccattgacctgtttaaccttatgccagt

SEQ ID NO: 42859 - DNA, 80 bp, synthetic construct
  misc_feature 1..80: note = Artificially Synthesized Probe
  source 1..80: mol_type = other DNA
tcttgatcttagcgggaagctttcggtctctcaccattgaatgtgatgctaacaatgcagttttgtgtagatgcttctat

SEQ ID NO: 42860 - DNA, 80 bp, synthetic construct
  misc_feature 1..80: note = Artificially Synthesized Probe
  source 1..80: mol_type = other DNA
aaattttcctgtcttagcctagcaaagtgctgggattacaggcatgagccaccacacccagccctaattttctttaaaat

SEQ ID NO: 42861 - DNA, 80 bp, synthetic construct
  misc_feature 1..80: note = Artificially Synthesized Probe
  source 1..80: mol_type = other DNA
acctggcctgttactgatttcttatttcactccattatggctaaaaaacatagattgtatgatttctcgtcttttatatg

SEQ ID NO: 42862 - DNA, 80 bp, synthetic construct
  misc_feature 1..80: note = Artificially Synthesized Probe
  source 1..80: mol_type = other DNA
tgtccttctttgtctttagtgaaaaaaaaatgtctttaagtcccttttgtatgttattagtatagccacttagctctttt

SEQ ID NO: 42863 - DNA, 80 bp, synthetic construct
  misc_feature 1..80: note = Artificially Synthesized Probe
  source 1..80: mol_type = other DNA
gtgtggtgtcttggacttcagcctcaagtatttcttgtaggacagatcttctagcaatgaattctctttgtttttgttta

SEQ ID NO: 42864 - DNA, 80 bp, synthetic construct
  misc_feature 1..80: note = Artificially Synthesized Probe
  source 1..80: mol_type = other DNA
tcttctcagaatgggtcatctcagttgacctatcttcaaggtcacagatgcttttgccaaacaaaacctgatgtcaagct

SEQ ID NO: 42865 - DNA, 80 bp, synthetic construct
  misc_feature 1..80: note = Artificially Synthesized Probe
  source 1..80: mol_type = other DNA
gtggcagagcttctcagcggccactgtgggcatctcgttcctcagatcttcctttcatgagttatgtagttgaattatca

SEQ ID NO: 42866 - DNA, 80 bp, synthetic construct
  misc_feature 1..80: note = Artificially Synthesized Probe
  source 1..80: mol_type = other DNA
catgcggagtgcccgcctgctcacacgtgcccatgcggagtgcccgcctgctcacacgtgccgacgtggagtgcccgcct

SEQ ID NO: 42867 - DNA, 80 bp, synthetic construct
  misc_feature 1..80: note = Artificially Synthesized Probe
  source 1..80: mol_type = other DNA
aattgaattcaggactgatttgttagcctggtgcttttcgtatcagaccttttaatgaattttcatggatgctgattaaa

SEQ ID NO: 42868 - DNA, 80 bp, synthetic construct
  misc_feature 1..80: note = Artificially Synthesized Probe
  source 1..80: mol_type = other DNA
ccccaagcatcgcgcctagagaagtgtgaagctttataaaaatttaaacgcgtccgtggtggcggcagcagtggggcgga

SEQ ID NO: 42869 - DNA, 80 bp, synthetic construct
  misc_feature 1..80: note = Artificially Synthesized Probe
  source 1..80: mol_type = other DNA
catgtcaccctttgtttgaaggataaatgtgttgaatgaagaaggcatcctccccttcatcatccccttaacacacttat

SEQ ID NO: 42870 - DNA, 80 bp, synthetic construct
  misc_feature 1..80: note = Artificially Synthesized Probe
  source 1..80: mol_type = other DNA
tgaagtttaaatatctggcagggaacaagggagtcacttgcaagcaaatatacatcacataactccagacatgttaacga

SEQ ID NO: 42871 - DNA, 80 bp, synthetic construct
  misc_feature 1..80: note = Artificially Synthesized Probe
  source 1..80: mol_type = other DNA
tcactttccccttgagtgccatttaattaagaatgggtacccctaagaagaatgttagcttcaagacataatataaataa

SEQ ID NO: 42872 - DNA, 80 bp, synthetic construct
  misc_feature 1..80: note = Artificially Synthesized Probe
  source 1..80: mol_type = other DNA
tgaatctatggcctcatgtcctaagatctgccacaaaacccttcattcagcagacatttatagggtacccataatgtcct

SEQ ID NO: 42873 - DNA, 80 bp, synthetic construct
  misc_feature 1..80: note = Artificially Synthesized Probe
  source 1..80: mol_type = other DNA
tgcatcctcttagtcctcactcagatcttggataggataagagttggtaactattagaaacggtatgacttagaaggggc

SEQ ID NO: 42874 - DNA, 80 bp, synthetic construct
  misc_feature 1..80: note = Artificially Synthesized Probe
  source 1..80: mol_type = other DNA
ggaagagagagtattaaatgacctcatttttatggggcagggttggataagctcagagaggcaaacatttgccccctgat

SEQ ID NO: 42875 - DNA, 80 bp, synthetic construct
  misc_feature 1..80: note = Artificially Synthesized Probe
  source 1..80: mol_type = other DNA
caagcatttctctcattaaaaagacagaggaacaagcatttcggaacccgcaaagagagtgctgatagacagtgactttc

SEQ ID NO: 42876 - DNA, 80 bp, synthetic construct
  misc_feature 1..80: note = Artificially Synthesized Probe
  source 1..80: mol_type = other DNA
tcccaggagggttagggtatggcatttacagctcctttgttttttcttcacacttatctcactggctgtgtttgcagttt

SEQ ID NO: 42877 - DNA, 80 bp, synthetic construct
  misc_feature 1..80: note = Artificially Synthesized Probe
  source 1..80: mol_type = other DNA
agtacctgctccttcctcaagcgcaagccctccattgctatggataccgaatccacttattctggatattcttactattc

SEQ ID NO: 42878 - DNA, 80 bp, synthetic construct
  misc_feature 1..80: note = Artificially Synthesized Probe
  source 1..80: mol_type = other DNA
cttttcacctgaagttgttgactcattgtccattatgcctttgtcatgaggcttatttagtgaactggtaggattgtcct

SEQ ID NO: 42879 - DNA, 80 bp, synthetic construct
  misc_feature 1..80: note = Artificially Synthesized Probe
  source 1..80: mol_type = other DNA
cttatcaaaatttggggaaaacatgtcagcgagcttgtgctggagtccaggtaaggctttcaaataaggatgagaaacag

SEQ ID NO: 42880 - DNA, 80 bp, synthetic construct
  misc_feature 1..80: note = Artificially Synthesized Probe
  source 1..80: mol_type = other DNA
gagagaggagatgaaccttagagatttgtaggtgcactccatgggttctttaaaaaacaccactaccacctacgggtggt

SEQ ID NO: 42881 - DNA, 80 bp, synthetic construct
  misc_feature 1..80: note = Artificially Synthesized Probe
  source 1..80: mol_type = other DNA
tgtgattgatgtgctaaaatgcacaaaaagagggccgccggggcagtgaggaattggtgcttttgtttcaaggctgcttc

SEQ ID NO: 42882 - DNA, 80 bp, synthetic construct
  misc_feature 1..80: note = Artificially Synthesized Probe
  source 1..80: mol_type = other DNA
tcctgacttggctcagagaccttcttagagcagtaattcgggaccagtggatttctgataaagttattctaattttctaa

SEQ ID NO: 42883 - DNA, 80 bp, synthetic construct
  misc_feature 1..80: note = Artificially Synthesized Probe
  source 1..80: mol_type = other DNA
ggttatcagataacagattcttctctggtttccctccgatgttatcaggggaattgttggttgtttcacatttgggtgct

SEQ ID NO: 42884 - DNA, 80 bp, synthetic construct
  misc_feature 1..80: note = Artificially Synthesized Probe
  source 1..80: mol_type = other DNA
atgcgtctctgggtaaacaaccaaattttctgcttatttggctgtttccctagctgccttgttaaaacaaaacacctgag

SEQ ID NO: 42885 - DNA, 80 bp, synthetic construct
  misc_feature 1..80: note = Artificially Synthesized Probe
  source 1..80: mol_type = other DNA
agaaaccaaggttttcagagattgaataacttgtgcaagatcacacatctggtagggcagatccaagatctgtttgtctc

SEQ ID NO: 42886 - DNA, 80 bp, synthetic construct
  misc_feature 1..80: note = Artificially Synthesized Probe
  source 1..80: mol_type = other DNA
atcactgatgatagaggaagagtgacagtctttgttttgggtcttgggatggcagaaagaaaatatttagtagggagtaa

SEQ ID NO: 42887 - DNA, 80 bp, synthetic construct
  misc_feature 1..80: note = Artificially Synthesized Probe
  source 1..80: mol_type = other DNA
ccaggttccaactgtctggcagcccacctgatttaaataaacatctgagctatacacagaaacatgtctgcataccctct

SEQ ID NO: 42888 - DNA, 80 bp, synthetic construct
  misc_feature 1..80: note = Artificially Synthesized Probe
  source 1..80: mol_type = other DNA
aacaggatcctttgtgtatctacatgttttaggcatacatgtgcaccccaggaaattctctcatgccctttctagtcaat

SEQ ID NO: 42889 - DNA, 80 bp, synthetic construct
  misc_feature 1..80: note = Artificially Synthesized Probe
  source 1..80: mol_type = other DNA
aggatacatacaaatttcagaggcagaaacctctttggcctcctgtgtcttttcagcgccttgctcttattgcttcatta

SEQ ID NO: 42890 - DNA, 80 bp, synthetic construct
  misc_feature 1..80: note = Artificially Synthesized Probe
  source 1..80: mol_type = other DNA
attttaaaatgtgggtcctagctacaggtaagcttgggtttgtgtagtggtgtaagttcccttgctacgccctttgctct

SEQ ID NO: 42891 - DNA, 80 bp, synthetic construct
  misc_feature 1..80: note = Artificially Synthesized Probe
  source 1..80: mol_type = other DNA
attggcttttttacggggtccgcattttggactctcgggaccggaattaccagggcattgtgcaatatgcagtctccctt

SEQ ID NO: 42892 - DNA, 80 bp, synthetic construct
  misc_feature 1..80: note = Artificially Synthesized Probe
  source 1..80: mol_type = other DNA
aactagggcttaggggatttaagtaatttgcacaaaaacatatggctagcctcatttaggattcactcagatgtcatgag

SEQ ID NO: 42893 - DNA, 80 bp, synthetic construct
  misc_feature 1..80: note = Artificially Synthesized Probe
  source 1..80: mol_type = other DNA
gggtataggtgataggaacacaggaggacagagaatttcagattgtggcagcaataaagccgagcaggagacagtctgtc

SEQ ID NO: 42894 - DNA, 80 bp, synthetic construct
  misc_feature 1..80: note = Artificially Synthesized Probe
  source 1..80: mol_type = other DNA
taaatctggtctgaacccagcagtggctggaagagttactaggccagaaatacaacttctaaggccttttgtaaagtgta

SEQ ID NO: 42895 - DNA, 80 bp, synthetic construct
  misc_feature 1..80: note = Artificially Synthesized Probe
  source 1..80: mol_type = other DNA
ttaatgtgcaactcagttttcacaacaatcatgtgaggtaggttctggtagcctccttttcagatgagcaaaccgaggcg

SEQ ID NO: 42896 - DNA, 80 bp, synthetic construct
  misc_feature 1..80: note = Artificially Synthesized Probe
  source 1..80: mol_type = other DNA
cagctgaggctgacttttttttcctgtgtattctctcctccttcttttcctgtatattctctccttctcatggcctctcc

SEQ ID NO: 42897 - DNA, 80 bp, synthetic construct
  misc_feature 1..80: note = Artificially Synthesized Probe
  source 1..80: mol_type = other DNA
aacgaatcacagaaccacctgtgctttagaagaaatgatccttggattgcttttcaagcaatggaagtttatgattgtca

SEQ ID NO: 42898 - DNA, 80 bp, synthetic construct
  misc_feature 1..80: note = Artificially Synthesized Probe
  source 1..80: mol_type = other DNA
ttttgaaatcttatgtttgtaattctgggtcaagtaatgtccaagccagtgattacattactggtaggcatgtctctcat

SEQ ID NO: 42899 - DNA, 80 bp, synthetic construct
  misc_feature 1..80: note = Artificially Synthesized Probe
  source 1..80: mol_type = other DNA
aaggcgaggcagtccagcatcctgggtggagtggaggtgtttcgagtccatatctaaatctttttcttagagcaccctaa

SEQ ID NO: 42900 - DNA, 80 bp, synthetic construct
  misc_feature 1..80: note = Artificially Synthesized Probe
  source 1..80: mol_type = other DNA
tgtcagtaaacatgagctaattccagtttttgtccctctttgtccttctcaagttccaaggtgatcattgcctgttatct

SEQ ID NO: 42901 - DNA, 80 bp, synthetic construct
  misc_feature 1..80: note = Artificially Synthesized Probe
  source 1..80: mol_type = other DNA
acccttccttccctaagttcgagtagtttcctaagtagcttccccttagtttcctaaggctgaagtaatagagtatagca

SEQ ID NO: 42902 - DNA, 80 bp, synthetic construct
  misc_feature 1..80: note = Artificially Synthesized Probe
  source 1..80: mol_type = other DNA
gtaactgcttttgatggagttggagaggctagttattaagatttttctgaatgtagcatccttagctggctttcaggata

SEQ ID NO: 42903 - DNA, 80 bp, synthetic construct
  misc_feature 1..80: note = Artificially Synthesized Probe
  source 1..80: mol_type = other DNA
tcagaacaaggcattgggtgaaccagtggtagaactgaaaggtcgtttcagtgtgaaagtgaactttcttttcaagcaaa

SEQ ID NO: 42904 - DNA, 80 bp, synthetic construct
  misc_feature 1..80: note = Artificially Synthesized Probe
  source 1..80: mol_type = other DNA
atgcctccctataggtaggtttgattttcaggaggctgagagttggcaggaagtactgcataaaaacaaagagtagcata

SEQ ID NO: 42905 - DNA, 80 bp, synthetic construct
  misc_feature 1..80: note = Artificially Synthesized Probe
  source 1..80: mol_type = other DNA
atggtaatcagggttttctgtgctgctcttcccatcctgcagatgaagagtatgaggtttggagaagtgactaatttgtt

SEQ ID NO: 42906 - DNA, 80 bp, synthetic construct
  misc_feature 1..80: note = Artificially Synthesized Probe
  source 1..80: mol_type = other DNA
cttttctctctgaatttaatggtgataacagagggggcaagtttctaaccaacttgatttttcttgcctcccacatttcc

SEQ ID NO: 42907 - DNA, 80 bp, synthetic construct
  misc_feature 1..80: note = Artificially Synthesized Probe
  source 1..80: mol_type = other DNA
ttaagttgtgcacttgagttttgtgtttatttagttacttggaaattctcattccctaatactgccaggtatgctgggca

SEQ ID NO: 42908 - DNA, 80 bp, synthetic construct
  misc_feature 1..80: note = Artificially Synthesized Probe
  source 1..80: mol_type = other DNA
ttctgagaacttctgatgattgctttttaatttttaaatttagatcagggtaatgcttttctgttggaatccaggggcct

SEQ ID NO: 42909 - DNA, 80 bp, synthetic construct
  misc_feature 1..80: note = Artificially Synthesized Probe
  source 1..80: mol_type = other DNA
ctcttaagcaggttagctgactgacttccatattcaattctgttcaagtcttgaagcagagctccaaggggagccaaatg

SEQ ID NO: 42910 - DNA, 80 bp, synthetic construct
  misc_feature 1..80: note = Artificially Synthesized Probe
  source 1..80: mol_type = other DNA
tctgtataaaacctaagttccaggattccttatacccagggataccaaggcctaggggacaaaaccctgaatgaggacct

SEQ ID NO: 42911 - DNA, 80 bp, synthetic construct
  misc_feature 1..80: note = Artificially Synthesized Probe
  source 1..80: mol_type = other DNA
atgcggtgtcatttcttcctgggtatgttgggtgagggcaagaactttgcaaaccctaggagaggattatattttcaaca

SEQ ID NO: 42912 - DNA, 80 bp, synthetic construct
  misc_feature 1..80: note = Artificially Synthesized Probe
  source 1..80: mol_type = other DNA
acaacactgacagattgggtactagttttctgctctgtttcccaccctcgtggtattaacactattctttcactgtcctt

SEQ ID NO: 42913 - DNA, 80 bp, synthetic construct
  misc_feature 1..80: note = Artificially Synthesized Probe
  source 1..80: mol_type = other DNA
aaacatgacctgctgggacacctttggagtgcaccttgctccagtgtttctcaaactgaagcctgtatgaatatcactgg

SEQ ID NO: 42914 - DNA, 80 bp, synthetic construct
  misc_feature 1..80: note = Artificially Synthesized Probe
  source 1..80: mol_type = other DNA
gtttttttaaatgtgcctttcgaaggcctctggattctaacagaggagagaatttcgcttggaggacagtatggaatagt

SEQ ID NO: 42915 - DNA, 80 bp, synthetic construct
  misc_feature 1..80: note = Artificially Synthesized Probe
  source 1..80: mol_type = other DNA
aatatccctaaaagtgtgctaaatactgtaatctaaaagaccgtttggtaaaactgactctgtaacacccaaaatgcctg

SEQ ID NO: 42916 - DNA, 80 bp, synthetic construct
  misc_feature 1..80: note = Artificially Synthesized Probe
  source 1..80: mol_type = other DNA
gaatgcagaaacatgtgaatactgtggttgcaaatgaggaaaatatgtctgcaggtataaaatgatggcttgtaccatgt

SEQ ID NO: 42917 - DNA, 80 bp, synthetic construct
  misc_feature 1..80: note = Artificially Synthesized Probe
  source 1..80: mol_type = other DNA
ctgattgtctgttgatgcacatttggattaagagttttcattagtgaaagccaggggcttgttgtatttgttaatcagat

SEQ ID NO: 42918 - DNA, 80 bp, synthetic construct
  misc_feature 1..80: note = Artificially Synthesized Probe
  source 1..80: mol_type = other DNA
aaggccttacttttctgccttacaatagatgctccacagatgaaaaaaatatatacctggcagtagcagcagggtgtgaa

SEQ ID NO: 42919 - DNA, 80 bp, synthetic construct
  misc_feature 1..80: note = Artificially Synthesized Probe
  source 1..80: mol_type = other DNA
gctgtcaaactcctagtatgtgctaggcacgttggaaattcaaattaaagaaacaaaacatacttcctgcccttcaagag

SEQ ID NO: 42920 - DNA, 80 bp, synthetic construct
  misc_feature 1..80: note = Artificially Synthesized Probe
  source 1..80: mol_type = other DNA
gtgactaatggattacgggatggaattgtgttcgtccttaagtgcttggacttcagcctcgtagtcaatgtgaagaaaat

SEQ ID NO: 42921 - DNA, 80 bp, synthetic construct
  misc_feature 1..80: note = Artificially Synthesized Probe
  source 1..80: mol_type = other DNA
cgtgggcagttcaggagatacctgccttcatctttgttctttgttgccttaggttcttcagagaaagatcacaacaaaaa

SEQ ID NO: 42922 - DNA, 80 bp, synthetic construct
  misc_feature 1..80: note = Artificially Synthesized Probe
  source 1..80: mol_type = other DNA
cctgtatctgcaacaaaccttttaaaagtgttcactcttgctttttccagtatttcggtaatcagccatcttgctgtagt

SEQ ID NO: 42923 - DNA, 80 bp, synthetic construct
  misc_feature 1..80: note = Artificially Synthesized Probe
  source 1..80: mol_type = other DNA
gcattgagtgttaaagaacttaatgaggagtctatatctgagattgctctcttccctggtgatgttttaactggtagata

SEQ ID NO: 42924 - DNA, 80 bp, synthetic construct
  misc_feature 1..80: note = Artificially Synthesized Probe
  source 1..80: mol_type = other DNA
atctgggtcctgctgtgtaagtatccctaagtggggatgcatatttgtttgtgcgtttttatttccatatatgtgagcat

SEQ ID NO: 42925 - DNA, 80 bp, synthetic construct
  misc_feature 1..80: note = Artificially Synthesized Probe
  source 1..80: mol_type = other DNA
aacggaaggtcagagaggaaggggcttgtccaaggtctcatgtctggttaacagaatttcaaactagatgtttgattcta

SEQ ID NO: 42926 - DNA, 80 bp, synthetic construct
  misc_feature 1..80: note = Artificially Synthesized Probe
  source 1..80: mol_type = other DNA
gtctatgaaataagcctctttagtgggttgttttagtctctccaacaaaagagcagattcctaaagccaggtgcagcact

SEQ ID NO: 42927 - DNA, 80 bp, synthetic construct
  misc_feature 1..80: note = Artificially Synthesized Probe
  source 1..80: mol_type = other DNA
aattaaatggcaaactcctctgggacccctaagttatggcgtgattagccaaatttgatttccaacagtcatttatggcc

SEQ ID NO: 42928 - DNA, 80 bp, synthetic construct
  misc_feature 1..80: note = Artificially Synthesized Probe
  source 1..80: mol_type = other DNA
ctacctagatgccaggagctgctgggaagggtctctaaaacaagaggctccagggcagatgtggtggcttacgcacgtat

SEQ ID NO: 42929 - DNA, 80 bp, synthetic construct
  misc_feature 1..80: note = Artificially Synthesized Probe
  source 1..80: mol_type = other DNA
tgcccggtgaggttgactcacgcctgtaatcctagcactttgggaggccaaggcggatggatcaccaggtcaagagattg

SEQ ID NO: 42930 - DNA, 80 bp, synthetic construct
  misc_feature 1..80: note = Artificially Synthesized Probe
  source 1..80: mol_type = other DNA
tgcttgagaccagcctgggcaacatggcgagacaccatctctaccaaaaaaaaacaaaaacaaaaattagctgggcatag

SEQ ID NO: 42931 - DNA, 80 bp, synthetic construct
  misc_feature 1..80: note = Artificially Synthesized Probe
  source 1..80: mol_type = other DNA
aagtaattcttaaaatggcaaggctggtataacggttcactcggttttgcatcagagactgggagtcgggggcagattat

SEQ ID NO: 42932 - DNA, 80 bp, synthetic construct
  misc_feature 1..80: note = Artificially Synthesized Probe
  source 1..80: mol_type = other DNA
gctgccaggcatgatgggagttgtagtcggcgcggctgcaaggcatcaagggaaatgaagtctccacagatttaaaaact

SEQ ID NO: 42933 - DNA, 80 bp, synthetic construct
  misc_feature 1..80: note = Artificially Synthesized Probe
  source 1..80: mol_type = other DNA
ctcctctcccggcattatcccatctacccctccacattcaagtttttggaaagattctacactcccagtctctacttcct

SEQ ID NO: 42934 - DNA, 80 bp, synthetic construct
  misc_feature 1..80: note = Artificially Synthesized Probe
  source 1..80: mol_type = other DNA
tttgaaaattcttagctggattaaatcaagatttctctattctgtgcaacccagaagtaaactggggttgatacacacac

SEQ ID NO: 42935 - DNA, 80 bp, synthetic construct
  misc_feature 1..80: note = Artificially Synthesized Probe
  source 1..80: mol_type = other DNA
gctcgcccctcactggtcacgtatcgcatcctggctcgcccctcactggtcacgtatcgaatcctggctcgcccctcact

SEQ ID NO: 42936 - DNA, 80 bp, synthetic construct
  misc_feature 1..80: note = Artificially Synthesized Probe
  source 1..80: mol_type = other DNA
aagtcccgtccactaaacggagcttaacttagcaggaatttcatccgatgagataatgtatccaggacacagtaaataca

SEQ ID NO: 42937 - DNA, 80 bp, synthetic construct
  misc_feature 1..80: note = Artificially Synthesized Probe
  source 1..80: mol_type = other DNA
aaaaaaagaaaaagaaaggcaggcaagaatttttgtccctgtcgggagaagagtctggtctgtggacaccagacacctaa

SEQ ID NO: 42938 - DNA, 80 bp, synthetic construct
  misc_feature 1..80: note = Artificially Synthesized Probe
  source 1..80: mol_type = other DNA
ctcctgttcacataggtgagaaggaaggagctggcaggcaatgcccttccaggtgggctacagggaaggttcttttctca

SEQ ID NO: 42939 - DNA, 80 bp, synthetic construct
  misc_feature 1..80: note = Artificially Synthesized Probe
  source 1..80: mol_type = other DNA
tttaatatataaaatgtcatcgtacccttcatgtaggccagcatttcaggtgtccatgtttctaaggcttttgcttaaat

SEQ ID NO: 42940 - DNA, 80 bp, synthetic construct
  misc_feature 1..80: note = Artificially Synthesized Probe
  source 1..80: mol_type = other DNA
ctggcattctttcaacagggaaccaggtctcctcatccgatggcaattcaggaagggttggtgtcataccctgcatcgag

SEQ ID NO: 42941 - DNA, 80 bp, synthetic construct
  misc_feature 1..80: note = Artificially Synthesized Probe
  source 1..80: mol_type = other DNA
ctgaatcacagagctgttagctgctgctttcatccacaggtactccttttaccttattattttttagagagtcttgctcc

SEQ ID NO: 42942 - DNA, 80 bp, synthetic construct
  misc_feature 1..80: note = Artificially Synthesized Probe
  source 1..80: mol_type = other DNA
acaagtttaaaatgaaagctgttatcagtagagaatcttcaccacgttggcaccagctcaagtgtagtgtcggcgcactt

SEQ ID NO: 42943 - DNA, 80 bp, synthetic construct
  misc_feature 1..80: note = Artificially Synthesized Probe
  source 1..80: mol_type = other DNA
ttggaatcttttcctaatagacctcaactgaaggccgcatctccttctcgcaacacttcttttctcctccgcattctcaa

SEQ ID NO: 42944 - DNA, 80 bp, synthetic construct
  misc_feature 1..80: note = Artificially Synthesized Probe
  source 1..80: mol_type = other DNA
gcagttgggactacaggtgcatgccaccacaccttgcaaatttttatttttgtagacatctgtatgttgcccaggctggt

SEQ ID NO: 42945 - DNA, 80 bp, synthetic construct
  misc_feature 1..80: note = Artificially Synthesized Probe
  source 1..80: mol_type = other DNA
caaagggccccttgctgctgctacagtctctttttaatgagtttctcgagcttgcggatgcgtgacgactcttgctctgg

SEQ ID NO: 42946 - DNA, 80 bp, synthetic construct
  misc_feature 1..80: note = Artificially Synthesized Probe
  source 1..80: mol_type = other DNA
tcatgtccagtatcttctgaaaggtttctgtgttgcagtctgtgagaagtttgatgtagttgtcaacaaacaccaccaac

SEQ ID NO: 42947 - DNA, 80 bp, synthetic construct
  misc_feature 1..80: note = Artificially Synthesized Probe
  source 1..80: mol_type = other DNA
gatttgttttgaattcctgagactgaagggaagagtggcgaggaggagttcactcaggcatcctctgccgataattccca

SEQ ID NO: 42948 - DNA, 80 bp, synthetic construct
  misc_feature 1..80: note = Artificially Synthesized Probe
  source 1..80: mol_type = other DNA
ctcagaaaaagagattaaataaataactggccccttttaacacaagccatcaccttgaggatcatctcagcccgggtcat

SEQ ID NO: 42949 - DNA, 80 bp, synthetic construct
  misc_feature 1..80: note = Artificially Synthesized Probe
  source 1..80: mol_type = other DNA
tggcaacaatctaccttttcctctttgtttgttctggttctctgggatgccaattatctagaaggacacccatagtccta

SEQ ID NO: 42950 - DNA, 80 bp, synthetic construct
  misc_feature 1..80: note = Artificially Synthesized Probe
  source 1..80: mol_type = other DNA
aggtaggtgagaaatgggacccttcaggccctgcgacactttgcatcctccaatttcctatttactttgctttggacaga

SEQ ID NO: 42951 - DNA, 80 bp, synthetic construct
  misc_feature 1..80: note = Artificially Synthesized Probe
  source 1..80: mol_type = other DNA
aagaggaaactcaaatgcccgaaaggcatatgaaatgacacgcaacctggttagtaactgggaaatgcaaattaaaacca

SEQ ID NO: 42952 - DNA, 80 bp, synthetic construct
  misc_feature 1..80: note = Artificially Synthesized Probe
  source 1..80: mol_type = other DNA
acacatatgagaataaaatcaaaatcaggacagtgtttactttggggcatggaggaagagatgggcagggtggggttcat

SEQ ID NO: 42953 - DNA, 80 bp, synthetic construct
  misc_feature 1..80: note = Artificially Synthesized Probe
  source 1..80: mol_type = other DNA
gcaccaggcataattctctagtgtccctcatatacagggagatatgacactttcattccctggccagtcaccataaaatt

SEQ ID NO: 42954 - DNA, 80 bp, synthetic construct
  misc_feature 1..80: note = Artificially Synthesized Probe
  source 1..80: mol_type = other DNA
gctctgaacattcgtctctcctactctctctcactgtagctagttgcctgcttcataaacttgctgtgaacattcgtctc

SEQ ID NO: 42955 - DNA, 80 bp, synthetic construct
  misc_feature 1..80: note = Artificially Synthesized Probe
  source 1..80: mol_type = other DNA
gtggtttttaaggtctattcacaaggttgtacagctgtcagcattatctggtttcagaacacattatcaccccagaaaga

SEQ ID NO: 42956 - DNA, 80 bp, synthetic construct
  misc_feature 1..80: note = Artificially Synthesized Probe
  source 1..80: mol_type = other DNA
ggattacaggtgtgaaccatgcaccctgcctttttcaattcatttgggtatatatctaggagtataattgctgggccctg

SEQ ID NO: 42957 - DNA, 80 bp, synthetic construct
  misc_feature 1..80: note = Artificially Synthesized Probe
  source 1..80: mol_type = other DNA
tttactcctaggtatttaatgtttcctgatgttattgtaaatgatttcatttaggcctgggagccatggctcacgcctgt

SEQ ID NO: 42958 - DNA, 80 bp, synthetic construct
  misc_feature 1..80: note = Artificially Synthesized Probe
  source 1..80: mol_type = other DNA
aacgtgggatagaaatggtgacagcggacattctcctcttatccttaatctcaagggaaagaaaagctttcataggtgaa

SEQ ID NO: 42959 - DNA, 80 bp, synthetic construct
  misc_feature 1..80: note = Artificially Synthesized Probe
  source 1..80: mol_type = other DNA
gctggtcttgaactcctggcctctagtgatcctcccatctcagcctcccatcactgggatttattctttttttttttttt

SEQ ID NO: 42960 - DNA, 80 bp, synthetic construct
  misc_feature 1..80: note = Artificially Synthesized Probe
  source 1..80: mol_type = other DNA
ttaaaaataaatggaagaacgaattaagaaaccttccgggtgagtcattatactgtccccaaacaggggacatcatcaat

SEQ ID NO: 42961 - DNA, 80 bp, synthetic construct
  misc_feature 1..80: note = Artificially Synthesized Probe
  source 1..80: mol_type = other DNA
tgtctccagcctcatcctgctaagccctggcctccctatgcttcaacccaactgagccacttgcagatcccaggattctg

SEQ ID NO: 42962 - DNA, 80 bp, synthetic construct
  misc_feature 1..80: note = Artificially Synthesized Probe
  source 1..80: mol_type = other DNA
aagcaacatgaaactgaactcatgaccaatggcagctgtgcacacagcgctttgtaacctaagttgcttcacattagaac

SEQ ID NO: 42963 - DNA, 80 bp, synthetic construct
  misc_feature 1..80: note = Artificially Synthesized Probe
  source 1..80: mol_type = other DNA
cttcctagatcccaggctgaatgattacagatgtgagggggggcatccaattcccagcgcactcaacctgggcttagcaa

SEQ ID NO: 42964 - DNA, 80 bp, synthetic construct
  misc_feature 1..80: note = Artificially Synthesized Probe
  source 1..80: mol_type = other DNA
atcggcaaagaactaaactatttcctcgcttcaaaactcagggcagaaatggccacacacaagacacagcaggaagacac

SEQ ID NO: 42965 - DNA, 80 bp, synthetic construct
  misc_feature 1..80: note = Artificially Synthesized Probe
  source 1..80: mol_type = other DNA
tttgcaaatttaacgcagaactgagtgaagtacttgcgtgtggaagccaggttgtcacggatgatggggacgttctgctt

SEQ ID NO: 42966 - DNA, 80 bp, synthetic construct
  misc_feature 1..80: note = Artificially Synthesized Probe
  source 1..80: mol_type = other DNA
cgcaggggagagaacattgctgagagcaccgaggtggtccctgaacaagctgtgaacaaaagtgacagacctgcttcaac

SEQ ID NO: 42967 - DNA, 80 bp, synthetic construct
  misc_feature 1..80: note = Artificially Synthesized Probe
  source 1..80: mol_type = other DNA
tatttcaaaatctcaaaacggtttatcaacaataatctaaacatgacagccctccatgaaagaaggtggcgacgtgctct

SEQ ID NO: 42968 - DNA, 80 bp, synthetic construct
  misc_feature 1..80: note = Artificially Synthesized Probe
  source 1..80: mol_type = other DNA
ttaactaggccttcgttaaaggtaaggcctgtttctcaaggagacgctaatgaaacatagtgatcaagcaaaggactctt

SEQ ID NO: 42969 - DNA, 80 bp, synthetic construct
  misc_feature 1..80: note = Artificially Synthesized Probe
  source 1..80: mol_type = other DNA
gttcaactggtactactatctaaatgagacacagtttgaagacagtaagaatgatgagtgcctccgggacctagtttaac

SEQ ID NO: 42970 - DNA, 80 bp, synthetic construct
  misc_feature 1..80: note = Artificially Synthesized Probe
  source 1..80: mol_type = other DNA
caggtgctgaaggaacgtttatcaagcaccgactacgcactgaaggaatgtttatcaaggacctaccacgcaccgggcgc

SEQ ID NO: 42971 - DNA, 80 bp, synthetic construct
  misc_feature 1..80: note = Artificially Synthesized Probe
  source 1..80: mol_type = other DNA
acacagtgtctcgcagcacgtataaattccacagtaaattttagctactgttataattttaagaatacttgcactatcac

SEQ ID NO: 42972 - DNA, 80 bp, synthetic construct
  misc_feature 1..80: note = Artificially Synthesized Probe
  source 1..80: mol_type = other DNA
gtttgcttctgaacagagacttggatttatttacctgagtgatgtgagcagccctaggaaaaggcacggagagaggcggg

SEQ ID NO: 42973 - DNA, 80 bp, synthetic construct
  misc_feature 1..80: note = Artificially Synthesized Probe
  source 1..80: mol_type = other DNA
ggttacttaagctgattttgcctcagttgccacatttgccaaaaagacttactcactctctctgtatggcatgccacaat

SEQ ID NO: 42974 - DNA, 80 bp, synthetic construct
  misc_feature 1..80: note = Artificially Synthesized Probe
  source 1..80: mol_type = other DNA
ccaatctttggtcaaaagtgtgtttgtggtcctttggttctttctctcccactccctggctccctctttaccttcaaagt

SEQ ID NO: 42975 - DNA, 80 bp, synthetic construct
  misc_feature 1..80: note = Artificially Synthesized Probe
  source 1..80: mol_type = other DNA
ggcaaaacatttaattctcatttcttcaaagagaatatacaaatcgccagtagcatctgagaaggtgatcaacatattag

SEQ ID NO: 42976 - DNA, 80 bp, synthetic construct
  misc_feature 1..80: note = Artificially Synthesized Probe
  source 1..80: mol_type = other DNA
gaggggcaaatctatagagacagaaagtaggctaatggttgtcaggggaatgtagaatgactgctgagaggtacggggtt

SEQ ID NO: 42977 - DNA, 80 bp, synthetic construct
  misc_feature 1..80: note = Artificially Synthesized Probe
  source 1..80: mol_type = other DNA
ccggagtgagcggcagaaactgacctagcagtggagtaaagagatagataatgaaagctctatatgccaaccaaggaaga

SEQ ID NO: 42978 - DNA, 80 bp, synthetic construct
  misc_feature 1..80: note = Artificially Synthesized Probe
  source 1..80: mol_type = other DNA
ggtattgctgtcatcttacacatctcttgccctcagctactggaatctaaacaccttagccaagggtttatgcctttctg

SEQ ID NO: 42979 - DNA, 80 bp, synthetic construct
  misc_feature 1..80: note = Artificially Synthesized Probe
  source 1..80: mol_type = other DNA
attcagaccaaatgtctgcttacacaaccttgtgacatggtcattcctcctgacaagagggagagggaactaacatttaa

SEQ ID NO: 42980 - DNA, 80 bp, synthetic construct
  misc_feature 1..80: note = Artificially Synthesized Probe
  source 1..80: mol_type = other DNA
attagaaaaccagagttcacaacctgatcaaatactcttacattggcaccagagctcagaaggagttggaaaaacctctc

SEQ ID NO: 42981 - DNA, 80 bp, synthetic construct
  misc_feature 1..80: note = Artificially Synthesized Probe
  source 1..80: mol_type = other DNA
acaacggccgtctgaatgactgacactcaggcccctgtgtaaaaatcagattcatcatttcactggcaaagtttgagctt

SEQ ID NO: 42982 - DNA, 80 bp, synthetic construct
  misc_feature 1..80: note = Artificially Synthesized Probe
  source 1..80: mol_type = other DNA
gccaagggagaatgtcttctctgtggttattcttcacagtgagacaatgaagaccccataagctaaaagagcaactgcat

SEQ ID NO: 42983 - DNA, 80 bp, synthetic construct
  misc_feature 1..80: note = Artificially Synthesized Probe
  source 1..80: mol_type = other DNA
ttttttgagactcgctcttgttgcctaggctggagtgcagtggtgcgacctcggctcactgcatcctctgcctcctgggt

SEQ ID NO: 42984 - DNA, 80 bp, synthetic construct
  misc_feature 1..80: note = Artificially Synthesized Probe
  source 1..80: mol_type = other DNA
ccaccgtgccaggacagaataaccaatgttttgtcttaaatttgaaaatgctgttggggtgcataaattagcataaactt

SEQ ID NO: 42985 - DNA, 80 bp, synthetic construct
  misc_feature 1..80: note = Artificially Synthesized Probe
  source 1..80: mol_type = other DNA
atggatctgggctttgagcatcagaggctgctgacatcacacaaagagcaaccaaacattatgtatcttgatgacagacg

SEQ ID NO: 42986 - DNA, 80 bp, synthetic construct
  misc_feature 1..80: note = Artificially Synthesized Probe
  source 1..80: mol_type = other DNA
tctccaaagtttatgggttataagcttaatccctgaagccacagtgttgagaggtatgaggtcatgagggctctggcatc

SEQ ID NO: 42987 - DNA, 80 bp, synthetic construct
  misc_feature 1..80: note = Artificially Synthesized Probe
  source 1..80: mol_type = other DNA
ttctcacggccttcttccctgtatctctgtgtgttcaatctctctctcctttctaaggacaacagtcattagataaggcc

SEQ ID NO: 42988 - DNA, 80 bp, synthetic construct
  misc_feature 1..80: note = Artificially Synthesized Probe
  source 1..80: mol_type = other DNA
tcgagactatcctggctaacacagtgaaacccggcctctactaaaaataaaaaaaaattagccaggcgtggtgatgggaa

SEQ ID NO: 42989 - DNA, 80 bp, synthetic construct
  misc_feature 1..80: note = Artificially Synthesized Probe
  source 1..80: mol_type = other DNA
tgtgcacacccaaaatagttaaacagtgtttcttcatgaaagaactctggaacccctgccttggaggtccttacagatag

SEQ ID NO: 42990 - DNA, 80 bp, synthetic construct
  misc_feature 1..80: note = Artificially Synthesized Probe
  source 1..80: mol_type = other DNA
aacttagtaacacttctgagcatggaataactggctgtgactcatcatcaccaaaggctgggtcctagcacagacaagct

SEQ ID NO: 42991 - DNA, 80 bp, synthetic construct
  misc_feature 1..80: note = Artificially Synthesized Probe
  source 1..80: mol_type = other DNA
ataagcgcatgttaagagaagtctgcactggaactcatgtgtgtttgtggaggaggacataagtgaatgttaagaaaagt

SEQ ID NO: 42992 - DNA, 80 bp, synthetic construct
  misc_feature 1..80: note = Artificially Synthesized Probe
  source 1..80: mol_type = other DNA
caaacattaggctatgtccagttctaatgcctcaggataacacaatagtccccataattaggagctatgcagtagctgac

SEQ ID NO: 42993 - DNA, 80 bp, synthetic construct
  misc_feature 1..80: note = Artificially Synthesized Probe
  source 1..80: mol_type = other DNA
ggcagagctgagcctagactccaatactaaagtaagaaactaatccttctatcatattagtactgtttacccctccaaaa

SEQ ID NO: 42994 - DNA, 80 bp, synthetic construct
  misc_feature 1..80: note = Artificially Synthesized Probe
  source 1..80: mol_type = other DNA
aatgtgcccaagagacagatgcctaaacaaagagaaactgtgaaatgtgttataatggtttctttctcctccgatttagt

SEQ ID NO: 42995 - DNA, 80 bp, synthetic construct
  misc_feature 1..80: note = Artificially Synthesized Probe
  source 1..80: mol_type = other DNA
agagttgcaatttttctccgatttcccattcaaacatccctgtaattgttccgttgaattgtgtcatcacctgtgaggat

SEQ ID NO: 42996 - DNA, 80 bp, synthetic construct
  misc_feature 1..80: note = Artificially Synthesized Probe
  source 1..80: mol_type = other DNA
cctcgcaacagctcccctgctggcctactcccggtcagtgggcctcgcaacggctcccctgctggcctactcccggtcac

SEQ ID NO: 42997 - DNA, 80 bp, synthetic construct
  misc_feature 1..80: note = Artificially Synthesized Probe
  source 1..80: mol_type = other DNA
aggcaaaagattcccctggggtcttcttatgagattctaatctctaaattgatagtgccaaccaaatcagggaccagagc

SEQ ID NO: 42998 - DNA, 80 bp, synthetic construct
  misc_feature 1..80: note = Artificially Synthesized Probe
  source 1..80: mol_type = other DNA
acagtgagctataatgccaccactgcactccagcctggacaacagagcaagacattgtcgaaggggaggggaggggaggg

SEQ ID NO: 42999 - DNA, 80 bp, synthetic construct
  misc_feature 1..80: note = Artificially Synthesized Probe
  source 1..80: mol_type = other DNA
ggctaaaataaaccctgtggtgtgagattagaattgaaggcatcagcatcaaatgcacaggttctaatatagaagcaggt

SEQ ID NO: 43000 - DNA, 80 bp, synthetic construct
  misc_feature 1..80: note = Artificially Synthesized Probe
  source 1..80: mol_type = other DNA
gaataaaatataaaaatccatgagtccatgctgacatagacataagggggagaagtgacagcttttcttaaagtagaatg

SEQ ID NO: 43001 - DNA, 80 bp, synthetic construct
  misc_feature 1..80: note = Artificially Synthesized Probe
  source 1..80: mol_type = other DNA
gcattctgtgcctcctgatatgaattcctaggaacacaggaccacttctgcataaatcataaataatgaggaaacatcag

SEQ ID NO: 43002 - DNA, 80 bp, synthetic construct
  misc_feature 1..80: note = Artificially Synthesized Probe
  source 1..80: mol_type = other DNA
gaaggctatacaagggctctttgtataattcttataattcttctgtaagcttgaaattaattcaaaataaacaacaatgg

SEQ ID NO: 43003 - DNA, 80 bp, synthetic construct
  misc_feature 1..80: note = Artificially Synthesized Probe
  source 1..80: mol_type = other DNA
gcgggaaaggtggggaaaagattgagaaatcggatggttgccgtgtctgtgtggaaagaagtagacatgggaaacttttc

SEQ ID NO: 43004 - DNA, 80 bp, synthetic construct
  misc_feature 1..80: note = Artificially Synthesized Probe
  source 1..80: mol_type = other DNA
ttccaccacactgtgttgcgtctctgtcatctgggaagttatgaatggtctcatgctttctgagttagagctacagcaaa

SEQ ID NO: 43005 - DNA, 80 bp, synthetic construct
  misc_feature 1..80: note = Artificially Synthesized Probe
  source 1..80: mol_type = other DNA
gaattacaataactcagaaaaatgaccctttaaaccaggtaggttttgggaaaggatgtggctacctcagacatgtgctt

SEQ ID NO: 43006 - DNA, 80 bp, synthetic construct
  misc_feature 1..80: note = Artificially Synthesized Probe
  source 1..80: mol_type = other DNA
tttaagaaacatgtttgaaactaagaatgtgctcacccatgatagaagcattaaaaacaaggggaggggtgaagtgcaat

SEQ ID NO: 43007 - DNA, 80 bp, synthetic construct
  misc_feature 1..80: note = Artificially Synthesized Probe
  source 1..80: mol_type = other DNA
aacctaatgtgttcccagacaatctgcctcataacctaatgcgttctcagataacttccctgagaacctcaatgcattcc

SEQ ID NO: 43008 - DNA, 80 bp, synthetic construct
  misc_feature 1..80: note = Artificially Synthesized Probe
  source 1..80: mol_type = other DNA
tgttcccaaagaacttccctcagacctaatgctttcccagaaaacctccttcagaacctaatgcatttccagagaacttc

SEQ ID NO: 43009 - DNA, 80 bp, synthetic construct
  misc_feature 1..80: note = Artificially Synthesized Probe
  source 1..80: mol_type = other DNA
cctaatgcgttcccaggcaacctccctcagaacctcactgcattaccagaaaaccttcctaagcaggtaattctttccca

SEQ ID NO: 43010 - DNA, 80 bp, synthetic construct
  misc_feature 1..80: note = Artificially Synthesized Probe
  source 1..80: mol_type = other DNA
aaaacctccctcaggacctaatgcggtcccagagaacctccctcagaacctcagtgcattaccagaaaacctccctcagg

SEQ ID NO: 43011 - DNA, 80 bp, synthetic construct
  misc_feature 1..80: note = Artificially Synthesized Probe
  source 1..80: mol_type = other DNA
aatttaatgcgttcccagagaaattccctcagaacctcagtgcgttcccagagaacctccctcagaacctcagtgcgttt

SEQ ID NO: 43012 - DNA, 80 bp, synthetic construct
  misc_feature 1..80: note = Artificially Synthesized Probe
  source 1..80: mol_type = other DNA
acctaatgcattcccacagatcttcactcaggacctgatgcgttcccagagaacttccctcaggatctcaattcgtttcc

SEQ ID NO: 43013 - DNA, 80 bp, synthetic construct
  misc_feature 1..80: note = Artificially Synthesized Probe
  source 1..80: mol_type = other DNA
aatcccagagaacctgccttcaaacctaatgcgttcccagaaaacatccctcaggaactaatgagttccaggagaacttc

SEQ ID NO: 43014 - DNA, 80 bp, synthetic construct
  misc_feature 1..80: note = Artificially Synthesized Probe
  source 1..80: mol_type = other DNA
gtgcattagcagagaacctccctcagaacctaatgcgttcccacagaacttccctcacaacctaatgcgttcccaaagaa

SEQ ID NO: 43015 - DNA, 80 bp, synthetic construct
  misc_feature 1..80: note = Artificially Synthesized Probe
  source 1..80: mol_type = other DNA
cctcaggacctaatatgttcccagataacttccctcagtacctaatgcattccccaagaagctccctcagaacccaatgt

SEQ ID NO: 43016 - DNA, 80 bp, synthetic construct
  misc_feature 1..80: note = Artificially Synthesized Probe
  source 1..80: mol_type = other DNA
caataatgggacaaatcaatgtgatgtgcctcttgacacaatgcactggggatacaatgccacttttatggtgttcttgc

SEQ ID NO: 43017 - DNA, 80 bp, synthetic construct
  misc_feature 1..80: note = Artificially Synthesized Probe
  source 1..80: mol_type = other DNA
cattcaaaagatgtaaaaatacccctaatgggtttctagggagggtcacaggcatgccacaaccatctttcagccccgga

SEQ ID NO: 43018 - DNA, 80 bp, synthetic construct
  misc_feature 1..80: note = Artificially Synthesized Probe
  source 1..80: mol_type = other DNA
atgtaggtatgactactactattttacacctcaagaaatgaggactcagaggttctctaacctgccccaacacatatgta

SEQ ID NO: 43019 - DNA, 80 bp, synthetic construct
  misc_feature 1..80: note = Artificially Synthesized Probe
  source 1..80: mol_type = other DNA
ctattgccaaatgtctacaaaatgaccctgagccaaacacaccatgctggggttgatactaaatcataatttgcatgtaa

SEQ ID NO: 43020 - DNA, 80 bp, synthetic construct
  misc_feature 1..80: note = Artificially Synthesized Probe
  source 1..80: mol_type = other DNA
cttgagtgcacagatgtcctgggagtttttctgcatttccattagtttaagatgaaggatctatgatggaggatgaggat

SEQ ID NO: 43021 - DNA, 80 bp, synthetic construct
  misc_feature 1..80: note = Artificially Synthesized Probe
  source 1..80: mol_type = other DNA
ctggtggaaaattccagagacctcaatggagccatcttaagaatggcatattgtcccattgatctatatctcttgttttg

SEQ ID NO: 43022 - DNA, 80 bp, synthetic construct
  misc_feature 1..80: note = Artificially Synthesized Probe
  source 1..80: mol_type = other DNA
gagataatcatgtggtttttgtctttggttctgtttatgtgctggattacatttattgatttgcgtatattgaaccagcc

SEQ ID NO: 43023 - DNA, 80 bp, synthetic construct
  misc_feature 1..80: note = Artificially Synthesized Probe
  source 1..80: mol_type = other DNA
ttttgaagggttttttgtgtctctatttccttcagttctgctctgattttcgttatttcttgccttctgctagcttttga

SEQ ID NO: 43024 - DNA, 80 bp, synthetic construct
  misc_feature 1..80: note = Artificially Synthesized Probe
  source 1..80: mol_type = other DNA
ttagcgcttccttcaggagctcttttagggcaggtctggtggtgacaaaatctctcagcagttgcctgtctgtgaagtat

SEQ ID NO: 43025 - DNA, 80 bp, synthetic construct
  misc_feature 1..80: note = Artificially Synthesized Probe
  source 1..80: mol_type = other DNA
tggcgattcctcagggatctagaactagaaataccatttgacccagcaatcccattactgggtatatacccaaaggacta

SEQ ID NO: 43026 - DNA, 80 bp, synthetic construct
  misc_feature 1..80: note = Artificially Synthesized Probe
  source 1..80: mol_type = other DNA
tggatcaatttcctggtttgatgatgcactctagtgccctgccctcgaggaagctgggagatgggaaggggtctggatca

SEQ ID NO: 43027 - DNA, 80 bp, synthetic construct
  misc_feature 1..80: note = Artificially Synthesized Probe
  source 1..80: mol_type = other DNA
tctggatcaatttcctggtttgatgatgcactctagtgtcccccctggaggaagctgggagatgggaaggggtctggatc

SEQ ID NO: 43028 - DNA, 80 bp, synthetic construct
  misc_feature 1..80: note = Artificially Synthesized Probe
  source 1..80: mol_type = other DNA
gaagtttccttttttcttacttttttcctgcagggctgcctcctgcctatggctacgttatgaacgtgctcagtttagat

SEQ ID NO: 43029 - DNA, 80 bp, synthetic construct
  misc_feature 1..80: note = Artificially Synthesized Probe
  source 1..80: mol_type = other DNA
tagtcactggcatgtaagtgttattactaatcagtaatagcccatgaaatggtgggtggatcagctagattagggggttt

SEQ ID NO: 43030 - DNA, 80 bp, synthetic construct
  misc_feature 1..80: note = Artificially Synthesized Probe
  source 1..80: mol_type = other DNA
tgggatgtgaggagcccctctgcctggctgcccagtctggaaagtgaggagcgtctccgcccggccgccatcccacctag

SEQ ID NO: 43031 - DNA, 80 bp, synthetic construct
  misc_feature 1..80: note = Artificially Synthesized Probe
  source 1..80: mol_type = other DNA
ttcattttgttctgtactaagaaaacttcttctgccttgggatcctgttgatctgtgaccttacccccaaccctgtgctc

SEQ ID NO: 43032 - DNA, 80 bp, synthetic construct
  misc_feature 1..80: note = Artificially Synthesized Probe
  source 1..80: mol_type = other DNA
ctagtccctgctcccaaaatgcaattgagaactgcatttaattagttacaagaaactgtttgttttcttccatgccagtc

SEQ ID NO: 43033 - DNA, 80 bp, synthetic construct
  misc_feature 1..80: note = Artificially Synthesized Probe
  source 1..80: mol_type = other DNA
tccaaaggaaattaaagtgttagtgtgctctgaaaagtaactcttcaaatatgccactggccaccttgacatttccaggc

SEQ ID NO: 43034 - DNA, 80 bp, synthetic construct
  misc_feature 1..80: note = Artificially Synthesized Probe
  source 1..80: mol_type = other DNA
ctacatgtctcctacccaggcatttattaaaatatagcaattgcccattatttgtcttttcccttctggcctccatgatg

SEQ ID NO: 43035 - DNA, 80 bp, synthetic construct
  misc_feature 1..80: note = Artificially Synthesized Probe
  source 1..80: mol_type = other DNA
ctctggagacgagaagttaatggagagggagtttctaaatgtacttggtattttagccaataccagtgggtcaatctgaa

SEQ ID NO: 43036 - DNA, 80 bp, synthetic construct
  misc_feature 1..80: note = Artificially Synthesized Probe
  source 1..80: mol_type = other DNA
gggcctcgtttttaaaacataatgtgttattggaaatcatggcaaacagcagatgtcagtgacgtggactgagaacgttc

SEQ ID NO: 43037 - DNA, 80 bp, synthetic construct
  misc_feature 1..80: note = Artificially Synthesized Probe
  source 1..80: mol_type = other DNA
tcactcatttgtggcacatgcattccacatgtggaccaagttagtacaggaaaagtgattcattccttccctcatccact

SEQ ID NO: 43038 - DNA, 80 bp, synthetic construct
  misc_feature 1..80: note = Artificially Synthesized Probe
  source 1..80: mol_type = other DNA
taaaaatattccactgctgtaggggaatggattataatgacagcaggcaaaccagtttaagaggctgctacagtgctcca

SEQ ID NO: 43039 - DNA, 80 bp, synthetic construct
  misc_feature 1..80: note = Artificially Synthesized Probe
  source 1..80: mol_type = other DNA
aacccctgggccacagtccatggcctgttagcaaccaggctgcatatcacgaggtgagcagcagtgagtgagcatgactg

SEQ ID NO: 43040 - DNA, 80 bp, synthetic construct
  misc_feature 1..80: note = Artificially Synthesized Probe
  source 1..80: mol_type = other DNA
ccgatataggaaagcaaaattcttcatatagcaagttaatccctactgattaaatcacaggggattcccagcaccttcaa

SEQ ID NO: 43041 - DNA, 80 bp, synthetic construct
  misc_feature 1..80: note = Artificially Synthesized Probe
  source 1..80: mol_type = other DNA
aaaaatataccccaaagaattaaacagtgtggatacctccagggggagggatatacagtagttaagaagagatgtttatt

SEQ ID NO: 43042 - DNA, 80 bp, synthetic construct
  misc_feature 1..80: note = Artificially Synthesized Probe
  source 1..80: mol_type = other DNA
tcacaacttgagccgataattccactagtgtcgtaagaaaatcatctcactgctttgggtaagagacagcgaagaggaga

SEQ ID NO: 43043 - DNA, 80 bp, synthetic construct
  misc_feature 1..80: note = Artificially Synthesized Probe
  source 1..80: mol_type = other DNA
aggaggaaacctaggtaagtctctgtagccttggattacgtaacagtttcttggatatgacactaaacacaagcaagaac

SEQ ID NO: 43044 - DNA, 80 bp, synthetic construct
  misc_feature 1..80: note = Artificially Synthesized Probe
  source 1..80: mol_type = other DNA
tctcacaagaataggaaacacgctgacacgaaaacctgtacaaatattcacagcagtattcatacagtgaaaacctgtac

SEQ ID NO: 43045 - DNA, 80 bp, synthetic construct
  misc_feature 1..80: note = Artificially Synthesized Probe
  source 1..80: mol_type = other DNA
cagtgaaaacctgtacaaatattcacatagtgagttcacacagtgaaaacctgtacagatactcacagcagtaatcaaat

SEQ ID NO: 43046 - DNA, 80 bp, synthetic construct; identical to SEQ ID NO: 43045
  misc_feature 1..80: note = Artificially Synthesized Probe
  source 1..80: mol_type = other DNA

SEQ ID NO: 43047 - DNA, 80 bp, synthetic construct
  misc_feature 1..80: note = Artificially Synthesized Probe
  source 1..80: mol_type = other DNA
gaagaatacatttctttagcaccagtaaagcatccataaaatattttccaacgctgaagggagtgcatgaggcgggggaa

SEQ ID NO: 43048 - DNA, 80 bp, synthetic construct
  misc_feature 1..80: note = Artificially Synthesized Probe
  source 1..80: mol_type = other DNA
gttacagcacaggacatcgtgaaactggttaagcaacaagcctgtccctgaggctctttcagtctaaagttctatcaaat

SEQ ID NO: 43049 - DNA, 80 bp, synthetic construct
  misc_feature 1..80: note = Artificially Synthesized Probe
  source 1..80: mol_type = other DNA
ggaatgcagaataactgccaggtcgtgatacctggcacaaagaatagggtaggaggacgaagttgaattaaagaagctga

SEQ ID NO: 43050 - DNA, 80 bp, synthetic construct
  misc_feature 1..80: note = Artificially Synthesized Probe
  source 1..80: mol_type = other DNA
cctggtcctcagatgcaacagggccatttgttcctctgtggtcctatagctccctaaatgtaaaagacaaatcaccagga

SEQ ID NO: 43051 - DNA, 80 bp, synthetic construct
  misc_feature 1..80: note = Artificially Synthesized Probe
  source 1..80: mol_type = other DNA
atatttcccgggtagctgggactacaggcgtgcgccaccacgccccactaatatttcccgggtagctgggactacaggcg

SEQ ID NO: 43052 - DNA, 80 bp, synthetic construct
  misc_feature 1..80: note = Artificially Synthesized Probe
  source 1..80: mol_type = other DNA
ggcgcccaccaggcctgctaatatttcctgggtagcagggactacacgtgtgcaccaccacacctgctaatatttcccgg

SEQ ID NO: 43053 - DNA, 80 bp, synthetic construct
  misc_feature 1..80: note = Artificially Synthesized Probe
  source 1..80: mol_type = other DNA
tatttccttttctgacctgcattttctttaaggctattttcacctgttttgtgacccatttttttcccttgttactaaaa

SEQ ID NO: 43054 - DNA, 80 bp, synthetic construct
  misc_feature 1..80: note = Artificially Synthesized Probe
  source 1..80: mol_type = other DNA
tgactgcaggtaaacgcacctaatatagcgtgggtcaccaagtggatgttcaaagcatgacagctatgggtgtttcagat

SEQ ID NO: 43055 - DNA, 80 bp, synthetic construct
  misc_feature 1..80: note = Artificially Synthesized Probe
  source 1..80: mol_type = other DNA
gtctgtctgactctgtactcatttttctaacgggttactcgtattttccttatggatttttaggagttctttacatgtgc

SEQ ID NO: 43056 - DNA, 80 bp, synthetic construct
  misc_feature 1..80: note = Artificially Synthesized Probe
  source 1..80: mol_type = other DNA
ggattagaccacaagtcttgactgctggtccaaggattttgctactaaatcactttgcttctctattgttacccgcagtt

SEQ ID NO: 43057 - DNA, 80 bp, synthetic construct
  misc_feature 1..80: note = Artificially Synthesized Probe
  source 1..80: mol_type = other DNA
gtatacctggctttggggtttacagagactcattgacctagtttgttcaccagagatgttaaaaggtaaaccctaaagta

SEQ ID NO: 43058 - DNA, 80 bp, synthetic construct
  misc_feature 1..80: note = Artificially Synthesized Probe
  source 1..80: mol_type = other DNA
gtcattaattactgaattataaagccctccctcttcctgagggcccaataatcatctcttcaactagagagcaggagtcc

SEQ ID NO: 43059 - DNA, 80 bp, synthetic construct
  misc_feature 1..80: note = Artificially Synthesized Probe
  source 1..80: mol_type = other DNA
tcacccagggctggagtgcaatggcatgataatggcctactgcaaccttgacctgggctcaagcaatcctcccacctcag

SEQ ID NO: 43060 - DNA, 80 bp, synthetic construct
  misc_feature 1..80: note = Artificially Synthesized Probe
  source 1..80: mol_type = other DNA
ataaaaggagttcaagaccagcccgaacaacacagcaaaactcttgtctctacaaaaaatacacacacaaaaattagccg

SEQ ID NO: 43061 - DNA, 80 bp, synthetic construct
  misc_feature 1..80: note = Artificially Synthesized Probe
  source 1..80: mol_type = other DNA
tagagactggggaaccgatggtgaaaatttgattaaccacagaaccagtagagaactggcatctaccttgtcacatggca

SEQ ID NO: 43062 - DNA, 80 bp, synthetic construct
  misc_feature 1..80: note = Artificially Synthesized Probe
  source 1..80: mol_type = other DNA
acacacacacaaaatccagaggtttttaacctggggtccatgattggccttcaggggtctatacatttccagaaactata

SEQ ID NO: 43063 - DNA, 80 bp, synthetic construct
  misc_feature 1..80: note = Artificially Synthesized Probe
  source 1..80: mol_type = other DNA
tgactccaacctctgggattcctgttcttaaagtgctatgtttttgccaaatagtgtggtctcccttaacacataaaacc

SEQ ID NO: 43064 - DNA, 80 bp, synthetic construct
  misc_feature 1..80: note = Artificially Synthesized Probe
  source 1..80: mol_type = other DNA
agggaggcatgttgttaaagagaaccattttaatttcatctgcccggtggaatctgggaaaaaaaatataaagcaggcct

SEQ ID NO: 43065 - DNA, 80 bp, synthetic construct
  misc_feature 1..80: note = Artificially Synthesized Probe
  source 1..80: mol_type = other DNA
tattgaattacagagcagatgcaggaaatgttccttggatcagtaaatgaatgtatgtccccatctctacccaccgagta

SEQ ID NO: 43066 - DNA, 80 bp, synthetic construct
  misc_feature 1..80: note = Artificially Synthesized Probe
  source 1..80: mol_type = other DNA
tctgtgaggaagagagaacatatcatcacctggcatcatatccttatgtaactacacaccgatccacagggtcggaaggg

SEQ ID NO: 43067 - DNA, 80 bp, synthetic construct
  misc_feature 1..80: note = Artificially Synthesized Probe
  source 1..80: mol_type = other DNA
ctgtcctactccttggagtacagaatggcaagagggctccataatgttttagggtgttttgtaaaaaattattatgggta

SEQ ID NO: 43068 - DNA, 80 bp, synthetic construct
  misc_feature 1..80: note = Artificially Synthesized Probe
  source 1..80: mol_type = other DNA
gagcacacttccattctcggtctccaccctgttccttcagaattaactttatgaagtttctagaaatagcaacagctcaa

SEQ ID NO: 43069 - DNA, 80 bp, synthetic construct
  misc_feature 1..80: note = Artificially Synthesized Probe
  source 1..80: mol_type = other DNA
agagcctgtgacagcacctggtatcaccagagacaaaaaagaggaaaaattaccagtctctgatttgtagacttccttgc

SEQ ID NO: 43070 - DNA, 80 bp, synthetic construct
  misc_feature 1..80: note = Artificially Synthesized Probe
  source 1..80: mol_type = other DNA
ttgaactagtttacattaccaccaacagtgtaaaattgttcctatttctccacatcctctccagcatctgttgtttcctg

SEQ ID NO: 43071 - DNA, 80 bp, synthetic construct
  misc_feature 1..80: note = Artificially Synthesized Probe
  source 1..80: mol_type = other DNA
ggagttccctcatgatttggctctctgtttgtctgttattggtgcataagaatgcttgtgatttttgcacactgattttg

SEQ ID NO: 43072 - DNA, 80 bp, synthetic construct
  misc_feature 1..80: note = Artificially Synthesized Probe
  source 1..80: mol_type = other DNA
gggtgtatgtgtccaggaatttatccatttcttctagattttgtagtttatttgcataggggtgtttatagtattttctg

SEQ ID NO: 43073 - DNA, 80 bp, synthetic construct
  misc_feature 1..80: note = Artificially Synthesized Probe
  source 1..80: mol_type = other DNA
tggtgctgagaagaatgtatattctgttgatttggggtggagagttctgtagatgtctattaggtccgtttggtgcacag

SEQ ID NO: 43074 - DNA, 80 bp, synthetic construct
  misc_feature 1..80: note = Artificially Synthesized Probe
  source 1..80: mol_type = other DNA
tctctctgactgcctttaacatttttttccttcatttcaactttggtgagtctgacagttatgtgtcttggaattgctct

SEQ ID NO: 43075 - DNA, 80 bp, synthetic construct
  misc_feature 1..80: note = Artificially Synthesized Probe
  source 1..80: mol_type = other DNA
tgagctgtgctgggctccatccagttccagcttcctggccactttgtttacctgctcaagcctcagcaatggcgggcgcc

SEQ ID NO: 43076 - DNA, 80 bp, synthetic construct
  misc_feature 1..80: note = Artificially Synthesized Probe
  source 1..80: mol_type = other DNA
tcttacggtgctaactggctttacaggtggctagaggttagatgtatgcttaatcctggagcagaaggatacgcatataa

SEQ ID NO: 43077 - DNA, 80 bp, synthetic construct
  misc_feature 1..80: note = Artificially Synthesized Probe
  source 1..80: mol_type = other DNA
caactcatagagaacagggaaaacaaaaattcctcctggcatccacgtaagttcagcctgttgcatggtggcaaccccaa

SEQ ID NO: 43078 - DNA, 80 bp, synthetic construct
  misc_feature 1..80: note = Artificially Synthesized Probe
  source 1..80: mol_type = other DNA
acaacactcatacttggcaactgaggacaacactcatacttggaaaccgaggacaacactcatacttggaaagtgaggac

SEQ ID NO: 43079 - DNA, 80 bp, synthetic construct
  misc_feature 1..80: note = Artificially Synthesized Probe
  source 1..80: mol_type = other DNA
ccgaggacaactctcatacttggaaagcgaggacaacactcatacttggaaagcgaggacaacactcatacttggaaagc

SEQ ID NO: 43080 - DNA, 80 bp, synthetic construct
  misc_feature 1..80: note = Artificially Synthesized Probe
  source 1..80: mol_type = other DNA
aaataagaagttgtctcctcttgtgctctttttagtgttatttttttttttcccccgagacgggtctgctttcttgccca

SEQ ID NO: 43081 - DNA, 80 bp, synthetic construct
  misc_feature 1..80: note = Artificially Synthesized Probe
  source 1..80: mol_type = other DNA
ggactacatcaacctaaaaagcctgttggagaaatgcaggtggaaaccacaatgcagtgtcacttcacgtcctaacgggg

SEQ ID NO: 43082 - DNA, 80 bp, synthetic construct
  misc_feature 1..80: note = Artificially Synthesized Probe
  source 1..80: mol_type = other DNA
atcggctcccacacacatctccgtgaccgcgtggccactgcctcctaagggtcttattttatccagactcctgtacctct

SEQ ID NO: 43083 - DNA, 80 bp, synthetic construct
  misc_feature 1..80: note = Artificially Synthesized Probe
  source 1..80: mol_type = other DNA
catgagactccctcttccttctttcccccattactgtcacgttggtaagatcccacccattcttttaagattcagattaa

SEQ ID NO: 43084 - DNA, 80 bp, synthetic construct
  misc_feature 1..80: note = Artificially Synthesized Probe
  source 1..80: mol_type = other DNA
cacgtcaggcggcaggggtgggcctctgggtctgagaacttcagcagtagccagaggggcggccaacacccaagaagacc

SEQ ID NO: 43085 - DNA, 80 bp, synthetic construct
  misc_feature 1..80: note = Artificially Synthesized Probe
  source 1..80: mol_type = other DNA
acagaggaatggaacaggcactgaagatcttacactataggacagaggaatggaacaggcactgaagatcttacactgga

SEQ ID NO: 43086 - DNA, 80 bp, synthetic construct
  misc_feature 1..80: note = Artificially Synthesized Probe
  source 1..80: mol_type = other DNA
aagatccaacgttcacgtaacaagaattccacaaggaaagaatgcagagaccaagttgtagagactactcaaagaaagga

SEQ ID NO: 43087 - DNA, 80 bp, synthetic construct
  misc_feature 1..80: note = Artificially Synthesized Probe
  source 1..80: mol_type = other DNA
ttagaaacaacgacctagtgctaccaaaatggtgaaataatctgtggtatgtcacgctatggggttctgtgcatcaattc

SEQ ID NO: 43088 - DNA, 80 bp, synthetic construct
  misc_feature 1..80: note = Artificially Synthesized Probe
  source 1..80: mol_type = other DNA
caaataaggaaacttaaggaaaacaaagaagcctgtagcattcgggccttattaagaaggcagagtcagaaacgtagctg

SEQ ID NO: 43089 - DNA, 80 bp, synthetic construct
  misc_feature 1..80: note = Artificially Synthesized Probe
  source 1..80: mol_type = other DNA
gtttctctcacaaatggggacaactgagagttgtccatatatacaactgtaactatctaccacaggcagctttggaagac

SEQ ID NO: 43090 - DNA, 80 bp, synthetic construct
  misc_feature 1..80: note = Artificially Synthesized Probe
  source 1..80: mol_type = other DNA
aaacagaagtacaaattatgtgctacggcaggaagaatgtgtgagtgatgaattctcatttggtgtggggaggggaatct

SEQ ID NO: 43091 - DNA, 80 bp, synthetic construct
  misc_feature 1..80: note = Artificially Synthesized Probe
  source 1..80: mol_type = other DNA
agggttgggttatttcattaaatttgtaatttatgattttccataagaagcattgaaaaagacaggattggccgggcgcg

SEQ ID NO: 43092 - DNA, 80 bp, synthetic construct
  misc_feature 1..80: note = Artificially Synthesized Probe
  source 1..80: mol_type = other DNA
tactttataaaaaaaagtggtttgaatgattgagttctgtctcatagggtctcttccatgacagtgcaactcagcccaac

SEQ ID NO: 43093 - DNA, 80 bp, synthetic construct
  misc_feature 1..80: note = Artificially Synthesized Probe
  source 1..80: mol_type = other DNA
gattgaaatataagctctgtaacatacgcttaacatgtaagttactaggagggcaggagcagtcttcagggagtgagaag

SEQ ID NO: 43094 - DNA, 80 bp, synthetic construct
  misc_feature 1..80: note = Artificially Synthesized Probe
  source 1..80: mol_type = other DNA
accgtgccatcgatcttaatgaaccgctgcatgcaaatcttcttaagtctgttccttaggaaaatgatgaggggaagaca

SEQ ID NO: 43095 - DNA, 80 bp, synthetic construct
  misc_feature 1..80: note = Artificially Synthesized Probe
  source 1..80: mol_type = other DNA
atcccactaaagtgagaaactcggcagggagttcgtggatagatacatcccactaaagtgagatactcggccgtgagttc

SEQ ID NO: 43096 - DNA, 80 bp, synthetic construct
  misc_feature 1..80: note = Artificially Synthesized Probe
  source 1..80: mol_type = other DNA
atcttagctataaaaagcctctttcatggggacttccccatcaagccttctctcctgtaacctccaaacaatctctgttt

SEQ ID NO: 43097 - DNA, 80 bp, synthetic construct
  misc_feature 1..80: note = Artificially Synthesized Probe
  source 1..80: mol_type = other DNA
acaaactgaaccactgatttttccctaaacaaagccatcaatggcagggcacaccaggggtactcaggtcaaacctacac

SEQ ID NO: 43098 - DNA, 80 bp, synthetic construct
  misc_feature 1..80: note = Artificially Synthesized Probe
  source 1..80: mol_type = other DNA
cagcgtgcatcgagctacataccgtacatctcgatggagaaatgcatgataccaataccaagaaatgttagagaaaggaa

SEQ ID NO: 43099 - DNA, 80 bp, synthetic construct
  misc_feature 1..80: note = Artificially Synthesized Probe
  source 1..80: mol_type = other DNA
gctttgtctttgatatctttgattttgccaaagagttgttggatagctttctgagcctcttcaagcgcctagagtaaggg

SEQ ID NO: 43100 - DNA, 80 bp, synthetic construct
  misc_feature 1..80: note = Artificially Synthesized Probe
  source 1..80: mol_type = other DNA
ttgagcccaggagttcaagactagcctggggaacatggcaagactcggtctctgcaaaaaaaaaagttagccaggcatgg

SEQ ID NO: 43101 - DNA, 80 bp, synthetic construct
  misc_feature 1..80: note = Artificially Synthesized Probe
  source 1..80: mol_type = other DNA
gttctaggcacgagtcagcatctccttaattcactccttcaatcactcaatgagtatttactgaatgcctcccatatacc

SEQ ID NO: 43102 - DNA, 80 bp, synthetic construct
  misc_feature 1..80: note = Artificially Synthesized Probe
  source 1..80: mol_type = other DNA
tacttgtataagactgtcctggctgctgtgtggcaaaggggctgtgcaggggcaggagggaaagcgggagtgaaagctct

SEQ ID NO: 43103 - DNA, 80 bp, synthetic construct
  misc_feature 1..80: note = Artificially Synthesized Probe
  source 1..80: mol_type = other DNA
tattgctgtgaacagagtgctaagggggattctgctaagggctcagaagaaaagcagaaatgtagagaaagtctggaact

SEQ ID NO: 43104 - DNA, 80 bp, synthetic construct
  misc_feature 1..80: note = Artificially Synthesized Probe
  source 1..80: mol_type = other DNA
aagagtttgtgaccagcctgaccaacatggtgaaacccctgtctctactaaaaatacaaaaattagccaggcatggtggt

SEQ ID NO: 43105 - DNA, 80 bp, synthetic construct
  misc_feature 1..80: note = Artificially Synthesized Probe
  source 1..80: mol_type = other DNA
agaaatgcttgcatacgtctgcttgggagtgatttagcaggagagaaatttatttgggggggcaatgggttaattacaga

SEQ ID NO: 43106 - DNA, 80 bp, synthetic construct
  misc_feature 1..80: note = Artificially Synthesized Probe
  source 1..80: mol_type = other DNA
aagtttcaatcgtggagtaaaaagtgcaacagaggcctctgtaggcaactgaccactagaaaggactgatctttttcgac

SEQ ID NO: 43107 - DNA, 80 bp, synthetic construct
  misc_feature 1..80: note = Artificially Synthesized Probe
  source 1..80: mol_type = other DNA
cactacctggctaatcagaaatgtgctgaaagaatcactctggcactgtccctagacactttttaaaataaaaacgtggt

SEQ ID NO: 43108 - DNA, 80 bp, synthetic construct
  misc_feature 1..80: note = Artificially Synthesized Probe
  source 1..80: mol_type = other DNA
tagcctagaaggctcagcaaaaccaattccagcatctttgtatttctgtgcatcctaatggtaaccactactctgaattc

SEQ ID NO: 43109 - DNA, 80 bp, synthetic construct
  misc_feature 1..80: note = Artificially Synthesized Probe
  source 1..80: mol_type = other DNA
aaaaagaaaaaaagaaaagagagacaggaaagaaagaggaaagaaagaaagaaaagaaagaaaagagaaagagggaggga

SEQ ID NO: 43110 - DNA, 80 bp, synthetic construct
  misc_feature 1..80: note = Artificially Synthesized Probe
  source 1..80: mol_type = other DNA
tccttctggcggtcacacttgttgaacttcttcaaacgagacacaacaggatccttccaaataatcccccttttgcctaa

SEQ ID NO: 43111 - DNA, 80 bp, synthetic construct
  misc_feature 1..80: note = Artificially Synthesized Probe
  source 1..80: mol_type = other DNA
cacggaagccctcaccacatccactgagggtggacaccaagggtcaagtcgcctctctttagagaaagtctcttcttttg

SEQ ID NO: 43112 - DNA, 80 bp, synthetic construct
  misc_feature 1..80: note = Artificially Synthesized Probe
  source 1..80: mol_type = other DNA
cagcagtgcccaaataagactaaacatttacattgcaaagttctgcctatatctgttatcacccctaacttaaaacaagc

SEQ ID NO: 43113 - DNA, 80 bp, synthetic construct
  misc_feature 1..80: note = Artificially Synthesized Probe
  source 1..80: mol_type = other DNA
aacagatcagccttaaaacagtacatccttaattacagagatctggaaaattccagggctgacaaacggtcctagaacct

SEQ ID NO: 43114 - DNA, 80 bp, synthetic construct
  misc_feature 1..80: note = Artificially Synthesized Probe
  source 1..80: mol_type = other DNA
ccctccaaattgggggtcattatgaaagtggcactaatacatttttgcctaacatccatattccaggtatcacatacaat

SEQ ID NO: 43115 - DNA, 80 bp, synthetic construct
  misc_feature 1..80: note = Artificially Synthesized Probe
  source 1..80: mol_type = other DNA
tttcttggcgcagtattttcctaaaactattttcaataatcatgttgcagaaaagcgggacttggcgtttctaaggtcag

SEQ ID NO: 43116 - DNA, 80 bp, synthetic construct
  misc_feature 1..80: note = Artificially Synthesized Probe
  source 1..80: mol_type = other DNA
atgagttcaagaccagtctgggcaacacagcaaaacccggattccacgagaaatacaaaaaaaattagccaggcgtggtg

SEQ ID NO: 43117 - DNA, 80 bp, synthetic construct
  misc_feature 1..80: note = Artificially Synthesized Probe
  source 1..80: mol_type = other DNA
aagaggagaactgacaaatatatccaagtgcaagtcctctgagaaggcctaaagaaattctggctgttttaatctaggat

SEQ ID NO: 43118 - DNA, 80 bp, synthetic construct
  misc_feature 1..80: note = Artificially Synthesized Probe
  source 1..80: mol_type = other DNA
aaacagtttactatttaaatggtctctgcggttgcaaaaaatgggaagcatcccagtttgttttataaagctgacaaagg

SEQ ID NO: 43119 - DNA, 80 bp, synthetic construct
  misc_feature 1..80: note = Artificially Synthesized Probe
  source 1..80: mol_type = other DNA
ccaaccacacagaaggcactcactaaatatgtactgagtgagcaaatgaacagatacactatgtaaagtgcctgtcatta

SEQ ID NO: 43120 - DNA, 80 bp, synthetic construct
  misc_feature 1..80: note = Artificially Synthesized Probe
  source 1..80: mol_type = other DNA
gggattaagttccagcataggaatcgtgggagataccaacattcctgtgctgtgacatgctgttttggttgaaaatatga

SEQ ID NO: 43121 - DNA, 80 bp, synthetic construct
  misc_feature 1..80: note = Artificially Synthesized Probe
  source 1..80: mol_type = other DNA
cattgttaagagacaaagcaaccaacagaacctgtctcaaagaggagccatttggtataaatattagataggctacagag

SEQ ID NO: 43122 - DNA, 80 bp, synthetic construct
  misc_feature 1..80: note = Artificially Synthesized Probe
  source 1..80: mol_type = other DNA
gaaaagctgagagcatttcttgccagcagaccgtgttataagaaacactaaaggaagttcatgaggcagaacaaatatgg

SEQ ID NO: 43123 - DNA, 80 bp, synthetic construct
  misc_feature 1..80: note = Artificially Synthesized Probe
  source 1..80: mol_type = other DNA
ttggaagatttaatattgtaaagatgtcaattctccttcaattgatctatagactcaacgcaatcccaatcaaagtccca

SEQ ID NO: 43124 - DNA, 80 bp, synthetic construct
  misc_feature 1..80: note = Artificially Synthesized Probe
  source 1..80: mol_type = other DNA
ttctaaaataatataccaacggccctcaacttgggatggttcaacacagaattttcttactacacgatggtgcaaaggtg

SEQ ID NO: 43125 - DNA, 80 bp, synthetic construct
  misc_feature 1..80: note = Artificially Synthesized Probe
  source 1..80: mol_type = other DNA
tacgatcctgccattacattccagcctgaatgacagagtgagaccctgtctctaagaagaaaaaaaagaagaatttggaa

SEQ ID NO: 43126 - DNA, 80 bp, synthetic construct
  misc_feature 1..80: note = Artificially Synthesized Probe
  source 1..80: mol_type = other DNA
caacatggggaaaccccatctccactaaaatacagaaaattagccgggcgtggtggcacatgcctgtagtcccagctact

SEQ ID NO: 43127 - DNA, 80 bp, synthetic construct
  misc_feature 1..80: note = Artificially Synthesized Probe
  source 1..80: mol_type = other DNA
ttttagaggatacgtggcaaagtgttccaaatatgccgcagacatgtctccctgccaaaaaagcgctatcaaggtgatat

SEQ ID NO: 43128 - DNA, 80 bp, synthetic construct
  misc_feature 1..80: note = Artificially Synthesized Probe
  source 1..80: mol_type = other DNA
atgggaaacttcgaggccatactctaaaagctcagtcgctttagctgtggtatgttttagtaggaagaagcaagtagcaa

SEQ ID NO: 43129 - DNA, 80 bp, synthetic construct
  misc_feature 1..80: note = Artificially Synthesized Probe
  source 1..80: mol_type = other DNA
aatctgctaatgataaagtggggaggtcatcaaggctcccaaagatcttgatgggataaacaatcgagcagaactagtgg

SEQ ID NO: 43130 - DNA, 80 bp, synthetic construct
  misc_feature 1..80: note = Artificially Synthesized Probe
  source 1..80: mol_type = other DNA
gctgacaaacagctatcaagagcaaggatgataaagggtctggaaattgcattataaagatgaagaaactaagaatggtt

SEQ ID NO: 43131 - DNA, 80 bp, synthetic construct
  misc_feature 1..80: note = Artificially Synthesized Probe
  source 1..80: mol_type = other DNA
agtggggacgacttgtaataattctcttctcctcccaaaccttactcttgttctgatcaaagaaatggctacattgcagc

SEQ ID NO: 43132 - DNA, 80 bp, synthetic construct
  misc_feature 1..80: note = Artificially Synthesized Probe
  source 1..80: mol_type = other DNA
catgaatgtgaagtcaacactttccccttatttacagatatagaagcacacctagccgggtgcggtggctcacgcctgtc

SEQ ID NO: 43133 - DNA, 80 bp, synthetic construct
  misc_feature 1..80: note = Artificially Synthesized Probe
  source 1..80: mol_type = other DNA
agtgctgaaagcaaacttctcttctcttccagggaagaggggaacgtggggcctcttgacctacaaaactcagtattttg

SEQ ID NO: 43134 - DNA, 80 bp, synthetic construct
  misc_feature 1..80: note = Artificially Synthesized Probe
  source 1..80: mol_type = other DNA
tcccagtagcagcaagttgggactcttaatgcacaaagcaagttctaaatcacttttaaggaacacccacttgctgatca

SEQ ID NO: 43135 - DNA, 80 bp, synthetic construct
  misc_feature 1..80: note = Artificially Synthesized Probe
  source 1..80: mol_type = other DNA
aaagtcttcagtgtagacagaacacaagaggaggcaaaactggaattggagaccagaattttgaatgccaagcaaaggaa

SEQ ID NO: 43136 - DNA, 80 bp, synthetic construct
  misc_feature 1..80: note = Artificially Synthesized Probe
  source 1..80: mol_type = other DNA
tctggaaatttcagcgtaggattatatgctcctcccactccaaatctgggcagcaggatgaacatttttagaaattagct

SEQ ID NO: 43137 - DNA, 80 bp, synthetic construct
  misc_feature 1..80: note = Artificially Synthesized Probe
  source 1..80: mol_type = other DNA
aaaaagtaaaaagtaatttattcatcaacttctgcagactgcacctaattgtccagaaaaccaaacatgtgtgagtggca

SEQ ID NO: 43138 - DNA, 80 bp, synthetic construct
  misc_feature 1..80: note = Artificially Synthesized Probe
  source 1..80: mol_type = other DNA
ctataattccagctacttgggtggctgaggctcaagaattgctcgaacctgggaggtggagattacagtaagccaagatc

SEQ ID NO: 43139 - DNA, 80 bp, synthetic construct
  misc_feature 1..80: note = Artificially Synthesized Probe
  source 1..80: mol_type = other DNA
tgctttaaaaaaaaaaaaagtaaagcagtagttggaagctacagccacatctagcccagcccctgttttttgtaaataaa

SEQ ID NO: 43140 - DNA, 80 bp, synthetic construct
  misc_feature 1..80: note = Artificially Synthesized Probe
  source 1..80: mol_type = other DNA
cagcattagtagctataatctatcaactacgtattgcaatatgaaaagaagtgatttcaaatttttcttcttgggccggg

SEQ ID NO: 43141 - DNA, 80 bp, synthetic construct
  misc_feature 1..80: note = Artificially Synthesized Probe
  source 1..80: mol_type = other DNA
atcccatctctccaaaaaataaaaaaaagttagccaggcatggtggcatgtgcttgcagtcccaggtactcaggaggctg

SEQ ID NO: 43142 - DNA, 80 bp, synthetic construct
  misc_feature 1..80: note = Artificially Synthesized Probe
  source 1..80: mol_type = other DNA
tttgggaggctgaggtgggtggactgctagagcccaagagttagagaccaacctggacaacgtggtgaaactccgtctct

SEQ ID NO: 43143 - DNA, 80 bp, synthetic construct
  misc_feature 1..80: note = Artificially Synthesized Probe
  source 1..80: mol_type = other DNA
tgcaggacaggtgctttgcctgaagctgcagagatcctctttcttactctagcatctacctctaacgcaatgattcttga

SEQ ID NO: 43144 - DNA, 80 bp, synthetic construct
  misc_feature 1..80: note = Artificially Synthesized Probe
  source 1..80: mol_type = other DNA
gctgggattagagaatacagccatgagctggatcttgggtttttttttctcttaacaatacagatccagagcatttttgg

SEQ ID NO: 43145 - DNA, 80 bp, synthetic construct
  misc_feature 1..80: note = Artificially Synthesized Probe
  source 1..80: mol_type = other DNA
cacacaccacaagaggtgagaacctggtggtttcctacaaaattttcaaatctaacacttctttttgttttggtgaatca

SEQ ID NO: 43146 - DNA, 80 bp, synthetic construct
  misc_feature 1..80: note = Artificially Synthesized Probe
  source 1..80: mol_type = other DNA
ccaacctggtgacaaagcaagactccatctcaaaataataataatactcagctgggtgtggtggcacacacctgtagtgc

SEQ ID NO: 43147 - DNA, 80 bp, synthetic construct
  misc_feature 1..80: note = Artificially Synthesized Probe
  source 1..80: mol_type = other DNA
tgtttttttaactgaataaacgaatgagtgaattttggattctccatgaccctctactttcatgccctcaggtaccaaac

SEQ ID NO: 43148 - DNA, 80 bp, synthetic construct
  misc_feature 1..80: note = Artificially Synthesized Probe
  source 1..80: mol_type = other DNA
cacattagctcaggagttcgagaccagcctgggcttcgtagtgagatctcgtctctactaaaaaaattttaaaacttagc

SEQ ID NO: 43149 - DNA, 80 bp, synthetic construct
  misc_feature 1..80: note = Artificially Synthesized Probe
  source 1..80: mol_type = other DNA
gagagctggtggagcagagtgttctctaactcccccagggaaagggagactccctttcacagtccgctaagtaacgggtg

SEQ ID NO: 43150 - DNA, 80 bp, synthetic construct
  misc_feature 1..80: note = Artificially Synthesized Probe
  source 1..80: mol_type = other DNA
tctccctacactagactccataagaccaagaccagatttgtcatgtttacatttctccctagtttctaaaaataatacct

SEQ ID NO: 43151 - DNA, 80 bp, synthetic construct
  misc_feature 1..80: note = Artificially Synthesized Probe
  source 1..80: mol_type = other DNA
gaaggaaacctgaaactctacttacttgctcggttgggaacagggtattgatatactcaacagcattgaaatctgctcga

SEQ ID NO: 43152 - DNA, 80 bp, synthetic construct
  misc_feature 1..80: note = Artificially Synthesized Probe
  source 1..80: mol_type = other DNA
agacatacagctaactccctaacaacctgaagaacacgcaacaaggtggatgatacaagcagccaaattatccactggac

SEQ ID NO: 43153 - DNA, 80 bp, synthetic construct
  misc_feature 1..80: note = Artificially Synthesized Probe
  source 1..80: mol_type = other DNA
acccggccttcatgggcaatttaaagaacttcagggcagagtgattttcatgtctagagtgactttcgcctttttttttt

SEQ ID NO: 43154 - DNA, 80 bp, synthetic construct
  misc_feature 1..80: note = Artificially Synthesized Probe
  source 1..80: mol_type = other DNA
ttggcgttctcaggctaggacaaagttggttgtataagtaatccaaccactactggaaaaacacacatcgaagcgtcaat

SEQ ID NO: 43155 - DNA, 80 bp, synthetic construct
  misc_feature 1..80: note = Artificially Synthesized Probe
  source 1..80: mol_type = other DNA
agaatggtaacgatgtcatttttcaacactttctctcttctctgccgtccgcttcagaaattaaagtcattcccttcccc

SEQ ID NO: 43156 - DNA, 80 bp, synthetic construct
  misc_feature 1..80: note = Artificially Synthesized Probe
  source 1..80: mol_type = other DNA
aacgtcttttttttttttttttttttttttgagacggagtcttacttgttgcccaggctggagtgcaacggcgcgatctc

SEQ ID NO: 43157 - DNA, 80 bp, synthetic construct
  misc_feature 1..80: note = Artificially Synthesized Probe
  source 1..80: mol_type = other DNA
agggaattattgactttctgagattgaatatcaggggtctagatctcatcccaccactgaggatcgcttgagcccaggag

SEQ ID NO: 43158 - DNA, 80 bp, synthetic construct
  misc_feature 1..80: note = Artificially Synthesized Probe
  source 1..80: mol_type = other DNA
cccaaattccctcttgcctcaccccatccactggcaaccactgacttgatttctgtccctatagtttttgtttttgtttt

SEQ ID NO: 43159 - DNA, 80 bp, synthetic construct
  misc_feature 1..80: note = Artificially Synthesized Probe
  source 1..80: mol_type = other DNA
aacagataggagatgaagatctagttaaaacaagcaacaaaataaaaatttgcctaaggccgtatacctaagtcttcctg

SEQ ID NO: 43160 - DNA, 80 bp, synthetic construct
  misc_feature 1..80: note = Artificially Synthesized Probe
  source 1..80: mol_type = other DNA
tctctgttttttgttttttgtttttttctttgcctctgagcttcccatattgttgtggagaatcatgaaaccagggtgac

SEQ ID NO: 43161 - DNA, 80 bp, synthetic construct
  misc_feature 1..80: note = Artificially Synthesized Probe
  source 1..80: mol_type = other DNA
agaaattcagtctctaatactttaaaagtaaaacaaaacgaaaccttggagactgtggcctttagtaggcgatgggggag

SEQ ID NO: 43162 - DNA, 80 bp, synthetic construct
  misc_feature 1..80: note = Artificially Synthesized Probe
  source 1..80: mol_type = other DNA
aatgaaattcagtgagatctctaaatgtcatgtgtctgtgtcaatgtagcgttaataactctgtggaaaggaatctccaa

SEQ ID NO: 43163 - DNA, 80 bp, synthetic construct
  misc_feature 1..80: note = Artificially Synthesized Probe
  source 1..80: mol_type = other DNA
cctttgttctctctttttgaactcctttcgtttgaggttagacttcctggattgatcctccaaacctgtttcctttttgt

SEQ ID NO: 43164 - DNA, 80 bp, synthetic construct
  misc_feature 1..80: note = Artificially Synthesized Probe
  source 1..80: mol_type = other DNA
ttctgggagcgggacagggctacaatgtgagaagggacggaggaggtgcagagctggaagacagatctaagcctaggaga

SEQ ID NO: 43165 - DNA, 80 bp, synthetic construct
  misc_feature 1..80: note = Artificially Synthesized Probe
  source 1..80: mol_type = other DNA
gaaagctcacagtcactgaatcttataattcttgataatgacacgagttgcatttttgctttcttcaaacgacccccaag

SEQ ID NO: 43166 - DNA, 80 bp, synthetic construct
  misc_feature 1..80: note = Artificially Synthesized Probe
  source 1..80: mol_type = other DNA
gccctcagaggtggctgggcctcagtgtcttgggctctgcctcccccagagggcagctatctgcatatggaatcgaacag

SEQ ID NO: 43167 - DNA, 80 bp, synthetic construct
  misc_feature 1..80: note = Artificially Synthesized Probe
  source 1..80: mol_type = other DNA
aagaatgagaaaggagatgaggagctggctgtattgggtctgccaggtagagctattagggctttgactctggaagcagc

SEQ ID NO: 43168 - DNA, 80 bp, synthetic construct
  misc_feature 1..80: note = Artificially Synthesized Probe
  source 1..80: mol_type = other DNA
cccttctttctttcctctcagtctgtatgatgcaaacatgcagctttgacattccaaatgacctctgtgactggacctgg

SEQ ID NO: 43169 - DNA, 80 bp, synthetic construct
  misc_feature 1..80: note = Artificially Synthesized Probe
  source 1..80: mol_type = other DNA
ttcattcattcaagaaatactgagcacctacaatatgccaggtgctgtcctaggcacttaaaatacaccagtgcagaaaa

SEQ ID NO: 43170 - DNA, 80 bp, synthetic construct
  misc_feature 1..80: note = Artificially Synthesized Probe
  source 1..80: mol_type = other DNA
cttgaaggccattgtcaggactgtggctttcctattctgtgtgaatggggagcctttgcaggattttgagcagtgacttg

SEQ ID NO: 43171 - DNA, 80 bp, synthetic construct
  misc_feature 1..80: note = Artificially Synthesized Probe
  source 1..80: mol_type = other DNA
ggagacgctcctcacttcccagactgggcggccgggcagaggggctcctcacatcccagacgatgggcggccaggcagag

SEQ ID NO: 43172 - DNA, 80 bp, synthetic construct
  misc_feature 1..80: note = Artificially Synthesized Probe
  source 1..80: mol_type = other DNA
ctgatattctttctttctatgcacccaagtctatccctagcttctttccaccacctccctgtgcactcagctgagcttct

SEQ ID NO: 43173 - DNA, 80 bp, synthetic construct
  misc_feature 1..80: note = Artificially Synthesized Probe
  source 1..80: mol_type = other DNA
agctgccacgcccagcctatatctctttgttcttcttttcccttaatacttatcctttctcaatccatttcctcccttcc

SEQ ID NO: 43174 - DNA, 80 bp, synthetic construct
  misc_feature 1..80: note = Artificially Synthesized Probe
  source 1..80: mol_type = other DNA
tttcatcattttcccacttcctttcctttcccttccctcttccttcccggttgtttcctttcttctccttcctcccgccc

SEQ ID NO: 43175 - DNA, 80 bp, synthetic construct
  misc_feature 1..80: note = Artificially Synthesized Probe
  source 1..80: mol_type = other DNA
gaaaaaggaaaaaagaaaaggaacaggctatgactctagtggaccttaagagttagcacccaggccagatgtgatggctc

SEQ ID NO: 43176 - DNA, 80 bp, synthetic construct
  misc_feature 1..80: note = Artificially Synthesized Probe
  source 1..80: mol_type = other DNA
cttgatggggaaacatggggcatccctcagggtctagggaggtctggaatatgtgcgagactattccatgaagtggaaat

SEQ ID NO: 43177 - DNA, 80 bp, synthetic construct
  misc_feature 1..80: note = Artificially Synthesized Probe
  source 1..80: mol_type = other DNA
aggtacagagaagcaaggggtcaggtccttgcacatggtaggcacacccaatgttgaaataaattgaggggcctggtgct

SEQ ID NO: 43178 - DNA, 80 bp, synthetic construct
  misc_feature 1..80: note = Artificially Synthesized Probe
  source 1..80: mol_type = other DNA
tttcaggcagtgggaagatcagtccacaggtgttttttcggaagtttccatggtactggaattgtggagatagcagagta

SEQ ID NO: 43179 - DNA, 80 bp, synthetic construct
  misc_feature 1..80: note = Artificially Synthesized Probe
  source 1..80: mol_type = other DNA
aataatgagggtggggtgcagtggctcacacctgtaatcccaatgctttgggaggctgagacgggtggatcacttgaggc

SEQ ID NO: 43180 - DNA, 80 bp, synthetic construct
  misc_feature 1..80: note = Artificially Synthesized Probe
  source 1..80: mol_type = other DNA
aaaatgagcagaaaaaataatgctacgacctgggaaatttgagtgtttgctcagattcccgttcagaaagcaaagctttg

SEQ ID NO: 43181 - DNA, 80 bp, synthetic construct
  misc_feature 1..80: note = Artificially Synthesized Probe
  source 1..80: mol_type = other DNA
taaactccagggattcttatttttctttgcagtaaaagtgctaccagagcttcctcccgtatctccagtttcttccactg

SEQ ID NO: 43182 - DNA, 80 bp, synthetic construct
  misc_feature 1..80: note = Artificially Synthesized Probe
  source 1..80: mol_type = other DNA
atggaaaaacccactctccccactgaagaaaccaccacctctgttgaagagactaccatctctacagaaaaactcaccat

SEQ ID NO: 43183 - DNA, 80 bp, synthetic construct
  misc_feature 1..80: note = Artificially Synthesized Probe
  source 1..80: mol_type = other DNA
gggggtgtcaggactgaaccacgaggcttccttctcgttgtttgttattgagatataatccatatttcataaaattcacc

SEQ ID NO: 43184 - DNA, 80 bp, synthetic construct
  misc_feature 1..80: note = Artificially Synthesized Probe
  source 1..80: mol_type = other DNA
gggccatccatactgtagcatgcatcaggacttcattcctttaaaaaaagtatttctggccaggcacggtggctcacgcc

SEQ ID NO: 43185 - DNA, 80 bp, synthetic construct
  misc_feature 1..80: note = Artificially Synthesized Probe
  source 1..80: mol_type = other DNA
ctgtgtctgcaaccctggctttttgtttagtgacaaccactgcatccaggcctcttcctgcaattgcttctacaacaacg

SEQ ID NO: 43186 - DNA, 80 bp, synthetic construct
  misc_feature 1..80: note = Artificially Synthesized Probe
  source 1..80: mol_type = other DNA
aagaaaagtgcattaagctattcattaatgtgcagagcctcttcccagctgcaggtgttcttcccattgacatcagagct

SEQ ID NO: 43187 - DNA, 80 bp, synthetic construct
  misc_feature 1..80: note = Artificially Synthesized Probe
  source 1..80: mol_type = other DNA
ccttcattcagcaagtatttactgaatgagagcactcatgggagggctaagatgttgggtaaagacagatattggctggg

SEQ ID NO: 43188 - DNA, 80 bp, synthetic construct
  misc_feature 1..80: note = Artificially Synthesized Probe
  source 1..80: mol_type = other DNA
gaccctcattatgtcacctttgacgggaggcactttggcttcatgggcaagtgcacttacatcttggcccagccctgtgg

SEQ ID NO: 43189 - DNA, 80 bp, synthetic construct
  misc_feature 1..80: note = Artificially Synthesized Probe
  source 1..80: mol_type = other DNA
acagacacgctgcggctgcaggctcttctggaagaggcagtcgtggtctgctcctgtgtggatccggcctcccctactgg

SEQ ID NO: 43190 - DNA, 80 bp, synthetic construct
  misc_feature 1..80: note = Artificially Synthesized Probe
  source 1..80: mol_type = other DNA
gttcggtttgcgggtgagatgggatggtgaccagcagctgtatgttactgtgtccaggtaaggcagtgtcccagccaggc

SEQ ID NO: 43191 - DNA, 80 bp, synthetic construct
  misc_feature 1..80: note = Artificially Synthesized Probe
  source 1..80: mol_type = other DNA
ttggaattacaggggagccactgtgcccggcgaaagaaagactttataaaaatactttatagaggccaggtgcaggggtt

SEQ ID NO: 43192 - DNA, 80 bp, synthetic construct
  misc_feature 1..80: note = Artificially Synthesized Probe
  source 1..80: mol_type = other DNA
tgtccagtccgcacctcttcatcctcctcacgccctctgttttaggatcccagctccttgccttctctgccactgcccct

SEQ ID NO: 43193 - DNA, 80 bp, synthetic construct
  misc_feature 1..80: note = Artificially Synthesized Probe
  source 1..80: mol_type = other DNA
cctttaaaaaatgactggcattgcccctttctcctctctaccctggagacttcaagttgttctttcagttgctcaatatt

SEQ ID NO: 43194 - DNA, 80 bp, synthetic construct
  misc_feature 1..80: note = Artificially Synthesized Probe
  source 1..80: mol_type = other DNA
tccccctgacttggtcactcccctcaggacatgcctgctgcacgtgaaggccgcttccttcttcgacagctgcatgcttg

SEQ ID NO: 43195 - DNA, 80 bp, synthetic construct
  misc_feature 1..80: note = Artificially Synthesized Probe
  source 1..80: mol_type = other DNA
aaaaaaaaaaaagtgtttctgtgcagcccaagtcatcacacgcaggcacacggtacaggccctaggcaggggaggcaacg

SEQ ID NO: 43196 - DNA, 80 bp, synthetic construct
  misc_feature 1..80: note = Artificially Synthesized Probe
  source 1..80: mol_type = other DNA
gcagtggcacggtctcagctcactgcaacctccgcctcccaggttcaagcgattctcccgcctaagcctcccaagtagct

SEQ ID NO: 43197 - DNA, 80 bp, synthetic construct
  misc_feature 1..80: note = Artificially Synthesized Probe
  source 1..80: mol_type = other DNA
ccaatgtgggctctccaggatggcagctctgagtcaaagcttccggggcatggaggagtgagactgtgaactccatcttc

SEQ ID NO: 43198 - DNA, 80 bp, synthetic construct
  misc_feature 1..80: note = Artificially Synthesized Probe
  source 1..80: mol_type = other DNA
aattttttttttcactttttgtagagacgggctttctccatgttgcccaggctgatctcgagatcctgggctcaagcgat

SEQ ID NO: 43199 - DNA, 80 bp, synthetic construct
  misc_feature 1..80: note = Artificially Synthesized Probe
  source 1..80: mol_type = other DNA
ggcctgctggggggccccttcttgcctgttttaatgactccctcctctagggaactacaacaacaacagcttggatgaca

SEQ ID NO: 43200 - DNA, 80 bp, synthetic construct
  misc_feature 1..80: note = Artificially Synthesized Probe
  source 1..80: mol_type = other DNA
caggtcttgtcttgtctttttttttcttttcttttctttcctttcctttccttctcttccctttcttccttcctttcttc

SEQ ID NO: 43201 - DNA, 80 bp, synthetic construct
  misc_feature 1..80: note = Artificially Synthesized Probe
  source 1..80: mol_type = other DNA
ggcctcccaagtagttgggatgacaggcataagccaccacgcctggccgttttttcttttttcttgttttttagagacaa

SEQ ID NO: 43202 - DNA, 80 bp, synthetic construct
  misc_feature 1..80: note = Artificially Synthesized Probe
  source 1..80: mol_type = other DNA
gggttttgtttgtttgttttgtttatattctctgttacccaggttggagtgcaatggcacaatcatagctcatcctcctg

SEQ ID NO: 43203 - DNA, 80 bp, synthetic construct
  misc_feature 1..80: note = Artificially Synthesized Probe
  source 1..80: mol_type = other DNA
aacaaaacaaaacaaaaagttctggcagtagatggtggtaatggcagcacgacaatgtgactgtacttagtgctgttgaa

SEQ ID NO: 43204 - DNA, 80 bp, synthetic construct
  misc_feature 1..80: note = Artificially Synthesized Probe
  source 1..80: mol_type = other DNA
tcccaaagtgctgggattacatgtgcgagctaccgctcctggccactactaggagcttttgatgccccaaggtttggggg

SEQ ID NO: 43205 - DNA, 80 bp, synthetic construct
  misc_feature 1..80: note = Artificially Synthesized Probe
  source 1..80: mol_type = other DNA
gtctctaaataaataaatcttttcctggaggccaggcatggtggctcatgcctgtaatcccagtggtttgggaagctgaa

SEQ ID NO: 43206 - DNA, 80 bp, synthetic construct
  misc_feature 1..80: note = Artificially Synthesized Probe
  source 1..80: mol_type = other DNA
cctcccaggtgtgggagtgtgtcagctcccaggggagtcccactacgtgagctttgatggtagtaaccattctatcccgg

SEQ ID NO: 43207 - DNA, 80 bp, synthetic construct
  misc_feature 1..80: note = Artificially Synthesized Probe
  source 1..80: mol_type = other DNA
tgtttccaggaaaaaacaggaaaaaccattctgcccgggcatggtggctcatgcctgtaatctcagcactctgggaggcc

SEQ ID NO: 43208 - DNA, 80 bp, synthetic construct
  misc_feature 1..80: note = Artificially Synthesized Probe
  source 1..80: mol_type = other DNA
ctgacctcgtgatccacccgcctcggcctcccaaagtgctgggattacaggcgtgagccaccgcgcccggcccctctcct

SEQ ID NO: 43209 - DNA, 80 bp, synthetic construct
  misc_feature 1..80: note = Artificially Synthesized Probe
  source 1..80: mol_type = other DNA
ttctggggcgatgtgtgtaattgatccatctcaaggctgctagaacccacttgaggaaatgtgaaagcttcctttcctcg

SEQ ID NO: 43210 - DNA, 80 bp, synthetic construct
  misc_feature 1..80: note = Artificially Synthesized Probe
  source 1..80: mol_type = other DNA
cttgccaacatggtgaaacctcgtctctattaaaaatacaaaaactagccggtcatggtggcgggtgcctgtaatcccag

SEQ ID NO: 43211 - DNA, 80 bp, synthetic construct
  misc_feature 1..80: note = Artificially Synthesized Probe
  source 1..80: mol_type = other DNA
tctctgcttccctgagagctccctcactctccttcctgttcgttcctgactaactcagccctcattgtttctttgacaag

SEQ ID NO: 43212 - DNA, 80 bp, synthetic construct
  misc_feature 1..80: note = Artificially Synthesized Probe
  source 1..80: mol_type = other DNA
ctcaccccatgggcctggttcatgtctcagtatttttcccaagaccacttatttatgcatatataaacaaattcaaattt

SEQ ID NO: 43213 - DNA, 80 bp, synthetic construct
  misc_feature 1..80: note = Artificially Synthesized Probe
  source 1..80: mol_type = other DNA
tgggcatcactgtgggtccagtgtgaccagatcctctgatttttttttttgaaagaagctataagcctgagtttttattt

SEQ ID NO: 43214 - DNA, 80 bp, synthetic construct
  misc_feature 1..80: note = Artificially Synthesized Probe
  source 1..80: mol_type = other DNA
actttgtttttgtttttctccagaaggctagccagctgttccaatattattaaatgactagtctgtctttgcgcagggac

SEQ ID NO: 43215 - DNA, 80 bp, synthetic construct
  misc_feature 1..80: note = Artificially Synthesized Probe
  source 1..80: mol_type = other DNA
tcctggcttttctggtttgcttatgtcttcagctcaactttgaaatcatcttgtcctattaaaagcacacacatatataa

SEQ ID NO: 43216 - DNA, 80 bp, synthetic construct
  misc_feature 1..80: note = Artificially Synthesized Probe
  source 1..80: mol_type = other DNA
tgtttgctgaatgaataacaaaagaacaaaaaaagctccccaagccttgttggtcatccacccatagcttggtttgtaca

SEQ ID NO: 43217 - DNA, 80 bp, synthetic construct
  misc_feature 1..80: note = Artificially Synthesized Probe
  source 1..80: mol_type = other DNA
taaaatgggttcagtagtacctcctgcacaacatatgtaagtcaccaagcacaaacacagtgcctttttttttttttttt

SEQ ID NO: 43218 - DNA, 80 bp, synthetic construct
  misc_feature 1..80: note = Artificially Synthesized Probe
  source 1..80: mol_type = other DNA
gcaaaaagaggggactggtcaaggagatcctccaaagtttttcttttcttgtttgtttgttttttgagatagggtcttgc

SEQ ID NO: 43219 - DNA, 80 bp, synthetic construct
  misc_feature 1..80: note = Artificially Synthesized Probe
  source 1..80: mol_type = other DNA
aaataataataaagggcctctaattgaatgtcagtaggtattgaaaaaaaaaagtctaggtaccgggcttggtggcttat

SEQ ID NO: 43220 - DNA, 80 bp, synthetic construct
  misc_feature 1..80: note = Artificially Synthesized Probe
  source 1..80: mol_type = other DNA
ccgttacctcacatttgacggcttcagctaccgcttgcaaggccgcatgacctatgttctgatcaagactgtggacgtac

SEQ ID NO: 43221 - DNA, 80 bp, synthetic construct
  misc_feature 1..80: note = Artificially Synthesized Probe
  source 1..80: mol_type = other DNA
acatatggagatgactgggaaaagtgaagcccagccaggaaatggcagcaggtcaggaggattcagccctgtctgtggct

SEQ ID NO: 43222 - DNA, 80 bp, synthetic construct
  misc_feature 1..80: note = Artificially Synthesized Probe
  source 1..80: mol_type = other DNA
aagatcccatctctataaaaaataaaaataaaaaattagctggatgtggtggtgcacacctgtaatcccagctactggaa

SEQ ID NO: 43223 - DNA, 80 bp, synthetic construct
  misc_feature 1..80: note = Artificially Synthesized Probe
  source 1..80: mol_type = other DNA
ctgacccagaacctcaacacctttggcaacagctgggaggtgaagaccgaggacgcactcctgcgcttccccaggtgcac

SEQ ID NO: 43224 - DNA, 80 bp, synthetic construct
  misc_feature 1..80: note = Artificially Synthesized Probe
  source 1..80: mol_type = other DNA
gagctgggcctccgcacgggcctccaagtgtccgaatgtagcccggagcagctggcgagcaacagcacccaggcctgtag

SEQ ID NO: 43225 - DNA, 80 bp, synthetic construct
  misc_feature 1..80: note = Artificially Synthesized Probe
  source 1..80: mol_type = other DNA
tcttagtcccatcatccctcgaatttctgccttagtcccaggtccaagtcagcacaaccggcagcctggctccttctctg

SEQ ID NO: 43226 - DNA, 80 bp, synthetic construct
  misc_feature 1..80: note = Artificially Synthesized Probe
  source 1..80: mol_type = other DNA
gaccatgactgtccccgcagccatggagtgtccagcaggtaccatatatcagagctgtatgacaccctgcccagcatcct

SEQ ID NO: 43227 - DNA, 80 bp, synthetic construct
  misc_feature 1..80: note = Artificially Synthesized Probe
  source 1..80: mol_type = other DNA
cctgatggttagcacagcactcctaatttatacataacaaacatggagttcagagaggttaagcagtttcctgctgggcg

SEQ ID NO: 43228 - DNA, 80 bp, synthetic construct
  misc_feature 1..80: note = Artificially Synthesized Probe
  source 1..80: mol_type = other DNA
atagtaggaattataatataatccctagaaattcgcaggacaagcatcctcaaaaaaccagtcctggccgggaatggtgg

SEQ ID NO: 43229 - DNA, 80 bp, synthetic construct
  misc_feature 1..80: note = Artificially Synthesized Probe
  source 1..80: mol_type = other DNA
attcccatgggcttctgggccagtggttctccagctttatcttgcctaagattgaagacggggtaacttgtgtacatgta

SEQ ID NO: 43230 - DNA, 80 bp, synthetic construct
  misc_feature 1..80: note = Artificially Synthesized Probe
  source 1..80: mol_type = other DNA
gagtccctggaggtgagaacctcctggaggaagaagcagacacacctagagatttagagagatgaggtcccctggggtag

SEQ ID NO: 43231 - DNA, 80 bp, synthetic construct
  misc_feature 1..80: note = Artificially Synthesized Probe
  source 1..80: mol_type = other DNA
tgcgtctggctactaccagaccgcgggttaggggcttcatctctctgcgttctcagttgtgggaggccttggtgattcgg

SEQ ID NO: 43232 - DNA, 80 bp, synthetic construct
  misc_feature 1..80: note = Artificially Synthesized Probe
  source 1..80: mol_type = other DNA
tggtgtcgttagtgagttgttggacagcccgttggggtcggagcattgactggtgttgagcaaactcctcacgtttcctg

SEQ ID NO: 43233 - DNA, 80 bp, synthetic construct
  misc_feature 1..80: note = Artificially Synthesized Probe
  source 1..80: mol_type = other DNA
atgttatacacaaagtgcccaccaggcttcgttttagagaagaaccttctttctcaggattccagtcacaacccacagtt

SEQ ID NO: 43234 - DNA, 80 bp, synthetic construct
  misc_feature 1..80: note = Artificially Synthesized Probe
  source 1..80: mol_type = other DNA
taaaccaataagaatttctgacagctttctatcagttccgtctgcctttctttttgcctttaaaaatatacttgtaactg

SEQ ID NO: 43235 - DNA, 80 bp, synthetic construct
  misc_feature 1..80: note = Artificially Synthesized Probe
  source 1..80: mol_type = other DNA
ctccagtctcctctccagagctggtgcccacaattttctgaaacccaaaagccaataaatagggaaaagctatatacttt

SEQ ID NO: 43236 - DNA, 80 bp, synthetic construct
  misc_feature 1..80: note = Artificially Synthesized Probe
  source 1..80: mol_type = other DNA
gctgtgttctgcccacagatcctgtccattgttctgggtgaaaagtccttatttattttatttttgattgttgttgtccc

SEQ ID NO: 43237 - DNA, 80 bp, synthetic construct
  misc_feature 1..80: note = Artificially Synthesized Probe
  source 1..80: mol_type = other DNA
aaaaaaaaaagaactatgtcccttgatatatttgtattttcaggaactcttaacattcagggatgtggccatagaattct

SEQ ID NO: 43238 - DNA, 80 bp, synthetic construct
  misc_feature 1..80: note = Artificially Synthesized Probe
  source 1..80: mol_type = other DNA
acaggcaaggggaccaaaggtcaagaaggaagccaggccttaaaatgtggtttggggccgggtgcagtggctcatgcctg

SEQ ID NO: 43239 - DNA, 80 bp, synthetic construct
  misc_feature 1..80: note = Artificially Synthesized Probe
  source 1..80: mol_type = other DNA
ttagctgggcgtggtggtgcattcctgtaatcccatctacttgggaggctgaggcaggagaattgcttgaacccaggaga

SEQ ID NO: 43240 - DNA, 80 bp, synthetic construct
  misc_feature 1..80: note = Artificially Synthesized Probe
  source 1..80: mol_type = other DNA
gctctctgcttctatgagtttacgcttttagatttcctatctaactgagaaaatttagtttctttgtctttccgtgtttg

SEQ ID NO: 43241 - DNA, 80 bp, synthetic construct
  misc_feature 1..80: note = Artificially Synthesized Probe
  source 1..80: mol_type = other DNA
gtgagccaaggagcccggccgcgcccagcctagttttattctttactgtatttttgtaagtttatcaatttgcatctcac

SEQ ID NO: 43242 - DNA, 80 bp, synthetic construct
  misc_feature 1..80: note = Artificially Synthesized Probe
  source 1..80: mol_type = other DNA
cctgtctctactaaaaatatacaaaaactagctaggggtggtagtgggcgcttgtaatcccagctactcgggaagctgag

SEQ ID NO: 43243 - DNA, 80 bp, synthetic construct
  misc_feature 1..80: note = Artificially Synthesized Probe
  source 1..80: mol_type = other DNA
ttgtctaattgttttgatacaaacttccagtcacatgttaagatagaagctgtggccctggaggcaggcctgcaagtctt

SEQ ID NO: 43244 - DNA, 80 bp, synthetic construct
  misc_feature 1..80: note = Artificially Synthesized Probe
  source 1..80: mol_type = other DNA
cacgtctggactgtagctgagattgaatttgagagaggttacagaactgcttcagaatcctcagtaagaccaagctcagt

SEQ ID NO: 43245 - DNA, 80 bp, synthetic construct
  misc_feature 1..80: note = Artificially Synthesized Probe
  source 1..80: mol_type = other DNA
ttttttaaaagcatgtggcacctcccctctcactcttgtcttgctcctgttcccactgtgtgagatgactcactctccct

SEQ ID NO: 43246 - DNA, 80 bp, synthetic construct
  misc_feature 1..80: note = Artificially Synthesized Probe
  source 1..80: mol_type = other DNA
gtttattctaaggagtattgcagtggggaaagcatcaagcataagacctgaagtcatctccaaaatgaggcagaaaaagg

SEQ ID NO: 43247 - DNA, 80 bp, synthetic construct
  misc_feature 1..80: note = Artificially Synthesized Probe
  source 1..80: mol_type = other DNA
cccagtttgtgttggaggattggttggtgttcagcaaactccatatatttggtgttggaataaagataatcaggctggat

SEQ ID NO: 43248 - DNA, 80 bp, synthetic construct
  misc_feature 1..80: note = Artificially Synthesized Probe
  source 1..80: mol_type = other DNA
agcatgagccaccactccccgctgagagttttacttcttttgcacacaagttgtcacagttaggtgtaatgtgattctac

SEQ ID NO: 43249 - DNA, 80 bp, synthetic construct
  misc_feature 1..80: note = Artificially Synthesized Probe
  source 1..80: mol_type = other DNA
tatgatttcagtctgtttaaaaatgaaaagacttgtttatttttgttgtgggccagatttatgacaggtcttggagagtg

SEQ ID NO: 43250 - DNA, 80 bp, synthetic construct
  misc_feature 1..80: note = Artificially Synthesized Probe
  source 1..80: mol_type = other DNA
ctcatgagaatcacatttccacatcacaacatgaccaaagtcttgaggatgatggaaggtgtacaccagagctcactttt

SEQ ID NO: 43251 - DNA, 80 bp, synthetic construct
  misc_feature 1..80: note = Artificially Synthesized Probe
  source 1..80: mol_type = other DNA
gaccatttagtggtttctgttttttaattccttcatgctgtcatcttttgtgttttcttgaatttttgttttgtttttgt

SEQ ID NO: 43252 - DNA, 80 bp, synthetic construct
  misc_feature 1..80: note = Artificially Synthesized Probe
  source 1..80: mol_type = other DNA
ctctgttgcccaggctggagtgcagtggcacgatcttggctcactgcagcttgcgcctcccggattcaagcaattctcta

SEQ ID NO: 43253 - DNA, 80 bp, synthetic construct
  misc_feature 1..80: note = Artificially Synthesized Probe
  source 1..80: mol_type = other DNA
ttattgttagttgttcctggagcatttttagtttctttttgtgctgttaggtttgcctgatccttcataatctgtgaagc

SEQ ID NO: 43254 - DNA, 80 bp, synthetic construct
  misc_feature 1..80: note = Artificially Synthesized Probe
  source 1..80: mol_type = other DNA
catgcctacagggacacatgtagctgtgcttttgggcaggtcacaggtcaggaaaaactcctcctggattttggttgcat

SEQ ID NO: 43255 - DNA, 80 bp, synthetic construct
  misc_feature 1..80: note = Artificially Synthesized Probe
  source 1..80: mol_type = other DNA
gtatttgcctgtataaatattgacctactttgtttataaattactcattttcttgggtagtcatcagtatttccttgtgt

SEQ ID NO: 43256 - DNA, 80 bp, synthetic construct
  misc_feature 1..80: note = Artificially Synthesized Probe
  source 1..80: mol_type = other DNA
gatggacatttgcgttggttccaagtctttgctattgtgaatagtgccgcagtaaacatacatgtgcatgtgtctttata

SEQ ID NO: 43257 - DNA, 80 bp, synthetic construct
  misc_feature 1..80: note = Artificially Synthesized Probe
  source 1..80: mol_type = other DNA
ttttcatgatattgattcttcctatccatgagcatggaatgttgttccatttgtttgcgtcctcttttatttcattgagc

SEQ ID NO: 43258 - DNA, 80 bp, synthetic construct
  misc_feature 1..80: note = Artificially Synthesized Probe
  source 1..80: mol_type = other DNA
agtgagccaagatcgtgccactgtactccagcctgcacgacacagtgagactctgtctccaaaaaaaaaaaaaggcgggg

SEQ ID NO: 43259 - DNA, 80 bp, synthetic construct
  misc_feature 1..80: note = Artificially Synthesized Probe
  source 1..80: mol_type = other DNA
tctgctgccttttgttcagctatgccctccccccagaggtggaatctacagaggcaactggccttgttgagatgcagtgg

SEQ ID NO: 43260 - DNA, 80 bp, synthetic construct
  misc_feature 1..80: note = Artificially Synthesized Probe
  source 1..80: mol_type = other DNA
ttgctgtgcaaaacatttttagtttgttgtaatcccatttgcataatgttacttcttttgcctgtgcttttgaggtctta

SEQ ID NO: 43261 - DNA, 80 bp, synthetic construct
  misc_feature 1..80: note = Artificially Synthesized Probe
  source 1..80: mol_type = other DNA
ggcgtgagccaccacacccagcattatcaatgttttataattatcagtgtagagagtgttcaccttttcaattcggtttg

SEQ ID NO: 43262 - DNA, 80 bp, synthetic construct
  misc_feature 1..80: note = Artificially Synthesized Probe
  source 1..80: mol_type = other DNA
tgctgagattacaccgcgcccagccaaaactttacaatcttaaatactgtttttttccaaagtttgttgtcataatttaa

SEQ ID NO: 43263 - DNA, 80 bp, synthetic construct
  misc_feature 1..80: note = Artificially Synthesized Probe
  source 1..80: mol_type = other DNA
gttcatatttttgccggattttattgatttaggtgttcaccttcatactcataccaaattgctttaattctttagctttg

SEQ ID NO: 43264 - DNA, 80 bp, synthetic construct
  misc_feature 1..80: note = Artificially Synthesized Probe
  source 1..80: mol_type = other DNA
ctttttctgtcttcctgtttgtcttttagatttttgtgttgataggactttacttcttatacttttgtgtatctatacct

SEQ ID NO: 43265 - DNA, 80 bp, synthetic construct
  misc_feature 1..80: note = Artificially Synthesized Probe
  source 1..80: mol_type = other DNA
atcgcaactttctcttgtctgaaaaaatgttgacagattcacttgttatcttataagagcatacttacaaatcacacatc

SEQ ID NO: 43266 - DNA, 80 bp, synthetic construct
  misc_feature 1..80: note = Artificially Synthesized Probe
  source 1..80: mol_type = other DNA
ggattacaggcatgagccaccatgcctcaccttttgtgataatttgtgtgtgtgtgtgtgtgtcagagtctcgctgtgtc

SEQ ID NO: 43267 - DNA, 80 bp, synthetic construct
  misc_feature 1..80: note = Artificially Synthesized Probe
  source 1..80: mol_type = other DNA
ctatgtggctcttggcattttgcttacctgaggcattgcatacaattaactcatttatagatttcacagaaaggtgtctt

SEQ ID NO: 43268 - DNA, 80 bp, synthetic construct
  misc_feature 1..80: note = Artificially Synthesized Probe
  source 1..80: mol_type = other DNA
atactggagagaaaccttttacttgtgaagaatgtggcagcatctttaccacatcctcacactttgctaagcataaaata

SEQ ID NO: 43269 - DNA, 80 bp, synthetic construct
  misc_feature 1..80: note = Artificially Synthesized Probe
  source 1..80: mol_type = other DNA
tgtaacaaaacctttaaacagccctcaccggtgaataaacataagaaaaatcatgctggagggaagccctacacatgtgg

SEQ ID NO: 43270 - DNA, 80 bp, synthetic construct
  misc_feature 1..80: note = Artificially Synthesized Probe
  source 1..80: mol_type = other DNA
gtgaagaatgtggcagtctttaaatcttcctcagtcttttctaatcataagataattcacactgaagagaaactgcaaac

SEQ ID NO: 43271 - DNA, 80 bp, synthetic construct
  misc_feature 1..80: note = Artificially Synthesized Probe
  source 1..80: mol_type = other DNA
atttcatactgtttcaacattcctgtttatgtgaaagcatgtgatgaattgttgctgcatcagagataagagagattctt

SEQ ID NO: 43272 - DNA, 80 bp, synthetic construct
  misc_feature 1..80: note = Artificially Synthesized Probe
  source 1..80: mol_type = other DNA
tggattgtcgttgagaatctccccatacaaactccttgtttttatttgtctggtgctcatgctagagctataatttcttt

SEQ ID NO: 43273 - DNA, 80 bp, synthetic construct
  misc_feature 1..80: note = Artificially Synthesized Probe
  source 1..80: mol_type = other DNA
cgtggactttaggttaactggggtgtttgaggttatttataggttatcagtgcaacatttagatcacttgagataagagt

SEQ ID NO: 43274 - DNA, 80 bp, synthetic construct
  misc_feature 1..80: note = Artificially Synthesized Probe
  source 1..80: mol_type = other DNA
ttttactcacctaactttatccaagtccttggtcaccttctctggaaaaaaatttgaagattatggcagctgttgaatcc

SEQ ID NO: 43275 - DNA, 80 bp, synthetic construct
  misc_feature 1..80: note = Artificially Synthesized Probe
  source 1..80: mol_type = other DNA
cactgcgcccagcctctatggttattatattacaaaaacagcacaaaaactatatattttttataatactcaagttgttt

SEQ ID NO: 43276 - DNA, 80 bp, synthetic construct
  misc_feature 1..80: note = Artificially Synthesized Probe
  source 1..80: mol_type = other DNA
tatttctgtattaaagcatgtattggaattccgtatatacatgttttagtaatagttgatttctaccaaatgctaaccat

SEQ ID NO: 43277 - DNA, 80 bp, synthetic construct
  misc_feature 1..80: note = Artificially Synthesized Probe
  source 1..80: mol_type = other DNA
tgactctattagtttagtttcctttgtgcctgtttctcagttttgcctaaatgctaccaattatcttacactggctcccc

SEQ ID NO: 43278 - DNA, 80 bp, synthetic construct
  misc_feature 1..80: note = Artificially Synthesized Probe
  source 1..80: mol_type = other DNA
atttctatgtgtgctctaggcacttgccctatagctgctcctaaatgtggggtcttagaaaacatcttgtcccttcgaag

SEQ ID NO: 43279 - DNA, 80 bp, synthetic construct
  misc_feature 1..80: note = Artificially Synthesized Probe
  source 1..80: mol_type = other DNA
ttcatgtccttggaaatggcttttatagtcgttcctatcaagagacagattctgtttcccaaaccttgaacttctcttga

SEQ ID NO: 43280 - DNA, 80 bp, synthetic construct
  misc_feature 1..80: note = Artificially Synthesized Probe
  source 1..80: mol_type = other DNA
cttccttctggtaacagaagtgcaggtatatgtggatgcatgtgattggtacttaaactcacacagtgccccataccaca

SEQ ID NO: 43281 - DNA, 80 bp, synthetic construct
  misc_feature 1..80: note = Artificially Synthesized Probe
  source 1..80: mol_type = other DNA
actcagccccatttctggcaacctgctttcatgtcccctttctgctgagagctttccttttgcttaataaatcctattct

SEQ ID NO: 43282 - DNA, 80 bp, synthetic construct
  misc_feature 1..80: note = Artificially Synthesized Probe
  source 1..80: mol_type = other DNA
ccatttatttcattggggagttttggaataggacatcccacatccgtggacacacatgtagaatacttttataagtaatt

SEQ ID NO: 43283 - DNA, 80 bp, synthetic construct
  misc_feature 1..80: note = Artificially Synthesized Probe
  source 1..80: mol_type = other DNA
cttgctttccaactctgatgactagtggaattaagtaatgcattcaggaaacatttaccgcatgcttgctttgtgccagc

SEQ ID NO: 43284 - DNA, 80 bp, synthetic construct
  misc_feature 1..80: note = Artificially Synthesized Probe
  source 1..80: mol_type = other DNA
actcactgggcaaagagataaagagcggttagggaatccagttttggatagaagacttccaagcgtcaaaaggtaatgtg

SEQ ID NO: 43285 - DNA, 80 bp, synthetic construct
  misc_feature 1..80: note = Artificially Synthesized Probe
  source 1..80: mol_type = other DNA
tgtggaatttaatggagtatgagtcatttggagcagaaaggaagtacaaaacatgtccctatacaatatatgcatacata

SEQ ID NO: 43286 - DNA, 80 bp, synthetic construct
  misc_feature 1..80: note = Artificially Synthesized Probe
  source 1..80: mol_type = other DNA
agctcctcttatgtccagtgtagtctgtgagttagtagagatccagaagggtaggataaacacattgccctggtcctgct

SEQ ID NO: 43287 - DNA, 80 bp, synthetic construct
  misc_feature 1..80: note = Artificially Synthesized Probe
  source 1..80: mol_type = other DNA
caacagtatcttctctctatgaagcagttctgacagtaaagcccaaccatgtaaggcaggccacgtaatcagtacctgaa

SEQ ID NO: 43288 - DNA, 80 bp, synthetic construct
  misc_feature 1..80: note = Artificially Synthesized Probe
  source 1..80: mol_type = other DNA
tttgaacattccataggcttagcttctaggatccttggcagaggataataaataaacacagaattcaatggaagtaacaa

SEQ ID NO: 43289 - DNA, 80 bp, synthetic construct
  misc_feature 1..80: note = Artificially Synthesized Probe
  source 1..80: mol_type = other DNA
acttcactatgaaatgcgtattatcttgtagcttttgtgtgagtgctaattggtggaatgtggataagtcttcatccagg

SEQ ID NO: 43290 - DNA, 80 bp, synthetic construct
  misc_feature 1..80: note = Artificially Synthesized Probe
  source 1..80: mol_type = other DNA
atatttttcaaaaaatatattttaaatatattttgagtagatacggggtcttgcccaggctgatctcgagctcctggact

SEQ ID NO: 43291 - DNA, 80 bp, synthetic construct
  misc_feature 1..80: note = Artificially Synthesized Probe
  source 1..80: mol_type = other DNA
tgtaagaggagattaagtaaaccttcccaggtttataccagactaaccttttccctagtactcggataatctagttcttt

SEQ ID NO: 43292 - DNA, 80 bp, synthetic construct
  misc_feature 1..80: note = Artificially Synthesized Probe
  source 1..80: mol_type = other DNA
ccttggtctctccagtctgtgatagtgttcttttagatttcttttttttttggaaacagagtcttgctctgtcactcagg

SEQ ID NO: 43293 - DNA, 80 bp, synthetic construct
  misc_feature 1..80: note = Artificially Synthesized Probe
  source 1..80: mol_type = other DNA
ttgagaaatgcctctaggtgatttcattgttgtgtgaacatcacagagtatacaaacctagatggtgcagcctgctacac

SEQ ID NO: 43294 - DNA, 80 bp, synthetic construct
  misc_feature 1..80: note = Artificially Synthesized Probe
  source 1..80: mol_type = other DNA
aaaacacatatgcctttattgtcccaaccggagcacattggaagaaacatattggatatatccttcacaggcttgtaagc

SEQ ID NO: 43295 - DNA, 80 bp, synthetic construct
  misc_feature 1..80: note = Artificially Synthesized Probe
  source 1..80: mol_type = other DNA
atatagaaggcaaaactatgaaactttcagaaggcaatgcaggacagtagttgtatgactctggtataggaaaggggtct

SEQ ID NO: 43296 - DNA, 80 bp, synthetic construct
  misc_feature 1..80: note = Artificially Synthesized Probe
  source 1..80: mol_type = other DNA
gtgaagtcccgtacagtagtgagattgagtgaatgttagctgcattcatcaccaaggataatacgcagctggaacataat

SEQ ID NO: 43297 - DNA, 80 bp, synthetic construct
  misc_feature 1..80: note = Artificially Synthesized Probe
  source 1..80: mol_type = other DNA
atgtctgagagagacagagggaagaaaacaaaaatcaaggcagaaatgggagtgtggaagaagactggtaaatgtttatt

SEQ ID NO: 43298 - DNA, 80 bp, synthetic construct
  misc_feature 1..80: note = Artificially Synthesized Probe
  source 1..80: mol_type = other DNA
cacatgtagtacttgtaggagatcccttatggggaaatacagaacataggtttcttaaacagatttgaggcactttagct

SEQ ID NO: 43299 - DNA, 80 bp, synthetic construct
  misc_feature 1..80: note = Artificially Synthesized Probe
  source 1..80: mol_type = other DNA
tatcacttcccacactctccttttcttcacctcagcactgtgtctggtaaatttgcattcagtggatattcgtttttttt

SEQ ID NO: 43300 - DNA, 80 bp, synthetic construct
  misc_feature 1..80: note = Artificially Synthesized Probe
  source 1..80: mol_type = other DNA
gttgtaagtgagggcattaaattcttgttgggttggttctagcactgtatccaaatctaaaaggaatggcagattatgga

SEQ ID NO: 43301 - DNA, 80 bp, synthetic construct
  misc_feature 1..80: note = Artificially Synthesized Probe
  source 1..80: mol_type = other DNA
gtacaaaaccagcccactccctccacccctgtacccgcattctgattgttgttttttcactttttatttggaagtgattt

SEQ ID NO: 43302 - DNA, 80 bp, synthetic construct
  misc_feature 1..80: note = Artificially Synthesized Probe
  source 1..80: mol_type = other DNA
cattgtgaccctttacccataaacactcagtctgtatcatctaagaatagggatttttctcttacgtgactgtggtgcta

SEQ ID NO: 43303 - DNA, 80 bp, synthetic construct
  misc_feature 1..80: note = Artificially Synthesized Probe
  source 1..80: mol_type = other DNA
tttaatgtgaggtccagcgaaccataggtaactttcttggtgcagatgagtgtttgaccaaatttgaatcccaagtgtct

SEQ ID NO: 43304 - DNA, 80 bp, synthetic construct
  misc_feature 1..80: note = Artificially Synthesized Probe
  source 1..80: mol_type = other DNA
tccagttggaatgaaaaccatggcttgcttactgaagcttaatgttctttttcaaaagtgttaaacattttcactgtaaa

SEQ ID NO: 43305 - DNA, 80 bp, synthetic construct
  misc_feature 1..80: note = Artificially Synthesized Probe
  source 1..80: mol_type = other DNA
gagatggctgtgctgattttgcaggccaaatttgatttgttgttttataaagctgttagtacatctgcatgaagagtgct

SEQ ID NO: 43306 - DNA, 80 bp, synthetic construct
  misc_feature 1..80: note = Artificially Synthesized Probe
  source 1..80: mol_type = other DNA
catcccctgaagcaataggtaattcctttaggagttacctattgctacataacaaatttggccaaaacatagttgcttaa

SEQ ID NO: 43307 - DNA, 80 bp, synthetic construct
  misc_feature 1..80: note = Artificially Synthesized Probe
  source 1..80: mol_type = other DNA
ttgtgcacatggggtttcgtgactacaactaatactaagctgcctttatgcatggacttgatggctctattaaatgaggt

SEQ ID NO: 43308 - DNA, 80 bp, synthetic construct
  misc_feature 1..80: note = Artificially Synthesized Probe
  source 1..80: mol_type = other DNA
tgtctgaatttgtgaatatgtctgaatgtgagtacgtgtgagtgtgtatctgaatgagtgtgtgggtgtgcaaatgcatg

SEQ ID NO: 43309 - DNA, 80 bp, synthetic construct
  misc_feature 1..80: note = Artificially Synthesized Probe
  source 1..80: mol_type = other DNA
tttagtctagatacttgccaggtcttctcaatcttgaaaccttactgtgggaagaaatctgaggctcattctacttctcc

SEQ ID NO: 43310 - DNA, 80 bp, synthetic construct
  misc_feature 1..80: note = Artificially Synthesized Probe
  source 1..80: mol_type = other DNA
gggagtatgattccttgctcacgtatactctgtagatcttagtttgcattgtgcacatgatcatgtatggccttgtattg

SEQ ID NO: 43311 - DNA, 80 bp, synthetic construct
  misc_feature 1..80: note = Artificially Synthesized Probe
  source 1..80: mol_type = other DNA
tagaatagtataatgaatccccatgtgcttgtcactcagctttaatcattatcacataacttcaccatgcccctctcctg

SEQ ID NO: 43312 - DNA, 80 bp, synthetic construct
  misc_feature 1..80: note = Artificially Synthesized Probe
  source 1..80: mol_type = other DNA
ctactcacacatgcagtaaaagcgtcaggctgagcccaggaggccagacctcccttcccccacagagcatattgcatggc

SEQ ID NO: 43313 - DNA, 80 bp, synthetic construct
  misc_feature 1..80: note = Artificially Synthesized Probe
  source 1..80: mol_type = other DNA
ttgcaaatgttgaatagcaaaccaatgctttatagaaaagagcatttctgtccccctcccctgctcttcttttttggtta

SEQ ID NO: 43314 - DNA, 80 bp, synthetic construct
  misc_feature 1..80: note = Artificially Synthesized Probe
  source 1..80: mol_type = other DNA
tgtgtgcaactatcaccacagttcattttaaaacactgttatcacctcagaaagaaacctcttaccctttagctatcatt

SEQ ID NO: 43315 - DNA, 80 bp, synthetic construct
  misc_feature 1..80: note = Artificially Synthesized Probe
  source 1..80: mol_type = other DNA
ggcttttgaagcatagtgtcttttgaagtttttaattttgatgaagtccaatttacttgtttttttctcgtattgttcgc

SEQ ID NO: 43316 - DNA, 80 bp, synthetic construct
  misc_feature 1..80: note = Artificially Synthesized Probe
  source 1..80: mol_type = other DNA
cagttgttttaaaattatgtttcttttacataggacttgggcttctgttagaggttaaggaggggaaggcctcacttcta

SEQ ID NO: 43317 - DNA, 80 bp, synthetic construct
  misc_feature 1..80: note = Artificially Synthesized Probe
  source 1..80: mol_type = other DNA
ctgatagtgttgttataggagaagacagaaataaacatgcttccaaacgcaggaaattagatgaggcagagccccttaaa

SEQ ID NO: 43318 - DNA, 80 bp, synthetic construct
  misc_feature 1..80: note = Artificially Synthesized Probe
  source 1..80: mol_type = other DNA
gtagaaagctagacaccttagtaacctcagagggtctcttagagaaattggaatctacaaaaaatacccttcaggcagca

SEQ ID NO: 43319 - DNA, 80 bp, synthetic construct
  misc_feature 1..80: note = Artificially Synthesized Probe
  source 1..80: mol_type = other DNA
gtataggtgcaaatgataaaaaagaagagtttgatgtttccggaaatggaaggattgaaggccatataggtgtgcaatta

SEQ ID NO: 43320 - DNA, 80 bp, synthetic construct
  misc_feature 1..80: note = Artificially Synthesized Probe
  source 1..80: mol_type = other DNA
gaaaaggcagtcttatctcaactctgctaatgtagaagctggttctgcagacatgtccaaaaacatcattatgcctgaag

SEQ ID NO: 43321 - DNA, 80 bp, synthetic construct
  misc_feature 1..80: note = Artificially Synthesized Probe
  source 1..80: mol_type = other DNA
ttttggtcgatttgactcctccataataagaataaagaaccctgaagatggtgagttgatagaccagtctgaagagggct

SEQ ID NO: 43322 - DNA, 80 bp, synthetic construct
  misc_feature 1..80: note = Artificially Synthesized Probe
  source 1..80: mol_type = other DNA
agctgacaagtttcttttaattttgtcaaaaagcctagtccctctgatgccttttaaaaactgctgtctgttggcggctt

SEQ ID NO: 43323 - DNA, 80 bp, synthetic construct
  misc_feature 1..80: note = Artificially Synthesized Probe
  source 1..80: mol_type = other DNA
gtccaaatgcttatttgtctgcactgtcagtatctctctcagtgccttgttgcagctttctttctgaaacgatacagttt

SEQ ID NO: 43324 - DNA, 80 bp, synthetic construct
  misc_feature 1..80: note = Artificially Synthesized Probe
  source 1..80: mol_type = other DNA
atcttgtgttggtcttatcaggaagtacatttttattgtgctttgaaacactaccaagagccctgttcctgaggacacaa

SEQ ID NO: 43325 - DNA, 80 bp, synthetic construct
  misc_feature 1..80: note = Artificially Synthesized Probe
  source 1..80: mol_type = other DNA
gtttgaatgtttagggaggattgtagaatgatggctctagtggttagatgttgggtaatatacaacttccttcattcctt

SEQ ID NO: 43326 - DNA, 80 bp, synthetic construct
  misc_feature 1..80: note = Artificially Synthesized Probe
  source 1..80: mol_type = other DNA
gctgtaagctgcagtctcaacctgcttttgacatttaaacatataaacctgactagatacaaccattcaggtgctaaata

SEQ ID NO: 43327 - DNA, 80 bp, synthetic construct
  misc_feature 1..80: note = Artificially Synthesized Probe
  source 1..80: mol_type = other DNA
tataccattgttttaatgtgagtaaattcaaagccggagaaatatgaggaaacaaggaggtggccacagagaaatgtatt

SEQ ID NO: 43328 - DNA, 80 bp, synthetic construct
  misc_feature 1..80: note = Artificially Synthesized Probe
  source 1..80: mol_type = other DNA
ttcttttgctgtactgcttcaatttttatcacagtagtagctctttggatccattggacttattctgtaaggaaagcaac

SEQ ID NO: 43329 - DNA, 80 bp, synthetic construct
  misc_feature 1..80: note = Artificially Synthesized Probe
  source 1..80: mol_type = other DNA
tatgagttataggaaaggagaaggccctgactccagtgaaaatttgctattaggtggcagtaagcagtttttctctcatt

SEQ ID NO: 43330 - DNA, 80 bp, synthetic construct
  misc_feature 1..80: note = Artificially Synthesized Probe
  source 1..80: mol_type = other DNA
gttcctgaacataagcagctcatgctgcatttcttcattagctttaattgctataaattttaccttttacaaaatcatgc

SEQ ID NO: 43331 - DNA, 80 bp, synthetic construct
  misc_feature 1..80: note = Artificially Synthesized Probe
  source 1..80: mol_type = other DNA
gtgatcgagagaggaattttatagaatataggtgtgtttatatttaggcacttgatggatagttaacatgaaaatctgtt

SEQ ID NO: 43332 - DNA, 80 bp, synthetic construct
  misc_feature 1..80: note = Artificially Synthesized Probe
  source 1..80: mol_type = other DNA
tttcagtaaacctaagaaatgataaccaagtttgatatgccattattgagaagcgcagaccctggtgtgcatgatttagg

SEQ ID NO: 43333 - DNA, 80 bp, synthetic construct
  misc_feature 1..80: note = Artificially Synthesized Probe
  source 1..80: mol_type = other DNA
gtacaacatgcagagtttcataaagcaaggaacacttgagagcttaatttatccaaatcaaagtctaaatgcagataaac

SEQ ID NO: 43334 - DNA, 80 bp, synthetic construct
  misc_feature 1..80: note = Artificially Synthesized Probe
  source 1..80: mol_type = other DNA
catggccagtaagtatgatcaacctataacaaaatagaaataaactaaatattatcatttcttggtgtagtagttgaaaa

SEQ ID NO: 43335 - DNA, 80 bp, synthetic construct
  misc_feature 1..80: note = Artificially Synthesized Probe
  source 1..80: mol_type = other DNA
tatatgccagcactgtgttagtctttagggttaaaaaggtcaaaacgacacctgcctcagatggagaaagcttaggtcaa

SEQ ID NO: 43336 - DNA, 80 bp, synthetic construct
  misc_feature 1..80: note = Artificially Synthesized Probe
  source 1..80: mol_type = other DNA
gtttccatacttgatcctctggatgggcaatttcagttgggacaggaaaccattaatttttaaaaagtatgtactgtgta

SEQ ID NO: 43337 - DNA, 80 bp, synthetic construct
  misc_feature 1..80: note = Artificially Synthesized Probe
  source 1..80: mol_type = other DNA
gtgatgaagatacacaagcaatttgggtattcattgtgaggcaactgttttctcttttccttaagatgatagaacatggg

SEQ ID NO: 43338 - DNA, 80 bp, synthetic construct
  misc_feature 1..80: note = Artificially Synthesized Probe
  source 1..80: mol_type = other DNA
gtgggccacgggaatattgtttgttaccccaaagaacacattatcttaaggtgtagaaaaaaatttactggctttatagt

SEQ ID NO: 43339 - DNA, 80 bp, synthetic construct
  misc_feature 1..80: note = Artificially Synthesized Probe
  source 1..80: mol_type = other DNA
tcaggctcagcaaagtggaaaaaaggaaagatttagtgggagtaaaaggttgaagaatgtaatttgtgcattcattctgc

SEQ ID NO: 43340 - DNA, 80 bp, synthetic construct
  misc_feature 1..80: note = Artificially Synthesized Probe
  source 1..80: mol_type = other DNA
cccccatgctgagaacttaaactaaggcagttagatgtaaaaatcatgaaggaccagcagagggcaatattatgttactc

SEQ ID NO: 43341 - DNA, 80 bp, synthetic construct
  misc_feature 1..80: note = Artificially Synthesized Probe
  source 1..80: mol_type = other DNA
ccattaaacctgccatttgccaactgaagttagtaatagtaacttaggtttaaacacctagaaaatgatgggccttttta

SEQ ID NO: 43342 - DNA, 80 bp, synthetic construct
  misc_feature 1..80: note = Artificially Synthesized Probe
  source 1..80: mol_type = other DNA
ttaccagtaggtatagttagtcctattagtctccctctaatctgattaaggcagtaaacatggcagcacctctggcattt

SEQ ID NO: 43343 - DNA, 80 bp, synthetic construct
  misc_feature 1..80: note = Artificially Synthesized Probe
  source 1..80: mol_type = other DNA
aaaatctgccttgcaactggactggtatctatccactagattatagaaatcacttgcacgcatagcatggatgataagta

SEQ ID NO: 43344 - DNA, 80 bp, synthetic construct
  misc_feature 1..80: note = Artificially Synthesized Probe
  source 1..80: mol_type = other DNA
aagacactaacatattaatgtgagggattttttggtgtgcagttcattttttgggggtatatgttagcgttcacatacat

SEQ ID NO: 43345 - DNA, 80 bp, synthetic construct
  misc_feature 1..80: note = Artificially Synthesized Probe
  source 1..80: mol_type = other DNA
gtttgtatctacagtggaaggcacagttttcttgatttagttcaagcccgtggaaactaaaattgagggtaatttcttga

SEQ ID NO: 43346 - DNA, 80 bp, synthetic construct
  misc_feature 1..80: note = Artificially Synthesized Probe
  source 1..80: mol_type = other DNA
aattcctccccatcctctccttcctccctgtcttctcagcctcttgctctctacttctccttttcctttcttcttcttct

SEQ ID NO: 43347 - DNA, 80 bp, synthetic construct
  misc_feature 1..80: note = Artificially Synthesized Probe
  source 1..80: mol_type = other DNA
tttttatattccatctagggacatgtgagtggacattggtattctcccccagatttacattctctgggtatttaaagctc

SEQ ID NO: 43348 - DNA, 80 bp, synthetic construct
  misc_feature 1..80: note = Artificially Synthesized Probe
  source 1..80: mol_type = other DNA
gacaccgggcaaaacaatgatgctttgaggacgtaattaaagatattgttcaaagaacaactttctgcatatttgaatta

SEQ ID NO: 43349 - DNA, 80 bp, synthetic construct
  misc_feature 1..80: note = Artificially Synthesized Probe
  source 1..80: mol_type = other DNA
gcacattattttaggagactgaaaaaaggcaactgaaagttaagaaacaagctgtctcaccacctcatgctattatctat

SEQ ID NO: 43350 - DNA, 80 bp, synthetic construct
  misc_feature 1..80: note = Artificially Synthesized Probe
  source 1..80: mol_type = other DNA
gtaaaaggccagcccccttttcgtggccgtatttgtttgaagtagttcttgatgggccctgcctcttgcatttcttctgt

SEQ ID NO: 43351 - DNA, 80 bp, synthetic construct
  misc_feature 1..80: note = Artificially Synthesized Probe
  source 1..80: mol_type = other DNA
tagaaggtgaaaagtattcaattgtcactctgtcagtcaatagagatgagaactgtctgcctaatggatttctttacata

SEQ ID NO: 43352 - DNA, 80 bp, synthetic construct
  misc_feature 1..80: note = Artificially Synthesized Probe
  source 1..80: mol_type = other DNA
ccgtaccaagaaggtgacaagatgctggaagaactcacatcagatgaagatctattgagagattttagagaggaccgaga

SEQ ID NO: 43353 - DNA, 80 bp, synthetic construct
  misc_feature 1..80: note = Artificially Synthesized Probe
  source 1..80: mol_type = other DNA
atggctgatttctaaaatagtgcttaataagttgaagaaatagccttaaaaatcctggtattggtgattgctttttcccc

SEQ ID NO: 43354 - DNA, 80 bp, synthetic construct
  misc_feature 1..80: note = Artificially Synthesized Probe
  source 1..80: mol_type = other DNA
ataattgtggagttactcagagttggtctggtgcttcttagtgttattagagatcattagccatctttctgccccactgc

SEQ ID NO: 43355 - DNA, 80 bp, synthetic construct
  misc_feature 1..80: note = Artificially Synthesized Probe
  source 1..80: mol_type = other DNA
aggttcctgggcactctgtgttcaggtagagaggaaaagaaagccacgtgggacttgtggtgacgaaagccttattccct

SEQ ID NO: 43356 - DNA, 80 bp, synthetic construct
  misc_feature 1..80: note = Artificially Synthesized Probe
  source 1..80: mol_type = other DNA
tgactgttggtggtcactcaaactgtgcttttgccattgccgatctttgactgcagaaactaaagtgcttttcatttgtg

SEQ ID NO: 43357 - DNA, 80 bp, synthetic construct
  misc_feature 1..80: note = Artificially Synthesized Probe
  source 1..80: mol_type = other DNA
agaaattcactgaagcagagtttaggagagtgcttaccttgttccttgcagttagcatctgtgttccttcctgtactttg

SEQ ID NO: 43358 - DNA, 80 bp, synthetic construct
  misc_feature 1..80: note = Artificially Synthesized Probe
  source 1..80: mol_type = other DNA
tagttctgagtgtttgatgtgtttaggatatatcattaaaaaaaacctaagtctctgttctcatgcgtgtcacgttctgg

SEQ ID NO: 43359 - DNA, 80 bp, synthetic construct
  misc_feature 1..80: note = Artificially Synthesized Probe
  source 1..80: mol_type = other DNA
aggcttagtgggatcttctcccacagcctaatttctgatgttctctgtagtctgacatgtagtctttattctgtcccagg

SEQ ID NO: 43360 - DNA, 80 bp, synthetic construct
  misc_feature 1..80: note = Artificially Synthesized Probe
  source 1..80: mol_type = other DNA
aggctggtctcagactcctgggcttaagcattcctttcatttctgcttcccagcttgctgggattacaggcgtgagccac

SEQ ID NO: 43361 - DNA, 80 bp, synthetic construct
  misc_feature 1..80: note = Artificially Synthesized Probe
  source 1..80: mol_type = other DNA
tgtcacatttagatcacccatgcatttctttgggaccatagcttgtcagtacgtatttattaaagggttagctttagtag

SEQ ID NO: 43362 - DNA, 80 bp, synthetic construct
  misc_feature 1..80: note = Artificially Synthesized Probe
  source 1..80: mol_type = other DNA
tttgatcacttttaatgaacctataatacctgcaataaaaaaatgaaaatatacagacatttaatttgtgctccctaccc

SEQ ID NO: 43363 - DNA, 80 bp, synthetic construct
  misc_feature 1..80: note = Artificially Synthesized Probe
  source 1..80: mol_type = other DNA
ttaatttaatcgcctctgcagaatcccttttgtgtgctgtgaggaagcgtattcacagactgtggatactgtgatgtgga

SEQ ID NO: 43364 - DNA, 80 bp, synthetic construct
  misc_feature 1..80: note = Artificially Synthesized Probe
  source 1..80: mol_type = other DNA
atcaggtccctacctctgtcatcctgtagctggtttacagcccactgttctctgaaaatatattaacacattaccaaata

SEQ ID NO: 43365 - DNA, 80 bp, synthetic construct
  misc_feature 1..80: note = Artificially Synthesized Probe
  source 1..80: mol_type = other DNA
cagagtattgtaagaggacgtgtaaaaaggagagaaagctttctgtcttttctgtgctgtctttccttttttgcctttta

SEQ ID NO: 43366 - DNA, 80 bp, synthetic construct
  misc_feature 1..80: note = Artificially Synthesized Probe
  source 1..80: mol_type = other DNA
caagctccgcctcccgggttcacgccattctcctgcctcaacctcccgagtagctgggactacaggcgcccaccaccgtg

SEQ ID NO: 43367 - DNA, 80 bp, synthetic construct
  misc_feature 1..80: note = Artificially Synthesized Probe
  source 1..80: mol_type = other DNA
catgtgcctgcacaccaggttaatttctgtattttttgtagacatggggtttcaccatgttggcagggccggtctcgaac

SEQ ID NO: 43368 - DNA, 80 bp, synthetic construct
  misc_feature 1..80: note = Artificially Synthesized Probe
  source 1..80: mol_type = other DNA
cagtgaggatttatgttaacttctgccaagtagctgggggtattagcagtttaggatcatctcaactgtattgcatatat

SEQ ID NO: 43369 - DNA, 80 bp, synthetic construct
  misc_feature 1..80: note = Artificially Synthesized Probe
  source 1..80: mol_type = other DNA
tcagcaagtgtatgcttctgtacggggtgaagtctgattctcatttgtgtcttcaatcactagagcagttgctggcatgt

SEQ ID NO: 43370 - DNA, 80 bp, synthetic construct
  misc_feature 1..80: note = Artificially Synthesized Probe
  source 1..80: mol_type = other DNA
aagcttttcagacaaaccattcagcatacatgtttttctcatttacattttcattcatgataagccagaaaatcaggctg

SEQ ID NO: 43371 - DNA, 80 bp, synthetic construct
  misc_feature 1..80: note = Artificially Synthesized Probe
  source 1..80: mol_type = other DNA
agccagaggaacccctaaggtaaagatgacagcacctctgccctctttattcattgttacatctgtttttcttgactgat

SEQ ID NO: 43372 - DNA, 80 bp, synthetic construct
  misc_feature 1..80: note = Artificially Synthesized Probe
  source 1..80: mol_type = other DNA
tttaaattctaaaatattcttcccaagttcattatgtctgggatggcaacattaatgttttctgacaaagatggaaaggg

SEQ ID NO: 43373 - DNA, 80 bp, synthetic construct
  misc_feature 1..80: note = Artificially Synthesized Probe
  source 1..80: mol_type = other DNA
taacatttgcttctgcctgttcattggttagctgttgttagtatgtccttgctaaactactggtttagctttctgaagat

SEQ ID NO: 43374 - DNA, 80 bp, synthetic construct
  misc_feature 1..80: note = Artificially Synthesized Probe
  source 1..80: mol_type = other DNA
tgatccttattgtctttgtatactaactcagtgcagaagcacttgtctattttgagctaaaccagacctcttgtaaaaag

SEQ ID NO: 43375 - DNA, 80 bp, synthetic construct
  misc_feature 1..80: note = Artificially Synthesized Probe
  source 1..80: mol_type = other DNA
tatcagaactcagcaggtggtattccttcttgtcatttttatggcctttggaggaaatgtgtttgactataaacctacac

SEQ ID NO: 43376 - DNA, 80 bp, synthetic construct
  misc_feature 1..80: note = Artificially Synthesized Probe
  source 1..80: mol_type = other DNA
ttgatctttttcaggcatgtgcaggccatgtcacttctgtgctcagcacattgttgtactgtgtgaaaagccaaagacct

SEQ ID NO: 43377 - DNA, 80 bp, synthetic construct
  misc_feature 1..80: note = Artificially Synthesized Probe
  source 1..80: mol_type = other DNA
aggtttttatccattcatgtatcagtgaaactttccacacttctgactattctctgtggcactgccaggcccaggtctgt

SEQ ID NO: 43378 - DNA, 80 bp, synthetic construct
  misc_feature 1..80: note = Artificially Synthesized Probe
  source 1..80: mol_type = other DNA
gtggcgggaaaaggactccttgaaaaagcctctgagagaagagatttactatattatcctttaatagttttggaaatcag

SEQ ID NO: 43379 - DNA, 80 bp, synthetic construct
  misc_feature 1..80: note = Artificially Synthesized Probe
  source 1..80: mol_type = other DNA
atagttatgctctcagcagtcattgttttccttaaagggtgattgcctttgagaacagattccctagcagcttacatctc

SEQ ID NO: 43380 - DNA, 80 bp, synthetic construct
  misc_feature 1..80: note = Artificially Synthesized Probe
  source 1..80: mol_type = other DNA
actttgacctcccaaagtgctgggattcacagacgtgagccactgtgctggcctatatctttctattttatttaggtcct

SEQ ID NO: 43381 - DNA, 80 bp, synthetic construct
  misc_feature 1..80: note = Artificially Synthesized Probe
  source 1..80: mol_type = other DNA
aggaggtacctccgaaaacctaacctgggtatgtgaattttttgcttagtttacctctaaaaaaaagctaaattgccaaa

SEQ ID NO: 43382 - DNA, 80 bp, synthetic construct
  misc_feature 1..80: note = Artificially Synthesized Probe
  source 1..80: mol_type = other DNA
atgcttcaaaagaagctgaactttttaattgaaattaggaaaggccgagcgcagtggctcacgcctgtaatcccagcact

SEQ ID NO: 43383 - DNA, 80 bp, synthetic construct
  misc_feature 1..80: note = Artificially Synthesized Probe
  source 1..80: mol_type = other DNA
atacatatatatatgcctgatgatggccgtatctcttcttcagtcaaggccattagcatggggcctccattcagtctagt

SEQ ID NO: 43384 - DNA, 80 bp, synthetic construct
  misc_feature 1..80: note = Artificially Synthesized Probe
  source 1..80: mol_type = other DNA
gagtgccctgtactgtggtgcacgtcagttcactgttggcttttaacagtttgttacaattttagctgatttcttcctat

SEQ ID NO: 43385 - DNA, 80 bp, synthetic construct
  misc_feature 1..80: note = Artificially Synthesized Probe
  source 1..80: mol_type = other DNA
agtatttcgaagtaccttggtttgctttcttctgtgttcatcgtgcttgaggtttgttaaatttctctgatctgtgggtg

SEQ ID NO: 43386 - DNA, 80 bp, synthetic construct
  misc_feature 1..80: note = Artificially Synthesized Probe
  source 1..80: mol_type = other DNA
tgctgtattttgtccagttttctggtggcttacagtgggccctagttctcatgactggaagcttacctgtatactttgta

SEQ ID NO: 43387 - DNA, 80 bp, synthetic construct
  misc_feature 1..80: note = Artificially Synthesized Probe
  source 1..80: mol_type = other DNA
ctttccattccttacacctaacaaccacctatgtggtagaaggaatgtctgatttggaactaggatcagtagttatctag

SEQ ID NO: 43388 - DNA, 80 bp, synthetic construct
  misc_feature 1..80: note = Artificially Synthesized Probe
  source 1..80: mol_type = other DNA
agatgcctccacggaacttttcttagaggttctgtttcccaacaaatatatcatagggttataatgtgtgtgtgtgtgtg

SEQ ID NO: 43389 - DNA, 80 bp, synthetic construct
  misc_feature 1..80: note = Artificially Synthesized Probe
  source 1..80: mol_type = other DNA
cttcttgattcttctccattcacattagctttttcattttctattaggtgggcaatgttgtatttcctcctgtgctccta

SEQ ID NO: 43390 - DNA, 80 bp, synthetic construct
  misc_feature 1..80: note = Artificially Synthesized Probe
  source 1..80: mol_type = other DNA
catttattcattgtaatgtgcaggtcaacagtgcagagatgcattcaattgacatcatcctaaaagcgatctattatttt

SEQ ID NO: 43391 - DNA, 80 bp, synthetic construct
  misc_feature 1..80: note = Artificially Synthesized Probe
  source 1..80: mol_type = other DNA
atttcattgcaaagataagatctgctatggacacacttcagtgcaaagtgagcagatatgcagggatgcctccaggaaac

SEQ ID NO: 43392 - DNA, 80 bp, synthetic construct
  misc_feature 1..80: note = Artificially Synthesized Probe
  source 1..80: mol_type = other DNA
gtgagagttggttctctggagacaaaattatatgcacatgtttctcttagtaaattaaagttgcccctaaaatgtgagtt

SEQ ID NO: 43393 - DNA, 80 bp, synthetic construct
  misc_feature 1..80: note = Artificially Synthesized Probe
  source 1..80: mol_type = other DNA
agattcatctgtcaaacattggagcgtatttattagtattccggtggtaccagacatttagtgggagctctggactgaat

SEQ ID NO: 43394 - DNA, 80 bp, synthetic construct
  misc_feature 1..80: note = Artificially Synthesized Probe
  source 1..80: mol_type = other DNA
caccccttcccccaacatgcagtttgtgcattgcattgtaaagagagactattttacagattttaggaaatcgatttcat

SEQ ID NO: 43395 - DNA, 80 bp, synthetic construct
  misc_feature 1..80: note = Artificially Synthesized Probe
  source 1..80: mol_type = other DNA
accctgatggtataggtttccatagaatttggggctcttcttccaggagcataacttacacatgcctggtctagtggttg

SEQ ID NO: 43396 - DNA, 80 bp, synthetic construct
  misc_feature 1..80: note = Artificially Synthesized Probe
  source 1..80: mol_type = other DNA
ggtaatgtttttaatacatcatcaacaagttctattagtgtgttctgccctattagcaaatgatctactaacagaaatcc

SEQ ID NO: 43397 - DNA, 80 bp, synthetic construct
  misc_feature 1..80: note = Artificially Synthesized Probe
  source 1..80: mol_type = other DNA
agtagcagataacacccatactatcatgtattgagccttggctcctaacagcaaagaaggcagaaatatgtctcattaat

SEQ ID NO: 43398 - DNA, 80 bp, synthetic construct
  misc_feature 1..80: note = Artificially Synthesized Probe
  source 1..80: mol_type = other DNA
acaatatgaaaattaaaagaaacaggttaaataaggtcttggtgtgagatgtgaactttcttttgcaggtgagaacaaac

SEQ ID NO: 43399 - DNA, 80 bp, synthetic construct
  misc_feature 1..80: note = Artificially Synthesized Probe
  source 1..80: mol_type = other DNA
tggatttggtcagatgggaataatgtgtattaccccatgaatttggatgctcattcgtttgttgttcattcactcaacat

SEQ ID NO: 43400 - DNA, 80 bp, synthetic construct
  misc_feature 1..80: note = Artificially Synthesized Probe
  source 1..80: mol_type = other DNA
aagtacaggctgagcatcccttatccaaatgcttggaacagaactgtttcagacttcaaattttttttggattttgaggt

SEQ ID NO: 43401 - DNA, 80 bp, synthetic construct
  misc_feature 1..80: note = Artificially Synthesized Probe
  source 1..80: mol_type = other DNA
tgttgcttcaggtgtattcctgggactagtgaagacccaaagaactgtggccaatcagctttctgcttgctgaccttttt

SEQ ID NO: 43402 - DNA, 80 bp, synthetic construct
  misc_feature 1..80: note = Artificially Synthesized Probe
  source 1..80: mol_type = other DNA
tccataatgtatcttctttgtaaaggtacagccaccacccaaaaatccttgtgttgcatttatgctcaaaatctgtaata

SEQ ID NO: 43403 - DNA, 80 bp, synthetic construct
  misc_feature 1..80: note = Artificially Synthesized Probe
  source 1..80: mol_type = other DNA
tttcgatacattttagtgctttggcatttcagaagtctttttaacccggttttgaatgatggcagataaatttagcttta

SEQ ID NO: 43404 - DNA, 80 bp, synthetic construct
  misc_feature 1..80: note = Artificially Synthesized Probe
  source 1..80: mol_type = other DNA
cgcctaaaatttagattttaattggtgtccagttttaatcttggttatttgggttggcagaataaagcaccctcccctca

SEQ ID NO: 43405 - DNA, 80 bp, synthetic construct
  misc_feature 1..80: note = Artificially Synthesized Probe
  source 1..80: mol_type = other DNA
ctttttatcactttgtatttattttttgttgtgtctgatttggccctggcgtgtgtcatatatgtgtctgactgatacag

SEQ ID NO: 43406 - DNA, 80 bp, synthetic construct
  misc_feature 1..80: note = Artificially Synthesized Probe
  source 1..80: mol_type = other DNA
ttttcttagaagatggctaaaatggcatctggaaagcttgtcattcccttttaagtagcaagggttggaacatagaggac

SEQ ID NO: 43407 - DNA, 80 bp, synthetic construct
  misc_feature 1..80: note = Artificially Synthesized Probe
  source 1..80: mol_type = other DNA
tgattaaaaggcttatgtttgtatgtgacatctcctagaaggcttgaaataatttggccttgtgtgttaacattcagaaa

SEQ ID NO: 43408 - DNA, 80 bp, synthetic construct
  misc_feature 1..80: note = Artificially Synthesized Probe
  source 1..80: mol_type = other DNA
agtctgacataaggagtcaaataggatgtgcccaaagttggtaaattttttttgctttttcttgcataaatctcctctgc

SEQ ID NO: 43409 - DNA, 80 bp, synthetic construct
  misc_feature 1..80: note = Artificially Synthesized Probe
  source 1..80: mol_type = other DNA
ccaagctctaaaaaaatcaatgttcttagcatattttgacctggagaaggctgttttcaaatacctgcttgctccctgat

SEQ ID NO: 43410 - DNA, 80 bp, synthetic construct
  misc_feature 1..80: note = Artificially Synthesized Probe
  source 1..80: mol_type = other DNA
cagtgacaccctgtgaactaattgctctgtttatctagcagtaaggcaactctaggacagcctcagcagtcaatatttaa

SEQ ID NO: 43411 - DNA, 80 bp, synthetic construct
  misc_feature 1..80: note = Artificially Synthesized Probe
  source 1..80: mol_type = other DNA
gagtgcagagacatgatatattcaaaatgaatcaaactataaaattcacttatttctcacatgataactgttgctgcctt

SEQ ID NO: 43412 - DNA, 80 bp, synthetic construct
  misc_feature 1..80: note = Artificially Synthesized Probe
  source 1..80: mol_type = other DNA
caagtgatctccttggctcagcctcccaaatagctgggactctagctgtgtgccactgtactcagctttgttaaatttat

SEQ ID NO: 43413 - DNA, 80 bp, synthetic construct
  misc_feature 1..80: note = Artificially Synthesized Probe
  source 1..80: mol_type = other DNA
tcctcctgtctggctgtaattttgtatcctttaacacatctctccctattcctcccttcctcctacgcttcctacccgct

SEQ ID NO: 43414 - DNA, 80 bp, synthetic construct
  misc_feature 1..80: note = Artificially Synthesized Probe
  source 1..80: mol_type = other DNA
tttcttttgctgtgcagaacctttttagtttgataccatcctatttatttttgcttttgttgcctgtgcttttcaggtct

SEQ ID NO: 43415 - DNA, 80 bp, synthetic construct
  misc_feature 1..80: note = Artificially Synthesized Probe
  source 1..80: mol_type = other DNA
aactaggcaagagagaaataagtggcgtccaaattgaaaaggaaggaagtcacattgtccctgtttgcaggtgacatcat

SEQ ID NO: 43416 - DNA, 80 bp, synthetic construct
  misc_feature 1..80: note = Artificially Synthesized Probe
  source 1..80: mol_type = other DNA
tcctctctagttgtcttactggtttttcatttatagaatctccttgccacatttcttgctagcctgtcagttgctcaagc

SEQ ID NO: 43417 - DNA, 80 bp, synthetic construct
  misc_feature 1..80: note = Artificially Synthesized Probe
  source 1..80: mol_type = other DNA
gcattgtgtcattttcattgctcctttttccctttgggatttggtcacatttttctggctcttgctatgtagaatacatt

SEQ ID NO: 43418 - DNA, 80 bp, synthetic construct
  misc_feature 1..80: note = Artificially Synthesized Probe
  source 1..80: mol_type = other DNA
tcattctcttgtgcaatagaacaccagaatgtatccctcctagctgctttgtacccattggccagtctcttcccatctct

SEQ ID NO: 43419 - DNA, 80 bp, synthetic construct
  misc_feature 1..80: note = Artificially Synthesized Probe
  source 1..80: mol_type = other DNA
aacagtttctagagagatgggtctgctgtgttgcccaggcttgcctgattgtttttaaaaatcagcttttaaaactattt

SEQ ID NO: 43420 - DNA, 80 bp, synthetic construct
  misc_feature 1..80: note = Artificially Synthesized Probe
  source 1..80: mol_type = other DNA
tgcatctcaagctcttagatgtatgtagactgcctctatgctttctgcattggataattatggctgagagtctagtttaa

SEQ ID NO: 43421 - DNA, 80 bp, synthetic construct
  misc_feature 1..80: note = Artificially Synthesized Probe
  source 1..80: mol_type = other DNA
aaacaacatttagatcatcatgaaaacggtgaaggattcagtgagagtttttagacaggatgtgtgaaccgaggtcaagt

SEQ ID NO: 43422 - DNA, 80 bp, synthetic construct
  misc_feature 1..80: note = Artificially Synthesized Probe
  source 1..80: mol_type = other DNA
ttgcacagaggagtagagtggctcagacaagtctcttttaagaagatactttaaatacctgtggtatctaggctggattc

SEQ ID NO: 43423 - DNA, 80 bp, synthetic construct
  misc_feature 1..80: note = Artificially Synthesized Probe
  source 1..80: mol_type = other DNA
cggttgtttttaaaaaagaaggggctcctttccacttttagtcactgttatgtcagcagctgctgtgactttttttctct

SEQ ID NO: 43424 - DNA, 80 bp, synthetic construct
  misc_feature 1..80: note = Artificially Synthesized Probe
  source 1..80: mol_type = other DNA
gttcattcataaaatgtgttaataaaatatcactggcatacaaaagcaacatacacagggaccgtacacttggctggtaa

SEQ ID NO: 43425 - DNA, 80 bp, synthetic construct
  misc_feature 1..80: note = Artificially Synthesized Probe
  source 1..80: mol_type = other DNA
tggtgttgccctttaagggtatcttgttcaacattgattacacttaatgggtttaaccatcaccctgtacaattcttcga

SEQ ID NO: 43426 - DNA, 80 bp, synthetic construct
  misc_feature 1..80: note = Artificially Synthesized Probe
  source 1..80: mol_type = other DNA
taaacagtgtccattccttgtctccataatttagcaggcctgggatggggtccaaaaacgtgccttcatacaaacccagg

SEQ ID NO: 43427 - DNA, 80 bp, synthetic construct
  misc_feature 1..80: note = Artificially Synthesized Probe
  source 1..80: mol_type = other DNA
tcctctaagccaagatgagagttcttcctgtctcaccagaaaagtgagtaaaggaagggcatggatgctagttgtccaac

SEQ ID NO: 43428 - DNA, 80 bp, synthetic construct
  misc_feature 1..80: note = Artificially Synthesized Probe
  source 1..80: mol_type = other DNA
tcttttgtcatctacaatcatgttaatcctcgtgagcctggactattggaactgaactgtgctgctttgctgcaggtcag

SEQ ID NO: 43429 - DNA, 80 bp, synthetic construct
  misc_feature 1..80: note = Artificially Synthesized Probe
  source 1..80: mol_type = other DNA
gccattgcctttaaggaggatagtttcagtaccaggaaataactgactgtcctcacctggcacatgagtgtagttttctg

SEQ ID NO: 43430 - DNA, 80 bp, synthetic construct
  misc_feature 1..80: note = Artificially Synthesized Probe
  source 1..80: mol_type = other DNA
tgtccatgatcaactttagaggcttgtcttgaatcttaacattctttggaggcatgcaaccttgtggccatattggaaag

SEQ ID NO: 43431 - DNA, 80 bp, synthetic construct
  misc_feature 1..80: note = Artificially Synthesized Probe
  source 1..80: mol_type = other DNA
tgtcagttgttttcatggcatttgcttggtggaaaagttgtgggggttatgtagaaataaaaacgagaataaatttctgc

SEQ ID NO: 43432 - DNA, 80 bp, synthetic construct
  misc_feature 1..80: note = Artificially Synthesized Probe
  source 1..80: mol_type = other DNA
gcagtgcatgtgtgtggatacatacgcagacacacacccttacgtttaggtatgtattttcagcagaggaccacagatgc

SEQ ID NO: 43433 - DNA, 80 bp, synthetic construct
  misc_feature 1..80: note = Artificially Synthesized Probe
  source 1..80: mol_type = other DNA
gagggtgaggcaggagaattgcttgaacccgggaggcggaggctgcagtgagccaagatcgtggcactgcactccagcct

SEQ ID NO: 43434 - DNA, 80 bp, synthetic construct
  misc_feature 1..80: note = Artificially Synthesized Probe
  source 1..80: mol_type = other DNA
cagtgaggcacatgcttctcttgtcagtaactaaaaagtaggtggtcattgaaacaggtattttcctttcagagaatgtt

SEQ ID NO: 43435 - DNA, 80 bp, synthetic construct
  misc_feature 1..80: note = Artificially Synthesized Probe
  source 1..80: mol_type = other DNA
atatggggtgtcttcaaacaacagattgttttttcacagttttggtggccagaggtcagaaatcaatgtgcctcggctga

SEQ ID NO: 43436 - DNA, 80 bp, synthetic construct
  misc_feature 1..80: note = Artificially Synthesized Probe
  source 1..80: mol_type = other DNA
gagaaccattcttttgtcccagtagcagtagctggaaggcagctgcatcacaggaagtttgagattattgatggtcaagt

SEQ ID NO: 43437 - DNA, 80 bp, synthetic construct
  misc_feature 1..80: note = Artificially Synthesized Probe
  source 1..80: mol_type = other DNA
tgtggttcttgcctagaattttacaccaagtgggaaagatgaaataacaattagcagaaagcttgaagtgcttttgaata

SEQ ID NO: 43438 - DNA, 80 bp, synthetic construct
  misc_feature 1..80: note = Artificially Synthesized Probe
  source 1..80: mol_type = other DNA
ggagaagaagcaagttacaggggttagggattacaatgtgggagggaaggtgacacatttggtttagttgtgttgaattt

SEQ ID NO: 43439 - DNA, 80 bp, synthetic construct
  misc_feature 1..80: note = Artificially Synthesized Probe
  source 1..80: mol_type = other DNA
aatttagtgtttgaacttcggcctcaaacactgatttttgtgacctgcaggcaatacattgagaatttattaatgaactt

SEQ ID NO: 43440 - DNA, 80 bp, synthetic construct
  misc_feature 1..80: note = Artificially Synthesized Probe
  source 1..80: mol_type = other DNA
gtccatccatggtaaatctgtaaaatcgagtagggaataatgatattactcagcatttcttagagaataggcaatgagat

SEQ ID NO: 43441 - DNA, 80 bp, synthetic construct
  misc_feature 1..80: note = Artificially Synthesized Probe
  source 1..80: mol_type = other DNA
ccagcatgcgactgtactgagtgctgtgcgagtgtacctaaacatagaatggtacagtaagagtacagtacgaaagataa

SEQ ID NO: 43442 - DNA, 80 bp, synthetic construct
  misc_feature 1..80: note = Artificially Synthesized Probe
  source 1..80: mol_type = other DNA
ttatagcagcatcaccacaaacgaataatgcactgcactgagatgtttggatggctatgaggtcattagtcaacaggaat

SEQ ID NO: 43443 - DNA, 80 bp, synthetic construct
  misc_feature 1..80: note = Artificially Synthesized Probe
  source 1..80: mol_type = other DNA
taccatcattgctattatttgccaatactgtctagggttcagaacaagtgctgtttttggtaccattttgctgacgttca

SEQ ID NO: 43444 - DNA, 80 bp, synthetic construct
  misc_feature 1..80: note = Artificially Synthesized Probe
  source 1..80: mol_type = other DNA
gaaagaacattattaagtatgggaatttcatggcagttttacctgttgtggaccctgttatgtcaaaaatatagtgcagt

SEQ ID NO: 43445 - DNA, 80 bp, synthetic construct
  misc_feature 1..80: note = Artificially Synthesized Probe
  source 1..80: mol_type = other DNA
ctacttcatcaacgatgttgggtatggcctgtatcaattccagtaaggtattggaattttagaaattaatggtgcccatt

SEQ ID NO: 43446 - DNA, 80 bp, synthetic construct
  misc_feature 1..80: note = Artificially Synthesized Probe
  source 1..80: mol_type = other DNA
tgtggccaactaatactgcattgtgtggacccagcaccgtttggtattcacccgttcatcatttcatggtcatcaggatg

SEQ ID NO: 43447 - DNA, 80 bp, synthetic construct
  misc_feature 1..80: note = Artificially Synthesized Probe
  source 1..80: mol_type = other DNA
ttggatatatcattaggaaggagttcattttattcttttctaatgtggctacgcacgtctcaataccatttgttgaaaag

SEQ ID NO: 43448 - DNA, 80 bp, synthetic construct
  misc_feature 1..80: note = Artificially Synthesized Probe
  source 1..80: mol_type = other DNA
tgtaaatttgtttaagttctttgtagatcctggatattagccctttgtcagatgggtaggttgcgaaaattttctcccat

SEQ ID NO: 43449 - DNA, 80 bp, synthetic construct
  misc_feature 1..80: note = Artificially Synthesized Probe
  source 1..80: mol_type = other DNA
ggagttcactcatgatttggctctctgtttgtctgttattggtgcgtaggaatgcttgtgatttttgcatattgattttg

SEQ ID NO: 43450 - DNA, 80 bp, synthetic construct
  misc_feature 1..80: note = Artificially Synthesized Probe
  source 1..80: mol_type = other DNA
ctgcactgatcttagttatttcttgccttctgctagcttttaaatgtgtttgctcttgcttctctagttcttttaattgt

SEQ ID NO: 43451 - DNA, 80 bp, synthetic construct
  misc_feature 1..80: note = Artificially Synthesized Probe
  source 1..80: mol_type = other DNA
gtattgggtgtatatatatttaggatagttatctcttcttgttgaattgatccctttaccattatgtaatggccttcttt

SEQ ID NO: 43452 - DNA, 80 bp, synthetic construct
  misc_feature 1..80: note = Artificially Synthesized Probe
  source 1..80: mol_type = other DNA
gctttgtagttgaaacatgtgagtccttcaaccttattctttttcaagattggtttggttattctgagtctcttgcattt

SEQ ID NO: 43453 - DNA, 80 bp, synthetic construct
  misc_feature 1..80: note = Artificially Synthesized Probe
  source 1..80: mol_type = other DNA
ttcctagttaataatttgggtcttctttcttttttcttcttcatctgttcagctaacagtttgtcatttttgatgatctt

SEQ ID NO: 43454 - DNA, 80 bp, synthetic construct
  misc_feature 1..80: note = Artificially Synthesized Probe
  source 1..80: mol_type = other DNA
taacatttattttctctgatatgaatatagccgctgcggctttcttttggttactgattgcatggtgtatctttcatcct

SEQ ID NO: 43455 - DNA, 80 bp, synthetic construct
  misc_feature 1..80: note = Artificially Synthesized Probe
  source 1..80: mol_type = other DNA
tggccaaaaaatatatttatagttttaaaaaattacctacgtcattacctttactggtccttcatttcttcatgtgaaaa

SEQ ID NO: 43456 - DNA, 80 bp, synthetic construct
  misc_feature 1..80: note = Artificially Synthesized Probe
  source 1..80: mol_type = other DNA
atgtaatgtgaccactttggaaatcagatcccttcctcctcagagtttacttttgttgatgctgtttagtgactattctg

SEQ ID NO: 43457 - DNA, 80 bp, synthetic construct
  misc_feature 1..80: note = Artificially Synthesized Probe
  source 1..80: mol_type = other DNA
cctaggctgctggttttcagatctactctagtcatcattttgttgtttttctggagtcttacgaatctagggagttgggc

SEQ ID NO: 43458 - DNA, 80 bp, synthetic construct
  misc_feature 1..80: note = Artificially Synthesized Probe
  source 1..80: mol_type = other DNA
tggagcttttaggcctgttgctgttaccttcatcagctctatagcctggttgtaatttatattatttctgactgctagaa

SEQ ID NO: 43459 - DNA, 80 bp, synthetic construct
  misc_feature 1..80: note = Artificially Synthesized Probe
  source 1..80: mol_type = other DNA
ctcaaacaagattatgattatacccattactgccccaaattcccattttttccattgtaatccatccttcctgccactct

SEQ ID NO: 43460 - DNA, 80 bp, synthetic construct
  misc_feature 1..80: note = Artificially Synthesized Probe
  source 1..80: mol_type = other DNA
ttgtgtaatatcccagaaatctttacctagatgaaggttacaactttttttcttatattttattttagaagtttaatggt

SEQ ID NO: 43461 - DNA, 80 bp, synthetic construct
  misc_feature 1..80: note = Artificially Synthesized Probe
  source 1..80: mol_type = other DNA
cttccatctctctacagtcgatcctctgtatccttgggttctacttttgtggattctaccaactgctggtcagaaatact

SEQ ID NO: 43462 - DNA, 80 bp, synthetic construct
  misc_feature 1..80: note = Artificially Synthesized Probe
  source 1..80: mol_type = other DNA
ttcttcatatatatgtgtcttgatcaataatcgctgaatcctccatgcactcttcccatgatctttagagttctgtctct

SEQ ID NO: 43463 - DNA, 80 bp, synthetic construct
  misc_feature 1..80: note = Artificially Synthesized Probe
  source 1..80: mol_type = other DNA
tacccatgaggttcaggagtcagagaagctgatgtagaagctttcccaggattgtggagagtggtcaaaggtttggttgt

SEQ ID NO: 43464 - DNA, 80 bp, synthetic construct
  misc_feature 1..80: note = Artificially Synthesized Probe
  source 1..80: mol_type = other DNA
tcttaattgataacttctgcatctcgccaatgttgcggtaattgatgatgatgatcttccggaagcactgcatgtttttc

SEQ ID NO: 43465 - DNA, 80 bp, synthetic construct
  misc_feature 1..80: note = Artificially Synthesized Probe
  source 1..80: mol_type = other DNA
gtttaggctcagctattcctagatccctcttagacaagattggaaacaggtgttggttttcattgactcattgatgtctg

SEQ ID NO: 43466 - DNA, 80 bp, synthetic construct
  misc_feature 1..80: note = Artificially Synthesized Probe
  source 1..80: mol_type = other DNA
tttaattcctgttgactgtgttagcactttgcattctcaggttactatcttacattaacagaaggccccaccaatgtttt

SEQ ID NO: 43467 - DNA, 80 bp, synthetic construct
  misc_feature 1..80: note = Artificially Synthesized Probe
  source 1..80: mol_type = other DNA
gtttgagaccagcttggacaacatagcaagaccctgcctctacaaaaaataaaaattagctgggtgtggtatgctcacct

SEQ ID NO: 43468 - DNA, 80 bp, synthetic construct
  misc_feature 1..80: note = Artificially Synthesized Probe
  source 1..80: mol_type = other DNA
aatacctttgaactgcaggtttttccgtattgtttatttaacatgctcattaataggtaagagaagtaggtgagaaaaat

SEQ ID NO: 43469 - DNA, 80 bp, synthetic construct
  misc_feature 1..80: note = Artificially Synthesized Probe
  source 1..80: mol_type = other DNA
gcatgaattctacttttgcattttcagcttctttgccccattttcttgaaaaagtcaaagtcacttatcttgtctgagcc

SEQ ID NO: 43470 - DNA, 80 bp, synthetic construct
  misc_feature 1..80: note = Artificially Synthesized Probe
  source 1..80: mol_type = other DNA
ctttacaatattgtcaatgcagacaagaaaaaatatcctggaaaggccatgggtggaaataaatattttagtgtcatcca

SEQ ID NO: 43471 - DNA, 80 bp, synthetic construct
  misc_feature 1..80: note = Artificially Synthesized Probe
  source 1..80: mol_type = other DNA
gtactagaaaataaggaagaacccaacagtaagagaagtgatgtcaaataaacatagtagccaactttgaagagtttcca

SEQ ID NO: 43472 - DNA, 80 bp, synthetic construct
  misc_feature 1..80: note = Artificially Synthesized Probe
  source 1..80: mol_type = other DNA
aaaacgttagtggtgagccggtttggagagggtacaagtatttcatgtattgtcttttcaacttttccaagtcttaactt

SEQ ID NO: 43473 - DNA, 80 bp, synthetic construct
  misc_feature 1..80: note = Artificially Synthesized Probe
  source 1..80: mol_type = other DNA
gtccttataagaaaggcttaagggaacctgtttgccccttctgccttgtgtggacacatagaagacgccctaaggggaac

SEQ ID NO: 43474 - DNA, 80 bp, synthetic construct
  misc_feature 1..80: note = Artificially Synthesized Probe
  source 1..80: mol_type = other DNA
tatatttagtattctttaagtggcagtggctcatcataaaggacttcatccttttgatcgtcgcattaagtgggctgagg

SEQ ID NO: 43475 - DNA, 80 bp, synthetic construct
  misc_feature 1..80: note = Artificially Synthesized Probe
  source 1..80: mol_type = other DNA
cactcctctgttcagatgcctgagatggcttttcttcccactcagaataaaagctgaggctgtcatggccttcagtgttg

SEQ ID NO: 43476 - DNA, 80 bp, synthetic construct
  misc_feature 1..80: note = Artificially Synthesized Probe
  source 1..80: mol_type = other DNA
ctagcacatagtaagtgatcagtaaacgtgatgagacagggactgaaggtatgaaagaatgaggatttattgggagcaag

SEQ ID NO: 43477 - DNA, 80 bp, synthetic construct
  misc_feature 1..80: note = Artificially Synthesized Probe
  source 1..80: mol_type = other DNA
ctcagcacgttaggacattgtattaggcaaaagctttttctccctatttcctctagtttgtttccctgtgccatgtaata

SEQ ID NO: 43478 - DNA, 80 bp, synthetic construct
  misc_feature 1..80: note = Artificially Synthesized Probe
  source 1..80: mol_type = other DNA
aataatcgcatgacgtaaataaattgatactgcactgtgttcaggggtagaatggcattcatgtactgctgattcctgtc

SEQ ID NO: 43479 - DNA, 80 bp, synthetic construct
  misc_feature 1..80: note = Artificially Synthesized Probe
  source 1..80: mol_type = other DNA
tttgtaatgaagaagcacttaaatactcatctactaggcaagcatggagttggcaccccaaaagaaaggtaattttcatt

SEQ ID NO: 43480 - DNA, 80 bp, synthetic construct
  misc_feature 1..80: note = Artificially Synthesized Probe
  source 1..80: mol_type = other DNA
ttctctgttaatgggaatttaagttgacttttctgtcaggcatattgttttctttagtattgtagtatgggcatagactg

SEQ ID NO: 43481 - DNA, 80 bp, synthetic construct
  misc_feature 1..80: note = Artificially Synthesized Probe
  source 1..80: mol_type = other DNA
tttttcttttctttaatatttatttctgtcctgaatacataaagggagattaaaactgaggcaggagaaagattgaattt

SEQ ID NO: 43482 - DNA, 80 bp, synthetic construct
  misc_feature 1..80: note = Artificially Synthesized Probe
  source 1..80: mol_type = other DNA
tctgtgaacacctgaggtgatggcttgtgtaagattatacttttttgttcctacatctgcattaaattattttagtgcag

SEQ ID NO: 43483 - DNA, 80 bp, synthetic construct
  misc_feature 1..80: note = Artificially Synthesized Probe
  source 1..80: mol_type = other DNA
tcaccttttttttatgaaacatgaaaatatctgaaacagcagcatctgtggaaaagcgcatgcacctggcatgcacctgg

SEQ ID NO: 43484 - DNA, 80 bp, synthetic construct
  misc_feature 1..80: note = Artificially Synthesized Probe
  source 1..80: mol_type = other DNA
gaagggggttatatttcgatgacgtactgcttttgcatgagctgcgaactctttctgttttttcattttttccatctttt

SEQ ID NO: 43485 - DNA, 80 bp, synthetic construct
  misc_feature 1..80: note = Artificially Synthesized Probe
  source 1..80: mol_type = other DNA
ggttgggttcctcagctcttaggaagcaatgtcaccggtactcctgcatcagttacatcatcaaatgcgacatcaaatat

SEQ ID NO: 43486 - DNA, 80 bp, synthetic construct
  misc_feature 1..80: note = Artificially Synthesized Probe
  source 1..80: mol_type = other DNA
aaaccaatatttttctggaagtgcatatatctttagccatttggttttgggggcgttgtattgagcattgtgcatccctg

SEQ ID NO: 43487 - DNA, 80 bp, synthetic construct
  misc_feature 1..80: note = Artificially Synthesized Probe
  source 1..80: mol_type = other DNA
gccttgttgtgtttgataggtggttagagcagttccagcagagagcacattccaggttccctgagaggtgtgggagagct

SEQ ID NO: 43488 - DNA, 80 bp, synthetic construct
  misc_feature 1..80: note = Artificially Synthesized Probe
  source 1..80: mol_type = other DNA
tagtctgatagtagactcagatttggggtataagaatatctgctgtttttaagtttttaagaatttaggtgtttttcttc

SEQ ID NO: 43489 - DNA, 80 bp, synthetic construct
  misc_feature 1..80: note = Artificially Synthesized Probe
  source 1..80: mol_type = other DNA
agatgtctgactgtcatttccgttagtcctttcaagaacattaaggcactctttgatacttttaagatattgctacctcc

SEQ ID NO: 43490 - DNA, 80 bp, synthetic construct
  misc_feature 1..80: note = Artificially Synthesized Probe
  source 1..80: mol_type = other DNA
tttcccctccttggttggcagattttggtgaaactgatgtggatttacagttctaaaatacaaaaacaatcatactgttt

SEQ ID NO: 43491 - DNA, 80 bp, synthetic construct
  misc_feature 1..80: note = Artificially Synthesized Probe
  source 1..80: mol_type = other DNA
ttaaatttctgtaaagtattttgagttgggcgtgttcagagaccactgtgacagagctcttaactagtgagagaacccag

SEQ ID NO: 43492 - DNA, 80 bp, synthetic construct
  misc_feature 1..80: note = Artificially Synthesized Probe
  source 1..80: mol_type = other DNA
ttgattagcactgtcttaggaaatggagactttttgatagaaagttgccaactgccaggtgtgacattgagtcgagagaa

SEQ ID NO: 43493 - DNA, 80 bp, synthetic construct
  misc_feature 1..80: note = Artificially Synthesized Probe
  source 1..80: mol_type = other DNA
atttattatgaagaaatgtgtaggagctgattttatactctggggccgttggcaaaataaacttgcatatatagcatagt

SEQ ID NO: 43494 - DNA, 80 bp, synthetic construct
  misc_feature 1..80: note = Artificially Synthesized Probe
  source 1..80: mol_type = other DNA
cacatttcgtaaatgacgggtacatgctttgaccctggtatcatccagtaccagtgtaataaaagtcacatgcaaaagca

SEQ ID NO: 43495 - DNA, 80 bp, synthetic construct
  misc_feature 1..80: note = Artificially Synthesized Probe
  source 1..80: mol_type = other DNA
ttgacaagacctgctaggtgattgataactgcaccagtttgaaatctagacctcaaggaatggaatggtaactggggacg

SEQ ID NO: 43496 - DNA, 80 bp, synthetic construct
  misc_feature 1..80: note = Artificially Synthesized Probe
  source 1..80: mol_type = other DNA
atgcactagtaatccattttagcgcatccgtaaagaccagcaggagggatcaaggtgagagttctggaatagtgtacatg

SEQ ID NO: 43497 - DNA, 80 bp, synthetic construct
  misc_feature 1..80: note = Artificially Synthesized Probe
  source 1..80: mol_type = other DNA
attataaaactcttaacaaacgctgctttaaatcaaccttttcagtgtaactgtggagtcttttactgatgcagaactca

SEQ ID NO: 43498 - DNA, 80 bp, synthetic construct
  misc_feature 1..80: note = Artificially Synthesized Probe
  source 1..80: mol_type = other DNA
tgctttggagaatgcgtatgcacctgtatcctacaagtagcaataggatgaatattcaatcaaagtttacatattcaaac

SEQ ID NO: 43499 - DNA, 80 bp, synthetic construct
  misc_feature 1..80: note = Artificially Synthesized Probe
  source 1..80: mol_type = other DNA
actgaaagtttttgattagtttgcttcctaggtagaatggaagcccagtgtctcaggaaatgtttctgaaattaatacga

SEQ ID NO: 43500 - DNA, 80 bp, synthetic construct
  misc_feature 1..80: note = Artificially Synthesized Probe
  source 1..80: mol_type = other DNA
ccacctgtagttcaaatgcagtttattgttttgatcagaatttcacacccgcagatgcatgtcgaggtctcttggttggt

SEQ ID NO: 43501 - DNA, 80 bp, synthetic construct
  misc_feature 1..80: note = Artificially Synthesized Probe
  source 1..80: mol_type = other DNA
tgcagatgaatagtcttccactgaatgctcacaaccgacaatgtgtggtagttgttttgttgtatgtattggaaggagag

SEQ ID NO: 43502 - DNA, 80 bp, synthetic construct
  misc_feature 1..80: note = Artificially Synthesized Probe
  source 1..80: mol_type = other DNA
tggaaacttcctgttttctgagaagaaggacctggttatcaatgggcatctagaatgtgtctgtgggatttttctctata

SEQ ID NO: 43503 - DNA, 80 bp, synthetic construct
  misc_feature 1..80: note = Artificially Synthesized Probe
  source 1..80: mol_type = other DNA
acccttaatgattcagggtttatttaaagctgactgtccaatcaaagtttttgtaagcatgccatgtgacaaatgcctgg

SEQ ID NO: 43504 - DNA, 80 bp, synthetic construct
  misc_feature 1..80: note = Artificially Synthesized Probe
  source 1..80: mol_type = other DNA
cgaggatctggctgtgacagtttgattagatcatcaatcctcactgttaacagcacttttcctgaacacctgggctgcca

SEQ ID NO: 43505 - DNA, 80 bp, synthetic construct
  misc_feature 1..80: note = Artificially Synthesized Probe
  source 1..80: mol_type = other DNA
gagcattgtgcaagcaaatgaagatgttacgttgtgtgagaaaattgagatactcctacttgacttctcgactcgtcctc

SEQ ID NO: 43506 - DNA, 80 bp, synthetic construct
  misc_feature 1..80: note = Artificially Synthesized Probe
  source 1..80: mol_type = other DNA
gcatggcatggttttaggttctaagaatggagtggtgagcaaaataaacacttcttacccatagagcttacattgttatg

SEQ ID NO: 43507 - DNA, 80 bp, synthetic construct
  misc_feature 1..80: note = Artificially Synthesized Probe
  source 1..80: mol_type = other DNA
ttaaaatgtatccaatagaatgttaacaccatgatgatttgattcccaccgtccattcatttaaaagtacatgaataagt

SEQ ID NO: 43508 - DNA, 80 bp, synthetic construct
  misc_feature 1..80: note = Artificially Synthesized Probe
  source 1..80: mol_type = other DNA
aataaatagagaagtgcttgtgcttgttgagtgtcatcactttgatagacatgggcatttagtcaaaggatagtacccaa

SEQ ID NO: 43509 - DNA, 80 bp, synthetic construct
  misc_feature 1..80: note = Artificially Synthesized Probe
  source 1..80: mol_type = other DNA
agttcttgcttatgtaccctttgcacatacatacaaagtctccatgtaccattagagtgtatggaggtctaagctggaag

SEQ ID NO: 43510 - DNA, 80 bp, synthetic construct
  misc_feature 1..80: note = Artificially Synthesized Probe
  source 1..80: mol_type = other DNA
actgaatgatcatgtaggattctgctgtgaaattcatgtgcattttaaagctgagtggccttatacagtcatatcctgtt

SEQ ID NO: 43511 - DNA, 80 bp, synthetic construct
  misc_feature 1..80: note = Artificially Synthesized Probe
  source 1..80: mol_type = other DNA
cattaaaaagtcaggaaacaaaggtgctggagaggatgtggagaaataggaacacttttacactgttgatgggactgtaa

SEQ ID NO: 43512 - DNA, 80 bp, synthetic construct
  misc_feature 1..80: note = Artificially Synthesized Probe
  source 1..80: mol_type = other DNA
attactctgttaactttgttttaggaagcctttatccttttgccattgtctttgcatgaagtagcatggcagactctctg

SEQ ID NO: 43513 - DNA, 80 bp, synthetic construct
  misc_feature 1..80: note = Artificially Synthesized Probe
  source 1..80: mol_type = other DNA
cggtgctccattttttcatcaatttcttgtccctcatttcatctctttgatgtggtcatcatagttctttcaaggttttt

SEQ ID NO: 43514 - DNA, 80 bp, synthetic construct
  misc_feature 1..80: note = Artificially Synthesized Probe
  source 1..80: mol_type = other DNA
ccttattggttttgtttgtgagtttgtttttgtttttaagatacagggtctccctctgttgcccaagccagagtatagtg

SEQ ID NO: 43515 - DNA, 80 bp, synthetic construct
  misc_feature 1..80: note = Artificially Synthesized Probe
  source 1..80: mol_type = other DNA
tttcttggcttttttcatttacccttaatgaatttgttatgctaaagtagagatacattatgaaatatacagtacatttt

SEQ ID NO: 43516 - DNA, 80 bp, synthetic construct
  misc_feature 1..80: note = Artificially Synthesized Probe
  source 1..80: mol_type = other DNA
ttcgaagtaaatcagtctctgtacagaggctgtgtgacataaactgaatcctgactccttatttcagcacctccctatga

SEQ ID NO: 43517 - DNA, 80 bp, synthetic construct
  misc_feature 1..80: note = Artificially Synthesized Probe
  source 1..80: mol_type = other DNA
gacctttattccattgcatttcttttccttttgtctgttaaaattgctaaggatctcattgattccctcatatgtttgtg

SEQ ID NO: 43518 - DNA, 80 bp, synthetic construct
  misc_feature 1..80: note = Artificially Synthesized Probe
  source 1..80: mol_type = other DNA
tgttgcactaggtcagcttggaattttgagatgacttttggcatcattgcatacatctggtttgtgtactgtgctgtgca

SEQ ID NO: 43519 - DNA, 80 bp, synthetic construct
  misc_feature 1..80: note = Artificially Synthesized Probe
  source 1..80: mol_type = other DNA
ggccctctctggaggactgaggaatagattacattcactcatatgtggcctgtttccaatcctgataagtcattattcaa

SEQ ID NO: 43520 - DNA, 80 bp, synthetic construct
  misc_feature 1..80: note = Artificially Synthesized Probe
  source 1..80: mol_type = other DNA
cctcttactctcctgaattattttcttgacattcttcaccccttacaggaccttagctgactgacagtggatggccctcc

SEQ ID NO: 43521 - DNA, 80 bp, synthetic construct
  misc_feature 1..80: note = Artificially Synthesized Probe
  source 1..80: mol_type = other DNA
atctgatctcagagcccttgttcttttcactgcctcagattgggacctacaatgacagttcagtcttaggaacagaagtc

SEQ ID NO: 43522 - DNA, 80 bp, synthetic construct
  misc_feature 1..80: note = Artificially Synthesized Probe
  source 1..80: mol_type = other DNA
aacaggcccccgtgtgtgatgatcccctccctgtgtccatgcgttctcattgttcaactcccacttatgagtgagaacat

SEQ ID NO: 43523 - DNA, 80 bp, synthetic construct
  misc_feature 1..80: note = Artificially Synthesized Probe
  source 1..80: mol_type = other DNA
taggtcttactcttaagtctttaattcatcttgagttaatttttgtataatgtgtaaggaaggggtccagttttagtttt

SEQ ID NO: 43524 - DNA, 80 bp, synthetic construct
  misc_feature 1..80: note = Artificially Synthesized Probe
  source 1..80: mol_type = other DNA
aagatcaaaagagacaaagaagggcattacataatggtaaaggtatcaatgcaacaagaagagctaactatcgtaaatat

SEQ ID NO: 43525 - DNA, 80 bp, synthetic construct
  misc_feature 1..80: note = Artificially Synthesized Probe
  source 1..80: mol_type = other DNA
gagcaaacaagttcaaaagctagcggaagacaagaaataactaaaatcagagccaaattgaaggagatagagacaggaaa

SEQ ID NO: 43526 - DNA, 80 bp, synthetic construct
  misc_feature 1..80: note = Artificially Synthesized Probe
  source 1..80: mol_type = other DNA
agaaaaccccagcatctcagcccaaaatctccttaagctgataatcaacttcaccaaagtctcaggatacaaaatcaatg

SEQ ID NO: 43527 - DNA, 80 bp, synthetic construct
  misc_feature 1..80: note = Artificially Synthesized Probe
  source 1..80: mol_type = other DNA
atttatctcagtcataacttgtcaaagttacatgtaatactcttctcaaggttgatctcttaggcagttggctcaagagc

SEQ ID NO: 43528 - DNA, 80 bp, synthetic construct
  misc_feature 1..80: note = Artificially Synthesized Probe
  source 1..80: mol_type = other DNA
agcagttctttagtttctccttaactttctgacctggacatttcgaatactagaggctagttgtttggaaaatgtccctc

SEQ ID NO: 43529 - DNA, 80 bp, synthetic construct
  misc_feature 1..80: note = Artificially Synthesized Probe
  source 1..80: mol_type = other DNA
aactgggacgaccagagtgagattcttaatacattaatctgttgacttctggttggctttggtgaggggcacagaaagtt

SEQ ID NO: 43530 - DNA, 80 bp, synthetic construct
  misc_feature 1..80: note = Artificially Synthesized Probe
  source 1..80: mol_type = other DNA
ccacatgttatgttggttaaacagggggccagtgggcagcaacttaaaaatcacattttcaaagtatacttaattacatg

SEQ ID NO: 43531 - DNA, 80 bp, synthetic construct
  misc_feature 1..80: note = Artificially Synthesized Probe
  source 1..80: mol_type = other DNA
tggtaaatatagtaggttctatgagtttataagggagggaccctattttgatgggattggtttccttttacaaagaggaa

SEQ ID NO: 43532 - DNA, 80 bp, synthetic construct
  misc_feature 1..80: note = Artificially Synthesized Probe
  source 1..80: mol_type = other DNA
gctgtaattttttgtcatttaaccaatgtctccctatccctcccttccccctacccttcccagcctgtcatatcctctgt

SEQ ID NO: 43533 - DNA, 80 bp, synthetic construct
  misc_feature 1..80: note = Artificially Synthesized Probe
  source 1..80: mol_type = other DNA
tccttcctttttaaggctgaataatattacaccgtgtgtaaataccacattttctttattcatccatctgtggttacttg

SEQ ID NO: 43534 - DNA, 80 bp, synthetic construct
  misc_feature 1..80: note = Artificially Synthesized Probe
  source 1..80: mol_type = other DNA
cctgagtttgtaagctcacaggcatgagccaccacacccactttaagttgatttcaaatatgatgatatcattgaagatg

SEQ ID NO: 43535 - DNA, 80 bp, synthetic construct
  misc_feature 1..80: note = Artificially Synthesized Probe
  source 1..80: mol_type = other DNA
ttatgttgtatcttcagttgaataggaaacagaggtttaagatcttgtttatcgtttgaaagttcactctggctgactcg

SEQ ID NO: 43536 - DNA, 80 bp, synthetic construct
  misc_feature 1..80: note = Artificially Synthesized Probe
  source 1..80: mol_type = other DNA
aaaatgggatgatctgggtatgaagaaatctctaattcgtcttttattttggtacttggccactctccttagaacctggt

SEQ ID NO: 43537 - DNA, 80 bp, synthetic construct
  misc_feature 1..80: note = Artificially Synthesized Probe
  source 1..80: mol_type = other DNA
gttagagataaagaagtaaacttgtggtagaaggaaaattttgagtgtgtgagtttgtgtcttggacagaggggggtgtg

SEQ ID NO: 43538 - DNA, 80 bp, synthetic construct
  misc_feature 1..80: note = Artificially Synthesized Probe
  source 1..80: mol_type = other DNA
gccctctcccctttcctccgtggagcacttataacagttacctttatttacatgtttaaaatccccctaccttctgtatt

SEQ ID NO: 43539 - DNA, 80 bp, synthetic construct
  misc_feature 1..80: note = Artificially Synthesized Probe
  source 1..80: mol_type = other DNA
gaaaatagtatatcccccttttgttcgctttactacttttcaagaccagataacatgttgatgatcatggtataaaccta

SEQ ID NO: 43540 - DNA, 80 bp, synthetic construct
  misc_feature 1..80: note = Artificially Synthesized Probe
  source 1..80: mol_type = other DNA
atgcttttccatctgccgtcccaagaatatatttttagataggtgcttagggagactctattaaagaatgcatcttccaa

SEQ ID NO: 43541 - DNA, 80 bp, synthetic construct
  misc_feature 1..80: note = Artificially Synthesized Probe
  source 1..80: mol_type = other DNA
gcaggttggaaattcttggacagaactgatgttgcagtttacatgcagaattttttcttccttatggaaaccttagctgt

SEQ ID NO: 43542 - DNA, 80 bp, synthetic construct
  misc_feature 1..80: note = Artificially Synthesized Probe
  source 1..80: mol_type = other DNA
tacagttggaagttggaaacatgaagactttggaaagattctgtcctcttcaatatacacatggctttcgggaaaccaca

SEQ ID NO: 43543 - DNA, 80 bp, synthetic construct
  misc_feature 1..80: note = Artificially Synthesized Probe
  source 1..80: mol_type = other DNA
aattgttaaactttaaggaattttgtgaactggttgccattcttttcgtaggctgaaatgggccacggtggaggcttttc

SEQ ID NO: 43544 - DNA, 80 bp, synthetic construct
  misc_feature 1..80: note = Artificially Synthesized Probe
  source 1..80: mol_type = other DNA
aaggttgcctaagatttttttattctgttggatactaggctgtaggctctttcagatcctagcttaccttattcatggct

SEQ ID NO: 43545 - DNA, 80 bp, synthetic construct
  misc_feature 1..80: note = Artificially Synthesized Probe
  source 1..80: mol_type = other DNA
taacttttcatgggctctatagatataagtatgtttctcacatctatccacttaaggagttgagcttcctgcatgagaca

SEQ ID NO: 43546 - DNA, 80 bp, synthetic construct
  misc_feature 1..80: note = Artificially Synthesized Probe
  source 1..80: mol_type = other DNA
tcaagagtacacagatcttaccttacagcataacagcagccccttgaagggataagccatgttccacttgtgtttattta

SEQ ID NO: 43547 - DNA, 80 bp, synthetic construct
  misc_feature 1..80: note = Artificially Synthesized Probe
  source 1..80: mol_type = other DNA
tcatcaaaacggggaaacaccatgagaaaacaagataaaatgctttttaaggtcctgtcctagggaatctgatggggccc

SEQ ID NO: 43548 - DNA, 80 bp, synthetic construct
  misc_feature 1..80: note = Artificially Synthesized Probe
  source 1..80: mol_type = other DNA
accaactgattatgtaagttagttgttaatataggaaaaaaaaatccctcacactttgaaatgaggccctagacaggcag

SEQ ID NO: 43549 - DNA, 80 bp, synthetic construct
  misc_feature 1..80: note = Artificially Synthesized Probe
  source 1..80: mol_type = other DNA
ttagtagagatggggtttcaccatgttgtccaggctggtcttgaacccctgacctcaggtgatccgcctgccttggcctc

SEQ ID NO: 43550 - DNA, 80 bp, synthetic construct
  misc_feature 1..80: note = Artificially Synthesized Probe
  source 1..80: mol_type = other DNA
aagtcgacaacatgtgtagtgtgtatgtctgctgtcagcatattgcagtgtgtgaccatgtttgtttccagttatctgaa

SEQ ID NO: 43551 - DNA, 80 bp, synthetic construct
  misc_feature 1..80: note = Artificially Synthesized Probe
  source 1..80: mol_type = other DNA
ctttttattcctcaagttataacactgatcattggagacacatgggcaagagttgagccgtaaggccagcagcatctttt

SEQ ID NO: 43552 - DNA, 80 bp, synthetic construct
  misc_feature 1..80: note = Artificially Synthesized Probe
  source 1..80: mol_type = other DNA
gtcgtgagctactgcaccccgccgtttctttgcttttctaagcacagctttttcatctcttaaaaggtagttgtaatgtt

SEQ ID NO: 43553 - DNA, 80 bp, synthetic construct
  misc_feature 1..80: note = Artificially Synthesized Probe
  source 1..80: mol_type = other DNA
atgcactcccatgccagtgggtctaatctatgaattcaacgaatatttttatttcttaaatgtatagatttgaccaaccc

SEQ ID NO: 43554 - DNA, 80 bp, synthetic construct
  misc_feature 1..80: note = Artificially Synthesized Probe
  source 1..80: mol_type = other DNA
aattgtacagttgttcttgggaagtgtttatgctccatgcaagtatgatctatgagacacttcattattgccgcgagttc

SEQ ID NO: 43555 - DNA, 80 bp, synthetic construct
  misc_feature 1..80: note = Artificially Synthesized Probe
  source 1..80: mol_type = other DNA
cgcctaccgcggcagagaataggaacgctgagtcaggactttctggtcctaaaaacattctgtgtttatctgtatgcatg

SEQ ID NO: 43556 - DNA, 80 bp, synthetic construct
  misc_feature 1..80: note = Artificially Synthesized Probe
  source 1..80: mol_type = other DNA
ccaaattatgattccttaaggaacaagaaactgtggctagtttctaagtgtggatcatgttggctagtattcgttctggc

SEQ ID NO: 43557 - DNA, 80 bp, synthetic construct
  misc_feature 1..80: note = Artificially Synthesized Probe
  source 1..80: mol_type = other DNA
tacgggaggcagtgttttatgactaaaagagtcctagacaaaagtcaaaagatctgtgttttaccactctccagcagttt

SEQ ID NO: 43558 - DNA, 80 bp, synthetic construct
  misc_feature 1..80: note = Artificially Synthesized Probe
  source 1..80: mol_type = other DNA
ttctctctggctgcatccttttcatttccccagagctgaccactgtccagatttctgtttctcatattaaacatagatta

SEQ ID NO: 43559 - DNA, 80 bp, synthetic construct
  misc_feature 1..80: note = Artificially Synthesized Probe
  source 1..80: mol_type = other DNA
gtaaattaactgtttgtttgaagcttatctgaattcttgttgggggtagctgtgaagagggagggtggaaacacctaaca

SEQ ID NO: 43560 - DNA, 80 bp, synthetic construct
  misc_feature 1..80: note = Artificially Synthesized Probe
  source 1..80: mol_type = other DNA
tactaaacaaccgtgggctaaatgatacagtttttctaattcaaagaaggcactcgttaattagataaaggctaaagctc

SEQ ID NO: 43561 - DNA, 80 bp, synthetic construct
  misc_feature 1..80: note = Artificially Synthesized Probe
  source 1..80: mol_type = other DNA
tcccctcctctcccctcccctcccctccccttccttccccaccttcctgactccctttgcttccttccctgactccttct

SEQ ID NO: 43562 - DNA, 80 bp, synthetic construct
  misc_feature 1..80: note = Artificially Synthesized Probe
  source 1..80: mol_type = other DNA
gaagtgtggtacataataaaataaaagcaataatgctgatatttctgagggatccatcagagctgacctgaagcaacata

SEQ ID NO: 43563 - DNA, 80 bp, synthetic construct
  misc_feature 1..80: note = Artificially Synthesized Probe
  source 1..80: mol_type = other DNA
tatttccagaacacaggataggacctggccccatggtagatgtttaaaagatgtttgtttaattgataaattaatagtag

SEQ ID NO: 43564 - DNA, 80 bp, synthetic construct
  misc_feature 1..80: note = Artificially Synthesized Probe
  source 1..80: mol_type = other DNA
ggtcgtactacaaatatggacacatgaataagtgtgttaaaatggttgagccttaaaaatgtaccttgggagcagtcacc

SEQ ID NO: 43565 - DNA, 80 bp, synthetic construct
  misc_feature 1..80: note = Artificially Synthesized Probe
  source 1..80: mol_type = other DNA
aatttatgactttcaagtcacatagagttacagattaattcagtgttttcataggtgcttagtgagaatagaatatcttt

SEQ ID NO: 43566 - DNA, 80 bp, synthetic construct
  misc_feature 1..80: note = Artificially Synthesized Probe
  source 1..80: mol_type = other DNA
tccctttttgccaactcttattcatcctgttagtccctggtcagatctgtgttaattcaggtaaaagttagaattcagtc

SEQ ID NO: 43567 - DNA, 80 bp, synthetic construct
  misc_feature 1..80: note = Artificially Synthesized Probe
  source 1..80: mol_type = other DNA
gctcttttgtttttgtgaatagcatcatgtgaattccagtggaatgttttgtccttatcttttggttatttatacaccat

SEQ ID NO: 43568 - DNA, 80 bp, synthetic construct
  misc_feature 1..80: note = Artificially Synthesized Probe
  source 1..80: mol_type = other DNA
tttggtttccagttttgaatatgtcattgggaacataacttatcagaacacttctcttcacatcctgagcctttgataaa

SEQ ID NO: 43569 - DNA, 80 bp, synthetic construct
  misc_feature 1..80: note = Artificially Synthesized Probe
  source 1..80: mol_type = other DNA
ccctttaattgttaacctcattttgatagcttcagttaattctgtatgtttatgttagcttccctaacactatacttaat

SEQ ID NO: 43570 - DNA, 80 bp, synthetic construct
  misc_feature 1..80: note = Artificially Synthesized Probe
  source 1..80: mol_type = other DNA
gctaatcttaccttgagctcaaatggttccttagatcatcctgacatgctagaaggccgagatgatgacaaagtccaaga

SEQ ID NO: 43571 - DNA, 80 bp, synthetic construct
  misc_feature 1..80: note = Artificially Synthesized Probe
  source 1..80: mol_type = other DNA
tttttcctcaccagcatgagtatctgactgcaaatgtgatttctgaacctgtggcatgaaatgaactgagcagtactgtt

SEQ ID NO: 43572 - DNA, 80 bp, synthetic construct
  misc_feature 1..80: note = Artificially Synthesized Probe
  source 1..80: mol_type = other DNA
aatcttgggtgagggcattgttataggaggtttttccatagacatacacatatttgtgggttgtatgcatatgtactgta

SEQ ID NO: 43573 - DNA, 80 bp, synthetic construct
  misc_feature 1..80: note = Artificially Synthesized Probe
  source 1..80: mol_type = other DNA
cagcctctgactggaatgggtctcatatgcagtataattccttccacctgttcttctcatgttgaagttttaaagctgtg

SEQ ID NO: 43574 - DNA, 80 bp, synthetic construct
  misc_feature 1..80: note = Artificially Synthesized Probe
  source 1..80: mol_type = other DNA
ttagaatgagtcattctcttggttcttagtagactgaggcagcctggggttaatattctgcttaatgctcctcccagaag

SEQ ID NO: 43575 - DNA, 80 bp, synthetic construct
  misc_feature 1..80: note = Artificially Synthesized Probe
  source 1..80: mol_type = other DNA
atagatactgaatttgttgctgtggcaggattttgtgagtgtcttcattttgctttctggtcttttgggacactttctaa

SEQ ID NO: 43576 - DNA, 80 bp, synthetic construct
  misc_feature 1..80: note = Artificially Synthesized Probe
  source 1..80: mol_type = other DNA
cagtggtgagatcttcctgcttttgcacatggacgacctaggtttacatatttaatactgtttattttgttgcaacattt

SEQ ID NO: 43577 - DNA, 80 bp, synthetic construct
  misc_feature 1..80: note = Artificially Synthesized Probe
  source 1..80: mol_type = other DNA
ctgatatttagacattcaaaaatagaaaaatgctctaacacagagtttctctgaggccaaaatatctattaggacagtgc

SEQ ID NO: 43578 - DNA, 80 bp, synthetic construct
  misc_feature 1..80: note = Artificially Synthesized Probe
  source 1..80: mol_type = other DNA
ctctctcttctgggcttcaattttctgggccgtaagaacatgggtgaaccatataccatcatattatgcgtgcttgtgtt

SEQ ID NO: 43579 - DNA, 80 bp, synthetic construct
  misc_feature 1..80: note = Artificially Synthesized Probe
  source 1..80: mol_type = other DNA
ggatcccttgggtgatggtagaggtcttactgagttgctgtgtgaaggcaaatattttagaatatttgagactcagaatt

SEQ ID NO: 43580 - DNA, 80 bp, synthetic construct
  misc_feature 1..80: note = Artificially Synthesized Probe
  source 1..80: mol_type = other DNA
taaggtaattcacatttgcctcaaaatagggaagttaattatttggaccctgggattctttatcagcccttatggggcta

SEQ ID NO: 43581 - DNA, 80 bp, synthetic construct
  misc_feature 1..80: note = Artificially Synthesized Probe
  source 1..80: mol_type = other DNA
gtgcgggccatatttatattgttttctctctccttcatgcaggaaatttacatgccacttatgtgatagaagtttcacag

SEQ ID NO: 43582 - DNA, 80 bp, synthetic construct
  misc_feature 1..80: note = Artificially Synthesized Probe
  source 1..80: mol_type = other DNA
attgtgatgtttgtgatttcttttttatagtctaagtctagtgggcccaaaacttccttacaagcttatatttgagtctc

SEQ ID NO: 43583 - DNA, 80 bp, synthetic construct
  misc_feature 1..80: note = Artificially Synthesized Probe
  source 1..80: mol_type = other DNA
agaaattttacatttagttttttcttaaaattttttttctcaaaaaaaacactctgtttggctgctgatcaaacctaaca

SEQ ID NO: 43584 - DNA, 80 bp, synthetic construct
  misc_feature 1..80: note = Artificially Synthesized Probe
  source 1..80: mol_type = other DNA
tattatgataaaccaaagtgatttgggacaacacagcctgactctggccaaactcttgaaagacttgttgcattaaatgt

SEQ ID NO: 43585 - DNA, 80 bp, synthetic construct
  misc_feature 1..80: note = Artificially Synthesized Probe
  source 1..80: mol_type = other DNA
ctttactcagctcagaaaggccagatgtatgggaattgtaaaatatcaggatatgcataaaaactgttcaagtgcataaa

SEQ ID NO: 43586 - DNA, 80 bp, synthetic construct
  misc_feature 1..80: note = Artificially Synthesized Probe
  source 1..80: mol_type = other DNA
ctccccacccgcctgtctatcaatccatctgtgattagataggatttgaagtcattgctgtttcagttgttcttggtatt

SEQ ID NO: 43587 - DNA, 80 bp, synthetic construct
  misc_feature 1..80: note = Artificially Synthesized Probe
  source 1..80: mol_type = other DNA
tgaaaacaaggtccattttaagtgtatagaagccacctgtgcatgcctgattttaaccactggcttcaggattcagcata

SEQ ID NO: 43588 - DNA, 80 bp, synthetic construct
  misc_feature 1..80: note = Artificially Synthesized Probe
  source 1..80: mol_type = other DNA
taagatttacttttatcacctgtcagggacccttgattcaagggcacaggagaagatcctcacgtgtggttgaacagtgt

SEQ ID NO: 43589 - DNA, 80 bp, synthetic construct
  misc_feature 1..80: note = Artificially Synthesized Probe
  source 1..80: mol_type = other DNA
gagctcagatgtctgagccttgcttagcataggattttatgtaccatgatatttttgtggcattatatttttccctgtca

SEQ ID NO: 43590 - DNA, 80 bp, synthetic construct
  misc_feature 1..80: note = Artificially Synthesized Probe
  source 1..80: mol_type = other DNA
gaagatctgaacagagtgttgtaccatgtttatagatcagacaatttaatattgttaggatttccatttcgttcacatcg

SEQ ID NO: 43591 - DNA, 80 bp, synthetic construct
  misc_feature 1..80: note = Artificially Synthesized Probe
  source 1..80: mol_type = other DNA
agttgaagtagatacttccccaaagaatataaaggtatggcagataagcacatggaaagatcctcggcaccctcggagga

SEQ ID NO: 43592 - DNA, 80 bp, synthetic construct
  misc_feature 1..80: note = Artificially Synthesized Probe
  source 1..80: mol_type = other DNA
gaacaaagagttattcaagcagaccttgggtgaccacttgtttggggtactatagatgggatttatcttaaagacaaaag

SEQ ID NO: 43593 - DNA, 80 bp, synthetic construct
  misc_feature 1..80: note = Artificially Synthesized Probe
  source 1..80: mol_type = other DNA
atgggtaagcagtataaatagacgtagaatgtagggcgaacttctaaacgttctaattttcaggacagatacggttttgt

SEQ ID NO: 43594 - DNA, 80 bp, synthetic construct
  misc_feature 1..80: note = Artificially Synthesized Probe
  source 1..80: mol_type = other DNA
catgaacttctcatgggtagaatggttacacttgataagcacgttcacacacacacataggcaggcatcacataacttgt

SEQ ID NO: 43595 - DNA, 80 bp, synthetic construct
  misc_feature 1..80: note = Artificially Synthesized Probe
  source 1..80: mol_type = other DNA
acaggtaatgactcatcactgagcagtcaaatcaggtgggccgccatgatggattaaaagcccgttaaatcccaattaga

SEQ ID NO: 43596 - DNA, 80 bp, synthetic construct
  misc_feature 1..80: note = Artificially Synthesized Probe
  source 1..80: mol_type = other DNA
tgtgtgttcggaaaggatgaggaggggatgacaccgtgtagaatgttagtgctgaaagcatcttgggaggtcatggatgt

SEQ ID NO: 43597 - DNA, 80 bp, synthetic construct
  misc_feature 1..80: note = Artificially Synthesized Probe
  source 1..80: mol_type = other DNA
cgcttaacactggattggtgtttcttggaaatttggtaaaatggtgatctaattagaggtagacatagaaattctatggt

SEQ ID NO: 43598 - DNA, 80 bp, synthetic construct
  misc_feature 1..80: note = Artificially Synthesized Probe
  source 1..80: mol_type = other DNA
aacaagtgaatgcaggagtgtccatgtcctgaagggcttcagtgtgttaaaacgttgtttagaatacctgccaatatgct

SEQ ID NO: 43599 - DNA, 80 bp, synthetic construct
  misc_feature 1..80: note = Artificially Synthesized Probe
  source 1..80: mol_type = other DNA
ctactgaacaaaaggcaagttcaccttgaccgggagtataaaaaatttgcaaaagtttgaatacttctgaagtgagagac

SEQ ID NO: 43600 - DNA, 80 bp, synthetic construct
  misc_feature 1..80: note = Artificially Synthesized Probe
  source 1..80: mol_type = other DNA
ttccacatcagagtggatgtgtttcacttcagtggcctcaactgggcttttgtttatgtgaaacttatttcttccatttc

SEQ ID NO: 43601 - DNA, 80 bp, synthetic construct
  misc_feature 1..80: note = Artificially Synthesized Probe
  source 1..80: mol_type = other DNA
tactgtggcattaagaattcagtatacaatgggattcattgttctgttctgccacttgtttcagcagcctcctgagttag

SEQ ID NO: 43602 - DNA, 80 bp, synthetic construct
  misc_feature 1..80: note = Artificially Synthesized Probe
  source 1..80: mol_type = other DNA
ctggcaagcataaagattgctttgaaaggttctcctagcttgtgtcatgatgacactttataccggtgtactccctttca

SEQ ID NO: 43603 - DNA, 80 bp, synthetic construct
  misc_feature 1..80: note = Artificially Synthesized Probe
  source 1..80: mol_type = other DNA
atctttggggatggtctttctacaaggaattactatggacagtcccttgggtagtagttagatatatctgtatatattgt

SEQ ID NO: 43604 - DNA, 80 bp, synthetic construct
  misc_feature 1..80: note = Artificially Synthesized Probe
  source 1..80: mol_type = other DNA
atgtatcagcgtgtctgactcattccactccctctaggcataagatgctgccttctgtgtggtagcatttattgtgtata

SEQ ID NO: 43605 - DNA, 80 bp, synthetic construct
  misc_feature 1..80: note = Artificially Synthesized Probe
  source 1..80: mol_type = other DNA
atgatctgtttccctccaaaagcagtagggagccagtggaggatgttgagcaggaaaatgacataatcacacttaacttt

SEQ ID NO: 43606 - DNA, 80 bp, synthetic construct
  misc_feature 1..80: note = Artificially Synthesized Probe
  source 1..80: mol_type = other DNA
taagaacttcccaccttttgggggtactgcatggcaccacattttatcttcactgtggtcggagttttgagtcaagaaaa

SEQ ID NO: 43607 - DNA, 80 bp, synthetic construct
  misc_feature 1..80: note = Artificially Synthesized Probe
  source 1..80: mol_type = other DNA
catatatatggccccaccggttgatggatgctattttttgcgttcactagcattttgtatgggtttcctttgattctgtt

SEQ ID NO: 43608 - DNA, 80 bp, synthetic construct
  misc_feature 1..80: note = Artificially Synthesized Probe
  source 1..80: mol_type = other DNA
gtccgtgttgtaaaagtaaaactaattttgccttcactcacatgagccatagaaggaggaagctttattgtccctgggaa

SEQ ID NO: 43609 - DNA, 80 bp, synthetic construct
  misc_feature 1..80: note = Artificially Synthesized Probe
  source 1..80: mol_type = other DNA
agtatgccaggtgtggaggatggaatctttcagacacttacatagtgtttaaattttatggctgcccttgccccacctct

SEQ ID NO: 43610 - DNA, 80 bp, synthetic construct
  misc_feature 1..80: note = Artificially Synthesized Probe
  source 1..80: mol_type = other DNA
gcgatgaagagttcgggggtctatatttatttcagagtggcaagataaaaatgagaagaatttctactctgccatccagg

SEQ ID NO: 43611 - DNA, 80 bp, synthetic construct
  misc_feature 1..80: note = Artificially Synthesized Probe
  source 1..80: mol_type = other DNA
gtcacttcctaccatttcttccttgtgatgttcattatttttctatggagtggagggtagaaaggaagatgttaaagtcg

SEQ ID NO: 43612 - DNA, 80 bp, synthetic construct
  misc_feature 1..80: note = Artificially Synthesized Probe
  source 1..80: mol_type = other DNA
caagggtggtggatgagaccaagaatgcgtcagtgttcatccacttctgtgctaacttacaagtttctttctcttatgag

SEQ ID NO: 43613 - DNA, 80 bp, synthetic construct
  misc_feature 1..80: note = Artificially Synthesized Probe
  source 1..80: mol_type = other DNA
tgtcaggtttacattcctggcaatgctgtacaatctgggtgtttttcaaatagatgtttggtcatatttgctttatatgt

SEQ ID NO: 43614 - DNA, 80 bp, synthetic construct
  misc_feature 1..80: note = Artificially Synthesized Probe
  source 1..80: mol_type = other DNA
catggaactctgtaggagaagctaactcttagctctcaatggtatagaattccctagtatggatgcactgtacatttaca

SEQ ID NO: 43615 - DNA, 80 bp, synthetic construct
  misc_feature 1..80: note = Artificially Synthesized Probe
  source 1..80: mol_type = other DNA
ttctagtggtgcatgtggtccagcactccaaatgacatgcatctatttgctaaacatcgttgataacatgttccctttta

SEQ ID NO: 43616 - DNA, 80 bp, synthetic construct
  misc_feature 1..80: note = Artificially Synthesized Probe
  source 1..80: mol_type = other DNA
taactttgcacacatgatacacacctcacatgtgctcatacatatactgtaactgtttgggaatctatttttagtcagat

SEQ ID NO: 43617 - DNA, 80 bp, synthetic construct
  misc_feature 1..80: note = Artificially Synthesized Probe
  source 1..80: mol_type = other DNA
ggttgcttgcttatattttatagattcaggtggactctccctccagctccccaccccaccctcattttttgaccctttta

SEQ ID NO: 43618 - DNA, 80 bp, synthetic construct
  misc_feature 1..80: note = Artificially Synthesized Probe
  source 1..80: mol_type = other DNA
tgtgcatttgtaaagataagtacatttagaaagttactgctgcatcacattctgtgatatagcccattccctccctatag

SEQ ID NO: 43619 - DNA, 80 bp, synthetic construct
  misc_feature 1..80: note = Artificially Synthesized Probe
  source 1..80: mol_type = other DNA
aatgggaatcagtgtttgtttagaatctctgtgtgctgggcactctcctgggtacttatcctataacatctgtgccaagc

SEQ ID NO: 43620 - DNA, 80 bp, synthetic construct
  misc_feature 1..80: note = Artificially Synthesized Probe
  source 1..80: mol_type = other DNA
aaactccaatgagataccattgtttacccaccacatgggcaacaattcaaaaatttggtagccccctaccttgacaagcg

SEQ ID NO: 43621 - DNA, 80 bp, synthetic construct
  misc_feature 1..80: note = Artificially Synthesized Probe
  source 1..80: mol_type = other DNA
tgtagcttgaaaaagtagtgtttacttctcccgaaagattgagaagaagttagggattgtacctagctggtcatctggga

SEQ ID NO: 43622 - DNA, 80 bp, synthetic construct
  misc_feature 1..80: note = Artificially Synthesized Probe
  source 1..80: mol_type = other DNA
ccaggtgaagattttgtgtttatgtgcgcttaccttctctaaagaaaaagataatgcatagattacattcagtcctttgg

SEQ ID NO: 43623 - DNA, 80 bp, synthetic construct
  misc_feature 1..80: note = Artificially Synthesized Probe
  source 1..80: mol_type = other DNA
ggagtgtgtgtgtgtgtgtgtgttcatgcatgtgtgtgctggtatggtgaggttgtgtgcagcattggttcgaatcggga

SEQ ID NO: 43624 - DNA, 80 bp, synthetic construct
  misc_feature 1..80: note = Artificially Synthesized Probe
  source 1..80: mol_type = other DNA
gtgcagtattggttcgaatcgggagtgtgtgtgtgtgtgtgtgcatgtgtgtgctggtatggagaggttgtgtgcagcat

SEQ ID NO: 43625 - DNA, 80 bp, synthetic construct
  misc_feature 1..80: note = Artificially Synthesized Probe
  source 1..80: mol_type = other DNA
tgcacatatctgtataagaatatatgtgtggaatagtccttaatgccttttaaaatctcaagttccacaccacgtctttc

SEQ ID NO: 43626 - DNA, 80 bp, synthetic construct
  misc_feature 1..80: note = Artificially Synthesized Probe
  source 1..80: mol_type = other DNA
gtcttgcatgtatttagtctaagatctcagggaaatgtaacacccagattgacagagcctttgcccaaagcaagttgaaa

SEQ ID NO: 43627 - DNA, 80 bp, synthetic construct
  misc_feature 1..80: note = Artificially Synthesized Probe
  source 1..80: mol_type = other DNA
ttcactgagtctttgaatttctagcgtcattgactgcctttgtgtgtgagagataacagttattttcacttccttgacca

SEQ ID NO: 43628 - DNA, 80 bp, synthetic construct
  misc_feature 1..80: note = Artificially Synthesized Probe
  source 1..80: mol_type = other DNA
tttgttccccagatgctctaaattcagtggaggcgacagcactttcatttttgtaccactcctcagtggtaataggtgtg

SEQ ID NO: 43629 - DNA, 80 bp, synthetic construct
  misc_feature 1..80: note = Artificially Synthesized Probe
  source 1..80: mol_type = other DNA
ggaaggtgtcagcgatgtggctgcaactgcagagtaaagcagatccgttcctccagcccgacattttgtttaattagcaa

SEQ ID NO: 43630 - DNA, 80 bp, synthetic construct
  misc_feature 1..80: note = Artificially Synthesized Probe
  source 1..80: mol_type = other DNA
agttcataaaaacagataaagtcgagttgaaatatctctggccataagtgcctatgggttcttcataaatatggacccat

SEQ ID NO: 43631 - DNA, 80 bp, synthetic construct
  misc_feature 1..80: note = Artificially Synthesized Probe
  source 1..80: mol_type = other DNA
accttcggggaagatgggctccaacttaagcttgatcattctcttgatgtctggccctgaaaactgcatttttactctgt

SEQ ID NO: 43632 - DNA, 80 bp, synthetic construct
  misc_feature 1..80: note = Artificially Synthesized Probe
  source 1..80: mol_type = other DNA
cataatggaataagtcagtgagaatgaatgaactacaagtacaagcagcagtgtgaagtaagtctcacagtcttatcact

SEQ ID NO: 43633 - DNA, 80 bp, synthetic construct
  misc_feature 1..80: note = Artificially Synthesized Probe
  source 1..80: mol_type = other DNA
accatgttgcccatccataaataagcttggtactcattcactacatttggacaaagaattaaatacatgtctgtgtttgc

SEQ ID NO: 43634 - DNA, 80 bp, synthetic construct
  misc_feature 1..80: note = Artificially Synthesized Probe
  source 1..80: mol_type = other DNA
gtacaacaattcattttctgaaaaggtccaaaaatctcagaaaatcctgacagcttctcattggttctccttacataaac

SEQ ID NO: 43635 - DNA, 80 bp, synthetic construct
  misc_feature 1..80: note = Artificially Synthesized Probe
  source 1..80: mol_type = other DNA
tcagtaaacatactgtttactgagaagcagatctttgacctgacctccacctcttttttcttgaataatatactgaaaga

SEQ ID NO: 43636 - DNA, 80 bp, synthetic construct
  misc_feature 1..80: note = Artificially Synthesized Probe
  source 1..80: mol_type = other DNA
aaatgaactaggtttcaggatgaactttttcaccatggagatgtgtaactttgagccagtcactcaagcattttgtgtct

SEQ ID NO: 43637 - DNA, 80 bp, synthetic construct
  misc_feature 1..80: note = Artificially Synthesized Probe
  source 1..80: mol_type = other DNA
ccaaaaaggtgggacatctcaagcagggagttagagagctcacatgtcataggtggattcaaagattttctgattggcaa

SEQ ID NO: 43638 - DNA, 80 bp, synthetic construct
  misc_feature 1..80: note = Artificially Synthesized Probe
  source 1..80: mol_type = other DNA
gcaggcagcactgcgatcttatcagagctcacatttgcagccttcgtgaactggattttgaaagttaaaacagttaaaaa

SEQ ID NO: 43639 - DNA, 80 bp, synthetic construct
  misc_feature 1..80: note = Artificially Synthesized Probe
  source 1..80: mol_type = other DNA
ttctatgctgtattctcgtattcagagtttatcatttttccactcacatcctccttcattcccagaattcagcccaggaa

SEQ ID NO: 43640 - DNA, 80 bp, synthetic construct
  misc_feature 1..80: note = Artificially Synthesized Probe
  source 1..80: mol_type = other DNA
atatatacactgtgtggactcattgcttctgtgtacctctgcttctaggccttcgcagcagataaacaaggaagtgtagg

SEQ ID NO: 43641 - DNA, 80 bp, synthetic construct
  misc_feature 1..80: note = Artificially Synthesized Probe
  source 1..80: mol_type = other DNA
ccccttttttcattaggttgatttttgagatcatttttattttatatttttgacctgagacctctgaaatatgatttgca

SEQ ID NO: 43642 - DNA, 80 bp, synthetic construct
  misc_feature 1..80: note = Artificially Synthesized Probe
  source 1..80: mol_type = other DNA
agaatgaaacgtagaattaccgtattatccagcagttccactttgggatagatatcccaaatcattgaaggcaaggtctc

SEQ ID NO: 43643 - DNA, 80 bp, synthetic construct
  misc_feature 1..80: note = Artificially Synthesized Probe
  source 1..80: mol_type = other DNA
tttatcctcgtaatcacttaaatcccctaatagcttttactgcagcagaatatactgtaggccccaactagataaaatag

SEQ ID NO: 43644 - DNA, 80 bp, synthetic construct
  misc_feature 1..80: note = Artificially Synthesized Probe
  source 1..80: mol_type = other DNA
taacatatgtgacctcgattcttggcacaacttgcatattcatgtttatgtacccaattctcttgattagaaatgactat

SEQ ID NO: 43645 - DNA, 80 bp, synthetic construct
  misc_feature 1..80: note = Artificially Synthesized Probe
  source 1..80: mol_type = other DNA
aataatgtgtaccagggaggagctcagaagttgaattgtgcggcacatacagtaaaagctgaaaaaggaagataatccaa

SEQ ID NO: 43646 - DNA, 80 bp, synthetic construct
  misc_feature 1..80: note = Artificially Synthesized Probe
  source 1..80: mol_type = other DNA
ggtaggatctttgactctgtatgaacctctgtttaaaacctataccgaaagaattctagacagttgggatacagttaatt

SEQ ID NO: 43647 - DNA, 80 bp, synthetic construct
  misc_feature 1..80: note = Artificially Synthesized Probe
  source 1..80: mol_type = other DNA
ctagataattgacagtgttatatgtgctgcttggattaaatgtcaccatcccaaaagttttatcagtcagggttcgacca

SEQ ID NO: 43648 - DNA, 80 bp, synthetic construct
  misc_feature 1..80: note = Artificially Synthesized Probe
  source 1..80: mol_type = other DNA
tgtgtcttaaataattgccacttaagggaattaagaactacaagggaaggaaaatgctgacccatagactaaagcagagg

SEQ ID NO: 43649 - DNA, 80 bp, synthetic construct
  misc_feature 1..80: note = Artificially Synthesized Probe
  source 1..80: mol_type = other DNA
aaggttgacggtacccattgatgaagcctatggaggaaaattggaactctcaacatattaagtgcaagcttttctatatc

SEQ ID NO: 43650 - DNA, 80 bp, synthetic construct
  misc_feature 1..80: note = Artificially Synthesized Probe
  source 1..80: mol_type = other DNA
agaagcgacatggtaagatttgtgtcactctctagctttgtgccttgataaaatgtttaactttcctatgcctctgtttc

SEQ ID NO: 43651 - DNA, 80 bp, synthetic construct
  misc_feature 1..80: note = Artificially Synthesized Probe
  source 1..80: mol_type = other DNA
tcttcccattgccacaaaactgacatccagtggtttctgtaatgtacttagcaataacaaaggactttcactgatctctc

SEQ ID NO: 43652 - DNA, 80 bp, synthetic construct
  misc_feature 1..80: note = Artificially Synthesized Probe
  source 1..80: mol_type = other DNA
tttgttttctatctgagctaaagattgatgccaaacatggaggaaaggctgggaaagtacctaccccagcatagcttggg

SEQ ID NO: 43653 - DNA, 80 bp, synthetic construct
  misc_feature 1..80: note = Artificially Synthesized Probe
  source 1..80: mol_type = other DNA
cctgagaattctgattcttcttaggctgatattacgttaatagtgattttagcacattgcagttctctttcttacagctg

SEQ ID NO: 43654 - DNA, 80 bp, synthetic construct
  misc_feature 1..80: note = Artificially Synthesized Probe
  source 1..80: mol_type = other DNA
gagtcactattacagtgactatatggaaagtttcccagcataaagtgacactctcgttctactgaacagttttccccttc

SEQ ID NO: 43655 - DNA, 80 bp, synthetic construct
  misc_feature 1..80: note = Artificially Synthesized Probe
  source 1..80: mol_type = other DNA
tacccataacagccagcgacgactcgtatgcatttgcttgcctgaatatacccacagtttgtattagttgcctatttcca

SEQ ID NO: 43656 - DNA, 80 bp, synthetic construct
  misc_feature 1..80: note = Artificially Synthesized Probe
  source 1..80: mol_type = other DNA
ttttgcagtgtcataacctcaaagctgtctccccgacatcttcactgatcacccttaaaactgtgggtgaaaactaagtg

SEQ ID NO: 43657 - DNA, 80 bp, synthetic construct
  misc_feature 1..80: note = Artificially Synthesized Probe
  source 1..80: mol_type = other DNA
cagctgatcatgctgctttgaggatgtgactgtttcagtacattttactgaattccttttagaggagtttaatcatatga

SEQ ID NO: 43658 - DNA, 80 bp, synthetic construct
  misc_feature 1..80: note = Artificially Synthesized Probe
  source 1..80: mol_type = other DNA
tctgtctttcaaagaacagtgggctttctccctgcgccttttgtttctacttacttcctctcatttcttttctccatttc

SEQ ID NO: 43659 - DNA, 80 bp, synthetic construct
  misc_feature 1..80: note = Artificially Synthesized Probe
  source 1..80: mol_type = other DNA
agtgtgtaaaaagaaaggacaatctaaagcttgggaagcaaactgtggaaaaatcaaggaagtctacagccagccatggt

SEQ ID NO: 43660 - DNA, 80 bp, synthetic construct
  misc_feature 1..80: note = Artificially Synthesized Probe
  source 1..80: mol_type = other DNA
tgttcaagaaaaaacaatactgatagattctttttaaccccccactggctatggttaagctgatggctccagatgaccat

SEQ ID NO: 43661 - DNA, 80 bp, synthetic construct
  misc_feature 1..80: note = Artificially Synthesized Probe
  source 1..80: mol_type = other DNA
ttctctattatgaccactactactgtgatacccccagtgcctccaaatgttcaaatgtactgaacttttcttttttctct

SEQ ID NO: 43662 - DNA, 80 bp, synthetic construct
  misc_feature 1..80: note = Artificially Synthesized Probe
  source 1..80: mol_type = other DNA
cctggcacagctctatgaagtattgctagaataactgcaaaggtgttgcaagcagttttctcagcttctgtcattcaaaa

SEQ ID NO: 43663 - DNA, 80 bp, synthetic construct
  misc_feature 1..80: note = Artificially Synthesized Probe
  source 1..80: mol_type = other DNA
aatggaatatggtcatttgggcttggagtgaagagagaagtaaggtagaccacacagggcatgtagagatgtttcttctg

SEQ ID NO: 43664 - DNA, 80 bp, synthetic construct
  misc_feature 1..80: note = Artificially Synthesized Probe
  source 1..80: mol_type = other DNA
atgtcattgtgtagacgggaaatttgtttttgataggcttcaccacaccagcaggaatctggtccattagggaactgtgg

SEQ ID NO: 43665 - DNA, 80 bp, synthetic construct
  misc_feature 1..80: note = Artificially Synthesized Probe
  source 1..80: mol_type = other DNA
ctctaaatggagccccaagcattgtaattcagtttaatcctaaaggtgttgttatatgttacaagccagtcgtgcagtct

SEQ ID NO: 43666 - DNA, 80 bp, synthetic construct
  misc_feature 1..80: note = Artificially Synthesized Probe
  source 1..80: mol_type = other DNA
gtgctggcagagtccacaggagaccatcagtggcaagaccatacttttttgtacattacatgattcctacttcagaaagc

SEQ ID NO: 43667 - DNA, 80 bp, synthetic construct
  misc_feature 1..80: note = Artificially Synthesized Probe
  source 1..80: mol_type = other DNA
atctgcattctcagcattggtcttcaggttgcagttcttgaaacatgacttcatcaatagctagggagaatctgacaaag

SEQ ID NO: 43668 - DNA, 80 bp, synthetic construct
  misc_feature 1..80: note = Artificially Synthesized Probe
  source 1..80: mol_type = other DNA
aacttacggggttttttggaataattcactctctcctctctgttgtcttcctagtggagcattctagatgagggattgaa

SEQ ID NO: 43669 - DNA, 80 bp, synthetic construct
  misc_feature 1..80: note = Artificially Synthesized Probe
  source 1..80: mol_type = other DNA
tgtttaagataaaggttaagtaagtgttctaaaggtgagaaagcaggatttgggtctcagggttgcagggagattatttt

SEQ ID NO: 43670 - DNA, 80 bp, synthetic construct
  misc_feature 1..80: note = Artificially Synthesized Probe
  source 1..80: mol_type = other DNA
ttagaccatcatcatcagtattgtcatgacaatcgttgtttaagaggcagcaggataaaaacttcctttctactgggaag

SEQ ID NO: 43671 - DNA, 80 bp, synthetic construct
  misc_feature 1..80: note = Artificially Synthesized Probe
  source 1..80: mol_type = other DNA
catttaggtaaaagtgcctctttttggcacttttaggattattgtgaagtgaaatgagatgacaaatgtagaggactggg

SEQ ID NO: 43672 - DNA, 80 bp, synthetic construct
  misc_feature 1..80: note = Artificially Synthesized Probe
  source 1..80: mol_type = other DNA
cacatatgaagaaacaaagtcattgagatttgagatcagttgtccaagatcacggtgacctagcagatcatggtgaccta

SEQ ID NO: 43673 - DNA, 80 bp, synthetic construct
  misc_feature 1..80: note = Artificially Synthesized Probe
  source 1..80: mol_type = other DNA
taatgtatgaaaaattccctttggtggttttactgtatttactcagggacacaatgatttcctcaaataccccaaactgt

SEQ ID NO: 43674 - DNA, 80 bp, synthetic construct
  misc_feature 1..80: note = Artificially Synthesized Probe
  source 1..80: mol_type = other DNA
gcctatcattcttgtatacaaagagattatcctgctctgacagttaatgcatggtcttcatcccacatcagccccttctt

SEQ ID NO: 43675 - DNA, 80 bp, synthetic construct
  misc_feature 1..80: note = Artificially Synthesized Probe
  source 1..80: mol_type = other DNA
gtaagactaggaggcagagcagttatataacagactttcatatgtagctcccactgtcgtgtacatggatccctggaccc

SEQ ID NO: 43676 - DNA, 80 bp, synthetic construct
  misc_feature 1..80: note = Artificially Synthesized Probe
  source 1..80: mol_type = other DNA
atacctgagatgtttagatacaggcatgcaatcatggagagtgaagcatgcatcccctcaagcatttatcctttgtgtta

SEQ ID NO: 43677 - DNA, 80 bp, synthetic construct
  misc_feature 1..80: note = Artificially Synthesized Probe
  source 1..80: mol_type = other DNA
gttatacttatgttcccaacaacactgtttaagggctccttctctccacattttctttggcatttttgttgcttgccttt

SEQ ID NO: 43678 - DNA, 80 bp, synthetic construct
  misc_feature 1..80: note = Artificially Synthesized Probe
  source 1..80: mol_type = other DNA
cccaaatttttaaagaaaggtagaggccagacacagtggctcacacctgtaatctgaacactttgggagactgaggcagg

SEQ ID NO: 43679 - DNA, 80 bp, synthetic construct
  misc_feature 1..80: note = Artificially Synthesized Probe
  source 1..80: mol_type = other DNA
tatactgcagacctttgagctccaacctacacagtctcttgacttaaattttattgtctttcccagggctccactgctac

SEQ ID NO: 43680 - DNA, 80 bp, synthetic construct
  misc_feature 1..80: note = Artificially Synthesized Probe
  source 1..80: mol_type = other DNA
gttttgccagacaggactcacagttaacggttcttttctcttagcaggtgcctctttcgtctgatcttcatattttcaga

SEQ ID NO: 43681 - DNA, 80 bp, synthetic construct
  misc_feature 1..80: note = Artificially Synthesized Probe
  source 1..80: mol_type = other DNA
taattttttatgcttttgtgatatttcagtttgcttgtttgatctgaggctgctggagctcccagtgaactctgctgtgg

SEQ ID NO: 43682 - DNA, 80 bp, synthetic construct
  misc_feature 1..80: note = Artificially Synthesized Probe
  source 1..80: mol_type = other DNA
cccctcctggctgctttcctgggctggtgttgagtgtctgtggcatttccaggtgcacggttcaagctgtcagtggatct

SEQ ID NO: 43683 - DNA, 80 bp, synthetic construct
  misc_feature 1..80: note = Artificially Synthesized Probe
  source 1..80: mol_type = other DNA
tccatctgagaccagctcagcttggaccttattttccttatcgctgtcagcattttgggcaaagccattcaacaagtctc

SEQ ID NO: 43684 - DNA, 80 bp, synthetic construct
  misc_feature 1..80: note = Artificially Synthesized Probe
  source 1..80: mol_type = other DNA
gctttatctgatcacgtctagtctgctcagagctgctcaaatctggactgttgccactgcctgagctcacaccttgattt

SEQ ID NO: 43685 - DNA, 80 bp, synthetic construct
  misc_feature 1..80: note = Artificially Synthesized Probe
  source 1..80: mol_type = other DNA
cgccttgaagtaaccagtaacaggttttctagtgtttatttgattatttctgtcaatgtaggctagtggtgtaggccaac

SEQ ID NO: 43686 - DNA, 80 bp, synthetic construct
  misc_feature 1..80: note = Artificially Synthesized Probe
  source 1..80: mol_type = other DNA
cttcccatacagttcaataaacgcatctttgtagtgagcatcaaggtttcagcctttagttttgaaaaatcttaataccc

SEQ ID NO: 43687 - DNA, 80 bp, synthetic construct
  misc_feature 1..80: note = Artificially Synthesized Probe
  source 1..80: mol_type = other DNA
aagcagagttatggcgatatattacccacgtgagtctgattatagctcagcattggcttgtacagtagctccttgctcca

SEQ ID NO: 43688 - DNA, 80 bp, synthetic construct
  misc_feature 1..80: note = Artificially Synthesized Probe
  source 1..80: mol_type = other DNA
gtttttatggaagtagagcagcttgcattcttattccatattggttgaccccaaatgttggatagcccccttgcagtcag

SEQ ID NO: 43689 - DNA, 80 bp, synthetic construct
  misc_feature 1..80: note = Artificially Synthesized Probe
  source 1..80: mol_type = other DNA
taggctggacaggcagaaaagagaaaaggattgctgtatcctatggcatagacttttaaccatttagtcaattgtgattt

SEQ ID NO: 43690 - DNA, 80 bp, synthetic construct
  misc_feature 1..80: note = Artificially Synthesized Probe
  source 1..80: mol_type = other DNA
ttcattggcatttgccgactacttctggatccatgactcttactgtggttgctaggatttgggatttgattttgtgaatt

SEQ ID NO: 43691 - DNA, 80 bp, synthetic construct
  misc_feature 1..80: note = Artificially Synthesized Probe
  source 1..80: mol_type = other DNA
ggcatctaatagtctcctgaaagcgaaaaattgaagatgaaaaacttaagtgggaatggagacacaaatttaagagctgt

SEQ ID NO: 43692 - DNA, 80 bp, synthetic construct
  misc_feature 1..80: note = Artificially Synthesized Probe
  source 1..80: mol_type = other DNA
ttcctagttttctcaaaaacttggatttttggagggacctcacaaaaagcactaatccagctgaaagatgaatccagtag

SEQ ID NO: 43693 - DNA, 80 bp, synthetic construct
  misc_feature 1..80: note = Artificially Synthesized Probe
  source 1..80: mol_type = other DNA
caaatattttgagacatttgctgagaaaatcctgcatgaaaggaagccaggaacccagcagaggaaagaaagggagcacc

SEQ ID NO: 43694 - DNA, 80 bp, synthetic construct
  misc_feature 1..80: note = Artificially Synthesized Probe
  source 1..80: mol_type = other DNA
gagacccaagcgttgatctctgagaagagtcctgagcatggtggtttcatttcaaatgtggattgttttccagttacaat

SEQ ID NO: 43695 - DNA, 80 bp, synthetic construct
  misc_feature 1..80: note = Artificially Synthesized Probe
  source 1..80: mol_type = other DNA
ggaacctctcgtcactgtcttaggagcgtcacctctgtttcctctcttcatcccacagcaggtagatagataaaaatatt

SEQ ID NO: 43696 - DNA, 80 bp, synthetic construct
  misc_feature 1..80: note = Artificially Synthesized Probe
  source 1..80: mol_type = other DNA
aggcacagtcaggtgttatcttaggctgtgtaagccattctacagcatgcagtgtttgttcctaaagaagtgttcacttt

SEQ ID NO: 43697 - DNA, 80 bp, synthetic construct
  misc_feature 1..80: note = Artificially Synthesized Probe
  source 1..80: mol_type = other DNA
gccgctgctcactgcaactgaagttaccagaggaaaaaaaaagtcatcacatcttttttaaaagtacctgggccatccaa

SEQ ID NO: 43698 - DNA, 80 bp, synthetic construct
  misc_feature 1..80: note = Artificially Synthesized Probe
  source 1..80: mol_type = other DNA
tgagttcctggctaattattacaaccacctaaattagtgttatccttagggaaagcaaacaaaaataaggaggaaagcca

SEQ ID NO: 43699 - DNA, 80 bp, synthetic construct
  misc_feature 1..80: note = Artificially Synthesized Probe
  source 1..80: mol_type = other DNA
atgcagtctagtgttgatttttctgctgacgtttgacaacttactgtgaaataggaataaatgtgagctctcggtgggaa

SEQ ID NO: 43700 - DNA, 80 bp, synthetic construct
  misc_feature 1..80: note = Artificially Synthesized Probe
  source 1..80: mol_type = other DNA
tgcaattattattataggtcttactgtattaccaaacccagtaagattgtacgcgaggaacggtgagctcacgtgtggtg

SEQ ID NO: 43701 - DNA, 80 bp, synthetic construct
  misc_feature 1..80: note = Artificially Synthesized Probe
  source 1..80: mol_type = other DNA
ggattccaatacctactctaaagatacaataatgaagacatatggatgcaagaaacatagtcggaaggccacaaatagac

SEQ ID NO: 43702 - DNA, 80 bp, synthetic construct
  misc_feature 1..80: note = Artificially Synthesized Probe
  source 1..80: mol_type = other DNA
aagctctggaaaagacagatctctagggacagaaagcagatatttgattgacaggatgtgggaggttactgactacagga

SEQ ID NO: 43703 - DNA, 80 bp, synthetic construct
  misc_feature 1..80: note = Artificially Synthesized Probe
  source 1..80: mol_type = other DNA
agcatagaaaaattaaacgctctgtgcagatgtcaattagttccttctgcgaatctgatacccatcaacaaatggagtac

SEQ ID NO: 43704 - DNA, 80 bp, synthetic construct
  misc_feature 1..80: note = Artificially Synthesized Probe
  source 1..80: mol_type = other DNA
tgttcttttgtgtattttactaaagaatgtcagctgaactcgtggggaaggggaagtgctgatatgtcctcccttgtctt

SEQ ID NO: 43705 - DNA, 80 bp, synthetic construct
  misc_feature 1..80: note = Artificially Synthesized Probe
  source 1..80: mol_type = other DNA
ttgtaggtccaaagcttactttttagcatgaaccttgtataaatttgaactctccagcttcgcatggcaccaggaaagct

SEQ ID NO: 43706 - DNA, 80 bp, synthetic construct
  misc_feature 1..80: note = Artificially Synthesized Probe
  source 1..80: mol_type = other DNA
gaagagaaaactacagtgaggggtctcccctgggacagttggagtttgtttatttgcaataaggcaagtgttgttgtttg

SEQ ID NO: 43707 - DNA, 80 bp, synthetic construct
  misc_feature 1..80: note = Artificially Synthesized Probe
  source 1..80: mol_type = other DNA
agtgttccctaatctaaggaaagctcgtcagaaaactgtatttagggctgggctttaaatggttcaaatggtgaacactc

SEQ ID NO: 43708 - DNA, 80 bp, synthetic construct
  misc_feature 1..80: note = Artificially Synthesized Probe
  source 1..80: mol_type = other DNA
gctcatgtttagattctcaaacggtagggagtattacagtgcagttcactttggacacgtgtcctatgaccaggaaacca

SEQ ID NO: 43709 - DNA, 80 bp, synthetic construct
  misc_feature 1..80: note = Artificially Synthesized Probe
  source 1..80: mol_type = other DNA
gcttcctaaattattttgctgaccgtgctgtttgtagctctgggtcagctctgtctcactgtgcatttgttatatttctt

SEQ ID NO: 43710 - DNA, 80 bp, synthetic construct
  misc_feature 1..80: note = Artificially Synthesized Probe
  source 1..80: mol_type = other DNA
aggactttatgaaacagagaaggcagcttccgtaaggtaaatcctactagatgaggcaggcgccaacaagcattttctta

SEQ ID NO: 43711 - DNA, 80 bp, synthetic construct
  misc_feature 1..80: note = Artificially Synthesized Probe
  source 1..80: mol_type = other DNA
taatatcatttaccagaaggcatgtgtaacagatttaatgagctagcaggtcacctgaatccagctgttcccgaccagct

SEQ ID NO: 43712 - DNA, 80 bp, synthetic construct
  misc_feature 1..80: note = Artificially Synthesized Probe
  source 1..80: mol_type = other DNA
gatttaattccctgaggcagagagagttttaattcctttttctttagtttactcagcttagctcagtgaagggcaaagca

SEQ ID NO: 43713 - DNA, 80 bp, synthetic construct
  misc_feature 1..80: note = Artificially Synthesized Probe
  source 1..80: mol_type = other DNA
acatggacacaggaaggggaatatcacactctggggactgtggtggggtcgggggaggggggagggatagcattgggaga

SEQ ID NO: 43714 - DNA, 80 bp, synthetic construct
  misc_feature 1..80: note = Artificially Synthesized Probe
  source 1..80: mol_type = other DNA
aaagaactctgggtgctggtgctgtggatttgtattacaaggaaagagtacgcataaatgtatctgctcttatttccata

SEQ ID NO: 43715 - DNA, 80 bp, synthetic construct
  misc_feature 1..80: note = Artificially Synthesized Probe
  source 1..80: mol_type = other DNA
gatatctttgaagtgccgactgtaacaataggagttcaacacagggagggacatcatgggttggaaaaattagtaaatgg

SEQ ID NO: 43716 - DNA, 80 bp, synthetic construct
  misc_feature 1..80: note = Artificially Synthesized Probe
  source 1..80: mol_type = other DNA
cagccttcagccttcttcccatttttctcctaaaagggcttatgtgtttttaaaaaatggatttgttcttgctgatatgg

SEQ ID NO: 43717 - DNA, 80 bp, synthetic construct
  misc_feature 1..80: note = Artificially Synthesized Probe
  source 1..80: mol_type = other DNA
cagcccacctacctcacaggctatggtgtttactaaatggaataacaaacgaaagtgttttacaaataaaaggtggtatt

SEQ ID NO: 43718 - DNA, 80 bp, synthetic construct
  misc_feature 1..80: note = Artificially Synthesized Probe
  source 1..80: mol_type = other DNA
tatttctatttgtgttgagaaactaaaagtttaaccaaccctctttcttgctgcctcacctgctaccactgcagtgtggc

SEQ ID NO: 43719 - DNA, 80 bp, synthetic construct
  misc_feature 1..80: note = Artificially Synthesized Probe
  source 1..80: mol_type = other DNA
tccacattattgatagcagcagagatattgacagtctgtgcttggaaggaaaataggagtttgatatgacatattgtgtg

SEQ ID NO: 43720 - DNA, 80 bp, synthetic construct
  misc_feature 1..80: note = Artificially Synthesized Probe
  source 1..80: mol_type = other DNA
acaaacctcagacttgggaatgtatgtttgaggagactaaagtgaacagcgggtctatgggagttttgattcttcgttag

SEQ ID NO: 43721 - DNA, 80 bp, synthetic construct
  misc_feature 1..80: note = Artificially Synthesized Probe
  source 1..80: mol_type = other DNA
ataattgcactgtagccacagaaggcaactctatgagccagttctttgaaatttgttgtagcttgccttttggtacagca

SEQ ID NO: 43722 - DNA, 80 bp, synthetic construct
  misc_feature 1..80: note = Artificially Synthesized Probe
  source 1..80: mol_type = other DNA
ggtaatgacactactgtaacatgggaaatcctccatgggaaatttacatcagctgctttggggtacacatagaggcagcc

SEQ ID NO: 43723 - DNA, 80 bp, synthetic construct
  misc_feature 1..80: note = Artificially Synthesized Probe
  source 1..80: mol_type = other DNA
tctgatcttttgcggttttactttttataaatccaaacctttagttcatttggagatattttgctgtaaggcgtgacata

SEQ ID NO: 43724 - DNA, 80 bp, synthetic construct
  misc_feature 1..80: note = Artificially Synthesized Probe
  source 1..80: mol_type = other DNA
cttgtgtggatgacttgatttctagctatgtgttgattaatgcagtgaagtaaccgttcttacaagagtagattagggga

SEQ ID NO: 43725 - DNA, 80 bp, synthetic construct
  misc_feature 1..80: note = Artificially Synthesized Probe
  source 1..80: mol_type = other DNA
tcactccagggtcatgtgtacaactaaattcccaaaaacagcaacagtcatgtgtcaccaaaataataagtgggtcacag

SEQ ID NO: 43726 - DNA, 80 bp, synthetic construct
  misc_feature 1..80: note = Artificially Synthesized Probe
  source 1..80: mol_type = other DNA
atacctgcaaatcactgctcatagcactgtggactacctttctctgcgaataaaaagcatgtgtcccttacacgtttttt

SEQ ID NO: 43727 - DNA, 80 bp, synthetic construct
  misc_feature 1..80: note = Artificially Synthesized Probe
  source 1..80: mol_type = other DNA
acattctgtttatggtgtccttgggcacctgtgctgaaatccattttccgacactttttgagttagctgaatgaacatca

SEQ ID NO: 43728 - DNA, 80 bp, synthetic construct
  misc_feature 1..80: note = Artificially Synthesized Probe
  source 1..80: mol_type = other DNA
atacacagtcattttgctgtgctgcagatcgcctgcgtgggagtcaggatgcatatttaatgcctgatttaaaaagaaaa

SEQ ID NO: 43729 - DNA, 80 bp, synthetic construct
  misc_feature 1..80: note = Artificially Synthesized Probe
  source 1..80: mol_type = other DNA
gtagcttggtcccagcttattgaggatgtactaggggttaaaaacagtgtgaactaatcagtaggttcacccactgttta

SEQ ID NO: 43730 - DNA, 80 bp, synthetic construct
  misc_feature 1..80: note = Artificially Synthesized Probe
  source 1..80: mol_type = other DNA
taattgtttcaattgaaacagtagattatacattcctttccccaccgccatattcgtatagccagctaatttggggagac

SEQ ID NO: 43731 - DNA, 80 bp, synthetic construct
  misc_feature 1..80: note = Artificially Synthesized Probe
  source 1..80: mol_type = other DNA
taattacaaatgggttttttgaggttatgattgtgagtagtgccgtcaatcccatataaggacaagtattggaaggcatg

SEQ ID NO: 43732 - DNA, 80 bp, synthetic construct
  misc_feature 1..80: note = Artificially Synthesized Probe
  source 1..80: mol_type = other DNA
tatccagtgccactgctattaatacctctatatttatcaaagtatgtcagaaaagttgaagctagagaaggagtcccagc

SEQ ID NO: 43733 - DNA, 80 bp, synthetic construct
  misc_feature 1..80: note = Artificially Synthesized Probe
  source 1..80: mol_type = other DNA
cagatcactttttccttcttccaccatgtgttgtggtccaagtaactgtttctctcatccctcttataatggtagcctcc

SEQ ID NO: 43734 - DNA, 80 bp, synthetic construct
  misc_feature 1..80: note = Artificially Synthesized Probe
  source 1..80: mol_type = other DNA
aaacttcaggagtaaatttgttgagtctacaggctttgtgtgcctgtagagagcacacatattaataatgtatattaact

SEQ ID NO: 43735 - DNA, 80 bp, synthetic construct
  misc_feature 1..80: note = Artificially Synthesized Probe
  source 1..80: mol_type = other DNA
tcccccaacattgggaattgaagtttgacttgaaatttgggtggggacacagagccaaaccataccacctagtatccatc

SEQ ID NO: 43736 - DNA, 80 bp, synthetic construct
  misc_feature 1..80: note = Artificially Synthesized Probe
  source 1..80: mol_type = other DNA
gttagaagatatgaaaacaaatgtacaataatgagacagtgggccgtggctggaggagagcaatctgtgtgtcattactg

SEQ ID NO: 43737 - DNA, 80 bp, synthetic construct
  misc_feature 1..80: note = Artificially Synthesized Probe
  source 1..80: mol_type = other DNA
gattaatagatataactatataagctacattctgtatgtcagaagttcccagaataaaaaggcaactagaatactgagaa

SEQ ID NO: 43738 - DNA, 80 bp, synthetic construct
  misc_feature 1..80: note = Artificially Synthesized Probe
  source 1..80: mol_type = other DNA
agaaataccatttgatccagcaagcccattactaaatgtataccccaaagaatataaattgttctattgtaaagatacct

SEQ ID NO: 43739 - DNA, 80 bp, synthetic construct
  misc_feature 1..80: note = Artificially Synthesized Probe
  source 1..80: mol_type = other DNA
ttttgatcaatctgcaacaaatattgagctccctcttcagaacgcactgtgctaagttatggggcaagtttcgatctaga

SEQ ID NO: 43740 - DNA, 80 bp, synthetic construct
  misc_feature 1..80: note = Artificially Synthesized Probe
  source 1..80: mol_type = other DNA
ttcccagctttattttatctgagtttgcacaccaaccagactaggttgtacaaaacgaagactatttccatctgatcatt

SEQ ID NO: 43741 - DNA, 80 bp, synthetic construct
  misc_feature 1..80: note = Artificially Synthesized Probe
  source 1..80: mol_type = other DNA
tacagatgccttgatgtttcttcagctttttcaccctttgaacgtagtaattagtcattatgctgccaagtgtgcgtgtt

SEQ ID NO: 43742 - DNA, 80 bp, synthetic construct
  misc_feature 1..80: note = Artificially Synthesized Probe
  source 1..80: mol_type = other DNA
tctgctactgttgtttccaaataactgccgtgtttattaatggtatgtgattggccacatgcacacctcactaaatactt

SEQ ID NO: 43743 - DNA, 80 bp, synthetic construct
  misc_feature 1..80: note = Artificially Synthesized Probe
  source 1..80: mol_type = other DNA
aagtttccatcttgagctatgtgcaagtgttgttgccatctgatctctaattctctgatttggggcaaacagcagattta

SEQ ID NO: 43744 - DNA, 80 bp, synthetic construct
  misc_feature 1..80: note = Artificially Synthesized Probe
  source 1..80: mol_type = other DNA
caacacaggaatttgaggggacacatttcagctcctaacagacttaaaatatacgttaaacaaatacctctaagtgactc

SEQ ID NO: 43745 - DNA, 80 bp, synthetic construct
  misc_feature 1..80: note = Artificially Synthesized Probe
  source 1..80: mol_type = other DNA
aatgcatgcaggtgaataaggtaaagttcagaagatgcttccatagaactgttgcccttcaaaagataggaattctgaaa

SEQ ID NO: 43746 - DNA, 80 bp, synthetic construct
  misc_feature 1..80: note = Artificially Synthesized Probe
  source 1..80: mol_type = other DNA
cctgggaggaaagttcatttcaaaggtcacatgatctttggggctgggtggtcatagagtattaaaagaaaaaacatgat

SEQ ID NO: 43747 - DNA, 80 bp, synthetic construct
  misc_feature 1..80: note = Artificially Synthesized Probe
  source 1..80: mol_type = other DNA
ccagtcattaataaatcctgtttattcaaggtcagtttataaccctcttgggccatgggtgtttgcagacctgaaaggtg

SEQ ID NO: 43748 - DNA, 80 bp, synthetic construct
  misc_feature 1..80: note = Artificially Synthesized Probe
  source 1..80: mol_type = other DNA
agcagctgatccaggaaaacatgttacccttggcaaagaaaagttactgctaagcaagctctaagatatttacataattt

SEQ ID NO: 43749 - DNA, 80 bp, synthetic construct
  misc_feature 1..80: note = Artificially Synthesized Probe
  source 1..80: mol_type = other DNA
taagagtgctcagaatagggggaagacagtattagataactaagactgctcagaatggggggaagacagtattagataac

SEQ ID NO: 43750 - DNA, 80 bp, synthetic construct
  misc_feature 1..80: note = Artificially Synthesized Probe
  source 1..80: mol_type = other DNA
ggccttgtgcatcatgaaaccaagctgtgttatacacacatatcagcgttctgtaattctactctacacactgtgaaagc

SEQ ID NO: 43751 - DNA, 80 bp, synthetic construct
  misc_feature 1..80: note = Artificially Synthesized Probe
  source 1..80: mol_type = other DNA
aagagaaaacaatttagagtttcagtcatacatcatctctgggggaaactaagttgacatgtgggaggttaatgtataca

SEQ ID NO: 43752 - DNA, 80 bp, synthetic construct
  misc_feature 1..80: note = Artificially Synthesized Probe
  source 1..80: mol_type = other DNA
tagaagagctcctgtgcattacagctagacagctcatcccagtgaaatctcatgtgtatctgattaccaatgggcattgc

SEQ ID NO: 43753 - DNA, 80 bp, synthetic construct
  misc_feature 1..80: note = Artificially Synthesized Probe
  source 1..80: mol_type = other DNA
agaagtatttccactcttttggggttgctgcctttggccatctaattgcttcttaggaaggaagagggaaattgcttcta

SEQ ID NO: 43754 - DNA, 80 bp, synthetic construct
  misc_feature 1..80: note = Artificially Synthesized Probe
  source 1..80: mol_type = other DNA
agagaatgtgtcccttctcaggggggcacgtgctcattgctcttccctggtaattgataatcttagaagttatactcatt

SEQ ID NO: 43755 - DNA, 80 bp, synthetic construct
  misc_feature 1..80: note = Artificially Synthesized Probe
  source 1..80: mol_type = other DNA
aaatccatgtttcaattactgtatcacctaatcttccaagcatacacatggaatactgttcctttgtgtggcagctgtaa

SEQ ID NO: 43756 - DNA, 80 bp, synthetic construct
  misc_feature 1..80: note = Artificially Synthesized Probe
  source 1..80: mol_type = other DNA
actgctagaatcatgggacgtgtctcatcattcttactgatgtgtggatgataaagagactgaggctgctgtgacaacag

SEQ ID NO: 43757 - DNA, 80 bp, synthetic construct
  misc_feature 1..80: note = Artificially Synthesized Probe
  source 1..80: mol_type = other DNA
ggctacacgtggtttcagccgcaacataatcaaaccattaggcattctgagctcattaataacttgtagctgagtgtgtg

SEQ ID NO: 43758 - DNA, 80 bp, synthetic construct
  misc_feature 1..80: note = Artificially Synthesized Probe
  source 1..80: mol_type = other DNA
acacacagaatccatctaaacaagcaataccttgaaatccactcctacgatgtctttttagccatgagatcactcaggcc

SEQ ID NO: 43759 - DNA, 80 bp, synthetic construct
  misc_feature 1..80: note = Artificially Synthesized Probe
  source 1..80: mol_type = other DNA
gagtcataatattgtataattagagtcctaagagtctgtagagagaaaatgatgtaactgcccactgaatttaggagtgc

SEQ ID NO: 43760 - DNA, 80 bp, synthetic construct
  misc_feature 1..80: note = Artificially Synthesized Probe
  source 1..80: mol_type = other DNA
ctccgcgtcctcaccagcacttggcatgatcggtctttttaaaattttagccattctaatgggtgtgttgtgtatctcat

SEQ ID NO: 43761 - DNA, 80 bp, synthetic construct
  misc_feature 1..80: note = Artificially Synthesized Probe
  source 1..80: mol_type = other DNA
ggtttttgtttgtttgttttcctttaatggaataaggtctttagaactagactccttggcggttctagcttagactacaa

SEQ ID NO: 43762 - DNA, 80 bp, synthetic construct
  misc_feature 1..80: note = Artificially Synthesized Probe
  source 1..80: mol_type = other DNA
tgtcagcaatatgtttctgaataaggaatgaagtttttttcagcttgattgggaaaaatctgggtgtgggggggtgtggg

SEQ ID NO: 43763 - DNA, 80 bp, synthetic construct
  misc_feature 1..80: note = Artificially Synthesized Probe
  source 1..80: mol_type = other DNA
ctttgtttttggattgcagatcaagtatgcattggggggaggtagatgactatactcttaagcagaaggatcaaatatgt

SEQ ID NO: 43764 - DNA, 80 bp, synthetic construct
  misc_feature 1..80: note = Artificially Synthesized Probe
  source 1..80: mol_type = other DNA
ctggagcggctgtgcagagaatctgtgagaatcaatctcctcccttctttggctttttgttttcatagagttgaattgaa

SEQ ID NO: 43765 - DNA, 80 bp, synthetic construct
  misc_feature 1..80: note = Artificially Synthesized Probe
  source 1..80: mol_type = other DNA
tcggtactgtcattctgattgtctggctgctgcaggaaagagtggagtatctttgttgagaaaaatacctgatgacgttt

SEQ ID NO: 43766 - DNA, 80 bp, synthetic construct
  misc_feature 1..80: note = Artificially Synthesized Probe
  source 1..80: mol_type = other DNA
tgtgaacagttatgattcctaaaaactgaaaaaattaaattggagggtgggaaggggcagaaggggtgagcaggcagtgt

SEQ ID NO: 43767 - DNA, 80 bp, synthetic construct
  misc_feature 1..80: note = Artificially Synthesized Probe
  source 1..80: mol_type = other DNA
cgcgtattcagcagaacttctgctccctgctttgggagttctagaatcataatctaaatattagcaaggacattggagcc

SEQ ID NO: 43768 - DNA, 80 bp, synthetic construct
  misc_feature 1..80: note = Artificially Synthesized Probe
  source 1..80: mol_type = other DNA
tgaacgcagaattcagggagcccaaatcttttattacaaggagtaagcttgcctgttctctgtccaagaggagtacttat

SEQ ID NO: 43769 - DNA, 80 bp, synthetic construct
  misc_feature 1..80: note = Artificially Synthesized Probe
  source 1..80: mol_type = other DNA
aaatgtgacaaactacaaaagcacccgagtgcattcttcctgtgctcacttacggaacctaaaaattctactagtagtca

SEQ ID NO: 43770 - DNA, 80 bp, synthetic construct
  misc_feature 1..80: note = Artificially Synthesized Probe
  source 1..80: mol_type = other DNA
attgtataattacattacctcgctgttatctgccacaggagtcgcgcgcttatgctagattgcctttgccccttcagaat

SEQ ID NO: 43771 - DNA, 80 bp, synthetic construct
  misc_feature 1..80: note = Artificially Synthesized Probe
  source 1..80: mol_type = other DNA
attttaaaaatctactgtggaaattttctggaggacttcagtgtgccgtgcatagctgctgagatagaatgacgcactgt

SEQ ID NO: 43772 - DNA, 80 bp, synthetic construct
  misc_feature 1..80: note = Artificially Synthesized Probe
  source 1..80: mol_type = other DNA
gttctgtttactgtaaatttgattttaatgatgcctctgtgcggttactgagaagcagtttgctttctaccttcatatga

SEQ ID NO: 43773 - DNA, 80 bp, synthetic construct
  misc_feature 1..80: note = Artificially Synthesized Probe
  source 1..80: mol_type = other DNA
gttctgaagaagtactattcatgggtaaatgactagatcagagcccttcccagcctaattttaaagtgccatctcatcgc

SEQ ID NO: 43774 - DNA, 80 bp, synthetic construct
  misc_feature 1..80: note = Artificially Synthesized Probe
  source 1..80: mol_type = other DNA
tatgctatgatatgtctaacttgtccttaggccagctcctgtcagctgaccaaaactgatctgtactctgagataaatct

SEQ ID NO: 43775 - DNA, 80 bp, synthetic construct
  misc_feature 1..80: note = Artificially Synthesized Probe
  source 1..80: mol_type = other DNA
tcaaggtgctttcattacgacaaggaaccatcccagcattctcaagcttactgggcctacgaaaatataaaatctaaagt

SEQ ID NO: 43776 - DNA, 80 bp, synthetic construct
  misc_feature 1..80: note = Artificially Synthesized Probe
  source 1..80: mol_type = other DNA
atgtaagcttaacaaaagcgtaaggtatttattctgtgggaacaaatgatgacagtaaggaaggagcagcacacacacag

SEQ ID NO: 43777 - DNA, 80 bp, synthetic construct
  misc_feature 1..80: note = Artificially Synthesized Probe
  source 1..80: mol_type = other DNA
gtttcccaaacgctgtatccatttggccatttgcatttggtgagctttacagttcatatttactagaaagagctcaaaac

SEQ ID NO: 43778 - DNA, 80 bp, synthetic construct
  misc_feature 1..80: note = Artificially Synthesized Probe
  source 1..80: mol_type = other DNA
aaattgcaagcataccagagaaagaatgtgtcaaatacaggagacaaagatctagaggtcctagcagatggcaaactgac

SEQ ID NO: 43779 - DNA, 80 bp, synthetic construct
  misc_feature 1..80: note = Artificially Synthesized Probe
  source 1..80: mol_type = other DNA
gcgcccggccgcagctcttttcttgacaaaattccataccctttctaagattcacactttacagagttgcctgagaaaga

SEQ ID NO: 43780 - DNA, 80 bp, synthetic construct
  misc_feature 1..80: note = Artificially Synthesized Probe
  source 1..80: mol_type = other DNA
gccgtgtgccctcgtgcagcgcctcccatccccgccgtacttgtgccccgccagagttttctttgtacaggatagatgac

SEQ ID NO: 43781 - DNA, 80 bp, synthetic construct
  misc_feature 1..80: note = Artificially Synthesized Probe
  source 1..80: mol_type = other DNA
ggtcattaaaaaaagattttccgttgggttaggagatactactgctggctgtttgctgaactttacttagcacccgtgac

SEQ ID NO: 43782 - DNA, 80 bp, synthetic construct
  misc_feature 1..80: note = Artificially Synthesized Probe
  source 1..80: mol_type = other DNA
tccaggtggcgctgtgatacaacaggtgaccaagcaggagattttaaacctctcggaggctggagtcgctccccccgagg

SEQ ID NO: 43783 - DNA, 80 bp, synthetic construct
  misc_feature 1..80: note = Artificially Synthesized Probe
  source 1..80: mol_type = other DNA
accttcaaaaccatgaggacaaggctcccgtgagctctgagcatgccctcccagcgagagtcacactggccaccagccag

SEQ ID NO: 43784 - DNA, 80 bp, synthetic construct
  misc_feature 1..80: note = Artificially Synthesized Probe
  source 1..80: mol_type = other DNA
agctgtcggatgcgagtttctgtcataatcatttgtttcctgatacaattgttcttattcttttccaaaactgtaaaata

SEQ ID NO: 43785 - DNA, 80 bp, synthetic construct
  misc_feature 1..80: note = Artificially Synthesized Probe
  source 1..80: mol_type = other DNA
cactcacatctggaagtttggggagggatctgggctggagatatggtagatatgggctggttgggtagaggcctggacta

SEQ ID NO: 43786 - DNA, 80 bp, synthetic construct; identical to SEQ ID NO: 43785
  misc_feature 1..80: note = Artificially Synthesized Probe
  source 1..80: mol_type = other DNA

SEQ ID NO: 43787 - DNA, 80 bp, synthetic construct
  misc_feature 1..80: note = Artificially Synthesized Probe
  source 1..80: mol_type = other DNA
caacatcactgtctggttctcatagtcttgattttccataggttcctgtggctgcagacttgcttacagaccatgaggag

SEQ ID NO: 43788 - DNA, 80 bp, synthetic construct
  misc_feature 1..80: note = Artificially Synthesized Probe
  source 1..80: mol_type = other DNA
aagcacatgaggtgatgtagagggtagtggttgtggtacaaagtatgtgcacattctaataagtgtaaacagatgtcccc

SEQ ID NO: 43789 - DNA, 80 bp, synthetic construct
  misc_feature 1..80: note = Artificially Synthesized Probe
  source 1..80: mol_type = other DNA
accctcctccaaggttctttctgtactattttgttttctttcctgtggtccatgatgagataagtcattctggctcagtg

SEQ ID NO: 43790 - DNA, 80 bp, synthetic construct
  misc_feature 1..80: note = Artificially Synthesized Probe
  source 1..80: mol_type = other DNA
tccctgctgagagctagccctctttatttctgctagcagccccaggcactaattactgggtgtgttagacacatctgtga

SEQ ID NO: 43791 - DNA, 80 bp, synthetic construct
  misc_feature 1..80: note = Artificially Synthesized Probe
  source 1..80: mol_type = other DNA
gggaatgtgggaaattttttagccaaagctcaaccctcatgcaacatcgaaaagttcacattggagaaaagccttttaag

SEQ ID NO: 43792 - DNA, 80 bp, synthetic construct
  misc_feature 1..80: note = Artificially Synthesized Probe
  source 1..80: mol_type = other DNA
tgtgttctaaatggttagcatttcatatttcctcctggaatatattagattttccatttcttcacattactgacagttta

SEQ ID NO: 43793 - DNA, 80 bp, synthetic construct
  misc_feature 1..80: note = Artificially Synthesized Probe
  source 1..80: mol_type = other DNA
aaaagccttatgtgagtatgctactgtaatcttatgaatctttttaaatatccaacttctgaaatatttgtaggtttaac

SEQ ID NO: 43794 - DNA, 80 bp, synthetic construct
  misc_feature 1..80: note = Artificially Synthesized Probe
  source 1..80: mol_type = other DNA
agttggctggacgtctagacccgtggggacgcggcgccccgcgtggcggcggccggaagggaaggccaatggggctcggg

SEQ ID NO: 43795 - DNA, 80 bp, synthetic construct
  misc_feature 1..80: note = Artificially Synthesized Probe
  source 1..80: mol_type = other DNA
ttacacatggctgcctttggataattttaatagggatggtctccccctgtatgcctaatctcttcaggtcatttctgact

SEQ ID NO: 43796 - DNA, 80 bp, synthetic construct
  misc_feature 1..80: note = Artificially Synthesized Probe
  source 1..80: mol_type = other DNA
aaaaaaaaaaaaaaaaattctgttaccctgcctgcctccttgtccaaacatagggctgatgatgtggggaatgcctgtgt

SEQ ID NO: 43797 - DNA, 80 bp, synthetic construct
  misc_feature 1..80: note = Artificially Synthesized Probe
  source 1..80: mol_type = other DNA
ggcctctcaactgaaccccatgagccagcctcgttctctgatggagctgacctgctacatgctgggggctggacagagcg

SEQ ID NO: 43798 - DNA, 80 bp, synthetic construct
  misc_feature 1..80: note = Artificially Synthesized Probe
  source 1..80: mol_type = other DNA
gaagtggtctctgagaatcacactgttgctgaaagggagctggccttggggaggagaattccaaatataagctgtttttg

SEQ ID NO: 43799 - DNA, 80 bp, synthetic construct
  misc_feature 1..80: note = Artificially Synthesized Probe
  source 1..80: mol_type = other DNA
ctacagaatggagcttctctgcattccgggcaggggcaggaatgtgacttgctaagatcccagccagagggggcgtggga

SEQ ID NO: 43800 - DNA, 80 bp, synthetic construct
  misc_feature 1..80: note = Artificially Synthesized Probe
  source 1..80: mol_type = other DNA
ccttcctgcctgtggatttgtgcattctggacacttcgagtacgtggttcctacatcccgctcgtttgtgactggctctg

SEQ ID NO: 43801 - DNA, 80 bp, synthetic construct
  misc_feature 1..80: note = Artificially Synthesized Probe
  source 1..80: mol_type = other DNA
aaataatcagactttcgggggccactagacactggctccgaactgacactgactccgggaaacccaggacatccctgtgc

SEQ ID NO: 43802 - DNA, 80 bp, synthetic construct
  misc_feature 1..80: note = Artificially Synthesized Probe
  source 1..80: mol_type = other DNA
accagctccggctgccgtccgcccatgtcatgcaattgcatttgggaggtgtgatatagaatcccactgtgccagctgct

SEQ ID NO: 43803 - DNA, 80 bp, synthetic construct
  misc_feature 1..80: note = Artificially Synthesized Probe
  source 1..80: mol_type = other DNA
tatctgcaaagtattctcattccaccatgtgattgatacaaacgtcagtgagttcacattctccttgctgcgccctcagg

SEQ ID NO: 43804 - DNA, 80 bp, synthetic construct
  misc_feature 1..80: note = Artificially Synthesized Probe
  source 1..80: mol_type = other DNA
ggcctcagagcgtggatgtgggataaatccaggcgtgtgtgggtgggttggtctctgcaatctcagtaaacatctggccg

SEQ ID NO: 43805 - DNA, 80 bp, synthetic construct
  misc_feature 1..80: note = Artificially Synthesized Probe
  source 1..80: mol_type = other DNA
gggtttgacaggtctacacctgcgctgcctgggaggagcggagtttgacacatgtacacctgtgctgtccaagaggagca

SEQ ID NO: 43806 - DNA, 80 bp, synthetic construct
  misc_feature 1..80: note = Artificially Synthesized Probe
  source 1..80: mol_type = other DNA
tcagaaagttgaagccaggaggaactttctcttatggccatggacagccagccagggagctctgtaggtaggtgggtatg

SEQ ID NO: 43807 - DNA, 80 bp, synthetic construct
  misc_feature 1..80: note = Artificially Synthesized Probe
  source 1..80: mol_type = other DNA
cccactctcagtgtgacggtcaagctgcgtttttcaggtgcttgtactttgggtctgttgagtgcgagtgacagaaacac

SEQ ID NO: 43808 - DNA, 80 bp, synthetic construct
  misc_feature 1..80: note = Artificially Synthesized Probe
  source 1..80: mol_type = other DNA
accctcgtgaagggaggccgggaggagacccttgagaagggaggccaggcagagacctgtctgaagggaagcctggagga

SEQ ID NO: 43809 - DNA, 80 bp, synthetic construct
  misc_feature 1..80: note = Artificially Synthesized Probe
  source 1..80: mol_type = other DNA
gagagagattctcctctgtaagatctcttcttatggtcattcgaacgaaggtgtcaatgtggagaatgttggaaatcccc

SEQ ID NO: 43810 - DNA, 80 bp, synthetic construct
  misc_feature 1..80: note = Artificially Synthesized Probe
  source 1..80: mol_type = other DNA
atttcatccccacagcaaaccaccacccccccaggatctatttttaacctcatttaacagataagaaaacacagcataga

SEQ ID NO: 43811 - DNA, 80 bp, synthetic construct
  misc_feature 1..80: note = Artificially Synthesized Probe
  source 1..80: mol_type = other DNA
tggtgcctcccagctgctcaaaatcacctaaaaccaaacattttcaatagcagaacacgcttgctgtggccaggtatgag

SEQ ID NO: 43812 - DNA, 80 bp, synthetic construct
  misc_feature 1..80: note = Artificially Synthesized Probe
  source 1..80: mol_type = other DNA
acccaaggtcagcctgtgggtccgcaaacagtctatctctgggcaggtcacctcacctctggataaaatgggcagaatct

SEQ ID NO: 43813 - DNA, 80 bp, synthetic construct
  misc_feature 1..80: note = Artificially Synthesized Probe
  source 1..80: mol_type = other DNA
taagccgagggctagaatagagtacttgcaggcccaagacccagattctagtcctgatgatggacagatggatagaggga

SEQ ID NO: 43814 - DNA, 80 bp, synthetic construct
  misc_feature 1..80: note = Artificially Synthesized Probe
  source 1..80: mol_type = other DNA
gattcacccaggtgaacaggtggatcaagaactgggccccagttatgctaaggatgctgagtgctgtgggtagcaccatg

SEQ ID NO: 43815 - DNA, 80 bp, synthetic construct
  misc_feature 1..80: note = Artificially Synthesized Probe
  source 1..80: mol_type = other DNA
ccctggacttctcattttttgtaacatagtgttattaatggttatgttaaaatcctctgcgtgggtttggtggctctggg

SEQ ID NO: 43816 - DNA, 80 bp, synthetic construct
  misc_feature 1..80: note = Artificially Synthesized Probe
  source 1..80: mol_type = other DNA
cagtgattgttgttttgcgggacccttgtgtttatgcttttattgtggacctttttaaacatatacaagagcagcgagag

SEQ ID NO: 43817 - DNA, 80 bp, synthetic construct
  misc_feature 1..80: note = Artificially Synthesized Probe
  source 1..80: mol_type = other DNA
cttcaggaggacagaacgcaactccaaacagacttagcagaaaggagactctattggctcacataaccaggctgtgcagg

SEQ ID NO: 43818 - DNA, 80 bp, synthetic construct
  misc_feature 1..80: note = Artificially Synthesized Probe
  source 1..80: mol_type = other DNA
cccacggcccaggccagaaacgcctccagccctgcagctcttggcctcagaagcggaaaagcctctgcagttagcaacac

SEQ ID NO: 43819 - DNA, 80 bp, synthetic construct
  misc_feature 1..80: note = Artificially Synthesized Probe
  source 1..80: mol_type = other DNA
tacaatctttctgccttaaaaatcagcataaacatgttttaagagaccaggagatcgcgcctgtgatactggggacagtg

SEQ ID NO: 43820 - DNA, 80 bp, synthetic construct
  misc_feature 1..80: note = Artificially Synthesized Probe
  source 1..80: mol_type = other DNA
gtacaggtttgtgcaaattaagacagtatcacaggtaggacatagaaaccacatgcacacacccggccatgcctgcacgt

SEQ ID NO: 43821 - DNA, 80 bp, synthetic construct
  misc_feature 1..80: note = Artificially Synthesized Probe
  source 1..80: mol_type = other DNA
gcccagcccacttagtactttctggaacaaagggagggcaagttttcaagaaacaaagttggaaggagaaaaagattgag

SEQ ID NO: 43822 - DNA, 80 bp, synthetic construct
  misc_feature 1..80: note = Artificially Synthesized Probe
  source 1..80: mol_type = other DNA
agacacttgagaactggaggatgaccagagactgagcacggctagacaaacgtgaaagcgggagggcagcagccaggaca

SEQ ID NO: 43823 - DNA, 80 bp, synthetic construct
  misc_feature 1..80: note = Artificially Synthesized Probe
  source 1..80: mol_type = other DNA
ataccgttgatagtgcaggtcacacagtgacatctatggtgcatggttcacagtaacgtctatgatgctgttgatggtgc

SEQ ID NO: 43824 - DNA, 80 bp, synthetic construct
  misc_feature 1..80: note = Artificially Synthesized Probe
  source 1..80: mol_type = other DNA
acccaacctcagcaatgacaacttcagagggtgaaagtgccacacagacaatgacacagagacgcaggtgagtggctccg

SEQ ID NO: 43825 - DNA, 80 bp, synthetic construct
  misc_feature 1..80: note = Artificially Synthesized Probe
  source 1..80: mol_type = other DNA
ctgctgtgtgactgcaggcacctcgcttaacctctctgaaccctgctgcatcggagttcatgaggtctttgccagtgaag

SEQ ID NO: 43826 - DNA, 80 bp, synthetic construct
  misc_feature 1..80: note = Artificially Synthesized Probe
  source 1..80: mol_type = other DNA
ttgaacaaatctgggccattatctctgccttatccaaggcacgggggccatagtcgtgcgtaaagctaattaaaatctgg

SEQ ID NO: 43827 - DNA, 80 bp, synthetic construct
  misc_feature 1..80: note = Artificially Synthesized Probe
  source 1..80: mol_type = other DNA
catcacgcccgggcttcagtctccaacacaaacacctgctgggcatcgggaaacgggaacaaactttggtgtggggtgga

SEQ ID NO: 43828 - DNA, 80 bp, synthetic construct
  misc_feature 1..80: note = Artificially Synthesized Probe
  source 1..80: mol_type = other DNA
ctgcaacagggaagggcactgcctcggcctcgcagagactccggtcccgggtgccacttcccactgtgtggccttggaaa

SEQ ID NO: 43829 - DNA, 80 bp, synthetic construct
  misc_feature 1..80: note = Artificially Synthesized Probe
  source 1..80: mol_type = other DNA
acaccccatccccacccagctcccaccccgggcacttcactaatcctctcgtccttaggaggcaaaattataatcacttt

SEQ ID NO: 43830 - DNA, 80 bp, synthetic construct
  misc_feature 1..80: note = Artificially Synthesized Probe
  source 1..80: mol_type = other DNA
ctgagcaggggcctgtcctgcggtcggcgtctaccccagggcctgggactgtcaggtcaaggtcagccacccacacactc

SEQ ID NO: 43831 - DNA, 80 bp, synthetic construct
  misc_feature 1..80: note = Artificially Synthesized Probe
  source 1..80: mol_type = other DNA
gtgagcccacgtgtgcatgggcatgtgtggatgtatgcacgtatgagcatgtgctcacgcgtgtgcatggatgagcatgc

SEQ ID NO: 43832 - DNA, 80 bp, synthetic construct
  misc_feature 1..80: note = Artificially Synthesized Probe
  source 1..80: mol_type = other DNA
tgagcactcaggtaacagatagtttttaagcaaagcggcagcgtttgaagcaaaaggaaaggagaatgtttgtgaaataa

SEQ ID NO: 43833 - DNA, 80 bp, synthetic construct
  misc_feature 1..80: note = Artificially Synthesized Probe
  source 1..80: mol_type = other DNA
aactgcaggttcagctctcagccatgctgtccttccccagtgccatgtctggaaagcggggccacacgcaggttccatgt

SEQ ID NO: 43834 - DNA, 80 bp, synthetic construct
  misc_feature 1..80: note = Artificially Synthesized Probe
  source 1..80: mol_type = other DNA
ctccatgaggtggcttgcgttgttctgtttaaccctctgaccacaccctgtgaggtcaagactctgatcatccccatttc

SEQ ID NO: 43835 - DNA, 80 bp, synthetic construct
  misc_feature 1..80: note = Artificially Synthesized Probe
  source 1..80: mol_type = other DNA
aaggctgcgaatctgtcacatcactgtgtgcccagtgcctgacacagcatccaacacaaatgtaaagacttgtggatgga

SEQ ID NO: 43836 - DNA, 80 bp, synthetic construct
  misc_feature 1..80: note = Artificially Synthesized Probe
  source 1..80: mol_type = other DNA
ggtggatgagtgggtgggtagatggatgggtgggtgagtgatggatgagtgggtggatggatgggtgggtagatggacag

SEQ ID NO: 43837 - DNA, 80 bp, synthetic construct
  misc_feature 1..80: note = Artificially Synthesized Probe
  source 1..80: mol_type = other DNA
aagaacagactgaaacaacaaacctttattatctcttagtttccaaaggtcaggatgcaggcacagcctagcgggtggtt

SEQ ID NO: 43838 - DNA, 80 bp, synthetic construct
  misc_feature 1..80: note = Artificially Synthesized Probe
  source 1..80: mol_type = other DNA
tggagcttcggagctgcatgtacacacaatctatgcgtacataaagacccaacaaaaagagatttaagatagccgtcaaa

SEQ ID NO: 43839 - DNA, 80 bp, synthetic construct
  misc_feature 1..80: note = Artificially Synthesized Probe
  source 1..80: mol_type = other DNA
attcactcaacaaacctcacctgtgaatcctggccccaaggactcccaggcctttgccccctggcagtggatcccagaag

SEQ ID NO: 43840 - DNA, 80 bp, synthetic construct
  misc_feature 1..80: note = Artificially Synthesized Probe
  source 1..80: mol_type = other DNA
ctcgtggccacagccaatggctcgggtctgagtcctgtccgcacagaggacagtcccgtatgtcatgacatgagaacaga

SEQ ID NO: 43841 - DNA, 80 bp, synthetic construct
  misc_feature 1..80: note = Artificially Synthesized Probe
  source 1..80: mol_type = other DNA
gcgcaggcttccctggggcccatcgagggctgaggatggccgtccagcccactccccagggcccccctcggacagctgcg

SEQ ID NO: 43842 - DNA, 80 bp, synthetic construct
  misc_feature 1..80: note = Artificially Synthesized Probe
  source 1..80: mol_type = other DNA
cgagacccttctctgacagtttacacaagagcctgaccaaaatccttcccgaaagaccaccttcagcccaggatgggctg

SEQ ID NO: 43843 - DNA, 80 bp, synthetic construct
  misc_feature 1..80: note = Artificially Synthesized Probe
  source 1..80: mol_type = other DNA
gctcttccctgtcgccgatgtccagcagcccagccaaccccagctcagaggaaagccagctccccggccccctcgggccc

SEQ ID NO: 43844 - DNA, 80 bp, synthetic construct
  misc_feature 1..80: note = Artificially Synthesized Probe
  source 1..80: mol_type = other DNA
aaacgcgttccctgggtctggcccccaccgaggcggatgcgcccagccagggcaggcagcagaggagggggaagcagttg

SEQ ID NO: 43845 - DNA, 80 bp, synthetic construct
  misc_feature 1..80: note = Artificially Synthesized Probe
  source 1..80: mol_type = other DNA
gagaatttctggcacccgtggctaacccctcaagtaccgcctgccccaaacccagtgttctgtcttcaaagatctccagt

SEQ ID NO: 43846 - DNA, 80 bp, synthetic construct
  misc_feature 1..80: note = Artificially Synthesized Probe
  source 1..80: mol_type = other DNA
agaaattggtcaccgaattagaaagtcagctgcaaaggagcaaagacacacgtggggccccgagagagcttgcagaagct

SEQ ID NO: 43847 - DNA, 80 bp, synthetic construct
  misc_feature 1..80: note = Artificially Synthesized Probe
  source 1..80: mol_type = other DNA
caactctccctgcagtggccggacatcagctggggctggaggcagatggacattggggcttgcttggccaagccgagaaa

SEQ ID NO: 43848 - DNA, 80 bp, synthetic construct
  misc_feature 1..80: note = Artificially Synthesized Probe
  source 1..80: mol_type = other DNA
atcccaaggaagccctggctggttgccttctccagggggagggcagccccctggaagacccttcctcctggcctcctggc

SEQ ID NO: 43849 - DNA, 80 bp, synthetic construct
  misc_feature 1..80: note = Artificially Synthesized Probe
  source 1..80: mol_type = other DNA
aacaggcagaaaaaagagaaggccggaggtggcgccgagagcccaccgtggactctcctagccactcagaggggaagtca

SEQ ID NO: 43850 - DNA, 80 bp, synthetic construct
  misc_feature 1..80: note = Artificially Synthesized Probe
  source 1..80: mol_type = other DNA
gtgccaaggatcctccaagcttgtttgatgatgaggtctctttctcccagctcttccctccaggcggtcgcttgactaga

SEQ ID NO: 43851 - DNA, 80 bp, synthetic construct
  misc_feature 1..80: note = Artificially Synthesized Probe
  source 1..80: mol_type = other DNA
agaggcacgcgcagagcaaggccgggccctgggcgtgcggcatgtgcctgaaggaggtggccgacgtctggatgtacaac

SEQ ID NO: 43852 - DNA, 80 bp, synthetic construct
  misc_feature 1..80: note = Artificially Synthesized Probe
  source 1..80: mol_type = other DNA
ccgccgtctctgtctcccttcccagctgccttggctgatggcagaggagactgcgcgctggacggagccctggagaggcc

SEQ ID NO: 43853 - DNA, 80 bp, synthetic construct
  misc_feature 1..80: note = Artificially Synthesized Probe
  source 1..80: mol_type = other DNA
gggccaagggaagctggtgagcaggggccccacgggagcctaggtcccaaggagaagggagagagcagtacgaagaggaa

SEQ ID NO: 43854 - DNA, 80 bp, synthetic construct
  misc_feature 1..80: note = Artificially Synthesized Probe
  source 1..80: mol_type = other DNA
gtcttgctgctgttgctggaattccaaagtgaccttagaaaccacgtgggggaaggcagtgctcactacttagaagggtt

SEQ ID NO: 43855 - DNA, 80 bp, synthetic construct
  misc_feature 1..80: note = Artificially Synthesized Probe
  source 1..80: mol_type = other DNA
aaaacgcctccggagtgtcgcaaaccaagtgcggaggggccctgaggttgtactgtaaacatcatagtgacttgtctttt

SEQ ID NO: 43856 - DNA, 80 bp, synthetic construct
  misc_feature 1..80: note = Artificially Synthesized Probe
  source 1..80: mol_type = other DNA
tctttaacatgtatatggtgttagctttggatctcttttacactcaaccctctgatttagtgtaatgtatgaagtttcag

SEQ ID NO: 43857 - DNA, 80 bp, synthetic construct
  misc_feature 1..80: note = Artificially Synthesized Probe
  source 1..80: mol_type = other DNA
tcttcatatttgtaggagtcttcttcagtataaactatcttacctaccataacgtgtgactaccatttaaagtccttgcc

SEQ ID NO: 43858 - DNA, 80 bp, synthetic construct
  misc_feature 1..80: note = Artificially Synthesized Probe
  source 1..80: mol_type = other DNA
ggcttggccacattctctacatttgtagtgtttttttccagtgtaaattattttatgtattataaggcctgagggtggac

SEQ ID NO: 43859 - DNA, 80 bp, synthetic construct
  misc_feature 1..80: note = Artificially Synthesized Probe
  source 1..80: mol_type = other DNA
tgaattattttatgtgtagtatggtttgaggagcagttaaaggatttgccacattctttgcatttgtaggacttctccct

SEQ ID NO: 43860 - DNA, 80 bp, synthetic construct
  misc_feature 1..80: note = Artificially Synthesized Probe
  source 1..80: mol_type = other DNA
ttgtgagaatcccagaatctctaccaaagacaattggtgtcatgctatgacaggaaggagctgcattataaagatcatga

SEQ ID NO: 43861 - DNA, 80 bp, synthetic construct
  misc_feature 1..80: note = Artificially Synthesized Probe
  source 1..80: mol_type = other DNA
taaaatgagtccatttactaggaatctataattattatgtctatctatatgtatatgcatatataacatcagggcttcaa

SEQ ID NO: 43862 - DNA, 80 bp, synthetic construct
  misc_feature 1..80: note = Artificially Synthesized Probe
  source 1..80: mol_type = other DNA
tagtgccagccgctcagtaggccaaggtgaaaggattacttgagtccaagaggttgaggctgcagtgagccaagattgtg

SEQ ID NO: 43863 - DNA, 80 bp, synthetic construct
  misc_feature 1..80: note = Artificially Synthesized Probe
  source 1..80: mol_type = other DNA
actggacatctacattgaaaaaatgaagttgaatggtttaattgcatcacatacaaaaaatattttaaacaaagtactta

SEQ ID NO: 43864 - DNA, 80 bp, synthetic construct
  misc_feature 1..80: note = Artificially Synthesized Probe
  source 1..80: mol_type = other DNA
ctttaaaatatatttcaaggctatagtaataaaaacagaatggcatgtgcagaaaaatggatgaccaccaatgaaagaga

SEQ ID NO: 43865 - DNA, 80 bp, synthetic construct
  misc_feature 1..80: note = Artificially Synthesized Probe
  source 1..80: mol_type = other DNA
tagctatgtctctgaatgtcaacagtccctggaaaacaaacaaacaaaaccactcatgaacacacaagcacttaccacac

SEQ ID NO: 43866 - DNA, 80 bp, synthetic construct
  misc_feature 1..80: note = Artificially Synthesized Probe
  source 1..80: mol_type = other DNA
tctcacctgtaaataaagataagagccttcatttttaaaagacaaatataagcaaaagtcatctaaaaggaaaggacagc

SEQ ID NO: 43867 - DNA, 80 bp, synthetic construct
  misc_feature 1..80: note = Artificially Synthesized Probe
  source 1..80: mol_type = other DNA
aggtgcagataacttccctgttctgtaatttttatcagtaattttaagtagtctttccttagcaccctggaaagcaagta

SEQ ID NO: 43868 - DNA, 80 bp, synthetic construct
  misc_feature 1..80: note = Artificially Synthesized Probe
  source 1..80: mol_type = other DNA
tgctacaaataaaaacaaccaatttccaccctgaaatgctatatttttgttggcttttttaagtttacagggacaacaga

SEQ ID NO: 43869 - DNA, 80 bp, synthetic construct
  misc_feature 1..80: note = Artificially Synthesized Probe
  source 1..80: mol_type = other DNA
tgagaccgcaccactgcactccagcctgggtgtaagagtgaaactctgtcttaaaaaaaaaaaaattcaaaggaaccaga

SEQ ID NO: 43870 - DNA, 80 bp, synthetic construct
  misc_feature 1..80: note = Artificially Synthesized Probe
  source 1..80: mol_type = other DNA
gtagaggatcagaggatgaagaaaatcagaaaacaaatctgttgggtactatacttagtacttgagtgataacataatct

SEQ ID NO: 43871 - DNA, 80 bp, synthetic construct
  misc_feature 1..80: note = Artificially Synthesized Probe
  source 1..80: mol_type = other DNA
agggggtcctggtcttttagccataaatctgcagatacctgcaggacacaaggacacataggcttggcctctaggagcag

SEQ ID NO: 43872 - DNA, 80 bp, synthetic construct
  misc_feature 1..80: note = Artificially Synthesized Probe
  source 1..80: mol_type = other DNA
gttctggtggtagtaagggagctctcaagacacctgacagtttaaaaatgtggcacgtcctccccggttctttctctttt

SEQ ID NO: 43873 - DNA, 80 bp, synthetic construct
  misc_feature 1..80: note = Artificially Synthesized Probe
  source 1..80: mol_type = other DNA
gcatttccatgaggcctggctttctaagtcacaggataaatagaagattggcacgagatccattttacaaagaccttgct

SEQ ID NO: 43874 - DNA, 80 bp, synthetic construct
  misc_feature 1..80: note = Artificially Synthesized Probe
  source 1..80: mol_type = other DNA
caattggctaactttttgtaagtggtggcatacctgggtaaagaatgggatcgggttagtagcccaatttagtggcgtta

SEQ ID NO: 43875 - DNA, 80 bp, synthetic construct
  misc_feature 1..80: note = Artificially Synthesized Probe
  source 1..80: mol_type = other DNA
cagtcagaagtccctgaaacaggccaggcatggtgactcacgcctgtaatctcagcattttgggaggccgaggtgggcgg

SEQ ID NO: 43876 - DNA, 80 bp, synthetic construct
  misc_feature 1..80: note = Artificially Synthesized Probe
  source 1..80: mol_type = other DNA
ttggtttcacttgggaggttatggtagtgaagttcaaaagtcagaaatattggcactttacatgactaaagtcaagtagt

SEQ ID NO: 43877 - DNA, 80 bp, synthetic construct
  misc_feature 1..80: note = Artificially Synthesized Probe
  source 1..80: mol_type = other DNA
cactaggcccatcacctagatggtgtgaccgtcttctacctggaacgtgtttacagggtggattgtgacatattgctttt

SEQ ID NO: 43878 - DNA, 80 bp, synthetic construct
  misc_feature 1..80: note = Artificially Synthesized Probe
  source 1..80: mol_type = other DNA
attgtgactctcatatgcacacctggctaacagtatgaattgtcaccctcccacctgaacacagcctccttacaacgtcc

SEQ ID NO: 43879 - DNA, 80 bp, synthetic construct
  misc_feature 1..80: note = Artificially Synthesized Probe
  source 1..80: mol_type = other DNA
tgatataactcttttttctgggttctaattacagaaggcattgtgaaatatctctaggcccatcacctacgtgatgtgac

SEQ ID NO: 43880 - DNA, 80 bp, synthetic construct
  misc_feature 1..80: note = Artificially Synthesized Probe
  source 1..80: mol_type = other DNA
gtcggtcacttttattctattgattattctcctgtgtttataatgcgggcggcagggtgggggtttctttaaaatgcttc

SEQ ID NO: 43881 - DNA, 80 bp, synthetic construct
  misc_feature 1..80: note = Artificially Synthesized Probe
  source 1..80: mol_type = other DNA
ctttcttggtccctgaccccacaacatcatatcaggggtggggctgcaatggcaggagacagagagggccagggccgggc

SEQ ID NO: 43882 - DNA, 80 bp, synthetic construct
  misc_feature 1..80: note = Artificially Synthesized Probe
  source 1..80: mol_type = other DNA
tctcggctcactgccaacttccgccgcccgggttcaagcgattctcttgcctcagcctcccaagtactacaggagtgcgc

SEQ ID NO: 43883 - DNA, 80 bp, synthetic construct
  misc_feature 1..80: note = Artificially Synthesized Probe
  source 1..80: mol_type = other DNA
tctttacccccaactggcatgggagcccccttgccaggaagaggacacctggactcactggaactgggtggttttgggga

SEQ ID NO: 43884 - DNA, 80 bp, synthetic construct
  misc_feature 1..80: note = Artificially Synthesized Probe
  source 1..80: mol_type = other DNA
gagggatgcggggattactccagccaatcccggtccctgctcccctgtttaactttcagaaaagtaaaggggccacagtg

SEQ ID NO: 43885 - DNA, 80 bp, synthetic construct
  misc_feature 1..80: note = Artificially Synthesized Probe
  source 1..80: mol_type = other DNA
gtgtgtgtgtgtgtgtgttgtccccaccaggctgtgaatgccttgggggcagagactaggcccagcctagggctcaacca

SEQ ID NO: 43886 - DNA, 80 bp, synthetic construct
  misc_feature 1..80: note = Artificially Synthesized Probe
  source 1..80: mol_type = other DNA
ctgcctcagcctcccgagtagctgggattataggcacctgccaccgcgcctggctaatttttgtatttttagtagagacg

SEQ ID NO: 43887 - DNA, 80 bp, synthetic construct
  misc_feature 1..80: note = Artificially Synthesized Probe
  source 1..80: mol_type = other DNA
cttggcccactcagcagtgatgtcgggaagatgacttgcagtgtgaccttagacaggtcactttcctttttgggcctcag

SEQ ID NO: 43888 - DNA, 80 bp, synthetic construct
  misc_feature 1..80: note = Artificially Synthesized Probe
  source 1..80: mol_type = other DNA
acagagccaagaaacagcaccgagtacagaattcaaatccaggccctgcctgacagcttccgcacctgctaagatttggc

SEQ ID NO: 43889 - DNA, 80 bp, synthetic construct
  misc_feature 1..80: note = Artificially Synthesized Probe
  source 1..80: mol_type = other DNA
tccccatccctagccccacaatctttcaaggcacaaataaatataatatttctacccaagaagtaagaatgacagttttt

SEQ ID NO: 43890 - DNA, 80 bp, synthetic construct
  misc_feature 1..80: note = Artificially Synthesized Probe
  source 1..80: mol_type = other DNA
cccagcacgttggtcaggttccgcaggttcttgagaacaatgaagtccgtgtccaggtagatgccgccgaacttccacat

SEQ ID NO: 43891 - DNA, 80 bp, synthetic construct
  misc_feature 1..80: note = Artificially Synthesized Probe
  source 1..80: mol_type = other DNA
gcctgcccaatatggtgaaaccccatctctactaaaaaatacaaaaattaaattaactgggcatggtggcacatgcctgt

SEQ ID NO: 43892 - DNA, 80 bp, synthetic construct
  misc_feature 1..80: note = Artificially Synthesized Probe
  source 1..80: mol_type = other DNA
agaagggctgaagggctgtttgtaagaagggcagaagggctcttttcggagcagaggttacaaaatattcttcctcccag

SEQ ID NO: 43893 - DNA, 80 bp, synthetic construct
  misc_feature 1..80: note = Artificially Synthesized Probe
  source 1..80: mol_type = other DNA
tgggtaaagacaaatgagagaaactaagaggcagggaaaacccgcaaactcccaaccacagttgagtgtggcccaaagca

SEQ ID NO: 43894 - DNA, 80 bp, synthetic construct
  misc_feature 1..80: note = Artificially Synthesized Probe
  source 1..80: mol_type = other DNA
caagtgacctcttgagacaggttaggttctggaggtgaaagaggagtggatgcagagaaaggccatactttaaaaagcac

SEQ ID NO: 43895 - DNA, 80 bp, synthetic construct
  misc_feature 1..80: note = Artificially Synthesized Probe
  source 1..80: mol_type = other DNA
aaatggaaacgggggtgaggagcacaaatactcgcttatatataaagaaaattcactatgaaaatattgccacagccggg

SEQ ID NO: 43896 - DNA, 80 bp, synthetic construct
  misc_feature 1..80: note = Artificially Synthesized Probe
  source 1..80: mol_type = other DNA
ccagctacttgggaggccaaggcaggagaatcatttgaacccaggaggtagaggctgtggtgagctgagatcgtaccact

SEQ ID NO: 43897 - DNA, 80 bp, synthetic construct; identical to SEQ ID NO: 26228
  misc_feature 1..80: note = Artificially Synthesized Probe
  source 1..80: mol_type = other DNA

SEQ ID NO: 43898 - DNA, 80 bp, synthetic construct
  misc_feature 1..80: note = Artificially Synthesized Probe
  source 1..80: mol_type = other DNA
atcgcttgaacctgggaagtggaggttgcaatgagtcaagatcgcaccactgcactccagcctgggtgacacagactaca

SEQ ID NO: 43899 - DNA, 80 bp, synthetic construct
  misc_feature 1..80: note = Artificially Synthesized Probe
  source 1..80: mol_type = other DNA
ttagccaggcgtggtggcgggcacctatagtcccagttactcgggaggctgaggcaggagaatggtgtgaacccgggagg

SEQ ID NO: 43900 - DNA, 80 bp, synthetic construct
  misc_feature 1..80: note = Artificially Synthesized Probe
  source 1..80: mol_type = other DNA
tctctattctctattcaagagacataccttaaacgaagtaacttagaatggttaaaaatataagaacagccgggtgcggt

SEQ ID NO: 43901 - DNA, 80 bp, synthetic construct
  misc_feature 1..80: note = Artificially Synthesized Probe
  source 1..80: mol_type = other DNA
cccaggtgccggggcagagaggcgttgccacccggaagccctttcatcaggaccagcacgtgggattcggggtgagttct

SEQ ID NO: 43902 - DNA, 80 bp, synthetic construct
  misc_feature 1..80: note = Artificially Synthesized Probe
  source 1..80: mol_type = other DNA
ttgggaggctgagacaggaggattacttgaaactgggaggcggaggttgcagtgagccaagattacgccactgcactcca

SEQ ID NO: 43903 - DNA, 80 bp, synthetic construct
  misc_feature 1..80: note = Artificially Synthesized Probe
  source 1..80: mol_type = other DNA
aatttattatgctaacggtataattcataatgcatcaaataatactgtagcaattttcagaatagaaaaattacagatac

SEQ ID NO: 43904 - DNA, 80 bp, synthetic construct
  misc_feature 1..80: note = Artificially Synthesized Probe
  source 1..80: mol_type = other DNA
ctgtgctttcttttcaagagctgagctgatggaacagtcatgaaatctgaccatattcagtccaaagaaaatgtcaataa

SEQ ID NO: 43905 - DNA, 80 bp, synthetic construct
  misc_feature 1..80: note = Artificially Synthesized Probe
  source 1..80: mol_type = other DNA
atcactttgagaggccgaggcagtcggatcagttaaggacaggagtttgagaccagcctggccaacatggtgaaacccag

SEQ ID NO: 43906 - DNA, 80 bp, synthetic construct
  misc_feature 1..80: note = Artificially Synthesized Probe
  source 1..80: mol_type = other DNA
agactctttctcaaaatataacaccaccaccaccaacaaataccaaaacaccaagtatccatatctacaggatacagcta

SEQ ID NO: 43907 - DNA, 80 bp, synthetic construct
  misc_feature 1..80: note = Artificially Synthesized Probe
  source 1..80: mol_type = other DNA
taccaaaacaccaagtatccatatctacaggatacagctacagcaatgatcaggatatttttagccaccagtgtatgtaa

SEQ ID NO: 43908 - DNA, 80 bp, synthetic construct
  misc_feature 1..80: note = Artificially Synthesized Probe
  source 1..80: mol_type = other DNA
gcctgggcaccacagtgagactgtcactacaaaaaaaaaaaaaaaaggctgggtgcggtggctcacgcctgtaatcccag

SEQ ID NO: 43909 - DNA, 80 bp, synthetic construct
  misc_feature 1..80: note = Artificially Synthesized Probe
  source 1..80: mol_type = other DNA
tcacctgaggttgggagttcaagaccagcctgactaacatggagaaaccccatctctactaaaaatacaaaattagccgg

SEQ ID NO: 43910 - DNA, 80 bp, synthetic construct
  misc_feature 1..80: note = Artificially Synthesized Probe
  source 1..80: mol_type = other DNA
ggtggtgtgtacctgcagtgccagctactcaggaggatcacctgagcctgggaagttaagactgcactgagccatgatgg

SEQ ID NO: 43911 - DNA, 80 bp, synthetic construct; identical to SEQ ID NO: 26231
  misc_feature 1..80: note = Artificially Synthesized Probe
  source 1..80: mol_type = other DNA

SEQ ID NO: 43912 - DNA, 80 bp, synthetic construct
  misc_feature 1..80: note = Artificially Synthesized Probe
  source 1..80: mol_type = other DNA
ctacacaggacaacttccacattagaaacagaattataaaaggactaccattacaaaacaaaagcaccagggcaaaacat

SEQ ID NO: 43913 - DNA, 80 bp, synthetic construct
  misc_feature 1..80: note = Artificially Synthesized Probe
  source 1..80: mol_type = other DNA
ttctccttgggctctcccacaacgtgccagtagatcatgatggagacgaaaaacgtgaacttgaagccgatgatgaacag

SEQ ID NO: 43914 - DNA, 80 bp, synthetic construct
  misc_feature 1..80: note = Artificially Synthesized Probe
  source 1..80: mol_type = other DNA
ctcacttacagcctctactttccaggctcaagtacatgatcctcccacctcagcctcctgagtagctgggactacaggca

SEQ ID NO: 43915 - DNA, 80 bp, synthetic construct
  misc_feature 1..80: note = Artificially Synthesized Probe
  source 1..80: mol_type = other DNA
agtaaagcaaatacttaaaccaaaacctgacaacggcttcacagaatatccttctgaccaatttcacttatgaatattat

SEQ ID NO: 43916 - DNA, 80 bp, synthetic construct
  misc_feature 1..80: note = Artificially Synthesized Probe
  source 1..80: mol_type = other DNA
atggcaaaaacccatctctactaaaaatacaaaaattagcccagtgtggtggggcacaactgtaatcccagctacttagg

SEQ ID NO: 43917 - DNA, 80 bp, synthetic construct
  misc_feature 1..80: note = Artificially Synthesized Probe
  source 1..80: mol_type = other DNA
tcaaagaatgcaaggatggttcaacataattaggaaatcatgaatataattcatcatattaaatagatctaagcagaaaa

SEQ ID NO: 43918 - DNA, 80 bp, synthetic construct
  misc_feature 1..80: note = Artificially Synthesized Probe
  source 1..80: mol_type = other DNA
gggcactaatactaagctcagggaagacacagatgctgccaccaccatcactatactgggtgtatttatcagaggaattt

SEQ ID NO: 43919 - DNA, 80 bp, synthetic construct
  misc_feature 1..80: note = Artificially Synthesized Probe
  source 1..80: mol_type = other DNA
aggtatgggaaaagagaagaccccgcttacaacaacagtcgcgatactcagggttaaacttaacaaaagatattaaacat

SEQ ID NO: 43920 - DNA, 80 bp, synthetic construct
  misc_feature 1..80: note = Artificially Synthesized Probe
  source 1..80: mol_type = other DNA
atgcacctgtggtcccagatacttgagaggctgaggtgggaggatagtttgagcccaggagggggaggctgcagcaagcc

SEQ ID NO: 43921 - DNA, 80 bp, synthetic construct
  misc_feature 1..80: note = Artificially Synthesized Probe
  source 1..80: mol_type = other DNA
gagctcaggagtttgagaccagcccaggcaacatggcaaaaccctatctctactaaaaatacaaaaaaaattagccaggt

SEQ ID NO: 43922 - DNA, 80 bp, synthetic construct; identical to SEQ ID NO: 26233
  misc_feature 1..80: note = Artificially Synthesized Probe
  source 1..80: mol_type = other DNA

SEQ ID NO: 43923 - DNA, 80 bp, synthetic construct
  misc_feature 1..80: note = Artificially Synthesized Probe
  source 1..80: mol_type = other DNA
atactcagatagcatctctcacatatcagatcagcaaaaatccaaaacacttaacacattattttggcaaggctgtgagc

SEQ ID NO: 43924 - DNA, 80 bp, synthetic construct
  misc_feature 1..80: note = Artificially Synthesized Probe
  source 1..80: mol_type = other DNA
tccacaaggaaaacgcttcctgtgaacatcagccagagccaaggctggcttccaagcccatgggctcctgggcccacagg

SEQ ID NO: 43925 - DNA, 80 bp, synthetic construct
  misc_feature 1..80: note = Artificially Synthesized Probe
  source 1..80: mol_type = other DNA
tcttgaagaggctgattaaataaacaatgatataatgatagcatggaaatgggcagagaccaatgctgtttttactcagt

SEQ ID NO: 43926 - DNA, 80 bp, synthetic construct
  misc_feature 1..80: note = Artificially Synthesized Probe
  source 1..80: mol_type = other DNA
tgcagtggcatgatcttggctcactacaacctccacttcctgggttgaagagattctcctgcctcagcctcccgggtagc

SEQ ID NO: 43927 - DNA, 80 bp, synthetic construct
  misc_feature 1..80: note = Artificially Synthesized Probe
  source 1..80: mol_type = other DNA
gtacgtatttttttgaaaggatgagtaaatgataccagtcctgcccacaaagccgggatcaaatgtgataactaatcctg

SEQ ID NO: 43928 - DNA, 80 bp, synthetic construct
  misc_feature 1..80: note = Artificially Synthesized Probe
  source 1..80: mol_type = other DNA
ggaaatgccctttgcaaactataaactctacgcagatgcaaattacagctgcctcattatttgaaggtacaaatcaagtc

SEQ ID NO: 43929 - DNA, 80 bp, synthetic construct
  misc_feature 1..80: note = Artificially Synthesized Probe
  source 1..80: mol_type = other DNA
aaattccccgcaacccctccaccgggttttatctcagttccgaaagcactgagtgaccttgaatctgggctcttacacct

SEQ ID NO: 43930 - DNA, 80 bp, synthetic construct
  misc_feature 1..80: note = Artificially Synthesized Probe
  source 1..80: mol_type = other DNA
gcaatgcccatggaaagggcatctagaaatcttggtctgagttagaagagtcctgagttcgttctatttgaaagaaagtt

SEQ ID NO: 43931 - DNA, 80 bp, synthetic construct
  misc_feature 1..80: note = Artificially Synthesized Probe
  source 1..80: mol_type = other DNA
gggtgaaaccctgtctctactaaaaatacaaaaattggctgggcgtggtggcggaagcctgtaatcccagctacttggta

SEQ ID NO: 43932 - DNA, 80 bp, synthetic construct
  misc_feature 1..80: note = Artificially Synthesized Probe
  source 1..80: mol_type = other DNA
atcacctactgcgtgttcttgtcattaaccacctttgctaactggatactgcctgagaaggggcctgtctatcttctaca

SEQ ID NO: 43933 - DNA, 80 bp, synthetic construct
  misc_feature 1..80: note = Artificially Synthesized Probe
  source 1..80: mol_type = other DNA
gacctcttagagcggctccatgccacccgcccccttgggtcaaggccaagggtgcagaagaccaagtcaggaggtgacaa

SEQ ID NO: 43934 - DNA, 80 bp, synthetic construct
  misc_feature 1..80: note = Artificially Synthesized Probe
  source 1..80: mol_type = other DNA
aacagggaagagaaggattgtctttggcttcatggagctgacattctagtaggggaaaattagtgaagaaacacattagg

SEQ ID NO: 43935 - DNA, 80 bp, synthetic construct
  misc_feature 1..80: note = Artificially Synthesized Probe
  source 1..80: mol_type = other DNA
cctgtaatcccagctacttgtaaggctgaggcaggagaattgcttggacccaggaggtggcggttgcagtgagccaagac

SEQ ID NO: 43936 - DNA, 80 bp, synthetic construct
  misc_feature 1..80: note = Artificially Synthesized Probe
  source 1..80: mol_type = other DNA
caggcccaggccagagtctggtctgcgtaaggactgtcagaagtgatggcttcgccatgtgacacacagggctctgtgag

SEQ ID NO: 43937 - DNA, 80 bp, synthetic construct; identical to SEQ ID NO: 26236
  misc_feature 1..80: note = Artificially Synthesized Probe
  source 1..80: mol_type = other DNA

SEQ ID NO: 43938 - DNA, 80 bp, synthetic construct
  misc_feature 1..80: note = Artificially Synthesized Probe
  source 1..80: mol_type = other DNA
tcaggaaactgaggtgggaggactgcgtgagcccagaaggctgaggctgcagtgagctatgctcataccaccgcactcca

SEQ ID NO: 43939 - DNA, 80 bp, synthetic construct
  misc_feature 1..80: note = Artificially Synthesized Probe
  source 1..80: mol_type = other DNA
agtgaaaccccgtttcttcaaaaaatacaaaaattagcatgtgcctgtagtcccagctacttgggaggctgaggtaggag

SEQ ID NO: 43940 - DNA, 80 bp, synthetic construct
  misc_feature 1..80: note = Artificially Synthesized Probe
  source 1..80: mol_type = other DNA
ggcacctgtaatcctagccactcgggaggctgagaatcgcttgaacccaggaggcggaggttgcagtgagccgagatggt

SEQ ID NO: 43941 - DNA, 80 bp, synthetic construct
  misc_feature 1..80: note = Artificially Synthesized Probe
  source 1..80: mol_type = other DNA
gctctgaaaaggggacatttgcgctgaggcctgaaggaagccagggaacacactgtggggccctggagtaagtgactcag

SEQ ID NO: 43942 - DNA, 80 bp, synthetic construct
  misc_feature 1..80: note = Artificially Synthesized Probe
  source 1..80: mol_type = other DNA
cttttgattgggatgattttgggagtgctacagtgtgacttacgtcttagagatctaagagagcaatacagcttcatacc

SEQ ID NO: 43943 - DNA, 80 bp, synthetic construct
  misc_feature 1..80: note = Artificially Synthesized Probe
  source 1..80: mol_type = other DNA
agcatgtccttaattacttctataggattggttcctagaagtgagccctctgggtcaaaggaaatgtaattcagggctgg

SEQ ID NO: 43944 - DNA, 80 bp, synthetic construct
  misc_feature 1..80: note = Artificially Synthesized Probe
  source 1..80: mol_type = other DNA
caggaggctgaggtgggaggatcgcttgagcccaggaggttgaggctgtagtgagccatgattgcaccagtgcactccag

SEQ ID NO: 43945 - DNA, 80 bp, synthetic construct
  misc_feature 1..80: note = Artificially Synthesized Probe
  source 1..80: mol_type = other DNA
ccacacctggccggaaagatacaatctttttttttgttttttttgagatggagtttcgctctttttgcccaggctggagt

SEQ ID NO: 43946 - DNA, 80 bp, synthetic construct
  misc_feature 1..80: note = Artificially Synthesized Probe
  source 1..80: mol_type = other DNA
ggtctcgaactcccgacctcaggtgatccgcccgcttcggcctcccaaagtgctgggattacaggcatgaaccactgcgc

SEQ ID NO: 43947 - DNA, 80 bp, synthetic construct
  misc_feature 1..80: note = Artificially Synthesized Probe
  source 1..80: mol_type = other DNA
ccagcaggtgcactcacagggcactcgctccaggcacatgacgctgactggtactactgccattagacctctctttcctg

SEQ ID NO: 43948 - DNA, 80 bp, synthetic construct; identical to SEQ ID NO: 26215
  misc_feature 1..80: note = Artificially Synthesized Probe
  source 1..80: mol_type = other DNA

SEQ ID NO: 43949 - DNA, 80 bp, synthetic construct
  misc_feature 1..80: note = Artificially Synthesized Probe
  source 1..80: mol_type = other DNA
gtggcaaatgtgatctcactgttgtttctgtttgcactgctgacggggtgagaaggcttctccagtgttgagttaacatt

SEQ ID NO: 43950 - DNA, 80 bp, synthetic construct
  misc_feature 1..80: note = Artificially Synthesized Probe
  source 1..80: mol_type = other DNA
aatccctcaccatcctgtgtggcaggtcctcttatgattaactacagtgtaagtgtagaggaaaccaaggcctgctgggc

SEQ ID NO: 43951 - DNA, 80 bp, synthetic construct
  misc_feature 1..80: note = Artificially Synthesized Probe
  source 1..80: mol_type = other DNA
aatgggaataacagagcatggtggctgagagggtctggtaaggtcaggtaacagtgtctggcttaatgggtagaggccta

SEQ ID NO: 43952 - DNA, 80 bp, synthetic construct
  misc_feature 1..80: note = Artificially Synthesized Probe
  source 1..80: mol_type = other DNA
gctctcatgtgctggtccacctggctccctgtctgccagctgactgcacagcgtgaccgcagaaggctgtggtgctcctg

SEQ ID NO: 43953 - DNA, 80 bp, synthetic construct; identical to SEQ ID NO: 26239
  misc_feature 1..80: note = Artificially Synthesized Probe
  source 1..80: mol_type = other DNA

SEQ ID NO: 43954 - DNA, 80 bp, synthetic construct
  misc_feature 1..80: note = Artificially Synthesized Probe
  source 1..80: mol_type = other DNA
caaagactggggccctcccctccgctgacttccaactccctctggggaagatcaaagccaattcatcaagtgtcccccaa

SEQ ID NO: 43955 - DNA, 80 bp, synthetic construct
  misc_feature 1..80: note = Artificially Synthesized Probe
  source 1..80: mol_type = other DNA
cagctcataaatgcagccaagtctccctcatcagaaagcacacacacagataaagtaaaacaaaaaacttgctgctcctc

SEQ ID NO: 43956 - DNA, 80 bp, synthetic construct
  misc_feature 1..80: note = Artificially Synthesized Probe
  source 1..80: mol_type = other DNA
gcaacacacaaagaacctggcttctcgtactctgacccaggagtttcatttctaggaaatacgaagaaatatctagctgg

SEQ ID NO: 43957 - DNA, 80 bp, synthetic construct
  misc_feature 1..80: note = Artificially Synthesized Probe
  source 1..80: mol_type = other DNA
gagtttcatttctaggaaatacgaagaaatatctagctgggtccagatacagccattctagaagttcatacgcactgatt

SEQ ID NO: 43958 - DNA, 80 bp, synthetic construct; identical to SEQ ID NO: 26240
  misc_feature 1..80: note = Artificially Synthesized Probe
  source 1..80: mol_type = other DNA

SEQ ID NO: 43959 - DNA, 80 bp, synthetic construct
  misc_feature 1..80: note = Artificially Synthesized Probe
  source 1..80: mol_type = other DNA
cacgtgccaccacgcccagttaatttattgtatttttagtggagatggggggtttcaccaagttggccaggctggtctcg

SEQ ID NO: 43960 - DNA, 80 bp, synthetic construct
  misc_feature 1..80: note = Artificially Synthesized Probe
  source 1..80: mol_type = other DNA
gcctcagtcttcccaccgacaggataggacgctggaacccactaaagggtaacattcattcattcatagttcgataaata

SEQ ID NO: 43961 - DNA, 80 bp, synthetic construct
  misc_feature 1..80: note = Artificially Synthesized Probe
  source 1..80: mol_type = other DNA
gtttttcctacttctttcggttaattcattcaaacaatattcaggaagcacctgctaggtgccaggcctggcactaggct

SEQ ID NO: 43962 - DNA, 80 bp, synthetic construct
  misc_feature 1..80: note = Artificially Synthesized Probe
  source 1..80: mol_type = other DNA
tcagaactcagatggctggcttggtggtggaggccgtccacctgccaccaccttccgggacctgcatccccagctgaact

SEQ ID NO: 43963 - DNA, 80 bp, synthetic construct
  misc_feature 1..80: note = Artificially Synthesized Probe
  source 1..80: mol_type = other DNA
cgaactggaaattaatggacccattaacctagcagctagagggcttcaattagtacaaggaaacaaaacatattttgtag

SEQ ID NO: 43964 - DNA, 80 bp, synthetic construct; identical to SEQ ID NO: 26241
  misc_feature 1..80: note = Artificially Synthesized Probe
  source 1..80: mol_type = other DNA

SEQ ID NO: 43965 - DNA, 80 bp, synthetic construct
  misc_feature 1..80: note = Artificially Synthesized Probe
  source 1..80: mol_type = other DNA
attccatctctcctcttcctttcttttcctttctattttgttttcctttgtattcctttgatttggggaccctcttttgg

SEQ ID NO: 43966 - DNA, 80 bp, synthetic construct
  misc_feature 1..80: note = Artificially Synthesized Probe
  source 1..80: mol_type = other DNA
ttttcctttgtattcctttgatttggggaccctcttttggggggttgcagctatggaaacacagtgtagcagggtttcgg

SEQ ID NO: 43967 - DNA, 80 bp, synthetic construct
  misc_feature 1..80: note = Artificially Synthesized Probe
  source 1..80: mol_type = other DNA
ggaaggccagacctggcctgagacccaccaggtgctcggggttatttgctgagtgcagggtacgtgaccccaaggggcct

SEQ ID NO: 43968 - DNA, 80 bp, synthetic construct
  misc_feature 1..80: note = Artificially Synthesized Probe
  source 1..80: mol_type = other DNA
atgaaactgagggaaggggactcgccctggcagtgaaacgggatgggcgctgggaccaggtgccccggcagatcctctcc

SEQ ID NO: 43969 - DNA, 80 bp, synthetic construct; identical to SEQ ID NO: 26242
  misc_feature 1..80: note = Artificially Synthesized Probe
  source 1..80: mol_type = other DNA

SEQ ID NO: 43970 - DNA, 80 bp, synthetic construct
  misc_feature 1..80: note = Artificially Synthesized Probe
  source 1..80: mol_type = other DNA
ggacccaaccgggtggggctgccctcgagggctccggagccaggcgcgtcctgcccgcgagggccggggctccgggtccc

SEQ ID NO: 43971 - DNA, 80 bp, synthetic construct
  misc_feature 1..80: note = Artificially Synthesized Probe
  source 1..80: mol_type = other DNA
cctccccactgcgagccgcaggatccccctggagcccccgtcccccgcaacatcggcgcggcccctcgtacctctagctc

SEQ ID NO: 43972 - DNA, 80 bp, synthetic construct
  misc_feature 1..80: note = Artificially Synthesized Probe
  source 1..80: mol_type = other DNA
acagccagcaatgacagtgcagggggttaggacccaggccacctggctggggtccctgctctcaccactgcaccgccctg

SEQ ID NO: 43973 - DNA, 80 bp, synthetic construct
  misc_feature 1..80: note = Artificially Synthesized Probe
  source 1..80: mol_type = other DNA
gtccccagagcccttgcggggtccccgcgaccccgcccgcgcgccctcgctgctccccggggcgggtgcggacagtcccc

SEQ ID NO: 43974 - DNA, 80 bp, synthetic construct; identical to SEQ ID NO: 26243
  misc_feature 1..80: note = Artificially Synthesized Probe
  source 1..80: mol_type = other DNA

SEQ ID NO: 43975 - DNA, 80 bp, synthetic construct
  misc_feature 1..80: note = Artificially Synthesized Probe
  source 1..80: mol_type = other DNA
ggggcagttgcatcgtttctactttaggtgccaggaaacctgggcataaagtcaagggactgggtgcaacctgattgcta

SEQ ID NO: 43976 - DNA, 80 bp, synthetic construct
  misc_feature 1..80: note = Artificially Synthesized Probe
  source 1..80: mol_type = other DNA
ctgaccagcctgggcagcccattgcagagaggtggggatcctggcagcccacaggcctccgggagacacgccctggctca

SEQ ID NO: 43977 - DNA, 80 bp, synthetic construct
  misc_feature 1..80: note = Artificially Synthesized Probe
  source 1..80: mol_type = other DNA
gtgttcactgattcattcactcgctccacctctcaggggacactcagggaataggggcaggccctgcactggtacccagg

SEQ ID NO: 43978 - DNA, 80 bp, synthetic construct
  misc_feature 1..80: note = Artificially Synthesized Probe
  source 1..80: mol_type = other DNA
tacaaaaattagccaggcgcggtggtgtgcgcctgtaatcccagctactcaggtgactgaggcaggagaatcgcttgaac

SEQ ID NO: 43979 - DNA, 80 bp, synthetic construct
  misc_feature 1..80: note = Artificially Synthesized Probe
  source 1..80: mol_type = other DNA
aggtcgggaattcgagaacagcctgaccaacatggagaaaccctgtctctactaaaaatacaaaattagccgggcatggt

SEQ ID NO: 43980 - DNA, 80 bp, synthetic construct; identical to SEQ ID NO: 26219
  misc_feature 1..80: note = Artificially Synthesized Probe
  source 1..80: mol_type = other DNA

SEQ ID NO: 43981 - DNA, 80 bp, synthetic construct
  misc_feature 1..80: note = Artificially Synthesized Probe
  source 1..80: mol_type = other DNA
atggctcactctgacccattcactcaacagccagcaggatgctttacaagtatatcagccacgtcattctcagctcagac

SEQ ID NO: 43982 - DNA, 80 bp, synthetic construct
  misc_feature 1..80: note = Artificially Synthesized Probe
  source 1..80: mol_type = other DNA
gagggttcttctctcagatgcccactcaaaagtccccttcccaccaggtcctccctgggccccctgaaattccaactccc

SEQ ID NO: 43983 - DNA, 80 bp, synthetic construct
  misc_feature 1..80: note = Artificially Synthesized Probe
  source 1..80: mol_type = other DNA
ccctgaggttcatccttcctgcctgttgtctagaaggcccggggcactcactgagcgccctccgctggctatggcaccat

SEQ ID NO: 43984 - DNA, 80 bp, synthetic construct
  misc_feature 1..80: note = Artificially Synthesized Probe
  source 1..80: mol_type = other DNA
ctcttagtatgtggtcaataaataggcagtgattccatgagttaaccaatgagtgaattaatgaatgatcagtaaatgaa

SEQ ID NO: 43985 - DNA, 80 bp, synthetic construct; identical to SEQ ID NO: 26220
  misc_feature 1..80: note = Artificially Synthesized Probe
  source 1..80: mol_type = other DNA

SEQ ID NO: 43986 - DNA, 80 bp, synthetic construct
  misc_feature 1..80: note = Artificially Synthesized Probe
  source 1..80: mol_type = other DNA
tcaggccacgccatatttggtgtcagagcccaagacccaggaatagaaactgtgtatggggccaagttggccgcagccca

SEQ ID NO: 43987 - DNA, 80 bp, synthetic construct
  misc_feature 1..80: note = Artificially Synthesized Probe
  source 1..80: mol_type = other DNA
ctcccagttagcctgttactgtggccactcccctgctctaagcccttccatggctcccatcgccaggattccccatgact

SEQ ID NO: 43988 - DNA, 80 bp, synthetic construct
  misc_feature 1..80: note = Artificially Synthesized Probe
  source 1..80: mol_type = other DNA
tgaaaatacaaaaattagctggcatgatggtgcacgcctgtagtctcagctactcaggaggctgaggcagaagaatcgct

SEQ ID NO: 43989 - DNA, 80 bp, synthetic construct
  misc_feature 1..80: note = Artificially Synthesized Probe
  source 1..80: mol_type = other DNA
ggttcttggcaccagctctgcagaccccaactaggggcatcagcatcaggggctaggcccaagggcctagaaaaggccct

SEQ ID NO: 43990 - DNA, 80 bp, synthetic construct
  misc_feature 1..80: note = Artificially Synthesized Probe
  source 1..80: mol_type = other DNA
gtgctgacagagaggctcccagagcaccagggttatgcccttggagattccgatgtcctgacgggaacacagaggccccg

SEQ ID NO: 43991 - DNA, 80 bp, synthetic construct
  misc_feature 1..80: note = Artificially Synthesized Probe
  source 1..80: mol_type = other DNA
gaccttgctgataaaacaggttgcagtagagaagccggccaaaacccaccaaaaccaaaatggccataagagtgacctct

SEQ ID NO: 43992 - DNA, 80 bp, synthetic construct
  misc_feature 1..80: note = Artificially Synthesized Probe
  source 1..80: mol_type = other DNA
gccctaggggctgctctatgcagtagccattcttttattcctttaccttcttttttttttatgagtcttgctctgtcgcc

SEQ ID NO: 43993 - DNA, 80 bp, synthetic construct
  misc_feature 1..80: note = Artificially Synthesized Probe
  source 1..80: mol_type = other DNA
agtttgccaagctagtcttgaactcctgacctcaagtgatccgcccacctcggcctcccaaagtgctgggattacaggca

SEQ ID NO: 43994 - DNA, 80 bp, synthetic construct
  misc_feature 1..80: note = Artificially Synthesized Probe
  source 1..80: mol_type = other DNA
gtgccccatcaggagcaggttggggaggtgacctggcgggcccctcacaagtacattttcatggcctcgtgcgtcgtggg

SEQ ID NO: 43995 - DNA, 80 bp, synthetic construct
  misc_feature 1..80: note = Artificially Synthesized Probe
  source 1..80: mol_type = other DNA
gggcctggcccggggagctgactgaggacttggagagccccatgcagggcaaggggagggctctgagttcctgtgagggc

SEQ ID NO: 43996 - DNA, 80 bp, synthetic construct
  misc_feature 1..80: note = Artificially Synthesized Probe
  source 1..80: mol_type = other DNA
cttgaccaggacacagggtgccccaattaaacgttactcctgggtgtgtctgggggtgtttccagatgagattaccattc

SEQ ID NO: 43997 - DNA, 80 bp, synthetic construct
  misc_feature 1..80: note = Artificially Synthesized Probe
  source 1..80: mol_type = other DNA
taatttggagaaccccgactaacccaggggcctacaccaacactggcccgcagtgggtcactggggatgggctgctcccg

SEQ ID NO: 43998 - DNA, 80 bp, synthetic construct
  misc_feature 1..80: note = Artificially Synthesized Probe
  source 1..80: mol_type = other DNA
ttcctggtgctgacacaggttcagccgacagcaggagctcaacagatactgatgagatgaggaatggccctccaggagag

SEQ ID NO: 43999 - DNA, 80 bp, synthetic construct
  misc_feature 1..80: note = Artificially Synthesized Probe
  source 1..80: mol_type = other DNA
gcgcatcagtgaccacgactggatactgctgtggcttccaagcctctccagataaggagctggcccctgtgcgtggccag

SEQ ID NO: 44000 - DNA, 80 bp, synthetic construct
  misc_feature 1..80: note = Artificially Synthesized Probe
  source 1..80: mol_type = other DNA
aaaatgggattaactccactttggagggatggagggaggcaatgcatctccagggcccagcccacggaacaggccctcaa

SEQ ID NO: 44001 - DNA, 80 bp, synthetic construct
  misc_feature 1..80: note = Artificially Synthesized Probe
  source 1..80: mol_type = other DNA
ctttatcatgctcccagtcccacagctgtcaccaactggatggtgagagcctgccatccctgtcccatggtcatacttgc

SEQ ID NO: 44002 - DNA, 80 bp, synthetic construct
  misc_feature 1..80: note = Artificially Synthesized Probe
  source 1..80: mol_type = other DNA
ctgcaccaacatacctgagcttccttcctggccctgccacgtgcccacaagacaggccacctctctgaacctgtctgtgg

SEQ ID NO: 44003 - DNA, 80 bp, synthetic construct
  misc_feature 1..80: note = Artificially Synthesized Probe
  source 1..80: mol_type = other DNA
accctaaggtcacatgtggctttgaacatcactaacatagcagctccataaagaatgctcccgccgcagcaggagaaaaa

SEQ ID NO: 44004 - DNA, 80 bp, synthetic construct
  misc_feature 1..80: note = Artificially Synthesized Probe
  source 1..80: mol_type = other DNA
ctcaggtccagctaatgatagtaccacattcccctggccgcagtggtccggctgaggcacacagaacctagtcaggtcca

SEQ ID NO: 44005 - DNA, 80 bp, synthetic construct
  misc_feature 1..80: note = Artificially Synthesized Probe
  source 1..80: mol_type = other DNA
caggggatggggtagaaggcctcagggggcagggtggtgacgccgcggcaggcgcggctctcggccaggctgcggatgga

SEQ ID NO: 44006 - DNA, 80 bp, synthetic construct
  misc_feature 1..80: note = Artificially Synthesized Probe
  source 1..80: mol_type = other DNA
agtccacacaagaggaaaggatagcccagaagtcaatgacggaaccttctgatgacctcctcaatcgaccaatgaatgtc

SEQ ID NO: 44007 - DNA, 80 bp, synthetic construct
  misc_feature 1..80: note = Artificially Synthesized Probe
  source 1..80: mol_type = other DNA
ctgcaggacgtaggagaagcagtcctggaactgctcccggcgcagcgcccggccgttcacatacacctcccccaggaagg

SEQ ID NO: 44008 - DNA, 80 bp, synthetic construct
  misc_feature 1..80: note = Artificially Synthesized Probe
  source 1..80: mol_type = other DNA
cacgatctcggctccctgcacctccacctgccggttcaagtgattctcctgcctcaacctcttgagtagggtagctggga

SEQ ID NO: 44009 - DNA, 80 bp, synthetic construct
  misc_feature 1..80: note = Artificially Synthesized Probe
  source 1..80: mol_type = other DNA
acagctggcaatggctaagattttttgatgattcaacaacaacaacaaaaatgggacaatgaagcaatgtgcacagtgac

SEQ ID NO: 44010 - DNA, 80 bp, synthetic construct; identical to SEQ ID NO: 22558
  misc_feature 1..80: note = Artificially Synthesized Probe
  source 1..80: mol_type = other DNA

SEQ ID NO: 44011 - DNA, 80 bp, synthetic construct
  misc_feature 1..80: note = Artificially Synthesized Probe
  source 1..80: mol_type = other DNA
ctgtataattttgggtctttatggtgataattcaaacattaagcaatggaagtcactttcgtctgctgtttttcatactc

SEQ ID NO: 44012 - DNA, 80 bp, synthetic construct
  misc_feature 1..80: note = Artificially Synthesized Probe
  source 1..80: mol_type = other DNA
ttttcacgtaaggcataagtcatgttagtttcacctacagcatgtgcgtgcattgtgtacatagtgaaaataaaccctgg

SEQ ID NO: 44013 - DNA, 80 bp, synthetic construct; identical to SEQ ID NO: 22559
  misc_feature 1..80: note = Artificially Synthesized Probe
  source 1..80: mol_type = other DNA

SEQ ID NO: 44014 - DNA, 80 bp, synthetic construct
  misc_feature 1..80: note = Artificially Synthesized Probe
  source 1..80: mol_type = other DNA
tcacttgagcccaggagtttgagaccaacatggtgaaaccctgtctctacaaaaaatacaaaaattagctgggtgtggtg

SEQ ID NO: 44015 - DNA, 80 bp, synthetic construct
  misc_feature 1..80: note = Artificially Synthesized Probe
  source 1..80: mol_type = other DNA
tctaaggttaaaggttaggtgatgcctttaggacaagaacctgatggcccctcagtcatattggacacaagtttaccata

SEQ ID NO: 44016 - DNA, 80 bp, synthetic construct
  misc_feature 1..80: note = Artificially Synthesized Probe
  source 1..80: mol_type = other DNA
ggtttaaatgattgaattgtcaaaataggaggaattgagatctgcagatggttaataccattcaaaggtatcagccgaca

SEQ ID NO: 44017 - DNA, 80 bp, synthetic construct
  misc_feature 1..80: note = Artificially Synthesized Probe
  source 1..80: mol_type = other DNA
gaagtatgccagatgttagtgaggactaagatgttggttagaatttttctcagggtggtatcttcatgaatattgggcat

SEQ ID NO: 44018 - DNA, 80 bp, synthetic construct
  misc_feature 1..80: note = Artificially Synthesized Probe
  source 1..80: mol_type = other DNA
tctccggtccagagtctgggtctctttaccagaagctgcttggcttcaggctccaccagcctgaggttgaggttctctgg

SEQ ID NO: 44019 - DNA, 80 bp, synthetic construct; identical to SEQ ID NO: 22560
  misc_feature 1..80: note = Artificially Synthesized Probe
  source 1..80: mol_type = other DNA

SEQ ID NO: 44020 - DNA, 80 bp, synthetic construct
  misc_feature 1..80: note = Artificially Synthesized Probe
  source 1..80: mol_type = other DNA
ccgggtggaaataaaagggtgggcccaacttgcaggccctctgcccgcaaggacagagtccagtccacattgatgcctca

SEQ ID NO: 44021 - DNA, 80 bp, synthetic construct
  misc_feature 1..80: note = Artificially Synthesized Probe
  source 1..80: mol_type = other DNA
tagattttggaaaaaattgcaaaaataacacagtgtttccatatacccattgtccagcttcccctaatgttaacatcttg

SEQ ID NO: 44022 - DNA, 80 bp, synthetic construct
  misc_feature 1..80: note = Artificially Synthesized Probe
  source 1..80: mol_type = other DNA
cctggagcttataaaacatccagagtgcaaagacaatgactgacctttcagaggcacccaggaaccccctggtcagattc

SEQ ID NO: 44023 - DNA, 80 bp, synthetic construct; identical to SEQ ID NO: 22548
  misc_feature 1..80: note = Artificially Synthesized Probe
  source 1..80: mol_type = other DNA

SEQ ID NO: 44024 - DNA, 80 bp, synthetic construct; identical to SEQ ID NO: 22561
  misc_feature 1..80: note = Artificially Synthesized Probe
  source 1..80: mol_type = other DNA

SEQ ID NO: 44025 - DNA, 80 bp, synthetic construct
  misc_feature 1..80: note = Artificially Synthesized Probe
  source 1..80: mol_type = other DNA
tacttttttttttgagatggagtctcattctgtcacccaggctgggatgcagtggtgcaatcttggctgactgcaatctc

SEQ ID NO: 44026 - DNA, 80 bp, synthetic construct
  misc_feature 1..80: note = Artificially Synthesized Probe
  source 1..80: mol_type = other DNA
ctgcctcagccttccaaagtgctgagattacaggcatgagccaccatgcctggcctgtacatgcttttcattcttcttat

SEQ ID NO: 44027 - DNA, 80 bp, synthetic construct
  misc_feature 1..80: note = Artificially Synthesized Probe
  source 1..80: mol_type = other DNA
ctctgaaccattcagctctctaaggaaccttctgatatctccccacaggtggacctggcctctcaggtcccttggtttga

SEQ ID NO: 44028 - DNA, 80 bp, synthetic construct; identical to SEQ ID NO: 22562
  misc_feature 1..80: note = Artificially Synthesized Probe
  source 1..80: mol_type = other DNA

SEQ ID NO: 44029 - DNA, 80 bp, synthetic construct
  misc_feature 1..80: note = Artificially Synthesized Probe
  source 1..80: mol_type = other DNA
gacggagagatcagcaaacagctccagcatgtaatgttcttttcagactcctccagccatgaggggcattggttcaggtt

SEQ ID NO: 44030 - DNA, 80 bp, synthetic construct
  misc_feature 1..80: note = Artificially Synthesized Probe
  source 1..80: mol_type = other DNA
aaatgagagaatgtctgagctgaaagggggcttggggaacagaggtcattctcatcatgttccacctttctttctcccta

SEQ ID NO: 44031 - DNA, 80 bp, synthetic construct; identical to SEQ ID NO: 22563
  misc_feature 1..80: note = Artificially Synthesized Probe
  source 1..80: mol_type = other DNA

SEQ ID NO: 44032 - DNA, 80 bp, synthetic construct
  misc_feature 1..80: note = Artificially Synthesized Probe
  source 1..80: mol_type = other DNA
caaatgaaatcttatgtataaatgcactttgtaactgaaacagcatcacagtcatgaagtccctctcactctgtccctgt

SEQ ID NO: 44033 - DNA, 80 bp, synthetic construct
  misc_feature 1..80: note = Artificially Synthesized Probe
  source 1..80: mol_type = other DNA
accgtcctggctatcacggtgaaaccccgtctctactaaaaatacaaaaaattagctgggtgtcgtggtgggtgcctgta

SEQ ID NO: 44034 - DNA, 80 bp, synthetic construct
  misc_feature 1..80: note = Artificially Synthesized Probe
  source 1..80: mol_type = other DNA
tgagtagctgggactgcaggcgccggccaccatgcccaactaattttttttgtatttttagtagagatggggtttcactg

SEQ ID NO: 44035 - DNA, 80 bp, synthetic construct
  misc_feature 1..80: note = Artificially Synthesized Probe
  source 1..80: mol_type = other DNA
tttgttttttttgttgttgttgttttgtttttttgaggcagtctctctctgttgcctaggctggattgcagtggtgtgat

SEQ ID NO: 44036 - DNA, 80 bp, synthetic construct
  misc_feature 1..80: note = Artificially Synthesized Probe
  source 1..80: mol_type = other DNA
tagagatatggttttgccatggtggccaggctgatctccaactcctggcctcaggtgatctgcttgccttggcctctcaa

SEQ ID NO: 44037 - DNA, 80 bp, synthetic construct; identical to SEQ ID NO: 22564
  misc_feature 1..80: note = Artificially Synthesized Probe
  source 1..80: mol_type = other DNA

SEQ ID NO: 44038 - DNA, 80 bp, synthetic construct
  misc_feature 1..80: note = Artificially Synthesized Probe
  source 1..80: mol_type = other DNA
tgattggctgagactcagcaacttgtctcagccagtctctgtcttaagagaatatactgctaagataagttgcagtttgt

SEQ ID NO: 44039 - DNA, 80 bp, synthetic construct
  misc_feature 1..80: note = Artificially Synthesized Probe
  source 1..80: mol_type = other DNA
tccccctgcccaacatacacacaaaagaacgctggccataatttttaaaatacaaagaaaacagccaggctgggcacggt

SEQ ID NO: 44040 - DNA, 80 bp, synthetic construct
  misc_feature 1..80: note = Artificially Synthesized Probe
  source 1..80: mol_type = other DNA
aaaaaattagctgggcgtggtggcacgtgcctgtaatcccagctacttgggaggctgatgtgggagaatcgcttgaaccc

SEQ ID NO: 44041 - DNA, 80 bp, synthetic construct; identical to SEQ ID NO: 22565
  misc_feature 1..80: note = Artificially Synthesized Probe
  source 1..80: mol_type = other DNA

SEQ ID NO: 44042 - DNA, 80 bp, synthetic construct
  misc_feature 1..80: note = Artificially Synthesized Probe
  source 1..80: mol_type = other DNA
aagcaaggtacatcttacatggtggcaggagagaagaatgaggggaggaactgccaaaaacttttaaaccataagagtgt

SEQ ID NO: 44043 - DNA, 80 bp, synthetic construct
  misc_feature 1..80: note = Artificially Synthesized Probe
  source 1..80: mol_type = other DNA
cccagatgccacaggcatcctccattggaaggctccccaccgctctcacaaagttttgctcagaaaacgtggccttcctg

SEQ ID NO: 44044 - DNA, 80 bp, synthetic construct; identical to SEQ ID NO: 22566
  misc_feature 1..80: note = Artificially Synthesized Probe
  source 1..80: mol_type = other DNA

SEQ ID NO: 44045 - DNA, 80 bp, synthetic construct
  misc_feature 1..80: note = Artificially Synthesized Probe
  source 1..80: mol_type = other DNA
agatctcagctcactgcaaccgctgtctcccaggttcaaacaattatcttgcctcagtctcccgaatagctggaattaca

SEQ ID NO: 44046 - DNA, 80 bp, synthetic construct
  misc_feature 1..80: note = Artificially Synthesized Probe
  source 1..80: mol_type = other DNA
gcgggtgtggtggcaggcatggtggcaggtgcctgtaatcccagctactcaggaggctgaggcaggggaatctcttgaac

SEQ ID NO: 44047 - DNA, 80 bp, synthetic construct
  misc_feature 1..80: note = Artificially Synthesized Probe
  source 1..80: mol_type = other DNA
gcattcatagcttgaacagctgtcacagacagaggctcaccgaaagtttttggaaactggatccaatctgatgcttactt

SEQ ID NO: 44048 - DNA, 80 bp, synthetic construct
  misc_feature 1..80: note = Artificially Synthesized Probe
  source 1..80: mol_type = other DNA
gtaaactagtgtcacggggttttgttgtacagattatttaatcacccaggtagtaagctttgtacccaagtgttttttcc

SEQ ID NO: 44049 - DNA, 80 bp, synthetic construct
  misc_feature 1..80: note = Artificially Synthesized Probe
  source 1..80: mol_type = other DNA
tactaaaaatacaaaaattagccgggcatggtagcgcctgtaatcccagctactcaggaggctgaggcagggagaattgc

SEQ ID NO: 44050 - DNA, 80 bp, synthetic construct; identical to SEQ ID NO: 22567
  misc_feature 1..80: note = Artificially Synthesized Probe
  source 1..80: mol_type = other DNA

SEQ ID NO: 44051 - DNA, 80 bp, synthetic construct
  misc_feature 1..80: note = Artificially Synthesized Probe
  source 1..80: mol_type = other DNA
aaaatagttatgttaacaccagcctgccttggggagaaagggccttggtgggtggcaggaggggacaaatgctccaggca

SEQ ID NO: 44052 - DNA, 80 bp, synthetic construct
  misc_feature 1..80: note = Artificially Synthesized Probe
  source 1..80: mol_type = other DNA
ccatctaggtccagggactatgccacctctctaggggctggtcacatctgcacggacagagtagtccggggtcctggaga

SEQ ID NO: 44053 - DNA, 80 bp, synthetic construct
  misc_feature 1..80: note = Artificially Synthesized Probe
  source 1..80: mol_type = other DNA
gggcagcccagctcgcctcagctggtgaggaagtgtgtggcccacgtgcgccagcacaaccagctgctccccaacttgac

SEQ ID NO: 44054 - DNA, 80 bp, synthetic construct; identical to SEQ ID NO: 22568
  misc_feature 1..80: note = Artificially Synthesized Probe
  source 1..80: mol_type = other DNA

SEQ ID NO: 44055 - DNA, 80 bp, synthetic construct
  misc_feature 1..80: note = Artificially Synthesized Probe
  source 1..80: mol_type = other DNA
caccatgcccagcacgtcgaggcccctcgggacctgtggaaagaatcaggggaaccaatgttgcagcttggaactcaagt

SEQ ID NO: 44056 - DNA, 80 bp, synthetic construct
  misc_feature 1..80: note = Artificially Synthesized Probe
  source 1..80: mol_type = other DNA
gttgaaatattttaaagaaacttgcttgttgctgtgagaggtacaaagatgaatcaactcccttagcagttgtcttcttt

SEQ ID NO: 44057 - DNA, 80 bp, synthetic construct
  misc_feature 1..80: note = Artificially Synthesized Probe
  source 1..80: mol_type = other DNA
cagtgcgctgacacccgcgtgggcaacatgtacgtgcgggggttgtcggggggtgagcgcaggagagtcagcattggggt

SEQ ID NO: 44058 - DNA, 80 bp, synthetic construct; identical to SEQ ID NO: 22569
  misc_feature 1..80: note = Artificially Synthesized Probe
  source 1..80: mol_type = other DNA

SEQ ID NO: 44059 - DNA, 80 bp, synthetic construct
  misc_feature 1..80: note = Artificially Synthesized Probe
  source 1..80: mol_type = other DNA
tggtgagtccccaaggccagcagccagggccctggcacacagggcctccccgatgcttaaaccctgcccaagcttgctgg

SEQ ID NO: 44060 - DNA, 80 bp, synthetic construct
  misc_feature 1..80: note = Artificially Synthesized Probe
  source 1..80: mol_type = other DNA
ttgcaaactccaaagatgggagggcatggaattcaagagggtggggatcaataaatatcagagtctttattcagactcag

SEQ ID NO: 44061 - DNA, 80 bp, synthetic construct
  misc_feature 1..80: note = Artificially Synthesized Probe
  source 1..80: mol_type = other DNA
ccaggcttgccctttgcttgggtcctgaacactcagcatattacactcagggagcatgagccgcttccttcattctgcag

SEQ ID NO: 44062 - DNA, 80 bp, synthetic construct; identical to SEQ ID NO: 22570
  misc_feature 1..80: note = Artificially Synthesized Probe
  source 1..80: mol_type = other DNA

SEQ ID NO: 44063 - DNA, 80 bp, synthetic construct
  misc_feature 1..80: note = Artificially Synthesized Probe
  source 1..80: mol_type = other DNA
cgtccagcagcccacaccctcctcctagtgtcccaagttctccaccatccttcccccaggaggacaggccgccccttgcc

SEQ ID NO: 44064 - DNA, 80 bp, synthetic construct
  misc_feature 1..80: note = Artificially Synthesized Probe
  source 1..80: mol_type = other DNA
agtaaccccagagaggggttaccagaagtcaagtgtccacagcaaacctgaaaactcttttttacattttatattgttac

SEQ ID NO: 44065 - DNA, 80 bp, synthetic construct
  misc_feature 1..80: note = Artificially Synthesized Probe
  source 1..80: mol_type = other DNA
ttatcttgtcttgagatgtgttatgaaaatgggaggaagggccgggtgcagtggctcatgcctgtaatcccagcactttc

SEQ ID NO: 44066 - DNA, 80 bp, synthetic construct; identical to SEQ ID NO: 22549
  misc_feature 1..80: note = Artificially Synthesized Probe
  source 1..80: mol_type = other DNA

SEQ ID NO: 44067 - DNA, 80 bp, synthetic construct
  misc_feature 1..80: note = Artificially Synthesized Probe
  source 1..80: mol_type = other DNA
aacctgagaggcggaggttgcagtgagctgagattgtgccactgcaccccagtctgggcgatagagtgagactccatctc

SEQ ID NO: 44068 - DNA, 80 bp, synthetic construct; identical to SEQ ID NO: 22571
  misc_feature 1..80: note = Artificially Synthesized Probe
  source 1..80: mol_type = other DNA

SEQ ID NO: 44069 - DNA, 80 bp, synthetic construct
  misc_feature 1..80: note = Artificially Synthesized Probe
  source 1..80: mol_type = other DNA
aaccctccagccagacattctcctgctttcggcagggtgcctgggaggccaagttattaattttcagtgagaattctcac

SEQ ID NO: 44070 - DNA, 80 bp, synthetic construct
  misc_feature 1..80: note = Artificially Synthesized Probe
  source 1..80: mol_type = other DNA
tcactctctgtatataactctcactatctatcgagatagaatactcactctctggatagaactctcactatctggataga

SEQ ID NO: 44071 - DNA, 80 bp, synthetic construct; identical to SEQ ID NO: 22572
  misc_feature 1..80: note = Artificially Synthesized Probe
  source 1..80: mol_type = other DNA

SEQ ID NO: 44072 - DNA, 80 bp, synthetic construct
  misc_feature 1..80: note = Artificially Synthesized Probe
  source 1..80: mol_type = other DNA
actctcaccatctaaatataattctcactctcaggatagaactctcactatctatctggatgggattctccctctatgga

SEQ ID NO: 44073 - DNA, 80 bp, synthetic construct
  misc_feature 1..80: note = Artificially Synthesized Probe
  source 1..80: mol_type = other DNA
ctacatgacggaccctgttctaggtgttaaggacacagcaggatacaggccctgccctatggaacgcgcactgtgcgtgc

SEQ ID NO: 44074 - DNA, 80 bp, synthetic construct; identical to SEQ ID NO: 22579
  misc_feature 1..80: note = Artificially Synthesized Probe
  source 1..80: mol_type = other DNA

SEQ ID NO: 44075 - DNA, 80 bp, synthetic construct
  misc_feature 1..80: note = Artificially Synthesized Probe
  source 1..80: mol_type = other DNA
tgtctggatagaattctctccatcctgacagaactctcaatatctggatggaattctcactctctggatagaactctcac

SEQ ID NO: 44076 - DNA, 80 bp, synthetic construct
  misc_feature 1..80: note = Artificially Synthesized Probe
  source 1..80: mol_type = other DNA
tggatagaactctcaccatgtgtataaaactctcactgtgtgggaagagaactctcactttctggatagaaatctcactt

SEQ ID NO: 44077 - DNA, 80 bp, synthetic construct; identical to SEQ ID NO: 22573
  misc_feature 1..80: note = Artificially Synthesized Probe
  source 1..80: mol_type = other DNA

SEQ ID NO: 44078 - DNA, 80 bp, synthetic construct
  misc_feature 1..80: note = Artificially Synthesized Probe
  source 1..80: mol_type = other DNA
gtcacttccagagttctgatccatagacattctgagagatcatgaatggtgttgttttaagccactaaattttgggatac

SEQ ID NO: 44079 - DNA, 80 bp, synthetic construct
  misc_feature 1..80: note = Artificially Synthesized Probe
  source 1..80: mol_type = other DNA
actatctatctggatagaattctcaccctctggatagaacgctcactatctatctggatagaattctcactctctggata

SEQ ID NO: 44080 - DNA, 80 bp, synthetic construct
  misc_feature 1..80: note = Artificially Synthesized Probe
  source 1..80: mol_type = other DNA
ctctctggatataactctcactaactgtctggatagaattctcactatctgcatagaattctatctgtctggttagaatt

SEQ ID NO: 44081 - DNA, 80 bp, synthetic construct
  misc_feature 1..80: note = Artificially Synthesized Probe
  source 1..80: mol_type = other DNA
tcggtctggataaaattctcaccatctgtgtagaattctcactatctgcatagaattcttactctctggatagaactctc

SEQ ID NO: 44082 - DNA, 80 bp, synthetic construct
  misc_feature 1..80: note = Artificially Synthesized Probe
  source 1..80: mol_type = other DNA
aaccctcactatctatatggaaagaattctcaacatctggatagaatcctcactatctggatagaattctcactctctcg

SEQ ID NO: 44083 - DNA, 80 bp, synthetic construct; identical to SEQ ID NO: 22574
  misc_feature 1..80: note = Artificially Synthesized Probe
  source 1..80: mol_type = other DNA

SEQ ID NO: 44084 - DNA, 80 bp, synthetic construct
  misc_feature 1..80: note = Artificially Synthesized Probe
  source 1..80: mol_type = other DNA
tctatagaattctcactctctagatagaactctcaatatatatctggatagaattcttaccatctggatagaactctcac

SEQ ID NO: 44085 - DNA, 80 bp, synthetic construct
  misc_feature 1..80: note = Artificially Synthesized Probe
  source 1..80: mol_type = other DNA
actctcactatctgtctggatagaaatctcaccatctgaattgaactctcactaactggatagaattcttattctctgga

SEQ ID NO: 44086 - DNA, 80 bp, synthetic construct
  misc_feature 1..80: note = Artificially Synthesized Probe
  source 1..80: mol_type = other DNA
tcacaatctggatagaattgtcattctctgaatagtactctcactatctatctcgatagaattctcaccatctggataga

SEQ ID NO: 44087 - DNA, 80 bp, synthetic construct; identical to SEQ ID NO: 22575
  misc_feature 1..80: note = Artificially Synthesized Probe
  source 1..80: mol_type = other DNA

SEQ ID NO: 44088 - DNA, 80 bp, synthetic construct
  misc_feature 1..80: note = Artificially Synthesized Probe
  source 1..80: mol_type = other DNA
gaattcttagtctctggatagaagtctcactctctgtctggctataattctcaaaatctgggtggaactctcactatcta

SEQ ID NO: 44089 - DNA, 80 bp, synthetic construct
  misc_feature 1..80: note = Artificially Synthesized Probe
  source 1..80: mol_type = other DNA
ccaaggcggatggatcataaggttaatgccctaaagggcgataaaactatgacatttgcaactaaataatctgcaaagaa

SEQ ID NO: 44090 - DNA, 80 bp, synthetic construct
  misc_feature 1..80: note = Artificially Synthesized Probe
  source 1..80: mol_type = other DNA
atctggatagaattctctccctctggatacaactctcactatctggatagaattctcacactctggatacaactctcact

SEQ ID NO: 44091 - DNA, 80 bp, synthetic construct; identical to SEQ ID NO: 22576
  misc_feature 1..80: note = Artificially Synthesized Probe
  source 1..80: mol_type = other DNA

SEQ ID NO: 44092 - DNA, 80 bp, synthetic construct
  misc_feature 1..80: note = Artificially Synthesized Probe
  source 1..80: mol_type = other DNA
cactatctggatagaattctcactatctggatagaactctcactatctatcttgatagaattctcaccctctggatagca

SEQ ID NO: 44093 - DNA, 80 bp, synthetic construct
  misc_feature 1..80: note = Artificially Synthesized Probe
  source 1..80: mol_type = other DNA
ctctggatagatctctcattatctgtctggagagaatactcattctctggatagaactctcactatcaatgtggatagaa

SEQ ID NO: 44094 - DNA, 80 bp, synthetic construct
  misc_feature 1..80: note = Artificially Synthesized Probe
  source 1..80: mol_type = other DNA
ggataaaattctcactctctggatagaactctcactatctgtctggatagaattctcaccatctggataaaactctcact

SEQ ID NO: 44095 - DNA, 80 bp, synthetic construct
  misc_feature 1..80: note = Artificially Synthesized Probe
  source 1..80: mol_type = other DNA
actctctgtttggtacagttctcacgatctggatagaactctcactatctggatagaattcttacactctggatagaact

SEQ ID NO: 44096 - DNA, 80 bp, synthetic construct; identical to SEQ ID NO: 22577
  misc_feature 1..80: note = Artificially Synthesized Probe
  source 1..80: mol_type = other DNA

SEQ ID NO: 44097 - DNA, 80 bp, synthetic construct
  misc_feature 1..80: note = Artificially Synthesized Probe
  source 1..80: mol_type = other DNA
tctgtgcaggcttgctttagactatactctagtgagactttgaacgtatatgtcatcatcttttgcctcgctaatgaaga

SEQ ID NO: 44098 - DNA, 80 bp, synthetic construct
  misc_feature 1..80: note = Artificially Synthesized Probe
  source 1..80: mol_type = other DNA
tagaattctcaccctctggatagaactctaacaatctggatagaattctcactctctgcatagaactctcactgtctatc

SEQ ID NO: 44099 - DNA, 80 bp, synthetic construct
  misc_feature 1..80: note = Artificially Synthesized Probe
  source 1..80: mol_type = other DNA
tcactatctatatggaaataactctcaccatctgggtagaattctccctatctagatagaattctcactgtctacataga

SEQ ID NO: 44100 - DNA, 80 bp, synthetic construct; identical to SEQ ID NO: 22578
  misc_feature 1..80: note = Artificially Synthesized Probe
  source 1..80: mol_type = other DNA

SEQ ID NO: 44101 - DNA, 80 bp, synthetic construct
  misc_feature 1..80: note = Artificially Synthesized Probe
  source 1..80: mol_type = other DNA
tagaactctcactatctatctggatagaattctcactctctggataaaactctatctgtctggatagaattctcagcatc

SEQ ID NO: 44102 - DNA, 80 bp, synthetic construct
  misc_feature 1..80: note = Artificially Synthesized Probe
  source 1..80: mol_type = other DNA
cactccccagatagtggacactatgtctcactatccggatagtggacataattctcactatccggatagaaatttcacca

SEQ ID NO: 44103 - DNA, 80 bp, synthetic construct
  misc_feature 1..80: note = Artificially Synthesized Probe
  source 1..80: mol_type = other DNA
tatcactctctggatagaactctcactatctacctcgatataattctcactctctggatagaactagcactatgtgaata

SEQ ID NO: 44104 - DNA, 80 bp, synthetic construct
  misc_feature 1..80: note = Artificially Synthesized Probe
  source 1..80: mol_type = other DNA
tctggatagaactcttactacctggaaagaactctcagtatctggctagatttctcaccatctgggtagaattctcacta

SEQ ID NO: 44105 - DNA, 80 bp, synthetic construct
  misc_feature 1..80: note = Artificially Synthesized Probe
  source 1..80: mol_type = other DNA
tctcactatctatctggatagaattctcacaatctggatagaagtcttactgtgtatctggatagaattttcactctctg

SEQ ID NO: 44106 - DNA, 80 bp, synthetic construct
  misc_feature 1..80: note = Artificially Synthesized Probe
  source 1..80: mol_type = other DNA
actctgaataaaactctcactatgtttctggatagaactcttactacctggaaacaactctcactatatggatagtattc

SEQ ID NO: 44107 - DNA, 80 bp, synthetic construct
  misc_feature 1..80: note = Artificially Synthesized Probe
  source 1..80: mol_type = other DNA
ctgggtagaattctaagtctcttggtagaactctcactatctctctgtgtagaattctgataatctggttagcactctta

SEQ ID NO: 44108 - DNA, 80 bp, synthetic construct
  misc_feature 1..80: note = Artificially Synthesized Probe
  source 1..80: mol_type = other DNA
aactcttactatcaatctggatagaattctcactgtctgtatagaactctcactatctggatagatttctcaccatctgg

SEQ ID NO: 44109 - DNA, 80 bp, synthetic construct
  misc_feature 1..80: note = Artificially Synthesized Probe
  source 1..80: mol_type = other DNA
gaatacagtccctgcccttgtagaacttgcagcccactgtggattcatttcagtataaagtgtaggcattgtcccaaagc

SEQ ID NO: 44110 - DNA, 80 bp, synthetic construct
  misc_feature 1..80: note = Artificially Synthesized Probe
  source 1..80: mol_type = other DNA
ctacctatctggatataattctcactctctggatagcactcactatctggatagaattctcaccatcgggatagaattct

SEQ ID NO: 44111 - DNA, 80 bp, synthetic construct; identical to SEQ ID NO: 22580
  misc_feature 1..80: note = Artificially Synthesized Probe
  source 1..80: mol_type = other DNA

SEQ ID NO: 44112 - DNA, 80 bp, synthetic construct
  misc_feature 1..80: note = Artificially Synthesized Probe
  source 1..80: mol_type = other DNA
tcaccatctggatagaactctcactgtctatcttgatagaattctcaccatctggatagaactctcactatctgtctgga

SEQ ID NO: 44113 - DNA, 80 bp, synthetic construct
  misc_feature 1..80: note = Artificially Synthesized Probe
  source 1..80: mol_type = other DNA
attctcactctctggatagaactctatttgtctaggtagaattttcaccgtccggaaacatctctcacaatctggatagg

SEQ ID NO: 44114 - DNA, 80 bp, synthetic construct
  misc_feature 1..80: note = Artificially Synthesized Probe
  source 1..80: mol_type = other DNA
tggatagaattctcactctctgggtagaactctcactatctatctggatagaattcccaccatctggatagaattcttac

SEQ ID NO: 44115 - DNA, 80 bp, synthetic construct
  misc_feature 1..80: note = Artificially Synthesized Probe
  source 1..80: mol_type = other DNA
attctcactatctgtctggatagaattttcactctctggatggaaccctcactacctatctggatataattctcactctc

SEQ ID NO: 44116 - DNA, 80 bp, synthetic construct; identical to SEQ ID NO: 22581
  misc_feature 1..80: note = Artificially Synthesized Probe
  source 1..80: mol_type = other DNA

SEQ ID NO: 44117 - DNA, 80 bp, synthetic construct
  misc_feature 1..80: note = Artificially Synthesized Probe
  source 1..80: mol_type = other DNA
tctcaccgtctgcatggaactgtcactatctggatagaattctcactctctgtataaaactctcactatctatctagata

SEQ ID NO: 44118 - DNA, 80 bp, synthetic construct
  misc_feature 1..80: note = Artificially Synthesized Probe
  source 1..80: mol_type = other DNA
tgtatctggatagaattctcaccctctggatacaactctcactatctggatagaattctcactctctggatagaactccc

SEQ ID NO: 44119 - DNA, 80 bp, synthetic construct; identical to SEQ ID NO: 22582
  misc_feature 1..80: note = Artificially Synthesized Probe
  source 1..80: mol_type = other DNA

SEQ ID NO: 44120 - DNA, 80 bp, synthetic construct
  misc_feature 1..80: note = Artificially Synthesized Probe
  source 1..80: mol_type = other DNA
gtctctgcatagcactctcactatctgtctggatagaattctcactctatggatagaactctgactatctatctggatag

SEQ ID NO: 44121 - DNA, 80 bp, synthetic construct; identical to SEQ ID NO: 22550
  misc_feature 1..80: note = Artificially Synthesized Probe
  source 1..80: mol_type = other DNA

SEQ ID NO: 44122 - DNA, 80 bp, synthetic construct
  misc_feature 1..80: note = Artificially Synthesized Probe
  source 1..80: mol_type = other DNA
ggatagaactctcactgtctatctggatagaattcttaatctctggatagaagtctcactatcagtctggatagaattct

SEQ ID NO: 44123 - DNA, 80 bp, synthetic construct
  misc_feature 1..80: note = Artificially Synthesized Probe
  source 1..80: mol_type = other DNA
ggatagaactctgactatctatctggatagaattctcaccctcttaggctacagtaaccaaaacatcatggtactggtac

SEQ ID NO: 44124 - DNA, 80 bp, synthetic construct
  misc_feature 1..80: note = Artificially Synthesized Probe
  source 1..80: mol_type = other DNA
gaaagctgaaactggatcccttccttacaccttatacaaaaatcaattcaagatggattaaagagttaaacattagacct

SEQ ID NO: 44125 - DNA, 80 bp, synthetic construct; identical to SEQ ID NO: 22583
  misc_feature 1..80: note = Artificially Synthesized Probe
  source 1..80: mol_type = other DNA

SEQ ID NO: 44126 - DNA, 80 bp, synthetic construct
  misc_feature 1..80: note = Artificially Synthesized Probe
  source 1..80: mol_type = other DNA
aaatcaaaaccacaatgagataccatctcacaccagttagaatggcaatcattaagaagtcaggaaacaacaggtgctgg

SEQ ID NO: 44127 - DNA, 80 bp, synthetic construct
  misc_feature 1..80: note = Artificially Synthesized Probe
  source 1..80: mol_type = other DNA
tctttttaaagaagcacactgtatttatcaaaaggaagctgagaatgaccctggatgttacggtacatgtgtatagctag

SEQ ID NO: 44128 - DNA, 80 bp, synthetic construct
  misc_feature 1..80: note = Artificially Synthesized Probe
  source 1..80: mol_type = other DNA
aatcatgctgctataaagacacatgcacacgtatgtttattgcggcattattcacaatagcaaagacttggaaccaaccc

SEQ ID NO: 44129 - DNA, 80 bp, synthetic construct
  misc_feature 1..80: note = Artificially Synthesized Probe
  source 1..80: mol_type = other DNA
aacaccgcatgttctcactcataggtgggaattgaacaatgagaagacatggaaacaggaaggggaacgtcacactctgg

SEQ ID NO: 44130 - DNA, 80 bp, synthetic construct; identical to SEQ ID NO: 22584
  misc_feature 1..80: note = Artificially Synthesized Probe
  source 1..80: mol_type = other DNA

SEQ ID NO: 44131 - DNA, 80 bp, synthetic construct
  misc_feature 1..80: note = Artificially Synthesized Probe
  source 1..80: mol_type = other DNA
agctctcactgtctggatagaattctcaatctctgcatagaactctcactgtctggatagaattctcagtctctgtatag

SEQ ID NO: 44132 - DNA, 80 bp, synthetic construct
  misc_feature 1..80: note = Artificially Synthesized Probe
  source 1..80: mol_type = other DNA
ctagatagaattctcactatctttctcaatagaattctcaccctctggatagaactctcactatctctctggatagaatt

SEQ ID NO: 44133 - DNA, 80 bp, synthetic construct; identical to SEQ ID NO: 22585
  misc_feature 1..80: note = Artificially Synthesized Probe
  source 1..80: mol_type = other DNA

SEQ ID NO: 44134 - DNA, 80 bp, synthetic construct
  misc_feature 1..80: note = Artificially Synthesized Probe
  source 1..80: mol_type = other DNA
ataaaactctcactgtctgtctggatagaattctcaccatctggataaaactctcactatctgtctggtagaattctcac

SEQ ID NO: 44135 - DNA, 80 bp, synthetic construct
  misc_feature 1..80: note = Artificially Synthesized Probe
  source 1..80: mol_type = other DNA
gaattctcaccatctgcatagaatattcactatctgtctggatagaattctgaccagctggagagaactctcactatctg

SEQ ID NO: 44136 - DNA, 80 bp, synthetic construct
  misc_feature 1..80: note = Artificially Synthesized Probe
  source 1..80: mol_type = other DNA
tctcactctgtggatagaactctgacaatgtatctggatagaattgtcaccctctggatagaactctcactatctgggta

SEQ ID NO: 44137 - DNA, 80 bp, synthetic construct
  misc_feature 1..80: note = Artificially Synthesized Probe
  source 1..80: mol_type = other DNA
ccaagattatgatattacgaggtggggcatgcaaggaggtgatattgggagatgattaggttatggagagctcttacaat

SEQ ID NO: 44138 - DNA, 80 bp, synthetic construct
  misc_feature 1..80: note = Artificially Synthesized Probe
  source 1..80: mol_type = other DNA
ggatagacttctcggtctctggatagaagtctcaatgcctgtctagatagaattttcaccatccggatacaactctcact

SEQ ID NO: 44139 - DNA, 80 bp, synthetic construct; identical to SEQ ID NO: 22586
  misc_feature 1..80: note = Artificially Synthesized Probe
  source 1..80: mol_type = other DNA

SEQ ID NO: 44140 - DNA, 80 bp, synthetic construct
  misc_feature 1..80: note = Artificially Synthesized Probe
  source 1..80: mol_type = other DNA
ctctctggatagaactctcactatctatctggatagaattctcactctttggatgaaactctcagtatctgtctggatag

SEQ ID NO: 44141 - DNA, 80 bp, synthetic construct
  misc_feature 1..80: note = Artificially Synthesized Probe
  source 1..80: mol_type = other DNA
ctatctggatagaattctccctctctggatagaagtctcattatctgtctggatagaattctcaccatctggatagaagt

SEQ ID NO: 44142 - DNA, 80 bp, synthetic construct; identical to SEQ ID NO: 22587
  misc_feature 1..80: note = Artificially Synthesized Probe
  source 1..80: mol_type = other DNA

SEQ ID NO: 44143 - DNA, 80 bp, synthetic construct
  misc_feature 1..80: note = Artificially Synthesized Probe
  source 1..80: mol_type = other DNA
cactacctgtctcgatagaattctcaccctctggatagaactctcacaatctggatagaattctcactgtctggatataa

SEQ ID NO: 44144 - DNA, 80 bp, synthetic construct
  misc_feature 1..80: note = Artificially Synthesized Probe
  source 1..80: mol_type = other DNA
ggaattctcaggctgtggatataactctcactatctatctggatagaatttttactatctggatagaattctcactatct

SEQ ID NO: 44145 - DNA, 80 bp, synthetic construct
  misc_feature 1..80: note = Artificially Synthesized Probe
  source 1..80: mol_type = other DNA
cactatctgtgtggatagaattctcaccatctgcatagaactctcactatatgggtagaattctgactctctggatcgaa

SEQ ID NO: 44146 - DNA, 80 bp, synthetic construct; identical to SEQ ID NO: 22588
  misc_feature 1..80: note = Artificially Synthesized Probe
  source 1..80: mol_type = other DNA

SEQ ID NO: 44147 - DNA, 80 bp, synthetic construct
  misc_feature 1..80: note = Artificially Synthesized Probe
  source 1..80: mol_type = other DNA
gatcaaactctcactatctggatagaattctcaccctctggatagaactgtcactatctatctggatagaactctcccca

SEQ ID NO: 44148 - DNA, 80 bp, synthetic construct; identical to SEQ ID NO: 22551
  misc_feature 1..80: note = Artificially Synthesized Probe
  source 1..80: mol_type = other DNA

SEQ ID NO: 44149 - DNA, 80 bp, synthetic construct
  misc_feature 1..80: note = Artificially Synthesized Probe
  source 1..80: mol_type = other DNA
tctggatagaatgctcactctctggatagaactctcactatctggatagaattctcaccctctggatagaactgtcactg

SEQ ID NO: 44150 - DNA, 80 bp, synthetic construct
  misc_feature 1..80: note = Artificially Synthesized Probe
  source 1..80: mol_type = other DNA
gcttcctggacagctggagttggagccagagcatgactgtcatgtggcccttggctctgaaggctcttgctctgtcctaa

SEQ ID NO: 44151 - DNA, 80 bp, synthetic construct
  misc_feature 1..80: note = Artificially Synthesized Probe
  source 1..80: mol_type = other DNA
ccccttgcttcatggctgagggtggggagaatgtcccagagccccacgaggggtgatcagcattgtgagctgggcgtgca

SEQ ID NO: 44152 - DNA, 80 bp, synthetic construct; identical to SEQ ID NO: 22589
  misc_feature 1..80: note = Artificially Synthesized Probe
  source 1..80: mol_type = other DNA

SEQ ID NO: 44153 - DNA, 80 bp, synthetic construct
  misc_feature 1..80: note = Artificially Synthesized Probe
  source 1..80: mol_type = other DNA
gtaattatctgtcattttattactgaacccgcccccctgcccaagtctttgtatatcacattaagccctttctattaaag

SEQ ID NO: 44154 - DNA, 80 bp, synthetic construct
  misc_feature 1..80: note = Artificially Synthesized Probe
  source 1..80: mol_type = other DNA
agttcaggagttcgagaccagcctgggcaacaaggtgaaagcccatctctacaaaaaattataaaaagtagccagttatg

SEQ ID NO: 44155 - DNA, 80 bp, synthetic construct; identical to SEQ ID NO: 22590
  misc_feature 1..80: note = Artificially Synthesized Probe
  source 1..80: mol_type = other DNA

SEQ ID NO: 44156 - DNA, 80 bp, synthetic construct
  misc_feature 1..80: note = Artificially Synthesized Probe
  source 1..80: mol_type = other DNA
tcctgatgtttccatgcatacacacatttgtaaacgtagcgggatcatactctgcatgctggtctgtagctggtttcttt

SEQ ID NO: 44157 - DNA, 80 bp, synthetic construct
  misc_feature 1..80: note = Artificially Synthesized Probe
  source 1..80: mol_type = other DNA
acatttttttttttttttttaacacagagtctctctctgtcacccaggctggagtgcactagggcaatcttggctcactg

SEQ ID NO: 44158 - DNA, 80 bp, synthetic construct
  misc_feature 1..80: note = Artificially Synthesized Probe
  source 1..80: mol_type = other DNA
agcgatccacctgcctcagcctcccaaaatgctgggattacaagcgtgagccaccacgcccagcctgtccgtacatcttt

SEQ ID NO: 44159 - DNA, 80 bp, synthetic construct
  misc_feature 1..80: note = Artificially Synthesized Probe
  source 1..80: mol_type = other DNA
tttttttgcatttttagtagagacgggttttgccatgttagccaggctggtctcgaattcctgacctcaagtgatccgcc

SEQ ID NO: 44160 - DNA, 80 bp, synthetic construct
  misc_feature 1..80: note = Artificially Synthesized Probe
  source 1..80: mol_type = other DNA
ggtattaccatccccattttgcataggagaaaaatgaggcttatggagactgtgacattcccagggtcacggggctggtg

SEQ ID NO: 44161 - DNA, 80 bp, synthetic construct; identical to SEQ ID NO: 22591
  misc_feature 1..80: note = Artificially Synthesized Probe
  source 1..80: mol_type = other DNA

SEQ ID NO: 44162 - DNA, 80 bp, synthetic construct
  misc_feature 1..80: note = Artificially Synthesized Probe
  source 1..80: mol_type = other DNA
taaattaccgagtcttagctgttcctatcctagcaggatttatatttgacagcagaacacgagctacagacttgcaaaac

SEQ ID NO: 44163 - DNA, 80 bp, synthetic construct
  misc_feature 1..80: note = Artificially Synthesized Probe
  source 1..80: mol_type = other DNA
cagaagcactgtagatttattctacttcttcattctcttttcctttcccttactttttaggttactcagagagggcaatg

SEQ ID NO: 44164 - DNA, 80 bp, synthetic construct; identical to SEQ ID NO: 22592
  misc_feature 1..80: note = Artificially Synthesized Probe
  source 1..80: mol_type = other DNA

SEQ ID NO: 44165 - DNA, 80 bp, synthetic construct
  misc_feature 1..80: note = Artificially Synthesized Probe
  source 1..80: mol_type = other DNA
ctacgtggctctccaaggccacacagctacttgatctggtcagggggagtagggacttgaaaccaggtcttaggacagca

SEQ ID NO: 44166 - DNA, 80 bp, synthetic construct
  misc_feature 1..80: note = Artificially Synthesized Probe
  source 1..80: mol_type = other DNA
gcactgctacttttaaacgtttataataatggcagtgaaggtgctggcttcatatccttgcaagggctgttctttgcaga

SEQ ID NO: 44167 - DNA, 80 bp, synthetic construct
  misc_feature 1..80: note = Artificially Synthesized Probe
  source 1..80: mol_type = other DNA
ggccctgctccccaccttccacatggcctccttcttcagcaatgccctctacaactccttctacctcgccgggggcttca

SEQ ID NO: 44168 - DNA, 80 bp, synthetic construct; identical to SEQ ID NO: 22593
  misc_feature 1..80: note = Artificially Synthesized Probe
  source 1..80: mol_type = other DNA

SEQ ID NO: 44169 - DNA, 80 bp, synthetic construct
  misc_feature 1..80: note = Artificially Synthesized Probe
  source 1..80: mol_type = other DNA
gggcccctccacatccctctcgactcagccacgcagagtgagctttccaaggtgcaaacccatgcccccctttgttcaaa

SEQ ID NO: 44170 - DNA, 80 bp, synthetic construct
  misc_feature 1..80: note = Artificially Synthesized Probe
  source 1..80: mol_type = other DNA
cctacatttggtcatagacttcaatggagtccccatctccattgaagagaataacacaagtagagagtggcagtgaatgt

SEQ ID NO: 44171 - DNA, 80 bp, synthetic construct; identical to SEQ ID NO: 22547
  misc_feature 1..80: note = Artificially Synthesized Probe
  source 1..80: mol_type = other DNA

SEQ ID NO: 44172 - DNA, 80 bp, synthetic construct
  misc_feature 1..80: note = Artificially Synthesized Probe
  source 1..80: mol_type = other DNA
aggcagggctcattgcctccttcccctccccataccatgccacctccataggatcagggcacaggctccattgtctctgg

SEQ ID NO: 44173 - DNA, 80 bp, synthetic construct
  misc_feature 1..80: note = Artificially Synthesized Probe
  source 1..80: mol_type = other DNA
ctctgcccttttgcctcttggtctctggtctctctcccctccttgctcatcagagaacttgggccagagccaccatggcc

SEQ ID NO: 44174 - DNA, 80 bp, synthetic construct; identical to SEQ ID NO: 22594
  misc_feature 1..80: note = Artificially Synthesized Probe
  source 1..80: mol_type = other DNA

SEQ ID NO: 44175 - DNA, 80 bp, synthetic construct
  misc_feature 1..80: note = Artificially Synthesized Probe
  source 1..80: mol_type = other DNA
agagagtgtcaatataaaggagactgtgggaatagggggagaccgtgggaatatgaagagactgtgtgaatatgggggag

SEQ ID NO: 44176 - DNA, 80 bp, synthetic construct
  misc_feature 1..80: note = Artificially Synthesized Probe
  source 1..80: mol_type = other DNA
tgtcaatataaaggagacagtggggatatggggagaccatgagaatatagggagaccatgggaatatgaagaaactgtgt

SEQ ID NO: 44177 - DNA, 80 bp, synthetic construct
  misc_feature 1..80: note = Artificially Synthesized Probe
  source 1..80: mol_type = other DNA
agactgtgtgaatatggggaagaccatgtcaatataaagaagaccatgggaatatggggagaccatgggaatatgaggaa

SEQ ID NO: 44178 - DNA, 80 bp, synthetic construct; identical to SEQ ID NO: 22595
  misc_feature 1..80: note = Artificially Synthesized Probe
  source 1..80: mol_type = other DNA

SEQ ID NO: 44179 - DNA, 80 bp, synthetic construct
  misc_feature 1..80: note = Artificially Synthesized Probe
  source 1..80: mol_type = other DNA
ttcctgcggtggtgttttgaagggctgatgaagattcagttcagcagaagaacttataaaatgcctctcgggaacctcac

SEQ ID NO: 44180 - DNA, 80 bp, synthetic construct
  misc_feature 1..80: note = Artificially Synthesized Probe
  source 1..80: mol_type = other DNA
atcgtcattggcctcagcggtggcttcatggtcctgtactacgtgtccttaaggttcatcaaacagaaaccaagtcaaga

SEQ ID NO: 44181 - DNA, 80 bp, synthetic construct
  misc_feature 1..80: note = Artificially Synthesized Probe
  source 1..80: mol_type = other DNA
ccacaggatggcagtagaataaagacagtcgaaagggatttctgctcactggcaggagactgcgatgactgggagaaaac

SEQ ID NO: 44182 - DNA, 80 bp, synthetic construct
  misc_feature 1..80: note = Artificially Synthesized Probe
  source 1..80: mol_type = other DNA
gatttggcttcatcttccaggggccccacactccgtggtgagccaccatcaatacagaaagtgacctaagatgtaccagc

SEQ ID NO: 44183 - DNA, 80 bp, synthetic construct
  misc_feature 1..80: note = Artificially Synthesized Probe
  source 1..80: mol_type = other DNA
gagaacgtcagctgcagaagattcaccacagggaccctcccagggaattgccctcggccacaaggagctgtctcaccaaa

SEQ ID NO: 44184 - DNA, 80 bp, synthetic construct; identical to SEQ ID NO: 22596
  misc_feature 1..80: note = Artificially Synthesized Probe
  source 1..80: mol_type = other DNA

SEQ ID NO: 44185 - DNA, 80 bp, synthetic construct
  misc_feature 1..80: note = Artificially Synthesized Probe
  source 1..80: mol_type = other DNA
acccaaatctcaccttgaattgtaataatccccaagtgtcaagggcgggaccagatggagataattgaatcataggggtg

SEQ ID NO: 44186 - DNA, 80 bp, synthetic construct
  misc_feature 1..80: note = Artificially Synthesized Probe
  source 1..80: mol_type = other DNA
gtgctgaactgtgagtcagttaaacctcttttctttataaattacccagtcttgggtatttcttcatagcagtgtgagag

SEQ ID NO: 44187 - DNA, 80 bp, synthetic construct; identical to SEQ ID NO: 22597
  misc_feature 1..80: note = Artificially Synthesized Probe
  source 1..80: mol_type = other DNA

SEQ ID NO: 44188 - DNA, 80 bp, synthetic construct
  misc_feature 1..80: note = Artificially Synthesized Probe
  source 1..80: mol_type = other DNA
agcatgctgccgttttccaaagcacttgcaacactcaggatgcttgcacggtcatgttgccaccatccaacctgcagacc

SEQ ID NO: 44189 - DNA, 80 bp, synthetic construct
  misc_feature 1..80: note = Artificially Synthesized Probe
  source 1..80: mol_type = other DNA
tttgaaggctgtctctcaatttgtgttctgcccagtgcatcctatcagaaggcatgtgatttcaacttctcccataccaa

SEQ ID NO: 44190 - DNA, 80 bp, synthetic construct
  misc_feature 1..80: note = Artificially Synthesized Probe
  source 1..80: mol_type = other DNA
attgatgtaaacttgtgaattcccattgtatccttacaaccctttattattgtgattaattctgatgctcagcttgtccc

SEQ ID NO: 44191 - DNA, 80 bp, synthetic construct
  misc_feature 1..80: note = Artificially Synthesized Probe
  source 1..80: mol_type = other DNA
gcaatggcgcgatctcggctcactgcaacctctgcctcccaggttcaagcgattgccttgcctcagcctcccaagtagtt

SEQ ID NO: 44192 - DNA, 80 bp, synthetic construct; identical to SEQ ID NO: 22552
  misc_feature 1..80: note = Artificially Synthesized Probe
  source 1..80: mol_type = other DNA

SEQ ID NO: 44193 - DNA, 80 bp, synthetic construct; identical to SEQ ID NO: 22598
  misc_feature 1..80: note = Artificially Synthesized Probe
  source 1..80: mol_type = other DNA

SEQ ID NO: 44194 - DNA, 80 bp, synthetic construct
  misc_feature 1..80: note = Artificially Synthesized Probe
  source 1..80: mol_type = other DNA
catgagtttactctgataacatccatttccaatccagcatcacagagttgatcctaggttcttccctcttctctaattgt

SEQ ID NO: 44195 - DNA, 80 bp, synthetic construct
  misc_feature 1..80: note = Artificially Synthesized Probe
  source 1..80: mol_type = other DNA
tcaggctctaactcccaagtccagctttccctgagtctgcagctgtcttcctcacactcccgtggcccaccacaacttcc

SEQ ID NO: 44196 - DNA, 80 bp, synthetic construct
  misc_feature 1..80: note = Artificially Synthesized Probe
  source 1..80: mol_type = other DNA
tgacagccactaagatacatcacctgactttgtgagttcaccattcggtctgcaatgggttttggtaactcagtggctct

SEQ ID NO: 44197 - DNA, 80 bp, synthetic construct; identical to SEQ ID NO: 22599
  misc_feature 1..80: note = Artificially Synthesized Probe
  source 1..80: mol_type = other DNA

SEQ ID NO: 44198 - DNA, 80 bp, synthetic construct
  misc_feature 1..80: note = Artificially Synthesized Probe
  source 1..80: mol_type = other DNA
aaaaatacaaaaattagctgggcatggtagtgcgtgcctgtagttccagctacttgggaggttgaggcaggagaatcgct

SEQ ID NO: 44199 - DNA, 80 bp, synthetic construct
  misc_feature 1..80: note = Artificially Synthesized Probe
  source 1..80: mol_type = other DNA
atgctgttcagcgagccctgccctgcattgcgaaagggtagagatttgtttatttgtcagtattgaaagcatggcttgca

SEQ ID NO: 44200 - DNA, 80 bp, synthetic construct; identical to SEQ ID NO: 22600
  misc_feature 1..80: note = Artificially Synthesized Probe
  source 1..80: mol_type = other DNA

SEQ ID NO: 44201 - DNA, 80 bp, synthetic construct
  misc_feature 1..80: note = Artificially Synthesized Probe
  source 1..80: mol_type = other DNA
gaggtagatctcgcatttgcttttgttttcttctacttcaactcttgtcatgatcccaaattaaacaactagcaacagaa

SEQ ID NO: 44202 - DNA, 80 bp, synthetic construct
  misc_feature 1..80: note = Artificially Synthesized Probe
  source 1..80: mol_type = other DNA
gggaaagtgatgaaatattttgttggttggcctttgcttgtttgcaaaatatatccaatgctcacacctgagagacaaca

SEQ ID NO: 44203 - DNA, 80 bp, synthetic construct
  misc_feature 1..80: note = Artificially Synthesized Probe
  source 1..80: mol_type = other DNA
tcttcatttaaagtggcctgggtacagagcaacatcccctgtctttatcacatgagctctgcctgaggcagcttcagcag

SEQ ID NO: 44204 - DNA, 80 bp, synthetic construct
  misc_feature 1..80: note = Artificially Synthesized Probe
  source 1..80: mol_type = other DNA
tcaaaaaagaaaaaaaaagaaaagaaaaacgaccagataagatctgataaggcccgatgttaatacatgaacttttaaat

SEQ ID NO: 44205 - DNA, 80 bp, synthetic construct; identical to SEQ ID NO: 22601
  misc_feature 1..80: note = Artificially Synthesized Probe
  source 1..80: mol_type = other DNA

SEQ ID NO: 44206 - DNA, 80 bp, synthetic construct
  misc_feature 1..80: note = Artificially Synthesized Probe
  source 1..80: mol_type = other DNA
gcaccaccatgcctggctaacttttgtatgtttttgtagagatggggtcccactatgttgcttaggttgctctcgaactc

SEQ ID NO: 44207 - DNA, 80 bp, synthetic construct
  misc_feature 1..80: note = Artificially Synthesized Probe
  source 1..80: mol_type = other DNA
ttgtgcttatttaatccttttcctgtctctaggcagtgtacagataggggaaattgtgtttcctgagtacttttatatgc

SEQ ID NO: 44208 - DNA, 80 bp, synthetic construct; identical to SEQ ID NO: 22553
  misc_feature 1..80: note = Artificially Synthesized Probe
  source 1..80: mol_type = other DNA

SEQ ID NO: 44209 - DNA, 80 bp, synthetic construct
  misc_feature 1..80: note = Artificially Synthesized Probe
  source 1..80: mol_type = other DNA
acgcggtggctttaaaggaaaccccaggaaggcaaaggcagcttggggccctggaaggggccacacccaggtccccagca

SEQ ID NO: 44210 - DNA, 80 bp, synthetic construct
  misc_feature 1..80: note = Artificially Synthesized Probe
  source 1..80: mol_type = other DNA
tggctgcgaggtggctgtccctgcattctttcaccaggtttcaagactccttgcattcgcagtacccccattcccatcca

SEQ ID NO: 44211 - DNA, 80 bp, synthetic construct
  misc_feature 1..80: note = Artificially Synthesized Probe
  source 1..80: mol_type = other DNA
ccttctccctctcctctctccacccgatccactaaagagggagcccgaagtgcccagactggcacttaaagagtgaagaa

SEQ ID NO: 44212 - DNA, 80 bp, synthetic construct
  misc_feature 1..80: note = Artificially Synthesized Probe
  source 1..80: mol_type = other DNA
tttacttggagacccatggaccctccgggggtcaaagatgagaggtcacccatggccaacaggcagcaaagctgggcaaa

SEQ ID NO: 44213 - DNA, 80 bp, synthetic construct
  misc_feature 1..80: note = Artificially Synthesized Probe
  source 1..80: mol_type = other DNA
ctctgcttcagtcgagtttgagaagcactggcttggtaagtcctttggtaagaccaagttggccacagcctgcactagag

SEQ ID NO: 44214 - DNA, 80 bp, synthetic construct; identical to SEQ ID NO: 22554
  misc_feature 1..80: note = Artificially Synthesized Probe
  source 1..80: mol_type = other DNA

SEQ ID NO: 44215 - DNA, 80 bp, synthetic construct
  misc_feature 1..80: note = Artificially Synthesized Probe
  source 1..80: mol_type = other DNA
cggcagaggagagagggctgccgaaaggggccactccccaggatacctcggtgagtgagcaatgggaagtcggcccaggc

SEQ ID NO: 44216 - DNA, 80 bp, synthetic construct
  misc_feature 1..80: note = Artificially Synthesized Probe
  source 1..80: mol_type = other DNA
gaggtcacttcctgccctaagaaatgctcttttagggaaatgatgttcttttgtgtgatgtgggacaatttcactttttc

SEQ ID NO: 44217 - DNA, 80 bp, synthetic construct
  misc_feature 1..80: note = Artificially Synthesized Probe
  source 1..80: mol_type = other DNA
agctctgcctcctaggttcaagtgattctcctgcctcagcctcccaagtagctgagattacaggcacctgccaccacacc

SEQ ID NO: 44218 - DNA, 80 bp, synthetic construct; identical to SEQ ID NO: 22555
  misc_feature 1..80: note = Artificially Synthesized Probe
  source 1..80: mol_type = other DNA

SEQ ID NO: 44219 - DNA, 80 bp, synthetic construct
  misc_feature 1..80: note = Artificially Synthesized Probe
  source 1..80: mol_type = other DNA
ggcaggaggtggaggtatgtttccttcctcattttacctgagaagtgtttactcaagaaatagcctttgactgaattcgg

SEQ ID NO: 44220 - DNA, 80 bp, synthetic construct
  misc_feature 1..80: note = Artificially Synthesized Probe
  source 1..80: mol_type = other DNA
agagaaagacaagcatgatcgaggattccacacccaatggggaaaacaacctggactggccttgagtttccaggacttga

SEQ ID NO: 44221 - DNA, 80 bp, synthetic construct
  misc_feature 1..80: note = Artificially Synthesized Probe
  source 1..80: mol_type = other DNA
ctgggagggctgacgattcagccaccacagcttgagaggcaaagaaatgctaggaccacaccagaaatgcacgcaggccc

SEQ ID NO: 44222 - DNA, 80 bp, synthetic construct; identical to SEQ ID NO: 22556
  misc_feature 1..80: note = Artificially Synthesized Probe
  source 1..80: mol_type = other DNA

SEQ ID NO: 44223 - DNA, 80 bp, synthetic construct
  misc_feature 1..80: note = Artificially Synthesized Probe
  source 1..80: mol_type = other DNA
catatacttctctggcctaaaagtcctcaggaggttgggcctgggaagaggtgtacagaccctggggatggacttggggc

SEQ ID NO: 44224 - DNA, 80 bp, synthetic construct
  misc_feature 1..80: note = Artificially Synthesized Probe
  source 1..80: mol_type = other DNA
aaatttcttcagccaggaacaagtcctgcgtgtcctcttgccaaccctccagccgtgagtgtcagcacatcactcccccc

SEQ ID NO: 44225 - DNA, 80 bp, synthetic construct
  misc_feature 1..80: note = Artificially Synthesized Probe
  source 1..80: mol_type = other DNA
tggcacaatctcagcacactgcaacctccgcctctcaggttcaagccattctcctgcctcagcctcctgagtagctggga

SEQ ID NO: 44226 - DNA, 80 bp, synthetic construct; identical to SEQ ID NO: 22557
  misc_feature 1..80: note = Artificially Synthesized Probe
  source 1..80: mol_type = other DNA

SEQ ID NO: 44227 - DNA, 80 bp, synthetic construct
  misc_feature 1..80: note = Artificially Synthesized Probe
  source 1..80: mol_type = other DNA
cctggaaggcacaatccctcaatggtggttggagtcagggctggcccacacctgccttcccaggccacagtgaaggggct

SEQ ID NO: 44228 - DNA, 80 bp, synthetic construct
  misc_feature 1..80: note = Artificially Synthesized Probe
  source 1..80: mol_type = other DNA
aaatgtctgaccttccttcctcagcgcctcctccatgcctaaatccgacctggggatgttttggccagcagaagtaattt

SEQ ID NO: 44229 - DNA, 80 bp, synthetic construct
  misc_feature 1..80: note = Artificially Synthesized Probe
  source 1..80: mol_type = other DNA
gagacacatgctcacgtatgtttattgcagcactattcacaatagcaaagacttgaaaccaacccaaatgtccatcaatg

SEQ ID NO: 44230 - DNA, 80 bp, synthetic construct
  misc_feature 1..80: note = Artificially Synthesized Probe
  source 1..80: mol_type = other DNA
tggcgtcatttcttcacagcggttgtgtgtgggggatcgttaccaccaaaatcataataatcatttatagtatattttaa

SEQ ID NO: 44231 - DNA, 80 bp, synthetic construct
  misc_feature 1..80: note = Artificially Synthesized Probe
  source 1..80: mol_type = other DNA
aaaaaaaagttcaatagccagagagctaaggataagatagaaaaaccacatagtaattttaaacagcattttgctgcaga

SEQ ID NO: 44232 - DNA, 80 bp, synthetic construct; identical to SEQ ID NO: 22603
  misc_feature 1..80: note = Artificially Synthesized Probe
  source 1..80: mol_type = other DNA

SEQ ID NO: 44233 - DNA, 80 bp, synthetic construct
  misc_feature 1..80: note = Artificially Synthesized Probe
  source 1..80: mol_type = other DNA
gtttccctcctctcaaaaaactccagaggatacctttagtaggcacagagtataatgtcatgttcaaaatttacaaagga

SEQ ID NO: 44234 - DNA, 80 bp, synthetic construct; identical to SEQ ID NO: 22613
  misc_feature 1..80: note = Artificially Synthesized Probe
  source 1..80: mol_type = other DNA

SEQ ID NO: 44235 - DNA, 80 bp, synthetic construct
  misc_feature 1..80: note = Artificially Synthesized Probe
  source 1..80: mol_type = other DNA
gattccagagaccacagagtcttaagttataaggtaatttcaaatttcccaagggttggtttacaaaatggtttgaaagt

SEQ ID NO: 44236 - DNA, 80 bp, synthetic construct
  misc_feature 1..80: note = Artificially Synthesized Probe
  source 1..80: mol_type = other DNA
aagtaacgctgaaacccctaccttcaaatccagcttaccgtcagatgaactatgtatacgtgggaaattatgattaaagc

SEQ ID NO: 44237 - DNA, 80 bp, synthetic construct; identical to SEQ ID NO: 22614
  misc_feature 1..80: note = Artificially Synthesized Probe
  source 1..80: mol_type = other DNA

SEQ ID NO: 44238 - DNA, 80 bp, synthetic construct
  misc_feature 1..80: note = Artificially Synthesized Probe
  source 1..80: mol_type = other DNA
gttcacgccattctcctgcctcagcctcccgagtaactgggactacaggcacctgccaccatgccctgctaatttttttg

SEQ ID NO: 44239 - DNA, 80 bp, synthetic construct
  misc_feature 1..80: note = Artificially Synthesized Probe
  source 1..80: mol_type = other DNA
tttattgttgttaagataaatgggaactgacaagcctatataacattccttacgtagtttctgatcgctataacattgcc

SEQ ID NO: 44240 - DNA, 80 bp, synthetic construct
  misc_feature 1..80: note = Artificially Synthesized Probe
  source 1..80: mol_type = other DNA
tcccacctgaaatacataaaagtctcacctatggaatctatcatttacaaggatttatacataaagattcatttggtggc

SEQ ID NO: 44241 - DNA, 80 bp, synthetic construct
  misc_feature 1..80: note = Artificially Synthesized Probe
  source 1..80: mol_type = other DNA
agccgggcatgttggcaggcgtccgtagtcccagctactccggaggctgaggcaggagaatggcgtgaacccaggaggcg

SEQ ID NO: 44242 - DNA, 80 bp, synthetic construct; identical to SEQ ID NO: 22615
  misc_feature 1..80: note = Artificially Synthesized Probe
  source 1..80: mol_type = other DNA

SEQ ID NO: 44243 - DNA, 80 bp, synthetic construct
  misc_feature 1..80: note = Artificially Synthesized Probe
  source 1..80: mol_type = other DNA
gcaaggattaattctaattagctaaatctaattcgttcttcagaggagagacttgtctgcaaggttgcaagggagggtag

SEQ ID NO: 44244 - DNA, 80 bp, synthetic construct
  misc_feature 1..80: note = Artificially Synthesized Probe
  source 1..80: mol_type = other DNA
cctgtctgtgccctcagtctacctggacgctgccatccttcaaaacccagcccagtcccacctcctgaaggatgaagggg

SEQ ID NO: 44245 - DNA, 80 bp, synthetic construct
  misc_feature 1..80: note = Artificially Synthesized Probe
  source 1..80: mol_type = other DNA
cagcactaaagtgctaacatggaagggaaagttgtaagaggtactagggtatgctaataactccagttttctactctcca

SEQ ID NO: 44246 - DNA, 80 bp, synthetic construct
  misc_feature 1..80: note = Artificially Synthesized Probe
  source 1..80: mol_type = other DNA
ttggtcgacgtggacgcagccgccgcctcattatattttttaaaacacatgaaaagtcatgtcatattctagccatataa

SEQ ID NO: 44247 - DNA, 80 bp, synthetic construct; identical to SEQ ID NO: 22616
  misc_feature 1..80: note = Artificially Synthesized Probe
  source 1..80: mol_type = other DNA

SEQ ID NO: 44248 - DNA, 80 bp, synthetic construct
  misc_feature 1..80: note = Artificially Synthesized Probe
  source 1..80: mol_type = other DNA
gctgtaccaggcgccatcctgacacctgcccgcccgggagagcagaacacagtgggagatccaggggcttcttcggaaga

SEQ ID NO: 44249 - DNA, 80 bp, synthetic construct
  misc_feature 1..80: note = Artificially Synthesized Probe
  source 1..80: mol_type = other DNA
cctccagggcagctctggtacttgggaagcctctagaaagacttgggcagaggcagcgatggcctaggcccactcaaccc

SEQ ID NO: 44250 - DNA, 80 bp, synthetic construct
  misc_feature 1..80: note = Artificially Synthesized Probe
  source 1..80: mol_type = other DNA
catgtggggagactgaggatcagaggggcacatccagcctgggaaagccagaccacgcgcagctcttggcattgtcttca

SEQ ID NO: 44251 - DNA, 80 bp, synthetic construct; identical to SEQ ID NO: 22617
  misc_feature 1..80: note = Artificially Synthesized Probe
  source 1..80: mol_type = other DNA

SEQ ID NO: 44252 - DNA, 80 bp, synthetic construct
  misc_feature 1..80: note = Artificially Synthesized Probe
  source 1..80: mol_type = other DNA
gtgggctgggctgcagtggtgtgtctgggctgcaatggtgggctgggctgcagtggtcgggctgagctacagtggtgggg

SEQ ID NO: 44253 - DNA, 80 bp, synthetic construct
  misc_feature 1..80: note = Artificially Synthesized Probe
  source 1..80: mol_type = other DNA
ggctgtgctgcggtgatggggctgggctagcgcttcacgtgtgggtctctcacgcctggtaaaccaaatgccctgcagca

SEQ ID NO: 44254 - DNA, 80 bp, synthetic construct
  misc_feature 1..80: note = Artificially Synthesized Probe
  source 1..80: mol_type = other DNA
cttatactgatttctggattataggctcaacaacaggtggattgtttgtgagttttccaagaaaggggaggggatttttc

SEQ ID NO: 44255 - DNA, 80 bp, synthetic construct
  misc_feature 1..80: note = Artificially Synthesized Probe
  source 1..80: mol_type = other DNA
gtcgccatcttggttttggtgggttttggctggcttctttactgcatcccatttgatcagcagggtcttggtgacttgta

SEQ ID NO: 44256 - DNA, 80 bp, synthetic construct
  misc_feature 1..80: note = Artificially Synthesized Probe
  source 1..80: mol_type = other DNA
tcagcagaggctcttggggctcaactggagtgaaccgagtcgcggatggtggaagtgaggggtacttggccatggaggcc

SEQ ID NO: 44257 - DNA, 80 bp, synthetic construct; identical to SEQ ID NO: 22618
  misc_feature 1..80: note = Artificially Synthesized Probe
  source 1..80: mol_type = other DNA

SEQ ID NO: 44258 - DNA, 80 bp, synthetic construct
  misc_feature 1..80: note = Artificially Synthesized Probe
  source 1..80: mol_type = other DNA
acatttgaggcaagggtcctgtggagggaggagggaagaagttggagagtgatgcctggaggccaaggtggcaccactgg

SEQ ID NO: 44259 - DNA, 80 bp, synthetic construct
  misc_feature 1..80: note = Artificially Synthesized Probe
  source 1..80: mol_type = other DNA
agaggttaggagaacgaccacgctgaaagtgaaaccgcctttgcaaaaactctatcaattagaaaaattgtaagagtgag

SEQ ID NO: 44260 - DNA, 80 bp, synthetic construct; identical to SEQ ID NO: 22619
  misc_feature 1..80: note = Artificially Synthesized Probe
  source 1..80: mol_type = other DNA

SEQ ID NO: 44261 - DNA, 80 bp, synthetic construct
  misc_feature 1..80: note = Artificially Synthesized Probe
  source 1..80: mol_type = other DNA
ctgaccccccaaactgccttgagaaacccctagctatgagcctttgatgagatgatttgagtacaaactctctctaccat

SEQ ID NO: 44262 - DNA, 80 bp, synthetic construct
  misc_feature 1..80: note = Artificially Synthesized Probe
  source 1..80: mol_type = other DNA
gtttcttctgccacctgaaataattgaaaggttcaaaatccaatgttatagagtttattcgaactctaagtttgacgacc

SEQ ID NO: 44263 - DNA, 80 bp, synthetic construct
  misc_feature 1..80: note = Artificially Synthesized Probe
  source 1..80: mol_type = other DNA
gttcccttcgggaaaagtatatttaacatactgtcttatggaatttgataggcatggggtcttttgtaccatctggtctg

SEQ ID NO: 44264 - DNA, 80 bp, synthetic construct
  misc_feature 1..80: note = Artificially Synthesized Probe
  source 1..80: mol_type = other DNA
gacttgctgcttgactagggtgtcagaatcacattctttcaaggctcgaagtaatttaaagttccaacagctttaatctg

SEQ ID NO: 44265 - DNA, 80 bp, synthetic construct; identical to SEQ ID NO: 22620
  misc_feature 1..80: note = Artificially Synthesized Probe
  source 1..80: mol_type = other DNA

SEQ ID NO: 44266 - DNA, 80 bp, synthetic construct
  misc_feature 1..80: note = Artificially Synthesized Probe
  source 1..80: mol_type = other DNA
agagtatagattgtaaatgccactaatcagacttaaggtctgtgttaatgttcatgctggtcagctttgctgaattccaa

SEQ ID NO: 44267 - DNA, 80 bp, synthetic construct
  misc_feature 1..80: note = Artificially Synthesized Probe
  source 1..80: mol_type = other DNA
acggtgaatgtcacacaaacaggaacgtgcctggaggccgcctggacctgtcctcccgcccatcagctgccaaggtgatg

SEQ ID NO: 44268 - DNA, 80 bp, synthetic construct
  misc_feature 1..80: note = Artificially Synthesized Probe
  source 1..80: mol_type = other DNA
caagctgcgaacatcataagccaccttctgccaggtgtggccctggggaggggtcccttaacatgtgataggaggtgcca

SEQ ID NO: 44269 - DNA, 80 bp, synthetic construct; identical to SEQ ID NO: 22621
  misc_feature 1..80: note = Artificially Synthesized Probe
  source 1..80: mol_type = other DNA

SEQ ID NO: 44270 - DNA, 80 bp, synthetic construct
  misc_feature 1..80: note = Artificially Synthesized Probe
  source 1..80: mol_type = other DNA
atatgagtttgagaccagcctggccaacatggtgaaactccatctctactaaaaaatacaaaacttagtcaggtgtggtg

SEQ ID NO: 44271 - DNA, 80 bp, synthetic construct
  misc_feature 1..80: note = Artificially Synthesized Probe
  source 1..80: mol_type = other DNA
ctaaacataaacattacttttacaatcaaaaccatttcaaaggccttacttcactggattctcagccagtgctgccccca

SEQ ID NO: 44272 - DNA, 80 bp, synthetic construct
  misc_feature 1..80: note = Artificially Synthesized Probe
  source 1..80: mol_type = other DNA
agcacccctagtgcggccacgcgggaggatggggcccgaggctgcaggggaggaagcgggtggatcaaggcaagcctcgc

SEQ ID NO: 44273 - DNA, 80 bp, synthetic construct; identical to SEQ ID NO: 22622
  misc_feature 1..80: note = Artificially Synthesized Probe
  source 1..80: mol_type = other DNA

SEQ ID NO: 44274 - DNA, 80 bp, synthetic construct
  misc_feature 1..80: note = Artificially Synthesized Probe
  source 1..80: mol_type = other DNA
cccctggaaatcccccagggaggcggggcgcagggattgcagtgaggccctgtgcccaggctggctgtgccctacctgcg

SEQ ID NO: 44275 - DNA, 80 bp, synthetic construct
  misc_feature 1..80: note = Artificially Synthesized Probe
  source 1..80: mol_type = other DNA
ggatactggaagcttcagcttaccccaccccacccctccaggcccggtttgtcctgggcgcaaggggctacttcagagct

SEQ ID NO: 44276 - DNA, 80 bp, synthetic construct
  misc_feature 1..80: note = Artificially Synthesized Probe
  source 1..80: mol_type = other DNA
aaccaggcttaagtaatagaactgcctgacctccagcttgtctcttcagctcccaggtctgtgctcgatttgggattatt

SEQ ID NO: 44277 - DNA, 80 bp, synthetic construct
  misc_feature 1..80: note = Artificially Synthesized Probe
  source 1..80: mol_type = other DNA
tgataaattgatttcttgaagatttttccacttccaagcaaggtagaatagatgcacctgtccccacgccctacactaag

SEQ ID NO: 44278 - DNA, 80 bp, synthetic construct
  misc_feature 1..80: note = Artificially Synthesized Probe
  source 1..80: mol_type = other DNA
tggaagaggccccgtgacatggggaacacactaagctcctagcccagctcttctcctggaggaccggatgccctcgctct

SEQ ID NO: 44279 - DNA, 80 bp, synthetic construct; identical to SEQ ID NO: 22602
  misc_feature 1..80: note = Artificially Synthesized Probe
  source 1..80: mol_type = other DNA

SEQ ID NO: 44280 - DNA, 80 bp, synthetic construct; identical to SEQ ID NO: 22623
  misc_feature 1..80: note = Artificially Synthesized Probe
  source 1..80: mol_type = other DNA

SEQ ID NO: 44281 - DNA, 80 bp, synthetic construct
  misc_feature 1..80: note = Artificially Synthesized Probe
  source 1..80: mol_type = other DNA
ttatagaaaaccctaaagattccaccaataagatgttagaataaatgaaatcagtaaagttgcaggatataaaattaaca

SEQ ID NO: 44282 - DNA, 80 bp, synthetic construct
  misc_feature 1..80: note = Artificially Synthesized Probe
  source 1..80: mol_type = other DNA
tgaaaactataaaacatttgtgaaagaaattgaagatacaaataattagaaagctgtcccatatctgagatcaggtgcca

SEQ ID NO: 44283 - DNA, 80 bp, synthetic construct; identical to SEQ ID NO: 22624
  misc_feature 1..80: note = Artificially Synthesized Probe
  source 1..80: mol_type = other DNA

SEQ ID NO: 44284 - DNA, 80 bp, synthetic construct
  misc_feature 1..80: note = Artificially Synthesized Probe
  source 1..80: mol_type = other DNA
caatacactacctaacttcaagatatactataaagctataataatcaaaacatcatggtattggcataaaaacaaacaga

SEQ ID NO: 44285 - DNA, 80 bp, synthetic construct
  misc_feature 1..80: note = Artificially Synthesized Probe
  source 1..80: mol_type = other DNA
gggatgccgaggtggaaggaccacttgaggcctccctccaggctccggaagagacctcctccatgatcccttgtctaagg

SEQ ID NO: 44286 - DNA, 80 bp, synthetic construct
  misc_feature 1..80: note = Artificially Synthesized Probe
  source 1..80: mol_type = other DNA
tgtgtggtctatgtgtctgtgtgtacacttctgtatgtctttctctgtgcatttttgcatgtgtctccatgtgtctctgt

SEQ ID NO: 44287 - DNA, 80 bp, synthetic construct
  misc_feature 1..80: note = Artificially Synthesized Probe
  source 1..80: mol_type = other DNA
tctgtgtatgtaatggtgtgtctctgtggcggggaggggctgtgtgtgtctttctgtgtatgtgtgtgtaacggtgtgtc

SEQ ID NO: 44288 - DNA, 80 bp, synthetic construct
  misc_feature 1..80: note = Artificially Synthesized Probe
  source 1..80: mol_type = other DNA
tttgtgtctgtgtgtgtctttctgtgtgtgtctgtgtatgtaatggtgtgtctctgtggcggggaggggctgcgtgtgat

SEQ ID NO: 44289 - DNA, 80 bp, synthetic construct; identical to SEQ ID NO: 22625
  misc_feature 1..80: note = Artificially Synthesized Probe
  source 1..80: mol_type = other DNA

SEQ ID NO: 44290 - DNA, 80 bp, synthetic construct
  misc_feature 1..80: note = Artificially Synthesized Probe
  source 1..80: mol_type = other DNA
ctcccagagcccctggcagccgctcacgggttccggaccgcctggtggttcttgggcaccgcagtgaacctcagcttcct

SEQ ID NO: 44291 - DNA, 80 bp, synthetic construct; identical to SEQ ID NO: 22604
  misc_feature 1..80: note = Artificially Synthesized Probe
  source 1..80: mol_type = other DNA

SEQ ID NO: 44292 - DNA, 80 bp, synthetic construct
  misc_feature 1..80: note = Artificially Synthesized Probe
  source 1..80: mol_type = other DNA
gccctggtgagccgctgcacctcttgcaccgaccccccgaagaacccccccaggtagtagaaatcgccctcgtccttggg

SEQ ID NO: 44293 - DNA, 80 bp, synthetic construct; identical to SEQ ID NO: 22626
  misc_feature 1..80: note = Artificially Synthesized Probe
  source 1..80: mol_type = other DNA

SEQ ID NO: 44294 - DNA, 80 bp, synthetic construct
  misc_feature 1..80: note = Artificially Synthesized Probe
  source 1..80: mol_type = other DNA
agtagtggacacggtggcccaccatgaagtgcttctccgccgtctccaggaacagcttcaggaaagccacgtatctgcaa

SEQ ID NO: 44295 - DNA, 80 bp, synthetic construct
  misc_feature 1..80: note = Artificially Synthesized Probe
  source 1..80: mol_type = other DNA
ttcatcctcttcccagcgatgggggaccaccagcaccccctcttactaaggagggctgagggcaggtggctggaggctgg

SEQ ID NO: 44296 - DNA, 80 bp, synthetic construct
  misc_feature 1..80: note = Artificially Synthesized Probe
  source 1..80: mol_type = other DNA
ctccctccaggcttgaactgcacctattcctaagagtaagtcattcctggcctccgccactgtcgctggcccagctgccc

SEQ ID NO: 44297 - DNA, 80 bp, synthetic construct; identical to SEQ ID NO: 22627
  misc_feature 1..80: note = Artificially Synthesized Probe
  source 1..80: mol_type = other DNA

SEQ ID NO: 44298 - DNA, 80 bp, synthetic construct
  misc_feature 1..80: note = Artificially Synthesized Probe
  source 1..80: mol_type = other DNA
cacatgagctcagtaagatgctgcatgaatgacctttcccatctaccctctgggaggacaaggctggccgccaccccact

SEQ ID NO: 44299 - DNA, 80 bp, synthetic construct
  misc_feature 1..80: note = Artificially Synthesized Probe
  source 1..80: mol_type = other DNA
gaatgtgccctcccagacaatgggagccagccaaggggtaccacgaggacatccttcctactgcacatggagagaggcgt

SEQ ID NO: 44300 - DNA, 80 bp, synthetic construct
  misc_feature 1..80: note = Artificially Synthesized Probe
  source 1..80: mol_type = other DNA
ggcaaatcattcccagccctccctcaacattggacctgtgggaacacacagcaagctgagctttgctggcaaagagatag

SEQ ID NO: 44301 - DNA, 80 bp, synthetic construct; identical to SEQ ID NO: 22628
  misc_feature 1..80: note = Artificially Synthesized Probe
  source 1..80: mol_type = other DNA

SEQ ID NO: 44302 - DNA, 80 bp, synthetic construct
  misc_feature 1..80: note = Artificially Synthesized Probe
  source 1..80: mol_type = other DNA
ggatgctaatgttctgtgcagctctttggttcagtgagtcctttttggtgaaagggctcagagatgcggctaaagcctgt

SEQ ID NO: 44303 - DNA, 80 bp, synthetic construct
  misc_feature 1..80: note = Artificially Synthesized Probe
  source 1..80: mol_type = other DNA
cagccgctgaaccatgactgggcattgaccctcccgccaaggccacactcccaggctggaatcactgtggttgcttgggg

SEQ ID NO: 44304 - DNA, 80 bp, synthetic construct
  misc_feature 1..80: note = Artificially Synthesized Probe
  source 1..80: mol_type = other DNA
cactgtgggcagagaggaggctgggtgtgtggcctctgtccctggttgttcccagggaaaggccctgagatgtgcagacc

SEQ ID NO: 44305 - DNA, 80 bp, synthetic construct
  misc_feature 1..80: note = Artificially Synthesized Probe
  source 1..80: mol_type = other DNA
ctgtccccacctaaaggattgtagaggctcaggagacatgagccggggccattttaactgtcagtaatggccacaatttg

SEQ ID NO: 44306 - DNA, 80 bp, synthetic construct; identical to SEQ ID NO: 22629
  misc_feature 1..80: note = Artificially Synthesized Probe
  source 1..80: mol_type = other DNA

SEQ ID NO: 44307 - DNA, 80 bp, synthetic construct
  misc_feature 1..80: note = Artificially Synthesized Probe
  source 1..80: mol_type = other DNA
gttaagcgtatttcatcacaatttaaaaaaaatcaaaagcagtgtggccagcttggccttgattgcctaggtcagcactg

SEQ ID NO: 44308 - DNA, 80 bp, synthetic construct
  misc_feature 1..80: note = Artificially Synthesized Probe
  source 1..80: mol_type = other DNA
gagttcaagactagcctggccaacatggtgaaacgctgtctctgctaaaaatacaaaaattagccaggtgtggtggtggg

SEQ ID NO: 44309 - DNA, 80 bp, synthetic construct
  misc_feature 1..80: note = Artificially Synthesized Probe
  source 1..80: mol_type = other DNA
tttggtcaaaactgaagctccagctccatcgtgctctctgagtggctgcaggacgagggccaagtcagggtagagactgg

SEQ ID NO: 44310 - DNA, 80 bp, synthetic construct; identical to SEQ ID NO: 22630
  misc_feature 1..80: note = Artificially Synthesized Probe
  source 1..80: mol_type = other DNA

SEQ ID NO: 44311 - DNA, 80 bp, synthetic construct
  misc_feature 1..80: note = Artificially Synthesized Probe
  source 1..80: mol_type = other DNA
tctgaggtctacgttcggggagcctcacagcccacacattcaccagacacgtcgaagccaaggccgggcagagtggagtt

SEQ ID NO: 44312 - DNA, 80 bp, synthetic construct
  misc_feature 1..80: note = Artificially Synthesized Probe
  source 1..80: mol_type = other DNA
aaaaggtgatctggcttctgtctcatctttcttgggatgttggtcttggagcctcccaaccaagctaagcaggagcccag

SEQ ID NO: 44313 - DNA, 80 bp, synthetic construct
  misc_feature 1..80: note = Artificially Synthesized Probe
  source 1..80: mol_type = other DNA
gggctgagggtgccacgctggggttggccaggtccaacctgccccctcctttgaggccctctccttccttcctgtgctgg

SEQ ID NO: 44314 - DNA, 80 bp, synthetic construct; identical to SEQ ID NO: 22631
  misc_feature 1..80: note = Artificially Synthesized Probe
  source 1..80: mol_type = other DNA

SEQ ID NO: 44315 - DNA, 80 bp, synthetic construct
  misc_feature 1..80: note = Artificially Synthesized Probe
  source 1..80: mol_type = other DNA
ggctggggaggtcaggaaggcaggatcagatcatggagagcctcctaccttatgttctggaaagatcactccagctgctg

SEQ ID NO: 44316 - DNA, 80 bp, synthetic construct
  misc_feature 1..80: note = Artificially Synthesized Probe
  source 1..80: mol_type = other DNA
cccagtgtaggggtgagagcaaagggagagttgaggatggctggtggaggaggggtggggatgggggagcagagaccatg

SEQ ID NO: 44317 - DNA, 80 bp, synthetic construct
  misc_feature 1..80: note = Artificially Synthesized Probe
  source 1..80: mol_type = other DNA
cccagagtgggacccccgcccacagccagcaccccggccagcatggatgctccacctgctcttccctgcactcaccagaa

SEQ ID NO: 44318 - DNA, 80 bp, synthetic construct
  misc_feature 1..80: note = Artificially Synthesized Probe
  source 1..80: mol_type = other DNA
ccggtgaagctgcaaggcctcgaggcaggtagggcaagttctcagcaaagctcaggcgcctcgccacgtcccacaccggg

SEQ ID NO: 44319 - DNA, 80 bp, synthetic construct; identical to SEQ ID NO: 22632
  misc_feature 1..80: note = Artificially Synthesized Probe
  source 1..80: mol_type = other DNA

SEQ ID NO: 44320 - DNA, 80 bp, synthetic construct
  misc_feature 1..80: note = Artificially Synthesized Probe
  source 1..80: mol_type = other DNA
aaataagggagcaagtaagcacaccctccgccagagctggacgcaggcaataactgtccttaggaccctgataactgtga

SEQ ID NO: 44321 - DNA, 80 bp, synthetic construct
  misc_feature 1..80: note = Artificially Synthesized Probe
  source 1..80: mol_type = other DNA
attaggaaaaggatcataggtcgaagtgcgtggcattttggttttcctggaaaacaggagtagaaaaatcacatcactca

SEQ ID NO: 44322 - DNA, 80 bp, synthetic construct
  misc_feature 1..80: note = Artificially Synthesized Probe
  source 1..80: mol_type = other DNA
ctcccactcagagaagagggaggcggtctgctcctcccagctcatcagcccgactgctcctgcagactctgagagccacc

SEQ ID NO: 44323 - DNA, 80 bp, synthetic construct; identical to SEQ ID NO: 22633
  misc_feature 1..80: note = Artificially Synthesized Probe
  source 1..80: mol_type = other DNA

SEQ ID NO: 44324 - DNA, 80 bp, synthetic construct
  misc_feature 1..80: note = Artificially Synthesized Probe
  source 1..80: mol_type = other DNA
atcccaggactttgggaggctgagccagcagaattgctggaagccaggagttctagaccagcctgggcaacatagtgaga

SEQ ID NO: 44325 - DNA, 80 bp, synthetic construct; identical to SEQ ID NO: 22605
  misc_feature 1..80: note = Artificially Synthesized Probe
  source 1..80: mol_type = other DNA

SEQ ID NO: 44326 - DNA, 80 bp, synthetic construct
  misc_feature 1..80: note = Artificially Synthesized Probe
  source 1..80: mol_type = other DNA
agcaagaccctgtctcttaataataaacaaaactacaacaacaaaaaacccacaaactaagatatatacacatttttttt

SEQ ID NO: 44327 - DNA, 80 bp, synthetic construct
  misc_feature 1..80: note = Artificially Synthesized Probe
  source 1..80: mol_type = other DNA
attctcctgcctcagcctcccgagtagctgggtttacaggcgcccaccactacgcctggctaattttttgtatttttagt

SEQ ID NO: 44328 - DNA, 80 bp, synthetic construct; identical to SEQ ID NO: 22634
  misc_feature 1..80: note = Artificially Synthesized Probe
  source 1..80: mol_type = other DNA

SEQ ID NO: 44329 - DNA, 80 bp, synthetic construct
  misc_feature 1..80: note = Artificially Synthesized Probe
  source 1..80: mol_type = other DNA
ctccacctttctaagtcctgtgaccacggagcgatttatctcgaatagcttcttgaaacagaaacgtgggaggcaaaaca

SEQ ID NO: 44330 - DNA, 80 bp, synthetic construct
  misc_feature 1..80: note = Artificially Synthesized Probe
  source 1..80: mol_type = other DNA
atccaataaaatgtgcccactttaggtatacggttttgatgagtttcacacaatgtatgtacacatgtaatcaccccagt

SEQ ID NO: 44331 - DNA, 80 bp, synthetic construct; identical to SEQ ID NO: 22635
  misc_feature 1..80: note = Artificially Synthesized Probe
  source 1..80: mol_type = other DNA

SEQ ID NO: 44332 - DNA, 80 bp, synthetic construct
  misc_feature 1..80: note = Artificially Synthesized Probe
  source 1..80: mol_type = other DNA
gtgactgaattttccattcccgccaggaatgtacgagaaccacagtccttgccaacacttgatggtcactcttttatcct

SEQ ID NO: 44333 - DNA, 80 bp, synthetic construct
  misc_feature 1..80: note = Artificially Synthesized Probe
  source 1..80: mol_type = other DNA
atatatttttggggggcacagtcccactccagttgcccaggctggagtgtggtggcatgatcatggctcactacagcctc

SEQ ID NO: 44334 - DNA, 80 bp, synthetic construct
  misc_feature 1..80: note = Artificially Synthesized Probe
  source 1..80: mol_type = other DNA
gcctcagcctcccaatgtgctgggattacaggcataagccacctcacctggccctctatttttattttttttagacagga

SEQ ID NO: 44335 - DNA, 80 bp, synthetic construct
  misc_feature 1..80: note = Artificially Synthesized Probe
  source 1..80: mol_type = other DNA
actgggtctcattaagttgtttctctttttattattgagcagaatttatttctatattttggatacaagtcctttgccaa

SEQ ID NO: 44336 - DNA, 80 bp, synthetic construct
  misc_feature 1..80: note = Artificially Synthesized Probe
  source 1..80: mol_type = other DNA
ctgggcacctggtagagccgtaggtgagaatggccccagtggtactgggcagatgtgagcacagggacaatgttagtgca

SEQ ID NO: 44337 - DNA, 80 bp, synthetic construct; identical to SEQ ID NO: 22636
  misc_feature 1..80: note = Artificially Synthesized Probe
  source 1..80: mol_type = other DNA

SEQ ID NO: 44338 - DNA, 80 bp, synthetic construct
  misc_feature 1..80: note = Artificially Synthesized Probe
  source 1..80: mol_type = other DNA
atctctactaaaaatacaaaaactaaggccaggcgtggtggctcacgcccgtaaccccagcactttgggaggccgaggtg

SEQ ID NO: 44339 - DNA, 80 bp, synthetic construct
  misc_feature 1..80: note = Artificially Synthesized Probe
  source 1..80: mol_type = other DNA
gaggttgcagtgagccgagattgcaccactgcactccagcccgggcgacagagcgagactccatctcaaaaaaaaaaaaa

SEQ ID NO: 44340 - DNA, 80 bp, synthetic construct
  misc_feature 1..80: note = Artificially Synthesized Probe
  source 1..80: mol_type = other DNA
ccagcctgggtgacagagcgagactccatctcaaaaaaaaaaaaaaaaagaataaaaataactaaaagagtatagttgga

SEQ ID NO: 44341 - DNA, 80 bp, synthetic construct; identical to SEQ ID NO: 22637
  misc_feature 1..80: note = Artificially Synthesized Probe
  source 1..80: mol_type = other DNA

SEQ ID NO: 44342 - DNA, 80 bp, synthetic construct
  misc_feature 1..80: note = Artificially Synthesized Probe
  source 1..80: mol_type = other DNA
aagtccctttcttccctcaatggatatccagtcatttcagccatttgaattgaaaatactttcctttctctatcacatta

SEQ ID NO: 44343 - DNA, 80 bp, synthetic construct
  misc_feature 1..80: note = Artificially Synthesized Probe
  source 1..80: mol_type = other DNA
ttacaaaaatttcttctggagttttaagtgagattatgtggactctgtagatccatctggggagaagtgacagtttagca

SEQ ID NO: 44344 - DNA, 80 bp, synthetic construct; identical to SEQ ID NO: 22638
  misc_feature 1..80: note = Artificially Synthesized Probe
  source 1..80: mol_type = other DNA

SEQ ID NO: 44345 - DNA, 80 bp, synthetic construct
  misc_feature 1..80: note = Artificially Synthesized Probe
  source 1..80: mol_type = other DNA
gttttaattgtatagacatttctcctaatttggtaaattattctctaaatatttcatgttttatgatgctactgtaaatg

SEQ ID NO: 44346 - DNA, 80 bp, synthetic construct
  misc_feature 1..80: note = Artificially Synthesized Probe
  source 1..80: mol_type = other DNA
cctctccctcctgggttcaagcaattctcatgcctcagcctcccaagtaggtgggattacaggcgcaccaccacactcaa

SEQ ID NO: 44347 - DNA, 80 bp, synthetic construct
  misc_feature 1..80: note = Artificially Synthesized Probe
  source 1..80: mol_type = other DNA
ttgctctggaatgagccacggagcccagagaaggaacatgcagagggcatctgagaactgcagcaggggacccagttggg

SEQ ID NO: 44348 - DNA, 80 bp, synthetic construct
  misc_feature 1..80: note = Artificially Synthesized Probe
  source 1..80: mol_type = other DNA
ttgtatcttgagaccttgctaagctgacttagctgatgggctcacagcataaacatatataatatatatgacaataatag

SEQ ID NO: 44349 - DNA, 80 bp, synthetic construct
  misc_feature 1..80: note = Artificially Synthesized Probe
  source 1..80: mol_type = other DNA
cataaaggagcaaggaggcaatgaagttattatatatactggagcaaggaaaggtcaccagacaatagcttgaatataca

SEQ ID NO: 44350 - DNA, 80 bp, synthetic construct; identical to SEQ ID NO: 22639
  misc_feature 1..80: note = Artificially Synthesized Probe
  source 1..80: mol_type = other DNA

SEQ ID NO: 44351 - DNA, 80 bp, synthetic construct
  misc_feature 1..80: note = Artificially Synthesized Probe
  source 1..80: mol_type = other DNA
gtaaaagatgaacagaagaacaaaaaggcataaaacatagaaaacaaattgtgaactgatagatggaaatccaaccacag

SEQ ID NO: 44352 - DNA, 80 bp, synthetic construct
  misc_feature 1..80: note = Artificially Synthesized Probe
  source 1..80: mol_type = other DNA
aaacaaagatacaaataggtcaaagcaaaaggatagtagatttgctatgcaaacaaccgtaagggagcttgaggagaaat

SEQ ID NO: 44353 - DNA, 80 bp, synthetic construct
  misc_feature 1..80: note = Artificially Synthesized Probe
  source 1..80: mol_type = other DNA
aattctcgtgcctcagcctcccaagtagcagggattacaggcgcacaccatcacagctggctaatttttttgtattttca

SEQ ID NO: 44354 - DNA, 80 bp, synthetic construct; identical to SEQ ID NO: 22640
  misc_feature 1..80: note = Artificially Synthesized Probe
  source 1..80: mol_type = other DNA

SEQ ID NO: 44355 - DNA, 80 bp, synthetic construct
  misc_feature 1..80: note = Artificially Synthesized Probe
  source 1..80: mol_type = other DNA
attgcgaagactctgtttctctagctgtgcagctgcaaggtcactaaacagataatcttgagtcataaaacgtgttgttc

SEQ ID NO: 44356 - DNA, 80 bp, synthetic construct
  misc_feature 1..80: note = Artificially Synthesized Probe
  source 1..80: mol_type = other DNA
gacacgttcttttatttgggttcttgctgctcccacgttactgtcacaatattttctgtggagttgaaaagcaaatgccc

SEQ ID NO: 44357 - DNA, 80 bp, synthetic construct
  misc_feature 1..80: note = Artificially Synthesized Probe
  source 1..80: mol_type = other DNA
aatctgattgggtcggtgcacctaaataattaaataattcctcctcaaccccatcggtctctctgattccttaattatcc

SEQ ID NO: 44358 - DNA, 80 bp, synthetic construct; identical to SEQ ID NO: 22641
  misc_feature 1..80: note = Artificially Synthesized Probe
  source 1..80: mol_type = other DNA

SEQ ID NO: 44359 - DNA, 80 bp, synthetic construct
  misc_feature 1..80: note = Artificially Synthesized Probe
  source 1..80: mol_type = other DNA
aatcctaccccactctcagtaatggatagaataattagaaagaaaatcagtagatacaaatgacttgacatcactggaca

SEQ ID NO: 44360 - DNA, 80 bp, synthetic construct
  misc_feature 1..80: note = Artificially Synthesized Probe
  source 1..80: mol_type = other DNA
tgtgttgagccagctgtgctgtggacagggcgctgtggacagggcacagcagacaggcgggggatgtaggcatcgggagg

SEQ ID NO: 44361 - DNA, 80 bp, synthetic construct
  misc_feature 1..80: note = Artificially Synthesized Probe
  source 1..80: mol_type = other DNA
tcgaaaggactgatatccacagagtttcttctctagccacaggggaatgaaatcagaaattaacaaaagaaatttgggaa

SEQ ID NO: 44362 - DNA, 80 bp, synthetic construct
  misc_feature 1..80: note = Artificially Synthesized Probe
  source 1..80: mol_type = other DNA
aaatgtctacattagaaaaaaaaatcttaaatcaagtgtgtaagcttccattgtaagtaactacaataagaaaagacaga

SEQ ID NO: 44363 - DNA, 80 bp, synthetic construct; identical to SEQ ID NO: 22642
  misc_feature 1..80: note = Artificially Synthesized Probe
  source 1..80: mol_type = other DNA

SEQ ID NO: 44364 - DNA, 80 bp, synthetic construct
  misc_feature 1..80: note = Artificially Synthesized Probe
  source 1..80: mol_type = other DNA
tatgataccagatacacaataaaagaaaaagttaataaattggaatggatcaaaatgtaaaacttttctacttcaaaata

SEQ ID NO: 44365 - DNA, 80 bp, synthetic construct
  misc_feature 1..80: note = Artificially Synthesized Probe
  source 1..80: mol_type = other DNA
aaaaggcaaaacatttcaataggcatttcaccaaaaacatatacaaatggctaaaaagcacaagaaaagccacttgccat

SEQ ID NO: 44366 - DNA, 80 bp, synthetic construct
  misc_feature 1..80: note = Artificially Synthesized Probe
  source 1..80: mol_type = other DNA
agatcacttgagcccaggagtttgagaacagcctgggcaacatggcaaaaccccatctctaccaaaaatacaaaaattag

SEQ ID NO: 44367 - DNA, 80 bp, synthetic construct; identical to SEQ ID NO: 22643
  misc_feature 1..80: note = Artificially Synthesized Probe
  source 1..80: mol_type = other DNA

SEQ ID NO: 44368 - DNA, 80 bp, synthetic construct
  misc_feature 1..80: note = Artificially Synthesized Probe
  source 1..80: mol_type = other DNA
atgtccttcagctgatgaatggataaacaaaatgtggtctatctgtacaatggattattcagtaataaaaaggaattaaa

SEQ ID NO: 44369 - DNA, 80 bp, synthetic construct
  misc_feature 1..80: note = Artificially Synthesized Probe
  source 1..80: mol_type = other DNA
atggggaatgactgcggaggagttccagggagttttggtgggctggggatggaaaagttataaaatttatttcacaactc

SEQ ID NO: 44370 - DNA, 80 bp, synthetic construct
  misc_feature 1..80: note = Artificially Synthesized Probe
  source 1..80: mol_type = other DNA
aaggaagagagatgctaggtgtgttcagtagggctccgtcaaagctgattttttgaagttatgggcagcattccgagtaa

SEQ ID NO: 44371 - DNA, 80 bp, synthetic construct
  misc_feature 1..80: note = Artificially Synthesized Probe
  source 1..80: mol_type = other DNA
gtatctttgaaatggcagcagctgatctttaaaacagaggcaagccgttcctgtctcaaaacgtttaaatcctcacccca

SEQ ID NO: 44372 - DNA, 80 bp, synthetic construct
  misc_feature 1..80: note = Artificially Synthesized Probe
  source 1..80: mol_type = other DNA
ccttcaagcatgacaaaataacgaaggaattcttaacaggacccatttaggattaaacaagttttattggggatctgaag

SEQ ID NO: 44373 - DNA, 80 bp, synthetic construct; identical to SEQ ID NO: 22644
  misc_feature 1..80: note = Artificially Synthesized Probe
  source 1..80: mol_type = other DNA

SEQ ID NO: 44374 - DNA, 80 bp, synthetic construct
  misc_feature 1..80: note = Artificially Synthesized Probe
  source 1..80: mol_type = other DNA
tcttcttggccaatctctggtgagacccaccagaatggaggagagccgggactgggtgcactgccagcttccaaaactcc

SEQ ID NO: 44375 - DNA, 80 bp, synthetic construct
  misc_feature 1..80: note = Artificially Synthesized Probe
  source 1..80: mol_type = other DNA
ctccctctgactccactaccctgctctcctgcccgccccaacaagcctgactgatttgtggagccgggccttccccatgt

SEQ ID NO: 44376 - DNA, 80 bp, synthetic construct; identical to SEQ ID NO: 22645
  misc_feature 1..80: note = Artificially Synthesized Probe
  source 1..80: mol_type = other DNA

SEQ ID NO: 44377 - DNA, 80 bp, synthetic construct
  misc_feature 1..80: note = Artificially Synthesized Probe
  source 1..80: mol_type = other DNA
agctgtgttcatcatcttgactgggtcaagatgtatccagctgtacctttcatgtgcggtttattgtatacatccgttga

SEQ ID NO: 44378 - DNA, 80 bp, synthetic construct
  misc_feature 1..80: note = Artificially Synthesized Probe
  source 1..80: mol_type = other DNA
gatctctccaaacctgttttcccgtgggtgaaagaatgacccgggaagtatttaccgttccttcctgagaactcagcgat

SEQ ID NO: 44379 - DNA, 80 bp, synthetic construct
  misc_feature 1..80: note = Artificially Synthesized Probe
  source 1..80: mol_type = other DNA
gtcaggcctcagtatgccttatccgccacctgattccaaatcaaagtaaaacatctctccccagatgtgtacacagcact

SEQ ID NO: 44380 - DNA, 80 bp, synthetic construct; identical to SEQ ID NO: 22646
  misc_feature 1..80: note = Artificially Synthesized Probe
  source 1..80: mol_type = other DNA

SEQ ID NO: 44381 - DNA, 80 bp, synthetic construct
  misc_feature 1..80: note = Artificially Synthesized Probe
  source 1..80: mol_type = other DNA
ctggccgccgtgcccgagggaagggctggggggcgggcagggcagcccagagccttgtcctagtccagggtcgggcggta

SEQ ID NO: 44382 - DNA, 80 bp, synthetic construct; identical to SEQ ID NO: 22606
  misc_feature 1..80: note = Artificially Synthesized Probe
  source 1..80: mol_type = other DNA

SEQ ID NO: 44383 - DNA, 80 bp, synthetic construct
  misc_feature 1..80: note = Artificially Synthesized Probe
  source 1..80: mol_type = other DNA
gtcccaggcacccacagcgcggccgagcccacctgcccgccggctccccaggacgcagggtctcggaggctggggcggcg

SEQ ID NO: 44384 - DNA, 80 bp, synthetic construct
  misc_feature 1..80: note = Artificially Synthesized Probe
  source 1..80: mol_type = other DNA
gtctcggcctccgccttccgcccggcggccctggggcggggtgagcccgaggcgccccctcccggcccgcgccgcccgcc

SEQ ID NO: 44385 - DNA, 80 bp, synthetic construct
  misc_feature 1..80: note = Artificially Synthesized Probe
  source 1..80: mol_type = other DNA
ccgcatcccgccctggggccgagcggctccgggtgcccctgaagccccgtccccgggggccccttgacaccctgtctccc

SEQ ID NO: 44386 - DNA, 80 bp, synthetic construct; identical to SEQ ID NO: 22647
  misc_feature 1..80: note = Artificially Synthesized Probe
  source 1..80: mol_type = other DNA

SEQ ID NO: 44387 - DNA, 80 bp, synthetic construct
  misc_feature 1..80: note = Artificially Synthesized Probe
  source 1..80: mol_type = other DNA
gggactgggagagcgcgccccgctgcgaagaggagttacctcccgaagggtcccagaggcttcttcctgcttttcctgat

SEQ ID NO: 44388 - DNA, 80 bp, synthetic construct
  misc_feature 1..80: note = Artificially Synthesized Probe
  source 1..80: mol_type = other DNA
ctctgggaacatttttaaattatttcttcttcctttgcctcagatgggaggagcatcgcgctactggatcacctctaatc

SEQ ID NO: 44389 - DNA, 80 bp, synthetic construct
  misc_feature 1..80: note = Artificially Synthesized Probe
  source 1..80: mol_type = other DNA
ccaatgtgcacattcagcctgggcctcacgcagcctggggaaaatgtgccaaaatgtcagcatggaaaggattcacagtg

SEQ ID NO: 44390 - DNA, 80 bp, synthetic construct; identical to SEQ ID NO: 22607
  misc_feature 1..80: note = Artificially Synthesized Probe
  source 1..80: mol_type = other DNA

SEQ ID NO: 44391 - DNA, 80 bp, synthetic construct
  misc_feature 1..80: note = Artificially Synthesized Probe
  source 1..80: mol_type = other DNA
tccaggtcaccagcagggcctggcttatgatctatgaacccccggccgatctagaggttagggctctagatggggcgggg

SEQ ID NO: 44392 - DNA, 80 bp, synthetic construct
  misc_feature 1..80: note = Artificially Synthesized Probe
  source 1..80: mol_type = other DNA
atgagcgtggttggggcagggccagtggggcagggtcaaggctgtgttgaggggtagagtgggcgtggtcggagcggagc

SEQ ID NO: 44393 - DNA, 80 bp, synthetic construct
  misc_feature 1..80: note = Artificially Synthesized Probe
  source 1..80: mol_type = other DNA
aaggccctgagccctccagtgggctctgagggtttgaatgtttattctaaatgggctccaacacggagtgcgcgtgcgct

SEQ ID NO: 44394 - DNA, 80 bp, synthetic construct; identical to SEQ ID NO: 22608
  misc_feature 1..80: note = Artificially Synthesized Probe
  source 1..80: mol_type = other DNA

SEQ ID NO: 44395 - DNA, 80 bp, synthetic construct
  misc_feature 1..80: note = Artificially Synthesized Probe
  source 1..80: mol_type = other DNA
cagagacacggtgacggtcaggtttctcaggtcccccgggctaaggaacacgtgagcctttcagccaccacgttgaccac

SEQ ID NO: 44396 - DNA, 80 bp, synthetic construct
  misc_feature 1..80: note = Artificially Synthesized Probe
  source 1..80: mol_type = other DNA
ttacagcacggcgactcctaaaggcaaggagttaaaggcacacggatcctagcactttggggaggctgaggtgggcggat

SEQ ID NO: 44397 - DNA, 80 bp, synthetic construct
  misc_feature 1..80: note = Artificially Synthesized Probe
  source 1..80: mol_type = other DNA
tgcagtgagccgagatagcaccactgcactccagcctggcaacagggcgagactccctcaaaacaacaacaacaaaaaca

SEQ ID NO: 44398 - DNA, 80 bp, synthetic construct
  misc_feature 1..80: note = Artificially Synthesized Probe
  source 1..80: mol_type = other DNA
agccctgaaagttctgtaactccactttagggatcagggattcccgactcaggccctgagctgtttctggagctttcact

SEQ ID NO: 44399 - DNA, 80 bp, synthetic construct; identical to SEQ ID NO: 22609
  misc_feature 1..80: note = Artificially Synthesized Probe
  source 1..80: mol_type = other DNA

SEQ ID NO: 44400 - DNA, 80 bp, synthetic construct
  misc_feature 1..80: note = Artificially Synthesized Probe
  source 1..80: mol_type = other DNA
aacacggtgaaatcccgtctctactaaacacacacagacacacagacacacacacacacacacacaattagccccgcgtg

SEQ ID NO: 44401 - DNA, 80 bp, synthetic construct
  misc_feature 1..80: note = Artificially Synthesized Probe
  source 1..80: mol_type = other DNA
ctctgtcaaaaaatgaaaaataaaataaaccgttttacagctgcgcatgtgtgtaaaaacaggacacagcacttctgccg

SEQ ID NO: 44402 - DNA, 80 bp, synthetic construct
  misc_feature 1..80: note = Artificially Synthesized Probe
  source 1..80: mol_type = other DNA
tccagggtgccacactcccccaacctactgtcccaggtagaggagcttttgggggtgggtggttactttctgctcatctc

SEQ ID NO: 44403 - DNA, 80 bp, synthetic construct
  misc_feature 1..80: note = Artificially Synthesized Probe
  source 1..80: mol_type = other DNA
attgggactacaggagagcgccaccatgcctaatttttttttttttgcattatttgtagagatggggtttcgttatgttc

SEQ ID NO: 44404 - DNA, 80 bp, synthetic construct; identical to SEQ ID NO: 22610
  misc_feature 1..80: note = Artificially Synthesized Probe
  source 1..80: mol_type = other DNA

SEQ ID NO: 44405 - DNA, 80 bp, synthetic construct
  misc_feature 1..80: note = Artificially Synthesized Probe
  source 1..80: mol_type = other DNA
gacacaatgccctagtgaggtcgcttcctgacacgagtttaaaggatgcacacgtgttataaatcttagaaagctggaag

SEQ ID NO: 44406 - DNA, 80 bp, synthetic construct
  misc_feature 1..80: note = Artificially Synthesized Probe
  source 1..80: mol_type = other DNA
aggtacttgtgatttgtatgagatgtgagttgtccatttcctattcctcgtgaccaaatgtgtcttttcaattacggtca

SEQ ID NO: 44407 - DNA, 80 bp, synthetic construct
  misc_feature 1..80: note = Artificially Synthesized Probe
  source 1..80: mol_type = other DNA
ctattcctcgtgaccaaatgtgtcttttcaattacggtcatttaaaaatgaaatgtgagtgaagacgatgattctagggc

SEQ ID NO: 44408 - DNA, 80 bp, synthetic construct
  misc_feature 1..80: note = Artificially Synthesized Probe
  source 1..80: mol_type = other DNA
agtaagactccatctctacaaacactttttaaaaattaaccaggcatggtggcacgtgtcagtagtcccagctactcaag

SEQ ID NO: 44409 - DNA, 80 bp, synthetic construct; identical to SEQ ID NO: 22611
  misc_feature 1..80: note = Artificially Synthesized Probe
  source 1..80: mol_type = other DNA

SEQ ID NO: 44410 - DNA, 80 bp, synthetic construct
  misc_feature 1..80: note = Artificially Synthesized Probe
  source 1..80: mol_type = other DNA
atcaaaaataaatacctatcgggtactatgcttattacctgggtgactaaataacctgtacaccaaacccccgagacacg

SEQ ID NO: 44411 - DNA, 80 bp, synthetic construct
  misc_feature 1..80: note = Artificially Synthesized Probe
  source 1..80: mol_type = other DNA
aaacaggcacctcaagggatggtcactgttacagcgttcgcctgagacagccacttccgttgagaagtcacagaaacctc

SEQ ID NO: 44412 - DNA, 80 bp, synthetic construct
  misc_feature 1..80: note = Artificially Synthesized Probe
  source 1..80: mol_type = other DNA
agcagcaaagctgcgatttcgaggccgacttggttccaaagcccaagcttttaaccgtcacgctataggacaccatgcag

SEQ ID NO: 44413 - DNA, 80 bp, synthetic construct
  misc_feature 1..80: note = Artificially Synthesized Probe
  source 1..80: mol_type = other DNA
gattgagaccatcctgtccaacagggtgaaaccacacctctactaaaaatacaaaaaatagctgggcgtggtggcgcacg

SEQ ID NO: 44414 - DNA, 80 bp, synthetic construct; identical to SEQ ID NO: 22612
  misc_feature 1..80: note = Artificially Synthesized Probe
  source 1..80: mol_type = other DNA

SEQ ID NO: 44415 - DNA, 80 bp, synthetic construct
  misc_feature 1..80: note = Artificially Synthesized Probe
  source 1..80: mol_type = other DNA
tttgtgcaaatgatggggctttgcattttttattaacattttcctctcacgtggtttacatcaatttataataatctaca

SEQ ID NO: 44416 - DNA, 80 bp, synthetic construct
  misc_feature 1..80: note = Artificially Synthesized Probe
  source 1..80: mol_type = other DNA
gtcctgctctgggccccgttcacgctgcagttttggctgagattggagcaaaggcgttggagagcgtacggatgggaaat

SEQ ID NO: 44417 - DNA, 80 bp, synthetic construct; identical to SEQ ID NO: 22755
  misc_feature 1..80: note = Artificially Synthesized Probe
  source 1..80: mol_type = other DNA

SEQ ID NO: 44418 - DNA, 80 bp, synthetic construct
  misc_feature 1..80: note = Artificially Synthesized Probe
  source 1..80: mol_type = other DNA
tcctcccagccagaacttgtgaaatgcagtcctggtgggttcgtttatcctcagcatcctgcacaatctgctaggctgac

SEQ ID NO: 44419 - DNA, 80 bp, synthetic construct
  misc_feature 1..80: note = Artificially Synthesized Probe
  source 1..80: mol_type = other DNA
tctctccagtagcactggcctccaagacaacaagcagggctggctctctggctgcgactcaaggctatagggcatgcagc

SEQ ID NO: 44420 - DNA, 80 bp, synthetic construct
  misc_feature 1..80: note = Artificially Synthesized Probe
  source 1..80: mol_type = other DNA
aactggcccatctcagtctcaggacagctgaggcagtgtagaggcatcgagagaccctctcctctcccagcgctaggcgc

SEQ ID NO: 44421 - DNA, 80 bp, synthetic construct; identical to SEQ ID NO: 22756
  misc_feature 1..80: note = Artificially Synthesized Probe
  source 1..80: mol_type = other DNA

SEQ ID NO: 44422 - DNA, 80 bp, synthetic construct
  misc_feature 1..80: note = Artificially Synthesized Probe
  source 1..80: mol_type = other DNA
ctgcaacctccatctcccgggttcaagtgattctcctgcttcagcctcctgagtagttgggattacaggtgcacgccacc

SEQ ID NO: 44423 - DNA, 80 bp, synthetic construct
  misc_feature 1..80: note = Artificially Synthesized Probe
  source 1..80: mol_type = other DNA
ggcatgagccactgcgcccaagaactgacttgtaaaaagcagtcttaccctacacgtatttgaaatcgtaagaaaaatgt

SEQ ID NO: 44424 - DNA, 80 bp, synthetic construct; identical to SEQ ID NO: 22757
  misc_feature 1..80: note = Artificially Synthesized Probe
  source 1..80: mol_type = other DNA

SEQ ID NO: 44425 - DNA, 80 bp, synthetic construct
  misc_feature 1..80: note = Artificially Synthesized Probe
  source 1..80: mol_type = other DNA
cctccctgggattgctgggaagattcagggagaaaacttgggtcaagccattggctcccaaataagcaaatcctccacag

SEQ ID NO: 44426 - DNA, 80 bp, synthetic construct
  misc_feature 1..80: note = Artificially Synthesized Probe
  source 1..80: mol_type = other DNA
ttagcccaacgtggtggcatgtgcctgtagtgagggggaggctgaggtgggaggactgattgagtctgggaggtggaggc

SEQ ID NO: 44427 - DNA, 80 bp, synthetic construct
  misc_feature 1..80: note = Artificially Synthesized Probe
  source 1..80: mol_type = other DNA
cttctacaacgcccccgtcacaaccctacctatctttaaatagaatggcatgaaacatttttggcaagtgtaagccattt

SEQ ID NO: 44428 - DNA, 80 bp, synthetic construct
  misc_feature 1..80: note = Artificially Synthesized Probe
  source 1..80: mol_type = other DNA
tgaagcgtcttggaaatgacactggaaacaggattgatttatgggcctggcacttgggcacatgctcacaacgcaactgc

SEQ ID NO: 44429 - DNA, 80 bp, synthetic construct; identical to SEQ ID NO: 22758
  misc_feature 1..80: note = Artificially Synthesized Probe
  source 1..80: mol_type = other DNA

SEQ ID NO: 44430 - DNA, 80 bp, synthetic construct
  misc_feature 1..80: note = Artificially Synthesized Probe
  source 1..80: mol_type = other DNA
tacgcccggctaatttttgtatttttagtagagatgtggtttcactatattggtcaggctgatctcgaactcctgacctc

SEQ ID NO: 44431 - DNA, 80 bp, synthetic construct
  misc_feature 1..80: note = Artificially Synthesized Probe
  source 1..80: mol_type = other DNA
catctctacagtgccaggcagggtgctctgaagagcacctaacctgagagtgtttgttgaatgaatccaggagctttctt

SEQ ID NO: 44432 - DNA, 80 bp, synthetic construct
  misc_feature 1..80: note = Artificially Synthesized Probe
  source 1..80: mol_type = other DNA
aagacaccatcccggtgctcacggggacccaggaggagcagcgttttcaggtgtgacacgtgctcaggctctcttggcat

SEQ ID NO: 44433 - DNA, 80 bp, synthetic construct; identical to SEQ ID NO: 22759
  misc_feature 1..80: note = Artificially Synthesized Probe
  source 1..80: mol_type = other DNA

SEQ ID NO: 44434 - DNA, 80 bp, synthetic construct
  misc_feature 1..80: note = Artificially Synthesized Probe
  source 1..80: mol_type = other DNA
ggctcaggagcagactttcccaccctgttcctagtggggaggctggtcagaccctaagtgcagaggcctccctgagccca

SEQ ID NO: 44435 - DNA, 80 bp, synthetic construct
  misc_feature 1..80: note = Artificially Synthesized Probe
  source 1..80: mol_type = other DNA
ctgcatctatttttacctccattggctcctcctcagagccacactgtagagtgggtggggcaggactgtgatccccatct

SEQ ID NO: 44436 - DNA, 80 bp, synthetic construct; identical to SEQ ID NO: 22658
  misc_feature 1..80: note = Artificially Synthesized Probe
  source 1..80: mol_type = other DNA

SEQ ID NO: 44437 - DNA, 80 bp, synthetic construct
  misc_feature 1..80: note = Artificially Synthesized Probe
  source 1..80: mol_type = other DNA
cttctcgacacagaaccagagagcagctgagcaaaaggctgaggtggaagctctgagaggtgtgtccaggagagaaaaag

SEQ ID NO: 44438 - DNA, 80 bp, synthetic construct
  misc_feature 1..80: note = Artificially Synthesized Probe
  source 1..80: mol_type = other DNA
agagcgggtgggccagggcccagcagatgctccctgcctgtcccgcctcgggaagggcacctgcccacctggctgcagcc

SEQ ID NO: 44439 - DNA, 80 bp, synthetic construct; identical to SEQ ID NO: 22760
  misc_feature 1..80: note = Artificially Synthesized Probe
  source 1..80: mol_type = other DNA

SEQ ID NO: 44440 - DNA, 80 bp, synthetic construct
  misc_feature 1..80: note = Artificially Synthesized Probe
  source 1..80: mol_type = other DNA
gctctgcgcccgcatcagccatttctcccgcgcaccttcggcagcgccggcccggccccccccagcgcccagggcgtgtc

SEQ ID NO: 44441 - DNA, 80 bp, synthetic construct
  misc_feature 1..80: note = Artificially Synthesized Probe
  source 1..80: mol_type = other DNA
cggagggcagacaggaagcggggtccacgcagcggcggcgggaggagggaggagggaggaggcgggcgggagggggggca

SEQ ID NO: 44442 - DNA, 80 bp, synthetic construct
  misc_feature 1..80: note = Artificially Synthesized Probe
  source 1..80: mol_type = other DNA
cggaggcgaacccgccgcacagcagcccagcgccctcctccgtgtcccgcccggccccgcagggcccgcccttcccgggc

SEQ ID NO: 44443 - DNA, 80 bp, synthetic construct; identical to SEQ ID NO: 22761
  misc_feature 1..80: note = Artificially Synthesized Probe
  source 1..80: mol_type = other DNA

SEQ ID NO: 44444 - DNA, 80 bp, synthetic construct
  misc_feature 1..80: note = Artificially Synthesized Probe
  source 1..80: mol_type = other DNA
acaggagcggtgggcgtcccactcacagggaccaggatccccctcctccaagcagcccccctcctccgagcagtcccccc

SEQ ID NO: 44445 - DNA, 80 bp, synthetic construct
  misc_feature 1..80: note = Artificially Synthesized Probe
  source 1..80: mol_type = other DNA
acctcctccaagcagcccccccagccaccccaccgcagggagccatcctgcaaggggagtgcacacagaacccaggacag

SEQ ID NO: 44446 - DNA, 80 bp, synthetic construct
  misc_feature 1..80: note = Artificially Synthesized Probe
  source 1..80: mol_type = other DNA
gaggccctgggaaaagctcttttacaacccaacgatggagcaaaggttgcaaacggcacccatgagggtgcgggtgaggc

SEQ ID NO: 44447 - DNA, 80 bp, synthetic construct
  misc_feature 1..80: note = Artificially Synthesized Probe
  source 1..80: mol_type = other DNA
ggccaaggcaggcagatcacgagctcaggagatcgagaccatcctggctaacacggtgaaaccccgtctctactaaaaat

SEQ ID NO: 44448 - DNA, 80 bp, synthetic construct; identical to SEQ ID NO: 22762
  misc_feature 1..80: note = Artificially Synthesized Probe
  source 1..80: mol_type = other DNA

SEQ ID NO: 44449 - DNA, 80 bp, synthetic construct
  misc_feature 1..80: note = Artificially Synthesized Probe
  source 1..80: mol_type = other DNA
ggggccccagggctaacagcctttgatcagggaactgtgccaccagggttcaacagaggcacacccccaccccacccatc

SEQ ID NO: 44450 - DNA, 80 bp, synthetic construct
  misc_feature 1..80: note = Artificially Synthesized Probe
  source 1..80: mol_type = other DNA
caagtatgccagctcagggcctggtaccacgggttcttctgtctcccgcccggcgggctccaagtgcatggcatgggctg

SEQ ID NO: 44451 - DNA, 80 bp, synthetic construct
  misc_feature 1..80: note = Artificially Synthesized Probe
  source 1..80: mol_type = other DNA
ctgacgcccacttcttcccaaaatccctgaaccccacacaagtgactccctgagtatccagggcctctctactccaccct

SEQ ID NO: 44452 - DNA, 80 bp, synthetic construct; identical to SEQ ID NO: 22763
  misc_feature 1..80: note = Artificially Synthesized Probe
  source 1..80: mol_type = other DNA

SEQ ID NO: 44453 - DNA, 80 bp, synthetic construct
  misc_feature 1..80: note = Artificially Synthesized Probe
  source 1..80: mol_type = other DNA
aggctggcccttcattctcccgcctcctgtaaatgtggagtcacttgcttgggcccagcctcagccctctgctcccttcc

SEQ ID NO: 44454 - DNA, 80 bp, synthetic construct
  misc_feature 1..80: note = Artificially Synthesized Probe
  source 1..80: mol_type = other DNA
aaggacccttcctccttctgaaacagcttccccttccgggtttccacttctgttagtgcggccgccatcttacgagtctt

SEQ ID NO: 44455 - DNA, 80 bp, synthetic construct
  misc_feature 1..80: note = Artificially Synthesized Probe
  source 1..80: mol_type = other DNA
cactttggctcctgatcttgtctgtccatctgtctgttcattcattcattcatacccagaaaaggcctggcatggcacac

SEQ ID NO: 44456 - DNA, 80 bp, synthetic construct; identical to SEQ ID NO: 22764
  misc_feature 1..80: note = Artificially Synthesized Probe
  source 1..80: mol_type = other DNA

SEQ ID NO: 44457 - DNA, 80 bp, synthetic construct
  misc_feature 1..80: note = Artificially Synthesized Probe
  source 1..80: mol_type = other DNA
gagttggaggctgcaatgagctatgatcgcaccactgcactccagcctgggcaacagagccagactctgtcttgagggag

SEQ ID NO: 44458 - DNA, 80 bp, synthetic construct
  misc_feature 1..80: note = Artificially Synthesized Probe
  source 1..80: mol_type = other DNA
ggcataagcacacaccacacctagctactgtttgaaatctttcgcagccactgagatttctgacaccatcaagtctaaat

SEQ ID NO: 44459 - DNA, 80 bp, synthetic construct
  misc_feature 1..80: note = Artificially Synthesized Probe
  source 1..80: mol_type = other DNA
aaaaaagaaaaaacatctaaacaatgttgaaaaagaacacagctatagggctaatattacccaatttcagggcttattat

SEQ ID NO: 44460 - DNA, 80 bp, synthetic construct
  misc_feature 1..80: note = Artificially Synthesized Probe
  source 1..80: mol_type = other DNA
ccaatcagcaagcatttgttaacgcctgacccaatcagcaagcagttgttaaccgcctgacccaatcagcaagcatttgt

SEQ ID NO: 44461 - DNA, 80 bp, synthetic construct; identical to SEQ ID NO: 22765
  misc_feature 1..80: note = Artificially Synthesized Probe
  source 1..80: mol_type = other DNA

SEQ ID NO: 44462 - DNA, 80 bp, synthetic construct
  misc_feature 1..80: note = Artificially Synthesized Probe
  source 1..80: mol_type = other DNA
gcccggctaatttttgtatttttagtagagatggggtttcatcatgttggccaggctggtctcgaacccctgacctcagg

SEQ ID NO: 44463 - DNA, 80 bp, synthetic construct
  misc_feature 1..80: note = Artificially Synthesized Probe
  source 1..80: mol_type = other DNA
cagagcccactctacgttcccaatcgtggcacttctattttaacttctttattttcctgttacatcactaacaattctaa

SEQ ID NO: 44464 - DNA, 80 bp, synthetic construct
  misc_feature 1..80: note = Artificially Synthesized Probe
  source 1..80: mol_type = other DNA
tggttccctctgacagagggagcctctaagagttagttatacatttttccttatttgtgtccacgaataaactatacata

SEQ ID NO: 44465 - DNA, 80 bp, synthetic construct; identical to SEQ ID NO: 22766
  misc_feature 1..80: note = Artificially Synthesized Probe
  source 1..80: mol_type = other DNA

SEQ ID NO: 44466 - DNA, 80 bp, synthetic construct
  misc_feature 1..80: note = Artificially Synthesized Probe
  source 1..80: mol_type = other DNA
acgtggtaaaaccctgtctctactaaaaatacaaaaattaaccaggaggggtggcacaggcctgtaatcccagctactct

SEQ ID NO: 44467 - DNA, 80 bp, synthetic construct
  misc_feature 1..80: note = Artificially Synthesized Probe
  source 1..80: mol_type = other DNA
gcactttgggaggctgaggcaggcagatcacctgaggtcaggagtttgagaccatcctggctaacacggtgaaaccccgt

SEQ ID NO: 44468 - DNA, 80 bp, synthetic construct
  misc_feature 1..80: note = Artificially Synthesized Probe
  source 1..80: mol_type = other DNA
ctggctaacacggtgaaaccccgtctctactaaaaaaaaaaaaatacaaaaaattagccgggcgcggtggtgggcgcctg

SEQ ID NO: 44469 - DNA, 80 bp, synthetic construct
  misc_feature 1..80: note = Artificially Synthesized Probe
  source 1..80: mol_type = other DNA
ctccgtctcaaaaaaaaaaagcagtggttagagatgctggtggggctggggaacagacaggagagagactatgtgaggca

SEQ ID NO: 44470 - DNA, 80 bp, synthetic construct; identical to SEQ ID NO: 22767
  misc_feature 1..80: note = Artificially Synthesized Probe
  source 1..80: mol_type = other DNA

SEQ ID NO: 44471 - DNA, 80 bp, synthetic construct
  misc_feature 1..80: note = Artificially Synthesized Probe
  source 1..80: mol_type = other DNA
aggatttcaggacaggtgtgacaggacattcatcctgcatccctcctgctgacatcagatgactctttctaaaacactgc

SEQ ID NO: 44472 - DNA, 80 bp, synthetic construct
  misc_feature 1..80: note = Artificially Synthesized Probe
  source 1..80: mol_type = other DNA
actttctcccgcctcttggcttctccctggctctcccagctttcctggcagaaactcaagccccacctccagactgtatg

SEQ ID NO: 44473 - DNA, 80 bp, synthetic construct
  misc_feature 1..80: note = Artificially Synthesized Probe
  source 1..80: mol_type = other DNA
cctccctctgcctcctctctgttctagtacaggtcactccaaaatcatatacatagttcaactacataaagctaatgttg

SEQ ID NO: 44474 - DNA, 80 bp, synthetic construct; identical to SEQ ID NO: 22768
  misc_feature 1..80: note = Artificially Synthesized Probe
  source 1..80: mol_type = other DNA

SEQ ID NO: 44475 - DNA, 80 bp, synthetic construct
  misc_feature 1..80: note = Artificially Synthesized Probe
  source 1..80: mol_type = other DNA
tgatgaaaccccatctctactaaaaatacaaaattagccggatgtggtggcctgtaatcccagctacttgggaggctgag

SEQ ID NO: 44476 - DNA, 80 bp, synthetic construct
  misc_feature 1..80: note = Artificially Synthesized Probe
  source 1..80: mol_type = other DNA
tttatacagtgaaacaaataaactaaaacagaaagaaaactcccctgcactctggatgtgagccccagctctgcctcttg

SEQ ID NO: 44477 - DNA, 80 bp, synthetic construct
  misc_feature 1..80: note = Artificially Synthesized Probe
  source 1..80: mol_type = other DNA
aggtgtggttcatcagggaagattaacagtatgcagaggtgagcaagatcccagccaggtgtgaatgtaggagggccaga

SEQ ID NO: 44478 - DNA, 80 bp, synthetic construct
  misc_feature 1..80: note = Artificially Synthesized Probe
  source 1..80: mol_type = other DNA
tgggtggcagggcagcccctgggctcctagcacagcacctggcacacgggagggtccagctcgtgtccttctctttgcag

SEQ ID NO: 44479 - DNA, 80 bp, synthetic construct; identical to SEQ ID NO: 22769
  misc_feature 1..80: note = Artificially Synthesized Probe
  source 1..80: mol_type = other DNA

SEQ ID NO: 44480 - DNA, 80 bp, synthetic construct; identical to SEQ ID NO: 22659
  misc_feature 1..80: note = Artificially Synthesized Probe
  source 1..80: mol_type = other DNA

SEQ ID NO: 44481 - DNA, 80 bp, synthetic construct; identical to SEQ ID NO: 22771
  misc_feature 1..80: note = Artificially Synthesized Probe
  source 1..80: mol_type = other DNA

SEQ ID NO: 44482 - DNA, 80 bp, synthetic construct
  misc_feature 1..80: note = Artificially Synthesized Probe
  source 1..80: mol_type = other DNA
agcctgagtcctccccagcgttatccctgagccggagttcctcccagcattatccctgaacccgagttcctcccagcgtt

SEQ ID NO: 44483 - DNA, 80 bp, synthetic construct
  misc_feature 1..80: note = Artificially Synthesized Probe
  source 1..80: mol_type = other DNA
gttctccccagcgttaaccctgagcctgagttcctcccagcgttatccctgagcctgagttctccccagcgttatccctg

SEQ ID NO: 44484 - DNA, 80 bp, synthetic construct
  misc_feature 1..80: note = Artificially Synthesized Probe
  source 1..80: mol_type = other DNA
tgagttcctcccagcgttatccctgagcctgagttctccccagcgttatccctgagcctgagttcctcccagcgttatcc

SEQ ID NO: 44485 - DNA, 80 bp, synthetic construct
  misc_feature 1..80: note = Artificially Synthesized Probe
  source 1..80: mol_type = other DNA
tcccagcgttatccctgagcctgagttcctccccagcgttatccctgagcctgagttctccccagcgttaaccctgagcc

SEQ ID NO: 44486 - DNA, 80 bp, synthetic construct; identical to SEQ ID NO: 22770
  misc_feature 1..80: note = Artificially Synthesized Probe
  source 1..80: mol_type = other DNA

SEQ ID NO: 44487 - DNA, 80 bp, synthetic construct
  misc_feature 1..80: note = Artificially Synthesized Probe
  source 1..80: mol_type = other DNA
agcctgagtcctccccagcgttatccctgagcctgagttccccccagcgttatccctgagcctgagttcctcccagcgtt

SEQ ID NO: 44488 - DNA, 80 bp, synthetic construct
  misc_feature 1..80: note = Artificially Synthesized Probe
  source 1..80: mol_type = other DNA
ctcccagcgttatccctgagcctgagttcttcccagcgttatccctgagcctgagtcctccccagcgttatccctgagcc

SEQ ID NO: 44489 - DNA, 80 bp, synthetic construct
  misc_feature 1..80: note = Artificially Synthesized Probe
  source 1..80: mol_type = other DNA
ttatccctgagcctgagttctcccagcgttatccctgagcctgagttctcccagcgttatccctgagcctgagttcctcc

SEQ ID NO: 44490 - DNA, 80 bp, synthetic construct
  misc_feature 1..80: note = Artificially Synthesized Probe
  source 1..80: mol_type = other DNA
tatattcaggattagttagtaccatgattggcagtacataattaaaaagacagccaggcacggtggctcacgcctgtaat

SEQ ID NO: 44491 - DNA, 80 bp, synthetic construct
  misc_feature 1..80: note = Artificially Synthesized Probe
  source 1..80: mol_type = other DNA
gcgttatccctgagcctgagttcctcccagcgttatccctgagcctgagttcctcccagcgttatccctgagcctgagtt

SEQ ID NO: 44492 - DNA, 80 bp, synthetic construct
  misc_feature 1..80: note = Artificially Synthesized Probe
  source 1..80: mol_type = other DNA
cctgactgaacatcccagaactacttggttccattccacaaataccagttgagaacccctaggtgccaagaagcttccac

SEQ ID NO: 44493 - DNA, 80 bp, synthetic construct; identical to SEQ ID NO: 22772
  misc_feature 1..80: note = Artificially Synthesized Probe
  source 1..80: mol_type = other DNA

SEQ ID NO: 44494 - DNA, 80 bp, synthetic construct
  misc_feature 1..80: note = Artificially Synthesized Probe
  source 1..80: mol_type = other DNA
cctgcctcagttccccttgtagatgggattatgggagtgaactaccatgcccagctaatcttaggcaaattacgtcacct

SEQ ID NO: 44495 - DNA, 80 bp, synthetic construct
  misc_feature 1..80: note = Artificially Synthesized Probe
  source 1..80: mol_type = other DNA
agctgtgatgagggggaggaggaggaagaggatgatagggacaatgatgatgattttttttttcctttttttctttttct

SEQ ID NO: 44496 - DNA, 80 bp, synthetic construct
  misc_feature 1..80: note = Artificially Synthesized Probe
  source 1..80: mol_type = other DNA
gctgggattataggcacctgccaccacacccagctaattttttgtgtatgtttttagtagagacggggtttcaccatgct

SEQ ID NO: 44497 - DNA, 80 bp, synthetic construct; identical to SEQ ID NO: 22773
  misc_feature 1..80: note = Artificially Synthesized Probe
  source 1..80: mol_type = other DNA

SEQ ID NO: 44498 - DNA, 80 bp, synthetic construct
  misc_feature 1..80: note = Artificially Synthesized Probe
  source 1..80: mol_type = other DNA
cctttttactaagcttcccaagaggcaagcagacagaggagtctgtggcctgtggggaggcgggttttctgtaagaccat

SEQ ID NO: 44499 - DNA, 80 bp, synthetic construct
  misc_feature 1..80: note = Artificially Synthesized Probe
  source 1..80: mol_type = other DNA
tttatggggcagggcttcaggtttcaccctaatacctctgtgggatccatgtcttggggacacaaaagaagacaaaggca

SEQ ID NO: 44500 - DNA, 80 bp, synthetic construct; identical to SEQ ID NO: 22774
  misc_feature 1..80: note = Artificially Synthesized Probe
  source 1..80: mol_type = other DNA

SEQ ID NO: 44501 - DNA, 80 bp, synthetic construct
  misc_feature 1..80: note = Artificially Synthesized Probe
  source 1..80: mol_type = other DNA
tggaagaatcgcttgaacccaggaggtggaggttgcattgagccaagatcacaccactgcactccagcctggcgacagag

SEQ ID NO: 44502 - DNA, 80 bp, synthetic construct
  misc_feature 1..80: note = Artificially Synthesized Probe
  source 1..80: mol_type = other DNA
gctgagtccccaaggcagggctctgagccctgctgtggtctgagagctgctcacagtgggatgggagctgagtcccccag

SEQ ID NO: 44503 - DNA, 80 bp, synthetic construct
  misc_feature 1..80: note = Artificially Synthesized Probe
  source 1..80: mol_type = other DNA
ggagactgaggctcagcggtatgaggacacttgcccaatgtctcacagctaaagagtagattttcttttattttcttgag

SEQ ID NO: 44504 - DNA, 80 bp, synthetic construct
  misc_feature 1..80: note = Artificially Synthesized Probe
  source 1..80: mol_type = other DNA
gtagagacagggtttcaccatgttggccaggctagtctcaaactcctgacctcaggtaatctggctgcctcagtctccca

SEQ ID NO: 44505 - DNA, 80 bp, synthetic construct; identical to SEQ ID NO: 22775
  misc_feature 1..80: note = Artificially Synthesized Probe
  source 1..80: mol_type = other DNA

SEQ ID NO: 44506 - DNA, 80 bp, synthetic construct
  misc_feature 1..80: note = Artificially Synthesized Probe
  source 1..80: mol_type = other DNA
tcctgagcctcgagtccactggcttatgagctggaatttacatccctggctctcctagctctcaggcctttggacttgga

SEQ ID NO: 44507 - DNA, 80 bp, synthetic construct
  misc_feature 1..80: note = Artificially Synthesized Probe
  source 1..80: mol_type = other DNA
gagaacactgactaacacaaagactcaaccttgggcttcccgttggctgcatatttgggcgtggaaggcccagcgataag

SEQ ID NO: 44508 - DNA, 80 bp, synthetic construct
  misc_feature 1..80: note = Artificially Synthesized Probe
  source 1..80: mol_type = other DNA
ataagcacagccaagccgcagaaacctcggtcttttattaatagtgtttttaaccaaaacatccccaagtactcaggaag

SEQ ID NO: 44509 - DNA, 80 bp, synthetic construct
  misc_feature 1..80: note = Artificially Synthesized Probe
  source 1..80: mol_type = other DNA
gtgctccctactcctgccttgcgtggcttctagtcgatggtgtaaacatcaaccctgggggccacaagcactttaggggg

SEQ ID NO: 44510 - DNA, 80 bp, synthetic construct; identical to SEQ ID NO: 22776
  misc_feature 1..80: note = Artificially Synthesized Probe
  source 1..80: mol_type = other DNA

SEQ ID NO: 44511 - DNA, 80 bp, synthetic construct
  misc_feature 1..80: note = Artificially Synthesized Probe
  source 1..80: mol_type = other DNA
cagcccctagaggcggctgtctgattccccactctccccacaacttctggagttcccagtgtttacccaaaaggctgtat

SEQ ID NO: 44512 - DNA, 80 bp, synthetic construct
  misc_feature 1..80: note = Artificially Synthesized Probe
  source 1..80: mol_type = other DNA
agagctgaaggcagagatgggagcgagagtcttctcctccttgctctcccctggttggcccccgttcaggtccctgaaca

SEQ ID NO: 44513 - DNA, 80 bp, synthetic construct
  misc_feature 1..80: note = Artificially Synthesized Probe
  source 1..80: mol_type = other DNA
ctcctgcctcagcctcccgagtagctggaattacagacacacacaaccacacccggctaattttttgtatttttagtaga

SEQ ID NO: 44514 - DNA, 80 bp, synthetic construct
  misc_feature 1..80: note = Artificially Synthesized Probe
  source 1..80: mol_type = other DNA
cccttgcctcccacctgccccccgccagcccttcccacaggtgcacgcctggactgccgctaaactcggcctcggcctct

SEQ ID NO: 44515 - DNA, 80 bp, synthetic construct
  misc_feature 1..80: note = Artificially Synthesized Probe
  source 1..80: mol_type = other DNA
agaatgggagggttcaggcggcctcagctggggtgggggggcactagcccctggaggaagaagaggcagcccgtggcatc

SEQ ID NO: 44516 - DNA, 80 bp, synthetic construct; identical to SEQ ID NO: 22777
  misc_feature 1..80: note = Artificially Synthesized Probe
  source 1..80: mol_type = other DNA

SEQ ID NO: 44517 - DNA, 80 bp, synthetic construct
  misc_feature 1..80: note = Artificially Synthesized Probe
  source 1..80: mol_type = other DNA
cacatacttaatattccttctacaatgcttctctctggagcagaactcttgtctctgtcaacaaggagaggtggatgcca

SEQ ID NO: 44518 - DNA, 80 bp, synthetic construct
  misc_feature 1..80: note = Artificially Synthesized Probe
  source 1..80: mol_type = other DNA
aggggaggagagcctggtcctctcctgggtcctctggaggagacaggctaacaggggaaagctgaaagaggcacggaggg

SEQ ID NO: 44519 - DNA, 80 bp, synthetic construct
  misc_feature 1..80: note = Artificially Synthesized Probe
  source 1..80: mol_type = other DNA
ccaatctctcgagaccaacccaagcagggcctggcccacgatgcccaggccttcccgtcacccctccccaaacccagaaa

SEQ ID NO: 44520 - DNA, 80 bp, synthetic construct; identical to SEQ ID NO: 22778
  misc_feature 1..80: note = Artificially Synthesized Probe
  source 1..80: mol_type = other DNA

SEQ ID NO: 44521 - DNA, 80 bp, synthetic construct
  misc_feature 1..80: note = Artificially Synthesized Probe
  source 1..80: mol_type = other DNA
ccgctccggggctgctgggaggcggggaggagcggctctgctgttgctacccgatgaagagcatgtcagccgcgtatttc

SEQ ID NO: 44522 - DNA, 80 bp, synthetic construct
  misc_feature 1..80: note = Artificially Synthesized Probe
  source 1..80: mol_type = other DNA
aggaggtggggggggccggtcgatgtcacttcctgtggccctcctccttgggtaccatttgtactgagcccactccctcc

SEQ ID NO: 44523 - DNA, 80 bp, synthetic construct; identical to SEQ ID NO: 22779
  misc_feature 1..80: note = Artificially Synthesized Probe
  source 1..80: mol_type = other DNA

SEQ ID NO: 44524 - DNA, 80 bp, synthetic construct
  misc_feature 1..80: note = Artificially Synthesized Probe
  source 1..80: mol_type = other DNA
cccctgcgtccagccccaccagcatggctataggagggaccctcccacaaaccggcccctgccccttggcctgtttgctc

SEQ ID NO: 44525 - DNA, 80 bp, synthetic construct; identical to SEQ ID NO: 22660
  misc_feature 1..80: note = Artificially Synthesized Probe
  source 1..80: mol_type = other DNA

SEQ ID NO: 44526 - DNA, 80 bp, synthetic construct
  misc_feature 1..80: note = Artificially Synthesized Probe
  source 1..80: mol_type = other DNA
gggagctggcaccgcagggcgtcctggagacacgaagatcaccgtgccggcagccttggggccagcaggagcctcctacg

SEQ ID NO: 44527 - DNA, 80 bp, synthetic construct
  misc_feature 1..80: note = Artificially Synthesized Probe
  source 1..80: mol_type = other DNA
cctccccatggcacctggccccctggcaccttagtgaatcctgcccctttgtccttgagcccctggggcaggaggtgagc

SEQ ID NO: 44528 - DNA, 80 bp, synthetic construct
  misc_feature 1..80: note = Artificially Synthesized Probe
  source 1..80: mol_type = other DNA
gctcttccctcctctgtcacaacacaccagcccacaggcaaccagcagctggagaatggtgtcaacaggtcaccgggacg

SEQ ID NO: 44529 - DNA, 80 bp, synthetic construct; identical to SEQ ID NO: 22780
  misc_feature 1..80: note = Artificially Synthesized Probe
  source 1..80: mol_type = other DNA

SEQ ID NO: 44530 - DNA, 80 bp, synthetic construct
  misc_feature 1..80: note = Artificially Synthesized Probe
  source 1..80: mol_type = other DNA
gtccttccagggggaggaggaagaggcacagcggcacccagctggcctgagtctgggtccgtgaagggcctggccgtttg

SEQ ID NO: 44531 - DNA, 80 bp, synthetic construct
  misc_feature 1..80: note = Artificially Synthesized Probe
  source 1..80: mol_type = other DNA
gtttagattccagccggccaagcagactctcctgtacactgaccaattcccaggggtcgcaggaatggaccccacacact

SEQ ID NO: 44532 - DNA, 80 bp, synthetic construct; identical to SEQ ID NO: 22781
  misc_feature 1..80: note = Artificially Synthesized Probe
  source 1..80: mol_type = other DNA

SEQ ID NO: 44533 - DNA, 80 bp, synthetic construct
  misc_feature 1..80: note = Artificially Synthesized Probe
  source 1..80: mol_type = other DNA
ctgcccccacaaaaccatgagagcccaggagactccaaccaggaaaaggggtacagaaaagatggggaaaccaatcctcg

SEQ ID NO: 44534 - DNA, 80 bp, synthetic construct
  misc_feature 1..80: note = Artificially Synthesized Probe
  source 1..80: mol_type = other DNA
aagaaaaggcagacaaggcaaaggctgctggcagccaatatccatttccccgccgactaacagaaatcctactgtattcg

SEQ ID NO: 44535 - DNA, 80 bp, synthetic construct
  misc_feature 1..80: note = Artificially Synthesized Probe
  source 1..80: mol_type = other DNA
gcccttgttcctccttctgttgctggtttggagagttgatgggatggctggagccccagcagccatcctgaaccatgagg

SEQ ID NO: 44536 - DNA, 80 bp, synthetic construct
  misc_feature 1..80: note = Artificially Synthesized Probe
  source 1..80: mol_type = other DNA
acaatgaaacattttgttcacataaagaagtagatgaggtcgaaaagagttttatcacagccgcgttacaccattcttta

SEQ ID NO: 44537 - DNA, 80 bp, synthetic construct
  misc_feature 1..80: note = Artificially Synthesized Probe
  source 1..80: mol_type = other DNA
gaaggtctacctcgggacgttttcacaagctgggagtccaggtcactgagggcacagtggagcccaccccaggaaggtct

SEQ ID NO: 44538 - DNA, 80 bp, synthetic construct; identical to SEQ ID NO: 22782
  misc_feature 1..80: note = Artificially Synthesized Probe
  source 1..80: mol_type = other DNA

SEQ ID NO: 44539 - DNA, 80 bp, synthetic construct
  misc_feature 1..80: note = Artificially Synthesized Probe
  source 1..80: mol_type = other DNA
ggtcaggagatcaagaccatactggccaatatggtgaagccatactggctacaaaaaaattagccaggcgtggtggttgg

SEQ ID NO: 44540 - DNA, 80 bp, synthetic construct
  misc_feature 1..80: note = Artificially Synthesized Probe
  source 1..80: mol_type = other DNA
agattcatgcacttcagcaaatgttgggctccagtgagtgacatgctggagtgaagtgtacaactctctgcaacttactc

SEQ ID NO: 44541 - DNA, 80 bp, synthetic construct
  misc_feature 1..80: note = Artificially Synthesized Probe
  source 1..80: mol_type = other DNA
tggtgaaaccccctctctactaaaaatacaaaaattagctgggtgcgatggcgggtgcctgtaatcccagcaacttggga

SEQ ID NO: 44542 - DNA, 80 bp, synthetic construct; identical to SEQ ID NO: 22783
  misc_feature 1..80: note = Artificially Synthesized Probe
  source 1..80: mol_type = other DNA

SEQ ID NO: 44543 - DNA, 80 bp, synthetic construct
  misc_feature 1..80: note = Artificially Synthesized Probe
  source 1..80: mol_type = other DNA
aattgtgttcctgctcccggaagaagtcaggtctgcagactcctgggcatctccacctttaggagcctcaaacgcagcct

SEQ ID NO: 44544 - DNA, 80 bp, synthetic construct
  misc_feature 1..80: note = Artificially Synthesized Probe
  source 1..80: mol_type = other DNA
aaatcagaccgtgttgccccccattcacttagggacacagccccgctcctcagctcaaggccctttgtggtctgcacctg

SEQ ID NO: 44545 - DNA, 80 bp, synthetic construct; identical to SEQ ID NO: 22784
  misc_feature 1..80: note = Artificially Synthesized Probe
  source 1..80: mol_type = other DNA

SEQ ID NO: 44546 - DNA, 80 bp, synthetic construct
  misc_feature 1..80: note = Artificially Synthesized Probe
  source 1..80: mol_type = other DNA
taccacctgacttttgaaaggttctaagtggccactagagtcttttactttctgaacactgaccccaacgtttctttttt

SEQ ID NO: 44547 - DNA, 80 bp, synthetic construct
  misc_feature 1..80: note = Artificially Synthesized Probe
  source 1..80: mol_type = other DNA
gacttctggtcttcagactgcgagagcatcgatttctgctgttctaagccatcaagttcatggcaatctctaatggcagc

SEQ ID NO: 44548 - DNA, 80 bp, synthetic construct
  misc_feature 1..80: note = Artificially Synthesized Probe
  source 1..80: mol_type = other DNA
acgcgcacagctcccccctttgcacaccaaatgcagtgcctgccacgcacacagctcccccctctttgcacaccaaatgc

SEQ ID NO: 44549 - DNA, 80 bp, synthetic construct
  misc_feature 1..80: note = Artificially Synthesized Probe
  source 1..80: mol_type = other DNA
tttgcacaccaaatgcagtgcctgccacgcgcacagctcccccctctttgcacaccaaatgcagtgcctgccacgcgcac

SEQ ID NO: 44550 - DNA, 80 bp, synthetic construct; identical to SEQ ID NO: 22785
  misc_feature 1..80: note = Artificially Synthesized Probe
  source 1..80: mol_type = other DNA

SEQ ID NO: 44551 - DNA, 80 bp, synthetic construct
  misc_feature 1..80: note = Artificially Synthesized Probe
  source 1..80: mol_type = other DNA
ctttgcacaccaaatgcagtgcctgccacgcgcacagctccccccctttgcacaccaaatgcagtgcctgccacgcgcac

SEQ ID NO: 44552 - DNA, 80 bp, synthetic construct
  misc_feature 1..80: note = Artificially Synthesized Probe
  source 1..80: mol_type = other DNA
ctgctcccgtgcctagaaaaccctccttgctgggcgcggtggctcacgcctgtcatcccatcactatgatgtggggcatc

SEQ ID NO: 44553 - DNA, 80 bp, synthetic construct
  misc_feature 1..80: note = Artificially Synthesized Probe
  source 1..80: mol_type = other DNA
cctgttttgccctcaaatctgcctcatctgtgccctctcccaggaactttcctgtattctacatattatgataatacttg

SEQ ID NO: 44554 - DNA, 80 bp, synthetic construct; identical to SEQ ID NO: 22786
  misc_feature 1..80: note = Artificially Synthesized Probe
  source 1..80: mol_type = other DNA

SEQ ID NO: 44555 - DNA, 80 bp, synthetic construct
  misc_feature 1..80: note = Artificially Synthesized Probe
  source 1..80: mol_type = other DNA
gaactacaaatattcaaaatgcattaaaaagaatgttaacctcatttgtaatgaaagaaaatgtaaagttctatatagtt

SEQ ID NO: 44556 - DNA, 80 bp, synthetic construct
  misc_feature 1..80: note = Artificially Synthesized Probe
  source 1..80: mol_type = other DNA
aggccgaagtggacggatcacctgaggtcaggagttcgagaccaggctgacccacacggagaaaccccatctctactaaa

SEQ ID NO: 44557 - DNA, 80 bp, synthetic construct
  misc_feature 1..80: note = Artificially Synthesized Probe
  source 1..80: mol_type = other DNA
ttttttatttgtagtggagatggggtttcaccatgttggccaggctggtctcgagctcctgacctcaggcgatccacctg

SEQ ID NO: 44558 - DNA, 80 bp, synthetic construct
  misc_feature 1..80: note = Artificially Synthesized Probe
  source 1..80: mol_type = other DNA
aaaaaaaaaaaaaaagttggcccaacttttctagagtcaatctggtaactggtatcaaaaggtttagtggttggtacagt

SEQ ID NO: 44559 - DNA, 80 bp, synthetic construct
  misc_feature 1..80: note = Artificially Synthesized Probe
  source 1..80: mol_type = other DNA
gactggttgagtcaattatggtttttctacaagatgggctgctatatagcattaaaaactatatggatgatgaatagcat

SEQ ID NO: 44560 - DNA, 80 bp, synthetic construct; identical to SEQ ID NO: 22787
  misc_feature 1..80: note = Artificially Synthesized Probe
  source 1..80: mol_type = other DNA

SEQ ID NO: 44561 - DNA, 80 bp, synthetic construct
  misc_feature 1..80: note = Artificially Synthesized Probe
  source 1..80: mol_type = other DNA
gcaaggccctgactttgatgattacaaagagacattttgccttgaactcatgggtgatgattggagttacggtggcttta

SEQ ID NO: 44562 - DNA, 80 bp, synthetic construct
  misc_feature 1..80: note = Artificially Synthesized Probe
  source 1..80: mol_type = other DNA
agcctgggcaagatggtgaaaccccatctctacagaaactacaaaaattagccgggtggtgactcacgcctgtaatccca

SEQ ID NO: 44563 - DNA, 80 bp, synthetic construct
  misc_feature 1..80: note = Artificially Synthesized Probe
  source 1..80: mol_type = other DNA
atcacttgaacccaggaggcagaggttgcagtgagctgagattgtagcactgcactccagccggggcaacagagcaagac

SEQ ID NO: 44564 - DNA, 80 bp, synthetic construct; identical to SEQ ID NO: 22788
  misc_feature 1..80: note = Artificially Synthesized Probe
  source 1..80: mol_type = other DNA

SEQ ID NO: 44565 - DNA, 80 bp, synthetic construct
  misc_feature 1..80: note = Artificially Synthesized Probe
  source 1..80: mol_type = other DNA
gaggctttggtgccacgctaaggaagacagttcatcgctgtggctgagagcagggaccctgcggtccggcagcggaggtt

SEQ ID NO: 44566 - DNA, 80 bp, synthetic construct
  misc_feature 1..80: note = Artificially Synthesized Probe
  source 1..80: mol_type = other DNA
cacgcatacggcacttagcacataggaagcacccaatccatctcagctgctattattactgttattaattggatcttgaa

SEQ ID NO: 44567 - DNA, 80 bp, synthetic construct
  misc_feature 1..80: note = Artificially Synthesized Probe
  source 1..80: mol_type = other DNA
gccgtgctggagaggaggcagggacttgctcctgagagcctcgtgagctgagccgagagccgtgcaggactcagtgagga

SEQ ID NO: 44568 - DNA, 80 bp, synthetic construct; identical to SEQ ID NO: 22789
  misc_feature 1..80: note = Artificially Synthesized Probe
  source 1..80: mol_type = other DNA

SEQ ID NO: 44569 - DNA, 80 bp, synthetic construct; identical to SEQ ID NO: 22661
  misc_feature 1..80: note = Artificially Synthesized Probe
  source 1..80: mol_type = other DNA

SEQ ID NO: 44570 - DNA, 80 bp, synthetic construct
  misc_feature 1..80: note = Artificially Synthesized Probe
  source 1..80: mol_type = other DNA
tggtcaacatggtgaaagcctgtctctactaaaaatacaaaaatcagctgggcttggtggcaggtgcctgtaatcccagc

SEQ ID NO: 44571 - DNA, 80 bp, synthetic construct
  misc_feature 1..80: note = Artificially Synthesized Probe
  source 1..80: mol_type = other DNA
ttatttttgttttggttccatataaattttagcatttttttttttctatttctgtgaagaataccattgtttgagcatta

SEQ ID NO: 44572 - DNA, 80 bp, synthetic construct; identical to SEQ ID NO: 22790
  misc_feature 1..80: note = Artificially Synthesized Probe
  source 1..80: mol_type = other DNA

SEQ ID NO: 44573 - DNA, 80 bp, synthetic construct
  misc_feature 1..80: note = Artificially Synthesized Probe
  source 1..80: mol_type = other DNA
tttttagtaaagacagggtttcaccatgtaggccaggctgatcttgaactcctgacctcaagtgatccacccacctcggc

SEQ ID NO: 44574 - DNA, 80 bp, synthetic construct
  misc_feature 1..80: note = Artificially Synthesized Probe
  source 1..80: mol_type = other DNA
tgaaagcggcttctttcctgacccctcatgaacaaatctctgccagcttcaaactttcctctgcagcttcctcacctctc

SEQ ID NO: 44575 - DNA, 80 bp, synthetic construct
  misc_feature 1..80: note = Artificially Synthesized Probe
  source 1..80: mol_type = other DNA
cactttgaatttccttaaaacacttttcctgtgtgttcacaatttggctaactggtaggagaggctccgcttccagccta

SEQ ID NO: 44576 - DNA, 80 bp, synthetic construct
  misc_feature 1..80: note = Artificially Synthesized Probe
  source 1..80: mol_type = other DNA
acctctgcctcccaggttcaagtgagtctcccacctcagactcctgagtagctggaattacaggcgcccgccaccacgcc

SEQ ID NO: 44577 - DNA, 80 bp, synthetic construct; identical to SEQ ID NO: 22791
  misc_feature 1..80: note = Artificially Synthesized Probe
  source 1..80: mol_type = other DNA

SEQ ID NO: 44578 - DNA, 80 bp, synthetic construct
  misc_feature 1..80: note = Artificially Synthesized Probe
  source 1..80: mol_type = other DNA
actgtaacaggtgtcataacaataaaaaagtctgaaagatcgtgagaaccaccaacacgtaacacagagagaatgcgagg

SEQ ID NO: 44579 - DNA, 80 bp, synthetic construct
  misc_feature 1..80: note = Artificially Synthesized Probe
  source 1..80: mol_type = other DNA
atcacaggagtgccgtaaagcgaggtatgcctgcaccgcaggaggctatttactttaggttggagcaaaggtaatatata

SEQ ID NO: 44580 - DNA, 80 bp, synthetic construct
  misc_feature 1..80: note = Artificially Synthesized Probe
  source 1..80: mol_type = other DNA
tcccacatctatcacccacacaccggctgggggcaggtggtacccaagcctccgacggggtctgggtctgcactgggttc

SEQ ID NO: 44581 - DNA, 80 bp, synthetic construct
  misc_feature 1..80: note = Artificially Synthesized Probe
  source 1..80: mol_type = other DNA
aattctcctgcctcagcctcctgagtagctgggattacaggtgcccaccaccaacacccggctaattttttttttttttt

SEQ ID NO: 44582 - DNA, 80 bp, synthetic construct; identical to SEQ ID NO: 22792
  misc_feature 1..80: note = Artificially Synthesized Probe
  source 1..80: mol_type = other DNA

SEQ ID NO: 44583 - DNA, 80 bp, synthetic construct
  misc_feature 1..80: note = Artificially Synthesized Probe
  source 1..80: mol_type = other DNA
tgttccatatcttgatctgggtgttagttacacaagcagacatatggaaatattcaccaagctctatgcttaagactggt

SEQ ID NO: 44584 - DNA, 80 bp, synthetic construct
  misc_feature 1..80: note = Artificially Synthesized Probe
  source 1..80: mol_type = other DNA
agtagctgagaccacaggcatgcacaaccatgcctggctgattcgaaaaagtttttgtagacacagggtcttgctatgtg

SEQ ID NO: 44585 - DNA, 80 bp, synthetic construct
  misc_feature 1..80: note = Artificially Synthesized Probe
  source 1..80: mol_type = other DNA
cgatatggagaagggaaggactgtttattttaggtatgcactagctcagtggatttgcatttaaaaagcttagcattgaa

SEQ ID NO: 44586 - DNA, 80 bp, synthetic construct; identical to SEQ ID NO: 22793
  misc_feature 1..80: note = Artificially Synthesized Probe
  source 1..80: mol_type = other DNA

SEQ ID NO: 44587 - DNA, 80 bp, synthetic construct
  misc_feature 1..80: note = Artificially Synthesized Probe
  source 1..80: mol_type = other DNA
tcactgcaagctccgcctcccgggttcaagccattctcctgcctcagcctcccgagtagctgggactacaggtgcctgcc

SEQ ID NO: 44588 - DNA, 80 bp, synthetic construct
  misc_feature 1..80: note = Artificially Synthesized Probe
  source 1..80: mol_type = other DNA
ctttttaacccttgccttgcctgttacttttcttggagtaaatacatacatatttgtttttaaatttctgcctccgtacc

SEQ ID NO: 44589 - DNA, 80 bp, synthetic construct; identical to SEQ ID NO: 22794
  misc_feature 1..80: note = Artificially Synthesized Probe
  source 1..80: mol_type = other DNA

SEQ ID NO: 44590 - DNA, 80 bp, synthetic construct
  misc_feature 1..80: note = Artificially Synthesized Probe
  source 1..80: mol_type = other DNA
acactatcctgaatagtcagatttcacgcacgctgggagccacggatgccaaaatggcaaggtgatttcagaggtgactt

SEQ ID NO: 44591 - DNA, 80 bp, synthetic construct
  misc_feature 1..80: note = Artificially Synthesized Probe
  source 1..80: mol_type = other DNA
agggctgagcgatggacaggaagggggagctggttccgggggaacagaccctaagtccaggtggagacatgtctggactg

SEQ ID NO: 44592 - DNA, 80 bp, synthetic construct
  misc_feature 1..80: note = Artificially Synthesized Probe
  source 1..80: mol_type = other DNA
ggtctcaaaggaagccccagctctggccttactttcccgaaacctctctcccctctaagctgcttctgttctttgcaaac

SEQ ID NO: 44593 - DNA, 80 bp, synthetic construct
  misc_feature 1..80: note = Artificially Synthesized Probe
  source 1..80: mol_type = other DNA
ctgtccggggcaatttcagcagggatggtggctcagatacaaaatctaccacctcacctacaacaataaggacactgtct

SEQ ID NO: 44594 - DNA, 80 bp, synthetic construct
  misc_feature 1..80: note = Artificially Synthesized Probe
  source 1..80: mol_type = other DNA
aggcacccgccaccatgcccggctaatttttgtatttttagtagagatggggtttcaccatgttggccaggctggtctcg

SEQ ID NO: 44595 - DNA, 80 bp, synthetic construct; identical to SEQ ID NO: 22795
  misc_feature 1..80: note = Artificially Synthesized Probe
  source 1..80: mol_type = other DNA

SEQ ID NO: 44596 - DNA, 80 bp, synthetic construct
  misc_feature 1..80: note = Artificially Synthesized Probe
  source 1..80: mol_type = other DNA
cacagggtggttgtgaaaatgacattaaataacatgatgtaggttaaagaactgggcacagtatcagggcagaagggtcc

SEQ ID NO: 44597 - DNA, 80 bp, synthetic construct
  misc_feature 1..80: note = Artificially Synthesized Probe
  source 1..80: mol_type = other DNA
tctttcccacgggacaagccacctccttctcagggccccccattctttgattgatggagcagaggttggggagccaggac

SEQ ID NO: 44598 - DNA, 80 bp, synthetic construct
  misc_feature 1..80: note = Artificially Synthesized Probe
  source 1..80: mol_type = other DNA
ctatacctcatgaagcttttgcgaggttacaatgaggaaatatatgctatgcaaggcacccaaagctggcgctaacaaaa

SEQ ID NO: 44599 - DNA, 80 bp, synthetic construct; identical to SEQ ID NO: 22796
  misc_feature 1..80: note = Artificially Synthesized Probe
  source 1..80: mol_type = other DNA

SEQ ID NO: 44600 - DNA, 80 bp, synthetic construct
  misc_feature 1..80: note = Artificially Synthesized Probe
  source 1..80: mol_type = other DNA
aattttgtatttttagtagaggtagggtttcaccatgttagccaggatggtctcaaactcctgacctcaggtgatccacc

SEQ ID NO: 44601 - DNA, 80 bp, synthetic construct
  misc_feature 1..80: note = Artificially Synthesized Probe
  source 1..80: mol_type = other DNA
attggtatggaatggcctgggcatcaggcctgttaaaagctccccaggtgactctaatgtataggaaggccaagagccgc

SEQ ID NO: 44602 - DNA, 80 bp, synthetic construct; identical to SEQ ID NO: 22662
  misc_feature 1..80: note = Artificially Synthesized Probe
  source 1..80: mol_type = other DNA

SEQ ID NO: 44603 - DNA, 80 bp, synthetic construct
  misc_feature 1..80: note = Artificially Synthesized Probe
  source 1..80: mol_type = other DNA
gagaaaccccgtctctactaaaaatataaaaattagccgggtatggtgacagatgtctgtaatcccagctactcgggggg

SEQ ID NO: 44604 - DNA, 80 bp, synthetic construct; identical to SEQ ID NO: 22797
  misc_feature 1..80: note = Artificially Synthesized Probe
  source 1..80: mol_type = other DNA

SEQ ID NO: 44605 - DNA, 80 bp, synthetic construct
  misc_feature 1..80: note = Artificially Synthesized Probe
  source 1..80: mol_type = other DNA
tggagcccctcattagcccagcaaagcggcaactggaggccgggcagaggctgtggggcagctcactcctgggaggaagc

SEQ ID NO: 44606 - DNA, 80 bp, synthetic construct
  misc_feature 1..80: note = Artificially Synthesized Probe
  source 1..80: mol_type = other DNA
ctcgctcctgggggacagctcattcctgggggacagctcgctcctggggggcagctcgctcctgggggacagctcattcc

SEQ ID NO: 44607 - DNA, 80 bp, synthetic construct
  misc_feature 1..80: note = Artificially Synthesized Probe
  source 1..80: mol_type = other DNA
cctgggggacagctcattcctgggggacagctcgctcctggggggcagctcgctcctgggggacagctcattcctggggg

SEQ ID NO: 44608 - DNA, 80 bp, synthetic construct
  misc_feature 1..80: note = Artificially Synthesized Probe
  source 1..80: mol_type = other DNA
acagactcgaggccccaccatgggcgggtgttatggcctctctggttgccatggagatgaaatccaatcatccacctcca

SEQ ID NO: 44609 - DNA, 80 bp, synthetic construct; identical to SEQ ID NO: 22798
  misc_feature 1..80: note = Artificially Synthesized Probe
  source 1..80: mol_type = other DNA

SEQ ID NO: 44610 - DNA, 80 bp, synthetic construct
  misc_feature 1..80: note = Artificially Synthesized Probe
  source 1..80: mol_type = other DNA
actctttgcaccaaggccattgtttcctgcgatttgacaaaatccccccaccttggcagagggaactaaaattcctcatc

SEQ ID NO: 44611 - DNA, 80 bp, synthetic construct
  misc_feature 1..80: note = Artificially Synthesized Probe
  source 1..80: mol_type = other DNA
ctcaacaaacatctcctaagctatcacacaccagatgcaggggcgggcacagactccagcacccccagctccgttacgag

SEQ ID NO: 44612 - DNA, 80 bp, synthetic construct; identical to SEQ ID NO: 22799
  misc_feature 1..80: note = Artificially Synthesized Probe
  source 1..80: mol_type = other DNA

SEQ ID NO: 44613 - DNA, 80 bp, synthetic construct
  misc_feature 1..80: note = Artificially Synthesized Probe
  source 1..80: mol_type = other DNA
tctactaaaaatacaaaaattagggctgggtgcagtggcttctgcctgtaatcccagcactttgggaggccggggcgggc

SEQ ID NO: 44614 - DNA, 80 bp, synthetic construct
  misc_feature 1..80: note = Artificially Synthesized Probe
  source 1..80: mol_type = other DNA
ttttagtagagacagggtttcaccatgttggccaggctggtctcgaactcctgacctcaaatgacccacccaccttggcc

SEQ ID NO: 44615 - DNA, 80 bp, synthetic construct
  misc_feature 1..80: note = Artificially Synthesized Probe
  source 1..80: mol_type = other DNA
ggccagatggtgccacggcactccagcctgggtgacagagtgagactctgtctcaaaaaaaataaataaataaaaataaa

SEQ ID NO: 44616 - DNA, 80 bp, synthetic construct
  misc_feature 1..80: note = Artificially Synthesized Probe
  source 1..80: mol_type = other DNA
gtaactgctggctgagtgatacgatctcctaataatcctcctcatctcttcccataacaaccaattcaattatttagggt

SEQ ID NO: 44617 - DNA, 80 bp, synthetic construct
  misc_feature 1..80: note = Artificially Synthesized Probe
  source 1..80: mol_type = other DNA
tctaacccttattagagttaacagcttcagcctacttcctgcttcccctccgaacctcctcaagaattgataacaagtaa

SEQ ID NO: 44618 - DNA, 80 bp, synthetic construct; identical to SEQ ID NO: 22800
  misc_feature 1..80: note = Artificially Synthesized Probe
  source 1..80: mol_type = other DNA

SEQ ID NO: 44619 - DNA, 80 bp, synthetic construct
  misc_feature 1..80: note = Artificially Synthesized Probe
  source 1..80: mol_type = other DNA
cttccaccccagggtgcccttcaatcccagagccacgcagctccgggctcctgcccctgtccgcagaagtcgcccaaggc

SEQ ID NO: 44620 - DNA, 80 bp, synthetic construct
  misc_feature 1..80: note = Artificially Synthesized Probe
  source 1..80: mol_type = other DNA
cctgggccttaaacataattctactgttgaactgggctgtcacagagtgcctcaaaagtcacctccttctccccactccc

SEQ ID NO: 44621 - DNA, 80 bp, synthetic construct
  misc_feature 1..80: note = Artificially Synthesized Probe
  source 1..80: mol_type = other DNA
gggcaaaagcccagccagcttgtctctgcttgtttctatccacgcaggcacatggagacacacacacacacacacacaca

SEQ ID NO: 44622 - DNA, 80 bp, synthetic construct; identical to SEQ ID NO: 22801
  misc_feature 1..80: note = Artificially Synthesized Probe
  source 1..80: mol_type = other DNA

SEQ ID NO: 44623 - DNA, 80 bp, synthetic construct
  misc_feature 1..80: note = Artificially Synthesized Probe
  source 1..80: mol_type = other DNA
acgacaccactgccaccatgccaccactgccactactgccaccattgccacacgacaccactgccaccactgccacatga

SEQ ID NO: 44624 - DNA, 80 bp, synthetic construct
  misc_feature 1..80: note = Artificially Synthesized Probe
  source 1..80: mol_type = other DNA
ccactgccgccactgccaccactgccaccatgacaccactgccctggccacagagcaggctcaagggccttcatccttca

SEQ ID NO: 44625 - DNA, 80 bp, synthetic construct; identical to SEQ ID NO: 22802
  misc_feature 1..80: note = Artificially Synthesized Probe
  source 1..80: mol_type = other DNA

SEQ ID NO: 44626 - DNA, 80 bp, synthetic construct
  misc_feature 1..80: note = Artificially Synthesized Probe
  source 1..80: mol_type = other DNA
tgagccaccgcactcggcctgtatttatttttctagagacagggtctcactgtgccgtccaggctgctatgttgccctgg

SEQ ID NO: 44627 - DNA, 80 bp, synthetic construct
  misc_feature 1..80: note = Artificially Synthesized Probe
  source 1..80: mol_type = other DNA
caggaccactgtgagcaagcagcagcttgcttgtgttaagtgatgaggatttcagcagtaatttgtggggggttttggtt

SEQ ID NO: 44628 - DNA, 80 bp, synthetic construct
  misc_feature 1..80: note = Artificially Synthesized Probe
  source 1..80: mol_type = other DNA
ctgagtagctgggattacagtcacccactaccacactcagctaatttttatatttttagtagagatgggatttcccaatg

SEQ ID NO: 44629 - DNA, 80 bp, synthetic construct
  misc_feature 1..80: note = Artificially Synthesized Probe
  source 1..80: mol_type = other DNA
gcctacctgcctggacacctgcttcggccacatcagtcaccctccaggaagcctggcccctcttgaaaagcccccacaac

SEQ ID NO: 44630 - DNA, 80 bp, synthetic construct
  misc_feature 1..80: note = Artificially Synthesized Probe
  source 1..80: mol_type = other DNA
tgaccggctaccctaacaccctgctcccactcagcccttccatgtatgctcagaaggccaaccccagcctcacggaagct

SEQ ID NO: 44631 - DNA, 80 bp, synthetic construct
  misc_feature 1..80: note = Artificially Synthesized Probe
  source 1..80: mol_type = other DNA
ctcttctggggaaagacgggaaagcaaggtggaatgtcttccagcaagtaagtaagtgccaggagcaccaacggcttagt

SEQ ID NO: 44632 - DNA, 80 bp, synthetic construct; identical to SEQ ID NO: 22803
  misc_feature 1..80: note = Artificially Synthesized Probe
  source 1..80: mol_type = other DNA

SEQ ID NO: 44633 - DNA, 80 bp, synthetic construct
  misc_feature 1..80: note = Artificially Synthesized Probe
  source 1..80: mol_type = other DNA
cggatgaggtgcttagagcagttagattcatcaagtcagaaagtaggagggtggtggccaggagctgggggctggagaaa

SEQ ID NO: 44634 - DNA, 80 bp, synthetic construct
  misc_feature 1..80: note = Artificially Synthesized Probe
  source 1..80: mol_type = other DNA
taggttctcgtaggagcgtgagccctgtcgtgatctgcgcgtgcgagggatcgcagttccatcccgaaagcgctccccac

SEQ ID NO: 44635 - DNA, 80 bp, synthetic construct; identical to SEQ ID NO: 22804
  misc_feature 1..80: note = Artificially Synthesized Probe
  source 1..80: mol_type = other DNA

SEQ ID NO: 44636 - DNA, 80 bp, synthetic construct
  misc_feature 1..80: note = Artificially Synthesized Probe
  source 1..80: mol_type = other DNA
ggtgcctgccaccatgcctggctaaatttttttgtatttttagtagagacggggtttcaccgtgttagccgggatggtct

SEQ ID NO: 44637 - DNA, 80 bp, synthetic construct
  misc_feature 1..80: note = Artificially Synthesized Probe
  source 1..80: mol_type = other DNA
cagagacccccccatgggtatcgacaggaggccagggggctgaaccaggcctggagcccacccagcttctgaagaggggt

SEQ ID NO: 44638 - DNA, 80 bp, synthetic construct
  misc_feature 1..80: note = Artificially Synthesized Probe
  source 1..80: mol_type = other DNA
tctcctgtctcagcctcccgagtaggtgggattacaggcatgcaccaccacacccagctaatttttgtatttttagtaga

SEQ ID NO: 44639 - DNA, 80 bp, synthetic construct
  misc_feature 1..80: note = Artificially Synthesized Probe
  source 1..80: mol_type = other DNA
gctccgcctcccgggttcacgccattctcctgcctcagcctcctgagtagctgggactacaggcgcccgccaccaccccc

SEQ ID NO: 44640 - DNA, 80 bp, synthetic construct
  misc_feature 1..80: note = Artificially Synthesized Probe
  source 1..80: mol_type = other DNA
tcagctcggccataggtaggggttgccgggcacctgtcagctccaaatgccaggagccaggctctccgaattccactccc

SEQ ID NO: 44641 - DNA, 80 bp, synthetic construct; identical to SEQ ID NO: 22805
  misc_feature 1..80: note = Artificially Synthesized Probe
  source 1..80: mol_type = other DNA

SEQ ID NO: 44642 - DNA, 80 bp, synthetic construct
  misc_feature 1..80: note = Artificially Synthesized Probe
  source 1..80: mol_type = other DNA
cagaattttttttgttacccacctgacaaagctcttcatcttgctaaagataacagagcacttggccaagccagcgcgat

SEQ ID NO: 44643 - DNA, 80 bp, synthetic construct
  misc_feature 1..80: note = Artificially Synthesized Probe
  source 1..80: mol_type = other DNA
cgtccagacacaaagaggagggtggtggccaggagctgcaagcagcggcacacgtgtgggcaatacacaggttgcccaag

SEQ ID NO: 44644 - DNA, 80 bp, synthetic construct
  misc_feature 1..80: note = Artificially Synthesized Probe
  source 1..80: mol_type = other DNA
ctgtggtaacatcctgcacggctctaaaccagaggcaacagggcaccccacccactgggaaccacgcgagcagggaggga

SEQ ID NO: 44645 - DNA, 80 bp, synthetic construct; identical to SEQ ID NO: 22806
  misc_feature 1..80: note = Artificially Synthesized Probe
  source 1..80: mol_type = other DNA

SEQ ID NO: 44646 - DNA, 80 bp, synthetic construct
  misc_feature 1..80: note = Artificially Synthesized Probe
  source 1..80: mol_type = other DNA
catggagtaacagtagcacccaagttcacagggtttctgtgaggatgaaacgagtaaacatctaaagcacaccgaagaga

SEQ ID NO: 44647 - DNA, 80 bp, synthetic construct
  misc_feature 1..80: note = Artificially Synthesized Probe
  source 1..80: mol_type = other DNA
taaagccctgtctgctgagaactcatctgacaattcatcctaatccctagagggccccaagcaaaaatcccaagctcagt

SEQ ID NO: 44648 - DNA, 80 bp, synthetic construct; identical to SEQ ID NO: 22807
  misc_feature 1..80: note = Artificially Synthesized Probe
  source 1..80: mol_type = other DNA

SEQ ID NO: 44649 - DNA, 80 bp, synthetic construct
  misc_feature 1..80: note = Artificially Synthesized Probe
  source 1..80: mol_type = other DNA
aacatcactgcctcctccccaagtgagggagaggatacaatagaaagacaggacatccatcccggctaacacgaggaaac

SEQ ID NO: 44650 - DNA, 80 bp, synthetic construct; identical to SEQ ID NO: 22663
  misc_feature 1..80: note = Artificially Synthesized Probe
  source 1..80: mol_type = other DNA

SEQ ID NO: 44651 - DNA, 80 bp, synthetic construct
  misc_feature 1..80: note = Artificially Synthesized Probe
  source 1..80: mol_type = other DNA
agttagccaggcgtggtggtgagcacctgtagtcccagcactttgggaggccaaagcaggtggatcacgaggtcaggaaa

SEQ ID NO: 44652 - DNA, 80 bp, synthetic construct
  misc_feature 1..80: note = Artificially Synthesized Probe
  source 1..80: mol_type = other DNA
ctgcgctccagcctgggctacagagcgagactctgtctcaaaaaaaaaaaaaaaaagacaggacaggctgggctggtggc

SEQ ID NO: 44653 - DNA, 80 bp, synthetic construct; identical to SEQ ID NO: 22808
  misc_feature 1..80: note = Artificially Synthesized Probe
  source 1..80: mol_type = other DNA

SEQ ID NO: 44654 - DNA, 80 bp, synthetic construct
  misc_feature 1..80: note = Artificially Synthesized Probe
  source 1..80: mol_type = other DNA
ggcattgcactggcttggccaagcgctctgttatctttagcaagatgatgagctttgtcacgtggttaacaaaaaaaatt

SEQ ID NO: 44655 - DNA, 80 bp, synthetic construct
  misc_feature 1..80: note = Artificially Synthesized Probe
  source 1..80: mol_type = other DNA
ctctactgacaatacaaaattagccaggcatggtggtgcacgcctgtagtcccagctacttgggctgaggcaggagaatc

SEQ ID NO: 44656 - DNA, 80 bp, synthetic construct
  misc_feature 1..80: note = Artificially Synthesized Probe
  source 1..80: mol_type = other DNA
ctttcttgccccatcatcaggtgcacttggtcaaatccccaccataccccttcccccacaactaggcagaaggaccaagg

SEQ ID NO: 44657 - DNA, 80 bp, synthetic construct
  misc_feature 1..80: note = Artificially Synthesized Probe
  source 1..80: mol_type = other DNA
ggagggctgggggtccaggcacacctgcgggagggctgggggtccaggcacacctgcgggagggctgggggtccaggcac

SEQ ID NO: 44658 - DNA, 80 bp, synthetic construct; identical to SEQ ID NO: 22809
  misc_feature 1..80: note = Artificially Synthesized Probe
  source 1..80: mol_type = other DNA

SEQ ID NO: 44659 - DNA, 80 bp, synthetic construct
  misc_feature 1..80: note = Artificially Synthesized Probe
  source 1..80: mol_type = other DNA
caaccatctcatccttctcactggtttgaagcctggtggtcaccatagcaacaggctcccgctccagcctgccaggcggg

SEQ ID NO: 44660 - DNA, 80 bp, synthetic construct
  misc_feature 1..80: note = Artificially Synthesized Probe
  source 1..80: mol_type = other DNA
aagggacgagggccaggaactgagcagcgggttcacctcccaggtccttcatgatcctggtgtccctgccgcggctgcca

SEQ ID NO: 44661 - DNA, 80 bp, synthetic construct
  misc_feature 1..80: note = Artificially Synthesized Probe
  source 1..80: mol_type = other DNA
gtcggggggagtgtgcaggatttggaggcaggctgatctgagtctcccattcaaccgtgcgcactcgggcaaggcctttc

SEQ ID NO: 44662 - DNA, 80 bp, synthetic construct
  misc_feature 1..80: note = Artificially Synthesized Probe
  source 1..80: mol_type = other DNA
ttcaacaggtgcagcttacagttcccgtcccgtggtgctgcctgccctggttgcattaaagtgctcataaagcccagaat

SEQ ID NO: 44663 - DNA, 80 bp, synthetic construct; identical to SEQ ID NO: 22810
  misc_feature 1..80: note = Artificially Synthesized Probe
  source 1..80: mol_type = other DNA

SEQ ID NO: 44664 - DNA, 80 bp, synthetic construct
  misc_feature 1..80: note = Artificially Synthesized Probe
  source 1..80: mol_type = other DNA
tccagcagccacttcccaccctgcatttgttccctcctacctggccctcaccaaggcatccacccaatcctggcggggcc

SEQ ID NO: 44665 - DNA, 80 bp, synthetic construct
  misc_feature 1..80: note = Artificially Synthesized Probe
  source 1..80: mol_type = other DNA
aggccacttgagagatggtgttcagctctgggatgtcccagcaatgtgtactatgggagcctccaggatgactggagcag

SEQ ID NO: 44666 - DNA, 80 bp, synthetic construct
  misc_feature 1..80: note = Artificially Synthesized Probe
  source 1..80: mol_type = other DNA
accaaatggtgctgggacaaccagattgccacatgtaaaagttgaacttttactttctaccatattcaaaaaataactct

SEQ ID NO: 44667 - DNA, 80 bp, synthetic construct; identical to SEQ ID NO: 22811
  misc_feature 1..80: note = Artificially Synthesized Probe
  source 1..80: mol_type = other DNA

SEQ ID NO: 44668 - DNA, 80 bp, synthetic construct
  misc_feature 1..80: note = Artificially Synthesized Probe
  source 1..80: mol_type = other DNA
aactacaaaaattagccaggcatggtggcaggtgcctgtaatcccagctactcgggaggctgaggcaggaaaatccagga

SEQ ID NO: 44669 - DNA, 80 bp, synthetic construct
  misc_feature 1..80: note = Artificially Synthesized Probe
  source 1..80: mol_type = other DNA
tggagcacagtgtcctggtacccaggtggccccaggttcaactccaacactgtgatcctcaatgggggtgctgtggggac

SEQ ID NO: 44670 - DNA, 80 bp, synthetic construct
  misc_feature 1..80: note = Artificially Synthesized Probe
  source 1..80: mol_type = other DNA
ggctgctcccttcacatgggcgacagtgtccagtgagaaaataaacctcttttcatgtgaagaaaaaaaaaaggcctctc

SEQ ID NO: 44671 - DNA, 80 bp, synthetic construct
  misc_feature 1..80: note = Artificially Synthesized Probe
  source 1..80: mol_type = other DNA
gaccagcctggccaacgtggtgaaaactcgtctctactaaaaatacaaaaattagccagacgtggtggcgcacacctaca

SEQ ID NO: 44672 - DNA, 80 bp, synthetic construct; identical to SEQ ID NO: 22812
  misc_feature 1..80: note = Artificially Synthesized Probe
  source 1..80: mol_type = other DNA

SEQ ID NO: 44673 - DNA, 80 bp, synthetic construct
  misc_feature 1..80: note = Artificially Synthesized Probe
  source 1..80: mol_type = other DNA
acatatgcggtttaagctctcatagccgctcccatctcacagatgaggatgctgcagcttaacgagagtgaggaatttac

SEQ ID NO: 44674 - DNA, 80 bp, synthetic construct
  misc_feature 1..80: note = Artificially Synthesized Probe
  source 1..80: mol_type = other DNA
caaagaattagatcaatgtcaggctctgacgcacaggcaggctcagtaataacaacagtccacacacacatacgataagt

SEQ ID NO: 44675 - DNA, 80 bp, synthetic construct
  misc_feature 1..80: note = Artificially Synthesized Probe
  source 1..80: mol_type = other DNA
ctaccctctcttgctactaagtcagtcgtgctacagcgcacattactttttttttttttttttttgagatgaagtctcac

SEQ ID NO: 44676 - DNA, 80 bp, synthetic construct
  misc_feature 1..80: note = Artificially Synthesized Probe
  source 1..80: mol_type = other DNA
tctcaccatgttggccaggctggtctcgaactcctgacctcatgtgatctgcctgcctcggcctcccaaagtgctgggat

SEQ ID NO: 44677 - DNA, 80 bp, synthetic construct; identical to SEQ ID NO: 22813
  misc_feature 1..80: note = Artificially Synthesized Probe
  source 1..80: mol_type = other DNA

SEQ ID NO: 44678 - DNA, 80 bp, synthetic construct
  misc_feature 1..80: note = Artificially Synthesized Probe
  source 1..80: mol_type = other DNA
ctaataagggcaggtattactttatgaggctcatttcaagcgtgcatgggtatatgtgtgtgtgcagatgtacgtatgtg

SEQ ID NO: 44679 - DNA, 80 bp, synthetic construct
  misc_feature 1..80: note = Artificially Synthesized Probe
  source 1..80: mol_type = other DNA
acctaaaaacataaatttaaccagaaaagggcagctcacaggaacatgcttacaatgtaattcttcttctttttattctt

SEQ ID NO: 44680 - DNA, 80 bp, synthetic construct; identical to SEQ ID NO: 22814
  misc_feature 1..80: note = Artificially Synthesized Probe
  source 1..80: mol_type = other DNA

SEQ ID NO: 44681 - DNA, 80 bp, synthetic construct
  misc_feature 1..80: note = Artificially Synthesized Probe
  source 1..80: mol_type = other DNA
tcccagctactcgggaggctgaggtaggagaattgcttgaacctgggagttggaagttgcaatgagccaagaccgtgcca

SEQ ID NO: 44682 - DNA, 80 bp, synthetic construct
  misc_feature 1..80: note = Artificially Synthesized Probe
  source 1..80: mol_type = other DNA
cccagtgcagccaaagccaccgttgtaaccacagcctaggattacccagagaaggctgaagcctgttcagactacaggga

SEQ ID NO: 44683 - DNA, 80 bp, synthetic construct
  misc_feature 1..80: note = Artificially Synthesized Probe
  source 1..80: mol_type = other DNA
tattaaactactgtcttagtcatggaactctcaggagtccaagagaagtaggaatgcagtactcatacacaagagaagaa

SEQ ID NO: 44684 - DNA, 80 bp, synthetic construct
  misc_feature 1..80: note = Artificially Synthesized Probe
  source 1..80: mol_type = other DNA
cggtgggcagacctggtgctgggaggccacccccagtacagccctcccgctgcctcgtgcccatcacttccgctccagct

SEQ ID NO: 44685 - DNA, 80 bp, synthetic construct; identical to SEQ ID NO: 22815
  misc_feature 1..80: note = Artificially Synthesized Probe
  source 1..80: mol_type = other DNA

SEQ ID NO: 44686 - DNA, 80 bp, synthetic construct
  misc_feature 1..80: note = Artificially Synthesized Probe
  source 1..80: mol_type = other DNA
gagaagtaagaatgcggtactcacgcacaagggaagtatgcggtactcacacacaggagaagtaagaatgcggtactcac

SEQ ID NO: 44687 - DNA, 80 bp, synthetic construct
  misc_feature 1..80: note = Artificially Synthesized Probe
  source 1..80: mol_type = other DNA
cgtgggtccacgatgctgaggagggaggcccagggacctgtgcctttgagtcagacctgtgggagcccctccagggcctg

SEQ ID NO: 44688 - DNA, 80 bp, synthetic construct
  misc_feature 1..80: note = Artificially Synthesized Probe
  source 1..80: mol_type = other DNA
ggaggaaacacttacaccaataggagcagagccctggggtctagggccgctgtacctctcctctctggtacaaggttcaa

SEQ ID NO: 44689 - DNA, 80 bp, synthetic construct; identical to SEQ ID NO: 22816
  misc_feature 1..80: note = Artificially Synthesized Probe
  source 1..80: mol_type = other DNA

SEQ ID NO: 44690 - DNA, 80 bp, synthetic construct
  misc_feature 1..80: note = Artificially Synthesized Probe
  source 1..80: mol_type = other DNA
catggttcaggcactgttccaggtgccaggggtacgacggagcagcaaacagaccaaatgtctgccctgtggagctgagt

SEQ ID NO: 44691 - DNA, 80 bp, synthetic construct
  misc_feature 1..80: note = Artificially Synthesized Probe
  source 1..80: mol_type = other DNA
gaacctattctaccgtgaattattaacacttttcacagaggccacgctccacaaagggaacttcagcgatacggaaatct

SEQ ID NO: 44692 - DNA, 80 bp, synthetic construct
  misc_feature 1..80: note = Artificially Synthesized Probe
  source 1..80: mol_type = other DNA
tggaccgccctgcctgctaaatatctatgtggattcccgttccaaggacaccatcccttctcagggatacaaggctgggg

SEQ ID NO: 44693 - DNA, 80 bp, synthetic construct
  misc_feature 1..80: note = Artificially Synthesized Probe
  source 1..80: mol_type = other DNA
ttttttttttctgagtctcatctccttcccagcacctatcctgggaaggttttgttggaaatccccgtcacccacaagtc

SEQ ID NO: 44694 - DNA, 80 bp, synthetic construct; identical to SEQ ID NO: 22817
  misc_feature 1..80: note = Artificially Synthesized Probe
  source 1..80: mol_type = other DNA

SEQ ID NO: 44695 - DNA, 80 bp, synthetic construct
  misc_feature 1..80: note = Artificially Synthesized Probe
  source 1..80: mol_type = other DNA
ctgcagcctcccaggcgacacttgctgctgtctcacacactccagccccttctgaggccaggcctgggccaggggcactt

SEQ ID NO: 44696 - DNA, 80 bp, synthetic construct
  misc_feature 1..80: note = Artificially Synthesized Probe
  source 1..80: mol_type = other DNA
tccagggttcaaacaattctcctgcctcaacttctctagtagctaggattacaggcgtgtaccaccacacccagctaatt

SEQ ID NO: 44697 - DNA, 80 bp, synthetic construct
  misc_feature 1..80: note = Artificially Synthesized Probe
  source 1..80: mol_type = other DNA
aggcacctgttaggtcctctcccacccgctacaccactagctaatggtaatcatagcacccattcccctgggagccccaa

SEQ ID NO: 44698 - DNA, 80 bp, synthetic construct; identical to SEQ ID NO: 22818
  misc_feature 1..80: note = Artificially Synthesized Probe
  source 1..80: mol_type = other DNA

SEQ ID NO: 44699 - DNA, 80 bp, synthetic construct
  misc_feature 1..80: note = Artificially Synthesized Probe
  source 1..80: mol_type = other DNA
tcctggcgtgggcccctccggatcccctctccctgcttctccatcctctcttccaccccagcaggagatgagaggaagac

SEQ ID NO: 44700 - DNA, 80 bp, synthetic construct
  misc_feature 1..80: note = Artificially Synthesized Probe
  source 1..80: mol_type = other DNA
cgcactcctcagcctgagtgtggcatctgcttcctgacgggccctaatggatgtggctcacacctctcatcccagcactt

SEQ ID NO: 44701 - DNA, 80 bp, synthetic construct
  misc_feature 1..80: note = Artificially Synthesized Probe
  source 1..80: mol_type = other DNA
caggtggatcacgaggtcaggagtttgaggccagcctggccaacatggtgaaaccccgtctctaataaaaatacaaaaat

SEQ ID NO: 44702 - DNA, 80 bp, synthetic construct
  misc_feature 1..80: note = Artificially Synthesized Probe
  source 1..80: mol_type = other DNA
atgaacattaatcttttgctccattaatttgtgcctctctgttctctcctgtaaactggagatgataagtatcttcttca

SEQ ID NO: 44703 - DNA, 80 bp, synthetic construct; identical to SEQ ID NO: 22819
  misc_feature 1..80: note = Artificially Synthesized Probe
  source 1..80: mol_type = other DNA

SEQ ID NO: 44704 - DNA, 80 bp, synthetic construct
  misc_feature 1..80: note = Artificially Synthesized Probe
  source 1..80: mol_type = other DNA
cacacagcactgaatccagacgcagggaccccagataaactgcaagacgcccagtgaacatggatgtcggagcatccagg

SEQ ID NO: 44705 - DNA, 80 bp, synthetic construct
  misc_feature 1..80: note = Artificially Synthesized Probe
  source 1..80: mol_type = other DNA
actgcaagacgcccagtgaacatggatgtcggagcatctaggtgggaccctggcaaagtgtcacacacagcactgaatcc

SEQ ID NO: 44706 - DNA, 80 bp, synthetic construct; identical to SEQ ID NO: 22664
  misc_feature 1..80: note = Artificially Synthesized Probe
  source 1..80: mol_type = other DNA

SEQ ID NO: 44707 - DNA, 80 bp, synthetic construct
  misc_feature 1..80: note = Artificially Synthesized Probe
  source 1..80: mol_type = other DNA
taggtgggaccctggcaaagtgtcacacacagcactgaatccagacgcagggaccccagataaactgcaagacgcccagt

SEQ ID NO: 44708 - DNA, 80 bp, synthetic construct; identical to SEQ ID NO: 22820
  misc_feature 1..80: note = Artificially Synthesized Probe
  source 1..80: mol_type = other DNA

SEQ ID NO: 44709 - DNA, 80 bp, synthetic construct
  misc_feature 1..80: note = Artificially Synthesized Probe
  source 1..80: mol_type = other DNA
ctcccagtgaacatgaacgtcaggtgagcaacagacaagctttcggtctacagataaaatgcaagacgcccagtgaacat

SEQ ID NO: 44710 - DNA, 80 bp, synthetic construct
  misc_feature 1..80: note = Artificially Synthesized Probe
  source 1..80: mol_type = other DNA
tcaagccatcctcccacctcagcctccgtaggagctgggactacaggtgtctgccaccactcccagctaattttttgtat

SEQ ID NO: 44711 - DNA, 80 bp, synthetic construct; identical to SEQ ID NO: 22821
  misc_feature 1..80: note = Artificially Synthesized Probe
  source 1..80: mol_type = other DNA

SEQ ID NO: 44712 - DNA, 80 bp, synthetic construct
  misc_feature 1..80: note = Artificially Synthesized Probe
  source 1..80: mol_type = other DNA
aaccgggccctggagcgccttcccacaatccaaaaatgcccctcagtccctggaggggagcctgtgacccggaggagcca

SEQ ID NO: 44713 - DNA, 80 bp, synthetic construct
  misc_feature 1..80: note = Artificially Synthesized Probe
  source 1..80: mol_type = other DNA
caaaatgtccaggaggaaactcaggaagctccagaggaaacccctcaggaagtcctgaaatagttccacagcccagagtg

SEQ ID NO: 44714 - DNA, 80 bp, synthetic construct
  misc_feature 1..80: note = Artificially Synthesized Probe
  source 1..80: mol_type = other DNA
accacgcccagctaatttttgtatattttagtagagacggggtttcaccatgttaggcaagctggtctcgaactcatgac

SEQ ID NO: 44715 - DNA, 80 bp, synthetic construct
  misc_feature 1..80: note = Artificially Synthesized Probe
  source 1..80: mol_type = other DNA
ctgagtccagggcgtagacccccagtgcctggcagcttggcccggctcacagggccccctccccagagcccacgcagatg

SEQ ID NO: 44716 - DNA, 80 bp, synthetic construct
  misc_feature 1..80: note = Artificially Synthesized Probe
  source 1..80: mol_type = other DNA
ctggcccctgggacgttggtggatgggacacctgactgctcaccctctggtcccagcagacaggtgccttccatgggccc

SEQ ID NO: 44717 - DNA, 80 bp, synthetic construct; identical to SEQ ID NO: 22822
  misc_feature 1..80: note = Artificially Synthesized Probe
  source 1..80: mol_type = other DNA

SEQ ID NO: 44718 - DNA, 80 bp, synthetic construct
  misc_feature 1..80: note = Artificially Synthesized Probe
  source 1..80: mol_type = other DNA
ctcttcacctggctgagaaagaccaacagcatccccaagcagaggaacagcacgtgcaaaaggcaccacactatgaatgg

SEQ ID NO: 44719 - DNA, 80 bp, synthetic construct
  misc_feature 1..80: note = Artificially Synthesized Probe
  source 1..80: mol_type = other DNA
ggctcccacgttgtgctaaggagtttagagtttatcctgcaggaaggagggagctacgaaggcttggagggcagatgctg

SEQ ID NO: 44720 - DNA, 80 bp, synthetic construct
  misc_feature 1..80: note = Artificially Synthesized Probe
  source 1..80: mol_type = other DNA
agcctggccaacatggtgtaaccctgtctctactaaaaatacagaaacattagctgggcatggtggcacgcgcctgtagt

SEQ ID NO: 44721 - DNA, 80 bp, synthetic construct; identical to SEQ ID NO: 22823
  misc_feature 1..80: note = Artificially Synthesized Probe
  source 1..80: mol_type = other DNA

SEQ ID NO: 44722 - DNA, 80 bp, synthetic construct
  misc_feature 1..80: note = Artificially Synthesized Probe
  source 1..80: mol_type = other DNA
tctgatggcccttctgccctcctaacacccagctccacctcctgcttggatcctccctgctccaggactctccggggcat

SEQ ID NO: 44723 - DNA, 80 bp, synthetic construct
  misc_feature 1..80: note = Artificially Synthesized Probe
  source 1..80: mol_type = other DNA
aaagcagcatttcccagggttccacctgctcggtgcctagctgggtgttgcggggaagggagaaccaccatggtgaaagg

SEQ ID NO: 44724 - DNA, 80 bp, synthetic construct; identical to SEQ ID NO: 22824
  misc_feature 1..80: note = Artificially Synthesized Probe
  source 1..80: mol_type = other DNA

SEQ ID NO: 44725 - DNA, 80 bp, synthetic construct
  misc_feature 1..80: note = Artificially Synthesized Probe
  source 1..80: mol_type = other DNA
ggtaaacactataaaacaacacgatatcggccgggcgggtcgctcacgcctgtaatcccagcactttgggaggccgaggc

SEQ ID NO: 44726 - DNA, 80 bp, synthetic construct
  misc_feature 1..80: note = Artificially Synthesized Probe
  source 1..80: mol_type = other DNA
ggccacaggcaggagacagaaacaggctgcaaaacatcgtggagccaaaaggcggacgaacgactgggccaggggtcgac

SEQ ID NO: 44727 - DNA, 80 bp, synthetic construct
  misc_feature 1..80: note = Artificially Synthesized Probe
  source 1..80: mol_type = other DNA
cgagaccagcctgaccaatatagagaaatcccgtctctactaaaaatacaaaattagccgggcatggtggcgcacacctg

SEQ ID NO: 44728 - DNA, 80 bp, synthetic construct
  misc_feature 1..80: note = Artificially Synthesized Probe
  source 1..80: mol_type = other DNA
aagcgatgtgagccggagcaatcagcattagggactctgagccagggatctcactaaggccagtgctcgaatcaggcctg

SEQ ID NO: 44729 - DNA, 80 bp, synthetic construct
  misc_feature 1..80: note = Artificially Synthesized Probe
  source 1..80: mol_type = other DNA
tgaatgtggtgggaaaggcaatgccccactgaacccactgaaggtttctgggcaaaggagagaaaatggtctagcacagc

SEQ ID NO: 44730 - DNA, 80 bp, synthetic construct; identical to SEQ ID NO: 22825
  misc_feature 1..80: note = Artificially Synthesized Probe
  source 1..80: mol_type = other DNA

SEQ ID NO: 44731 - DNA, 80 bp, synthetic construct
  misc_feature 1..80: note = Artificially Synthesized Probe
  source 1..80: mol_type = other DNA
actcgcaaagtaactaccaaggctttctgctccattaacaccaaagctggccctgcaggggaaagaggagggagggagga

SEQ ID NO: 44732 - DNA, 80 bp, synthetic construct
  misc_feature 1..80: note = Artificially Synthesized Probe
  source 1..80: mol_type = other DNA
ccaatcccccttcttatccttaaaatcagggtaacaacctttcataggtttactgtgaagatgaaatgagatcacgaatg

SEQ ID NO: 44733 - DNA, 80 bp, synthetic construct
  misc_feature 1..80: note = Artificially Synthesized Probe
  source 1..80: mol_type = other DNA
ccagccaaagggggctccgctaaggtgtaagccccccagacacaggccttccccaggggctgacctctccgtgggggact

SEQ ID NO: 44734 - DNA, 80 bp, synthetic construct; identical to SEQ ID NO: 22826
  misc_feature 1..80: note = Artificially Synthesized Probe
  source 1..80: mol_type = other DNA

SEQ ID NO: 44735 - DNA, 80 bp, synthetic construct
  misc_feature 1..80: note = Artificially Synthesized Probe
  source 1..80: mol_type = other DNA
acctccaccttcgggttcgagcgattctcctgcctcagcctcccgagtagctggggctacaggcacgagccaccacgccc

SEQ ID NO: 44736 - DNA, 80 bp, synthetic construct
  misc_feature 1..80: note = Artificially Synthesized Probe
  source 1..80: mol_type = other DNA
gtgtggggggggggtgtgtttgtgtatgttaacaatcagcacttcttgccaataattccaggaacacagcaatgcaggca

SEQ ID NO: 44737 - DNA, 80 bp, synthetic construct
  misc_feature 1..80: note = Artificially Synthesized Probe
  source 1..80: mol_type = other DNA
tatcacgggggcttgggggcaagacgcagtcttcacaactgtctttctagctagagaaatgaacccagatccatcaacct

SEQ ID NO: 44738 - DNA, 80 bp, synthetic construct; identical to SEQ ID NO: 22827
  misc_feature 1..80: note = Artificially Synthesized Probe
  source 1..80: mol_type = other DNA

SEQ ID NO: 44739 - DNA, 80 bp, synthetic construct
  misc_feature 1..80: note = Artificially Synthesized Probe
  source 1..80: mol_type = other DNA
gtagctgggattctaggtgcctgccaccatgcctggctaatttttgtattttagtagaaacggggtttcatcatgttggt

SEQ ID NO: 44740 - DNA, 80 bp, synthetic construct
  misc_feature 1..80: note = Artificially Synthesized Probe
  source 1..80: mol_type = other DNA
taaaaactagtttctatgaatccatcaggactgatggactttcttttcacgggaccccaggatcctgggagacccaagga

SEQ ID NO: 44741 - DNA, 80 bp, synthetic construct
  misc_feature 1..80: note = Artificially Synthesized Probe
  source 1..80: mol_type = other DNA
accttcaatagcacacactgccacgccgactctacaactcccagagggatctttctcctaaaactttgcctccaagggag

SEQ ID NO: 44742 - DNA, 80 bp, synthetic construct; identical to SEQ ID NO: 22828
  misc_feature 1..80: note = Artificially Synthesized Probe
  source 1..80: mol_type = other DNA

SEQ ID NO: 44743 - DNA, 80 bp, synthetic construct
  misc_feature 1..80: note = Artificially Synthesized Probe
  source 1..80: mol_type = other DNA
gcttccttggctctggtttacctgaggcctcccagccacccaagacttcctggagaccctgctagccttaggcaagatgc

SEQ ID NO: 44744 - DNA, 80 bp, synthetic construct; identical to SEQ ID NO: 22649
  misc_feature 1..80: note = Artificially Synthesized Probe
  source 1..80: mol_type = other DNA

SEQ ID NO: 44745 - DNA, 80 bp, synthetic construct
  misc_feature 1..80: note = Artificially Synthesized Probe
  source 1..80: mol_type = other DNA
gagttcgagaccagcctgatcaacatggagaaatcccttctctactaaaaatacaaaattagccgggcgtggtggcagca

SEQ ID NO: 44746 - DNA, 80 bp, synthetic construct; identical to SEQ ID NO: 22665
  misc_feature 1..80: note = Artificially Synthesized Probe
  source 1..80: mol_type = other DNA

SEQ ID NO: 44747 - DNA, 80 bp, synthetic construct
  misc_feature 1..80: note = Artificially Synthesized Probe
  source 1..80: mol_type = other DNA
ttaatcaatcaggtcaccacagagccgaccacatctggctctatctactgaagcccaggctgactctgacattttccata

SEQ ID NO: 44748 - DNA, 80 bp, synthetic construct; identical to SEQ ID NO: 22829
  misc_feature 1..80: note = Artificially Synthesized Probe
  source 1..80: mol_type = other DNA

SEQ ID NO: 44749 - DNA, 80 bp, synthetic construct
  misc_feature 1..80: note = Artificially Synthesized Probe
  source 1..80: mol_type = other DNA
ccctaagaaatgcaagctactcctgggccgggcacggtggctcacacctgtcatcccagcactttgggaggccgagatgg

SEQ ID NO: 44750 - DNA, 80 bp, synthetic construct
  misc_feature 1..80: note = Artificially Synthesized Probe
  source 1..80: mol_type = other DNA
ggttgcagtggagccgagattgccccactgcactccagcctgggtgacagagcaagactccatctcaaaaaaaaaagaaa

SEQ ID NO: 44751 - DNA, 80 bp, synthetic construct
  misc_feature 1..80: note = Artificially Synthesized Probe
  source 1..80: mol_type = other DNA
agaatatagaacagagcaggtaatccaccccccccatcacctcagcccacccaacacatcacctcagtccacccaacaca

SEQ ID NO: 44752 - DNA, 80 bp, synthetic construct
  misc_feature 1..80: note = Artificially Synthesized Probe
  source 1..80: mol_type = other DNA
acctcagtccacccaacacatcacctcagtcaacgcaacacatcacctcagtccactcaacacatcacctcagcccaccc

SEQ ID NO: 44753 - DNA, 80 bp, synthetic construct; identical to SEQ ID NO: 22830
  misc_feature 1..80: note = Artificially Synthesized Probe
  source 1..80: mol_type = other DNA

SEQ ID NO: 44754 - DNA, 80 bp, synthetic construct
  misc_feature 1..80: note = Artificially Synthesized Probe
  source 1..80: mol_type = other DNA
cagctaacaggggtttctgctgcggggaggagctcaaggagccaagaactcgagttttctttttcccacccgtactcaga

SEQ ID NO: 44755 - DNA, 80 bp, synthetic construct
  misc_feature 1..80: note = Artificially Synthesized Probe
  source 1..80: mol_type = other DNA
ggagcgcaatgagctggacagctgagctgctcaatagctctcctcaccttcaaagcactttataaatatgaattaatcca

SEQ ID NO: 44756 - DNA, 80 bp, synthetic construct; identical to SEQ ID NO: 22831
  misc_feature 1..80: note = Artificially Synthesized Probe
  source 1..80: mol_type = other DNA

SEQ ID NO: 44757 - DNA, 80 bp, synthetic construct
  misc_feature 1..80: note = Artificially Synthesized Probe
  source 1..80: mol_type = other DNA
aaaacaagcaagcatctgccagcaggcgctcactagcacacacggaggggtctgatgcggccccgagaactgaactgctc

SEQ ID NO: 44758 - DNA, 80 bp, synthetic construct
  misc_feature 1..80: note = Artificially Synthesized Probe
  source 1..80: mol_type = other DNA
aagaatcccgtaggtggctggtggaggtcgcctcgcctttctggaccgaagtgacctcatgtttggggcaggaatcagca

SEQ ID NO: 44759 - DNA, 80 bp, synthetic construct
  misc_feature 1..80: note = Artificially Synthesized Probe
  source 1..80: mol_type = other DNA
ctataaagggcatgaaaatatcacaagagaatgaaatcgcccttggaaatgttgcttggggtaagagaagtgagctccaa

SEQ ID NO: 44760 - DNA, 80 bp, synthetic construct
  misc_feature 1..80: note = Artificially Synthesized Probe
  source 1..80: mol_type = other DNA
atacagcctctgcctctcctctaagtaagtcctaaacacacatataaagattttccagttgaagaggtgccagatgatca

SEQ ID NO: 44761 - DNA, 80 bp, synthetic construct; identical to SEQ ID NO: 22832
  misc_feature 1..80: note = Artificially Synthesized Probe
  source 1..80: mol_type = other DNA

SEQ ID NO: 44762 - DNA, 80 bp, synthetic construct
  misc_feature 1..80: note = Artificially Synthesized Probe
  source 1..80: mol_type = other DNA
tctactaaaaatataaaaattagccgggtgtggtggcgggcacctgtaatcccagctactcaggaggctgaggcaggaga

SEQ ID NO: 44763 - DNA, 80 bp, synthetic construct
  misc_feature 1..80: note = Artificially Synthesized Probe
  source 1..80: mol_type = other DNA
actgacattgctacattaatacaggcaaatgagtggcgcagacacaagaactgggggatgtctgaaaccatctgtcactc

SEQ ID NO: 44764 - DNA, 80 bp, synthetic construct
  misc_feature 1..80: note = Artificially Synthesized Probe
  source 1..80: mol_type = other DNA
caaacctgtgatggaagtgggcacactcctcctgtcaaaaccagaaagaatgaactgccaaccccaaaggcaggaagtgt

SEQ ID NO: 44765 - DNA, 80 bp, synthetic construct
  misc_feature 1..80: note = Artificially Synthesized Probe
  source 1..80: mol_type = other DNA
gcctgcagtcccagctactcgggaggctgaggcaggagaatggcgtgaacctgggaggtggagcttgcagcgagctgaga

SEQ ID NO: 44766 - DNA, 80 bp, synthetic construct; identical to SEQ ID NO: 22833
  misc_feature 1..80: note = Artificially Synthesized Probe
  source 1..80: mol_type = other DNA

SEQ ID NO: 44767 - DNA, 80 bp, synthetic construct
  misc_feature 1..80: note = Artificially Synthesized Probe
  source 1..80: mol_type = other DNA
catttgttacttatgtgatcttaggtctatgatttatgctaactgagcctcactttcctactctgtaagagttgcagagt

SEQ ID NO: 44768 - DNA, 80 bp, synthetic construct
  misc_feature 1..80: note = Artificially Synthesized Probe
  source 1..80: mol_type = other DNA
aaaaatacaaaacttagctgggttgtggtggcaggcgcccataatcccagctactcaggaggctgaggcaggggaactgc

SEQ ID NO: 44769 - DNA, 80 bp, synthetic construct
  misc_feature 1..80: note = Artificially Synthesized Probe
  source 1..80: mol_type = other DNA
gaccccatttctcctgcctctgcccggagggctgctcccggccagctccccgtgctcggattcaggggcacgctccctcc

SEQ ID NO: 44770 - DNA, 80 bp, synthetic construct
  misc_feature 1..80: note = Artificially Synthesized Probe
  source 1..80: mol_type = other DNA
atacagtaggtgctcaggagacgctattatcattgttaccaggaacaatgctcagagagaggaaggcagggaacctctaa

SEQ ID NO: 44771 - DNA, 80 bp, synthetic construct; identical to SEQ ID NO: 22834
  misc_feature 1..80: note = Artificially Synthesized Probe
  source 1..80: mol_type = other DNA

SEQ ID NO: 44772 - DNA, 80 bp, synthetic construct
  misc_feature 1..80: note = Artificially Synthesized Probe
  source 1..80: mol_type = other DNA
cagaggccagggcagcagcaggagggtagacagctcaggtgccaatctgcctgaatcagggctgcccaacagaaccccct

SEQ ID NO: 44773 - DNA, 80 bp, synthetic construct
  misc_feature 1..80: note = Artificially Synthesized Probe
  source 1..80: mol_type = other DNA
aaagctagagacagggttccatacgattccaggcttcgggaaatagggaaacaagaactgggttttgcaaagagccagaa

SEQ ID NO: 44774 - DNA, 80 bp, synthetic construct
  misc_feature 1..80: note = Artificially Synthesized Probe
  source 1..80: mol_type = other DNA
gcacgcacatgccacacagccatgggccctgaccttcacccaacgacgctggcctctgcaggggaaggagcagatggagc

SEQ ID NO: 44775 - DNA, 80 bp, synthetic construct; identical to SEQ ID NO: 22835
  misc_feature 1..80: note = Artificially Synthesized Probe
  source 1..80: mol_type = other DNA

SEQ ID NO: 44776 - DNA, 80 bp, synthetic construct
  misc_feature 1..80: note = Artificially Synthesized Probe
  source 1..80: mol_type = other DNA
gaccagcctggcctcatggtgaaaccccatctctactaaaaatacaaaaaattagccgagagtggtggtgggtacctgta

SEQ ID NO: 44777 - DNA, 80 bp, synthetic construct
  misc_feature 1..80: note = Artificially Synthesized Probe
  source 1..80: mol_type = other DNA
gcatccagtgcctagaatcaggctgaaccaggctccacgtggccccacgtgcctcccccaactcctgcctgggagatgtg

SEQ ID NO: 44778 - DNA, 80 bp, synthetic construct
  misc_feature 1..80: note = Artificially Synthesized Probe
  source 1..80: mol_type = other DNA
gcaaggtgcggtggtgggggcggggggcggctctcggttcgccccaagcccccccacaccattacccgtgatcagttacg

SEQ ID NO: 44779 - DNA, 80 bp, synthetic construct; identical to SEQ ID NO: 22836
  misc_feature 1..80: note = Artificially Synthesized Probe
  source 1..80: mol_type = other DNA

SEQ ID NO: 44780 - DNA, 80 bp, synthetic construct; identical to SEQ ID NO: 22666
  misc_feature 1..80: note = Artificially Synthesized Probe
  source 1..80: mol_type = other DNA

SEQ ID NO: 44781 - DNA, 80 bp, synthetic construct
  misc_feature 1..80: note = Artificially Synthesized Probe
  source 1..80: mol_type = other DNA
ctgaggctcgcggaggccgggttcacaacaggtgggaggggggacgcagctctcggctcggtccgcccacggtccccgcc

SEQ ID NO: 44782 - DNA, 80 bp, synthetic construct
  misc_feature 1..80: note = Artificially Synthesized Probe
  source 1..80: mol_type = other DNA
ccgatcccgatcttggggtcccgatcccgatcctggggtcccgatctccatcctggggtcccgatcccgatcctggggtc

SEQ ID NO: 44783 - DNA, 80 bp, synthetic construct
  misc_feature 1..80: note = Artificially Synthesized Probe
  source 1..80: mol_type = other DNA
ggggaggccgaagttgcgagcgcggaggggcgaggaggccgggaaccaggtccccgggaggagcgcggggcggccggggc

SEQ ID NO: 44784 - DNA, 80 bp, synthetic construct
  misc_feature 1..80: note = Artificially Synthesized Probe
  source 1..80: mol_type = other DNA
cggggctttggtgcgggggcggggcggggagggaccaatcggctcgaggctccgccctccgcaggacgcccccggccggg

SEQ ID NO: 44785 - DNA, 80 bp, synthetic construct
  misc_feature 1..80: note = Artificially Synthesized Probe
  source 1..80: mol_type = other DNA
agcccacaggggtgacatcacctcccgcccgggatctccaagcgcggcttcgcgggcgggagcggcggccgggcccctcc

SEQ ID NO: 44786 - DNA, 80 bp, synthetic construct
  misc_feature 1..80: note = Artificially Synthesized Probe
  source 1..80: mol_type = other DNA
gaggaccgaagtcacgggggctgtggggccaggacagtcccacatgtgcccctcctgggcggaggacaaactggagccag

SEQ ID NO: 44787 - DNA, 80 bp, synthetic construct
  misc_feature 1..80: note = Artificially Synthesized Probe
  source 1..80: mol_type = other DNA
aaggaagaccccctcgcccaagggcagtgaagagattgggggccccatgcctgtctcctgtgggctgattctgtgggagc

SEQ ID NO: 44788 - DNA, 80 bp, synthetic construct; identical to SEQ ID NO: 22837
  misc_feature 1..80: note = Artificially Synthesized Probe
  source 1..80: mol_type = other DNA

SEQ ID NO: 44789 - DNA, 80 bp, synthetic construct
  misc_feature 1..80: note = Artificially Synthesized Probe
  source 1..80: mol_type = other DNA
ctcccccaggatgctgagaggaagccccataagctgcttgggcagaggcctctgcagctgccccaggggagatgggggtc

SEQ ID NO: 44790 - DNA, 80 bp, synthetic construct
  misc_feature 1..80: note = Artificially Synthesized Probe
  source 1..80: mol_type = other DNA
accagcgctgtctcttgccgcccctccctgcagctgtcaccctcccaccgtccctgactagcacacaggattgggagggc

SEQ ID NO: 44791 - DNA, 80 bp, synthetic construct
  misc_feature 1..80: note = Artificially Synthesized Probe
  source 1..80: mol_type = other DNA
tcggtcactcccaccgcccaggagctgaccccccgaggagccctgcctccaggcacagccctgccctcgggggccgcccc

SEQ ID NO: 44792 - DNA, 80 bp, synthetic construct
  misc_feature 1..80: note = Artificially Synthesized Probe
  source 1..80: mol_type = other DNA
actctcggaagacagcccaggggaaaggtggaaacgggcgtgagctgccgccaccaggagccaccagcccaggaggcagc

SEQ ID NO: 44793 - DNA, 80 bp, synthetic construct; identical to SEQ ID NO: 22838
  misc_feature 1..80: note = Artificially Synthesized Probe
  source 1..80: mol_type = other DNA

SEQ ID NO: 44794 - DNA, 80 bp, synthetic construct
  misc_feature 1..80: note = Artificially Synthesized Probe
  source 1..80: mol_type = other DNA
ttcgttcactagcgtgatctcaccgtgaatgtcactgttatctctgttttctccattttccaggtcagaaaaccgaggcc

SEQ ID NO: 44795 - DNA, 80 bp, synthetic construct
  misc_feature 1..80: note = Artificially Synthesized Probe
  source 1..80: mol_type = other DNA
tgcaagctccgcctcccgggttcacgccattctcttgcctcagcctcccgagtagctgggactacaggcacgtgccacca

SEQ ID NO: 44796 - DNA, 80 bp, synthetic construct
  misc_feature 1..80: note = Artificially Synthesized Probe
  source 1..80: mol_type = other DNA
ccacgcatactgcctccacggccagctaactggtgatcaccgggtgctgaaggtcctgagaaatctctgcgggtccatgg

SEQ ID NO: 44797 - DNA, 80 bp, synthetic construct; identical to SEQ ID NO: 22839
  misc_feature 1..80: note = Artificially Synthesized Probe
  source 1..80: mol_type = other DNA

SEQ ID NO: 44798 - DNA, 80 bp, synthetic construct
  misc_feature 1..80: note = Artificially Synthesized Probe
  source 1..80: mol_type = other DNA
ccaatctgtcagaggagcggggagctgtggcagacagaccttcctgattcagctaaatgtggaccgggtggggaccagcc

SEQ ID NO: 44799 - DNA, 80 bp, synthetic construct
  misc_feature 1..80: note = Artificially Synthesized Probe
  source 1..80: mol_type = other DNA
acctgcctgctcctgcctcatcactggacttaaaggggatttcatggttgggtgcaccgccaggagcactgggttaatga

SEQ ID NO: 44800 - DNA, 80 bp, synthetic construct
  misc_feature 1..80: note = Artificially Synthesized Probe
  source 1..80: mol_type = other DNA
acgggccctagaaccaaaactgggtatctccacatttcctcccttctcatgttagcagctcagctccactgcacacgaca

SEQ ID NO: 44801 - DNA, 80 bp, synthetic construct; identical to SEQ ID NO: 22840
  misc_feature 1..80: note = Artificially Synthesized Probe
  source 1..80: mol_type = other DNA

SEQ ID NO: 44802 - DNA, 80 bp, synthetic construct
  misc_feature 1..80: note = Artificially Synthesized Probe
  source 1..80: mol_type = other DNA
gggaggccgaggcgggcggatcacaaggtcaggagatcgagaccaacctgaccaacgtggcgaaaccccgtctctactaa

SEQ ID NO: 44803 - DNA, 80 bp, synthetic construct
  misc_feature 1..80: note = Artificially Synthesized Probe
  source 1..80: mol_type = other DNA
cctgtaatcccagcagtgagccgagatcctgtcactgcactccagcctgggcaacagagtgagactccctctcaaaaaaa

SEQ ID NO: 44804 - DNA, 80 bp, synthetic construct
  misc_feature 1..80: note = Artificially Synthesized Probe
  source 1..80: mol_type = other DNA
gggcgcctgtagtcccagctactcgggaggctgaggcgagagaatggtgtgaacctgggaggtggagcttgcagtgagct

SEQ ID NO: 44805 - DNA, 80 bp, synthetic construct; identical to SEQ ID NO: 22841
  misc_feature 1..80: note = Artificially Synthesized Probe
  source 1..80: mol_type = other DNA

SEQ ID NO: 44806 - DNA, 80 bp, synthetic construct
  misc_feature 1..80: note = Artificially Synthesized Probe
  source 1..80: mol_type = other DNA
tagatgtgagccaccgtgcctggtctactgagtgcttcttaagtgtcaggcactgctctatctgctttacgtaggttatt

SEQ ID NO: 44807 - DNA, 80 bp, synthetic construct
  misc_feature 1..80: note = Artificially Synthesized Probe
  source 1..80: mol_type = other DNA
agcggcaattagtgaatgaatgaataaacagaatgaagttaaactcagggaggaagaaatcggagctacacgagggaggc

SEQ ID NO: 44808 - DNA, 80 bp, synthetic construct
  misc_feature 1..80: note = Artificially Synthesized Probe
  source 1..80: mol_type = other DNA
ccccacttcttcaatgcctccggccaatctcaagagtttccagcctcagtgttcacatctgtagacagtatgcgcccagg

SEQ ID NO: 44809 - DNA, 80 bp, synthetic construct
  misc_feature 1..80: note = Artificially Synthesized Probe
  source 1..80: mol_type = other DNA
aatcccagctactcgggagactgaggcaggagaatcgcttgaacctgggaggtggaggttgcagtgagccgagatcgtgc

SEQ ID NO: 44810 - DNA, 80 bp, synthetic construct; identical to SEQ ID NO: 22842
  misc_feature 1..80: note = Artificially Synthesized Probe
  source 1..80: mol_type = other DNA

SEQ ID NO: 44811 - DNA, 80 bp, synthetic construct
  misc_feature 1..80: note = Artificially Synthesized Probe
  source 1..80: mol_type = other DNA
tagctaggattacaggagcccgccaccacacctggccaattttttgtatttttagtagaaatggggtttcgccatgttgg

SEQ ID NO: 44812 - DNA, 80 bp, synthetic construct
  misc_feature 1..80: note = Artificially Synthesized Probe
  source 1..80: mol_type = other DNA
accatgtgcggccagcatttactattctaagattcatcctcagccctccagtctggggaaagaagaaaattccccaggcc

SEQ ID NO: 44813 - DNA, 80 bp, synthetic construct; identical to SEQ ID NO: 22843
  misc_feature 1..80: note = Artificially Synthesized Probe
  source 1..80: mol_type = other DNA

SEQ ID NO: 44814 - DNA, 80 bp, synthetic construct
  misc_feature 1..80: note = Artificially Synthesized Probe
  source 1..80: mol_type = other DNA
aaatgcttcttcacaacaaaggtggtaaatctgttcctgagaggtgggacaggaacgctagaaaatgactcccagccggg

SEQ ID NO: 44815 - DNA, 80 bp, synthetic construct
  misc_feature 1..80: note = Artificially Synthesized Probe
  source 1..80: mol_type = other DNA
ccgttcccatggccaggggccacagcaagggcagcatcctgggcagagccgctggcttagattatgcactccccgagcca

SEQ ID NO: 44816 - DNA, 80 bp, synthetic construct
  misc_feature 1..80: note = Artificially Synthesized Probe
  source 1..80: mol_type = other DNA
aagtccccatcagcattcagaaagacgccagcagaagagtccaatggattctctaagtctccaaaacccagagattcagt

SEQ ID NO: 44817 - DNA, 80 bp, synthetic construct
  misc_feature 1..80: note = Artificially Synthesized Probe
  source 1..80: mol_type = other DNA
ctacgctgctctgccaggacctctgacaccacccaccaggctggccctgtccccatcaggcccaggagtggctgcaggag

SEQ ID NO: 44818 - DNA, 80 bp, synthetic construct
  misc_feature 1..80: note = Artificially Synthesized Probe
  source 1..80: mol_type = other DNA
aggaccaggcctcttcaaggcaagttccctctgcagtccagtcctgcctctgcccgtcctgcggcagagagtgggggctc

SEQ ID NO: 44819 - DNA, 80 bp, synthetic construct; identical to SEQ ID NO: 22844
  misc_feature 1..80: note = Artificially Synthesized Probe
  source 1..80: mol_type = other DNA

SEQ ID NO: 44820 - DNA, 80 bp, synthetic construct
  misc_feature 1..80: note = Artificially Synthesized Probe
  source 1..80: mol_type = other DNA
ggtgcctgtaatcccagctactcgggaggctgaggcaggagaatcacttgaacctgggtggcggaggttgcagtgagccg

SEQ ID NO: 44821 - DNA, 80 bp, synthetic construct; identical to SEQ ID NO: 34421
  misc_feature 1..80: note = Artificially Synthesized Probe
  source 1..80: mol_type = other DNA

SEQ ID NO: 44822 - DNA, 80 bp, synthetic construct
  misc_feature 1..80: note = Artificially Synthesized Probe
  source 1..80: mol_type = other DNA
gggagcatttaaagaggtcacaataggccagctgcagtggcttatgcctgtaatcccagcactttgggaggccgaggcgg

SEQ ID NO: 44823 - DNA, 80 bp, synthetic construct; identical to SEQ ID NO: 22845
  misc_feature 1..80: note = Artificially Synthesized Probe
  source 1..80: mol_type = other DNA

SEQ ID NO: 44824 - DNA, 80 bp, synthetic construct
  misc_feature 1..80: note = Artificially Synthesized Probe
  source 1..80: mol_type = other DNA
tcccatctcacccccagctggtcctctttccccatcacactgctttggatgtccttcctactaaatttcgccttcataaa

SEQ ID NO: 44825 - DNA, 80 bp, synthetic construct
  misc_feature 1..80: note = Artificially Synthesized Probe
  source 1..80: mol_type = other DNA
ttgcagtgagccaagatagcaccactgcactccagcctgggcaacagagcaagactctgtctcaaaaaaaaaaaaaaaaa

SEQ ID NO: 44826 - DNA, 80 bp, synthetic construct
  misc_feature 1..80: note = Artificially Synthesized Probe
  source 1..80: mol_type = other DNA
aagcactttcgggttctgatcgtgaaacctcgtgactcctaatttcctcttccccaagctcttggcaccttgtcctgagc

SEQ ID NO: 44827 - DNA, 80 bp, synthetic construct; identical to SEQ ID NO: 22846
  misc_feature 1..80: note = Artificially Synthesized Probe
  source 1..80: mol_type = other DNA

SEQ ID NO: 44828 - DNA, 80 bp, synthetic construct
  misc_feature 1..80: note = Artificially Synthesized Probe
  source 1..80: mol_type = other DNA
gttcaagtgattctcccgcctcagtctcccgagtcactgctgtcgggatagagacccgcacatccttttggtggcctaag

SEQ ID NO: 44829 - DNA, 80 bp, synthetic construct
  misc_feature 1..80: note = Artificially Synthesized Probe
  source 1..80: mol_type = other DNA
ctctacccccactctgcctgggtaactcctactctcccttctggtcttaacttaagtatcttgtcttccagggagctttc

SEQ ID NO: 44830 - DNA, 80 bp, synthetic construct
  misc_feature 1..80: note = Artificially Synthesized Probe
  source 1..80: mol_type = other DNA
atctgttattcactgtaaccccaggaccttgcacaaatagtttcagtgaatgaatgagcaagtgtgaatgaatgaatgac

SEQ ID NO: 44831 - DNA, 80 bp, synthetic construct; identical to SEQ ID NO: 22847
  misc_feature 1..80: note = Artificially Synthesized Probe
  source 1..80: mol_type = other DNA

SEQ ID NO: 44832 - DNA, 80 bp, synthetic construct
  misc_feature 1..80: note = Artificially Synthesized Probe
  source 1..80: mol_type = other DNA
acttcggtctcagttctcagagtccttctccgaggcctgtcccaaatttgcaataaaacttgtttttaggccaggcacgg

SEQ ID NO: 44833 - DNA, 80 bp, synthetic construct
  misc_feature 1..80: note = Artificially Synthesized Probe
  source 1..80: mol_type = other DNA
gccaacaaggtgaaaccccgtctctactaaaattacaaaaattagccaggcgtggtggtgggtgcctgtaatcccaccta

SEQ ID NO: 44834 - DNA, 80 bp, synthetic construct
  misc_feature 1..80: note = Artificially Synthesized Probe
  source 1..80: mol_type = other DNA
aaacacacacaaaaaaacttatgtttcggggagggaggtaaacagtagctcttccctgggaagaaagcagtttctaggtg

SEQ ID NO: 44835 - DNA, 80 bp, synthetic construct
  misc_feature 1..80: note = Artificially Synthesized Probe
  source 1..80: mol_type = other DNA
ggaaaatctggctttcagttcaatgatgggagaaatatgatagaaatggattctgggccctcacgctcccaaggggctgg

SEQ ID NO: 44836 - DNA, 80 bp, synthetic construct; identical to SEQ ID NO: 22848
  misc_feature 1..80: note = Artificially Synthesized Probe
  source 1..80: mol_type = other DNA

SEQ ID NO: 44837 - DNA, 80 bp, synthetic construct; identical to SEQ ID NO: 22667
  misc_feature 1..80: note = Artificially Synthesized Probe
  source 1..80: mol_type = other DNA

SEQ ID NO: 44838 - DNA, 80 bp, synthetic construct
  misc_feature 1..80: note = Artificially Synthesized Probe
  source 1..80: mol_type = other DNA
atgttctggatgttccagcatttttcttttctttttttttttttttttttttgagacagagtctccctctgttgcccagg

SEQ ID NO: 44839 - DNA, 80 bp, synthetic construct
  misc_feature 1..80: note = Artificially Synthesized Probe
  source 1..80: mol_type = other DNA
caggctggtctcgaactcctgacctcaggtgatccacctgccttggcctcccaaagtgctgggactccaggcgtgagcac

SEQ ID NO: 44840 - DNA, 80 bp, synthetic construct
  misc_feature 1..80: note = Artificially Synthesized Probe
  source 1..80: mol_type = other DNA
actctgcatgtattaaatcacttcattgtcaccgtgccacacgaccgctccaggagccacacatgagcccctcaacactc

SEQ ID NO: 44841 - DNA, 80 bp, synthetic construct; identical to SEQ ID NO: 22849
  misc_feature 1..80: note = Artificially Synthesized Probe
  source 1..80: mol_type = other DNA

SEQ ID NO: 44842 - DNA, 80 bp, synthetic construct
  misc_feature 1..80: note = Artificially Synthesized Probe
  source 1..80: mol_type = other DNA
tacttattatttcactgaatattccctgagccctactgtataaaccagagttccttttcccaggctgcttatgataatag

SEQ ID NO: 44843 - DNA, 80 bp, synthetic construct
  misc_feature 1..80: note = Artificially Synthesized Probe
  source 1..80: mol_type = other DNA
gaaagaatgtgagctgggcacgggggctcacacctgtaatcccagcattctgggaggccgaggtgggcggatcacctgag

SEQ ID NO: 44844 - DNA, 80 bp, synthetic construct
  misc_feature 1..80: note = Artificially Synthesized Probe
  source 1..80: mol_type = other DNA
ccaacatggtgaaaccccgtctctactaaaaatacaaaaaaatagctgggcgtggtggaaggcacctataatcccagcac

SEQ ID NO: 44845 - DNA, 80 bp, synthetic construct; identical to SEQ ID NO: 22850
  misc_feature 1..80: note = Artificially Synthesized Probe
  source 1..80: mol_type = other DNA

SEQ ID NO: 44846 - DNA, 80 bp, synthetic construct
  misc_feature 1..80: note = Artificially Synthesized Probe
  source 1..80: mol_type = other DNA
gaaactgctactaatctaacgtgtggcctcagcatgaattcaggaaaacaacagaattagcagcttttcttagatccacc

SEQ ID NO: 44847 - DNA, 80 bp, synthetic construct
  misc_feature 1..80: note = Artificially Synthesized Probe
  source 1..80: mol_type = other DNA
agtatttacgttctaggcaccctgttaagcacgtaaccttcactcttcgcaagcagcctctctatgtggaagccacagtc

SEQ ID NO: 44848 - DNA, 80 bp, synthetic construct
  misc_feature 1..80: note = Artificially Synthesized Probe
  source 1..80: mol_type = other DNA
actgctccgagcgactccgagagaggcagggcagagagggaggggctgccaggacctacccctggcttccagctcagcag

SEQ ID NO: 44849 - DNA, 80 bp, synthetic construct; identical to SEQ ID NO: 22851
  misc_feature 1..80: note = Artificially Synthesized Probe
  source 1..80: mol_type = other DNA

SEQ ID NO: 44850 - DNA, 80 bp, synthetic construct
  misc_feature 1..80: note = Artificially Synthesized Probe
  source 1..80: mol_type = other DNA
ccacgcccagctaattttttttttgtatttttaatagagacggggtttcaccgtgttagccaggatggttttgatctcct

SEQ ID NO: 44851 - DNA, 80 bp, synthetic construct
  misc_feature 1..80: note = Artificially Synthesized Probe
  source 1..80: mol_type = other DNA
cacaaagatgaatttccatcctctttctcctctactgaaatctgacaagctcctgggtcttttgatttctccttgaacat

SEQ ID NO: 44852 - DNA, 80 bp, synthetic construct
  misc_feature 1..80: note = Artificially Synthesized Probe
  source 1..80: mol_type = other DNA
ttcaagtaattctcttgcctcagcctcccaagtagctaagattacaggtacacgccaccacgcccagctatttttttgtt

SEQ ID NO: 44853 - DNA, 80 bp, synthetic construct; identical to SEQ ID NO: 22852
  misc_feature 1..80: note = Artificially Synthesized Probe
  source 1..80: mol_type = other DNA

SEQ ID NO: 44854 - DNA, 80 bp, synthetic construct
  misc_feature 1..80: note = Artificially Synthesized Probe
  source 1..80: mol_type = other DNA
ctgcctcagcccccctagtagctgggattacaggcatgtgccaccatgccctaaaaattttgtatttttagtagagacag

SEQ ID NO: 44855 - DNA, 80 bp, synthetic construct
  misc_feature 1..80: note = Artificially Synthesized Probe
  source 1..80: mol_type = other DNA
tgctcttgaagtcctggcctcaggccaggcgcggtggctcacgcctgtaatcccagcactttgggaggccgaggcgggcg

SEQ ID NO: 44856 - DNA, 80 bp, synthetic construct
  misc_feature 1..80: note = Artificially Synthesized Probe
  source 1..80: mol_type = other DNA
ttgcagtgagcggagatcgcgccacagcactccagcctgggcgacagaatgagactgtctcaaaaaaaaaaaaaagtcct

SEQ ID NO: 44857 - DNA, 80 bp, synthetic construct; identical to SEQ ID NO: 22853
  misc_feature 1..80: note = Artificially Synthesized Probe
  source 1..80: mol_type = other DNA

SEQ ID NO: 44858 - DNA, 80 bp, synthetic construct
  misc_feature 1..80: note = Artificially Synthesized Probe
  source 1..80: mol_type = other DNA
caaaggcggagtctgaggaggggccggcagcggcaaacggcagcatcaaacagaccactgctgccgcggcaacccagggc

SEQ ID NO: 44859 - DNA, 80 bp, synthetic construct
  misc_feature 1..80: note = Artificially Synthesized Probe
  source 1..80: mol_type = other DNA
gtcccagctacacaggaggctgaggcaggagaatggtgtgaacccgggaggcaaaggttgcagtgagccgagatcgtgtc

SEQ ID NO: 44860 - DNA, 80 bp, synthetic construct
  misc_feature 1..80: note = Artificially Synthesized Probe
  source 1..80: mol_type = other DNA
tgcgagacgagcctgggcaacatggcaaaaccccatctctactaaaaatacaaaaattagccaggcatggtagcaggtgc

SEQ ID NO: 44861 - DNA, 80 bp, synthetic construct
  misc_feature 1..80: note = Artificially Synthesized Probe
  source 1..80: mol_type = other DNA
gcccacctgccatacccaggccagccacagataggctcgggctgatgccgtgtcccagggcctcggctggcttcccctcc

SEQ ID NO: 44862 - DNA, 80 bp, synthetic construct
  misc_feature 1..80: note = Artificially Synthesized Probe
  source 1..80: mol_type = other DNA
gtctcaaaaaaaaaaaaaaaaataggcaaggtgcggtggctcacgcctataatcccggcactttgggaggccgaggcagg

SEQ ID NO: 44863 - DNA, 80 bp, synthetic construct
  misc_feature 1..80: note = Artificially Synthesized Probe
  source 1..80: mol_type = other DNA
aggtcacagtgagctgacatcacaccactgcactccagcctgggtgacaagagtgaaaactctggcccaaaaaacaaatt

SEQ ID NO: 44864 - DNA, 80 bp, synthetic construct; identical to SEQ ID NO: 22854
  misc_feature 1..80: note = Artificially Synthesized Probe
  source 1..80: mol_type = other DNA

SEQ ID NO: 44865 - DNA, 80 bp, synthetic construct
  misc_feature 1..80: note = Artificially Synthesized Probe
  source 1..80: mol_type = other DNA
accaccgtgcccggctaattttttgtatttttagtagagatggggtttcaccgtgttagccaggatggtctcaatctcct

SEQ ID NO: 44866 - DNA, 80 bp, synthetic construct
  misc_feature 1..80: note = Artificially Synthesized Probe
  source 1..80: mol_type = other DNA
acagacgcatcctgcaacgctccagagggtatcggatctcgggggcatctctttcttcaaggcagcccccagccctgcct

SEQ ID NO: 44867 - DNA, 80 bp, synthetic construct
  misc_feature 1..80: note = Artificially Synthesized Probe
  source 1..80: mol_type = other DNA
tttcaaacctctgtctctgcgggtttgaaaaaaattgggcagggtcagccccatgccccatttttggtctgagaggttgg

SEQ ID NO: 44868 - DNA, 80 bp, synthetic construct; identical to SEQ ID NO: 22855
  misc_feature 1..80: note = Artificially Synthesized Probe
  source 1..80: mol_type = other DNA

SEQ ID NO: 44869 - DNA, 80 bp, synthetic construct
  misc_feature 1..80: note = Artificially Synthesized Probe
  source 1..80: mol_type = other DNA
acccaaaccagaccgtgacttggttttccccagagagcagtatctatggtgtccccacctaagacctaactggagctggg

SEQ ID NO: 44870 - DNA, 80 bp, synthetic construct
  misc_feature 1..80: note = Artificially Synthesized Probe
  source 1..80: mol_type = other DNA
tgagctgtcgccttctggacataaaggagctgcttttgcaaaagagactgtatctgccccctgccacaactaaccagaaa

SEQ ID NO: 44871 - DNA, 80 bp, synthetic construct; identical to SEQ ID NO: 22856
  misc_feature 1..80: note = Artificially Synthesized Probe
  source 1..80: mol_type = other DNA

SEQ ID NO: 44872 - DNA, 80 bp, synthetic construct
  misc_feature 1..80: note = Artificially Synthesized Probe
  source 1..80: mol_type = other DNA
cagagcctctgccggccccacgtccactgcagagcctctgcctgccccacgtccgctccagcgcctctgccggccccacg

SEQ ID NO: 44873 - DNA, 80 bp, synthetic construct
  misc_feature 1..80: note = Artificially Synthesized Probe
  source 1..80: mol_type = other DNA
cctgagatcaggagttcgagaccagcctggcctcatggtgaaaccccatctctactaaaaatacaatattaaccaggcgt

SEQ ID NO: 44874 - DNA, 80 bp, synthetic construct
  misc_feature 1..80: note = Artificially Synthesized Probe
  source 1..80: mol_type = other DNA
ctcccgggttcacgccattctcctgcctcagcctctccagtacctgggactacagttgcccaccaccacacctggcaaat

SEQ ID NO: 44875 - DNA, 80 bp, synthetic construct
  misc_feature 1..80: note = Artificially Synthesized Probe
  source 1..80: mol_type = other DNA
cgcctggccaatcccagctacttgggaggctgaggtagaagaatcgtttgaacctgggaggcagaggttgcagtgagccg

SEQ ID NO: 44876 - DNA, 80 bp, synthetic construct
  misc_feature 1..80: note = Artificially Synthesized Probe
  source 1..80: mol_type = other DNA
agggggccggggaaggtgtgaaaactttgctcgggagtggtcagggtcacgaatgcctggttctggaaaacaaaacctct

SEQ ID NO: 44877 - DNA, 80 bp, synthetic construct; identical to SEQ ID NO: 22857
  misc_feature 1..80: note = Artificially Synthesized Probe
  source 1..80: mol_type = other DNA

SEQ ID NO: 44878 - DNA, 80 bp, synthetic construct
  misc_feature 1..80: note = Artificially Synthesized Probe
  source 1..80: mol_type = other DNA
tcagcctcccaagtagctaggattacagacgcccgccaccacgcccggctaatttttgcattttcagtagagacagggtt

SEQ ID NO: 44879 - DNA, 80 bp, synthetic construct
  misc_feature 1..80: note = Artificially Synthesized Probe
  source 1..80: mol_type = other DNA
cataaagccagaattttaaaaacttttagacaataaaagagtaaaatgtgacccataaaatacaccaccccaattagcat

SEQ ID NO: 44880 - DNA, 80 bp, synthetic construct
  misc_feature 1..80: note = Artificially Synthesized Probe
  source 1..80: mol_type = other DNA
atgttggtgtgctgcaaccatagagctctttacaaagttttatagttggccttctctacctggctggaagccacactatc

SEQ ID NO: 44881 - DNA, 80 bp, synthetic construct; identical to SEQ ID NO: 22858
  misc_feature 1..80: note = Artificially Synthesized Probe
  source 1..80: mol_type = other DNA

SEQ ID NO: 44882 - DNA, 80 bp, synthetic construct
  misc_feature 1..80: note = Artificially Synthesized Probe
  source 1..80: mol_type = other DNA
ggagacgtgattaggttacatgtaactattacagcaccttatataagagacttgggcgtcctgggattctggtatctgcc

SEQ ID NO: 44883 - DNA, 80 bp, synthetic construct
  misc_feature 1..80: note = Artificially Synthesized Probe
  source 1..80: mol_type = other DNA
cctcctcccgttacatcaagcagaacaagtttcacctagatgagctatgacctcactttattcggggcctccgtggtgca

SEQ ID NO: 44884 - DNA, 80 bp, synthetic construct; identical to SEQ ID NO: 22668
  misc_feature 1..80: note = Artificially Synthesized Probe
  source 1..80: mol_type = other DNA

SEQ ID NO: 44885 - DNA, 80 bp, synthetic construct; identical to SEQ ID NO: 22859
  misc_feature 1..80: note = Artificially Synthesized Probe
  source 1..80: mol_type = other DNA

SEQ ID NO: 44886 - DNA, 80 bp, synthetic construct
  misc_feature 1..80: note = Artificially Synthesized Probe
  source 1..80: mol_type = other DNA
aagggaaagttctgtttggattcagggcccaagccccaaaccctgataggaataaaatgatcagaggagcagccggggag

SEQ ID NO: 44887 - DNA, 80 bp, synthetic construct
  misc_feature 1..80: note = Artificially Synthesized Probe
  source 1..80: mol_type = other DNA
gtgtcacgacgtattgaacctctctgagcttcagtctcttcagtaatgacggtaagtgctttaactgagattgttaacaa

SEQ ID NO: 44888 - DNA, 80 bp, synthetic construct
  misc_feature 1..80: note = Artificially Synthesized Probe
  source 1..80: mol_type = other DNA
ggtacacacacacacaacacctctctccggagggtaaaaacaagacaaaaagtgaaacaggccccccgatgccgaagaga

SEQ ID NO: 44889 - DNA, 80 bp, synthetic construct
  misc_feature 1..80: note = Artificially Synthesized Probe
  source 1..80: mol_type = other DNA
ggtgtgcagtggcgtgatctctggctcactgcaacctctgcctcccacgttcacgccattctcctgcctcagcctcctga

SEQ ID NO: 44890 - DNA, 80 bp, synthetic construct; identical to SEQ ID NO: 22860
  misc_feature 1..80: note = Artificially Synthesized Probe
  source 1..80: mol_type = other DNA

SEQ ID NO: 44891 - DNA, 80 bp, synthetic construct
  misc_feature 1..80: note = Artificially Synthesized Probe
  source 1..80: mol_type = other DNA
cccaggttggggcaccaccatgcccagctaatttttgtatttttagcatagatggggtttccccatgttggctaggctgg

SEQ ID NO: 44892 - DNA, 80 bp, synthetic construct
  misc_feature 1..80: note = Artificially Synthesized Probe
  source 1..80: mol_type = other DNA
attactcatcttagatcactcattctaaattgcaaattcaaaggggatcccggctgtctctttcctatactcttcagcga

SEQ ID NO: 44893 - DNA, 80 bp, synthetic construct; identical to SEQ ID NO: 22861
  misc_feature 1..80: note = Artificially Synthesized Probe
  source 1..80: mol_type = other DNA

SEQ ID NO: 44894 - DNA, 80 bp, synthetic construct
  misc_feature 1..80: note = Artificially Synthesized Probe
  source 1..80: mol_type = other DNA
ctactatttaggttggtgcaaaagtaattgctgtttttgccattactttttttttttttttaagatggagtcttgctctg

SEQ ID NO: 44895 - DNA, 80 bp, synthetic construct
  misc_feature 1..80: note = Artificially Synthesized Probe
  source 1..80: mol_type = other DNA
tcatgttggccaggctggtctcgaactcccgacctcaggtgatccgcccgcctcggcctcccagagtgctgggatgacag

SEQ ID NO: 44896 - DNA, 80 bp, synthetic construct
  misc_feature 1..80: note = Artificially Synthesized Probe
  source 1..80: mol_type = other DNA
tcgaggatgccagagtggcaagggcaggggcagtggggccctcttgagaaaaggaacaggccagggccaaagcaacacgg

SEQ ID NO: 44897 - DNA, 80 bp, synthetic construct
  misc_feature 1..80: note = Artificially Synthesized Probe
  source 1..80: mol_type = other DNA
tggggggcggggtccgcggggaggagcctgcggggcggtcccccgtgggggcggggccttgagggggcggggcccgcggg

SEQ ID NO: 44898 - DNA, 80 bp, synthetic construct; identical to SEQ ID NO: 22862
  misc_feature 1..80: note = Artificially Synthesized Probe
  source 1..80: mol_type = other DNA

SEQ ID NO: 44899 - DNA, 80 bp, synthetic construct
  misc_feature 1..80: note = Artificially Synthesized Probe
  source 1..80: mol_type = other DNA
cgcgtggcgagagacccgccagggggtgtggcgtgagtgtgtgtcccgccaggacgttccggtggcgccgcctgacgcgg

SEQ ID NO: 44900 - DNA, 80 bp, synthetic construct
  misc_feature 1..80: note = Artificially Synthesized Probe
  source 1..80: mol_type = other DNA
tccactcctcccggcctctccctcatctcggcctgggccccgcagaagccaccaccagggctcctggattccaccagggg

SEQ ID NO: 44901 - DNA, 80 bp, synthetic construct
  misc_feature 1..80: note = Artificially Synthesized Probe
  source 1..80: mol_type = other DNA
aaatacaaaacattatccgggcgtggtggtgcgcgcctgtaatcccagctactcgggaggctgaggcaggagaatcgctt

SEQ ID NO: 44902 - DNA, 80 bp, synthetic construct
  misc_feature 1..80: note = Artificially Synthesized Probe
  source 1..80: mol_type = other DNA
atacaaaggtggtccagaagattataatcctgtattttttcctgtaccttttgtacgcttagacgtgttcagatacacaa

SEQ ID NO: 44903 - DNA, 80 bp, synthetic construct; identical to SEQ ID NO: 22863
  misc_feature 1..80: note = Artificially Synthesized Probe
  source 1..80: mol_type = other DNA

SEQ ID NO: 44904 - DNA, 80 bp, synthetic construct
  misc_feature 1..80: note = Artificially Synthesized Probe
  source 1..80: mol_type = other DNA
cgtgatctcggctcactgcatcctctgcctcctgggttaaagtgattctcctgcctcagcctcccaagtagctgggataa

SEQ ID NO: 44905 - DNA, 80 bp, synthetic construct
  misc_feature 1..80: note = Artificially Synthesized Probe
  source 1..80: mol_type = other DNA
atccccattattaagagactgtaatgagctctgggccctttggcacattacccaatattcttaagccttagttttctcat

SEQ ID NO: 44906 - DNA, 80 bp, synthetic construct; identical to SEQ ID NO: 22864
  misc_feature 1..80: note = Artificially Synthesized Probe
  source 1..80: mol_type = other DNA

SEQ ID NO: 44907 - DNA, 80 bp, synthetic construct
  misc_feature 1..80: note = Artificially Synthesized Probe
  source 1..80: mol_type = other DNA
ggttaagaaacattaacagggctgggcgcggtggttcacacctgtaatcccagcactgtgggaggcctaggtgggaggat

SEQ ID NO: 44908 - DNA, 80 bp, synthetic construct
  misc_feature 1..80: note = Artificially Synthesized Probe
  source 1..80: mol_type = other DNA
tacaaaaaataccaaaattggccaggcgcggcggctcacgcctgtaatcccagcactctgggaggcccaggcgggcagat

SEQ ID NO: 44909 - DNA, 80 bp, synthetic construct
  misc_feature 1..80: note = Artificially Synthesized Probe
  source 1..80: mol_type = other DNA
gtgagctgagattgcgccactgcactccagcctggcgccagagcaagactccgactcgaaaaaagaaaaaaaaaatacaa

SEQ ID NO: 44910 - DNA, 80 bp, synthetic construct
  misc_feature 1..80: note = Artificially Synthesized Probe
  source 1..80: mol_type = other DNA
ccagcctggtgacagaaggagactccgtctcaaaaaaaagagaaacaaaattagctgggtgtggtggcacactcgggagg

SEQ ID NO: 44911 - DNA, 80 bp, synthetic construct; identical to SEQ ID NO: 22865
  misc_feature 1..80: note = Artificially Synthesized Probe
  source 1..80: mol_type = other DNA

SEQ ID NO: 44912 - DNA, 80 bp, synthetic construct
  misc_feature 1..80: note = Artificially Synthesized Probe
  source 1..80: mol_type = other DNA
caggatgacaggcatttggaaactgaaaagtggaaataaccagctttcgtttctgggctgcagcttgtttagtgccacat

SEQ ID NO: 44913 - DNA, 80 bp, synthetic construct
  misc_feature 1..80: note = Artificially Synthesized Probe
  source 1..80: mol_type = other DNA
tttgtgaaactccatctctacaaaaacatacaaaaattaggctgggcgcggtggctcatgcttgtcatcccagcactttg

SEQ ID NO: 44914 - DNA, 80 bp, synthetic construct
  misc_feature 1..80: note = Artificially Synthesized Probe
  source 1..80: mol_type = other DNA
aacccgggaggtggaggtggcagtgagctgagatctcaccactgcactccagcctggacaacagagtgagactccatctc

SEQ ID NO: 44915 - DNA, 80 bp, synthetic construct; identical to SEQ ID NO: 22866
  misc_feature 1..80: note = Artificially Synthesized Probe
  source 1..80: mol_type = other DNA

SEQ ID NO: 44916 - DNA, 80 bp, synthetic construct
  misc_feature 1..80: note = Artificially Synthesized Probe
  source 1..80: mol_type = other DNA
tgctaaaaatataaaattagctgggaatggtggcaggcgcctgtaatcccagctactcaggaggctgagccaggagaatt

SEQ ID NO: 44917 - DNA, 80 bp, synthetic construct
  misc_feature 1..80: note = Artificially Synthesized Probe
  source 1..80: mol_type = other DNA
aggaaactgttggaatcacagaccttatgactttgtaattccttgcacagcctctcttagaagatcagtaactttgtttt

SEQ ID NO: 44918 - DNA, 80 bp, synthetic construct
  misc_feature 1..80: note = Artificially Synthesized Probe
  source 1..80: mol_type = other DNA
ctgcaccagcctaatttttgtatttttagtagagatggggtttcaccatgttggccaggatggtctcaaactcccgacct

SEQ ID NO: 44919 - DNA, 80 bp, synthetic construct
  misc_feature 1..80: note = Artificially Synthesized Probe
  source 1..80: mol_type = other DNA
gcggtgagccgagattgtgccattgtactccagcctgggcgacagagcgagactccatctcaaaaaaaaaaaaaaaaaaa

SEQ ID NO: 44920 - DNA, 80 bp, synthetic construct; identical to SEQ ID NO: 22867
  misc_feature 1..80: note = Artificially Synthesized Probe
  source 1..80: mol_type = other DNA

SEQ ID NO: 44921 - DNA, 80 bp, synthetic construct
  misc_feature 1..80: note = Artificially Synthesized Probe
  source 1..80: mol_type = other DNA
tctcgatcgggtgattcccacaccatcactgcatgccacggtcccctgtcagcctgtgaagaaccagtctcagagccaca

SEQ ID NO: 44922 - DNA, 80 bp, synthetic construct
  misc_feature 1..80: note = Artificially Synthesized Probe
  source 1..80: mol_type = other DNA
tctgtggcagagaagtccttgctactaatgagattcgagttctctgctaacgtcgcggtagagaagtgctgaccactgct

SEQ ID NO: 44923 - DNA, 80 bp, synthetic construct
  misc_feature 1..80: note = Artificially Synthesized Probe
  source 1..80: mol_type = other DNA
taaaaatacaaaaaattagccgggtgtggtggcgggcgcctgtagtcccagctactcgggaggctgaggcaggagaatgg

SEQ ID NO: 44924 - DNA, 80 bp, synthetic construct; identical to SEQ ID NO: 22868
  misc_feature 1..80: note = Artificially Synthesized Probe
  source 1..80: mol_type = other DNA

SEQ ID NO: 44925 - DNA, 80 bp, synthetic construct
  misc_feature 1..80: note = Artificially Synthesized Probe
  source 1..80: mol_type = other DNA
gtgttttactctctgcagctgcgttgaagtgggtggtgttttattgttcacatccttctcttttaacctgtttgtttctt

SEQ ID NO: 44926 - DNA, 80 bp, synthetic construct
  misc_feature 1..80: note = Artificially Synthesized Probe
  source 1..80: mol_type = other DNA
tttttgtatttttaatagagacagggttttgccatgttggccaggctggtctcgaactcctggactaaggtgattcacct

SEQ ID NO: 44927 - DNA, 80 bp, synthetic construct
  misc_feature 1..80: note = Artificially Synthesized Probe
  source 1..80: mol_type = other DNA
agacatacaatgccttactctctgcacctgctttgaagtgggtggtgttttattgtccacatccttctctcttaactttc

SEQ ID NO: 44928 - DNA, 80 bp, synthetic construct; identical to SEQ ID NO: 22869
  misc_feature 1..80: note = Artificially Synthesized Probe
  source 1..80: mol_type = other DNA

SEQ ID NO: 44929 - DNA, 80 bp, synthetic construct
  misc_feature 1..80: note = Artificially Synthesized Probe
  source 1..80: mol_type = other DNA
agtagaggtagaaagtaacagaatctagagaggcggaagctcagcccagctgtgttggtactgtgggggctgtcactttt

SEQ ID NO: 44930 - DNA, 80 bp, synthetic construct; identical to SEQ ID NO: 22669
  misc_feature 1..80: note = Artificially Synthesized Probe
  source 1..80: mol_type = other DNA

SEQ ID NO: 44931 - DNA, 80 bp, synthetic construct
  misc_feature 1..80: note = Artificially Synthesized Probe
  source 1..80: mol_type = other DNA
actatcgtccacgttatcactcagcttctctgcactatcgtccaggtgtcactcagtttctccatgctgttgtccgcgta

SEQ ID NO: 44932 - DNA, 80 bp, synthetic construct
  misc_feature 1..80: note = Artificially Synthesized Probe
  source 1..80: mol_type = other DNA
tcactcagctttctgctattgtgtttgctctcaagccaaaaatcactttgggctgtttcctctctctctgcttcctggct

SEQ ID NO: 44933 - DNA, 80 bp, synthetic construct; identical to SEQ ID NO: 22870
  misc_feature 1..80: note = Artificially Synthesized Probe
  source 1..80: mol_type = other DNA

SEQ ID NO: 44934 - DNA, 80 bp, synthetic construct
  misc_feature 1..80: note = Artificially Synthesized Probe
  source 1..80: mol_type = other DNA
cctgtccaatatggtgaaaccccgtctctactaaaaaatacaaaaattagccaggcgtggtggcagacgcccatagtccc

SEQ ID NO: 44935 - DNA, 80 bp, synthetic construct
  misc_feature 1..80: note = Artificially Synthesized Probe
  source 1..80: mol_type = other DNA
taaataaaaatatggattccaggttttgctctgacccagtgggattccatttcagtggagctagccaccaaaaatcgatc

SEQ ID NO: 44936 - DNA, 80 bp, synthetic construct
  misc_feature 1..80: note = Artificially Synthesized Probe
  source 1..80: mol_type = other DNA
tccccacaacattccaggaaatagacactattaacacatccattttacagataagatatccaaggcacagagacgtgaaa

SEQ ID NO: 44937 - DNA, 80 bp, synthetic construct; identical to SEQ ID NO: 22871
  misc_feature 1..80: note = Artificially Synthesized Probe
  source 1..80: mol_type = other DNA

SEQ ID NO: 44938 - DNA, 80 bp, synthetic construct
  misc_feature 1..80: note = Artificially Synthesized Probe
  source 1..80: mol_type = other DNA
cccagctactcgggaggctgaggcacaagaattgcttgaactcgggaggtggaggttgcagtgagccgagattgcaccgc

SEQ ID NO: 44939 - DNA, 80 bp, synthetic construct
  misc_feature 1..80: note = Artificially Synthesized Probe
  source 1..80: mol_type = other DNA
agatctctcgagtctgggagttcgagaccagcctgggcaacagagcaagacctcatctctacaaaagttttataaggatt

SEQ ID NO: 44940 - DNA, 80 bp, synthetic construct
  misc_feature 1..80: note = Artificially Synthesized Probe
  source 1..80: mol_type = other DNA
aaacaacaacaaaacaaaacaaaaagagacgccaggcacagtggttcacacctgtaatcccagcactctgagaggctgag

SEQ ID NO: 44941 - DNA, 80 bp, synthetic construct
  misc_feature 1..80: note = Artificially Synthesized Probe
  source 1..80: mol_type = other DNA
gtttgagaccagcctgatcaacatggaaaaactccatctttactaaaagtacaaaattagccaagtgtggtggcggacgc

SEQ ID NO: 44942 - DNA, 80 bp, synthetic construct
  misc_feature 1..80: note = Artificially Synthesized Probe
  source 1..80: mol_type = other DNA
ctcacgtgacttcatctgagtcactctctgagcctcattcctcatatataaaaacagtctgggccaggcacgggggctcc

SEQ ID NO: 44943 - DNA, 80 bp, synthetic construct; identical to SEQ ID NO: 22872
  misc_feature 1..80: note = Artificially Synthesized Probe
  source 1..80: mol_type = other DNA

SEQ ID NO: 44944 - DNA, 80 bp, synthetic construct
  misc_feature 1..80: note = Artificially Synthesized Probe
  source 1..80: mol_type = other DNA
gttatttccacttttcagcttctaaaacctgttaattttgtaatatgctcagggtgggagacagctcagcccaggaaatg

SEQ ID NO: 44945 - DNA, 80 bp, synthetic construct
  misc_feature 1..80: note = Artificially Synthesized Probe
  source 1..80: mol_type = other DNA
acgtggccatagtttaggtgactaagcaggtactatttggtgtgaattaaggctgcagagcttgaaggtcacagtctttt

SEQ ID NO: 44946 - DNA, 80 bp, synthetic construct
  misc_feature 1..80: note = Artificially Synthesized Probe
  source 1..80: mol_type = other DNA
ggattacaggtgcatgccactatgcccggctaatttttgtatttttttaagtagaggcggggtttcaccatgttggtcag

SEQ ID NO: 44947 - DNA, 80 bp, synthetic construct; identical to SEQ ID NO: 22873
  misc_feature 1..80: note = Artificially Synthesized Probe
  source 1..80: mol_type = other DNA

SEQ ID NO: 44948 - DNA, 80 bp, synthetic construct
  misc_feature 1..80: note = Artificially Synthesized Probe
  source 1..80: mol_type = other DNA
cagcctcccgagtagctgggattacaggcgcccgccaccacgcccggctaattttgtatttttagtagagaagaggtttc

SEQ ID NO: 44949 - DNA, 80 bp, synthetic construct
  misc_feature 1..80: note = Artificially Synthesized Probe
  source 1..80: mol_type = other DNA
ctaaagataagctaacttcaggtcccttcaacctaaaatgaacatttattttggctttcatcagtttttggaatctatga

SEQ ID NO: 44950 - DNA, 80 bp, synthetic construct; identical to SEQ ID NO: 22874
  misc_feature 1..80: note = Artificially Synthesized Probe
  source 1..80: mol_type = other DNA

SEQ ID NO: 44951 - DNA, 80 bp, synthetic construct
  misc_feature 1..80: note = Artificially Synthesized Probe
  source 1..80: mol_type = other DNA
ccagcttgaccaacatggagaaaccccatctctactaaaaatacaaaattagccaggcgtagtggcacatgcctgtaatc

SEQ ID NO: 44952 - DNA, 80 bp, synthetic construct
  misc_feature 1..80: note = Artificially Synthesized Probe
  source 1..80: mol_type = other DNA
tgtaatgtggcagctatctcggtgtatataagctcaatggccaagttctatttctctccaaataaaatactcagaccaaa

SEQ ID NO: 44953 - DNA, 80 bp, synthetic construct
  misc_feature 1..80: note = Artificially Synthesized Probe
  source 1..80: mol_type = other DNA
atggtgtgtgcctgtagtcccaactactcaggaggctgaggcaggagaatcacttgaacccaggaggcagagattgcagt

SEQ ID NO: 44954 - DNA, 80 bp, synthetic construct
  misc_feature 1..80: note = Artificially Synthesized Probe
  source 1..80: mol_type = other DNA
gctgaggtgggaggattgcttgagcctgggagatggaggctgcagtgagccgagatggtgccactgcactccagcctggg

SEQ ID NO: 44955 - DNA, 80 bp, synthetic construct
  misc_feature 1..80: note = Artificially Synthesized Probe
  source 1..80: mol_type = other DNA
actgcaagctccctgcctgattctcctgcctcagcctgccgagtgcctgcgattgcaggcgcgcgctgccatgcctgact

SEQ ID NO: 44956 - DNA, 80 bp, synthetic construct
  misc_feature 1..80: note = Artificially Synthesized Probe
  source 1..80: mol_type = other DNA
gcagtggcgtgatctcggctcactataacctccacctcctagccgcctgccttggcctcccaaagtgcccagagtgcagc

SEQ ID NO: 44957 - DNA, 80 bp, synthetic construct
  misc_feature 1..80: note = Artificially Synthesized Probe
  source 1..80: mol_type = other DNA
aggagactccattttgttctgtactgggagaaaatcttctgccttgggatcctgttgatctgtgaccttacccccaaccc

SEQ ID NO: 44958 - DNA, 80 bp, synthetic construct
  misc_feature 1..80: note = Artificially Synthesized Probe
  source 1..80: mol_type = other DNA
ccgcagggtcctctgcctaggaaaaccagagacctttgttcacttgtttatctgctgaccttccctccactattgtccta

SEQ ID NO: 44959 - DNA, 80 bp, synthetic construct
  misc_feature 1..80: note = Artificially Synthesized Probe
  source 1..80: mol_type = other DNA
gctgttataaccccctgctccagaggaggagagcggggcccacaggggctgtgtcatttgcctagagtcacgcaggagtg

SEQ ID NO: 44960 - DNA, 80 bp, synthetic construct; identical to SEQ ID NO: 22876
  misc_feature 1..80: note = Artificially Synthesized Probe
  source 1..80: mol_type = other DNA

SEQ ID NO: 44961 - DNA, 80 bp, synthetic construct
  misc_feature 1..80: note = Artificially Synthesized Probe
  source 1..80: mol_type = other DNA
atccagaaatccagattgctaggtaaaacctggttttaaatggatccaattttgttttaaccctctgtagcccaaacaaa

SEQ ID NO: 44962 - DNA, 80 bp, synthetic construct
  misc_feature 1..80: note = Artificially Synthesized Probe
  source 1..80: mol_type = other DNA
agcccattgatatgaataattaatttctgcgtgctcactgccagcccacaaaggttaccaacaagctcggcattcaggaa

SEQ ID NO: 44963 - DNA, 80 bp, synthetic construct
  misc_feature 1..80: note = Artificially Synthesized Probe
  source 1..80: mol_type = other DNA
gctcattagagatgggacatgcggcggctttccctgctgtcagcaggagtgggctctggattcctcaagatgctttaaaa

SEQ ID NO: 44964 - DNA, 80 bp, synthetic construct; identical to SEQ ID NO: 22877
  misc_feature 1..80: note = Artificially Synthesized Probe
  source 1..80: mol_type = other DNA

SEQ ID NO: 44965 - DNA, 80 bp, synthetic construct
  misc_feature 1..80: note = Artificially Synthesized Probe
  source 1..80: mol_type = other DNA
acgccaacttacttgactattgatattatattatcatcgtcccctagcctacaaatataaacactgaggtgcaaaaaggt

SEQ ID NO: 44966 - DNA, 80 bp, synthetic construct
  misc_feature 1..80: note = Artificially Synthesized Probe
  source 1..80: mol_type = other DNA
agcctggctaacacggtgaaaccccgtctctactaaaaatacaaaaaattagctgggcgaggtggcgggcgcctgtagtc

SEQ ID NO: 44967 - DNA, 80 bp, synthetic construct
  misc_feature 1..80: note = Artificially Synthesized Probe
  source 1..80: mol_type = other DNA
ttgctctgtggcccaggctggagtgcagtggtgcaatctcagttcactgcaacctccacctcccaggttcaagcgattct

SEQ ID NO: 44968 - DNA, 80 bp, synthetic construct
  misc_feature 1..80: note = Artificially Synthesized Probe
  source 1..80: mol_type = other DNA
gcattacaggaacgtgctaccacgcccgactaatttttgtatttttagtggagacggggtttcaccatgttggccaggct

SEQ ID NO: 44969 - DNA, 80 bp, synthetic construct
  misc_feature 1..80: note = Artificially Synthesized Probe
  source 1..80: mol_type = other DNA
tttcatttaacctttgcaacaccaagtgaggtacaatgatccccattgtatagaaaagaaaataagcttatagacaggtg

SEQ ID NO: 44970 - DNA, 80 bp, synthetic construct; identical to SEQ ID NO: 22878
  misc_feature 1..80: note = Artificially Synthesized Probe
  source 1..80: mol_type = other DNA

SEQ ID NO: 44971 - DNA, 80 bp, synthetic construct
  misc_feature 1..80: note = Artificially Synthesized Probe
  source 1..80: mol_type = other DNA
cctacacttctgctcaacattcggcatgccaaaaccatctcattatagtcagctgtccccaaattacaaatggacgattt

SEQ ID NO: 44972 - DNA, 80 bp, synthetic construct
  misc_feature 1..80: note = Artificially Synthesized Probe
  source 1..80: mol_type = other DNA
aaatccccaaggaaatcgcgtttttcagagagctgagcaatcagatctttaggccttccaccctcacaaatgaagttaat

SEQ ID NO: 44973 - DNA, 80 bp, synthetic construct
  misc_feature 1..80: note = Artificially Synthesized Probe
  source 1..80: mol_type = other DNA
cctctgcctcctgggttcaggcaattatcctgcctcagcctctcgagtagctgggattacaggtgcctgccaccacgcct

SEQ ID NO: 44974 - DNA, 80 bp, synthetic construct; identical to SEQ ID NO: 22879
  misc_feature 1..80: note = Artificially Synthesized Probe
  source 1..80: mol_type = other DNA

SEQ ID NO: 44975 - DNA, 80 bp, synthetic construct
  misc_feature 1..80: note = Artificially Synthesized Probe
  source 1..80: mol_type = other DNA
ttcttgccatggctggttgtatagcacgatgtgcctatgtgaccagcctcccattaaaatctcagactaatacaaaagtt

SEQ ID NO: 44976 - DNA, 80 bp, synthetic construct
  misc_feature 1..80: note = Artificially Synthesized Probe
  source 1..80: mol_type = other DNA
aaaaaaaaaaaaaaatacaaaacttggccgggcgtggtggcgggcacctgtaatcccagctactcaggaggctgaggcag

SEQ ID NO: 44977 - DNA, 80 bp, synthetic construct
  misc_feature 1..80: note = Artificially Synthesized Probe
  source 1..80: mol_type = other DNA
gcaaaataaaaggccttgggctggactcaggcggaaagaaagtgctggaggaaatgaaagaacaaagcgggctgtctgtg

SEQ ID NO: 44978 - DNA, 80 bp, synthetic construct
  misc_feature 1..80: note = Artificially Synthesized Probe
  source 1..80: mol_type = other DNA
ataaaataattgatttttaaaactgaggaaagaataaccccaccacttagcactaagagatcttgggcttgctggtggac

SEQ ID NO: 44979 - DNA, 80 bp, synthetic construct
  misc_feature 1..80: note = Artificially Synthesized Probe
  source 1..80: mol_type = other DNA
tgttctaaaaattcaacgtgacagcgtaggtaaagcacttgacctagtgctttgcagagagtaggtactggagtatcttt

SEQ ID NO: 44980 - DNA, 80 bp, synthetic construct
  misc_feature 1..80: note = Artificially Synthesized Probe
  source 1..80: mol_type = other DNA
gatcgacaccagcctggccaacatggtgaaatcccatctctactcaaaatacaaaaaattagccgggcgtggtggcgggc

SEQ ID NO: 44981 - DNA, 80 bp, synthetic construct; identical to SEQ ID NO: 22880
  misc_feature 1..80: note = Artificially Synthesized Probe
  source 1..80: mol_type = other DNA

SEQ ID NO: 44982 - DNA, 80 bp, synthetic construct
  misc_feature 1..80: note = Artificially Synthesized Probe
  source 1..80: mol_type = other DNA
tgcaaagtcaggtggtcacggggatttctgcttatgattctagtatggtatacagagcccagtttccaaaacagccaaat

SEQ ID NO: 44983 - DNA, 80 bp, synthetic construct
  misc_feature 1..80: note = Artificially Synthesized Probe
  source 1..80: mol_type = other DNA
cagggaatgtatttttttcactgaacttctcattcgtgactattctaaaatcaaccaggaacttatcgagtgccggccat

SEQ ID NO: 44984 - DNA, 80 bp, synthetic construct; identical to SEQ ID NO: 22881
  misc_feature 1..80: note = Artificially Synthesized Probe
  source 1..80: mol_type = other DNA

SEQ ID NO: 44985 - DNA, 80 bp, synthetic construct
  misc_feature 1..80: note = Artificially Synthesized Probe
  source 1..80: mol_type = other DNA
aggtgactaaggagataaaaacagaaactgtcaagagaggttcccaggaaagtgccttaaaaggcagacaaacagccacc

SEQ ID NO: 44986 - DNA, 80 bp, synthetic construct
  misc_feature 1..80: note = Artificially Synthesized Probe
  source 1..80: mol_type = other DNA
tactctcggccggactgctggccgctggaattctgttacatgtgagataaataagcctctatcttgtttaagctactttt

SEQ ID NO: 44987 - DNA, 80 bp, synthetic construct
  misc_feature 1..80: note = Artificially Synthesized Probe
  source 1..80: mol_type = other DNA
aatgagcaatggcagaaaggatctgcgtagaaaacagaatataagaagccagatggtggctttgcagacgccaagagaga

SEQ ID NO: 44988 - DNA, 80 bp, synthetic construct; identical to SEQ ID NO: 22670
  misc_feature 1..80: note = Artificially Synthesized Probe
  source 1..80: mol_type = other DNA

SEQ ID NO: 44989 - DNA, 80 bp, synthetic construct; identical to SEQ ID NO: 22882
  misc_feature 1..80: note = Artificially Synthesized Probe
  source 1..80: mol_type = other DNA

SEQ ID NO: 44990 - DNA, 80 bp, synthetic construct
  misc_feature 1..80: note = Artificially Synthesized Probe
  source 1..80: mol_type = other DNA
aagcaattctcctgcctcagcctcccaagtagctgggattacaggtatgtgccactctgcccggataatttttgtatttt

SEQ ID NO: 44991 - DNA, 80 bp, synthetic construct
  misc_feature 1..80: note = Artificially Synthesized Probe
  source 1..80: mol_type = other DNA
cggcctcaaatggcttcttaatatctcttcacaatagggatgggaaaaaattactctatcacagctgaggctgaaaattc

SEQ ID NO: 44992 - DNA, 80 bp, synthetic construct
  misc_feature 1..80: note = Artificially Synthesized Probe
  source 1..80: mol_type = other DNA
taaagattaaaaataaaaagtctcagggccaagtgtggtggctcatatctgtaatctcagcacttgtggaggccaaggag

SEQ ID NO: 44993 - DNA, 80 bp, synthetic construct
  misc_feature 1..80: note = Artificially Synthesized Probe
  source 1..80: mol_type = other DNA
ggctgcagtgagctgtgttcatgccactgcactccagcttgggcaacagagtaagaccctgtcttaaaataaaataggcc

SEQ ID NO: 44994 - DNA, 80 bp, synthetic construct; identical to SEQ ID NO: 22883
  misc_feature 1..80: note = Artificially Synthesized Probe
  source 1..80: mol_type = other DNA

SEQ ID NO: 44995 - DNA, 80 bp, synthetic construct
  misc_feature 1..80: note = Artificially Synthesized Probe
  source 1..80: mol_type = other DNA
cacagagacacgaataccctccatcgtcactctacgccaggtgttctgctacactctttaattattctcttgcatttaat

SEQ ID NO: 44996 - DNA, 80 bp, synthetic construct
  misc_feature 1..80: note = Artificially Synthesized Probe
  source 1..80: mol_type = other DNA
ggtgaccatgggcaatgttattgaagttctccaggcctcgtgattctcatggaaaatggaaataataacagcacctgtat

SEQ ID NO: 44997 - DNA, 80 bp, synthetic construct
  misc_feature 1..80: note = Artificially Synthesized Probe
  source 1..80: mol_type = other DNA
ggcaggagagcaagcaagcctgcgggggaaacttccaaacgctttaaaaccaccagatctcatgagaactcccctcgtga

SEQ ID NO: 44998 - DNA, 80 bp, synthetic construct; identical to SEQ ID NO: 22884
  misc_feature 1..80: note = Artificially Synthesized Probe
  source 1..80: mol_type = other DNA

SEQ ID NO: 44999 - DNA, 80 bp, synthetic construct
  misc_feature 1..80: note = Artificially Synthesized Probe
  source 1..80: mol_type = other DNA
tttcctggtaccaagcaaggctacaaggtactagaaggaagatactaagcgaattggcagactaacttatttacactctg

SEQ ID NO: 45000 - DNA, 80 bp, synthetic construct
  misc_feature 1..80: note = Artificially Synthesized Probe
  source 1..80: mol_type = other DNA
accttgccggttctttggcctggaatgcactgcccccaggttttttatggctgaattcttcttgtcatttaaatcttcgt

SEQ ID NO: 45001 - DNA, 80 bp, synthetic construct
  misc_feature 1..80: note = Artificially Synthesized Probe
  source 1..80: mol_type = other DNA
gcctggattgcccaataaaacctgaccttaaggacctctgaatgcagataatgagtgtgattgctggtggaggccaatcc

SEQ ID NO: 45002 - DNA, 80 bp, synthetic construct; identical to SEQ ID NO: 22885
  misc_feature 1..80: note = Artificially Synthesized Probe
  source 1..80: mol_type = other DNA

SEQ ID NO: 45003 - DNA, 80 bp, synthetic construct
  misc_feature 1..80: note = Artificially Synthesized Probe
  source 1..80: mol_type = other DNA
acggtgaaaccctgtctctactaaaaatacaaaaaattagacaggcgtggtggcgggcacctgtagtcccagctactcag

SEQ ID NO: 45004 - DNA, 80 bp, synthetic construct
  misc_feature 1..80: note = Artificially Synthesized Probe
  source 1..80: mol_type = other DNA
cccaggctggtctcaaattcccagcctcaagcagtcctcccacctcagcctcccaaagtgctagaattacaggtgtgagc

SEQ ID NO: 45005 - DNA, 80 bp, synthetic construct
  misc_feature 1..80: note = Artificially Synthesized Probe
  source 1..80: mol_type = other DNA
ggagttcaagaccagcccggccaatatggtgaaaccccatctcatctaaaatacaaaaattagccaggcgtagtggcaca

SEQ ID NO: 45006 - DNA, 80 bp, synthetic construct; identical to SEQ ID NO: 22886
  misc_feature 1..80: note = Artificially Synthesized Probe
  source 1..80: mol_type = other DNA

SEQ ID NO: 45007 - DNA, 80 bp, synthetic construct
  misc_feature 1..80: note = Artificially Synthesized Probe
  source 1..80: mol_type = other DNA
ttcaaacctttttgttcatctcacagcaagaaatacattctacatcagctcccagtgtacacatacgcgtccgcatagaa

SEQ ID NO: 45008 - DNA, 80 bp, synthetic construct
  misc_feature 1..80: note = Artificially Synthesized Probe
  source 1..80: mol_type = other DNA
cacatgcaaaattgcagcatccacggtggtaatttggggaatgctgtagagaaaaatgaagcaacaaaggacaagggtgg

SEQ ID NO: 45009 - DNA, 80 bp, synthetic construct
  misc_feature 1..80: note = Artificially Synthesized Probe
  source 1..80: mol_type = other DNA
gggctctttctcctagattgtgtgtgcacacatgtatgtggcagtgtgcacatgtatgtacatgtgcaggtgtctgtgta

SEQ ID NO: 45010 - DNA, 80 bp, synthetic construct; identical to SEQ ID NO: 22887
  misc_feature 1..80: note = Artificially Synthesized Probe
  source 1..80: mol_type = other DNA

SEQ ID NO: 45011 - DNA, 80 bp, synthetic construct
  misc_feature 1..80: note = Artificially Synthesized Probe
  source 1..80: mol_type = other DNA
gcagtgtgtcacgtatatacatgtgctgctgtgcgtgtgtgtgcatgcatgtgacagtgtaccatgtgtatacgtgtgca

SEQ ID NO: 45012 - DNA, 80 bp, synthetic construct
  misc_feature 1..80: note = Artificially Synthesized Probe
  source 1..80: mol_type = other DNA
gtccctagttcctgcaggcctggcacgtggaaggtgctccggcaatactcacaggccagaggaaccaactggggcatggg

SEQ ID NO: 45013 - DNA, 80 bp, synthetic construct
  misc_feature 1..80: note = Artificially Synthesized Probe
  source 1..80: mol_type = other DNA
ctcacgaggaggctttggagacagaggcagaacccgaacatgtagctgtgcagtgtgccacaggagcttgccctgcagag

SEQ ID NO: 45014 - DNA, 80 bp, synthetic construct
  misc_feature 1..80: note = Artificially Synthesized Probe
  source 1..80: mol_type = other DNA
gccgatttctaacgtgcatcaaggtgccctatgtgctagagtgtcctaagggagacaggcgacgactcacagaaataaaa

SEQ ID NO: 45015 - DNA, 80 bp, synthetic construct; identical to SEQ ID NO: 22888
  misc_feature 1..80: note = Artificially Synthesized Probe
  source 1..80: mol_type = other DNA

SEQ ID NO: 45016 - DNA, 80 bp, synthetic construct
  misc_feature 1..80: note = Artificially Synthesized Probe
  source 1..80: mol_type = other DNA
ctaataatggagattttggaacaatcccagcatcaatgattttttttcctccttcactgagcaggaaggcatcttaaatt

SEQ ID NO: 45017 - DNA, 80 bp, synthetic construct
  misc_feature 1..80: note = Artificially Synthesized Probe
  source 1..80: mol_type = other DNA
agagctcggtggacgctcaattccaggcaatcatttattcagccattatgcgttgagctttgactgctgcaaagcaccgt

SEQ ID NO: 45018 - DNA, 80 bp, synthetic construct
  misc_feature 1..80: note = Artificially Synthesized Probe
  source 1..80: mol_type = other DNA
gagcacttaatctttctgagcttcggtttcctcttttatccagtgaagacgctggactagacatggtctctgggcaccag

SEQ ID NO: 45019 - DNA, 80 bp, synthetic construct; identical to SEQ ID NO: 22889
  misc_feature 1..80: note = Artificially Synthesized Probe
  source 1..80: mol_type = other DNA

SEQ ID NO: 45020 - DNA, 80 bp, synthetic construct
  misc_feature 1..80: note = Artificially Synthesized Probe
  source 1..80: mol_type = other DNA
gcaaagcgcaaaggcccgggcgccggccctgccgccgccgccagttcattttcatagagtcgcccgagcttaacgtcgcc

SEQ ID NO: 45021 - DNA, 80 bp, synthetic construct
  misc_feature 1..80: note = Artificially Synthesized Probe
  source 1..80: mol_type = other DNA
gtcgagcggggtctggggggggcgcccacctgcggagaagtcgtcctcgcggtcggagctgtgccggctgccgtcgctgt

SEQ ID NO: 45022 - DNA, 80 bp, synthetic construct
  misc_feature 1..80: note = Artificially Synthesized Probe
  source 1..80: mol_type = other DNA
ggcggcccttggcctcggcctcccgctgctccaggtcgcgggtcccccgctgcggccgccgccccccggggatcaggtgc

SEQ ID NO: 45023 - DNA, 80 bp, synthetic construct; identical to SEQ ID NO: 22671
  misc_feature 1..80: note = Artificially Synthesized Probe
  source 1..80: mol_type = other DNA

SEQ ID NO: 45024 - DNA, 80 bp, synthetic construct
  misc_feature 1..80: note = Artificially Synthesized Probe
  source 1..80: mol_type = other DNA
cgaggggcgcgtcgtcctcccgggcccggaaccgcagctggggctgcaggagctgccggtggacggcgtcggcccagctc

SEQ ID NO: 45025 - DNA, 80 bp, synthetic construct; identical to SEQ ID NO: 22890
  misc_feature 1..80: note = Artificially Synthesized Probe
  source 1..80: mol_type = other DNA

SEQ ID NO: 45026 - DNA, 80 bp, synthetic construct
  misc_feature 1..80: note = Artificially Synthesized Probe
  source 1..80: mol_type = other DNA
tccgcgccgacccttccccgcggcccccgaagagaccagagggaaagtcaagtgtccccttccgccctcgcgcctcctcc

SEQ ID NO: 45027 - DNA, 80 bp, synthetic construct
  misc_feature 1..80: note = Artificially Synthesized Probe
  source 1..80: mol_type = other DNA
tggggaccccggaggcctccccgagcacagccacggcatccaggcatcggatgggaagggcgctgtggatgtcacggctc

SEQ ID NO: 45028 - DNA, 80 bp, synthetic construct
  misc_feature 1..80: note = Artificially Synthesized Probe
  source 1..80: mol_type = other DNA
ggaccagctccacgggcccctcccgcctctccagggcccatcctggagggccaagggtctacggctcactggacccagga

SEQ ID NO: 45029 - DNA, 80 bp, synthetic construct; identical to SEQ ID NO: 22672
  misc_feature 1..80: note = Artificially Synthesized Probe
  source 1..80: mol_type = other DNA

SEQ ID NO: 45030 - DNA, 80 bp, synthetic construct
  misc_feature 1..80: note = Artificially Synthesized Probe
  source 1..80: mol_type = other DNA
aaatgcctggggcagctcccccagccacacctgcaggcttgggggctccttccaaaatgtctggggcctcattgcctctg

SEQ ID NO: 45031 - DNA, 80 bp, synthetic construct
  misc_feature 1..80: note = Artificially Synthesized Probe
  source 1..80: mol_type = other DNA
aggaccagcgcccttctaccctccctaggtaccaagaagcggcaccttgccaagttcactcagagcagggttcccgcctt

SEQ ID NO: 45032 - DNA, 80 bp, synthetic construct
  misc_feature 1..80: note = Artificially Synthesized Probe
  source 1..80: mol_type = other DNA
agtactcatgaggccccagcagtgaggtctgcccactcggcaggtgggtaagtgctgtggaaaagagggagggtcgcccg

SEQ ID NO: 45033 - DNA, 80 bp, synthetic construct
  misc_feature 1..80: note = Artificially Synthesized Probe
  source 1..80: mol_type = other DNA
acaaaagacgtacgcattccagttcttggaagctggcttccctcgagtctggagtgctgggtttgggagttttctattgc

SEQ ID NO: 45034 - DNA, 80 bp, synthetic construct
  misc_feature 1..80: note = Artificially Synthesized Probe
  source 1..80: mol_type = other DNA
cctgctgggcacagcccaccctgctgggcacagtgactggaggttccaggctgcacagtccctggctcctgactcctgcc

SEQ ID NO: 45035 - DNA, 80 bp, synthetic construct
  misc_feature 1..80: note = Artificially Synthesized Probe
  source 1..80: mol_type = other DNA
agaagacgcacgatgaagctttcttcccaccgggaaacaaggaagggcggtgggcagccgggccaggccagacttctatt

SEQ ID NO: 45036 - DNA, 80 bp, synthetic construct; identical to SEQ ID NO: 22673
  misc_feature 1..80: note = Artificially Synthesized Probe
  source 1..80: mol_type = other DNA

SEQ ID NO: 45037 - DNA, 80 bp, synthetic construct
  misc_feature 1..80: note = Artificially Synthesized Probe
  source 1..80: mol_type = other DNA
ccatgcccggctattttttttttttttgtatttttagtagacacggggtttcaccatgttggccaggctggtctcgaacg

SEQ ID NO: 45038 - DNA, 80 bp, synthetic construct
  misc_feature 1..80: note = Artificially Synthesized Probe
  source 1..80: mol_type = other DNA
ggaccttcttctaagaccatcatgagcctgaagcttccccgaatggcccaagaggggctctccaccccgcccttcctcag

SEQ ID NO: 45039 - DNA, 80 bp, synthetic construct
  misc_feature 1..80: note = Artificially Synthesized Probe
  source 1..80: mol_type = other DNA
gtcacctgaagctgcactcaatctccttacaccctgccggctcagcctgagtccccaccgccggccagcatctggcctgg

SEQ ID NO: 45040 - DNA, 80 bp, synthetic construct; identical to SEQ ID NO: 22674
  misc_feature 1..80: note = Artificially Synthesized Probe
  source 1..80: mol_type = other DNA

SEQ ID NO: 45041 - DNA, 80 bp, synthetic construct
  misc_feature 1..80: note = Artificially Synthesized Probe
  source 1..80: mol_type = other DNA
gggaaaaggaaagaaaagtagaaacgcgaagttcaataccgagagccctggctgaacccacaaacccagatgccacgtgt

SEQ ID NO: 45042 - DNA, 80 bp, synthetic construct
  misc_feature 1..80: note = Artificially Synthesized Probe
  source 1..80: mol_type = other DNA
cagaaaccagaggccctgcactatttaaaggctcagttctgatcatgagacctttccatctgaacagattgtttaatccc

SEQ ID NO: 45043 - DNA, 80 bp, synthetic construct; identical to SEQ ID NO: 22675
  misc_feature 1..80: note = Artificially Synthesized Probe
  source 1..80: mol_type = other DNA

SEQ ID NO: 45044 - DNA, 80 bp, synthetic construct
  misc_feature 1..80: note = Artificially Synthesized Probe
  source 1..80: mol_type = other DNA
gacgtccctccgtccaccacagcgctgacccctgcgtccacgacacggacacactgtggcagacgtccctccgtccgcca

SEQ ID NO: 45045 - DNA, 80 bp, synthetic construct
  misc_feature 1..80: note = Artificially Synthesized Probe
  source 1..80: mol_type = other DNA
ctggacctgtggggagacaggaaggcggaggctgggctccctgtcctaggcctcgtccttgctgactccagcctgtgttg

SEQ ID NO: 45046 - DNA, 80 bp, synthetic construct
  misc_feature 1..80: note = Artificially Synthesized Probe
  source 1..80: mol_type = other DNA
caccacccctgcccagagatccccatcagacacggagccaccaggcactgccagaggcaaacccagctaaggaattcttg

SEQ ID NO: 45047 - DNA, 80 bp, synthetic construct
  misc_feature 1..80: note = Artificially Synthesized Probe
  source 1..80: mol_type = other DNA
aggtcagtttcttgccaaccctgacgtttggggatggatggtgagctctgggctggtgcctgctggcctcagcaggggct

SEQ ID NO: 45048 - DNA, 80 bp, synthetic construct
  misc_feature 1..80: note = Artificially Synthesized Probe
  source 1..80: mol_type = other DNA
cagcactttccagggctgatgtcacctctgggaggtcaagtatgccccatggcaggagctgaaacaaaacgaggggccag

SEQ ID NO: 45049 - DNA, 80 bp, synthetic construct; identical to SEQ ID NO: 22676
  misc_feature 1..80: note = Artificially Synthesized Probe
  source 1..80: mol_type = other DNA

SEQ ID NO: 45050 - DNA, 80 bp, synthetic construct
  misc_feature 1..80: note = Artificially Synthesized Probe
  source 1..80: mol_type = other DNA
cacatggacggaacgcctggtgcccggcgggcactgggcccacagtcagatgggtggtccctgaagggaagcctcgagcc

SEQ ID NO: 45051 - DNA, 80 bp, synthetic construct
  misc_feature 1..80: note = Artificially Synthesized Probe
  source 1..80: mol_type = other DNA
cagaggcaggcgtctccccgtgcgctgtttgcactcccggagtggaaagcagggtccacctgccgagaagaaacctccct

SEQ ID NO: 45052 - DNA, 80 bp, synthetic construct
  misc_feature 1..80: note = Artificially Synthesized Probe
  source 1..80: mol_type = other DNA
agcccccgcagccccccgagccccgcagcgcccccgagcccccaccccccggaacctccagcccccgcgggcaccttgtt

SEQ ID NO: 45053 - DNA, 80 bp, synthetic construct; identical to SEQ ID NO: 22677
  misc_feature 1..80: note = Artificially Synthesized Probe
  source 1..80: mol_type = other DNA

SEQ ID NO: 45054 - DNA, 80 bp, synthetic construct
  misc_feature 1..80: note = Artificially Synthesized Probe
  source 1..80: mol_type = other DNA
aagccccaaccccgggtttcatccctggcaagggcgctgctcctccccgaccccgccgccctccctcgcaataaagttta

SEQ ID NO: 45055 - DNA, 80 bp, synthetic construct
  misc_feature 1..80: note = Artificially Synthesized Probe
  source 1..80: mol_type = other DNA
cgcacttccccacccccaacttctgccccaggcaccttcctcagagccagcttggtgacccggccagacccttgtggacc

SEQ ID NO: 45056 - DNA, 80 bp, synthetic construct; identical to SEQ ID NO: 22650
  misc_feature 1..80: note = Artificially Synthesized Probe
  source 1..80: mol_type = other DNA

SEQ ID NO: 45057 - DNA, 80 bp, synthetic construct
  misc_feature 1..80: note = Artificially Synthesized Probe
  source 1..80: mol_type = other DNA
gcgggtcacacgtccagccagagatgcctcttgaggggtcactttgaaccatggccctttgcacctcaccaaaaaaggtt

SEQ ID NO: 45058 - DNA, 80 bp, synthetic construct; identical to SEQ ID NO: 22678
  misc_feature 1..80: note = Artificially Synthesized Probe
  source 1..80: mol_type = other DNA

SEQ ID NO: 45059 - DNA, 80 bp, synthetic construct
  misc_feature 1..80: note = Artificially Synthesized Probe
  source 1..80: mol_type = other DNA
cagtatttgcaccgtggcaaccgcgaaccaggtctttcaaacgcccgactgcatgtgagcctcacattcttgtcatgttg

SEQ ID NO: 45060 - DNA, 80 bp, synthetic construct
  misc_feature 1..80: note = Artificially Synthesized Probe
  source 1..80: mol_type = other DNA
cactgtgccttactcaaacatggatgatgctttggattcaggaaaaagagctgggtcaggacatttcttggttgacccca

SEQ ID NO: 45061 - DNA, 80 bp, synthetic construct
  misc_feature 1..80: note = Artificially Synthesized Probe
  source 1..80: mol_type = other DNA
agggaccaggcatcatggattaagtcacttacccctcccaactgtatgaagtcagtaccagcatccccgctttacctctg

SEQ ID NO: 45062 - DNA, 80 bp, synthetic construct
  misc_feature 1..80: note = Artificially Synthesized Probe
  source 1..80: mol_type = other DNA
gtggaggggggccttggggcgtcctgcctgggctagaaccgggcctcagtcttcactgtccctgcaggggcggccagacc

SEQ ID NO: 45063 - DNA, 80 bp, synthetic construct; identical to SEQ ID NO: 22679
  misc_feature 1..80: note = Artificially Synthesized Probe
  source 1..80: mol_type = other DNA

SEQ ID NO: 45064 - DNA, 80 bp, synthetic construct
  misc_feature 1..80: note = Artificially Synthesized Probe
  source 1..80: mol_type = other DNA
cactgcagcctccgcctccccagctcaagcaactctcctgcctcagccccttgagtagatgggactacacacacccacca

SEQ ID NO: 45065 - DNA, 80 bp, synthetic construct
  misc_feature 1..80: note = Artificially Synthesized Probe
  source 1..80: mol_type = other DNA
gggcctggctgcgtgcccgaccctggggtgggggttaaggcatcacagagacgaatcaaaagtcagtgcttgacaaaggg

SEQ ID NO: 45066 - DNA, 80 bp, synthetic construct; identical to SEQ ID NO: 22680
  misc_feature 1..80: note = Artificially Synthesized Probe
  source 1..80: mol_type = other DNA

SEQ ID NO: 45067 - DNA, 80 bp, synthetic construct
  misc_feature 1..80: note = Artificially Synthesized Probe
  source 1..80: mol_type = other DNA
tgtaactggctggtaggatgccattataactgctctccacgtttgcgccacagtgctcctggtgccgtgacttaacttca

SEQ ID NO: 45068 - DNA, 80 bp, synthetic construct
  misc_feature 1..80: note = Artificially Synthesized Probe
  source 1..80: mol_type = other DNA
gtgacaccccatagcccatcaacccagcttcccacgagggaagaggtgtggggactctgagctgttctctctcctcctaa

SEQ ID NO: 45069 - DNA, 80 bp, synthetic construct
  misc_feature 1..80: note = Artificially Synthesized Probe
  source 1..80: mol_type = other DNA
gtaccacaggctcaatacttgtctaggtaaagcaagctcggactggatgaacgatggccagctggtctccatggtgacat

SEQ ID NO: 45070 - DNA, 80 bp, synthetic construct
  misc_feature 1..80: note = Artificially Synthesized Probe
  source 1..80: mol_type = other DNA
tggaagaagatctgtgcaagacagatgtccccagcaaaagcagaagtctgaattctagtcgctgcagcccaccacggacc

SEQ ID NO: 45071 - DNA, 80 bp, synthetic construct
  misc_feature 1..80: note = Artificially Synthesized Probe
  source 1..80: mol_type = other DNA
cccccaccccttccatcccctacacctgctccccccaccccttccatcccccacacctgttcccccaccccttccatccc

SEQ ID NO: 45072 - DNA, 80 bp, synthetic construct; identical to SEQ ID NO: 22681
  misc_feature 1..80: note = Artificially Synthesized Probe
  source 1..80: mol_type = other DNA

SEQ ID NO: 45073 - DNA, 80 bp, synthetic construct
  misc_feature 1..80: note = Artificially Synthesized Probe
  source 1..80: mol_type = other DNA
agctgtgactgaggtaaaatcgggttaaggtgttcagtggcggcatcaacgaggaaaaaaggtcacatcctgccctgtgc

SEQ ID NO: 45074 - DNA, 80 bp, synthetic construct
  misc_feature 1..80: note = Artificially Synthesized Probe
  source 1..80: mol_type = other DNA
aaatgcagctgccgctttcctggagtgacctcctttttcccaccagaacgacgctcctctcccccagcccacacttgaac

SEQ ID NO: 45075 - DNA, 80 bp, synthetic construct; identical to SEQ ID NO: 22682
  misc_feature 1..80: note = Artificially Synthesized Probe
  source 1..80: mol_type = other DNA

SEQ ID NO: 45076 - DNA, 80 bp, synthetic construct
  misc_feature 1..80: note = Artificially Synthesized Probe
  source 1..80: mol_type = other DNA
ggacccgaggctttgggggctgcagagagcctgccagtggctcctgcccaaagacaggtgcaggctccaggatgagagag

SEQ ID NO: 45077 - DNA, 80 bp, synthetic construct
  misc_feature 1..80: note = Artificially Synthesized Probe
  source 1..80: mol_type = other DNA
gttctgaccatttcctgtaccgaccctaaccaaaacctgcggactggaaggccaaatgtcttcccagaatgagacactga

SEQ ID NO: 45078 - DNA, 80 bp, synthetic construct
  misc_feature 1..80: note = Artificially Synthesized Probe
  source 1..80: mol_type = other DNA
cttccttccatccttccttccttccatccatccacccatccatccatccatccacccatccatccacccacccacccatc

SEQ ID NO: 45079 - DNA, 80 bp, synthetic construct
  misc_feature 1..80: note = Artificially Synthesized Probe
  source 1..80: mol_type = other DNA
gcccgggcggtgccagggtacctgcgccatgacgtcatgggaccgtcaccctccgccagccacgggcccgggcggtgcca

SEQ ID NO: 45080 - DNA, 80 bp, synthetic construct
  misc_feature 1..80: note = Artificially Synthesized Probe
  source 1..80: mol_type = other DNA
caaggtaacctgctgtcctcccaactccccaaaggcctgtgccggctcatagggcagtcccgagtacgtgctgcttctca

SEQ ID NO: 45081 - DNA, 80 bp, synthetic construct; identical to SEQ ID NO: 22683
  misc_feature 1..80: note = Artificially Synthesized Probe
  source 1..80: mol_type = other DNA

SEQ ID NO: 45082 - DNA, 80 bp, synthetic construct
  misc_feature 1..80: note = Artificially Synthesized Probe
  source 1..80: mol_type = other DNA
tggccgggtctcccagcacagccataaattgcagcctgaggcaggaggggctgaggcctgaaggtgggatggggtcgccg

SEQ ID NO: 45083 - DNA, 80 bp, synthetic construct
  misc_feature 1..80: note = Artificially Synthesized Probe
  source 1..80: mol_type = other DNA
gtttttctctgggttcagtttccacagctgtcaaatcaggagctcggaacagacacatggtctccggtgagatttctttt

SEQ ID NO: 45084 - DNA, 80 bp, synthetic construct
  misc_feature 1..80: note = Artificially Synthesized Probe
  source 1..80: mol_type = other DNA
gtggggcccactggctcacacctgcttttccaccacccctcgcctgccttggggctcacgtccctccccggaattcccac

SEQ ID NO: 45085 - DNA, 80 bp, synthetic construct; identical to SEQ ID NO: 22684
  misc_feature 1..80: note = Artificially Synthesized Probe
  source 1..80: mol_type = other DNA

SEQ ID NO: 45086 - DNA, 80 bp, synthetic construct
  misc_feature 1..80: note = Artificially Synthesized Probe
  source 1..80: mol_type = other DNA
tgaacacggtgtgcccatccctccctgccccagcccaaagctacaggctacactggggcttagaccctcgcccagcacca

SEQ ID NO: 45087 - DNA, 80 bp, synthetic construct
  misc_feature 1..80: note = Artificially Synthesized Probe
  source 1..80: mol_type = other DNA
tctctggcaacccttctgtggcatccttctcttgaagctttcagaaaacacggaaagtgggacaaccctggagctgatcc

SEQ ID NO: 45088 - DNA, 80 bp, synthetic construct
  misc_feature 1..80: note = Artificially Synthesized Probe
  source 1..80: mol_type = other DNA
tcaaacccaggtcccgtgcctctgagtctgggagcccggcacccagagctgagaacacctttttttggtctgtcgggagg

SEQ ID NO: 45089 - DNA, 80 bp, synthetic construct; identical to SEQ ID NO: 22685
  misc_feature 1..80: note = Artificially Synthesized Probe
  source 1..80: mol_type = other DNA

SEQ ID NO: 45090 - DNA, 80 bp, synthetic construct
  misc_feature 1..80: note = Artificially Synthesized Probe
  source 1..80: mol_type = other DNA
ggcgtctagacctgccttgaagagggacagcaggtgggagtctgggctggagaacaaatgtgcccgaaacagctggggtg

SEQ ID NO: 45091 - DNA, 80 bp, synthetic construct
  misc_feature 1..80: note = Artificially Synthesized Probe
  source 1..80: mol_type = other DNA
tcaccctccgccagccacgggcccgggcggtgccagggtacctgcgccatgacgtcatgggaccagatgtccgcagccga

SEQ ID NO: 45092 - DNA, 80 bp, synthetic construct
  misc_feature 1..80: note = Artificially Synthesized Probe
  source 1..80: mol_type = other DNA
cgtgggccagctgtgagggtggcaagcagcagggaggcggaactcctaagccaggagccgaggcggggcctgacatgcac

SEQ ID NO: 45093 - DNA, 80 bp, synthetic construct; identical to SEQ ID NO: 22686
  misc_feature 1..80: note = Artificially Synthesized Probe
  source 1..80: mol_type = other DNA

SEQ ID NO: 45094 - DNA, 80 bp, synthetic construct
  misc_feature 1..80: note = Artificially Synthesized Probe
  source 1..80: mol_type = other DNA
ccccttgggggtcagagggagggaagtggggcaggggagcccttgactcctgccctggcgggctccggccccacgttctc

SEQ ID NO: 45095 - DNA, 80 bp, synthetic construct
  misc_feature 1..80: note = Artificially Synthesized Probe
  source 1..80: mol_type = other DNA
cttgacttccccgcccctgctatgaggttggttcagcaaagccagtctgaccccatcagcttaagaaaataatgctgcct

SEQ ID NO: 45096 - DNA, 80 bp, synthetic construct
  misc_feature 1..80: note = Artificially Synthesized Probe
  source 1..80: mol_type = other DNA
ccccgggtccagggtttcatggaccctcacattcagtcctcttacagcccatctgacaggtcaggaagctgaggctcaga

SEQ ID NO: 45097 - DNA, 80 bp, synthetic construct; identical to SEQ ID NO: 22687
  misc_feature 1..80: note = Artificially Synthesized Probe
  source 1..80: mol_type = other DNA

SEQ ID NO: 45098 - DNA, 80 bp, synthetic construct
  misc_feature 1..80: note = Artificially Synthesized Probe
  source 1..80: mol_type = other DNA
cgcctcggcctcctaaagtgctgggattacaggcatgaaccaccgtgcctggcctaagttctcttgttttctttaccaga

SEQ ID NO: 45099 - DNA, 80 bp, synthetic construct
  misc_feature 1..80: note = Artificially Synthesized Probe
  source 1..80: mol_type = other DNA
actggctcttccaggtatgtgagatcctttaagccagtgctgaaggtggggtaggaatagttacccccactgaatcaata

SEQ ID NO: 45100 - DNA, 80 bp, synthetic construct
  misc_feature 1..80: note = Artificially Synthesized Probe
  source 1..80: mol_type = other DNA
gcgcctttaatcccagctaaccaggagactgagacaggagaatcacttgaacccgggagacggaggttgcagtgagccaa

SEQ ID NO: 45101 - DNA, 80 bp, synthetic construct
  misc_feature 1..80: note = Artificially Synthesized Probe
  source 1..80: mol_type = other DNA
ctaaaccactgaccaggggaggaaagagctgacccaggaagaagggtgaaggggtcaaggggcagggacacttggccggg

SEQ ID NO: 45102 - DNA, 80 bp, synthetic construct; identical to SEQ ID NO: 22651
  misc_feature 1..80: note = Artificially Synthesized Probe
  source 1..80: mol_type = other DNA

SEQ ID NO: 45103 - DNA, 80 bp, synthetic construct; identical to SEQ ID NO: 22688
  misc_feature 1..80: note = Artificially Synthesized Probe
  source 1..80: mol_type = other DNA

SEQ ID NO: 45104 - DNA, 80 bp, synthetic construct
  misc_feature 1..80: note = Artificially Synthesized Probe
  source 1..80: mol_type = other DNA
cgcggatggatggataaacagacgtggcagctacatccacaaacggatgaataaacagacgtggcacctacatccacgaa

SEQ ID NO: 45105 - DNA, 80 bp, synthetic construct
  misc_feature 1..80: note = Artificially Synthesized Probe
  source 1..80: mol_type = other DNA
taaacagatgtggcacctacatccatggacggatggatgggtaaacagacatggcacctacgtccacagacggatggatg

SEQ ID NO: 45106 - DNA, 80 bp, synthetic construct; identical to SEQ ID NO: 22689
  misc_feature 1..80: note = Artificially Synthesized Probe
  source 1..80: mol_type = other DNA

SEQ ID NO: 45107 - DNA, 80 bp, synthetic construct
  misc_feature 1..80: note = Artificially Synthesized Probe
  source 1..80: mol_type = other DNA
gaagctcaaggacatgaggaggacaaatgctgtctgattccacctacgtaaggttcccagactggacaaattcgtacaga

SEQ ID NO: 45108 - DNA, 80 bp, synthetic construct
  misc_feature 1..80: note = Artificially Synthesized Probe
  source 1..80: mol_type = other DNA
cacccaaaaattattattttttgagatggagtctcactctattgcccaggctggagtgcagtggcatgatcttggctcac

SEQ ID NO: 45109 - DNA, 80 bp, synthetic construct
  misc_feature 1..80: note = Artificially Synthesized Probe
  source 1..80: mol_type = other DNA
tcaccatgttggccaggctggtcttgaactcctgacctcaggtgatccatctacctcggcctcccaaagtgctgggatta

SEQ ID NO: 45110 - DNA, 80 bp, synthetic construct; identical to SEQ ID NO: 22690
  misc_feature 1..80: note = Artificially Synthesized Probe
  source 1..80: mol_type = other DNA

SEQ ID NO: 45111 - DNA, 80 bp, synthetic construct
  misc_feature 1..80: note = Artificially Synthesized Probe
  source 1..80: mol_type = other DNA
gtggggaagtggagctgcctcccaggcacagggagcagaggtggactgtggggtgggggctgtccccagcctgcggtgag

SEQ ID NO: 45112 - DNA, 80 bp, synthetic construct
  misc_feature 1..80: note = Artificially Synthesized Probe
  source 1..80: mol_type = other DNA
aagaagggccggaccctgggaatatgctaatcagctagcgggtaggttgcagctggagcggcaaggctggaaatagagta

SEQ ID NO: 45113 - DNA, 80 bp, synthetic construct
  misc_feature 1..80: note = Artificially Synthesized Probe
  source 1..80: mol_type = other DNA
gctgcctcgctcacccttgctggtgtccatttccttctctccggaaaacaggattggattaaacgccctctaagatttat

SEQ ID NO: 45114 - DNA, 80 bp, synthetic construct
  misc_feature 1..80: note = Artificially Synthesized Probe
  source 1..80: mol_type = other DNA
cctgagagcagatactgttctgaaaactccctggaacaactcacactcgccgcagtcctttgaggtaaatatgattatcg

SEQ ID NO: 45115 - DNA, 80 bp, synthetic construct
  misc_feature 1..80: note = Artificially Synthesized Probe
  source 1..80: mol_type = other DNA
tactactactaataaaaatcagctgggcatggtggtgggcgcctgtaatcccagctactcgggaggctgggacaggagaa

SEQ ID NO: 45116 - DNA, 80 bp, synthetic construct; identical to SEQ ID NO: 22691
  misc_feature 1..80: note = Artificially Synthesized Probe
  source 1..80: mol_type = other DNA

SEQ ID NO: 45117 - DNA, 80 bp, synthetic construct
  misc_feature 1..80: note = Artificially Synthesized Probe
  source 1..80: mol_type = other DNA
gccttagcatagcaattgcgctggccgctctataccaagatttctacaaagaatataaagtacttttaacaaagtatcca

SEQ ID NO: 45118 - DNA, 80 bp, synthetic construct
  misc_feature 1..80: note = Artificially Synthesized Probe
  source 1..80: mol_type = other DNA
ggagccggaggaaggatggtttctgattaggtttcaagtctctttgcttctactgcaattttctttctcatacaaacatt

SEQ ID NO: 45119 - DNA, 80 bp, synthetic construct; identical to SEQ ID NO: 22692
  misc_feature 1..80: note = Artificially Synthesized Probe
  source 1..80: mol_type = other DNA

SEQ ID NO: 45120 - DNA, 80 bp, synthetic construct
  misc_feature 1..80: note = Artificially Synthesized Probe
  source 1..80: mol_type = other DNA
cttcttatagcaggaggcagcaggacatctagaaatgggctctgcagccagctgcccgccctggcccactcctgggcaca

SEQ ID NO: 45121 - DNA, 80 bp, synthetic construct
  misc_feature 1..80: note = Artificially Synthesized Probe
  source 1..80: mol_type = other DNA
gtggctgacatctagcattcttctcactggagaacatggaccaatatactcgtctttccaatctgacagtgggtccctgg

SEQ ID NO: 45122 - DNA, 80 bp, synthetic construct
  misc_feature 1..80: note = Artificially Synthesized Probe
  source 1..80: mol_type = other DNA
aggttcaagtgattctcctccctcagcctcccaagtagctgggattacaggtgcccgccatcacgcctggctaatttttg

SEQ ID NO: 45123 - DNA, 80 bp, synthetic construct; identical to SEQ ID NO: 22693
  misc_feature 1..80: note = Artificially Synthesized Probe
  source 1..80: mol_type = other DNA

SEQ ID NO: 45124 - DNA, 80 bp, synthetic construct
  misc_feature 1..80: note = Artificially Synthesized Probe
  source 1..80: mol_type = other DNA
tatttttagtaggaaaggggttttgccatgttggccaggctggtctcgaactcctgacctcgtgatcagcccacctcggc

SEQ ID NO: 45125 - DNA, 80 bp, synthetic construct
  misc_feature 1..80: note = Artificially Synthesized Probe
  source 1..80: mol_type = other DNA
tccgggctgggggattcgttgacaaaggcctgagacgtggggacatggcacagaggagggaacatggcctttcccacata

SEQ ID NO: 45126 - DNA, 80 bp, synthetic construct
  misc_feature 1..80: note = Artificially Synthesized Probe
  source 1..80: mol_type = other DNA
gaagagttaaggtgggtggggcaggggagaaaggcaggcagggcctggagcccagcaggagtcactagctagacccgggg

SEQ ID NO: 45127 - DNA, 80 bp, synthetic construct
  misc_feature 1..80: note = Artificially Synthesized Probe
  source 1..80: mol_type = other DNA
ggacacacattggtgacgcatgctgccgtctgtctgtcactaaatgcttcccccaccccaccccgccgctgagactcctg

SEQ ID NO: 45128 - DNA, 80 bp, synthetic construct; identical to SEQ ID NO: 22694
  misc_feature 1..80: note = Artificially Synthesized Probe
  source 1..80: mol_type = other DNA

SEQ ID NO: 45129 - DNA, 80 bp, synthetic construct
  misc_feature 1..80: note = Artificially Synthesized Probe
  source 1..80: mol_type = other DNA
atccacggtggctctgagggcagtcacggggcgagactttctaagccacagcccgcccctggggcatgcctcccccacca

SEQ ID NO: 45130 - DNA, 80 bp, synthetic construct
  misc_feature 1..80: note = Artificially Synthesized Probe
  source 1..80: mol_type = other DNA
tatcaactcccaggcatttaacattcctcgaagcttaaacacagaaacattttccttaccagactctgccttctgctttg

SEQ ID NO: 45131 - DNA, 80 bp, synthetic construct
  misc_feature 1..80: note = Artificially Synthesized Probe
  source 1..80: mol_type = other DNA
gggccttgggagctgagttctcgaggggctggggcccaccgtgcccacggggctggctgcccggcacatccttgtaactc

SEQ ID NO: 45132 - DNA, 80 bp, synthetic construct; identical to SEQ ID NO: 22695
  misc_feature 1..80: note = Artificially Synthesized Probe
  source 1..80: mol_type = other DNA

SEQ ID NO: 45133 - DNA, 80 bp, synthetic construct
  misc_feature 1..80: note = Artificially Synthesized Probe
  source 1..80: mol_type = other DNA
gtgggagacccacacagctccccaggggcaatgctaccaaggacctgcaggtaagagccagataccaaactcggtggcca

SEQ ID NO: 45134 - DNA, 80 bp, synthetic construct
  misc_feature 1..80: note = Artificially Synthesized Probe
  source 1..80: mol_type = other DNA
gaagctcggcgcccagctgcgcctggatcacgtccggggccacggtcaagaagctcggcgcccagctgccgcctggatca

SEQ ID NO: 45135 - DNA, 80 bp, synthetic construct
  misc_feature 1..80: note = Artificially Synthesized Probe
  source 1..80: mol_type = other DNA
tgtcaagaagctcagcacgcccaacgcccgaggctcaacctcagtacgggtcagttaccgtctcccttcatttcatggtc

SEQ ID NO: 45136 - DNA, 80 bp, synthetic construct; identical to SEQ ID NO: 22696
  misc_feature 1..80: note = Artificially Synthesized Probe
  source 1..80: mol_type = other DNA

SEQ ID NO: 45137 - DNA, 80 bp, synthetic construct
  misc_feature 1..80: note = Artificially Synthesized Probe
  source 1..80: mol_type = other DNA
gcctctccgtctgcctcgtgggacccaggattgtcctccctctggatcctctcctgcttctcttactcaacaggccagat

SEQ ID NO: 45138 - DNA, 80 bp, synthetic construct
  misc_feature 1..80: note = Artificially Synthesized Probe
  source 1..80: mol_type = other DNA
cagcctactgagtagctgggattacaggcgcccgccaccacgacctgctaatttttgtatttttagtagagatggggttt

SEQ ID NO: 45139 - DNA, 80 bp, synthetic construct
  misc_feature 1..80: note = Artificially Synthesized Probe
  source 1..80: mol_type = other DNA
agccacagactcccaacgcagctgagtaaggtccggccaccctaacaacaagtcagagacccccctccccccaagccaac

SEQ ID NO: 45140 - DNA, 80 bp, synthetic construct
  misc_feature 1..80: note = Artificially Synthesized Probe
  source 1..80: mol_type = other DNA
aacaaccacccatagactaaagctggcgtgtgaaaacaaagctggttgtttccatcttgcagaagcgcagatgacccacc

SEQ ID NO: 45141 - DNA, 80 bp, synthetic construct
  misc_feature 1..80: note = Artificially Synthesized Probe
  source 1..80: mol_type = other DNA
acctcctggaggctccctcagcctcgccccggcgccctggcctcacctggatctgtcctttgcccatgatcttgtccacg

SEQ ID NO: 45142 - DNA, 80 bp, synthetic construct; identical to SEQ ID NO: 22697
  misc_feature 1..80: note = Artificially Synthesized Probe
  source 1..80: mol_type = other DNA

SEQ ID NO: 45143 - DNA, 80 bp, synthetic construct
  misc_feature 1..80: note = Artificially Synthesized Probe
  source 1..80: mol_type = other DNA
cacgagcacggggtggtggggtccccacagagatgccagcccctgccactcacctcatcccacttgggctccgctgtgtc

SEQ ID NO: 45144 - DNA, 80 bp, synthetic construct
  misc_feature 1..80: note = Artificially Synthesized Probe
  source 1..80: mol_type = other DNA
tctgtcctttccaacgtccccacggatggcatcttggctctctcctccctgaagcccgggaccatctggcttctcccctg

SEQ ID NO: 45145 - DNA, 80 bp, synthetic construct
  misc_feature 1..80: note = Artificially Synthesized Probe
  source 1..80: mol_type = other DNA
aaagggcccttgactgttccgtctccacatcttcctcaccatggagacgacaccacaaactcttcactgaccgccctgga

SEQ ID NO: 45146 - DNA, 80 bp, synthetic construct; identical to SEQ ID NO: 22698
  misc_feature 1..80: note = Artificially Synthesized Probe
  source 1..80: mol_type = other DNA

SEQ ID NO: 45147 - DNA, 80 bp, synthetic construct
  misc_feature 1..80: note = Artificially Synthesized Probe
  source 1..80: mol_type = other DNA
ggggctttccccggcatttccatcttccaccctggccttcaggctgaaaatctaccttgggacccaactgctgaggccac

SEQ ID NO: 45148 - DNA, 80 bp, synthetic construct; identical to SEQ ID NO: 22652
  misc_feature 1..80: note = Artificially Synthesized Probe
  source 1..80: mol_type = other DNA

SEQ ID NO: 45149 - DNA, 80 bp, synthetic construct
  misc_feature 1..80: note = Artificially Synthesized Probe
  source 1..80: mol_type = other DNA
agccttcccatagcctgttctcacgttgcctcagcgagcttggggctgtggggctccctgaggctgagacgcgaaggtgc

SEQ ID NO: 45150 - DNA, 80 bp, synthetic construct
  misc_feature 1..80: note = Artificially Synthesized Probe
  source 1..80: mol_type = other DNA
ggaggtgcctttgggacactatggccaaccctctgcagcgtgaaacaacgtcagaggtcacagtgcgggcatacagtgca

SEQ ID NO: 45151 - DNA, 80 bp, synthetic construct
  misc_feature 1..80: note = Artificially Synthesized Probe
  source 1..80: mol_type = other DNA
accaacatggtgaaaccccatctctactaaaaatacaaaagtgagcccggcgtggtggcacatgcctgtagtcccagcta

SEQ ID NO: 45152 - DNA, 80 bp, synthetic construct; identical to SEQ ID NO: 22699
  misc_feature 1..80: note = Artificially Synthesized Probe
  source 1..80: mol_type = other DNA

SEQ ID NO: 45153 - DNA, 80 bp, synthetic construct
  misc_feature 1..80: note = Artificially Synthesized Probe
  source 1..80: mol_type = other DNA
gggttccggaaggggctgggggagggctcacagggtcagagggagggttccggaaggggctgggggagggttcacagggt

SEQ ID NO: 45154 - DNA, 80 bp, synthetic construct
  misc_feature 1..80: note = Artificially Synthesized Probe
  source 1..80: mol_type = other DNA
ggaggggtcacagggtcagagggagggttccggaaggggctgggggaggggtcacagggtcagagggagggttccggaag

SEQ ID NO: 45155 - DNA, 80 bp, synthetic construct
  misc_feature 1..80: note = Artificially Synthesized Probe
  source 1..80: mol_type = other DNA
gggagggttccggaaggggctgggggaggggtcacagggtcagagggagggttcaggaaggggctgggggagggctcaca

SEQ ID NO: 45156 - DNA, 80 bp, synthetic construct
  misc_feature 1..80: note = Artificially Synthesized Probe
  source 1..80: mol_type = other DNA
tgggggaggggtcacagggtcagagggagggttccggaaggggctgggggaggggtcacagggtcagagggagggttccg

SEQ ID NO: 45157 - DNA, 80 bp, synthetic construct; identical to SEQ ID NO: 22700
  misc_feature 1..80: note = Artificially Synthesized Probe
  source 1..80: mol_type = other DNA

SEQ ID NO: 45158 - DNA, 80 bp, synthetic construct
  misc_feature 1..80: note = Artificially Synthesized Probe
  source 1..80: mol_type = other DNA
gcctacaccctgggcctgcctgtccagaggtcctgagtttaccacggctgaagacacagggcctcacctctgagtgagaa

SEQ ID NO: 45159 - DNA, 80 bp, synthetic construct
  misc_feature 1..80: note = Artificially Synthesized Probe
  source 1..80: mol_type = other DNA
caggagagggaggggcggcatctggggacatggagtggtggcgcctggtccagacatgggtgggacagtgcttcagagct

SEQ ID NO: 45160 - DNA, 80 bp, synthetic construct
  misc_feature 1..80: note = Artificially Synthesized Probe
  source 1..80: mol_type = other DNA
ttcggaattggttggggctctagtcctggccaaaccagaggaaaaatgtttcatgatgggaaaaacaagacaccagcccc

SEQ ID NO: 45161 - DNA, 80 bp, synthetic construct; identical to SEQ ID NO: 22701
  misc_feature 1..80: note = Artificially Synthesized Probe
  source 1..80: mol_type = other DNA

SEQ ID NO: 45162 - DNA, 80 bp, synthetic construct
  misc_feature 1..80: note = Artificially Synthesized Probe
  source 1..80: mol_type = other DNA
taggtgctgtgtaaattaacgacttcattccacatttctgagctcccatgcatcccagggtaaaggagacctggttcccg

SEQ ID NO: 45163 - DNA, 80 bp, synthetic construct
  misc_feature 1..80: note = Artificially Synthesized Probe
  source 1..80: mol_type = other DNA
ggatgggggcacaaagaacctgaggggacgggggcacaaagaacctgaggggatgggggcacaaggaacctgaggggatg

SEQ ID NO: 45164 - DNA, 80 bp, synthetic construct
  misc_feature 1..80: note = Artificially Synthesized Probe
  source 1..80: mol_type = other DNA
gaagggacaaagaagggaggccagtttgcccccaggaactcagggaggcttcctgggaaaggctgctctaacggcccggg

SEQ ID NO: 45165 - DNA, 80 bp, synthetic construct; identical to SEQ ID NO: 22702
  misc_feature 1..80: note = Artificially Synthesized Probe
  source 1..80: mol_type = other DNA

SEQ ID NO: 45166 - DNA, 80 bp, synthetic construct
  misc_feature 1..80: note = Artificially Synthesized Probe
  source 1..80: mol_type = other DNA
ctttgtgagacactaaaaacagatttagtatgaggaacccacaagggggaaggggagaaaaagcgatgagcgtggcagca

SEQ ID NO: 45167 - DNA, 80 bp, synthetic construct
  misc_feature 1..80: note = Artificially Synthesized Probe
  source 1..80: mol_type = other DNA
tgtcatgggcagatatgaagttggagtccacgtgtttgtcgccctcagatatgaagttggagtccacgtgtttgtcgcac

SEQ ID NO: 45168 - DNA, 80 bp, synthetic construct
  misc_feature 1..80: note = Artificially Synthesized Probe
  source 1..80: mol_type = other DNA
tgcccacgctaattttagtatttttagtagagacggggtttcaccatgttggcccggatggtctcgaactcctgacctcg

SEQ ID NO: 45169 - DNA, 80 bp, synthetic construct; identical to SEQ ID NO: 22703
  misc_feature 1..80: note = Artificially Synthesized Probe
  source 1..80: mol_type = other DNA

SEQ ID NO: 45170 - DNA, 80 bp, synthetic construct
  misc_feature 1..80: note = Artificially Synthesized Probe
  source 1..80: mol_type = other DNA
tccaccccaggccggcgggaggcagacggggtatgagactcagctgagtcttggtccaacatcaccacctggtggccaga

SEQ ID NO: 45171 - DNA, 80 bp, synthetic construct
  misc_feature 1..80: note = Artificially Synthesized Probe
  source 1..80: mol_type = other DNA
ccagggaccacctccccacgcaagcctgaggacctctgaactttgctacaagtacaaccaactttagccactcttggttg

SEQ ID NO: 45172 - DNA, 80 bp, synthetic construct
  misc_feature 1..80: note = Artificially Synthesized Probe
  source 1..80: mol_type = other DNA
aaatcctgcctatcctggcactgaaaactgaccaatatgataaatcattctgctaatgatttatgtcgaggaaagcttgc

SEQ ID NO: 45173 - DNA, 80 bp, synthetic construct; identical to SEQ ID NO: 22704
  misc_feature 1..80: note = Artificially Synthesized Probe
  source 1..80: mol_type = other DNA

SEQ ID NO: 45174 - DNA, 80 bp, synthetic construct
  misc_feature 1..80: note = Artificially Synthesized Probe
  source 1..80: mol_type = other DNA
cccaagctgtgtcctggccactcaacagtctcagcacagccgagcagggatcagccatttacagccacatgtctgtctga

SEQ ID NO: 45175 - DNA, 80 bp, synthetic construct
  misc_feature 1..80: note = Artificially Synthesized Probe
  source 1..80: mol_type = other DNA
gaaacaggatcctgtgagcacctggagctccactgagctcaggacaaaggcctggagatctggagggagagccgagagag

SEQ ID NO: 45176 - DNA, 80 bp, synthetic construct
  misc_feature 1..80: note = Artificially Synthesized Probe
  source 1..80: mol_type = other DNA
gtaggagaatctaactgaagaggtttgtgtgtgtgtgtgtgtgtgtgtgtgtgtgtgtgtgtgtgtgtgtgtgtgtgtgt

SEQ ID NO: 45177 - DNA, 80 bp, synthetic construct
  misc_feature 1..80: note = Artificially Synthesized Probe
  source 1..80: mol_type = other DNA
cccaccaccacacctggctaatttttgtgtttttagtagagacggggtttcaccacgttgcccaggctgatctcaaactc

SEQ ID NO: 45178 - DNA, 80 bp, synthetic construct; identical to SEQ ID NO: 22705
  misc_feature 1..80: note = Artificially Synthesized Probe
  source 1..80: mol_type = other DNA

SEQ ID NO: 45179 - DNA, 80 bp, synthetic construct
  misc_feature 1..80: note = Artificially Synthesized Probe
  source 1..80: mol_type = other DNA
atttacccttcttctgtagtttctgaattgcttctctccactctgacctctcgtagtccgaggacagtaggaacaggtaa

SEQ ID NO: 45180 - DNA, 80 bp, synthetic construct
  misc_feature 1..80: note = Artificially Synthesized Probe
  source 1..80: mol_type = other DNA
atctcggctcactgcaacctccacctcccgggttcacgccaatctcctgcctcagcctcctgagtagctgggattacagg

SEQ ID NO: 45181 - DNA, 80 bp, synthetic construct
  misc_feature 1..80: note = Artificially Synthesized Probe
  source 1..80: mol_type = other DNA
gctcctccttatccaggcacagctgaccttgcaggaggaggcagctgggggtgggtgggtgaagggggagctccttcctg

SEQ ID NO: 45182 - DNA, 80 bp, synthetic construct; identical to SEQ ID NO: 22706
  misc_feature 1..80: note = Artificially Synthesized Probe
  source 1..80: mol_type = other DNA

SEQ ID NO: 45183 - DNA, 80 bp, synthetic construct; identical to SEQ ID NO: 22653
  misc_feature 1..80: note = Artificially Synthesized Probe
  source 1..80: mol_type = other DNA

SEQ ID NO: 45184 - DNA, 80 bp, synthetic construct
  misc_feature 1..80: note = Artificially Synthesized Probe
  source 1..80: mol_type = other DNA
agcactaagcacgacactccactgtgtgttaacatgctctttacattttccgtatttcgtgatgttttgacatcttgtgg

SEQ ID NO: 45185 - DNA, 80 bp, synthetic construct
  misc_feature 1..80: note = Artificially Synthesized Probe
  source 1..80: mol_type = other DNA
tgtccccaaccaccttctctacctgacgctcactcgccaagccagcatctcctctgccccacgtcacccagggccaggga

SEQ ID NO: 45186 - DNA, 80 bp, synthetic construct; identical to SEQ ID NO: 22707
  misc_feature 1..80: note = Artificially Synthesized Probe
  source 1..80: mol_type = other DNA

SEQ ID NO: 45187 - DNA, 80 bp, synthetic construct
  misc_feature 1..80: note = Artificially Synthesized Probe
  source 1..80: mol_type = other DNA
gcagggttccagcctccctgcccggcagacaacccaccaggtcccgtcggctcagcctccccctctcaccagacattcat

SEQ ID NO: 45188 - DNA, 80 bp, synthetic construct
  misc_feature 1..80: note = Artificially Synthesized Probe
  source 1..80: mol_type = other DNA
gctcctcagttagaattcacctctatggtgttttgttctttttaacccactggactggcaaaattgtaaagaatgttcac

SEQ ID NO: 45189 - DNA, 80 bp, synthetic construct
  misc_feature 1..80: note = Artificially Synthesized Probe
  source 1..80: mol_type = other DNA
gcagtgatgtttactgttgacttgcctgctaagagcgaagaatcagagacaatccaaacacccaaaaacatttgtatgca

SEQ ID NO: 45190 - DNA, 80 bp, synthetic construct
  misc_feature 1..80: note = Artificially Synthesized Probe
  source 1..80: mol_type = other DNA
agttcgagaccaccctggccaacgtggtgaaactccgtctctactaaaaatgcaaaaactaccgggcgtggtggcgggcg

SEQ ID NO: 45191 - DNA, 80 bp, synthetic construct; identical to SEQ ID NO: 22708
  misc_feature 1..80: note = Artificially Synthesized Probe
  source 1..80: mol_type = other DNA

SEQ ID NO: 45192 - DNA, 80 bp, synthetic construct
  misc_feature 1..80: note = Artificially Synthesized Probe
  source 1..80: mol_type = other DNA
accctgtacatgctggtactacgagcatttctcattaaaaccagccagtattatattggggattagaaaaaacatgaaaa

SEQ ID NO: 45193 - DNA, 80 bp, synthetic construct
  misc_feature 1..80: note = Artificially Synthesized Probe
  source 1..80: mol_type = other DNA
aacacggtgaaaccccgtctctactaaaaatacaaaaaattagccaggcgtggtggcggacgcctttattcccagctact

SEQ ID NO: 45194 - DNA, 80 bp, synthetic construct; identical to SEQ ID NO: 22709
  misc_feature 1..80: note = Artificially Synthesized Probe
  source 1..80: mol_type = other DNA

SEQ ID NO: 45195 - DNA, 80 bp, synthetic construct
  misc_feature 1..80: note = Artificially Synthesized Probe
  source 1..80: mol_type = other DNA
accccccactgcatctagaaatggctacattcgttgaatgaaccaccagtaggttgggacccactgattataaaacctgc

SEQ ID NO: 45196 - DNA, 80 bp, synthetic construct
  misc_feature 1..80: note = Artificially Synthesized Probe
  source 1..80: mol_type = other DNA
actcgactgggcacaaggccacgtctgcacagctggggcaacggggaggcagcaagcctcccaggggcgggtgggaaaca

SEQ ID NO: 45197 - DNA, 80 bp, synthetic construct
  misc_feature 1..80: note = Artificially Synthesized Probe
  source 1..80: mol_type = other DNA
gtgatcttgctttcccctgttcaaagggagatgcttgagttgaaaggatcctcagagaggccatctggttatgttttctt

SEQ ID NO: 45198 - DNA, 80 bp, synthetic construct
  misc_feature 1..80: note = Artificially Synthesized Probe
  source 1..80: mol_type = other DNA
tcacacaattcttttgcctcagcctcccatgtggctgggattacaggcacccaccaccacacccggctaacttttgtatt

SEQ ID NO: 45199 - DNA, 80 bp, synthetic construct; identical to SEQ ID NO: 22710
  misc_feature 1..80: note = Artificially Synthesized Probe
  source 1..80: mol_type = other DNA

SEQ ID NO: 45200 - DNA, 80 bp, synthetic construct
  misc_feature 1..80: note = Artificially Synthesized Probe
  source 1..80: mol_type = other DNA
ccaaaccgctccaggcccttcctccactcacagggatgctcctcccgtggtgccttcctctagacactgttgttacgtga

SEQ ID NO: 45201 - DNA, 80 bp, synthetic construct
  misc_feature 1..80: note = Artificially Synthesized Probe
  source 1..80: mol_type = other DNA
atggtcaatatttgaggttactactggttacgggacccaaatatttctcaaaacagaaaaacatgagtgcaagaacttgg

SEQ ID NO: 45202 - DNA, 80 bp, synthetic construct
  misc_feature 1..80: note = Artificially Synthesized Probe
  source 1..80: mol_type = other DNA
gctgttatgtgaactgagggctatgcatgttcctctagacactgttgttacgtgaactgagggctatgcatgttcctcta

SEQ ID NO: 45203 - DNA, 80 bp, synthetic construct
  misc_feature 1..80: note = Artificially Synthesized Probe
  source 1..80: mol_type = other DNA
ttcctctagacactgttgttatgtgaactgagggctatgcatgttcctctagacactgttgttatgtgaactgagggcta

SEQ ID NO: 45204 - DNA, 80 bp, synthetic construct; identical to SEQ ID NO: 22711
  misc_feature 1..80: note = Artificially Synthesized Probe
  source 1..80: mol_type = other DNA

SEQ ID NO: 45205 - DNA, 80 bp, synthetic construct
  misc_feature 1..80: note = Artificially Synthesized Probe
  source 1..80: mol_type = other DNA
cactgctgttatgtgaactgagggctatgcatgttcctctagacactgttgttatgtgaactgagggctatgcatgttcc

SEQ ID NO: 45206 - DNA, 80 bp, synthetic construct
  misc_feature 1..80: note = Artificially Synthesized Probe
  source 1..80: mol_type = other DNA
atgcatgttcctctagacactgttgttacgtgaactgagggctatacatgttcctctagacactgctgttacgtgaactg

SEQ ID NO: 45207 - DNA, 80 bp, synthetic construct
  misc_feature 1..80: note = Artificially Synthesized Probe
  source 1..80: mol_type = other DNA
tgtgaactgagggctatgcatgttgctctagacactgttgttacgtgaactgagggctatgcatgttcctctagacgctg

SEQ ID NO: 45208 - DNA, 80 bp, synthetic construct
  misc_feature 1..80: note = Artificially Synthesized Probe
  source 1..80: mol_type = other DNA
ctctagacactgttgttacgtgaactgagggctatgcatgttcctctagcactgctgttacgtgaactgagggctatgca

SEQ ID NO: 45209 - DNA, 80 bp, synthetic construct; identical to SEQ ID NO: 22712
  misc_feature 1..80: note = Artificially Synthesized Probe
  source 1..80: mol_type = other DNA

SEQ ID NO: 45210 - DNA, 80 bp, synthetic construct; identical to SEQ ID NO: 22714
  misc_feature 1..80: note = Artificially Synthesized Probe
  source 1..80: mol_type = other DNA

SEQ ID NO: 45211 - DNA, 80 bp, synthetic construct
  misc_feature 1..80: note = Artificially Synthesized Probe
  source 1..80: mol_type = other DNA
ttcctctagacactgttgttatgtgaactgagggctatgcatgttcctctagacactgctgttatgtgaactgagggcta

SEQ ID NO: 45212 - DNA, 80 bp, synthetic construct
  misc_feature 1..80: note = Artificially Synthesized Probe
  source 1..80: mol_type = other DNA
actgaggaggtggggttggggccgctccccgttaccttttcaagtgttccagcaggaagaggaaggtgatgaggttgggg

SEQ ID NO: 45213 - DNA, 80 bp, synthetic construct
  misc_feature 1..80: note = Artificially Synthesized Probe
  source 1..80: mol_type = other DNA
aactgagggctatgcatgttcctctagacactgttgttatgtgaactgagggctatgcatgttcctctagacactgttgt

SEQ ID NO: 45214 - DNA, 80 bp, synthetic construct
  misc_feature 1..80: note = Artificially Synthesized Probe
  source 1..80: mol_type = other DNA
agacactgctgttacgtgaactgagggctatgcatgttcctctagacactgttgttacgtgaactgagggctatgcatgt

SEQ ID NO: 45215 - DNA, 80 bp, synthetic construct
  misc_feature 1..80: note = Artificially Synthesized Probe
  source 1..80: mol_type = other DNA
ggctatgcatgttcctctagacactgctgttacgtgaactgagggctatgcatgttcctctagacactgttgttacgtga

SEQ ID NO: 45216 - DNA, 80 bp, synthetic construct
  misc_feature 1..80: note = Artificially Synthesized Probe
  source 1..80: mol_type = other DNA
gttgttatgtgaactgagggctatgcatgttcctctagacgctgttgttatgtgaactgagggctatgcatgttcctcta

SEQ ID NO: 45217 - DNA, 80 bp, synthetic construct
  misc_feature 1..80: note = Artificially Synthesized Probe
  source 1..80: mol_type = other DNA
gaactttccaaaccaatgctttttttttttttttttttttttgagacagtctcactctgttgctcaggctggagtgcagc

SEQ ID NO: 45218 - DNA, 80 bp, synthetic construct
  misc_feature 1..80: note = Artificially Synthesized Probe
  source 1..80: mol_type = other DNA
caaactcctgacctcaggtgacctgcctgcctgggcctcctaaagtgctgggattacaggcatgatccaccacgcctgga

SEQ ID NO: 45219 - DNA, 80 bp, synthetic construct
  misc_feature 1..80: note = Artificially Synthesized Probe
  source 1..80: mol_type = other DNA
attttactccactgtggtctgtgaacatgacttgtatgctatcaacttgcagaaaaattttgagatttccttagtggcct

SEQ ID NO: 45220 - DNA, 80 bp, synthetic construct; identical to SEQ ID NO: 22715
  misc_feature 1..80: note = Artificially Synthesized Probe
  source 1..80: mol_type = other DNA

SEQ ID NO: 45221 - DNA, 80 bp, synthetic construct
  misc_feature 1..80: note = Artificially Synthesized Probe
  source 1..80: mol_type = other DNA
tcagcctcccgagtagctgggattacaggtgcccaccaccacactctgctaatttttgtacttttagtagagacagggtt

SEQ ID NO: 45222 - DNA, 80 bp, synthetic construct
  misc_feature 1..80: note = Artificially Synthesized Probe
  source 1..80: mol_type = other DNA
atgttagccctatgaaatcctgagcactgaccccctcgatctgcttggagctactgtagtcggggtctttcccttagtaa

SEQ ID NO: 45223 - DNA, 80 bp, synthetic construct
  misc_feature 1..80: note = Artificially Synthesized Probe
  source 1..80: mol_type = other DNA
cctccagctcatggtctgggaaggggtgcacctgggggctggcctcagactcctcgggggatggaaacaccaggtcggcc

SEQ ID NO: 45224 - DNA, 80 bp, synthetic construct
  misc_feature 1..80: note = Artificially Synthesized Probe
  source 1..80: mol_type = other DNA
gcttccaggcctttggggagcagaccccacaggggagggcctggtgtctgggtgggctgtcagcagctgcttcctccagg

SEQ ID NO: 45225 - DNA, 80 bp, synthetic construct
  misc_feature 1..80: note = Artificially Synthesized Probe
  source 1..80: mol_type = other DNA
acgatccctgctcctgaggagcctgattgggaaacacacactggagtgatgaaagctgggttctggggtccgccccgccc

SEQ ID NO: 45226 - DNA, 80 bp, synthetic construct; identical to SEQ ID NO: 22716
  misc_feature 1..80: note = Artificially Synthesized Probe
  source 1..80: mol_type = other DNA

SEQ ID NO: 45227 - DNA, 80 bp, synthetic construct
  misc_feature 1..80: note = Artificially Synthesized Probe
  source 1..80: mol_type = other DNA
gtgtgcttattattgccatctctgcctcagaactatctcaaacatgatctagttccagggagtcatgtcctttattatta

SEQ ID NO: 45228 - DNA, 80 bp, synthetic construct
  misc_feature 1..80: note = Artificially Synthesized Probe
  source 1..80: mol_type = other DNA
catcacacccagctaatttttgtactttcagtagagacggagttttgccatgttggccaggctggtctcaaactcctgac

SEQ ID NO: 45229 - DNA, 80 bp, synthetic construct
  misc_feature 1..80: note = Artificially Synthesized Probe
  source 1..80: mol_type = other DNA
gcgtggggcttgctccccctgagctatacttgggggcacagccagccagggagggctgaagggagaggtaggatagcctg

SEQ ID NO: 45230 - DNA, 80 bp, synthetic construct; identical to SEQ ID NO: 22717
  misc_feature 1..80: note = Artificially Synthesized Probe
  source 1..80: mol_type = other DNA

SEQ ID NO: 45231 - DNA, 80 bp, synthetic construct
  misc_feature 1..80: note = Artificially Synthesized Probe
  source 1..80: mol_type = other DNA
gagcttgggctgcttatttaccttctccaagactcctctctcatctatgattagggaacaacagtcgctactttgtggag

SEQ ID NO: 45232 - DNA, 80 bp, synthetic construct
  misc_feature 1..80: note = Artificially Synthesized Probe
  source 1..80: mol_type = other DNA
aaattcagagatgtctaataaaaggagaatgcttaagtagacgatggcacatctacgggtaacatcgtgcaggaaagtaa

SEQ ID NO: 45233 - DNA, 80 bp, synthetic construct; identical to SEQ ID NO: 22718
  misc_feature 1..80: note = Artificially Synthesized Probe
  source 1..80: mol_type = other DNA

SEQ ID NO: 45234 - DNA, 80 bp, synthetic construct
  misc_feature 1..80: note = Artificially Synthesized Probe
  source 1..80: mol_type = other DNA
caaaaccccgtctctactaaaaatacaaaaattagccagacatggtggcatggtggcgtgcacctgtaatcccagctact

SEQ ID NO: 45235 - DNA, 80 bp, synthetic construct; identical to SEQ ID NO: 22654
  misc_feature 1..80: note = Artificially Synthesized Probe
  source 1..80: mol_type = other DNA

SEQ ID NO: 45236 - DNA, 80 bp, synthetic construct
  misc_feature 1..80: note = Artificially Synthesized Probe
  source 1..80: mol_type = other DNA
ggcctccctcccccgccctgtgccactggactcacacactcaccccgcagaggtcaggaccccctcccccgcccctggac

SEQ ID NO: 45237 - DNA, 80 bp, synthetic construct
  misc_feature 1..80: note = Artificially Synthesized Probe
  source 1..80: mol_type = other DNA
ctcaccctgcagaggtcttcttcagcttggcacacagtaggacatctgtaaagaggaagacgtgccgcagcttccgggag

SEQ ID NO: 45238 - DNA, 80 bp, synthetic construct; identical to SEQ ID NO: 22719
  misc_feature 1..80: note = Artificially Synthesized Probe
  source 1..80: mol_type = other DNA

SEQ ID NO: 45239 - DNA, 80 bp, synthetic construct
  misc_feature 1..80: note = Artificially Synthesized Probe
  source 1..80: mol_type = other DNA
ctccgcggctaaccctggagccccctgcccgggacgacctggtttctccaccctggggcacgaacatccccgtttgcaat

SEQ ID NO: 45240 - DNA, 80 bp, synthetic construct
  misc_feature 1..80: note = Artificially Synthesized Probe
  source 1..80: mol_type = other DNA
ggggacctgcagccaactctaacctgggctctgggtggtttctgctccacgtgggagttccagagtttccaacccccgct

SEQ ID NO: 45241 - DNA, 80 bp, synthetic construct
  misc_feature 1..80: note = Artificially Synthesized Probe
  source 1..80: mol_type = other DNA
aggctgaggcgggtggatcacctgaggtcaggagtttgagaccagcctggccaacgtggcgaaaccccgtctctactaaa

SEQ ID NO: 45242 - DNA, 80 bp, synthetic construct; identical to SEQ ID NO: 22720
  misc_feature 1..80: note = Artificially Synthesized Probe
  source 1..80: mol_type = other DNA

SEQ ID NO: 45243 - DNA, 80 bp, synthetic construct
  misc_feature 1..80: note = Artificially Synthesized Probe
  source 1..80: mol_type = other DNA
taaacagaccacaggagcagacaccctgtcagcctcactcgtaacggccgcctaatggcctcccctggacaggaagcctt

SEQ ID NO: 45244 - DNA, 80 bp, synthetic construct
  misc_feature 1..80: note = Artificially Synthesized Probe
  source 1..80: mol_type = other DNA
cctccaccacctccaacgccagcctttcctgctgtgggctccccgcaagccactgcgtgtgcaggccgagctgaagcagc

SEQ ID NO: 45245 - DNA, 80 bp, synthetic construct
  misc_feature 1..80: note = Artificially Synthesized Probe
  source 1..80: mol_type = other DNA
gaaagactgcgtggtggacctggagagactccccagcctcaggttcttctggctcactggattgttattattatttctga

SEQ ID NO: 45246 - DNA, 80 bp, synthetic construct
  misc_feature 1..80: note = Artificially Synthesized Probe
  source 1..80: mol_type = other DNA
tgccctatggcttaagccagcctcctccttggttctgggatgctggcttctggccactcacctcagggcagtcttccctg

SEQ ID NO: 45247 - DNA, 80 bp, synthetic construct
  misc_feature 1..80: note = Artificially Synthesized Probe
  source 1..80: mol_type = other DNA
agtaaagacggggcttcaccatgttggccaggctggtctcaaacttctaactcaagtgatccacctgcctcagcctccca

SEQ ID NO: 45248 - DNA, 80 bp, synthetic construct; identical to SEQ ID NO: 22721
  misc_feature 1..80: note = Artificially Synthesized Probe
  source 1..80: mol_type = other DNA

SEQ ID NO: 45249 - DNA, 80 bp, synthetic construct
  misc_feature 1..80: note = Artificially Synthesized Probe
  source 1..80: mol_type = other DNA
cctgatacttctcagcctgggtgaggggccgtgccgggctctgagctcacctcccccttgggcgttgtcactgcagtccg

SEQ ID NO: 45250 - DNA, 80 bp, synthetic construct
  misc_feature 1..80: note = Artificially Synthesized Probe
  source 1..80: mol_type = other DNA
gtgtggccaccggggagtgctcagtccccatccaaagggtgggcactcagggacctgcctaattcccgcaaaatctgaac

SEQ ID NO: 45251 - DNA, 80 bp, synthetic construct
  misc_feature 1..80: note = Artificially Synthesized Probe
  source 1..80: mol_type = other DNA
gtggcgggcgcctgtagtcccagctactcgggaggctgaggcaggagaattgcttgaacccaggaggcagaggttgcagt

SEQ ID NO: 45252 - DNA, 80 bp, synthetic construct; identical to SEQ ID NO: 22722
  misc_feature 1..80: note = Artificially Synthesized Probe
  source 1..80: mol_type = other DNA

SEQ ID NO: 45253 - DNA, 80 bp, synthetic construct
  misc_feature 1..80: note = Artificially Synthesized Probe
  source 1..80: mol_type = other DNA
caggtggactgttctcggtgactccagcaccctctcacccaggctcagtcttccactgaactcctaagccctctctggcc

SEQ ID NO: 45254 - DNA, 80 bp, synthetic construct
  misc_feature 1..80: note = Artificially Synthesized Probe
  source 1..80: mol_type = other DNA
gcatgcttcccacgtgaacacccctcgagggacaccagagtgagcccacggcagcccccacctctgttctcactccccgg

SEQ ID NO: 45255 - DNA, 80 bp, synthetic construct
  misc_feature 1..80: note = Artificially Synthesized Probe
  source 1..80: mol_type = other DNA
tggacccccagccctgaatcacacagctccacccagccacgccccgaagagtccagcacacctgccacacgcaggacccc

SEQ ID NO: 45256 - DNA, 80 bp, synthetic construct; identical to SEQ ID NO: 22723
  misc_feature 1..80: note = Artificially Synthesized Probe
  source 1..80: mol_type = other DNA

SEQ ID NO: 45257 - DNA, 80 bp, synthetic construct
  misc_feature 1..80: note = Artificially Synthesized Probe
  source 1..80: mol_type = other DNA
cagtgcactgggaaggtcagccagcaaaggaagccacagatatttctcctgctggttacttctccgggcagggagtcctg

SEQ ID NO: 45258 - DNA, 80 bp, synthetic construct
  misc_feature 1..80: note = Artificially Synthesized Probe
  source 1..80: mol_type = other DNA
tgggggaaggagacatgctgtgtttccaggaagggcagctctccagaccttatcattctcaggctcctggagctgaaggc

SEQ ID NO: 45259 - DNA, 80 bp, synthetic construct
  misc_feature 1..80: note = Artificially Synthesized Probe
  source 1..80: mol_type = other DNA
cacagaaaggctctgctccccgaggccagcctggccaaccagtgaaaccccatctctattaaaaatacaaaaattagcca

SEQ ID NO: 45260 - DNA, 80 bp, synthetic construct; identical to SEQ ID NO: 22724
  misc_feature 1..80: note = Artificially Synthesized Probe
  source 1..80: mol_type = other DNA

SEQ ID NO: 45261 - DNA, 80 bp, synthetic construct
  misc_feature 1..80: note = Artificially Synthesized Probe
  source 1..80: mol_type = other DNA
tggtggatcaacacttcccaacacccttcctgtacgcggctgcgcccaccctcccaacaggaggctcagcttcagtcctg

SEQ ID NO: 45262 - DNA, 80 bp, synthetic construct
  misc_feature 1..80: note = Artificially Synthesized Probe
  source 1..80: mol_type = other DNA
ccccaaacctgatagttctccaaagcctgagatataaataccccgtgcgcggctaagcagacacttcagggagcaatctg

SEQ ID NO: 45263 - DNA, 80 bp, synthetic construct; identical to SEQ ID NO: 22648
  misc_feature 1..80: note = Artificially Synthesized Probe
  source 1..80: mol_type = other DNA

SEQ ID NO: 45264 - DNA, 80 bp, synthetic construct
  misc_feature 1..80: note = Artificially Synthesized Probe
  source 1..80: mol_type = other DNA
cgtcaactcaacccaaatctctgcaagaccacaagggccatcagcatttctataaagcttctttactgatttgaatgtat

SEQ ID NO: 45265 - DNA, 80 bp, synthetic construct; identical to SEQ ID NO: 22725
  misc_feature 1..80: note = Artificially Synthesized Probe
  source 1..80: mol_type = other DNA

SEQ ID NO: 45266 - DNA, 80 bp, synthetic construct
  misc_feature 1..80: note = Artificially Synthesized Probe
  source 1..80: mol_type = other DNA
tctcgaactcctggcctcaagccaaatacaagctggtctcgaactcctggcctcaagcaatcctcctgcctcagtctgcc

SEQ ID NO: 45267 - DNA, 80 bp, synthetic construct
  misc_feature 1..80: note = Artificially Synthesized Probe
  source 1..80: mol_type = other DNA
cggcactgagggtgcagcccaggtcctagctcaggtgggatccatttctgaggctgtttaaggcacccacctgtggctca

SEQ ID NO: 45268 - DNA, 80 bp, synthetic construct
  misc_feature 1..80: note = Artificially Synthesized Probe
  source 1..80: mol_type = other DNA
aggaagaggtttctgactaagctcagaggtctgaacacatggcaggttgggtttcagaggggttattaacatgtctgtgg

SEQ ID NO: 45269 - DNA, 80 bp, synthetic construct
  misc_feature 1..80: note = Artificially Synthesized Probe
  source 1..80: mol_type = other DNA
cagcaggatgtccttgttatctgcaggggtggggccgaggtcaggcagccttagctgggccagcagccccgttccacccc

SEQ ID NO: 45270 - DNA, 80 bp, synthetic construct
  misc_feature 1..80: note = Artificially Synthesized Probe
  source 1..80: mol_type = other DNA
cggagggaaccgggggaataagagcggccctgaagtttgtgctccccacggcccctgcacgctggggtcccctgagaact

SEQ ID NO: 45271 - DNA, 80 bp, synthetic construct; identical to SEQ ID NO: 22726
  misc_feature 1..80: note = Artificially Synthesized Probe
  source 1..80: mol_type = other DNA

SEQ ID NO: 45272 - DNA, 80 bp, synthetic construct
  misc_feature 1..80: note = Artificially Synthesized Probe
  source 1..80: mol_type = other DNA
tgagccccctcctcacgagctggccctttcactcctcattccccactttgaagccgacttcaacaacagtatcacggaga

SEQ ID NO: 45273 - DNA, 80 bp, synthetic construct
  misc_feature 1..80: note = Artificially Synthesized Probe
  source 1..80: mol_type = other DNA
caactcctaggccagaccaaaaagaccatttctcctctgatcgctgaccaggccaatttcaagtgagaacagggttcctg

SEQ ID NO: 45274 - DNA, 80 bp, synthetic construct; identical to SEQ ID NO: 22727
  misc_feature 1..80: note = Artificially Synthesized Probe
  source 1..80: mol_type = other DNA

SEQ ID NO: 45275 - DNA, 80 bp, synthetic construct
  misc_feature 1..80: note = Artificially Synthesized Probe
  source 1..80: mol_type = other DNA
gtcttgcctcttgaggcagggtccacgggcttctggacacctccctacctgggccggcttcatcctcctacgaccgacag

SEQ ID NO: 45276 - DNA, 80 bp, synthetic construct
  misc_feature 1..80: note = Artificially Synthesized Probe
  source 1..80: mol_type = other DNA
ccgctggccctgccgacctgccttccacagttgagggcccagacctcggctgggggtctctcacggctggaaacaaacct

SEQ ID NO: 45277 - DNA, 80 bp, synthetic construct
  misc_feature 1..80: note = Artificially Synthesized Probe
  source 1..80: mol_type = other DNA
gccgccgtccggaccatcgccacccatcgccacgctgtgcctggcccccgcagaccctctccctggcctcagggctacta

SEQ ID NO: 45278 - DNA, 80 bp, synthetic construct; identical to SEQ ID NO: 22728
  misc_feature 1..80: note = Artificially Synthesized Probe
  source 1..80: mol_type = other DNA

SEQ ID NO: 45279 - DNA, 80 bp, synthetic construct
  misc_feature 1..80: note = Artificially Synthesized Probe
  source 1..80: mol_type = other DNA
agcgtgcagccatcgctccaggctccccggcgcccaccagcagcccggccactcagccaccttgctgatgctgccgcacg

SEQ ID NO: 45280 - DNA, 80 bp, synthetic construct
  misc_feature 1..80: note = Artificially Synthesized Probe
  source 1..80: mol_type = other DNA
gctggctgcctgggcacgaggctagagtcctcgcgtgcgcgcacacgcgcactcagctcacactcacacgcgctcacaca

SEQ ID NO: 45281 - DNA, 80 bp, synthetic construct; identical to SEQ ID NO: 22655
  misc_feature 1..80: note = Artificially Synthesized Probe
  source 1..80: mol_type = other DNA

SEQ ID NO: 45282 - DNA, 80 bp, synthetic construct
  misc_feature 1..80: note = Artificially Synthesized Probe
  source 1..80: mol_type = other DNA
gtccttgggacctttcactttgagttcctgccaaagggaggagaggagtcatggcctgttctgtccctcacctctcccag

SEQ ID NO: 45283 - DNA, 80 bp, synthetic construct
  misc_feature 1..80: note = Artificially Synthesized Probe
  source 1..80: mol_type = other DNA
cacggtgaaaccccatctctactaaaaatacaaaagttagccaggtgtggtgtcaggtgcctgtaatcccagctacttgg

SEQ ID NO: 45284 - DNA, 80 bp, synthetic construct; identical to SEQ ID NO: 22729
  misc_feature 1..80: note = Artificially Synthesized Probe
  source 1..80: mol_type = other DNA

SEQ ID NO: 45285 - DNA, 80 bp, synthetic construct
  misc_feature 1..80: note = Artificially Synthesized Probe
  source 1..80: mol_type = other DNA
agggcatgaggaacccatgaggtaggaaggaagggtcccacacgccagcagggaagtggtggaccttcggcagagatgct

SEQ ID NO: 45286 - DNA, 80 bp, synthetic construct
  misc_feature 1..80: note = Artificially Synthesized Probe
  source 1..80: mol_type = other DNA
gcagcaggtagtgagtactggaaagacccccgggatgactcatctgctccaagcctctttatcctcctttagagacgttc

SEQ ID NO: 45287 - DNA, 80 bp, synthetic construct
  misc_feature 1..80: note = Artificially Synthesized Probe
  source 1..80: mol_type = other DNA
ggtcaggtgcccaggtgatgaggccaaggtcagctgcccaggtgatgaggccaaggtcagctgccgaggtgatgccacct

SEQ ID NO: 45288 - DNA, 80 bp, synthetic construct; identical to SEQ ID NO: 22730
  misc_feature 1..80: note = Artificially Synthesized Probe
  source 1..80: mol_type = other DNA

SEQ ID NO: 45289 - DNA, 80 bp, synthetic construct
  misc_feature 1..80: note = Artificially Synthesized Probe
  source 1..80: mol_type = other DNA
gtgggggtttctgcctaggcacagagaacaggcaatcagcccaggccaagagaagaccccacactctctgcaccatgtct

SEQ ID NO: 45290 - DNA, 80 bp, synthetic construct
  misc_feature 1..80: note = Artificially Synthesized Probe
  source 1..80: mol_type = other DNA
aggccggtcttgaactcctgggctcaagccaatctcccgcctcggcctcccaaagtgctgggattacaggcgtgagccac

SEQ ID NO: 45291 - DNA, 80 bp, synthetic construct; identical to SEQ ID NO: 22731
  misc_feature 1..80: note = Artificially Synthesized Probe
  source 1..80: mol_type = other DNA

SEQ ID NO: 45292 - DNA, 80 bp, synthetic construct
  misc_feature 1..80: note = Artificially Synthesized Probe
  source 1..80: mol_type = other DNA
cccacggattcatccctgcctggccagtgcaggtttcttgacagtggggtatgtggctgctgcacctgaaccagcaggag

SEQ ID NO: 45293 - DNA, 80 bp, synthetic construct
  misc_feature 1..80: note = Artificially Synthesized Probe
  source 1..80: mol_type = other DNA
gcaccaccacgcccggctaatttttgtatctttagtagagacggcgtttcgccacgttggccaggctggtctcaaactcc

SEQ ID NO: 45294 - DNA, 80 bp, synthetic construct
  misc_feature 1..80: note = Artificially Synthesized Probe
  source 1..80: mol_type = other DNA
gtggctacagatccaaatccacattttccaagctgcatttttttaacagtaatgaaggtgacatgttcatctccaactgt

SEQ ID NO: 45295 - DNA, 80 bp, synthetic construct
  misc_feature 1..80: note = Artificially Synthesized Probe
  source 1..80: mol_type = other DNA
actgcagaagcttctccccttttctaggatggaggttctcttgccctgagctgggggctgttcctctcaggccagtgctt

SEQ ID NO: 45296 - DNA, 80 bp, synthetic construct
  misc_feature 1..80: note = Artificially Synthesized Probe
  source 1..80: mol_type = other DNA
cctcaggagcagaagcacgcgtgttcccagccaggaaggctgggcctcaggagcagaagcacgtgtgctcccggccaggt

SEQ ID NO: 45297 - DNA, 80 bp, synthetic construct; identical to SEQ ID NO: 22732
  misc_feature 1..80: note = Artificially Synthesized Probe
  source 1..80: mol_type = other DNA

SEQ ID NO: 45298 - DNA, 80 bp, synthetic construct
  misc_feature 1..80: note = Artificially Synthesized Probe
  source 1..80: mol_type = other DNA
cactttgggaggctgagacgggcacatcacccgagttcgagaccagcctggccaacacggcaaaacctcatctctactaa

SEQ ID NO: 45299 - DNA, 80 bp, synthetic construct
  misc_feature 1..80: note = Artificially Synthesized Probe
  source 1..80: mol_type = other DNA
aaaaaaaaaaaaaaaaaaaaaaggattatctggccatttctaaacccctcattctaccggacaggacataaaagccaaga

SEQ ID NO: 45300 - DNA, 80 bp, synthetic construct; identical to SEQ ID NO: 22733
  misc_feature 1..80: note = Artificially Synthesized Probe
  source 1..80: mol_type = other DNA

SEQ ID NO: 45301 - DNA, 80 bp, synthetic construct
  misc_feature 1..80: note = Artificially Synthesized Probe
  source 1..80: mol_type = other DNA
gagatcttctggaactggttgttggactggctgcacttctcagctgtctccagagcgactttatagttatcgacaaacgc

SEQ ID NO: 45302 - DNA, 80 bp, synthetic construct
  misc_feature 1..80: note = Artificially Synthesized Probe
  source 1..80: mol_type = other DNA
aaacgcagggatgaacatattacagtgtccctttgaactggacagtttccatggaaaccagctcagccaataaggttaat

SEQ ID NO: 45303 - DNA, 80 bp, synthetic construct
  misc_feature 1..80: note = Artificially Synthesized Probe
  source 1..80: mol_type = other DNA
tggagtcagatctgagttttaagtccagaaccaaaacctacaagttgggtcatcctgggcaagtgagtcggcccttgtga

SEQ ID NO: 45304 - DNA, 80 bp, synthetic construct
  misc_feature 1..80: note = Artificially Synthesized Probe
  source 1..80: mol_type = other DNA
gcagggagagaggggggtgtgtgtgctggggggagctggcacgtgtggcctgctcaggcctccctccccacgtgcagcgt

SEQ ID NO: 45305 - DNA, 80 bp, synthetic construct
  misc_feature 1..80: note = Artificially Synthesized Probe
  source 1..80: mol_type = other DNA
gcgcgtgcctgtaatcccaggtactcaggagaatgaggcaggagaatcgcttgaacccaagaggtggaggctgcagtgaa

SEQ ID NO: 45306 - DNA, 80 bp, synthetic construct; identical to SEQ ID NO: 22734
  misc_feature 1..80: note = Artificially Synthesized Probe
  source 1..80: mol_type = other DNA

SEQ ID NO: 45307 - DNA, 80 bp, synthetic construct
  misc_feature 1..80: note = Artificially Synthesized Probe
  source 1..80: mol_type = other DNA
attttatactcatcagaagggtcaaaatttaaaagtctaattgacagcaacggctggcaagcatatggggaaatttaaac

SEQ ID NO: 45308 - DNA, 80 bp, synthetic construct
  misc_feature 1..80: note = Artificially Synthesized Probe
  source 1..80: mol_type = other DNA
ggctaatcttgtatttttagtagagacggcgtttctccatattggtcaggctggtctcaaactcccaacctcaggtgatc

SEQ ID NO: 45309 - DNA, 80 bp, synthetic construct
  misc_feature 1..80: note = Artificially Synthesized Probe
  source 1..80: mol_type = other DNA
atgcagtgatgccatctcggctcactacaagctccacctcccaggttcgcgccattctcctgcctcagcctcctgagtgg

SEQ ID NO: 45310 - DNA, 80 bp, synthetic construct; identical to SEQ ID NO: 22735
  misc_feature 1..80: note = Artificially Synthesized Probe
  source 1..80: mol_type = other DNA

SEQ ID NO: 45311 - DNA, 80 bp, synthetic construct
  misc_feature 1..80: note = Artificially Synthesized Probe
  source 1..80: mol_type = other DNA
aactaataaagctgagaataggcatggcctattttcagttgaactaataacagtgtggataggcacagcccatcgattgc

SEQ ID NO: 45312 - DNA, 80 bp, synthetic construct
  misc_feature 1..80: note = Artificially Synthesized Probe
  source 1..80: mol_type = other DNA
atgtaaaatacacagtgggttccaaagccttagtatgtaaaagagaatgtaaattacctcgttaatttttaaatactgat

SEQ ID NO: 45313 - DNA, 80 bp, synthetic construct
  misc_feature 1..80: note = Artificially Synthesized Probe
  source 1..80: mol_type = other DNA
atcacctaaggttggcagttcgagaccagcctggccaaaatggtgaaaccctgtctccactaaagatacaaaattatccg

SEQ ID NO: 45314 - DNA, 80 bp, synthetic construct; identical to SEQ ID NO: 22736
  misc_feature 1..80: note = Artificially Synthesized Probe
  source 1..80: mol_type = other DNA

SEQ ID NO: 45315 - DNA, 80 bp, synthetic construct; identical to SEQ ID NO: 22656
  misc_feature 1..80: note = Artificially Synthesized Probe
  source 1..80: mol_type = other DNA

SEQ ID NO: 45316 - DNA, 80 bp, synthetic construct
  misc_feature 1..80: note = Artificially Synthesized Probe
  source 1..80: mol_type = other DNA
gatgcacccgatttacacatagcattgctgacaagctccaaaacgaacatgggttgaactgtaaaatacgattgctgaca

SEQ ID NO: 45317 - DNA, 80 bp, synthetic construct
  misc_feature 1..80: note = Artificially Synthesized Probe
  source 1..80: mol_type = other DNA
gattctcctgcctcagcctcctgactaactgggactacaggcacgcaccaccacacccggctagtttttgtatttttagt

SEQ ID NO: 45318 - DNA, 80 bp, synthetic construct
  misc_feature 1..80: note = Artificially Synthesized Probe
  source 1..80: mol_type = other DNA
cacacctatagccctcgctacttgggagactgaggtgggaggatcacttgagcccgagttcaagtccagcctggacaaca

SEQ ID NO: 45319 - DNA, 80 bp, synthetic construct; identical to SEQ ID NO: 22737
  misc_feature 1..80: note = Artificially Synthesized Probe
  source 1..80: mol_type = other DNA

SEQ ID NO: 45320 - DNA, 80 bp, synthetic construct
  misc_feature 1..80: note = Artificially Synthesized Probe
  source 1..80: mol_type = other DNA
tccccaaggacccagagaggctggggtgggggtaggggtgggggcaggctggccgcagcatcggctgagcctggagcctc

SEQ ID NO: 45321 - DNA, 80 bp, synthetic construct
  misc_feature 1..80: note = Artificially Synthesized Probe
  source 1..80: mol_type = other DNA
caggtctcagctgcagaagggcaggactttaaaagggggcagggccggacttttaaaagagggcggggcctgagttttaa

SEQ ID NO: 45322 - DNA, 80 bp, synthetic construct
  misc_feature 1..80: note = Artificially Synthesized Probe
  source 1..80: mol_type = other DNA
aggaaaaggctcctcttgccccctttcccacaagaaggagaaagcctggaggcccgggttggcacaccaccctcccagga

SEQ ID NO: 45323 - DNA, 80 bp, synthetic construct; identical to SEQ ID NO: 22738
  misc_feature 1..80: note = Artificially Synthesized Probe
  source 1..80: mol_type = other DNA

SEQ ID NO: 45324 - DNA, 80 bp, synthetic construct
  misc_feature 1..80: note = Artificially Synthesized Probe
  source 1..80: mol_type = other DNA
aaccggggacagccaggtccaagtgacaaagataaactgtgacagcgtttccagcaaccctaggtttgctctcctctacc

SEQ ID NO: 45325 - DNA, 80 bp, synthetic construct
  misc_feature 1..80: note = Artificially Synthesized Probe
  source 1..80: mol_type = other DNA
gtgtggcattcccttggaaggataccttccagggtgcctcttcccaatttaataataataataataataataataataat

SEQ ID NO: 45326 - DNA, 80 bp, synthetic construct
  misc_feature 1..80: note = Artificially Synthesized Probe
  source 1..80: mol_type = other DNA
ggcacgatctcggctcactacaacctctgcctcccgagttcaagcgattctcccacctcagcctcccgagtagtagctgg

SEQ ID NO: 45327 - DNA, 80 bp, synthetic construct
  misc_feature 1..80: note = Artificially Synthesized Probe
  source 1..80: mol_type = other DNA
acccccacccagcacacacacaccctggagagcttctagcatttgggatggagagctggggcgggggcaggggcagggca

SEQ ID NO: 45328 - DNA, 80 bp, synthetic construct; identical to SEQ ID NO: 22739
  misc_feature 1..80: note = Artificially Synthesized Probe
  source 1..80: mol_type = other DNA

SEQ ID NO: 45329 - DNA, 80 bp, synthetic construct
  misc_feature 1..80: note = Artificially Synthesized Probe
  source 1..80: mol_type = other DNA
ctgacctcacgatccacccaccccggcctcccaaagtgctgggattacaggcgtgagccaccacgctcagtcaggcctat

SEQ ID NO: 45330 - DNA, 80 bp, synthetic construct
  misc_feature 1..80: note = Artificially Synthesized Probe
  source 1..80: mol_type = other DNA
aatcacccaatgaggtaaatactgttactatcctgttttttacagatgaggaagctgattcagagcggttgggtaagttg

SEQ ID NO: 45331 - DNA, 80 bp, synthetic construct
  misc_feature 1..80: note = Artificially Synthesized Probe
  source 1..80: mol_type = other DNA
aggtcacggtgcattcactcattcaagcagtgaccactgggctggttctgggagtctaagaagaaggaaatgcaggccgg

SEQ ID NO: 45332 - DNA, 80 bp, synthetic construct
  misc_feature 1..80: note = Artificially Synthesized Probe
  source 1..80: mol_type = other DNA
acaaaaattagccgggtgtgatggtgggcgcctgtaatcccagctactcgggatgctgaggcaggagaatcacttgaacc

SEQ ID NO: 45333 - DNA, 80 bp, synthetic construct; identical to SEQ ID NO: 22740
  misc_feature 1..80: note = Artificially Synthesized Probe
  source 1..80: mol_type = other DNA

SEQ ID NO: 45334 - DNA, 80 bp, synthetic construct
  misc_feature 1..80: note = Artificially Synthesized Probe
  source 1..80: mol_type = other DNA
gcaaagggtctctcgagccattcctcggagcctgaccttcatccgagggccgtggggatccgctgaaggggccgtcgagg

SEQ ID NO: 45335 - DNA, 80 bp, synthetic construct
  misc_feature 1..80: note = Artificially Synthesized Probe
  source 1..80: mol_type = other DNA
acaggacaggtgggggagggggtgcagccagaaagagtctgaagcactcggtgaggtaaagacaggaagcggagcaggtg

SEQ ID NO: 45336 - DNA, 80 bp, synthetic construct; identical to SEQ ID NO: 22741
  misc_feature 1..80: note = Artificially Synthesized Probe
  source 1..80: mol_type = other DNA

SEQ ID NO: 45337 - DNA, 80 bp, synthetic construct
  misc_feature 1..80: note = Artificially Synthesized Probe
  source 1..80: mol_type = other DNA
acgtttcccaacacgaggtctgcatgttaacccacccactcctgccgctcccgaccctgcagtggtgagcagggctgggc

SEQ ID NO: 45338 - DNA, 80 bp, synthetic construct
  misc_feature 1..80: note = Artificially Synthesized Probe
  source 1..80: mol_type = other DNA
gcaggcagcccacatgaggaggtgggtcaggcctgagacaaggggccagggtggtggtgaaccgggggacacgtgccctt

SEQ ID NO: 45339 - DNA, 80 bp, synthetic construct
  misc_feature 1..80: note = Artificially Synthesized Probe
  source 1..80: mol_type = other DNA
agaagccttcattccagggctggttcctcagagcaccctccgggagagagagggagcaccgtccgggaaagacggagcac

SEQ ID NO: 45340 - DNA, 80 bp, synthetic construct
  misc_feature 1..80: note = Artificially Synthesized Probe
  source 1..80: mol_type = other DNA
gtcaaggccccggccccaggcaccccataacacacaggcccaggccttcctcccggactcggagaggtctcaggccttca

SEQ ID NO: 45341 - DNA, 80 bp, synthetic construct; identical to SEQ ID NO: 22742
  misc_feature 1..80: note = Artificially Synthesized Probe
  source 1..80: mol_type = other DNA

SEQ ID NO: 45342 - DNA, 80 bp, synthetic construct
  misc_feature 1..80: note = Artificially Synthesized Probe
  source 1..80: mol_type = other DNA
ggctgccaaaggcagggcactgaaacgagctttgtatcaaggagccactgccacaggccccaacaagccgcacactcgac

SEQ ID NO: 45343 - DNA, 80 bp, synthetic construct
  misc_feature 1..80: note = Artificially Synthesized Probe
  source 1..80: mol_type = other DNA
cacttcagtggaagggagggttgacagggaactcaagcctatagctgtttccttccaagaaacagaatgtggttctagga

SEQ ID NO: 45344 - DNA, 80 bp, synthetic construct
  misc_feature 1..80: note = Artificially Synthesized Probe
  source 1..80: mol_type = other DNA
ccactgcgcatggcaggggtctccagtctcagactctttctcaatgcctgcctgtctataccaagatgctccagggcctg

SEQ ID NO: 45345 - DNA, 80 bp, synthetic construct; identical to SEQ ID NO: 22743
  misc_feature 1..80: note = Artificially Synthesized Probe
  source 1..80: mol_type = other DNA

SEQ ID NO: 45346 - DNA, 80 bp, synthetic construct
  misc_feature 1..80: note = Artificially Synthesized Probe
  source 1..80: mol_type = other DNA
attctcctgcctcagcctcccaagtaacagggactacaggcgcccgccaccacgcctggctaattttttttgtattttta

SEQ ID NO: 45347 - DNA, 80 bp, synthetic construct
  misc_feature 1..80: note = Artificially Synthesized Probe
  source 1..80: mol_type = other DNA
catgtcggattctgttgatgttcttcacctacctgaaggccacgtggaaagaggcttagacttggctggtcacggtggct

SEQ ID NO: 45348 - DNA, 80 bp, synthetic construct
  misc_feature 1..80: note = Artificially Synthesized Probe
  source 1..80: mol_type = other DNA
ctgggcgtggtggtgcacacctgtaatcccagctactcaggaggctgaggcaggagaatctcttgaactcaggaggcaga

SEQ ID NO: 45349 - DNA, 80 bp, synthetic construct
  misc_feature 1..80: note = Artificially Synthesized Probe
  source 1..80: mol_type = other DNA
gcctctgcggccactctagatccacaccggccatctgccaccgccgagcggggggtaactgattaggtgccaggatgggc

SEQ ID NO: 45350 - DNA, 80 bp, synthetic construct
  misc_feature 1..80: note = Artificially Synthesized Probe
  source 1..80: mol_type = other DNA
gctgtcccccataggattaagtagtgagctttccgacaagagaagcattctagcagagaatgggtgactccactgctgaa

SEQ ID NO: 45351 - DNA, 80 bp, synthetic construct; identical to SEQ ID NO: 22744
  misc_feature 1..80: note = Artificially Synthesized Probe
  source 1..80: mol_type = other DNA

SEQ ID NO: 45352 - DNA, 80 bp, synthetic construct
  misc_feature 1..80: note = Artificially Synthesized Probe
  source 1..80: mol_type = other DNA
tccttctgaccctcgctgtgctagaatcaatggcccctcggtgtccggtcaggcccctccttctgaccctcaccgtccta

SEQ ID NO: 45353 - DNA, 80 bp, synthetic construct
  misc_feature 1..80: note = Artificially Synthesized Probe
  source 1..80: mol_type = other DNA
cacatcactcagcatccctgggcttcgtgtcaccagcagcctcatgtgtgaaactgggataatacagccatgcgctacct

SEQ ID NO: 45354 - DNA, 80 bp, synthetic construct
  misc_feature 1..80: note = Artificially Synthesized Probe
  source 1..80: mol_type = other DNA
cctcagcctcctgagtagctggaattacaggtgtccaccaccccgcccagctagtttttgtagtttttgtagatatgggg

SEQ ID NO: 45355 - DNA, 80 bp, synthetic construct; identical to SEQ ID NO: 22745
  misc_feature 1..80: note = Artificially Synthesized Probe
  source 1..80: mol_type = other DNA

SEQ ID NO: 45356 - DNA, 80 bp, synthetic construct
  misc_feature 1..80: note = Artificially Synthesized Probe
  source 1..80: mol_type = other DNA
ccctccatgagggacatggaactagcttcaggattgacatcgtcgtaagagtttatccttttcacctcaacgcaggaccc

SEQ ID NO: 45357 - DNA, 80 bp, synthetic construct
  misc_feature 1..80: note = Artificially Synthesized Probe
  source 1..80: mol_type = other DNA
atctgccacccacacgaagacaaaacacaatggttatgcttcctcctcaacttcccaccccgtctgcaaaaggggaagaa

SEQ ID NO: 45358 - DNA, 80 bp, synthetic construct; identical to SEQ ID NO: 22746
  misc_feature 1..80: note = Artificially Synthesized Probe
  source 1..80: mol_type = other DNA

SEQ ID NO: 45359 - DNA, 80 bp, synthetic construct
  misc_feature 1..80: note = Artificially Synthesized Probe
  source 1..80: mol_type = other DNA
tctcggagaggacccgtgagtgacttcaaccctggctcccataccagctgcttctcaggaagacgggcctgggccggttc

SEQ ID NO: 45360 - DNA, 80 bp, synthetic construct
  misc_feature 1..80: note = Artificially Synthesized Probe
  source 1..80: mol_type = other DNA
atgcttgctgccatgccacccgagtcactcgtcactggagcccagggaggaaggcctcattcacctgttttatagataaa

SEQ ID NO: 45361 - DNA, 80 bp, synthetic construct; identical to SEQ ID NO: 22657
  misc_feature 1..80: note = Artificially Synthesized Probe
  source 1..80: mol_type = other DNA

SEQ ID NO: 45362 - DNA, 80 bp, synthetic construct
  misc_feature 1..80: note = Artificially Synthesized Probe
  source 1..80: mol_type = other DNA
aagctcagttcccagtgtcaaggagatccagaatttcaatgcagttggcttcatcttttttccttcaccccctacttcgg

SEQ ID NO: 45363 - DNA, 80 bp, synthetic construct; identical to SEQ ID NO: 22747
  misc_feature 1..80: note = Artificially Synthesized Probe
  source 1..80: mol_type = other DNA

SEQ ID NO: 45364 - DNA, 80 bp, synthetic construct
  misc_feature 1..80: note = Artificially Synthesized Probe
  source 1..80: mol_type = other DNA
tcagggaggagaggaggaagggtgtgattctttcactctgaggttttcttctgaggctgtggctgtggagggtcctactc

SEQ ID NO: 45365 - DNA, 80 bp, synthetic construct
  misc_feature 1..80: note = Artificially Synthesized Probe
  source 1..80: mol_type = other DNA
gaacctgccccgggaggagagagctggggaaggggggaacctgccccgggtggagagagctgggggaagtgggggaacct

SEQ ID NO: 45366 - DNA, 80 bp, synthetic construct
  misc_feature 1..80: note = Artificially Synthesized Probe
  source 1..80: mol_type = other DNA
gggaaggggggaacctgccccgggaggagacagctggggaaggggggaacctgcgccaggcatatcaggaagggggcccc

SEQ ID NO: 45367 - DNA, 80 bp, synthetic construct; identical to SEQ ID NO: 22748
  misc_feature 1..80: note = Artificially Synthesized Probe
  source 1..80: mol_type = other DNA

SEQ ID NO: 45368 - DNA, 80 bp, synthetic construct
  misc_feature 1..80: note = Artificially Synthesized Probe
  source 1..80: mol_type = other DNA
aacatggtgaaatctcatctctactaaaaatacaaaaattagctgggcgtggtggtgggtgcctgtaatctcagctactt

SEQ ID NO: 45369 - DNA, 80 bp, synthetic construct
  misc_feature 1..80: note = Artificially Synthesized Probe
  source 1..80: mol_type = other DNA
aaaaaagaactctgtgtataaattcctttaatcctcacaacgaccccatgaaaagcatactatttgtatacccagtttgc

SEQ ID NO: 45370 - DNA, 80 bp, synthetic construct
  misc_feature 1..80: note = Artificially Synthesized Probe
  source 1..80: mol_type = other DNA
aactatgttcctttttggacagcaattcacggtttggaagacgtgtttcacgaatgtctgacgggttgtctctttgcctg

SEQ ID NO: 45371 - DNA, 80 bp, synthetic construct; identical to SEQ ID NO: 22749
  misc_feature 1..80: note = Artificially Synthesized Probe
  source 1..80: mol_type = other DNA

SEQ ID NO: 45372 - DNA, 80 bp, synthetic construct
  misc_feature 1..80: note = Artificially Synthesized Probe
  source 1..80: mol_type = other DNA
ttttgtacttttttagtagagacggggtttcaccgtgttggccaaggatggtctggatctcctgaccttgtgatccgccc

SEQ ID NO: 45373 - DNA, 80 bp, synthetic construct
  misc_feature 1..80: note = Artificially Synthesized Probe
  source 1..80: mol_type = other DNA
acagcggccccaggagcagccacagggccgggctgcccacctgctgcacagacgttccacctcccggctcacgccactga

SEQ ID NO: 45374 - DNA, 80 bp, synthetic construct
  misc_feature 1..80: note = Artificially Synthesized Probe
  source 1..80: mol_type = other DNA
tatctttcccgtgtatgatgcatgctgacattttttcattggtttaaaaatgctggttcaacccactgtactggtttcac

SEQ ID NO: 45375 - DNA, 80 bp, synthetic construct
  misc_feature 1..80: note = Artificially Synthesized Probe
  source 1..80: mol_type = other DNA
ggaaaacagctccgtacacacagataaactcctggagagatgggacgtactcagcctggcgtgtggcaaaacagctgcac

SEQ ID NO: 45376 - DNA, 80 bp, synthetic construct
  misc_feature 1..80: note = Artificially Synthesized Probe
  source 1..80: mol_type = other DNA
tttagtagagatggggcttcaccatgttggccaggctggtctcgaactcctgacctcaggtgatccacccacctcggcct

SEQ ID NO: 45377 - DNA, 80 bp, synthetic construct; identical to SEQ ID NO: 22750
  misc_feature 1..80: note = Artificially Synthesized Probe
  source 1..80: mol_type = other DNA

SEQ ID NO: 45378 - DNA, 80 bp, synthetic construct
  misc_feature 1..80: note = Artificially Synthesized Probe
  source 1..80: mol_type = other DNA
atctcagggttgacgtgtgacaacacctcacgtcatggcaagtacttaaatgtgcatcttagaattcttgttaagaatga

SEQ ID NO: 45379 - DNA, 80 bp, synthetic construct
  misc_feature 1..80: note = Artificially Synthesized Probe
  source 1..80: mol_type = other DNA
ggaaacgacgctctgccacacagaagagccggggagctgtaactggctataagtcgagcccctggagctgcatctgctct

SEQ ID NO: 45380 - DNA, 80 bp, synthetic construct
  misc_feature 1..80: note = Artificially Synthesized Probe
  source 1..80: mol_type = other DNA
tctgtgtagtacttttatcttccgaaaacattttcatattcccctcccaatcagactctcacaacgatgcctccatctgg

SEQ ID NO: 45381 - DNA, 80 bp, synthetic construct
  misc_feature 1..80: note = Artificially Synthesized Probe
  source 1..80: mol_type = other DNA
tggaaaccagcctggccaacatgataaaatcctgtctctactaaatacaaaaattagccaggactggtggcgtgcacgtg

SEQ ID NO: 45382 - DNA, 80 bp, synthetic construct; identical to SEQ ID NO: 22751
  misc_feature 1..80: note = Artificially Synthesized Probe
  source 1..80: mol_type = other DNA

SEQ ID NO: 45383 - DNA, 80 bp, synthetic construct
  misc_feature 1..80: note = Artificially Synthesized Probe
  source 1..80: mol_type = other DNA
cgggtgtgcttctcctgccttttgagagctggagctgagaggcacaggccctttctggcaatgacccgggctgcccgatg

SEQ ID NO: 45384 - DNA, 80 bp, synthetic construct
  misc_feature 1..80: note = Artificially Synthesized Probe
  source 1..80: mol_type = other DNA
agggcttccagctggttaatgtagatctcttcgctggccaagaaccccgagagaaccagcttcctcatctccaggccttt

SEQ ID NO: 45385 - DNA, 80 bp, synthetic construct
  misc_feature 1..80: note = Artificially Synthesized Probe
  source 1..80: mol_type = other DNA
agagccagctacacagtcaggaaggcggaagtgagcagctgggataagctgatgtttacctggaaatcaaccctttgggg

SEQ ID NO: 45386 - DNA, 80 bp, synthetic construct; identical to SEQ ID NO: 22752
  misc_feature 1..80: note = Artificially Synthesized Probe
  source 1..80: mol_type = other DNA

SEQ ID NO: 45387 - DNA, 80 bp, synthetic construct
  misc_feature 1..80: note = Artificially Synthesized Probe
  source 1..80: mol_type = other DNA
attatgccagactaattttttttgtatttttagtagagatggggtttcaccatgttggccaggctggtatagaactcctg

SEQ ID NO: 45388 - DNA, 80 bp, synthetic construct
  misc_feature 1..80: note = Artificially Synthesized Probe
  source 1..80: mol_type = other DNA
aatataaaaggaaaagacaatcacccatattcctcctgtaacatctcgttttgcttccctcaatctattttccacctggg

SEQ ID NO: 45389 - DNA, 80 bp, synthetic construct
  misc_feature 1..80: note = Artificially Synthesized Probe
  source 1..80: mol_type = other DNA
tgtccatttatttattcattcaataaatatttactgaatgtccaccaggccctatagataccatgggaaacagacagtgg

SEQ ID NO: 45390 - DNA, 80 bp, synthetic construct
  misc_feature 1..80: note = Artificially Synthesized Probe
  source 1..80: mol_type = other DNA
ctgcctcagcctcccgagtagctgggactacaggctcccgccaccacgcccagctaactttttgtatttttagtagagcc

SEQ ID NO: 45391 - DNA, 80 bp, synthetic construct; identical to SEQ ID NO: 22753
  misc_feature 1..80: note = Artificially Synthesized Probe
  source 1..80: mol_type = other DNA

SEQ ID NO: 45392 - DNA, 80 bp, synthetic construct
  misc_feature 1..80: note = Artificially Synthesized Probe
  source 1..80: mol_type = other DNA
tgagggactgcttggaagatgctacactggtaggtttgaagacagaggatggggccacgagctaaggaatgcagagagcc

SEQ ID NO: 45393 - DNA, 80 bp, synthetic construct
  misc_feature 1..80: note = Artificially Synthesized Probe
  source 1..80: mol_type = other DNA
ataatgttttaagagtttacaaatttgtgtcgggccacattcaaagcagtcctgggccgtatggccgcaggctggaaaag

SEQ ID NO: 45394 - DNA, 80 bp, synthetic construct
  misc_feature 1..80: note = Artificially Synthesized Probe
  source 1..80: mol_type = other DNA
aggttcaagcgattctcctgcctcagcctcccgagtacctgggattacaggcgtccaccatcacacccactaatttttgt

SEQ ID NO: 45395 - DNA, 80 bp, synthetic construct; identical to SEQ ID NO: 22754
  misc_feature 1..80: note = Artificially Synthesized Probe
  source 1..80: mol_type = other DNA

SEQ ID NO: 45396 - DNA, 80 bp, synthetic construct
  misc_feature 1..80: note = Artificially Synthesized Probe
  source 1..80: mol_type = other DNA
actcctggctgccagcccgggacatgggtattattaccccatttcacagatgcagaaactgaggctcacaaaaggtaagc

SEQ ID NO: 45397 - DNA, 80 bp, synthetic construct
  misc_feature 1..80: note = Artificially Synthesized Probe
  source 1..80: mol_type = other DNA
accgagagtcgggactgccagaggcctgcacagcctccagcacacgtagccccgggggacaagatcagagcctggaacag

SEQ ID NO: 45398 - DNA, 80 bp, synthetic construct
  misc_feature 1..80: note = Artificially Synthesized Probe
  source 1..80: mol_type = other DNA
agctgtaactgtagagctggttggactaggatggggggaagaaagggatttgcagccccagccacaaacaagcttcatcc

SEQ ID NO: 45399 - DNA, 80 bp, synthetic construct; identical to SEQ ID NO: 22891
  misc_feature 1..80: note = Artificially Synthesized Probe
  source 1..80: mol_type = other DNA

SEQ ID NO: 45400 - DNA, 80 bp, synthetic construct
  misc_feature 1..80: note = Artificially Synthesized Probe
  source 1..80: mol_type = other DNA
tcttttttgagacagaatctcactctgtcgcccaggctggggtacagtgcatgatcttagctcattgcaacctccatctc

SEQ ID NO: 45401 - DNA, 80 bp, synthetic construct
  misc_feature 1..80: note = Artificially Synthesized Probe
  source 1..80: mol_type = other DNA
ctcggctcactgcaacctccgcttcctggattcaagtgattctcctgcctcagcctcccaagtagctgggactacaggcg

SEQ ID NO: 45402 - DNA, 80 bp, synthetic construct
  misc_feature 1..80: note = Artificially Synthesized Probe
  source 1..80: mol_type = other DNA
tttgtatttttagtagagatggggttttgccatgttggccaggatggtctcgaactcctgacctcaggtgatctgcctgc

SEQ ID NO: 45403 - DNA, 80 bp, synthetic construct; identical to SEQ ID NO: 22902
  misc_feature 1..80: note = Artificially Synthesized Probe
  source 1..80: mol_type = other DNA

SEQ ID NO: 45404 - DNA, 80 bp, synthetic construct; identical to SEQ ID NO: 22892
  misc_feature 1..80: note = Artificially Synthesized Probe
  source 1..80: mol_type = other DNA

SEQ ID NO: 45405 - DNA, 80 bp, synthetic construct
  misc_feature 1..80: note = Artificially Synthesized Probe
  source 1..80: mol_type = other DNA
agcagtgatttcaaggtgggggcttgtagtctaaatgtaggaggaaaagagagctggaaggagccaggtctttaaggagg

SEQ ID NO: 45406 - DNA, 80 bp, synthetic construct
  misc_feature 1..80: note = Artificially Synthesized Probe
  source 1..80: mol_type = other DNA
aggctggagtgcagtggtgcgatctcggctcactgcagcctccgcctcccgggttcaagcgattctcctgcctcagcctc

SEQ ID NO: 45407 - DNA, 80 bp, synthetic construct; identical to SEQ ID NO: 22903
  misc_feature 1..80: note = Artificially Synthesized Probe
  source 1..80: mol_type = other DNA

SEQ ID NO: 45408 - DNA, 80 bp, synthetic construct
  misc_feature 1..80: note = Artificially Synthesized Probe
  source 1..80: mol_type = other DNA
tgtcgcagtgacggctagaagaggacacgccgccgccacaggtccggctgcagtcgccccatggagtccacggcccccag

SEQ ID NO: 45409 - DNA, 80 bp, synthetic construct
  misc_feature 1..80: note = Artificially Synthesized Probe
  source 1..80: mol_type = other DNA
ctccgggatgggcagaggcggggtctgaacatgcgaacagagtcaggttacgtaggagagtggtctgggagacagaccag

SEQ ID NO: 45410 - DNA, 80 bp, synthetic construct
  misc_feature 1..80: note = Artificially Synthesized Probe
  source 1..80: mol_type = other DNA
gggcgtggccaatgagggagagagcaaacagtaggcgtggccagagccgtgggaatcattacacggtgggcgtggccaac

SEQ ID NO: 45411 - DNA, 80 bp, synthetic construct
  misc_feature 1..80: note = Artificially Synthesized Probe
  source 1..80: mol_type = other DNA
gacaggcgggtaggcgtggccaacgcgggaggtggctcagggggcgtggcccagttgggggccctggccggcgctcaccc

SEQ ID NO: 45412 - DNA, 80 bp, synthetic construct; identical to SEQ ID NO: 22904
  misc_feature 1..80: note = Artificially Synthesized Probe
  source 1..80: mol_type = other DNA

SEQ ID NO: 45413 - DNA, 80 bp, synthetic construct
  misc_feature 1..80: note = Artificially Synthesized Probe
  source 1..80: mol_type = other DNA
cacagctactaagggaatagcctggagtttaacccagctctttaattcagagtctgtgctctaacgaactttgcaattca

SEQ ID NO: 45414 - DNA, 80 bp, synthetic construct
  misc_feature 1..80: note = Artificially Synthesized Probe
  source 1..80: mol_type = other DNA
tctagttttttccagctgttggttctctttgttcccccatctaaactggagaagcccccaacacttttaagctatgtgga

SEQ ID NO: 45415 - DNA, 80 bp, synthetic construct
  misc_feature 1..80: note = Artificially Synthesized Probe
  source 1..80: mol_type = other DNA
tggctcatgcctgtaatctcagcactttgggaggccgaggcaggtggatcacttcaggtcgggagtttgaaaccagcctg

SEQ ID NO: 45416 - DNA, 80 bp, synthetic construct
  misc_feature 1..80: note = Artificially Synthesized Probe
  source 1..80: mol_type = other DNA
gtcccagggactcactctgactcttaaagtccaggttaatatccctggagaagccccagtgagttcaggtgaagcaaaat

SEQ ID NO: 45417 - DNA, 80 bp, synthetic construct; identical to SEQ ID NO: 22905
  misc_feature 1..80: note = Artificially Synthesized Probe
  source 1..80: mol_type = other DNA

SEQ ID NO: 45418 - DNA, 80 bp, synthetic construct
  misc_feature 1..80: note = Artificially Synthesized Probe
  source 1..80: mol_type = other DNA
taaaaactcagactgtgtcctcttggccatatctaaaaatatcacatcagtcctgtcgcaatcccacttctgacacctct

SEQ ID NO: 45419 - DNA, 80 bp, synthetic construct
  misc_feature 1..80: note = Artificially Synthesized Probe
  source 1..80: mol_type = other DNA
ctgtcttgcctatataaatggctatgaggcacgtgacaggatagataagaaaggacttgcaccaatgccattatggggta

SEQ ID NO: 45420 - DNA, 80 bp, synthetic construct
  misc_feature 1..80: note = Artificially Synthesized Probe
  source 1..80: mol_type = other DNA
agcccaagcttgatattttgacagctcctcccctcccctgcccctttgtaaaatttagagagtcatgagagacctggatt

SEQ ID NO: 45421 - DNA, 80 bp, synthetic construct; identical to SEQ ID NO: 22906
  misc_feature 1..80: note = Artificially Synthesized Probe
  source 1..80: mol_type = other DNA

SEQ ID NO: 45422 - DNA, 80 bp, synthetic construct
  misc_feature 1..80: note = Artificially Synthesized Probe
  source 1..80: mol_type = other DNA
gagggcaatttggcagctgcttgccctctgctttgcattaacatggcatcacaaaaactctgatcgtttgagttgtgata

SEQ ID NO: 45423 - DNA, 80 bp, synthetic construct
  misc_feature 1..80: note = Artificially Synthesized Probe
  source 1..80: mol_type = other DNA
ggctgaagcaggaagccagcaggtcttcagcttcctggggggagctgggagtggaacctcctgccccccaatgcccttct

SEQ ID NO: 45424 - DNA, 80 bp, synthetic construct
  misc_feature 1..80: note = Artificially Synthesized Probe
  source 1..80: mol_type = other DNA
aggaaagatggctcatccccagggaaattatttccgtcaggactggatgtttagttaaaaactgccccgtgagaggtctt

SEQ ID NO: 45425 - DNA, 80 bp, synthetic construct; identical to SEQ ID NO: 22907
  misc_feature 1..80: note = Artificially Synthesized Probe
  source 1..80: mol_type = other DNA

SEQ ID NO: 45426 - DNA, 80 bp, synthetic construct
  misc_feature 1..80: note = Artificially Synthesized Probe
  source 1..80: mol_type = other DNA
cattgctcatctgcatcgtaggcttggcccggtgccactgtcgggtacacaaagtcctgtctggggggccggttgttcag

SEQ ID NO: 45427 - DNA, 80 bp, synthetic construct
  misc_feature 1..80: note = Artificially Synthesized Probe
  source 1..80: mol_type = other DNA
agcctgggagacagagcgagactctgtcacaaaacaaaacaaaaaaacaaaaaaacaaaaaaaaaaaaaaggaaaaatta

SEQ ID NO: 45428 - DNA, 80 bp, synthetic construct
  misc_feature 1..80: note = Artificially Synthesized Probe
  source 1..80: mol_type = other DNA
tctgagggacacccaggtgcatcctcactctagaaagctggtgatgtagtcacggctgcaggatgaccacacgaatgggt

SEQ ID NO: 45429 - DNA, 80 bp, synthetic construct
  misc_feature 1..80: note = Artificially Synthesized Probe
  source 1..80: mol_type = other DNA
ctcttgtgtgccctggcctcacgtgtgcccgatctcgtgggcaatggtgaacgctgtggccaggccaatgtcctcattga

SEQ ID NO: 45430 - DNA, 80 bp, synthetic construct
  misc_feature 1..80: note = Artificially Synthesized Probe
  source 1..80: mol_type = other DNA
ctacggggctcgggtacctagtgtgccgcagggtttgttcttgtagatgcagatgtcatagctgtaaaaggagacagggt

SEQ ID NO: 45431 - DNA, 80 bp, synthetic construct; identical to SEQ ID NO: 22908
  misc_feature 1..80: note = Artificially Synthesized Probe
  source 1..80: mol_type = other DNA

SEQ ID NO: 45432 - DNA, 80 bp, synthetic construct
  misc_feature 1..80: note = Artificially Synthesized Probe
  source 1..80: mol_type = other DNA
gtgtcatggttagccacaccgttctctggaatggcattgccatggccgctgtggttcacgatggatttctgccacttaca

SEQ ID NO: 45433 - DNA, 80 bp, synthetic construct
  misc_feature 1..80: note = Artificially Synthesized Probe
  source 1..80: mol_type = other DNA
tgagcaggatgaggcgagttacgaggatgttaacggtgcttcccagactcgagtcctggaaaagtttggcaacctgacct

SEQ ID NO: 45434 - DNA, 80 bp, synthetic construct
  misc_feature 1..80: note = Artificially Synthesized Probe
  source 1..80: mol_type = other DNA
gggtcttggtatgttgctcaggctggtcttgaactcctgacctcaagtgatcctcctgcctggcctcccatagggctggg

SEQ ID NO: 45435 - DNA, 80 bp, synthetic construct; identical to SEQ ID NO: 22909
  misc_feature 1..80: note = Artificially Synthesized Probe
  source 1..80: mol_type = other DNA

SEQ ID NO: 45436 - DNA, 80 bp, synthetic construct
  misc_feature 1..80: note = Artificially Synthesized Probe
  source 1..80: mol_type = other DNA
agccatgcccgcctaatttttgtatgtttagtagagactgggtttcaccatgttggccaggctggtcttgaactcctgac

SEQ ID NO: 45437 - DNA, 80 bp, synthetic construct
  misc_feature 1..80: note = Artificially Synthesized Probe
  source 1..80: mol_type = other DNA
gtgtcagaagtgagactcaagtctggattgcttaccagaacatttctttcagactcctccaagctcagcttatctacttg

SEQ ID NO: 45438 - DNA, 80 bp, synthetic construct
  misc_feature 1..80: note = Artificially Synthesized Probe
  source 1..80: mol_type = other DNA
aaacaaacaaacacgacccaataaaacaaaagaagacaaatattccctttcctttccattgttccttttcatagcaccca

SEQ ID NO: 45439 - DNA, 80 bp, synthetic construct; identical to SEQ ID NO: 22910
  misc_feature 1..80: note = Artificially Synthesized Probe
  source 1..80: mol_type = other DNA

SEQ ID NO: 45440 - DNA, 80 bp, synthetic construct
  misc_feature 1..80: note = Artificially Synthesized Probe
  source 1..80: mol_type = other DNA
cagcctcagcctccggagtagctgggactacaggtgcccgccaccacgcccagctgatttttgtatttttagtagggaca

SEQ ID NO: 45441 - DNA, 80 bp, synthetic construct
  misc_feature 1..80: note = Artificially Synthesized Probe
  source 1..80: mol_type = other DNA
gcacaactgagggccatcagagacgacactacacaacattttggaccctctgcctgtctgctaaactttttgttttccct

SEQ ID NO: 45442 - DNA, 80 bp, synthetic construct
  misc_feature 1..80: note = Artificially Synthesized Probe
  source 1..80: mol_type = other DNA
gcctgagatctaggatggaaatggactatatctgaaggtgggttggggaggtcagcctgtaggaatttataagtaggtgc

SEQ ID NO: 45443 - DNA, 80 bp, synthetic construct
  misc_feature 1..80: note = Artificially Synthesized Probe
  source 1..80: mol_type = other DNA
actgcaacctctgcctcccgggttcaagcgattctcctgtctcagcctcccaagtagctgggattacaggtgcccaccac

SEQ ID NO: 45444 - DNA, 80 bp, synthetic construct; identical to SEQ ID NO: 22911
  misc_feature 1..80: note = Artificially Synthesized Probe
  source 1..80: mol_type = other DNA

SEQ ID NO: 45445 - DNA, 80 bp, synthetic construct
  misc_feature 1..80: note = Artificially Synthesized Probe
  source 1..80: mol_type = other DNA
agcacagtggcgtgatctcagctcactacaacctccacctccctggttcaagcgattctcctgcctcagcctcctgagta

SEQ ID NO: 45446 - DNA, 80 bp, synthetic construct
  misc_feature 1..80: note = Artificially Synthesized Probe
  source 1..80: mol_type = other DNA
tacacacagcaaacacttatatgccacctactgcatgccaagaactgttctacatgctttatgaatgcactggatctacc

SEQ ID NO: 45447 - DNA, 80 bp, synthetic construct; identical to SEQ ID NO: 22912
  misc_feature 1..80: note = Artificially Synthesized Probe
  source 1..80: mol_type = other DNA

SEQ ID NO: 45448 - DNA, 80 bp, synthetic construct
  misc_feature 1..80: note = Artificially Synthesized Probe
  source 1..80: mol_type = other DNA
cttggctcactgcaagctctgcctcccaggttcacgccattctcctgcctcggcctcccgagtagctgggactacaggcg

SEQ ID NO: 45449 - DNA, 80 bp, synthetic construct
  misc_feature 1..80: note = Artificially Synthesized Probe
  source 1..80: mol_type = other DNA
tggtgaaaccccgtctctactaaaaatacaaaaattagccgggcgtggtggcaggcgcctgtagtcccagctattcagga

SEQ ID NO: 45450 - DNA, 80 bp, synthetic construct
  misc_feature 1..80: note = Artificially Synthesized Probe
  source 1..80: mol_type = other DNA
ttcctttctacccctgtccccacgtcagggattggggtgggatggtagccacccccttgcctaacactgcaggctggctc

SEQ ID NO: 45451 - DNA, 80 bp, synthetic construct
  misc_feature 1..80: note = Artificially Synthesized Probe
  source 1..80: mol_type = other DNA
caggcctggctggccacgctctgtttcattccccaggggcctggcaggcggtggcttcaaggtccgcagccaccatggcc

SEQ ID NO: 45452 - DNA, 80 bp, synthetic construct; identical to SEQ ID NO: 22913
  misc_feature 1..80: note = Artificially Synthesized Probe
  source 1..80: mol_type = other DNA

SEQ ID NO: 45453 - DNA, 80 bp, synthetic construct
  misc_feature 1..80: note = Artificially Synthesized Probe
  source 1..80: mol_type = other DNA
ctaatttttgtatttttaattgagactgcatttcaccatgttggccaggctggtctcgaactcctgacctcaagtgatcc

SEQ ID NO: 45454 - DNA, 80 bp, synthetic construct
  misc_feature 1..80: note = Artificially Synthesized Probe
  source 1..80: mol_type = other DNA
ctacctgagaatattgtagtctaccatgatgtcactgtccctctgccaaactgttgagttgaataacagcctgacttctc

SEQ ID NO: 45455 - DNA, 80 bp, synthetic construct
  misc_feature 1..80: note = Artificially Synthesized Probe
  source 1..80: mol_type = other DNA
atccactgacaattccactgcccgaatggaatggtgtgaaccagcctgttttgcaatttgaactgtgtgcttggacaacg

SEQ ID NO: 45456 - DNA, 80 bp, synthetic construct; identical to SEQ ID NO: 22914
  misc_feature 1..80: note = Artificially Synthesized Probe
  source 1..80: mol_type = other DNA

SEQ ID NO: 45457 - DNA, 80 bp, synthetic construct
  misc_feature 1..80: note = Artificially Synthesized Probe
  source 1..80: mol_type = other DNA
agtagctggaattacaggtgtgtgccaccacgcctggctaacttttttgtatttttagtaaagacggggtttcgccatgt

SEQ ID NO: 45458 - DNA, 80 bp, synthetic construct
  misc_feature 1..80: note = Artificially Synthesized Probe
  source 1..80: mol_type = other DNA
gtgtgatcaaggctcattggagcctcaatctccctggctcaagtgatcctcctgcctcagcctctcaagtagctgggact

SEQ ID NO: 45459 - DNA, 80 bp, synthetic construct
  misc_feature 1..80: note = Artificially Synthesized Probe
  source 1..80: mol_type = other DNA
actgacctggtttcctagcagtacgattgtgttggtaagtattttgttggtgtatagctttccttctctctcatttctta

SEQ ID NO: 45460 - DNA, 80 bp, synthetic construct
  misc_feature 1..80: note = Artificially Synthesized Probe
  source 1..80: mol_type = other DNA
attttgttggtgtatagctttccttctctctcatttcttaaatgcctgattgtacaaccatcctcctaccagtctgatcg

SEQ ID NO: 45461 - DNA, 80 bp, synthetic construct; identical to SEQ ID NO: 22893
  misc_feature 1..80: note = Artificially Synthesized Probe
  source 1..80: mol_type = other DNA

SEQ ID NO: 45462 - DNA, 80 bp, synthetic construct; identical to SEQ ID NO: 22915
  misc_feature 1..80: note = Artificially Synthesized Probe
  source 1..80: mol_type = other DNA

SEQ ID NO: 45463 - DNA, 80 bp, synthetic construct
  misc_feature 1..80: note = Artificially Synthesized Probe
  source 1..80: mol_type = other DNA
tgtatttttagtagagatggggtttcgccatgttggtcaggctggtcttgaactcctgacctcaggtgatccgcccacct

SEQ ID NO: 45464 - DNA, 80 bp, synthetic construct
  misc_feature 1..80: note = Artificially Synthesized Probe
  source 1..80: mol_type = other DNA
atactgtgtagccctctgcccatccccagaaagaccgatgtacctctcactccacaggctgtgtccaggtgggggtgacg

SEQ ID NO: 45465 - DNA, 80 bp, synthetic construct
  misc_feature 1..80: note = Artificially Synthesized Probe
  source 1..80: mol_type = other DNA
agcttccatctagcggccagtgatttatggcaggaccaggggcgaattaaaagctacagatggatttttttttttttttt

SEQ ID NO: 45466 - DNA, 80 bp, synthetic construct
  misc_feature 1..80: note = Artificially Synthesized Probe
  source 1..80: mol_type = other DNA
gttctggagcttaggacccctgggaccttctctctgtctttatgatttcattcttatcaggtttattttgctatttcttt

SEQ ID NO: 45467 - DNA, 80 bp, synthetic construct; identical to SEQ ID NO: 22916
  misc_feature 1..80: note = Artificially Synthesized Probe
  source 1..80: mol_type = other DNA

SEQ ID NO: 45468 - DNA, 80 bp, synthetic construct
  misc_feature 1..80: note = Artificially Synthesized Probe
  source 1..80: mol_type = other DNA
gaggggtagggcagtgctggggggcagggcaccggcagaccacctccccacccctactcttcacagtacatattccgatc

SEQ ID NO: 45469 - DNA, 80 bp, synthetic construct
  misc_feature 1..80: note = Artificially Synthesized Probe
  source 1..80: mol_type = other DNA
tatagtatgtatgtatgtgtatacatacacatacacatatataattatatattatatatatttataaatataaaaaatat

SEQ ID NO: 45470 - DNA, 80 bp, synthetic construct
  misc_feature 1..80: note = Artificially Synthesized Probe
  source 1..80: mol_type = other DNA
ctaatttttatatgtatttttagtagagatggggtttcaccatgttggccaggctggtctcgaactcctgacctcaagtg

SEQ ID NO: 45471 - DNA, 80 bp, synthetic construct
  misc_feature 1..80: note = Artificially Synthesized Probe
  source 1..80: mol_type = other DNA
ctgattggctcaaaacacttaaaaaacatcccactatcattccttctctgccctctatgtagaagtgtttttcttaactt

SEQ ID NO: 45472 - DNA, 80 bp, synthetic construct
  misc_feature 1..80: note = Artificially Synthesized Probe
  source 1..80: mol_type = other DNA
tccagtactccacggagacgtgccctgccagtagacgggagctgcgggtcaggttcagcaggaagtgggtgctgggcgag

SEQ ID NO: 45473 - DNA, 80 bp, synthetic construct; identical to SEQ ID NO: 22917
  misc_feature 1..80: note = Artificially Synthesized Probe
  source 1..80: mol_type = other DNA

SEQ ID NO: 45474 - DNA, 80 bp, synthetic construct
  misc_feature 1..80: note = Artificially Synthesized Probe
  source 1..80: mol_type = other DNA
ccaccagacttcccctaccttgagaccggaaggcgtgcgtgacctcgaacatgaggcccagccccagggcgagggcccag

SEQ ID NO: 45475 - DNA, 80 bp, synthetic construct
  misc_feature 1..80: note = Artificially Synthesized Probe
  source 1..80: mol_type = other DNA
cccgctgtccagcacaaccaatgccaaggccaatcatggccaaagcttttcacctgactctgaagattctgaatgcattt

SEQ ID NO: 45476 - DNA, 80 bp, synthetic construct; identical to SEQ ID NO: 22918
  misc_feature 1..80: note = Artificially Synthesized Probe
  source 1..80: mol_type = other DNA

SEQ ID NO: 45477 - DNA, 80 bp, synthetic construct
  misc_feature 1..80: note = Artificially Synthesized Probe
  source 1..80: mol_type = other DNA
tgcaagccaccacacctggctaatgtttttgtttttttggagagacgggggtctcactttgttgcccaggctgatcttga

SEQ ID NO: 45478 - DNA, 80 bp, synthetic construct
  misc_feature 1..80: note = Artificially Synthesized Probe
  source 1..80: mol_type = other DNA
tcgccatgctggccaggttagtctcaaactcctgacctcaggtgatctgcccaccttggcctcccattgtgttgggatta

SEQ ID NO: 45479 - DNA, 80 bp, synthetic construct
  misc_feature 1..80: note = Artificially Synthesized Probe
  source 1..80: mol_type = other DNA
cacgctcttttttttgagatggagtctcactatgtgacccaggctggagtgcaatggcgcaatcgcggctcactgcaacc

SEQ ID NO: 45480 - DNA, 80 bp, synthetic construct
  misc_feature 1..80: note = Artificially Synthesized Probe
  source 1..80: mol_type = other DNA
ctcgtatccctcatctttttatagatgaggaaatagactcaggagtgatagagtttgccgtgggtcacattgctagaaag

SEQ ID NO: 45481 - DNA, 80 bp, synthetic construct; identical to SEQ ID NO: 22919
  misc_feature 1..80: note = Artificially Synthesized Probe
  source 1..80: mol_type = other DNA

SEQ ID NO: 45482 - DNA, 80 bp, synthetic construct
  misc_feature 1..80: note = Artificially Synthesized Probe
  source 1..80: mol_type = other DNA
ttcaagccagattagagctaaggctcccacccatgcatctactgtcctgggccctgtctttggattatctgaaatgggta

SEQ ID NO: 45483 - DNA, 80 bp, synthetic construct
  misc_feature 1..80: note = Artificially Synthesized Probe
  source 1..80: mol_type = other DNA
tattcactcccacctcccaggcctctcctccaccctgtgtttctgaccccgtcctccattcagattctttcaaggctcca

SEQ ID NO: 45484 - DNA, 80 bp, synthetic construct
  misc_feature 1..80: note = Artificially Synthesized Probe
  source 1..80: mol_type = other DNA
cctcctcctcctctgtgcaaaatcccttaatcacagagtcttgttttctttgcagcccagccaagtctgagagtccaagt

SEQ ID NO: 45485 - DNA, 80 bp, synthetic construct; identical to SEQ ID NO: 22920
  misc_feature 1..80: note = Artificially Synthesized Probe
  source 1..80: mol_type = other DNA

SEQ ID NO: 45486 - DNA, 80 bp, synthetic construct
  misc_feature 1..80: note = Artificially Synthesized Probe
  source 1..80: mol_type = other DNA
catgcccagctaatttttgtatttttaggagagacggggtttcactatgttggccaggatggtctcgatctcttgacctc

SEQ ID NO: 45487 - DNA, 80 bp, synthetic construct
  misc_feature 1..80: note = Artificially Synthesized Probe
  source 1..80: mol_type = other DNA
tgggcccctgtacggatccttccctcgcctgctccctgcacctgggcctccctctctgggccttggtttcttcttctttg

SEQ ID NO: 45488 - DNA, 80 bp, synthetic construct
  misc_feature 1..80: note = Artificially Synthesized Probe
  source 1..80: mol_type = other DNA
tccaacaaaaacccacctcctctccctctccctctcttcttgcttcttcttccctattccttctttggaagtgtcagcca

SEQ ID NO: 45489 - DNA, 80 bp, synthetic construct; identical to SEQ ID NO: 22921
  misc_feature 1..80: note = Artificially Synthesized Probe
  source 1..80: mol_type = other DNA

SEQ ID NO: 45490 - DNA, 80 bp, synthetic construct; identical to SEQ ID NO: 22894
  misc_feature 1..80: note = Artificially Synthesized Probe
  source 1..80: mol_type = other DNA

SEQ ID NO: 45491 - DNA, 80 bp, synthetic construct
  misc_feature 1..80: note = Artificially Synthesized Probe
  source 1..80: mol_type = other DNA
cctgtgcacagtgtatggggtagggggaggaggggggtctgcagaaggctcacaggcgtctgagctgggggtccagccca

SEQ ID NO: 45492 - DNA, 80 bp, synthetic construct
  misc_feature 1..80: note = Artificially Synthesized Probe
  source 1..80: mol_type = other DNA
tgtgtgtgactgcatgtacattacagcatgtatgtgagtgtgtgtgaccctgtgtgtgattgtgagcgtgtgactgcatg

SEQ ID NO: 45493 - DNA, 80 bp, synthetic construct
  misc_feature 1..80: note = Artificially Synthesized Probe
  source 1..80: mol_type = other DNA
tggaaatggcttagaaacagaggctctgtcccatcccatcccatcccggggatcctgaagggaccctaagctccacaccc

SEQ ID NO: 45494 - DNA, 80 bp, synthetic construct
  misc_feature 1..80: note = Artificially Synthesized Probe
  source 1..80: mol_type = other DNA
ggcccagccggggcctgcgggaggagggggccggcgcccgggctggtcccccacaaccggccgctaattaaaggccctga

SEQ ID NO: 45495 - DNA, 80 bp, synthetic construct; identical to SEQ ID NO: 22922
  misc_feature 1..80: note = Artificially Synthesized Probe
  source 1..80: mol_type = other DNA

SEQ ID NO: 45496 - DNA, 80 bp, synthetic construct
  misc_feature 1..80: note = Artificially Synthesized Probe
  source 1..80: mol_type = other DNA
agacagacacacaggcctacacgctgacacatacacactcatttgcatgctcacaccaaaccagagacaaactcacaagt

SEQ ID NO: 45497 - DNA, 80 bp, synthetic construct
  misc_feature 1..80: note = Artificially Synthesized Probe
  source 1..80: mol_type = other DNA
gcgcacacactgtccaaacacacagacacacaagagactcatccccaggcactgacacacacatgtaatgcacaaccact

SEQ ID NO: 45498 - DNA, 80 bp, synthetic construct
  misc_feature 1..80: note = Artificially Synthesized Probe
  source 1..80: mol_type = other DNA
ccacgccctcacagcccgatgcggacacacaaagtcccactgaatcacgcacccccgggccccccgcccgcgccgctacc

SEQ ID NO: 45499 - DNA, 80 bp, synthetic construct
  misc_feature 1..80: note = Artificially Synthesized Probe
  source 1..80: mol_type = other DNA
tgcgccgcgcccggggcctccgcgccgtcgccgccgctgtctcgccgccccgcgcgcgcaggaagggagggagcgagcga

SEQ ID NO: 45500 - DNA, 80 bp, synthetic construct
  misc_feature 1..80: note = Artificially Synthesized Probe
  source 1..80: mol_type = other DNA
gaggtcaggaattcgagaccagcctggccaatatggtgaaaccccatctctactaaaaatacaaaaattagctggtcatg

SEQ ID NO: 45501 - DNA, 80 bp, synthetic construct
  misc_feature 1..80: note = Artificially Synthesized Probe
  source 1..80: mol_type = other DNA
agccaggcgcagtggctcacgcctgtaatcccagcactttgggaggccgaggcgggtggattacttgaggccaggagttc

SEQ ID NO: 45502 - DNA, 80 bp, synthetic construct
  misc_feature 1..80: note = Artificially Synthesized Probe
  source 1..80: mol_type = other DNA
cgagatcgctctactgcactccaacgtgggtgacaaagtgagtcccggtctcaaaaataaataagtaaataaggctgggc

SEQ ID NO: 45503 - DNA, 80 bp, synthetic construct
  misc_feature 1..80: note = Artificially Synthesized Probe
  source 1..80: mol_type = other DNA
tactcagcaggctgaggcaggagaatcgattgaacccaggaggcggaggttgcagtgagccgagatcaggtcactgcact

SEQ ID NO: 45504 - DNA, 80 bp, synthetic construct; identical to SEQ ID NO: 22895
  misc_feature 1..80: note = Artificially Synthesized Probe
  source 1..80: mol_type = other DNA

SEQ ID NO: 45505 - DNA, 80 bp, synthetic construct
  misc_feature 1..80: note = Artificially Synthesized Probe
  source 1..80: mol_type = other DNA
ggacagctccccacggcaatcatctagctcaaaatgtcactagtgcctgaggttgaaaaaccgatttaaaggaaaaatat

SEQ ID NO: 45506 - DNA, 80 bp, synthetic construct
  misc_feature 1..80: note = Artificially Synthesized Probe
  source 1..80: mol_type = other DNA
cctggcagagacacagcaatgcatttccgaggttccagaagttctaggatgaagtcaggacccccaatgccctctgtggc

SEQ ID NO: 45507 - DNA, 80 bp, synthetic construct
  misc_feature 1..80: note = Artificially Synthesized Probe
  source 1..80: mol_type = other DNA
gtgcagcgcaccgagcgctgccgctgcccgacgccgcactgtgcagagcactgcgagggggcaccactcagttgctgccc

SEQ ID NO: 45508 - DNA, 80 bp, synthetic construct
  misc_feature 1..80: note = Artificially Synthesized Probe
  source 1..80: mol_type = other DNA
tctccatccccccagccagggccctgcaggggttcccaataaataacttccggctccgtctcacccttccctcccagttc

SEQ ID NO: 45509 - DNA, 80 bp, synthetic construct; identical to SEQ ID NO: 22896
  misc_feature 1..80: note = Artificially Synthesized Probe
  source 1..80: mol_type = other DNA

SEQ ID NO: 45510 - DNA, 80 bp, synthetic construct
  misc_feature 1..80: note = Artificially Synthesized Probe
  source 1..80: mol_type = other DNA
gagggcaagtggggccgtggcaggcctccagtacaggtgggcgcggctgcgggcatgcgctgtcgtccagcgccttctcc

SEQ ID NO: 45511 - DNA, 80 bp, synthetic construct
  misc_feature 1..80: note = Artificially Synthesized Probe
  source 1..80: mol_type = other DNA
gcactatagcctacccccacccttccaatcacccagcctcatatggaaactggcaccaggcacctccacattccacactt

SEQ ID NO: 45512 - DNA, 80 bp, synthetic construct; identical to SEQ ID NO: 22897
  misc_feature 1..80: note = Artificially Synthesized Probe
  source 1..80: mol_type = other DNA

SEQ ID NO: 45513 - DNA, 80 bp, synthetic construct
  misc_feature 1..80: note = Artificially Synthesized Probe
  source 1..80: mol_type = other DNA
ggagctgtccagctggttgcggcactccaccgcctgcacctggctacctggaggggagggtgagaggcctgctcagcccc

SEQ ID NO: 45514 - DNA, 80 bp, synthetic construct
  misc_feature 1..80: note = Artificially Synthesized Probe
  source 1..80: mol_type = other DNA
gcaggcagctcggtccgggccagcacctggagaaagggggcggcagccagtggaaggatcgcatggagtctctaattcca

SEQ ID NO: 45515 - DNA, 80 bp, synthetic construct
  misc_feature 1..80: note = Artificially Synthesized Probe
  source 1..80: mol_type = other DNA
ccctccagcagcagggactcctggtctcccttcagggctgggggacgatgcagggttcagaattctagtcatgctgaaac

SEQ ID NO: 45516 - DNA, 80 bp, synthetic construct; identical to SEQ ID NO: 22898
  misc_feature 1..80: note = Artificially Synthesized Probe
  source 1..80: mol_type = other DNA

SEQ ID NO: 45517 - DNA, 80 bp, synthetic construct
  misc_feature 1..80: note = Artificially Synthesized Probe
  source 1..80: mol_type = other DNA
ggcggaagtaggctcggctgcagaactgaaatttgagcaccagggggcagtaggcgaccttgttcacatccttgcactct

SEQ ID NO: 45518 - DNA, 80 bp, synthetic construct
  misc_feature 1..80: note = Artificially Synthesized Probe
  source 1..80: mol_type = other DNA
tttttttttttggagacaggatgtctctgttgcccaggctggagtgcagtgaagtgatcttggcttgctacagcctcaga

SEQ ID NO: 45519 - DNA, 80 bp, synthetic construct
  misc_feature 1..80: note = Artificially Synthesized Probe
  source 1..80: mol_type = other DNA
gggctcaagtgatcctcttgcctcagcctcccaaagtgctgggagcaccggtatgagcctggccagcttttttttttttt

SEQ ID NO: 45520 - DNA, 80 bp, synthetic construct
  misc_feature 1..80: note = Artificially Synthesized Probe
  source 1..80: mol_type = other DNA
ttttgtagccgggcacagtggtcacgcctataatcccagcacattgggaggctgaggcgggcagatcatgaggtcaggag

SEQ ID NO: 45521 - DNA, 80 bp, synthetic construct; identical to SEQ ID NO: 22899
  misc_feature 1..80: note = Artificially Synthesized Probe
  source 1..80: mol_type = other DNA

SEQ ID NO: 45522 - DNA, 80 bp, synthetic construct
  misc_feature 1..80: note = Artificially Synthesized Probe
  source 1..80: mol_type = other DNA
gtagtctcagctacttgggatggtgaggcaggagaatttcttgaacctgggaggcagaggttgcagtgagccgagatcaa

SEQ ID NO: 45523 - DNA, 80 bp, synthetic construct
  misc_feature 1..80: note = Artificially Synthesized Probe
  source 1..80: mol_type = other DNA
tgtgagccaccgtgcctgtctcacttttgatgccagcggccaggctgcttattataaaaccccaatgggactctacctgg

SEQ ID NO: 45524 - DNA, 80 bp, synthetic construct
  misc_feature 1..80: note = Artificially Synthesized Probe
  source 1..80: mol_type = other DNA
ggaaaaggtgctttctacattctctgaatatcccctcccgtagtaagcctttccctgctagcacagaacattcattctcg

SEQ ID NO: 45525 - DNA, 80 bp, synthetic construct
  misc_feature 1..80: note = Artificially Synthesized Probe
  source 1..80: mol_type = other DNA
gcagtggtgtgatctcggctcactgcaacctccacctcccaggttcaagcagttctcgtgcctcagcttcctgagtagct

SEQ ID NO: 45526 - DNA, 80 bp, synthetic construct
  misc_feature 1..80: note = Artificially Synthesized Probe
  source 1..80: mol_type = other DNA
atttactttttttttttttttttttttttttttttacagatgttatcttgctatgttgaccaggctggtctccacctctt

SEQ ID NO: 45527 - DNA, 80 bp, synthetic construct; identical to SEQ ID NO: 22900
  misc_feature 1..80: note = Artificially Synthesized Probe
  source 1..80: mol_type = other DNA

SEQ ID NO: 45528 - DNA, 80 bp, synthetic construct
  misc_feature 1..80: note = Artificially Synthesized Probe
  source 1..80: mol_type = other DNA
tcccgcaggtcggagcccaggactcggtcgcagcccacgtgctgcgtggagaaggcgtgagtgaggcgaccccctaaccc

SEQ ID NO: 45529 - DNA, 80 bp, synthetic construct
  misc_feature 1..80: note = Artificially Synthesized Probe
  source 1..80: mol_type = other DNA
gcgagcaggccttcacgccccctggggggcacggccccgtcacaccacgggccaggccaccccggaactctttgcttgct

SEQ ID NO: 45530 - DNA, 80 bp, synthetic construct
  misc_feature 1..80: note = Artificially Synthesized Probe
  source 1..80: mol_type = other DNA
gggatgctgcattcatccacctgctgctggacactcccacggctgcccttcacggccccacagcctttggagtcccacac

SEQ ID NO: 45531 - DNA, 80 bp, synthetic construct; identical to SEQ ID NO: 22901
  misc_feature 1..80: note = Artificially Synthesized Probe
  source 1..80: mol_type = other DNA

SEQ ID NO: 45532 - DNA, 80 bp, synthetic construct; identical to SEQ ID NO: 22923
  misc_feature 1..80: note = Artificially Synthesized Probe
  source 1..80: mol_type = other DNA

SEQ ID NO: 45533 - DNA, 80 bp, synthetic construct
  misc_feature 1..80: note = Artificially Synthesized Probe
  source 1..80: mol_type = other DNA
ctctaggagccgctaaggtgtctgattttcctcccttcctctcacaaacctgctcacacggcctcctgctggacccaggg

SEQ ID NO: 45534 - DNA, 80 bp, synthetic construct
  misc_feature 1..80: note = Artificially Synthesized Probe
  source 1..80: mol_type = other DNA
cttctccatattcacaaggtaactcattcacgcctggcaacagctctacaaggctggcactattactgttgctgaaatat

SEQ ID NO: 45535 - DNA, 80 bp, synthetic construct; identical to SEQ ID NO: 22934
  misc_feature 1..80: note = Artificially Synthesized Probe
  source 1..80: mol_type = other DNA

SEQ ID NO: 45536 - DNA, 80 bp, synthetic construct
  misc_feature 1..80: note = Artificially Synthesized Probe
  source 1..80: mol_type = other DNA
agcgattctcctgcctcagcctctcaagtagcggggattacaggctcccaccgccatgcccagctaaattttttttgcat

SEQ ID NO: 45537 - DNA, 80 bp, synthetic construct
  misc_feature 1..80: note = Artificially Synthesized Probe
  source 1..80: mol_type = other DNA
acccagtgatatcaggttggtagtgcaaacaaacatagcttcagtcgcttgcttcaagcttctatcttgaaacccaaaga

SEQ ID NO: 45538 - DNA, 80 bp, synthetic construct
  misc_feature 1..80: note = Artificially Synthesized Probe
  source 1..80: mol_type = other DNA
ttccagagcacggctgtctgtgagggacaggtcaggatctccagggacctgtaggtgtgatggtgttaggggagggatgg

SEQ ID NO: 45539 - DNA, 80 bp, synthetic construct
  misc_feature 1..80: note = Artificially Synthesized Probe
  source 1..80: mol_type = other DNA
cttctccccaggctcctctctcagccacctgccagcaatgcctctccttctctgagcacctcccctccagacccttggtt

SEQ ID NO: 45540 - DNA, 80 bp, synthetic construct; identical to SEQ ID NO: 22924
  misc_feature 1..80: note = Artificially Synthesized Probe
  source 1..80: mol_type = other DNA

SEQ ID NO: 45541 - DNA, 80 bp, synthetic construct; identical to SEQ ID NO: 22935
  misc_feature 1..80: note = Artificially Synthesized Probe
  source 1..80: mol_type = other DNA

SEQ ID NO: 45542 - DNA, 80 bp, synthetic construct
  misc_feature 1..80: note = Artificially Synthesized Probe
  source 1..80: mol_type = other DNA
tatggccttggtaggaaggggtgagcctgggcaggtgcccagcttggtgagtcagcctctgcaatgggacggggctgagc

SEQ ID NO: 45543 - DNA, 80 bp, synthetic construct
  misc_feature 1..80: note = Artificially Synthesized Probe
  source 1..80: mol_type = other DNA
catcccggctggtgcccgagacatccagattgtagagaggaagaagtccgctgacgtgctaggtgggtacgcagtgtctg

SEQ ID NO: 45544 - DNA, 80 bp, synthetic construct
  misc_feature 1..80: note = Artificially Synthesized Probe
  source 1..80: mol_type = other DNA
tcacaggggagccagctttacccctgtgcatggcaggaccttgaactcagagctgctggacaatgggagggtggtgatgt

SEQ ID NO: 45545 - DNA, 80 bp, synthetic construct; identical to SEQ ID NO: 22936
  misc_feature 1..80: note = Artificially Synthesized Probe
  source 1..80: mol_type = other DNA

SEQ ID NO: 45546 - DNA, 80 bp, synthetic construct
  misc_feature 1..80: note = Artificially Synthesized Probe
  source 1..80: mol_type = other DNA
tattggccgagcagcgtgccatgtctgcaccccttgggccacagtgggcaggtgctgacacctgtgagctgctctgtgct

SEQ ID NO: 45547 - DNA, 80 bp, synthetic construct
  misc_feature 1..80: note = Artificially Synthesized Probe
  source 1..80: mol_type = other DNA
ctggaagaggaggctttgctgaaggtcttcaggctgggacccaccttgggttctcctgttccctctccagagcctaaggg

SEQ ID NO: 45548 - DNA, 80 bp, synthetic construct
  misc_feature 1..80: note = Artificially Synthesized Probe
  source 1..80: mol_type = other DNA
gagagtggagaggccaggaaactccacattctctgagctggctgcaaagctcttgctcttgaaacagacgcgtagaaata

SEQ ID NO: 45549 - DNA, 80 bp, synthetic construct
  misc_feature 1..80: note = Artificially Synthesized Probe
  source 1..80: mol_type = other DNA
actctaatttgcgttatcttctgacttttctacgtgaagggggtttttcaagcagacatgtcctgcttgttgcgtctgtc

SEQ ID NO: 45550 - DNA, 80 bp, synthetic construct; identical to SEQ ID NO: 22937
  misc_feature 1..80: note = Artificially Synthesized Probe
  source 1..80: mol_type = other DNA

SEQ ID NO: 45551 - DNA, 80 bp, synthetic construct
  misc_feature 1..80: note = Artificially Synthesized Probe
  source 1..80: mol_type = other DNA
gccccagggaggatcagttccccttgaaaccccaccagctctgggctgttgttccagtctgcaggggtggtggggagtgg

SEQ ID NO: 45552 - DNA, 80 bp, synthetic construct
  misc_feature 1..80: note = Artificially Synthesized Probe
  source 1..80: mol_type = other DNA
cagagggcagacggtattatcgctttcactactattactggtggctttccttcccagcctttctggtgggtggtcagaca

SEQ ID NO: 45553 - DNA, 80 bp, synthetic construct
  misc_feature 1..80: note = Artificially Synthesized Probe
  source 1..80: mol_type = other DNA
gattggaccaggccgccctggcctgattgagcacctcggccaggcctgggtgcacgggttgactgggtgaagggtcagca

SEQ ID NO: 45554 - DNA, 80 bp, synthetic construct
  misc_feature 1..80: note = Artificially Synthesized Probe
  source 1..80: mol_type = other DNA
caggacccctgctgcctcgtgtgtgccttccacaggccacagactctcctgctccagactgggtcccttggttgtggtgc

SEQ ID NO: 45555 - DNA, 80 bp, synthetic construct; identical to SEQ ID NO: 22938
  misc_feature 1..80: note = Artificially Synthesized Probe
  source 1..80: mol_type = other DNA

SEQ ID NO: 45556 - DNA, 80 bp, synthetic construct
  misc_feature 1..80: note = Artificially Synthesized Probe
  source 1..80: mol_type = other DNA
gtacaggcggcccatggatgtctatgagaccggaatcgagtacatcgtggcacaggggcccaccaaccagggcctgaatg

SEQ ID NO: 45557 - DNA, 80 bp, synthetic construct
  misc_feature 1..80: note = Artificially Synthesized Probe
  source 1..80: mol_type = other DNA
gttcaatcactgttactcattcacttgttctttcactaactccctcccccattcattcattcactcggattttggttcat

SEQ ID NO: 45558 - DNA, 80 bp, synthetic construct
  misc_feature 1..80: note = Artificially Synthesized Probe
  source 1..80: mol_type = other DNA
ttccagtctcccattcactcatcagttcattaattcatttacctgttcacttctcactcaaccacctattctctcaccca

SEQ ID NO: 45559 - DNA, 80 bp, synthetic construct
  misc_feature 1..80: note = Artificially Synthesized Probe
  source 1..80: mol_type = other DNA
gggtttatgcccctacctagcttcaggctccaccccctccccaggcactatggtgctcggtccttagtgccagggcccaa

SEQ ID NO: 45560 - DNA, 80 bp, synthetic construct; identical to SEQ ID NO: 22939
  misc_feature 1..80: note = Artificially Synthesized Probe
  source 1..80: mol_type = other DNA

SEQ ID NO: 45561 - DNA, 80 bp, synthetic construct
  misc_feature 1..80: note = Artificially Synthesized Probe
  source 1..80: mol_type = other DNA
gcgagtgacttgcagtcatggaattgtgagtggcacgactgggctttgaacccaggcctgcctggtgccagagcctgttc

SEQ ID NO: 45562 - DNA, 80 bp, synthetic construct
  misc_feature 1..80: note = Artificially Synthesized Probe
  source 1..80: mol_type = other DNA
ggaggtggactgaccacttggctttgcctcctggctgcaggggctgttttgtaggtcagggtccccagaaaatagactct

SEQ ID NO: 45563 - DNA, 80 bp, synthetic construct
  misc_feature 1..80: note = Artificially Synthesized Probe
  source 1..80: mol_type = other DNA
tggaatggtgccccagcttcctcctcctcccctttttggaggtgcctctgtttgccgaggatgggctctggggaagctgg

SEQ ID NO: 45564 - DNA, 80 bp, synthetic construct
  misc_feature 1..80: note = Artificially Synthesized Probe
  source 1..80: mol_type = other DNA
tcaagttggggcaggagggcatcacatactgccaggtgtagttgccccttgtggggggcatgacctggggagagacagct

SEQ ID NO: 45565 - DNA, 80 bp, synthetic construct; identical to SEQ ID NO: 22940
  misc_feature 1..80: note = Artificially Synthesized Probe
  source 1..80: mol_type = other DNA

SEQ ID NO: 45566 - DNA, 80 bp, synthetic construct
  misc_feature 1..80: note = Artificially Synthesized Probe
  source 1..80: mol_type = other DNA
gtagctgggactacaggcgtccgccactacgcccggctaatttttttttgtatttttagtagagacagggtttcaccgtt

SEQ ID NO: 45567 - DNA, 80 bp, synthetic construct
  misc_feature 1..80: note = Artificially Synthesized Probe
  source 1..80: mol_type = other DNA
caggtggctacctggtgaggtgaccctggtctccatgaccatctcaacctgaggctgctgcttttgtccagttatcatca

SEQ ID NO: 45568 - DNA, 80 bp, synthetic construct
  misc_feature 1..80: note = Artificially Synthesized Probe
  source 1..80: mol_type = other DNA
tctaggcctcaggtaaccctcctgcctcagcctctcatagtgcttggattataggcgtgagccacctgccttggcctgtc

SEQ ID NO: 45569 - DNA, 80 bp, synthetic construct; identical to SEQ ID NO: 22941
  misc_feature 1..80: note = Artificially Synthesized Probe
  source 1..80: mol_type = other DNA

SEQ ID NO: 45570 - DNA, 80 bp, synthetic construct
  misc_feature 1..80: note = Artificially Synthesized Probe
  source 1..80: mol_type = other DNA
agctcacagctatggctgtgtgggggtgccctgaagagcagagaaaaatggccaaacttgatttagagatgggtcggctt

SEQ ID NO: 45571 - DNA, 80 bp, synthetic construct
  misc_feature 1..80: note = Artificially Synthesized Probe
  source 1..80: mol_type = other DNA
gagaaaaatggccaaacttgatttagagatgggtcggcttgccctgagggtgcaagctggaagtaagatctacttcacta

SEQ ID NO: 45572 - DNA, 80 bp, synthetic construct
  misc_feature 1..80: note = Artificially Synthesized Probe
  source 1..80: mol_type = other DNA
gggtgttggaggatacggcaggcccagtggatctcacagtcatgcgcccattgtggcacgtcctctgctataaagcgggt

SEQ ID NO: 45573 - DNA, 80 bp, synthetic construct; identical to SEQ ID NO: 22942
  misc_feature 1..80: note = Artificially Synthesized Probe
  source 1..80: mol_type = other DNA

SEQ ID NO: 45574 - DNA, 80 bp, synthetic construct
  misc_feature 1..80: note = Artificially Synthesized Probe
  source 1..80: mol_type = other DNA
ggccattctgtcttctactggggtgtttagtgcctctcgcatggtgacacttcctggtacaaatgaacaaatgaaaggaa

SEQ ID NO: 45575 - DNA, 80 bp, synthetic construct
  misc_feature 1..80: note = Artificially Synthesized Probe
  source 1..80: mol_type = other DNA
caggggctgccaagttggtgctggacatctgcagaatccctgagcctctctgccctggccctggctgctctagccatctg

SEQ ID NO: 45576 - DNA, 80 bp, synthetic construct
  misc_feature 1..80: note = Artificially Synthesized Probe
  source 1..80: mol_type = other DNA
ccctgcctcccatcacaccgatgcttacatcacatgcactgcctgaagcccatggggaagattttccttcactgctcttt

SEQ ID NO: 45577 - DNA, 80 bp, synthetic construct
  misc_feature 1..80: note = Artificially Synthesized Probe
  source 1..80: mol_type = other DNA
aaaggggatgtgtgggtacaagagtcttggatgggggagtttgggtcccttgctgacacagctttgtcgtaccctctggc

SEQ ID NO: 45578 - DNA, 80 bp, synthetic construct
  misc_feature 1..80: note = Artificially Synthesized Probe
  source 1..80: mol_type = other DNA
aagttttttgcaagtgatgtgtatttatttactgcagatggccttgctccagaaccatagggtgctatgttatgctttcc

SEQ ID NO: 45579 - DNA, 80 bp, synthetic construct; identical to SEQ ID NO: 22943
  misc_feature 1..80: note = Artificially Synthesized Probe
  source 1..80: mol_type = other DNA

SEQ ID NO: 45580 - DNA, 80 bp, synthetic construct
  misc_feature 1..80: note = Artificially Synthesized Probe
  source 1..80: mol_type = other DNA
gcacagtctcagctccctgcaacctccgcctcctaggttcaaacgattctcctgcctcagcctccagagtagctgggatt

SEQ ID NO: 45581 - DNA, 80 bp, synthetic construct
  misc_feature 1..80: note = Artificially Synthesized Probe
  source 1..80: mol_type = other DNA
gcagcagcttttaatgtcacccagcagatgagttgaacagatattcttggatgtggaatatgctggctccagaattactc

SEQ ID NO: 45582 - DNA, 80 bp, synthetic construct
  misc_feature 1..80: note = Artificially Synthesized Probe
  source 1..80: mol_type = other DNA
ctgacatttccactaatgtaaggggctgccgaatcttcacagggttgaatctctgctcctctggaagacaggtgctttac

SEQ ID NO: 45583 - DNA, 80 bp, synthetic construct; identical to SEQ ID NO: 22944
  misc_feature 1..80: note = Artificially Synthesized Probe
  source 1..80: mol_type = other DNA

SEQ ID NO: 45584 - DNA, 80 bp, synthetic construct
  misc_feature 1..80: note = Artificially Synthesized Probe
  source 1..80: mol_type = other DNA
gactcggatggcagatccctggggtctgtcttgttattgtgggggctgaactatcgagttaaatgcgggatgtgatgggc

SEQ ID NO: 45585 - DNA, 80 bp, synthetic construct
  misc_feature 1..80: note = Artificially Synthesized Probe
  source 1..80: mol_type = other DNA
tccattggtgtatagccccttctcccaggactgccctgactgggcgagaatgtgacttaatctaagctattggtctggtg

SEQ ID NO: 45586 - DNA, 80 bp, synthetic construct
  misc_feature 1..80: note = Artificially Synthesized Probe
  source 1..80: mol_type = other DNA
gaagtttttcaagtgtattgacgcagatccccacaccccgagtctcaaggtccccctcttctggttggtctctgtcctgg

SEQ ID NO: 45587 - DNA, 80 bp, synthetic construct; identical to SEQ ID NO: 22925
  misc_feature 1..80: note = Artificially Synthesized Probe
  source 1..80: mol_type = other DNA

SEQ ID NO: 45588 - DNA, 80 bp, synthetic construct; identical to SEQ ID NO: 22945
  misc_feature 1..80: note = Artificially Synthesized Probe
  source 1..80: mol_type = other DNA

SEQ ID NO: 45589 - DNA, 80 bp, synthetic construct
  misc_feature 1..80: note = Artificially Synthesized Probe
  source 1..80: mol_type = other DNA
taaaatcctaggcctgcctgctcctgacaccagctggttttggttggaatctctggaaaaagcaactcctggagagaggg

SEQ ID NO: 45590 - DNA, 80 bp, synthetic construct
  misc_feature 1..80: note = Artificially Synthesized Probe
  source 1..80: mol_type = other DNA
gggctctgggttggagggtggtgggagagggacaccgtgattacttagaatttctggcacatggtgagaagaaaatgcag

SEQ ID NO: 45591 - DNA, 80 bp, synthetic construct
  misc_feature 1..80: note = Artificially Synthesized Probe
  source 1..80: mol_type = other DNA
ctctttgacttggatgcccctggggcaggagcactgcgttgggctgggctagtcagtgtcattccctgagggggctcaac

SEQ ID NO: 45592 - DNA, 80 bp, synthetic construct; identical to SEQ ID NO: 22946
  misc_feature 1..80: note = Artificially Synthesized Probe
  source 1..80: mol_type = other DNA

SEQ ID NO: 45593 - DNA, 80 bp, synthetic construct
  misc_feature 1..80: note = Artificially Synthesized Probe
  source 1..80: mol_type = other DNA
agccagggccaggagaccaacgaggtgtgcgagcaggccggcggcggggcctgcgaggggccccccaggggcaagggctt

SEQ ID NO: 45594 - DNA, 80 bp, synthetic construct
  misc_feature 1..80: note = Artificially Synthesized Probe
  source 1..80: mol_type = other DNA
gaggacttgggataggtccttctgtccatgcattctttgaggtagatgtggttatccccatttgatggatggggagactg

SEQ ID NO: 45595 - DNA, 80 bp, synthetic construct
  misc_feature 1..80: note = Artificially Synthesized Probe
  source 1..80: mol_type = other DNA
ggggccccaggcgccccttggctgtgaccgtgtcactccagcctctgcctttgtcctcataggcctcctcctctgtgccg

SEQ ID NO: 45596 - DNA, 80 bp, synthetic construct; identical to SEQ ID NO: 22947
  misc_feature 1..80: note = Artificially Synthesized Probe
  source 1..80: mol_type = other DNA

SEQ ID NO: 45597 - DNA, 80 bp, synthetic construct
  misc_feature 1..80: note = Artificially Synthesized Probe
  source 1..80: mol_type = other DNA
acggggactcctctcaccggggacaaggatgacgaagaggttgacacccacttcgcctcccaggagttcttctcggctaa

SEQ ID NO: 45598 - DNA, 80 bp, synthetic construct
  misc_feature 1..80: note = Artificially Synthesized Probe
  source 1..80: mol_type = other DNA
cgtggattatgaggagaacgagggggctggcccttacctgctcaacgggtcctacctggagctgagcagcgacagggttg

SEQ ID NO: 45599 - DNA, 80 bp, synthetic construct
  misc_feature 1..80: note = Artificially Synthesized Probe
  source 1..80: mol_type = other DNA
ccggcagcagccaacaggcagctgggccggcctggccgggctccagaggcgcagagcgggttaaagtgtgcgccaggccg

SEQ ID NO: 45600 - DNA, 80 bp, synthetic construct
  misc_feature 1..80: note = Artificially Synthesized Probe
  source 1..80: mol_type = other DNA
ccactgggggggtctggccagaagggctgaggtcctagaggtagaggagagagggccccttcttcccggggttctccact

SEQ ID NO: 45601 - DNA, 80 bp, synthetic construct
  misc_feature 1..80: note = Artificially Synthesized Probe
  source 1..80: mol_type = other DNA
ctggtctcaaactcctgacctcgtgtgatccccctgcttcagcctctcaaactgctgggattataggcatgagccactgc

SEQ ID NO: 45602 - DNA, 80 bp, synthetic construct; identical to SEQ ID NO: 22948
  misc_feature 1..80: note = Artificially Synthesized Probe
  source 1..80: mol_type = other DNA

SEQ ID NO: 45603 - DNA, 80 bp, synthetic construct
  misc_feature 1..80: note = Artificially Synthesized Probe
  source 1..80: mol_type = other DNA
agcctcagcaagggctggagaggatctagtggattcctccatgaggggcaagagcctgaaatcagggatgaagaacaagg

SEQ ID NO: 45604 - DNA, 80 bp, synthetic construct
  misc_feature 1..80: note = Artificially Synthesized Probe
  source 1..80: mol_type = other DNA
ggggacgcctgggcagtcacagctagacctggggaagtctgaggttgggagcttccctgtgtcaggggccagctgtgagc

SEQ ID NO: 45605 - DNA, 80 bp, synthetic construct
  misc_feature 1..80: note = Artificially Synthesized Probe
  source 1..80: mol_type = other DNA
gttggaggcaggcacgggctcactggtgtttggttttgttttctgaggtccaacccaagccctttgactttagacgcaag

SEQ ID NO: 45606 - DNA, 80 bp, synthetic construct; identical to SEQ ID NO: 22949
  misc_feature 1..80: note = Artificially Synthesized Probe
  source 1..80: mol_type = other DNA

SEQ ID NO: 45607 - DNA, 80 bp, synthetic construct
  misc_feature 1..80: note = Artificially Synthesized Probe
  source 1..80: mol_type = other DNA
tcaaagccttgggtaggtggggcctgtggctggttctcaggactcgggcggggagggccgggccttgctttgggtatagt

SEQ ID NO: 45608 - DNA, 80 bp, synthetic construct
  misc_feature 1..80: note = Artificially Synthesized Probe
  source 1..80: mol_type = other DNA
cgtgtgtgaggcccacggtaaggcctccagtaagtagaagctattagtagaaaactgagcctccaagtggcagcagtggg

SEQ ID NO: 45609 - DNA, 80 bp, synthetic construct
  misc_feature 1..80: note = Artificially Synthesized Probe
  source 1..80: mol_type = other DNA
tgggcctcagtttccccatctctcactggggggcttgtcaggggctgccctttgggcccaccaggtcaaatattcagtga

SEQ ID NO: 45610 - DNA, 80 bp, synthetic construct
  misc_feature 1..80: note = Artificially Synthesized Probe
  source 1..80: mol_type = other DNA
ttgaatttccagggcctgtcaggggcctcaagggtcgatcaactaggctgtcagcactcagaaaggccctgactgctgag

SEQ ID NO: 45611 - DNA, 80 bp, synthetic construct
  misc_feature 1..80: note = Artificially Synthesized Probe
  source 1..80: mol_type = other DNA
gcgcgggggaggaggggaaggggagagggaggccgggccgcagcctctgcactcacgccgcccccgcacgcacagcgcac

SEQ ID NO: 45612 - DNA, 80 bp, synthetic construct; identical to SEQ ID NO: 22950
  misc_feature 1..80: note = Artificially Synthesized Probe
  source 1..80: mol_type = other DNA

SEQ ID NO: 45613 - DNA, 80 bp, synthetic construct
  misc_feature 1..80: note = Artificially Synthesized Probe
  source 1..80: mol_type = other DNA
ggagcccgtgagcctgtgtctggccgggcatctgggcgaaggaccctgaggagtgacaggtggtctggtggtgactccac

SEQ ID NO: 45614 - DNA, 80 bp, synthetic construct
  misc_feature 1..80: note = Artificially Synthesized Probe
  source 1..80: mol_type = other DNA
attgttgtgcaaatatatgcagggttatgttcaagagttgcatctgctatgccccacacgtgctgctgcgaagagtgtgt

SEQ ID NO: 45615 - DNA, 80 bp, synthetic construct; identical to SEQ ID NO: 22951
  misc_feature 1..80: note = Artificially Synthesized Probe
  source 1..80: mol_type = other DNA

SEQ ID NO: 45616 - DNA, 80 bp, synthetic construct
  misc_feature 1..80: note = Artificially Synthesized Probe
  source 1..80: mol_type = other DNA
aggtttccagggaacttttgttctgagatgacagggtcttgggaaaccccccacccacccccattttttttttttttttg

SEQ ID NO: 45617 - DNA, 80 bp, synthetic construct
  misc_feature 1..80: note = Artificially Synthesized Probe
  source 1..80: mol_type = other DNA
tttttagtagagacggggtttcaccatgtcagccaggatggtctcgatctcctgacctcgtgatccacccgcctcggcct

SEQ ID NO: 45618 - DNA, 80 bp, synthetic construct
  misc_feature 1..80: note = Artificially Synthesized Probe
  source 1..80: mol_type = other DNA
aggaggctttgaagaaacagtgggaccagcccccagcccgcagcccttcctgggccttggtccccatgccttctcccttc

SEQ ID NO: 45619 - DNA, 80 bp, synthetic construct; identical to SEQ ID NO: 22952
  misc_feature 1..80: note = Artificially Synthesized Probe
  source 1..80: mol_type = other DNA

SEQ ID NO: 45620 - DNA, 80 bp, synthetic construct
  misc_feature 1..80: note = Artificially Synthesized Probe
  source 1..80: mol_type = other DNA
aaagtggagttgggcaatgccacctgctgcactgtccagtttaaaaaggaagtcgaggctcgaaggacctgctgtccacc

SEQ ID NO: 45621 - DNA, 80 bp, synthetic construct
  misc_feature 1..80: note = Artificially Synthesized Probe
  source 1..80: mol_type = other DNA
ccaggcacacctactggttcaaagaagcaaacagtcctaacaatagttggctttggctgcataggctccagccaagaatc

SEQ ID NO: 45622 - DNA, 80 bp, synthetic construct
  misc_feature 1..80: note = Artificially Synthesized Probe
  source 1..80: mol_type = other DNA
gccctctggagccgttacataacgtggggaggcttgtggggaggggtcgggccgcagagcacggggcagggtggcctccc

SEQ ID NO: 45623 - DNA, 80 bp, synthetic construct
  misc_feature 1..80: note = Artificially Synthesized Probe
  source 1..80: mol_type = other DNA
tcagagtcccagctggaggagggggtgggagagaattctggaacattcttagcacataagacaccttctgaggtcccctc

SEQ ID NO: 45624 - DNA, 80 bp, synthetic construct; identical to SEQ ID NO: 22953
  misc_feature 1..80: note = Artificially Synthesized Probe
  source 1..80: mol_type = other DNA

SEQ ID NO: 45625 - DNA, 80 bp, synthetic construct
  misc_feature 1..80: note = Artificially Synthesized Probe
  source 1..80: mol_type = other DNA
tcaccttccctgcttggtctcgctttcaggaccaggcccaaggcgcgcaagcaaggcgtgagtcccgcggacatgtaccg

SEQ ID NO: 45626 - DNA, 80 bp, synthetic construct
  misc_feature 1..80: note = Artificially Synthesized Probe
  source 1..80: mol_type = other DNA
tgcttgtccgtggcctcctgacttgggggcagtgtggcgtgataggagtttgggtgtctggtgaggccaccctcattctc

SEQ ID NO: 45627 - DNA, 80 bp, synthetic construct
  misc_feature 1..80: note = Artificially Synthesized Probe
  source 1..80: mol_type = other DNA
ggttaaaagtaagaaatcttaggtagcagagattttacttttgcttccagcaaacataggaagggagtcataggcccctg

SEQ ID NO: 45628 - DNA, 80 bp, synthetic construct
  misc_feature 1..80: note = Artificially Synthesized Probe
  source 1..80: mol_type = other DNA
agttgagctgggatttgaacccacagctgtctggttgcacggccaccatcgccctgagacgctggccacagccgctagag

SEQ ID NO: 45629 - DNA, 80 bp, synthetic construct; identical to SEQ ID NO: 22954
  misc_feature 1..80: note = Artificially Synthesized Probe
  source 1..80: mol_type = other DNA

SEQ ID NO: 45630 - DNA, 80 bp, synthetic construct
  misc_feature 1..80: note = Artificially Synthesized Probe
  source 1..80: mol_type = other DNA
ggccttgcctctctgggactgaagaaagggctctgcctcctgttacaagagcccccaaacagggcatagccatggggcat

SEQ ID NO: 45631 - DNA, 80 bp, synthetic construct
  misc_feature 1..80: note = Artificially Synthesized Probe
  source 1..80: mol_type = other DNA
cggctgggcccggctcgcaccgccgtgggcggcgtggcgggcaccctgctgggcccggctcgcaccgccgtgggcggcgt

SEQ ID NO: 45632 - DNA, 80 bp, synthetic construct
  misc_feature 1..80: note = Artificially Synthesized Probe
  source 1..80: mol_type = other DNA
caccgctgtgggcggcgtggtgggcaccggcttggccaggctcgcaccgctgtgggcggcgtggtgggcacccggcttgg

SEQ ID NO: 45633 - DNA, 80 bp, synthetic construct
  misc_feature 1..80: note = Artificially Synthesized Probe
  source 1..80: mol_type = other DNA
ggccggctggcacctgtcttcagccggcaggcagaggctggggcacccgttagccaatggcacagtggagggggctcctg

SEQ ID NO: 45634 - DNA, 80 bp, synthetic construct; identical to SEQ ID NO: 22955
  misc_feature 1..80: note = Artificially Synthesized Probe
  source 1..80: mol_type = other DNA

SEQ ID NO: 45635 - DNA, 80 bp, synthetic construct
  misc_feature 1..80: note = Artificially Synthesized Probe
  source 1..80: mol_type = other DNA
catacccaggagcagctggccttggaagtgagccatgtgacctgccttccgggcagacccctagcggagctgagcatggt

SEQ ID NO: 45636 - DNA, 80 bp, synthetic construct
  misc_feature 1..80: note = Artificially Synthesized Probe
  source 1..80: mol_type = other DNA
ctcccagacacatcgctggctggagaggggacgtcgctcgagacgtctgcagggtgaggcagcctcgctggcaaggggcc

SEQ ID NO: 45637 - DNA, 80 bp, synthetic construct
  misc_feature 1..80: note = Artificially Synthesized Probe
  source 1..80: mol_type = other DNA
tttggaagaaggaaactctgctttacaggaggttgttcagaaatggaaatgagccaccctgagagacagagagagagaga

SEQ ID NO: 45638 - DNA, 80 bp, synthetic construct; identical to SEQ ID NO: 22956
  misc_feature 1..80: note = Artificially Synthesized Probe
  source 1..80: mol_type = other DNA

SEQ ID NO: 45639 - DNA, 80 bp, synthetic construct
  misc_feature 1..80: note = Artificially Synthesized Probe
  source 1..80: mol_type = other DNA
agagggagagggagagagagggagagagagagagaaagagggagagagagagggagagagagagaaagagggagagagag

SEQ ID NO: 45640 - DNA, 80 bp, synthetic construct
  misc_feature 1..80: note = Artificially Synthesized Probe
  source 1..80: mol_type = other DNA
agagagggagagagggagagagagagagggagagagagagggagacagagagggagagagagagggagagggagagagag

SEQ ID NO: 45641 - DNA, 80 bp, synthetic construct
  misc_feature 1..80: note = Artificially Synthesized Probe
  source 1..80: mol_type = other DNA
agagggagagagagagaaggagagagagagagggtgagagagagagagagaaagggagggcaggagggagggagagttcc

SEQ ID NO: 45642 - DNA, 80 bp, synthetic construct
  misc_feature 1..80: note = Artificially Synthesized Probe
  source 1..80: mol_type = other DNA
tggggcagatcagcctgccctgagctttggccgcggtggggaagcttgtttttagatttttcttcgaagacactcttttg

SEQ ID NO: 45643 - DNA, 80 bp, synthetic construct; identical to SEQ ID NO: 22957
  misc_feature 1..80: note = Artificially Synthesized Probe
  source 1..80: mol_type = other DNA

SEQ ID NO: 45644 - DNA, 80 bp, synthetic construct
  misc_feature 1..80: note = Artificially Synthesized Probe
  source 1..80: mol_type = other DNA
ttgaccaaggcctgccgcgtttccactccgtgacgaggagcgaatgaataaccaggcacttggcgatggtctgcaagtcc

SEQ ID NO: 45645 - DNA, 80 bp, synthetic construct; identical to SEQ ID NO: 22926
  misc_feature 1..80: note = Artificially Synthesized Probe
  source 1..80: mol_type = other DNA

SEQ ID NO: 45646 - DNA, 80 bp, synthetic construct
  misc_feature 1..80: note = Artificially Synthesized Probe
  source 1..80: mol_type = other DNA
tttacggaaaaaagaaaaaatccccttgtcggctgcttcccaggctgtttcgttccatccagcgctggggcttggagagg

SEQ ID NO: 45647 - DNA, 80 bp, synthetic construct
  misc_feature 1..80: note = Artificially Synthesized Probe
  source 1..80: mol_type = other DNA
acacacacacacacacacacacacacagccacagcagaagcagcaaaccctaaccccaccccaaggccgttcccactgct

SEQ ID NO: 45648 - DNA, 80 bp, synthetic construct; identical to SEQ ID NO: 22958
  misc_feature 1..80: note = Artificially Synthesized Probe
  source 1..80: mol_type = other DNA

SEQ ID NO: 45649 - DNA, 80 bp, synthetic construct
  misc_feature 1..80: note = Artificially Synthesized Probe
  source 1..80: mol_type = other DNA
tactcgggaggctgaggcaggagaattgcttgaacccaggagggggaggttgcagtgagctgagattgcaccattgcact

SEQ ID NO: 45650 - DNA, 80 bp, synthetic construct
  misc_feature 1..80: note = Artificially Synthesized Probe
  source 1..80: mol_type = other DNA
cctgcctgtccacccagggatgggtggttgctgaacgcctggcgatgggggacacctgactgtgtttgcctctgcacctc

SEQ ID NO: 45651 - DNA, 80 bp, synthetic construct; identical to SEQ ID NO: 22959
  misc_feature 1..80: note = Artificially Synthesized Probe
  source 1..80: mol_type = other DNA

SEQ ID NO: 45652 - DNA, 80 bp, synthetic construct
  misc_feature 1..80: note = Artificially Synthesized Probe
  source 1..80: mol_type = other DNA
gagtgccagcccaggtacctgccaccaggggccctgggcagggggtcggcagggggcgtgaggggctctgcccaaaggag

SEQ ID NO: 45653 - DNA, 80 bp, synthetic construct
  misc_feature 1..80: note = Artificially Synthesized Probe
  source 1..80: mol_type = other DNA
attaatgcttgccaccgcagatttagaaaccattctcaacattatattacagcggtatctttgccccaccaggcccactt

SEQ ID NO: 45654 - DNA, 80 bp, synthetic construct
  misc_feature 1..80: note = Artificially Synthesized Probe
  source 1..80: mol_type = other DNA
attatattacagcggtatctttgccccaccaggcccacttggcacatctaggatttttataaactcaagggattattccc

SEQ ID NO: 45655 - DNA, 80 bp, synthetic construct
  misc_feature 1..80: note = Artificially Synthesized Probe
  source 1..80: mol_type = other DNA
ctcccccgacaaggatcacacactcctcggaggctgagccctcctgctccccgcacacggccacactgcctcttcttttc

SEQ ID NO: 45656 - DNA, 80 bp, synthetic construct
  misc_feature 1..80: note = Artificially Synthesized Probe
  source 1..80: mol_type = other DNA
tggtttctgaaatcccttctctaactcgctggcaagtgaccctcagcacctgagcaaggcctggacagaggtcatggtgg

SEQ ID NO: 45657 - DNA, 80 bp, synthetic construct; identical to SEQ ID NO: 22960
  misc_feature 1..80: note = Artificially Synthesized Probe
  source 1..80: mol_type = other DNA

SEQ ID NO: 45658 - DNA, 80 bp, synthetic construct
  misc_feature 1..80: note = Artificially Synthesized Probe
  source 1..80: mol_type = other DNA
gccaaccaccttgctaaggtgctccctgaagacctccggggccgtcatggcccagcctgcacccttgagcctcgacaccc

SEQ ID NO: 45659 - DNA, 80 bp, synthetic construct
  misc_feature 1..80: note = Artificially Synthesized Probe
  source 1..80: mol_type = other DNA
tggagcgagtgttcgcgcacctgcggagagggctaccagttccgcgtcgtgcgctgctggaagatgctctcgcccggctt

SEQ ID NO: 45660 - DNA, 80 bp, synthetic construct
  misc_feature 1..80: note = Artificially Synthesized Probe
  source 1..80: mol_type = other DNA
ggagctgggcttgggagatggaggtggctacacctgtgtcacaccccccctgccccctccccctgccgccccagtgcact

SEQ ID NO: 45661 - DNA, 80 bp, synthetic construct
  misc_feature 1..80: note = Artificially Synthesized Probe
  source 1..80: mol_type = other DNA
cactgaggggtggctgggcgtgcggctggtgaggggacccagagctttgccttgatgtgcctcagtttccatttttttcc

SEQ ID NO: 45662 - DNA, 80 bp, synthetic construct; identical to SEQ ID NO: 22961
  misc_feature 1..80: note = Artificially Synthesized Probe
  source 1..80: mol_type = other DNA

SEQ ID NO: 45663 - DNA, 80 bp, synthetic construct
  misc_feature 1..80: note = Artificially Synthesized Probe
  source 1..80: mol_type = other DNA
tgtaattagaatagaaaatgttatttaaaaagtggttaccatggcaaccgcttcgacactgcctgggagccactcctctc

SEQ ID NO: 45664 - DNA, 80 bp, synthetic construct
  misc_feature 1..80: note = Artificially Synthesized Probe
  source 1..80: mol_type = other DNA
cagtgccagatggagaccaagcctctggccatccacccctgtggggacaaaaactgtcccgcccactggctggcccagga

SEQ ID NO: 45665 - DNA, 80 bp, synthetic construct; identical to SEQ ID NO: 22962
  misc_feature 1..80: note = Artificially Synthesized Probe
  source 1..80: mol_type = other DNA

SEQ ID NO: 45666 - DNA, 80 bp, synthetic construct
  misc_feature 1..80: note = Artificially Synthesized Probe
  source 1..80: mol_type = other DNA
tttcagacgagttgctctccacaaattgctttcaaccagcagctcccggcaggtcactaaaccggataatctcgagccaa

SEQ ID NO: 45667 - DNA, 80 bp, synthetic construct
  misc_feature 1..80: note = Artificially Synthesized Probe
  source 1..80: mol_type = other DNA
aatggttatcgaacaaagagtttccagccagtttgttatgcactggagcattctcacccaattgctattgaccagcccgt

SEQ ID NO: 45668 - DNA, 80 bp, synthetic construct
  misc_feature 1..80: note = Artificially Synthesized Probe
  source 1..80: mol_type = other DNA
tggccctggactgctgacatgctggcacaaactgcacctcctcctgccctgcccctcccccaattccatcttctctccgg

SEQ ID NO: 45669 - DNA, 80 bp, synthetic construct
  misc_feature 1..80: note = Artificially Synthesized Probe
  source 1..80: mol_type = other DNA
cgcagtggccccgagtgcgggctcgccaagaagcctcccgaggagagcacgtgtttcgagaggccctgcttcaagtggta

SEQ ID NO: 45670 - DNA, 80 bp, synthetic construct
  misc_feature 1..80: note = Artificially Synthesized Probe
  source 1..80: mol_type = other DNA
gcttctcaactccaccacgtcagctggtgcgagagccagcacctccaggaagccttctctgatcttgtccctgggatccc

SEQ ID NO: 45671 - DNA, 80 bp, synthetic construct; identical to SEQ ID NO: 22963
  misc_feature 1..80: note = Artificially Synthesized Probe
  source 1..80: mol_type = other DNA

SEQ ID NO: 45672 - DNA, 80 bp, synthetic construct
  misc_feature 1..80: note = Artificially Synthesized Probe
  source 1..80: mol_type = other DNA
tgaggccctgaggcacgtgtggcaaccctcacccagttctttgcctgaagggtctcctctctcccaatagtgccatgagg

SEQ ID NO: 45673 - DNA, 80 bp, synthetic construct
  misc_feature 1..80: note = Artificially Synthesized Probe
  source 1..80: mol_type = other DNA
tgaaccagctcatcccaaggggccctgggcagggagccccgaggtgggtgggcagccctggtttcacagagggggtggca

SEQ ID NO: 45674 - DNA, 80 bp, synthetic construct
  misc_feature 1..80: note = Artificially Synthesized Probe
  source 1..80: mol_type = other DNA
ggaggcagccctgtctagactccagcttgagtaactcacatcagctgtgacacatcagccatccgtgcccctttcacagc

SEQ ID NO: 45675 - DNA, 80 bp, synthetic construct; identical to SEQ ID NO: 22964
  misc_feature 1..80: note = Artificially Synthesized Probe
  source 1..80: mol_type = other DNA

SEQ ID NO: 45676 - DNA, 80 bp, synthetic construct
  misc_feature 1..80: note = Artificially Synthesized Probe
  source 1..80: mol_type = other DNA
agattggggtccaggccccgggcccttgccaggtcccaggctcctcgtgcacgcttggtggtgtctggcctccaccctgc

SEQ ID NO: 45677 - DNA, 80 bp, synthetic construct
  misc_feature 1..80: note = Artificially Synthesized Probe
  source 1..80: mol_type = other DNA
caggggaggcctgggcagagccagggcctgaagggtgagccggcttttgccgggagtcagctggagagaccacggcgtgc

SEQ ID NO: 45678 - DNA, 80 bp, synthetic construct; identical to SEQ ID NO: 22965
  misc_feature 1..80: note = Artificially Synthesized Probe
  source 1..80: mol_type = other DNA

SEQ ID NO: 45679 - DNA, 80 bp, synthetic construct
  misc_feature 1..80: note = Artificially Synthesized Probe
  source 1..80: mol_type = other DNA
ggccattctcctgcgaggccagcaagagctgagccagttaaaatcccaaggtgctcctgccaaggcgctggactgagccc

SEQ ID NO: 45680 - DNA, 80 bp, synthetic construct
  misc_feature 1..80: note = Artificially Synthesized Probe
  source 1..80: mol_type = other DNA
gctcagtcagtgtttgttgccccagctgcccagtcccatccactccccaggggcagaggagctggcaccagggctggccg

SEQ ID NO: 45681 - DNA, 80 bp, synthetic construct
  misc_feature 1..80: note = Artificially Synthesized Probe
  source 1..80: mol_type = other DNA
ctgccaagtcttaatcggtcttccttgctcctttgcaaacagaagtggagagtgggtcccagggccagggcctcccaccc

SEQ ID NO: 45682 - DNA, 80 bp, synthetic construct
  misc_feature 1..80: note = Artificially Synthesized Probe
  source 1..80: mol_type = other DNA
ctcagcggggttttccaaggggaacatctggacggggagccactggagggggtggtgacttcgcgagatgcatttgatcg

SEQ ID NO: 45683 - DNA, 80 bp, synthetic construct
  misc_feature 1..80: note = Artificially Synthesized Probe
  source 1..80: mol_type = other DNA
ctggaccccctgggaaatgagagaggagggaccacccctcactgtggatctggggagactgaggcagccctgggtgggag

SEQ ID NO: 45684 - DNA, 80 bp, synthetic construct; identical to SEQ ID NO: 22966
  misc_feature 1..80: note = Artificially Synthesized Probe
  source 1..80: mol_type = other DNA

SEQ ID NO: 45685 - DNA, 80 bp, synthetic construct
  misc_feature 1..80: note = Artificially Synthesized Probe
  source 1..80: mol_type = other DNA
ggtggctctgggaattcccaggggaggcgaggacagagtcagggcctgaggggtgagcagacattgctcaccttgatggc

SEQ ID NO: 45686 - DNA, 80 bp, synthetic construct
  misc_feature 1..80: note = Artificially Synthesized Probe
  source 1..80: mol_type = other DNA
gaaaagggtcagcttcagatggcagggccactgtggggccaagacctgaatccaggatgactcagctggagcggccaggg

SEQ ID NO: 45687 - DNA, 80 bp, synthetic construct; identical to SEQ ID NO: 22967
  misc_feature 1..80: note = Artificially Synthesized Probe
  source 1..80: mol_type = other DNA

SEQ ID NO: 45688 - DNA, 80 bp, synthetic construct
  misc_feature 1..80: note = Artificially Synthesized Probe
  source 1..80: mol_type = other DNA
ctgtgttccttctccagatgacagctgccaggaccagccaggcaccaactgtgccctggccatcaaagtgaacctctgcg

SEQ ID NO: 45689 - DNA, 80 bp, synthetic construct
  misc_feature 1..80: note = Artificially Synthesized Probe
  source 1..80: mol_type = other DNA
ctaagagacgtggcactgagcctcggctgtcgagaggggacttcccacggcccgtggacctttgtgctcctggggcagag

SEQ ID NO: 45690 - DNA, 80 bp, synthetic construct; identical to SEQ ID NO: 22927
  misc_feature 1..80: note = Artificially Synthesized Probe
  source 1..80: mol_type = other DNA

SEQ ID NO: 45691 - DNA, 80 bp, synthetic construct
  misc_feature 1..80: note = Artificially Synthesized Probe
  source 1..80: mol_type = other DNA
gctccgggcccgtagcccacgccctctctgggtggcagggccttctgaaggaaacttgcaggcgagcccaacgtggtggg

SEQ ID NO: 45692 - DNA, 80 bp, synthetic construct; identical to SEQ ID NO: 22968
  misc_feature 1..80: note = Artificially Synthesized Probe
  source 1..80: mol_type = other DNA

SEQ ID NO: 45693 - DNA, 80 bp, synthetic construct
  misc_feature 1..80: note = Artificially Synthesized Probe
  source 1..80: mol_type = other DNA
gtgacagtggccttgcttcctaggatggatggcagatggcaatgttcctgctgggcctggttcctgctggttctggcagt

SEQ ID NO: 45694 - DNA, 80 bp, synthetic construct
  misc_feature 1..80: note = Artificially Synthesized Probe
  source 1..80: mol_type = other DNA
gccgtgtgggcacgtgccccaggtcccagaacccatcttggctcctagaaacttctgcccagagccagtcagatcagcct

SEQ ID NO: 45695 - DNA, 80 bp, synthetic construct
  misc_feature 1..80: note = Artificially Synthesized Probe
  source 1..80: mol_type = other DNA
agagtgggggactcacctcaacagcactctctaaggggtaaggagcccctggcatcaggagctaccagagcacctgctac

SEQ ID NO: 45696 - DNA, 80 bp, synthetic construct
  misc_feature 1..80: note = Artificially Synthesized Probe
  source 1..80: mol_type = other DNA
gacagttagatgcggccccaggagcttgccaagcccccaggccatcctggaccttaaggtcaaggaggacccgtggccca

SEQ ID NO: 45697 - DNA, 80 bp, synthetic construct; identical to SEQ ID NO: 22928
  misc_feature 1..80: note = Artificially Synthesized Probe
  source 1..80: mol_type = other DNA

SEQ ID NO: 45698 - DNA, 80 bp, synthetic construct
  misc_feature 1..80: note = Artificially Synthesized Probe
  source 1..80: mol_type = other DNA
gggcggttggctcttcagcctggtggcttctccccctgggagggctctcgggttgggggcagcacaggctgagtcccccc

SEQ ID NO: 45699 - DNA, 80 bp, synthetic construct
  misc_feature 1..80: note = Artificially Synthesized Probe
  source 1..80: mol_type = other DNA
acctgagtgagggtctttagaatatgccagggagccccgggagaagcagaggactggcaggaaagcctccgctgccagat

SEQ ID NO: 45700 - DNA, 80 bp, synthetic construct; identical to SEQ ID NO: 22929
  misc_feature 1..80: note = Artificially Synthesized Probe
  source 1..80: mol_type = other DNA

SEQ ID NO: 45701 - DNA, 80 bp, synthetic construct
  misc_feature 1..80: note = Artificially Synthesized Probe
  source 1..80: mol_type = other DNA
agcctgcatctttctgccaggaggaagtccgtcccgggccccgggaacaggacctgcacgggcacgtccaagcggtacca

SEQ ID NO: 45702 - DNA, 80 bp, synthetic construct
  misc_feature 1..80: note = Artificially Synthesized Probe
  source 1..80: mol_type = other DNA
aaggctgcggggggccctgggctagtacggagccatccactgtccagaccactgtccctgtgctcacatgtgctcagcaa

SEQ ID NO: 45703 - DNA, 80 bp, synthetic construct
  misc_feature 1..80: note = Artificially Synthesized Probe
  source 1..80: mol_type = other DNA
cccacgccataaaacagttccctgggttgctctcggagcccttctgctccagcccccatcagcttccttgggtagccgag

SEQ ID NO: 45704 - DNA, 80 bp, synthetic construct
  misc_feature 1..80: note = Artificially Synthesized Probe
  source 1..80: mol_type = other DNA
aaggcagagcagctgggggtctctgtgtctgtgtgtctcagggggtgtgtgcgcacgtgcagggagtgaggggctggagg

SEQ ID NO: 45705 - DNA, 80 bp, synthetic construct; identical to SEQ ID NO: 22930
  misc_feature 1..80: note = Artificially Synthesized Probe
  source 1..80: mol_type = other DNA

SEQ ID NO: 45706 - DNA, 80 bp, synthetic construct
  misc_feature 1..80: note = Artificially Synthesized Probe
  source 1..80: mol_type = other DNA
tcccaggtggccagcctgcagcctgtgccgtcctgctgagccaagagaagacactgggggtgtttgtgttggtcggctgt

SEQ ID NO: 45707 - DNA, 80 bp, synthetic construct
  misc_feature 1..80: note = Artificially Synthesized Probe
  source 1..80: mol_type = other DNA
ctagagtaggcggagggctggcgtggggggcggagctgccctttcctgcgtccttgctccctcctgagagcgcatgggag

SEQ ID NO: 45708 - DNA, 80 bp, synthetic construct
  misc_feature 1..80: note = Artificially Synthesized Probe
  source 1..80: mol_type = other DNA
aggagtgtccgccggacgggaggagcttccgcgaggagcagtgcgtctccttcaactcccacgtgtacaacgggcggacg

SEQ ID NO: 45709 - DNA, 80 bp, synthetic construct
  misc_feature 1..80: note = Artificially Synthesized Probe
  source 1..80: mol_type = other DNA
gtggggaaatggaggtggtcagacgaagagccaggaatgaacctgggtctcctgagccctggcccaggggtctgtcccct

SEQ ID NO: 45710 - DNA, 80 bp, synthetic construct; identical to SEQ ID NO: 22931
  misc_feature 1..80: note = Artificially Synthesized Probe
  source 1..80: mol_type = other DNA

SEQ ID NO: 45711 - DNA, 80 bp, synthetic construct
  misc_feature 1..80: note = Artificially Synthesized Probe
  source 1..80: mol_type = other DNA
tgagacctggacaggttccttctgttctccaggcctgagttgccccatctatgcaatgggagctgtctcagagggaggaa

SEQ ID NO: 45712 - DNA, 80 bp, synthetic construct
  misc_feature 1..80: note = Artificially Synthesized Probe
  source 1..80: mol_type = other DNA
cacatcctgcaagctcactgacctgcgaggggtttgcgtgtctggaaaatgtgaggttgttaaacgttgtagcaaaagta

SEQ ID NO: 45713 - DNA, 80 bp, synthetic construct
  misc_feature 1..80: note = Artificially Synthesized Probe
  source 1..80: mol_type = other DNA
ggcatctgccagggggacggtagcagctgcacccacgtgacgggcaactatcgcaaggggaatgcccaccttggtaagcc

SEQ ID NO: 45714 - DNA, 80 bp, synthetic construct; identical to SEQ ID NO: 22932
  misc_feature 1..80: note = Artificially Synthesized Probe
  source 1..80: mol_type = other DNA

SEQ ID NO: 45715 - DNA, 80 bp, synthetic construct
  misc_feature 1..80: note = Artificially Synthesized Probe
  source 1..80: mol_type = other DNA
agaggaaggggatggcagaggcacccagagcgagtgtaatccggtcatgtgagagggactgggtgtgtgtgtgcctgtgt

SEQ ID NO: 45716 - DNA, 80 bp, synthetic construct
  misc_feature 1..80: note = Artificially Synthesized Probe
  source 1..80: mol_type = other DNA
ctcccgaggagctgggactacaggcatgtgccaccaagcctggctaatttttctatttttagtggagatggggtttcact

SEQ ID NO: 45717 - DNA, 80 bp, synthetic construct
  misc_feature 1..80: note = Artificially Synthesized Probe
  source 1..80: mol_type = other DNA
gagaaactaaggcccaagacccattctctccacggatatgaggtttgaccctggcacgctggattctggggcctgagttt

SEQ ID NO: 45718 - DNA, 80 bp, synthetic construct; identical to SEQ ID NO: 22933
  misc_feature 1..80: note = Artificially Synthesized Probe
  source 1..80: mol_type = other DNA

SEQ ID NO: 45719 - DNA, 80 bp, synthetic construct
  misc_feature 1..80: note = Artificially Synthesized Probe
  source 1..80: mol_type = other DNA
aggacccgaccgtgtcttgaaggtcgagggaatgacctcagcctgccactgagggctaactgtggcgtgagtgttggctc

SEQ ID NO: 45720 - DNA, 80 bp, synthetic construct; identical to SEQ ID NO: 22969
  misc_feature 1..80: note = Artificially Synthesized Probe
  source 1..80: mol_type = other DNA

SEQ ID NO: 45721 - DNA, 80 bp, synthetic construct
  misc_feature 1..80: note = Artificially Synthesized Probe
  source 1..80: mol_type = other DNA
gatcacgaggtcaggagatcgagaccatcctggctaacatggtgaaaccccgtctctactaaaaatacaaaaaaaattag

SEQ ID NO: 45722 - DNA, 80 bp, synthetic construct
  misc_feature 1..80: note = Artificially Synthesized Probe
  source 1..80: mol_type = other DNA
aaaaggatgttgtggaaacatgtctgcttgcacagaggatcagattaacactcacaaacaaactttgaagcctccttctc

SEQ ID NO: 45723 - DNA, 80 bp, synthetic construct; identical to SEQ ID NO: 22980
  misc_feature 1..80: note = Artificially Synthesized Probe
  source 1..80: mol_type = other DNA

SEQ ID NO: 45724 - DNA, 80 bp, synthetic construct
  misc_feature 1..80: note = Artificially Synthesized Probe
  source 1..80: mol_type = other DNA
ctggtaccatctgtcagatatttttccccccaggatctttagtgaggaaaattttgacaacatgtggaaaaaatatgatg

SEQ ID NO: 45725 - DNA, 80 bp, synthetic construct
  misc_feature 1..80: note = Artificially Synthesized Probe
  source 1..80: mol_type = other DNA
tatgagatagcaagaaggcatcccttcctgtatgcacctacaattcttctttgggctgctcgctatgacaaaataattcc

SEQ ID NO: 45726 - DNA, 80 bp, synthetic construct
  misc_feature 1..80: note = Artificially Synthesized Probe
  source 1..80: mol_type = other DNA
aaaacgtgcttaattgtggagagtatcgtttttggaatagagaaatagttcagcagtctgatattcttcgagtgaacaaa

SEQ ID NO: 45727 - DNA, 80 bp, synthetic construct; identical to SEQ ID NO: 22981
  misc_feature 1..80: note = Artificially Synthesized Probe
  source 1..80: mol_type = other DNA

SEQ ID NO: 45728 - DNA, 80 bp, synthetic construct
  misc_feature 1..80: note = Artificially Synthesized Probe
  source 1..80: mol_type = other DNA
ggtagaataatatccaccattaactacttgctaccagcagtcctataacaaaaatttcctgagaactgactactctcagt

SEQ ID NO: 45729 - DNA, 80 bp, synthetic construct
  misc_feature 1..80: note = Artificially Synthesized Probe
  source 1..80: mol_type = other DNA
ctggcacagatgcatataaactaacccaaaagaataaatgagtcaataatattctgcgataatgtatgacatttataatt

SEQ ID NO: 45730 - DNA, 80 bp, synthetic construct; identical to SEQ ID NO: 22970
  misc_feature 1..80: note = Artificially Synthesized Probe
  source 1..80: mol_type = other DNA

SEQ ID NO: 45731 - DNA, 80 bp, synthetic construct
  misc_feature 1..80: note = Artificially Synthesized Probe
  source 1..80: mol_type = other DNA
ttgttaaatcaacatgcatgtgcagtaatgaaaaattttgggacccgaactttccaagccatgtaagttcaagttctatc

SEQ ID NO: 45732 - DNA, 80 bp, synthetic construct; identical to SEQ ID NO: 22982
  misc_feature 1..80: note = Artificially Synthesized Probe
  source 1..80: mol_type = other DNA

SEQ ID NO: 45733 - DNA, 80 bp, synthetic construct
  misc_feature 1..80: note = Artificially Synthesized Probe
  source 1..80: mol_type = other DNA
aacaagaaattctttatattaattgtgtttcttaatcttctataaggctctttatagcatttattgcttcccataaaaat

SEQ ID NO: 45734 - DNA, 80 bp, synthetic construct
  misc_feature 1..80: note = Artificially Synthesized Probe
  source 1..80: mol_type = other DNA
cagagtttatttgattgctgtttggttaaataacacgttaaagcatattgtagacaatggaaatctagaatgaagttttt

SEQ ID NO: 45735 - DNA, 80 bp, synthetic construct
  misc_feature 1..80: note = Artificially Synthesized Probe
  source 1..80: mol_type = other DNA
atacccttatcatttgctatccataagtgaaagctaagtggtctaaatttatagagaagatccatctttatcagaagcag

SEQ ID NO: 45736 - DNA, 80 bp, synthetic construct
  misc_feature 1..80: note = Artificially Synthesized Probe
  source 1..80: mol_type = other DNA
tttcttgtcccatttcattgatttgcacatacgcctcctttcctggattctcagaagtattttttaccccagtaaaaaat

SEQ ID NO: 45737 - DNA, 80 bp, synthetic construct; identical to SEQ ID NO: 22983
  misc_feature 1..80: note = Artificially Synthesized Probe
  source 1..80: mol_type = other DNA

SEQ ID NO: 45738 - DNA, 80 bp, synthetic construct
  misc_feature 1..80: note = Artificially Synthesized Probe
  source 1..80: mol_type = other DNA
caaagttaattttactgaaatccagaaactagtcctggatgtggcccatgtacatgagcactgttgcagaggagatgtgc

SEQ ID NO: 45739 - DNA, 80 bp, synthetic construct
  misc_feature 1..80: note = Artificially Synthesized Probe
  source 1..80: mol_type = other DNA
ctcggtagtaaaacttaaaccatcttttgttgatcctggctttcactttagctatacccctttttgtgaaaccaaggctc

SEQ ID NO: 45740 - DNA, 80 bp, synthetic construct; identical to SEQ ID NO: 22984
  misc_feature 1..80: note = Artificially Synthesized Probe
  source 1..80: mol_type = other DNA

SEQ ID NO: 45741 - DNA, 80 bp, synthetic construct
  misc_feature 1..80: note = Artificially Synthesized Probe
  source 1..80: mol_type = other DNA
acgtttcaacatacaaaccggggagttttgcctggaatgtttcctaaaatgtgtcctgtagcacatagggtcctcttgtt

SEQ ID NO: 45742 - DNA, 80 bp, synthetic construct
  misc_feature 1..80: note = Artificially Synthesized Probe
  source 1..80: mol_type = other DNA
caagtgtgaataaagtggtctcggagaattagaaaacaaaatttaaaaaacccagcaacagtttcttgagtgtgctctag

SEQ ID NO: 45743 - DNA, 80 bp, synthetic construct
  misc_feature 1..80: note = Artificially Synthesized Probe
  source 1..80: mol_type = other DNA
cttaggtactcaaatggcttgataaccagcactggactatggtttccagaaggctgaaagtgaagataaaatgctcattt

SEQ ID NO: 45744 - DNA, 80 bp, synthetic construct
  misc_feature 1..80: note = Artificially Synthesized Probe
  source 1..80: mol_type = other DNA
tatggcatactaggaaaaccaacaagaagtattttgtttttctttgagctcagttttcccattttgaacggacaatttta

SEQ ID NO: 45745 - DNA, 80 bp, synthetic construct; identical to SEQ ID NO: 22985
  misc_feature 1..80: note = Artificially Synthesized Probe
  source 1..80: mol_type = other DNA

SEQ ID NO: 45746 - DNA, 80 bp, synthetic construct
  misc_feature 1..80: note = Artificially Synthesized Probe
  source 1..80: mol_type = other DNA
attatcattcttacggaatttctcgtggagcagaaagtttgctctccatgttatgataccagttgcaagtgttgtttagg

SEQ ID NO: 45747 - DNA, 80 bp, synthetic construct
  misc_feature 1..80: note = Artificially Synthesized Probe
  source 1..80: mol_type = other DNA
atggaaagaagaattgaacaaacaggtaagtggaaaggaatgagaaaaggcaaaagtggggagaaagcactaaaacggga

SEQ ID NO: 45748 - DNA, 80 bp, synthetic construct
  misc_feature 1..80: note = Artificially Synthesized Probe
  source 1..80: mol_type = other DNA
tgataatttccaagggtctttctagatttaaaagtctgattctaacgtagtaataaaaataaaggcccaattttctcttt

SEQ ID NO: 45749 - DNA, 80 bp, synthetic construct; identical to SEQ ID NO: 22986
  misc_feature 1..80: note = Artificially Synthesized Probe
  source 1..80: mol_type = other DNA

SEQ ID NO: 45750 - DNA, 80 bp, synthetic construct
  misc_feature 1..80: note = Artificially Synthesized Probe
  source 1..80: mol_type = other DNA
aacctgaaggtctatctccaaatctaaacaggtttttaggagatagagattttaaccaattttcttcaggggaaaaaaat

SEQ ID NO: 45751 - DNA, 80 bp, synthetic construct
  misc_feature 1..80: note = Artificially Synthesized Probe
  source 1..80: mol_type = other DNA
atttcagtagataaccagggaataagtaatgggatttggtgtttaacggtgaagcgttcaccactgtgactcattaactg

SEQ ID NO: 45752 - DNA, 80 bp, synthetic construct
  misc_feature 1..80: note = Artificially Synthesized Probe
  source 1..80: mol_type = other DNA
tgaacatgtacttagttactaagtctttgactttatctcattcataccactcagctttatccaggccacttatttgacag

SEQ ID NO: 45753 - DNA, 80 bp, synthetic construct
  misc_feature 1..80: note = Artificially Synthesized Probe
  source 1..80: mol_type = other DNA
gctacgcatgttaaaaaaaaaacttttctccaaaagataacacaagagataatgctaggtagaagaacttttataggaac

SEQ ID NO: 45754 - DNA, 80 bp, synthetic construct
  misc_feature 1..80: note = Artificially Synthesized Probe
  source 1..80: mol_type = other DNA
tttccttcattgtatagtatgtaactatggacactattagaggagggatttgtgtagcacttaggacattatacttgata

SEQ ID NO: 45755 - DNA, 80 bp, synthetic construct; identical to SEQ ID NO: 22987
  misc_feature 1..80: note = Artificially Synthesized Probe
  source 1..80: mol_type = other DNA

SEQ ID NO: 45756 - DNA, 80 bp, synthetic construct
  misc_feature 1..80: note = Artificially Synthesized Probe
  source 1..80: mol_type = other DNA
atgatcttcccccagatatttgcatggcttctttcacttagctgatctctgttctgatatcagctgcctagagagaattt

SEQ ID NO: 45757 - DNA, 80 bp, synthetic construct
  misc_feature 1..80: note = Artificially Synthesized Probe
  source 1..80: mol_type = other DNA
tttatttgttctgcctccctataatgtgtgcttttcagagggcaggtatttatcttagacatcattgagtccgttctgct

SEQ ID NO: 45758 - DNA, 80 bp, synthetic construct
  misc_feature 1..80: note = Artificially Synthesized Probe
  source 1..80: mol_type = other DNA
aattgagagatgcaggagaaaacaaaaagccattttacaggacaatttgaaggatcacagtctgtattaacagttttgcc

SEQ ID NO: 45759 - DNA, 80 bp, synthetic construct; identical to SEQ ID NO: 22988
  misc_feature 1..80: note = Artificially Synthesized Probe
  source 1..80: mol_type = other DNA

SEQ ID NO: 45760 - DNA, 80 bp, synthetic construct
  misc_feature 1..80: note = Artificially Synthesized Probe
  source 1..80: mol_type = other DNA
atttgtctagatattaagctgttattaactagcagtcagcagctagtggcttgctttagaaacaaaaatgttaattgctt

SEQ ID NO: 45761 - DNA, 80 bp, synthetic construct
  misc_feature 1..80: note = Artificially Synthesized Probe
  source 1..80: mol_type = other DNA
tttgccattaaatgattttgtgatttataaaatgttaaacttaatctccccaaaatccattttctgtaattatcaaaatt

SEQ ID NO: 45762 - DNA, 80 bp, synthetic construct
  misc_feature 1..80: note = Artificially Synthesized Probe
  source 1..80: mol_type = other DNA
gagagccaagcattggcaaagcgaagctgcggcctcttccagaaactaggagaatattacttacaaaatgcgtatgtttt

SEQ ID NO: 45763 - DNA, 80 bp, synthetic construct
  misc_feature 1..80: note = Artificially Synthesized Probe
  source 1..80: mol_type = other DNA
tgtcatagtctgtccgagttaaagcaccaaaagatcacagttaaaatcaatgaagctccgaggttgagaatacaagtcag

SEQ ID NO: 45764 - DNA, 80 bp, synthetic construct
  misc_feature 1..80: note = Artificially Synthesized Probe
  source 1..80: mol_type = other DNA
gagatgtggcccttgccaactttgccaggaattcccaatatctagtattttctactattaaactttgtgcctcttcaaaa

SEQ ID NO: 45765 - DNA, 80 bp, synthetic construct; identical to SEQ ID NO: 22989
  misc_feature 1..80: note = Artificially Synthesized Probe
  source 1..80: mol_type = other DNA

SEQ ID NO: 45766 - DNA, 80 bp, synthetic construct
  misc_feature 1..80: note = Artificially Synthesized Probe
  source 1..80: mol_type = other DNA
catttctgccctgtttgacttgaaatagcctcataattcccctctagggaagacggtaaaaaccaatgtagagatggcct

SEQ ID NO: 45767 - DNA, 80 bp, synthetic construct
  misc_feature 1..80: note = Artificially Synthesized Probe
  source 1..80: mol_type = other DNA
caacaatatctgagccaactttatatatcggaaagacagaacgaccaacatgtaactcataattcataacaattcataat

SEQ ID NO: 45768 - DNA, 80 bp, synthetic construct; identical to SEQ ID NO: 22990
  misc_feature 1..80: note = Artificially Synthesized Probe
  source 1..80: mol_type = other DNA

SEQ ID NO: 45769 - DNA, 80 bp, synthetic construct
  misc_feature 1..80: note = Artificially Synthesized Probe
  source 1..80: mol_type = other DNA
tcatgtcatacattttttccccaaaggttaagagtaaaaggagagttcttgtgattaaatgtcacctcaattgtttgttg

SEQ ID NO: 45770 - DNA, 80 bp, synthetic construct
  misc_feature 1..80: note = Artificially Synthesized Probe
  source 1..80: mol_type = other DNA
tctgacatttgagaatacaaattataccaccctcatacgacagctgttttaaacaagataatctgcataactcacacagc

SEQ ID NO: 45771 - DNA, 80 bp, synthetic construct
  misc_feature 1..80: note = Artificially Synthesized Probe
  source 1..80: mol_type = other DNA
atgatatattagctgcaagtgtatacatgtgtatatgtatgtgaataaaaggggtaagtttgtgctattcttaccttcag

SEQ ID NO: 45772 - DNA, 80 bp, synthetic construct
  misc_feature 1..80: note = Artificially Synthesized Probe
  source 1..80: mol_type = other DNA
acacaaatagctaaatgactatcctcaacatcacatatggaccatctgctactacttgctaaggcttagcccaaacaaat

SEQ ID NO: 45773 - DNA, 80 bp, synthetic construct; identical to SEQ ID NO: 22991
  misc_feature 1..80: note = Artificially Synthesized Probe
  source 1..80: mol_type = other DNA

SEQ ID NO: 45774 - DNA, 80 bp, synthetic construct
  misc_feature 1..80: note = Artificially Synthesized Probe
  source 1..80: mol_type = other DNA
gagtaagaaactgttacttgctagcatggaaaagaatgacaaccccaaagagtaactgagacttctacctcgctcaccta

SEQ ID NO: 45775 - DNA, 80 bp, synthetic construct; identical to SEQ ID NO: 22971
  misc_feature 1..80: note = Artificially Synthesized Probe
  source 1..80: mol_type = other DNA

SEQ ID NO: 45776 - DNA, 80 bp, synthetic construct
  misc_feature 1..80: note = Artificially Synthesized Probe
  source 1..80: mol_type = other DNA
actgttattgtgatatgtatttgggggttgaggaaaagtgggcaatctattctgaggaattagagtgtatctttgcagca

SEQ ID NO: 45777 - DNA, 80 bp, synthetic construct
  misc_feature 1..80: note = Artificially Synthesized Probe
  source 1..80: mol_type = other DNA
aatgacatgtacatttcagttcattgtgggagctcttttgtaatggtgatggtcatgcaagtcaatggagcttatgttct

SEQ ID NO: 45778 - DNA, 80 bp, synthetic construct; identical to SEQ ID NO: 22992
  misc_feature 1..80: note = Artificially Synthesized Probe
  source 1..80: mol_type = other DNA

SEQ ID NO: 45779 - DNA, 80 bp, synthetic construct
  misc_feature 1..80: note = Artificially Synthesized Probe
  source 1..80: mol_type = other DNA
gccttccactacacataagtatggtcaagtatgaaatagtgttttatccacaacctgcacaactccaggctggtggaaca

SEQ ID NO: 45780 - DNA, 80 bp, synthetic construct
  misc_feature 1..80: note = Artificially Synthesized Probe
  source 1..80: mol_type = other DNA
gagtaagggtttaggctctgaaaattctctactaggaaggctgtagaaaaatagcattgcataacagacttctcttgtat

SEQ ID NO: 45781 - DNA, 80 bp, synthetic construct; identical to SEQ ID NO: 22993
  misc_feature 1..80: note = Artificially Synthesized Probe
  source 1..80: mol_type = other DNA

SEQ ID NO: 45782 - DNA, 80 bp, synthetic construct
  misc_feature 1..80: note = Artificially Synthesized Probe
  source 1..80: mol_type = other DNA
gagaaacccataaagtgaatgtgtaaataattgacggtaatttagatagtttctggcctaaaattgatcaattcagctaa

SEQ ID NO: 45783 - DNA, 80 bp, synthetic construct
  misc_feature 1..80: note = Artificially Synthesized Probe
  source 1..80: mol_type = other DNA
aggagttattttaattacatagtaattttagctggataattagccagattttctttaaccaggggattctacctaacatt

SEQ ID NO: 45784 - DNA, 80 bp, synthetic construct
  misc_feature 1..80: note = Artificially Synthesized Probe
  source 1..80: mol_type = other DNA
tgctacatatatttgaatatagcaacactatactttaaaaagatattctataacttagcgtttttgtcaattttaccttt

SEQ ID NO: 45785 - DNA, 80 bp, synthetic construct
  misc_feature 1..80: note = Artificially Synthesized Probe
  source 1..80: mol_type = other DNA
tcaggtagggtgggacatagataaccaaattagataaaactggtgaaacagatttgatgtgaagcatttctgaaaaacat

SEQ ID NO: 45786 - DNA, 80 bp, synthetic construct; identical to SEQ ID NO: 22994
  misc_feature 1..80: note = Artificially Synthesized Probe
  source 1..80: mol_type = other DNA

SEQ ID NO: 45787 - DNA, 80 bp, synthetic construct
  misc_feature 1..80: note = Artificially Synthesized Probe
  source 1..80: mol_type = other DNA
gctactttgtgcaagacccggttctgaggcatttatatttattgatttatttaattctcatttaaccatgaaggaggtac

SEQ ID NO: 45788 - DNA, 80 bp, synthetic construct
  misc_feature 1..80: note = Artificially Synthesized Probe
  source 1..80: mol_type = other DNA
gagatgtgtcattcatttgtatcaatgaatgaatgaggacaattagtgtataaatccttagtacaacaatctgagggtag

SEQ ID NO: 45789 - DNA, 80 bp, synthetic construct
  misc_feature 1..80: note = Artificially Synthesized Probe
  source 1..80: mol_type = other DNA
gctgctttgggagtttaaattacttcaggtaacaaaacattcagacaagcctgaatacaatgttgtttctccagaaatat

SEQ ID NO: 45790 - DNA, 80 bp, synthetic construct
  misc_feature 1..80: note = Artificially Synthesized Probe
  source 1..80: mol_type = other DNA
tggctcaactatgcaaaatcctttttggttatttaaaagacttcaacaaatgctatcagaagactttcctacgtatccaa

SEQ ID NO: 45791 - DNA, 80 bp, synthetic construct
  misc_feature 1..80: note = Artificially Synthesized Probe
  source 1..80: mol_type = other DNA
tattgcaggggaagagaagacaaaacgagtctttcattcggtgtgaacttttctctttaattttaactgatttaacactt

SEQ ID NO: 45792 - DNA, 80 bp, synthetic construct; identical to SEQ ID NO: 22995
  misc_feature 1..80: note = Artificially Synthesized Probe
  source 1..80: mol_type = other DNA

SEQ ID NO: 45793 - DNA, 80 bp, synthetic construct
  misc_feature 1..80: note = Artificially Synthesized Probe
  source 1..80: mol_type = other DNA
tatgggatctaagaaaatttaacatctactttttttctcaatcttgttcagttctctattcacagacattttaaaacata

SEQ ID NO: 45794 - DNA, 80 bp, synthetic construct
  misc_feature 1..80: note = Artificially Synthesized Probe
  source 1..80: mol_type = other DNA
ggaatgcagacatctgctccgtaaggcagaatatggaaggagattggaggatgacacaaaaccagcataatatcagagga

SEQ ID NO: 45795 - DNA, 80 bp, synthetic construct
  misc_feature 1..80: note = Artificially Synthesized Probe
  source 1..80: mol_type = other DNA
aaatagtcataatttactaaaggcctaccatttgccaggcatttttacatttgtcccctctaatcttttgatgagatgat

SEQ ID NO: 45796 - DNA, 80 bp, synthetic construct
  misc_feature 1..80: note = Artificially Synthesized Probe
  source 1..80: mol_type = other DNA
tgtaacccctttctctacattaaacccatgttggaacaaatacatttattattcattcatcaaatgttgctgagtcctgg

SEQ ID NO: 45797 - DNA, 80 bp, synthetic construct; identical to SEQ ID NO: 22972
  misc_feature 1..80: note = Artificially Synthesized Probe
  source 1..80: mol_type = other DNA

SEQ ID NO: 45798 - DNA, 80 bp, synthetic construct
  misc_feature 1..80: note = Artificially Synthesized Probe
  source 1..80: mol_type = other DNA
ttatactatgataaatgtttgtatttgctggaagtgctactgacggtaaaccctttttgtttaaatgtgtgccctagtag

SEQ ID NO: 45799 - DNA, 80 bp, synthetic construct
  misc_feature 1..80: note = Artificially Synthesized Probe
  source 1..80: mol_type = other DNA
gtccattatttctgtcttttattcaacattttttttagagggtgggaggaatacagaggaggtacaatgatacacaaatg

SEQ ID NO: 45800 - DNA, 80 bp, synthetic construct
  misc_feature 1..80: note = Artificially Synthesized Probe
  source 1..80: mol_type = other DNA
atttgattttataatcttacctttagaataatgaaacacctgtgaagctttagaaaatactggtgcctgggtctcaactc

SEQ ID NO: 45801 - DNA, 80 bp, synthetic construct; identical to SEQ ID NO: 22973
  misc_feature 1..80: note = Artificially Synthesized Probe
  source 1..80: mol_type = other DNA

SEQ ID NO: 45802 - DNA, 80 bp, synthetic construct
  misc_feature 1..80: note = Artificially Synthesized Probe
  source 1..80: mol_type = other DNA
tattattctgcaacttagggacaagtcatctctctgaattttttgtactttgagagtatttgttatatttgcaagatgaa

SEQ ID NO: 45803 - DNA, 80 bp, synthetic construct
  misc_feature 1..80: note = Artificially Synthesized Probe
  source 1..80: mol_type = other DNA
ttagggacaagtcatctctttgaatattctgtagtttgaggagaatatttgttatatttgcaaaataaaataagtttgca

SEQ ID NO: 45804 - DNA, 80 bp, synthetic construct
  misc_feature 1..80: note = Artificially Synthesized Probe
  source 1..80: mol_type = other DNA
atataccatcaaacaagaggttccatgagaaaataatctgaaaggtttaataagttgtcaaaggtgagagggctcttctc

SEQ ID NO: 45805 - DNA, 80 bp, synthetic construct; identical to SEQ ID NO: 22974
  misc_feature 1..80: note = Artificially Synthesized Probe
  source 1..80: mol_type = other DNA

SEQ ID NO: 45806 - DNA, 80 bp, synthetic construct
  misc_feature 1..80: note = Artificially Synthesized Probe
  source 1..80: mol_type = other DNA
cttgatttattattcatatttattattccacatggagaaaaaatatttaactgatggatatatttaaatgaaagataaac

SEQ ID NO: 45807 - DNA, 80 bp, synthetic construct
  misc_feature 1..80: note = Artificially Synthesized Probe
  source 1..80: mol_type = other DNA
aaattttatatgtgaagaagccagaattatgctccttcacataactccctcagactagtaaaatagataaaatctttgtt

SEQ ID NO: 45808 - DNA, 80 bp, synthetic construct
  misc_feature 1..80: note = Artificially Synthesized Probe
  source 1..80: mol_type = other DNA
aaaaaccaaacaactggaagacaaaatctggattttagtgataggtctactataaattatgcttgttaacttcattcctt

SEQ ID NO: 45809 - DNA, 80 bp, synthetic construct; identical to SEQ ID NO: 22975
  misc_feature 1..80: note = Artificially Synthesized Probe
  source 1..80: mol_type = other DNA

SEQ ID NO: 45810 - DNA, 80 bp, synthetic construct
  misc_feature 1..80: note = Artificially Synthesized Probe
  source 1..80: mol_type = other DNA
tgactaatgtcttcgacattgaccttttgattccttgaaatctcatgagtcaaaccaaatcagattttagaaactgaaga

SEQ ID NO: 45811 - DNA, 80 bp, synthetic construct
  misc_feature 1..80: note = Artificially Synthesized Probe
  source 1..80: mol_type = other DNA
tgttagtctcttggatgtctttccattccacattttaaaaatttctaacaaagaatttaaagtagtgtgttgctgttact

SEQ ID NO: 45812 - DNA, 80 bp, synthetic construct
  misc_feature 1..80: note = Artificially Synthesized Probe
  source 1..80: mol_type = other DNA
tagataccctcaattatgggtacattacagtagatggatggtcacagaaggagaaaccactcttatgggaaatccactta

SEQ ID NO: 45813 - DNA, 80 bp, synthetic construct; identical to SEQ ID NO: 22976
  misc_feature 1..80: note = Artificially Synthesized Probe
  source 1..80: mol_type = other DNA

SEQ ID NO: 45814 - DNA, 80 bp, synthetic construct
  misc_feature 1..80: note = Artificially Synthesized Probe
  source 1..80: mol_type = other DNA
gacaaaaatttagcatgctgaagagaagatacaaaaatagcagtgaaaaatgcatttatatatttgaagagctattgtat

SEQ ID NO: 45815 - DNA, 80 bp, synthetic construct
  misc_feature 1..80: note = Artificially Synthesized Probe
  source 1..80: mol_type = other DNA
atctcagaaacagtgagataagagaaggaattttctcacaacccacacgtatagctcaactgctctgaagaagtatatat

SEQ ID NO: 45816 - DNA, 80 bp, synthetic construct
  misc_feature 1..80: note = Artificially Synthesized Probe
  source 1..80: mol_type = other DNA
tttcttatctgtaaaataagggatgataatagctcccatttcatagttagcatggaaattgatataacagcaatagtagc

SEQ ID NO: 45817 - DNA, 80 bp, synthetic construct
  misc_feature 1..80: note = Artificially Synthesized Probe
  source 1..80: mol_type = other DNA
ccagtgagtcaagagatgctggctcgggcttctgggcaggatatcagctttgcttacctatatttatttattaaacattt

SEQ ID NO: 45818 - DNA, 80 bp, synthetic construct
  misc_feature 1..80: note = Artificially Synthesized Probe
  source 1..80: mol_type = other DNA
aactatagtgaatgtaagatgcatagcacatcgttagggttgccaggtttagcaaacaacaacaaaacataatacccagt

SEQ ID NO: 45819 - DNA, 80 bp, synthetic construct; identical to SEQ ID NO: 22977
  misc_feature 1..80: note = Artificially Synthesized Probe
  source 1..80: mol_type = other DNA

SEQ ID NO: 45820 - DNA, 80 bp, synthetic construct
  misc_feature 1..80: note = Artificially Synthesized Probe
  source 1..80: mol_type = other DNA
cattatctattgcaactttacaaccaattagaggttcaaggtaatgttacagatcgctgatttattcttgtaaattcaaa

SEQ ID NO: 45821 - DNA, 80 bp, synthetic construct
  misc_feature 1..80: note = Artificially Synthesized Probe
  source 1..80: mol_type = other DNA
catgtattcctcagatgctttctgtggaatattgatgctgtcatctgagtttggtaagggtaagtcacagaggaggaaac

SEQ ID NO: 45822 - DNA, 80 bp, synthetic construct; identical to SEQ ID NO: 22978
  misc_feature 1..80: note = Artificially Synthesized Probe
  source 1..80: mol_type = other DNA

SEQ ID NO: 45823 - DNA, 80 bp, synthetic construct
  misc_feature 1..80: note = Artificially Synthesized Probe
  source 1..80: mol_type = other DNA
cctaccaacctgttgcctgggtattaagcccagcgtgcattacctatttttcctaatgctctccctccctgcactccact

SEQ ID NO: 45824 - DNA, 80 bp, synthetic construct
  misc_feature 1..80: note = Artificially Synthesized Probe
  source 1..80: mol_type = other DNA
cttttttccttttattgtttggacattaaagtctcattttccataaggcagcaaagaaatctatttcatcaggctgaaac

SEQ ID NO: 45825 - DNA, 80 bp, synthetic construct
  misc_feature 1..80: note = Artificially Synthesized Probe
  source 1..80: mol_type = other DNA
ctttgccatgagaaagaaattttggagaagtacggacattcagactgctgcagccaaagtgaagagggaagacataactg

SEQ ID NO: 45826 - DNA, 80 bp, synthetic construct
  misc_feature 1..80: note = Artificially Synthesized Probe
  source 1..80: mol_type = other DNA
cagattgaattatttgcctgtcatacagctaataattgaccataagacaattagatttaaattagttttgaatctttcta

SEQ ID NO: 45827 - DNA, 80 bp, synthetic construct; identical to SEQ ID NO: 22979
  misc_feature 1..80: note = Artificially Synthesized Probe
  source 1..80: mol_type = other DNA

SEQ ID NO: 45828 - DNA, 80 bp, synthetic construct
  misc_feature 1..80: note = Artificially Synthesized Probe
  source 1..80: mol_type = other DNA
caattttaccttgttcaagaatatattagtattgcaccaaattgatgctttccagagccatatattggtgttttgtgttc

SEQ ID NO: 45829 - DNA, 80 bp, synthetic construct
  misc_feature 1..80: note = Artificially Synthesized Probe
  source 1..80: mol_type = other DNA
agtcgcgggtcctgcagtgccccagaagccgcacgtataactccctcggcgtaagtgctaggaatgccgctggcctcgcg

SEQ ID NO: 45830 - DNA, 80 bp, synthetic construct
  misc_feature 1..80: note = Artificially Synthesized Probe
  source 1..80: mol_type = other DNA
tcatcagttattattgcccattattaattgaaagttatattcgtgtttaaaatttatatgtattatatttctaatagact

SEQ ID NO: 45831 - DNA, 80 bp, synthetic construct
  misc_feature 1..80: note = Artificially Synthesized Probe
  source 1..80: mol_type = other DNA
ggtatgtttttttaaaaataacctaacttgggcaaaagtagaaatgcattggctctcaggattacaagacagctttagta

SEQ ID NO: 45832 - DNA, 80 bp, synthetic construct
  misc_feature 1..80: note = Artificially Synthesized Probe
  source 1..80: mol_type = other DNA
cagcaaacactccaagtcagaggttcccaccaccctagtcagttgctaaatctttattagcacatcactggacttgagca

SEQ ID NO: 45833 - DNA, 80 bp, synthetic construct; identical to SEQ ID NO: 23007
  misc_feature 1..80: note = Artificially Synthesized Probe
  source 1..80: mol_type = other DNA

SEQ ID NO: 45834 - DNA, 80 bp, synthetic construct; identical to SEQ ID NO: 22997
  misc_feature 1..80: note = Artificially Synthesized Probe
  source 1..80: mol_type = other DNA

SEQ ID NO: 45835 - DNA, 80 bp, synthetic construct
  misc_feature 1..80: note = Artificially Synthesized Probe
  source 1..80: mol_type = other DNA
agagcagacagctctatgatgtttactatacttgctaaaatgtgaaattcagctaaattggaatacaaagtagtgccaaa

SEQ ID NO: 45836 - DNA, 80 bp, synthetic construct
  misc_feature 1..80: note = Artificially Synthesized Probe
  source 1..80: mol_type = other DNA
ggcccaactttacagggaaaagcagttaccgtgtatacaaattacccatttcctggagaaacatttaatagagaaaaatt

SEQ ID NO: 45837 - DNA, 80 bp, synthetic construct; identical to SEQ ID NO: 23008
  misc_feature 1..80: note = Artificially Synthesized Probe
  source 1..80: mol_type = other DNA

SEQ ID NO: 45838 - DNA, 80 bp, synthetic construct
  misc_feature 1..80: note = Artificially Synthesized Probe
  source 1..80: mol_type = other DNA
tatacttatatttcattaaaccaacattcttggatattttgtgtattatacatgtaattatgtagattgtgaaagggtaa

SEQ ID NO: 45839 - DNA, 80 bp, synthetic construct
  misc_feature 1..80: note = Artificially Synthesized Probe
  source 1..80: mol_type = other DNA
ttttcccttagaaatgagaaaagtggtggaggttacatagttgtggaccccattttacgtgttggtgctgataatcatgt

SEQ ID NO: 45840 - DNA, 80 bp, synthetic construct
  misc_feature 1..80: note = Artificially Synthesized Probe
  source 1..80: mol_type = other DNA
tagatttcaaaagttttgtgtattagtccattctctcattgcagtaaagaactacctgagactgggtaatttataaagaa

SEQ ID NO: 45841 - DNA, 80 bp, synthetic construct; identical to SEQ ID NO: 23009
  misc_feature 1..80: note = Artificially Synthesized Probe
  source 1..80: mol_type = other DNA

SEQ ID NO: 45842 - DNA, 80 bp, synthetic construct
  misc_feature 1..80: note = Artificially Synthesized Probe
  source 1..80: mol_type = other DNA
acggagtatcaccctgtcacgtaggctgcaatggtgcgatctcagctcactacaacctccacctcccgggttcaaacgat

SEQ ID NO: 45843 - DNA, 80 bp, synthetic construct
  misc_feature 1..80: note = Artificially Synthesized Probe
  source 1..80: mol_type = other DNA
gggattataggcatgagctgctgtgcttggcccatattacatttttgatacttaaccatttttaacctataaaaatggca

SEQ ID NO: 45844 - DNA, 80 bp, synthetic construct
  misc_feature 1..80: note = Artificially Synthesized Probe
  source 1..80: mol_type = other DNA
cttttgtgtagaagacatgtgctaccataaataccaagagcaaaatgaaacttgtgtttcattttggcgcaatctcggct

SEQ ID NO: 45845 - DNA, 80 bp, synthetic construct
  misc_feature 1..80: note = Artificially Synthesized Probe
  source 1..80: mol_type = other DNA
agttgatctgtatttaaaagatcaaattacttttctacaaggctagttaatagatgttttattttcttagcctttgtaat

SEQ ID NO: 45846 - DNA, 80 bp, synthetic construct
  misc_feature 1..80: note = Artificially Synthesized Probe
  source 1..80: mol_type = other DNA
tgatccacctgcctcagcctcccaaagtgctgggattacaggcatgagccactgcgcctggccttttttttttttttttt

SEQ ID NO: 45847 - DNA, 80 bp, synthetic construct; identical to SEQ ID NO: 23010
  misc_feature 1..80: note = Artificially Synthesized Probe
  source 1..80: mol_type = other DNA

SEQ ID NO: 45848 - DNA, 80 bp, synthetic construct
  misc_feature 1..80: note = Artificially Synthesized Probe
  source 1..80: mol_type = other DNA
tgtatatgaggacacatatcttgaaagatttaaataaacttgcttaaagtctcttgtggtacagttaggatttgaaccca

SEQ ID NO: 45849 - DNA, 80 bp, synthetic construct
  misc_feature 1..80: note = Artificially Synthesized Probe
  source 1..80: mol_type = other DNA
ttcctttatttgctttgcaggctacaacatgattcattttaccccattgcagactcttggactatctaggtcatgctact

SEQ ID NO: 45850 - DNA, 80 bp, synthetic construct; identical to SEQ ID NO: 23011
  misc_feature 1..80: note = Artificially Synthesized Probe
  source 1..80: mol_type = other DNA

SEQ ID NO: 45851 - DNA, 80 bp, synthetic construct
  misc_feature 1..80: note = Artificially Synthesized Probe
  source 1..80: mol_type = other DNA
agtatcttgcatctgttgcttataaatacaggagagtgatcatagaaggaacataatgatcacatatttcaacttacagt

SEQ ID NO: 45852 - DNA, 80 bp, synthetic construct
  misc_feature 1..80: note = Artificially Synthesized Probe
  source 1..80: mol_type = other DNA
ctatcccacctggaatgtgactcatccttttgtccagtgcatccatgctgtaaatactacctgtccaccagttacttaat

SEQ ID NO: 45853 - DNA, 80 bp, synthetic construct
  misc_feature 1..80: note = Artificially Synthesized Probe
  source 1..80: mol_type = other DNA
agaggggactactctattaatcctttcccaagtaactcatggatcctatattagcaggagctctggtactatagtactat

SEQ ID NO: 45854 - DNA, 80 bp, synthetic construct; identical to SEQ ID NO: 23012
  misc_feature 1..80: note = Artificially Synthesized Probe
  source 1..80: mol_type = other DNA

SEQ ID NO: 45855 - DNA, 80 bp, synthetic construct
  misc_feature 1..80: note = Artificially Synthesized Probe
  source 1..80: mol_type = other DNA
aaaagatacaatctgctgtttcataaaacagttctccaagtaaccatagaaactatgaagatatttaaaagctcatagat

SEQ ID NO: 45856 - DNA, 80 bp, synthetic construct
  misc_feature 1..80: note = Artificially Synthesized Probe
  source 1..80: mol_type = other DNA
ttgaaaatttgacattattaagccaggtgctgtggcttgcacctgtaatcccagctgcttgagaggctgaagtgggagga

SEQ ID NO: 45857 - DNA, 80 bp, synthetic construct
  misc_feature 1..80: note = Artificially Synthesized Probe
  source 1..80: mol_type = other DNA
atcttcatgccaaatccgcgcctttttccaactttggcatttaaaatcactgagtacctactccatttttggctttcctg

SEQ ID NO: 45858 - DNA, 80 bp, synthetic construct
  misc_feature 1..80: note = Artificially Synthesized Probe
  source 1..80: mol_type = other DNA
ggcattttatgagttataaattgtatgagttaggatatggcataagcagctataacagaaaaacatagggactaaaggct

SEQ ID NO: 45859 - DNA, 80 bp, synthetic construct
  misc_feature 1..80: note = Artificially Synthesized Probe
  source 1..80: mol_type = other DNA
acattctccccagtggaaatgaggaaagggcaggcatgtctttttgggtatgatatgatatatattactgtgttcatatt

SEQ ID NO: 45860 - DNA, 80 bp, synthetic construct; identical to SEQ ID NO: 23013
  misc_feature 1..80: note = Artificially Synthesized Probe
  source 1..80: mol_type = other DNA

SEQ ID NO: 45861 - DNA, 80 bp, synthetic construct
  misc_feature 1..80: note = Artificially Synthesized Probe
  source 1..80: mol_type = other DNA
ctcccgcctcagcctcccaagtagctgggattacaggcatgcaccaacacacccagctaatttttgtatttttagtagag

SEQ ID NO: 45862 - DNA, 80 bp, synthetic construct
  misc_feature 1..80: note = Artificially Synthesized Probe
  source 1..80: mol_type = other DNA
ttttaaaaaagtattatctagcagaattcaacctccagaatggttatgtgaaggcttcacacactctttacgtagtgaaa

SEQ ID NO: 45863 - DNA, 80 bp, synthetic construct; identical to SEQ ID NO: 23014
  misc_feature 1..80: note = Artificially Synthesized Probe
  source 1..80: mol_type = other DNA

SEQ ID NO: 45864 - DNA, 80 bp, synthetic construct
  misc_feature 1..80: note = Artificially Synthesized Probe
  source 1..80: mol_type = other DNA
ttttttttgagacggagtctccttctgtcgcccaggctggagtgcagtggcgcagtcttggctcactgcagcctccacct

SEQ ID NO: 45865 - DNA, 80 bp, synthetic construct
  misc_feature 1..80: note = Artificially Synthesized Probe
  source 1..80: mol_type = other DNA
gagccaccgcacccggccgtgttgcagaagttctattccaagcaggcaggtggagaaaaatctccttttctccacccagc

SEQ ID NO: 45866 - DNA, 80 bp, synthetic construct
  misc_feature 1..80: note = Artificially Synthesized Probe
  source 1..80: mol_type = other DNA
agggactaaatgattgtttttaaaattattttcaccagttaaattgttttgctagggacagtgtttgttgagtttcttac

SEQ ID NO: 45867 - DNA, 80 bp, synthetic construct; identical to SEQ ID NO: 23015
  misc_feature 1..80: note = Artificially Synthesized Probe
  source 1..80: mol_type = other DNA

SEQ ID NO: 45868 - DNA, 80 bp, synthetic construct
  misc_feature 1..80: note = Artificially Synthesized Probe
  source 1..80: mol_type = other DNA
acagtctcatggcctcaactgttgcctctgtgctaatgactacttttggaggaaaagccttgagctttcttcttcttgga

SEQ ID NO: 45869 - DNA, 80 bp, synthetic construct
  misc_feature 1..80: note = Artificially Synthesized Probe
  source 1..80: mol_type = other DNA
cacttgaacccaggaggtggaggttacagtgagccgagactgtgccactgtactccagcctgggtgacaaagcaagactc

SEQ ID NO: 45870 - DNA, 80 bp, synthetic construct
  misc_feature 1..80: note = Artificially Synthesized Probe
  source 1..80: mol_type = other DNA
atggagaaagacctttctcaaaaataaatggatgaatgagagcagcattggtatttactctttttttttttttttttgag

SEQ ID NO: 45871 - DNA, 80 bp, synthetic construct
  misc_feature 1..80: note = Artificially Synthesized Probe
  source 1..80: mol_type = other DNA
tgtagagatgaggtctcactatgttgcccaggctgtctccagctcctggactcaggtgatactccctcctcagcctccca

SEQ ID NO: 45872 - DNA, 80 bp, synthetic construct
  misc_feature 1..80: note = Artificially Synthesized Probe
  source 1..80: mol_type = other DNA
aatgcaagttttgagaattaccaatttaacttttattacaacttctctgctccttacatagcctttcttcatctgagtgc

SEQ ID NO: 45873 - DNA, 80 bp, synthetic construct; identical to SEQ ID NO: 23016
  misc_feature 1..80: note = Artificially Synthesized Probe
  source 1..80: mol_type = other DNA

SEQ ID NO: 45874 - DNA, 80 bp, synthetic construct
  misc_feature 1..80: note = Artificially Synthesized Probe
  source 1..80: mol_type = other DNA
tgctcttcaatatgaattcagggataattattagtccattttaaagatcaaacaaattccatgtaactttcattcgttta

SEQ ID NO: 45875 - DNA, 80 bp, synthetic construct
  misc_feature 1..80: note = Artificially Synthesized Probe
  source 1..80: mol_type = other DNA
ttgtaaatatttggaatactgtgccaaactcctgattctgattctgaactataagctacattcgtattccttgagcgtat

SEQ ID NO: 45876 - DNA, 80 bp, synthetic construct
  misc_feature 1..80: note = Artificially Synthesized Probe
  source 1..80: mol_type = other DNA
tatgctgaagcgaatgataggataccataaccaaagaaaaaacttttcctgtaacagtatcatcgtaaaattgatgtcca

SEQ ID NO: 45877 - DNA, 80 bp, synthetic construct; identical to SEQ ID NO: 22996
  misc_feature 1..80: note = Artificially Synthesized Probe
  source 1..80: mol_type = other DNA

SEQ ID NO: 45878 - DNA, 80 bp, synthetic construct; identical to SEQ ID NO: 23017
  misc_feature 1..80: note = Artificially Synthesized Probe
  source 1..80: mol_type = other DNA

SEQ ID NO: 45879 - DNA, 80 bp, synthetic construct
  misc_feature 1..80: note = Artificially Synthesized Probe
  source 1..80: mol_type = other DNA
ggaaatacaaagaaaagggaatacctgctttgattgaaaatgatcaccatatgaatgtcagtatgtacagaggagtatca

SEQ ID NO: 45880 - DNA, 80 bp, synthetic construct
  misc_feature 1..80: note = Artificially Synthesized Probe
  source 1..80: mol_type = other DNA
aaaaataatttgggaggatatttttccaaagcttaaactctgggaatttttccaagtagatgtcaacaaagcggttgagc

SEQ ID NO: 45881 - DNA, 80 bp, synthetic construct
  misc_feature 1..80: note = Artificially Synthesized Probe
  source 1..80: mol_type = other DNA
tgttgcccaagctgagtgttgtggcatgatcatggctcagtgctgcctcaacttcctgggctcaagcagttctcctgcct

SEQ ID NO: 45882 - DNA, 80 bp, synthetic construct
  misc_feature 1..80: note = Artificially Synthesized Probe
  source 1..80: mol_type = other DNA
gtgattctgtaagctgagagttagcagaaacatctaaagggcacgtcataataatacataacacaattatttcccctggg

SEQ ID NO: 45883 - DNA, 80 bp, synthetic construct; identical to SEQ ID NO: 23018
  misc_feature 1..80: note = Artificially Synthesized Probe
  source 1..80: mol_type = other DNA

SEQ ID NO: 45884 - DNA, 80 bp, synthetic construct
  misc_feature 1..80: note = Artificially Synthesized Probe
  source 1..80: mol_type = other DNA
atgtgcccccccccccccaacaaaatagggtaggaaaaaataggtgaaatgagaaagtagggtttgtaggagacaaatta

SEQ ID NO: 45885 - DNA, 80 bp, synthetic construct
  misc_feature 1..80: note = Artificially Synthesized Probe
  source 1..80: mol_type = other DNA
aatagtgcctttgaagtagacgtcaatatggcttgagctctaggatactcagtcagcttcatgcatcaacttttgcaatt

SEQ ID NO: 45886 - DNA, 80 bp, synthetic construct
  misc_feature 1..80: note = Artificially Synthesized Probe
  source 1..80: mol_type = other DNA
gaaaatagaatgtatgacctcttctttcccaaaacccacatctcagctactacatattgtttcttgtacttaagactctt

SEQ ID NO: 45887 - DNA, 80 bp, synthetic construct
  misc_feature 1..80: note = Artificially Synthesized Probe
  source 1..80: mol_type = other DNA
tatttcttttaacctctgtatagcaatatgctatttttaaagtacttgaatttatttagcctttttgataggttgtttcc

SEQ ID NO: 45888 - DNA, 80 bp, synthetic construct; identical to SEQ ID NO: 23019
  misc_feature 1..80: note = Artificially Synthesized Probe
  source 1..80: mol_type = other DNA

SEQ ID NO: 45889 - DNA, 80 bp, synthetic construct
  misc_feature 1..80: note = Artificially Synthesized Probe
  source 1..80: mol_type = other DNA
gtcaccaggctagagtgcagtggtgtgatcttggctcactgcaacctctgcctcccaggttcaagtgattctcctgcctc

SEQ ID NO: 45890 - DNA, 80 bp, synthetic construct
  misc_feature 1..80: note = Artificially Synthesized Probe
  source 1..80: mol_type = other DNA
cgtgagccaccgcgcccagccttttaagttacatttctttgcttattaatgaagtatatttttacaccttgattagctat

SEQ ID NO: 45891 - DNA, 80 bp, synthetic construct; identical to SEQ ID NO: 23020
  misc_feature 1..80: note = Artificially Synthesized Probe
  source 1..80: mol_type = other DNA

SEQ ID NO: 45892 - DNA, 80 bp, synthetic construct; identical to SEQ ID NO: 22998
  misc_feature 1..80: note = Artificially Synthesized Probe
  source 1..80: mol_type = other DNA

SEQ ID NO: 45893 - DNA, 80 bp, synthetic construct
  misc_feature 1..80: note = Artificially Synthesized Probe
  source 1..80: mol_type = other DNA
tcatagtgtatggtaatatacaaaatatacatctgttatctgtgctcttccactgatccgtctcttttattctatcaata

SEQ ID NO: 45894 - DNA, 80 bp, synthetic construct
  misc_feature 1..80: note = Artificially Synthesized Probe
  source 1..80: mol_type = other DNA
ctgggttcaagcgattctcctgcctcagcctcccgagtagctgggattacaggcatgtgccaccacacccagctaattct

SEQ ID NO: 45895 - DNA, 80 bp, synthetic construct
  misc_feature 1..80: note = Artificially Synthesized Probe
  source 1..80: mol_type = other DNA
gcccggcggcagttttcatatatttactcttccagatgaaccttagaaactggattttaagaattgatttgtattttatg

SEQ ID NO: 45896 - DNA, 80 bp, synthetic construct
  misc_feature 1..80: note = Artificially Synthesized Probe
  source 1..80: mol_type = other DNA
tagttaatataaaatcaagttcaatggaggcaatcctgtaccagttcttaattttattacaaacaagttccagaaaaaga

SEQ ID NO: 45897 - DNA, 80 bp, synthetic construct; identical to SEQ ID NO: 23021
  misc_feature 1..80: note = Artificially Synthesized Probe
  source 1..80: mol_type = other DNA

SEQ ID NO: 45898 - DNA, 80 bp, synthetic construct
  misc_feature 1..80: note = Artificially Synthesized Probe
  source 1..80: mol_type = other DNA
gctgagattgaattgataggaatccttgtgtctttcttttatgttatttttgtctctgtttctttctcccccacacccct

SEQ ID NO: 45899 - DNA, 80 bp, synthetic construct
  misc_feature 1..80: note = Artificially Synthesized Probe
  source 1..80: mol_type = other DNA
tagatatttgcatttaaggtatcgtcttttctttcttttagaaaataggcgagtaaccaagtctgatccaaaccaacacc

SEQ ID NO: 45900 - DNA, 80 bp, synthetic construct
  misc_feature 1..80: note = Artificially Synthesized Probe
  source 1..80: mol_type = other DNA
cttattaaaaacgcttaatagaaaatgaaataaagtaattcactgtaattctactatttcagcacatgacattttcccac

SEQ ID NO: 45901 - DNA, 80 bp, synthetic construct; identical to SEQ ID NO: 23022
  misc_feature 1..80: note = Artificially Synthesized Probe
  source 1..80: mol_type = other DNA

SEQ ID NO: 45902 - DNA, 80 bp, synthetic construct
  misc_feature 1..80: note = Artificially Synthesized Probe
  source 1..80: mol_type = other DNA
gtgatgatctaacacaatttaatgtttttcaggcagttaattgccttttgggaaatgtgttttatgaacgactggctggc

SEQ ID NO: 45903 - DNA, 80 bp, synthetic construct
  misc_feature 1..80: note = Artificially Synthesized Probe
  source 1..80: mol_type = other DNA
cctaaatgttttctttaacatgtgagttcagtacatttcttaaattgaaatagaagttttgatttggacataggcttaat

SEQ ID NO: 45904 - DNA, 80 bp, synthetic construct
  misc_feature 1..80: note = Artificially Synthesized Probe
  source 1..80: mol_type = other DNA
ggatagctcaacttggatatgcttaaatctagcatgtccaaaaatatcccctgcccattctcgatcctttatttctcagc

SEQ ID NO: 45905 - DNA, 80 bp, synthetic construct; identical to SEQ ID NO: 23023
  misc_feature 1..80: note = Artificially Synthesized Probe
  source 1..80: mol_type = other DNA

SEQ ID NO: 45906 - DNA, 80 bp, synthetic construct
  misc_feature 1..80: note = Artificially Synthesized Probe
  source 1..80: mol_type = other DNA
ccaggactacagaggtgcaccaccatgcccagctaatttttgtagttttagtagagacggggtttccccatgttggccag

SEQ ID NO: 45907 - DNA, 80 bp, synthetic construct
  misc_feature 1..80: note = Artificially Synthesized Probe
  source 1..80: mol_type = other DNA
catgttaactccctatttctcacatcctgctagatttactcaaaaagcctaatgaagatttttgacctatattgaagttt

SEQ ID NO: 45908 - DNA, 80 bp, synthetic construct
  misc_feature 1..80: note = Artificially Synthesized Probe
  source 1..80: mol_type = other DNA
gacttctccatggaagaatctatgattcatctgccaaataaagcttgttttctgatggcacacaatggatgggtaatggg

SEQ ID NO: 45909 - DNA, 80 bp, synthetic construct
  misc_feature 1..80: note = Artificially Synthesized Probe
  source 1..80: mol_type = other DNA
cagagatacatacaatttgagaaagaaaacatggagccaacaaaaaaagaagttcatcttctgtcctctcctttgccttc

SEQ ID NO: 45910 - DNA, 80 bp, synthetic construct; identical to SEQ ID NO: 23024
  misc_feature 1..80: note = Artificially Synthesized Probe
  source 1..80: mol_type = other DNA

SEQ ID NO: 45911 - DNA, 80 bp, synthetic construct
  misc_feature 1..80: note = Artificially Synthesized Probe
  source 1..80: mol_type = other DNA
atctctgccctcttttttctagccattctaaacgaaatcaagccattctgctgtatgccatggatctaatacaacctgtt

SEQ ID NO: 45912 - DNA, 80 bp, synthetic construct
  misc_feature 1..80: note = Artificially Synthesized Probe
  source 1..80: mol_type = other DNA
aattgaggacaaatttttagaagagactgtaagctagagttttttcagaatagctatgagaaataaataattattaattt

SEQ ID NO: 45913 - DNA, 80 bp, synthetic construct
  misc_feature 1..80: note = Artificially Synthesized Probe
  source 1..80: mol_type = other DNA
tatctctgattgcctgtctattctgtatggctgaatatagatgccagaataatcttatgcagtctcttccctttgttatt

SEQ ID NO: 45914 - DNA, 80 bp, synthetic construct; identical to SEQ ID NO: 23025
  misc_feature 1..80: note = Artificially Synthesized Probe
  source 1..80: mol_type = other DNA

SEQ ID NO: 45915 - DNA, 80 bp, synthetic construct
  misc_feature 1..80: note = Artificially Synthesized Probe
  source 1..80: mol_type = other DNA
ttccttaagtaaactatgcaggtaaatgtttccttttgctagttggacacaagcattgatttggtggtagtatttatcac

SEQ ID NO: 45916 - DNA, 80 bp, synthetic construct
  misc_feature 1..80: note = Artificially Synthesized Probe
  source 1..80: mol_type = other DNA
aatgttaatttttgttatttttaggttgctttcaatatattttagaagtgactgtgaaggtgaatagcttattacacatt

SEQ ID NO: 45917 - DNA, 80 bp, synthetic construct
  misc_feature 1..80: note = Artificially Synthesized Probe
  source 1..80: mol_type = other DNA
ttaaataaaaaataaacattaacattatagcatattgaagccagtctagcctcatcgatttaatttttattatttataaa

SEQ ID NO: 45918 - DNA, 80 bp, synthetic construct; identical to SEQ ID NO: 23026
  misc_feature 1..80: note = Artificially Synthesized Probe
  source 1..80: mol_type = other DNA

SEQ ID NO: 45919 - DNA, 80 bp, synthetic construct
  misc_feature 1..80: note = Artificially Synthesized Probe
  source 1..80: mol_type = other DNA
tggtagaacattgtttagttccaaaaaatgacggctttattttattgtgcttttagcaatagcaaaaagaaatatgcttc

SEQ ID NO: 45920 - DNA, 80 bp, synthetic construct
  misc_feature 1..80: note = Artificially Synthesized Probe
  source 1..80: mol_type = other DNA
ttataaaccagtgtttataataaacagctagatagatagcaccagtgttaaacgtaaatcacacaagtggaaattgtaag

SEQ ID NO: 45921 - DNA, 80 bp, synthetic construct
  misc_feature 1..80: note = Artificially Synthesized Probe
  source 1..80: mol_type = other DNA
ttatttagtcaaccacctggaaattaagtctgattaaagttttaaaaataagcaagcaggcccaggcacggtggctcacg

SEQ ID NO: 45922 - DNA, 80 bp, synthetic construct
  misc_feature 1..80: note = Artificially Synthesized Probe
  source 1..80: mol_type = other DNA
aggctggagaatttcttgaacctgggaggcggaggttgtggtgagctcacatcatgtcattgcactccagcctgggcaac

SEQ ID NO: 45923 - DNA, 80 bp, synthetic construct; identical to SEQ ID NO: 23027
  misc_feature 1..80: note = Artificially Synthesized Probe
  source 1..80: mol_type = other DNA

SEQ ID NO: 45924 - DNA, 80 bp, synthetic construct
  misc_feature 1..80: note = Artificially Synthesized Probe
  source 1..80: mol_type = other DNA
tagtagctgaactgttcacaggaagtgaagatctggacaatgtctttgttactagactgggcattagttccttaataaga

SEQ ID NO: 45925 - DNA, 80 bp, synthetic construct; identical to SEQ ID NO: 22999
  misc_feature 1..80: note = Artificially Synthesized Probe
  source 1..80: mol_type = other DNA

SEQ ID NO: 45926 - DNA, 80 bp, synthetic construct
  misc_feature 1..80: note = Artificially Synthesized Probe
  source 1..80: mol_type = other DNA
tttatcagtataaatttctactttggggtaagatacctcatttcaaattgaaagaccagtaggatgaactgaagactcac

SEQ ID NO: 45927 - DNA, 80 bp, synthetic construct
  misc_feature 1..80: note = Artificially Synthesized Probe
  source 1..80: mol_type = other DNA
caacatatgttcccttttccttacatgagccatttctccagttaagttatggggaaaacttttttgtcacttaaactagt

SEQ ID NO: 45928 - DNA, 80 bp, synthetic construct; identical to SEQ ID NO: 23028
  misc_feature 1..80: note = Artificially Synthesized Probe
  source 1..80: mol_type = other DNA

SEQ ID NO: 45929 - DNA, 80 bp, synthetic construct
  misc_feature 1..80: note = Artificially Synthesized Probe
  source 1..80: mol_type = other DNA
ttaactctctgacacttggtcacaatcatacccatatacttcaaaatagtgtcttagatttataactgatttataataca

SEQ ID NO: 45930 - DNA, 80 bp, synthetic construct
  misc_feature 1..80: note = Artificially Synthesized Probe
  source 1..80: mol_type = other DNA
cgtatgatgctcttccaagtactacaattgtttctatggcatgttgtgctagtggaagtacaagaggctatgatgaatta

SEQ ID NO: 45931 - DNA, 80 bp, synthetic construct; identical to SEQ ID NO: 23029
  misc_feature 1..80: note = Artificially Synthesized Probe
  source 1..80: mol_type = other DNA

SEQ ID NO: 45932 - DNA, 80 bp, synthetic construct
  misc_feature 1..80: note = Artificially Synthesized Probe
  source 1..80: mol_type = other DNA
acatagtggcagtaacaagacactcacctagcatccatcagtctgttgtggctgtatctagaactgctttcaggaatccc

SEQ ID NO: 45933 - DNA, 80 bp, synthetic construct
  misc_feature 1..80: note = Artificially Synthesized Probe
  source 1..80: mol_type = other DNA
ctgtggacgtacttgagaaaaagaatttaaactttttggtaacttggccaggtatgatggctcacaccagtaatcccaac

SEQ ID NO: 45934 - DNA, 80 bp, synthetic construct
  misc_feature 1..80: note = Artificially Synthesized Probe
  source 1..80: mol_type = other DNA
taagtgctgaataatgaagcagtgtctaaaggcttgttagtcttacagtgtcagactagggtttaaaatctgtgagaatt

SEQ ID NO: 45935 - DNA, 80 bp, synthetic construct
  misc_feature 1..80: note = Artificially Synthesized Probe
  source 1..80: mol_type = other DNA
ggaggatcgcttgagcccagcaggcagtggttacactgagtccagatcccaccactgcactctactgggtgatagagtga

SEQ ID NO: 45936 - DNA, 80 bp, synthetic construct
  misc_feature 1..80: note = Artificially Synthesized Probe
  source 1..80: mol_type = other DNA
tgaacatttatttctcttctagcagaacaatatgtatatttgtgttagtgtatatgtatatatgtgtataaatgtctttg

SEQ ID NO: 45937 - DNA, 80 bp, synthetic construct; identical to SEQ ID NO: 23030
  misc_feature 1..80: note = Artificially Synthesized Probe
  source 1..80: mol_type = other DNA

SEQ ID NO: 45938 - DNA, 80 bp, synthetic construct
  misc_feature 1..80: note = Artificially Synthesized Probe
  source 1..80: mol_type = other DNA
tgcagcagctggcaaagtttgttgattgattgaccaaatgaaaattcctataaaaatcatcatattctatattggttgct

SEQ ID NO: 45939 - DNA, 80 bp, synthetic construct
  misc_feature 1..80: note = Artificially Synthesized Probe
  source 1..80: mol_type = other DNA
ctcaggttttgttttggtcacagatcattcttaaaacatttccacttcagtccgcaaaattgtgatttttattttgttaa

SEQ ID NO: 45940 - DNA, 80 bp, synthetic construct
  misc_feature 1..80: note = Artificially Synthesized Probe
  source 1..80: mol_type = other DNA
ttacctgttgccagattaatgacttaaagcttaagttatttaaagtaaggttgaaattttatataatccattgaccctgc

SEQ ID NO: 45941 - DNA, 80 bp, synthetic construct; identical to SEQ ID NO: 23031
  misc_feature 1..80: note = Artificially Synthesized Probe
  source 1..80: mol_type = other DNA

SEQ ID NO: 45942 - DNA, 80 bp, synthetic construct
  misc_feature 1..80: note = Artificially Synthesized Probe
  source 1..80: mol_type = other DNA
actgaattgaggttacctctgaaagtgaagaatgggtacacagaggctttattgtatttgtaaagtttaagtgaggaagt

SEQ ID NO: 45943 - DNA, 80 bp, synthetic construct
  misc_feature 1..80: note = Artificially Synthesized Probe
  source 1..80: mol_type = other DNA
ttaactaagctgtaattttttttacaaatgtgaaaatacaccttgggtagaatcatctactttcagacttctaaaaaaaa

SEQ ID NO: 45944 - DNA, 80 bp, synthetic construct
  misc_feature 1..80: note = Artificially Synthesized Probe
  source 1..80: mol_type = other DNA
aaaaagaaacaaaattagctgggcatgatggtgcttgcctgtggtccccagctacctaggaggttgaggctggaggatct

SEQ ID NO: 45945 - DNA, 80 bp, synthetic construct
  misc_feature 1..80: note = Artificially Synthesized Probe
  source 1..80: mol_type = other DNA
cacgaaaccttataggaaggatgagaattcaatcaatggaacaccagatatcacagtagaaattagagaacatattcagg

SEQ ID NO: 45946 - DNA, 80 bp, synthetic construct; identical to SEQ ID NO: 23032
  misc_feature 1..80: note = Artificially Synthesized Probe
  source 1..80: mol_type = other DNA

SEQ ID NO: 45947 - DNA, 80 bp, synthetic construct
  misc_feature 1..80: note = Artificially Synthesized Probe
  source 1..80: mol_type = other DNA
cagagttagtcttgatccacatgcacaagtcgctgttggaattcttcgaaatcatctgacacaattcagtcctcacttta

SEQ ID NO: 45948 - DNA, 80 bp, synthetic construct
  misc_feature 1..80: note = Artificially Synthesized Probe
  source 1..80: mol_type = other DNA
agtacggtccaaggaccagcagtgtcagcatcacctgttgttaacattttaccctattgttttataatttgtgtgtgtac

SEQ ID NO: 45949 - DNA, 80 bp, synthetic construct
  misc_feature 1..80: note = Artificially Synthesized Probe
  source 1..80: mol_type = other DNA
cctacatgcatacataacacatgcatgcatctctgtatacacacacacacaatttctctgaagtatttgagactaagttg

SEQ ID NO: 45950 - DNA, 80 bp, synthetic construct; identical to SEQ ID NO: 23033
  misc_feature 1..80: note = Artificially Synthesized Probe
  source 1..80: mol_type = other DNA

SEQ ID NO: 45951 - DNA, 80 bp, synthetic construct
  misc_feature 1..80: note = Artificially Synthesized Probe
  source 1..80: mol_type = other DNA
tcattagtactagtataaatattttcagaaatggaagttttgggttagacgaggggtccccaacctctgggccacagact

SEQ ID NO: 45952 - DNA, 80 bp, synthetic construct
  misc_feature 1..80: note = Artificially Synthesized Probe
  source 1..80: mol_type = other DNA
aaccctattgtgaactgtccctgcgagggatttagattgcatgctgcctatgagaatctaatgcctgatgatctgccact

SEQ ID NO: 45953 - DNA, 80 bp, synthetic construct
  misc_feature 1..80: note = Artificially Synthesized Probe
  source 1..80: mol_type = other DNA
atcccaaaaccacgcccctcacccccagtctgtgaaaaaatgtcttctgtgaaaccagtccctggtgccaaaaaggacca

SEQ ID NO: 45954 - DNA, 80 bp, synthetic construct; identical to SEQ ID NO: 23034
  misc_feature 1..80: note = Artificially Synthesized Probe
  source 1..80: mol_type = other DNA

SEQ ID NO: 45955 - DNA, 80 bp, synthetic construct
  misc_feature 1..80: note = Artificially Synthesized Probe
  source 1..80: mol_type = other DNA
ctgttcaggaagctgaggtaacagcatcagcatcagttgagcccaggaggtctaggctgcaatgagccatgattgtgcca

SEQ ID NO: 45956 - DNA, 80 bp, synthetic construct
  misc_feature 1..80: note = Artificially Synthesized Probe
  source 1..80: mol_type = other DNA
ggtcaccccaggtcaggattttgagaccatccagcctgatcaacatggtgaaaccccttctctactaaaaatacaaaaat

SEQ ID NO: 45957 - DNA, 80 bp, synthetic construct
  misc_feature 1..80: note = Artificially Synthesized Probe
  source 1..80: mol_type = other DNA
ttactaatcaaactggtaaatataaaatagttaaaaataacatctcatgtaatttaaatattaagctaaattattttgtt

SEQ ID NO: 45958 - DNA, 80 bp, synthetic construct
  misc_feature 1..80: note = Artificially Synthesized Probe
  source 1..80: mol_type = other DNA
aaaaatctgtgatgaagcagctttgtgtttggatggactgcttgtaaaatgcatgttcctcctcagacctgctcagatta

SEQ ID NO: 45959 - DNA, 80 bp, synthetic construct
  misc_feature 1..80: note = Artificially Synthesized Probe
  source 1..80: mol_type = other DNA
agggaggctgatatggagagaacaaagcacagatgacaatgattttctaaattgagccagaactaaatgggaaagaaaga

SEQ ID NO: 45960 - DNA, 80 bp, synthetic construct; identical to SEQ ID NO: 23035
  misc_feature 1..80: note = Artificially Synthesized Probe
  source 1..80: mol_type = other DNA

SEQ ID NO: 45961 - DNA, 80 bp, synthetic construct
  misc_feature 1..80: note = Artificially Synthesized Probe
  source 1..80: mol_type = other DNA
tgatgtctcacttaggggaatataaaggagagaaatcagatgagaacacataaataaatgaaggaaggaaggaaaacact

SEQ ID NO: 45962 - DNA, 80 bp, synthetic construct
  misc_feature 1..80: note = Artificially Synthesized Probe
  source 1..80: mol_type = other DNA
ggagtaatgtcgcttctaattgaattttttttcacaatttgtcctttaataattacttaaaatgtatgagtataatgttt

SEQ ID NO: 45963 - DNA, 80 bp, synthetic construct; identical to SEQ ID NO: 23036
  misc_feature 1..80: note = Artificially Synthesized Probe
  source 1..80: mol_type = other DNA

SEQ ID NO: 45964 - DNA, 80 bp, synthetic construct
  misc_feature 1..80: note = Artificially Synthesized Probe
  source 1..80: mol_type = other DNA
cttctttacagacatagatataggctcagagtatgcctacttgggttgcaattatggctctgcttctgctcattaattga

SEQ ID NO: 45965 - DNA, 80 bp, synthetic construct
  misc_feature 1..80: note = Artificially Synthesized Probe
  source 1..80: mol_type = other DNA
acctagaaatactagttctatctctttccttaaggtctgtatagctctttatgtatacttggaccttgattaatgtttct

SEQ ID NO: 45966 - DNA, 80 bp, synthetic construct
  misc_feature 1..80: note = Artificially Synthesized Probe
  source 1..80: mol_type = other DNA
agtagttgtaagatgagttaaaggaattaagtatttatcagttttattcatctagttggtaatatttacttagatgttta

SEQ ID NO: 45967 - DNA, 80 bp, synthetic construct; identical to SEQ ID NO: 23000
  misc_feature 1..80: note = Artificially Synthesized Probe
  source 1..80: mol_type = other DNA

SEQ ID NO: 45968 - DNA, 80 bp, synthetic construct; identical to SEQ ID NO: 23037
  misc_feature 1..80: note = Artificially Synthesized Probe
  source 1..80: mol_type = other DNA

SEQ ID NO: 45969 - DNA, 80 bp, synthetic construct
  misc_feature 1..80: note = Artificially Synthesized Probe
  source 1..80: mol_type = other DNA
ttaggattaatgaattaatacatgtgaacagctcattagacgacacctaattcatactaagtaattggaaattgttagcc

SEQ ID NO: 45970 - DNA, 80 bp, synthetic construct
  misc_feature 1..80: note = Artificially Synthesized Probe
  source 1..80: mol_type = other DNA
ttctaaaatattctcatttttaatacaaaatgttttgtgctatgagtaagaaagaagtgtatgtgagccagacatggtgg

SEQ ID NO: 45971 - DNA, 80 bp, synthetic construct
  misc_feature 1..80: note = Artificially Synthesized Probe
  source 1..80: mol_type = other DNA
taatttttaaaagatgtatgtatgttatcagatttgagtaattatctacttcattttcactctgagttgttaaactactt

SEQ ID NO: 45972 - DNA, 80 bp, synthetic construct
  misc_feature 1..80: note = Artificially Synthesized Probe
  source 1..80: mol_type = other DNA
gctttataccaatcccttttccctctgattgtttaatattttcagcaggccacatatttccagcaggctgctaataagag

SEQ ID NO: 45973 - DNA, 80 bp, synthetic construct; identical to SEQ ID NO: 23038
  misc_feature 1..80: note = Artificially Synthesized Probe
  source 1..80: mol_type = other DNA

SEQ ID NO: 45974 - DNA, 80 bp, synthetic construct
  misc_feature 1..80: note = Artificially Synthesized Probe
  source 1..80: mol_type = other DNA
attattcaacagtgagaccaacatttaccgagcattatctgctgtccatgaaaatgccagggcatatgtagaatattatt

SEQ ID NO: 45975 - DNA, 80 bp, synthetic construct
  misc_feature 1..80: note = Artificially Synthesized Probe
  source 1..80: mol_type = other DNA
gcatttttatttcggtcttattcgttgtgctcaaaggcaggaaacaactattaatttgccttctcgaatcttaatagtta

SEQ ID NO: 45976 - DNA, 80 bp, synthetic construct
  misc_feature 1..80: note = Artificially Synthesized Probe
  source 1..80: mol_type = other DNA
aataaatttagtctaaatgaagtcagtgatgccaatataatttttaaggtagcatcattgaaataataaaatctgggaaa

SEQ ID NO: 45977 - DNA, 80 bp, synthetic construct
  misc_feature 1..80: note = Artificially Synthesized Probe
  source 1..80: mol_type = other DNA
gctctttctgaaaccagttctatgacttccttaaatctagcctgaatactgatgaacccactacttttcaacatgaaaaa

SEQ ID NO: 45978 - DNA, 80 bp, synthetic construct
  misc_feature 1..80: note = Artificially Synthesized Probe
  source 1..80: mol_type = other DNA
aaatgttataaatgagaatgtgccacctttttttgcagtaatggtgtgatcattttgttttagaagataatttgaagccg

SEQ ID NO: 45979 - DNA, 80 bp, synthetic construct; identical to SEQ ID NO: 23039
  misc_feature 1..80: note = Artificially Synthesized Probe
  source 1..80: mol_type = other DNA

SEQ ID NO: 45980 - DNA, 80 bp, synthetic construct
  misc_feature 1..80: note = Artificially Synthesized Probe
  source 1..80: mol_type = other DNA
agaccaaagaatgacttggggcatcctttttgtaataatttgagatctggagattggatgattgactatgtcagtaaccg

SEQ ID NO: 45981 - DNA, 80 bp, synthetic construct
  misc_feature 1..80: note = Artificially Synthesized Probe
  source 1..80: mol_type = other DNA
taataaatggaaatcgggtttatagattactagataaagttgcacatttagatttacctctaaaaacacacctagtctgt

SEQ ID NO: 45982 - DNA, 80 bp, synthetic construct; identical to SEQ ID NO: 23040
  misc_feature 1..80: note = Artificially Synthesized Probe
  source 1..80: mol_type = other DNA

SEQ ID NO: 45983 - DNA, 80 bp, synthetic construct
  misc_feature 1..80: note = Artificially Synthesized Probe
  source 1..80: mol_type = other DNA
gaatattgttttatattgtttctatgtattcactgacttattgagttaattgataaagtttctgaaatctacatgtacaa

SEQ ID NO: 45984 - DNA, 80 bp, synthetic construct
  misc_feature 1..80: note = Artificially Synthesized Probe
  source 1..80: mol_type = other DNA
atttctaccatttgttttacaaccatctgtggactgtaagccagctaaaataatgggtgaaatgaaagcagttttgaaat

SEQ ID NO: 45985 - DNA, 80 bp, synthetic construct
  misc_feature 1..80: note = Artificially Synthesized Probe
  source 1..80: mol_type = other DNA
gttcaacctttgtgaaacacctttcattgggttcagttcaactgtgtggagtaggaaaattcccttccctgccaattctt

SEQ ID NO: 45986 - DNA, 80 bp, synthetic construct; identical to SEQ ID NO: 23041
  misc_feature 1..80: note = Artificially Synthesized Probe
  source 1..80: mol_type = other DNA

SEQ ID NO: 45987 - DNA, 80 bp, synthetic construct
  misc_feature 1..80: note = Artificially Synthesized Probe
  source 1..80: mol_type = other DNA
ccatgcttactgtttaattataactgtgcaccaggcatttatgtgtgttttttatggctagctgattcttcatgtttcta

SEQ ID NO: 45988 - DNA, 80 bp, synthetic construct
  misc_feature 1..80: note = Artificially Synthesized Probe
  source 1..80: mol_type = other DNA
caaaaaaaattagccgggcctggtggcgggcgcctctagtcccagctactcgggaggctgaggcaggagaaaggcgtgaa

SEQ ID NO: 45989 - DNA, 80 bp, synthetic construct
  misc_feature 1..80: note = Artificially Synthesized Probe
  source 1..80: mol_type = other DNA
ataattttcatcatgtgtctaattggaatcaaatgctttcaacatttgaataaatatcctttattccaactagatttaaa

SEQ ID NO: 45990 - DNA, 80 bp, synthetic construct
  misc_feature 1..80: note = Artificially Synthesized Probe
  source 1..80: mol_type = other DNA
ggaagaaagaaatagtattatctgtgtaattccctcttttacccttaaatttgcagctacttagaccagataaaaagact

SEQ ID NO: 45991 - DNA, 80 bp, synthetic construct; identical to SEQ ID NO: 23042
  misc_feature 1..80: note = Artificially Synthesized Probe
  source 1..80: mol_type = other DNA

SEQ ID NO: 45992 - DNA, 80 bp, synthetic construct
  misc_feature 1..80: note = Artificially Synthesized Probe
  source 1..80: mol_type = other DNA
ataaacaaatacaaatagaagtgtgatatttgctcctagcatcccaagggaatgttttgcctattccatacttgtaaaaa

SEQ ID NO: 45993 - DNA, 80 bp, synthetic construct
  misc_feature 1..80: note = Artificially Synthesized Probe
  source 1..80: mol_type = other DNA
tggggcagggagttcaagaccagcctgaacaacatagcaagaccccatctttaccaaaaaaaaaaattaaaaattagcca

SEQ ID NO: 45994 - DNA, 80 bp, synthetic construct
  misc_feature 1..80: note = Artificially Synthesized Probe
  source 1..80: mol_type = other DNA
tagcctgttctaataattgacaaattagaaatcacttagaagatatggaatctattagttgtgtactcttagaggtcaaa

SEQ ID NO: 45995 - DNA, 80 bp, synthetic construct; identical to SEQ ID NO: 23043
  misc_feature 1..80: note = Artificially Synthesized Probe
  source 1..80: mol_type = other DNA

SEQ ID NO: 45996 - DNA, 80 bp, synthetic construct
  misc_feature 1..80: note = Artificially Synthesized Probe
  source 1..80: mol_type = other DNA
taatggaagaaactaacatctaattcccaataaacagaaacttaaattgtgaagtacactcaggaattgccaaaactttc

SEQ ID NO: 45997 - DNA, 80 bp, synthetic construct
  misc_feature 1..80: note = Artificially Synthesized Probe
  source 1..80: mol_type = other DNA
cttgttggtgaacaaggtagatgaggtttctactcataggtcttatttcctactgggaagatatatgcattcaacagata

SEQ ID NO: 45998 - DNA, 80 bp, synthetic construct
  misc_feature 1..80: note = Artificially Synthesized Probe
  source 1..80: mol_type = other DNA
ttgcccaggctggagtacaatagcgtgatctcggctcactgcaacctccgcttcctgggttcaagcaattctcctgcctc

SEQ ID NO: 45999 - DNA, 80 bp, synthetic construct
  misc_feature 1..80: note = Artificially Synthesized Probe
  source 1..80: mol_type = other DNA
gagaaggctattttaaaaacacatctgattaaagaaaaggattgaacagcctgagttgaaaaagagaggacaaggccagg

SEQ ID NO: 46000 - DNA, 80 bp, synthetic construct; identical to SEQ ID NO: 23044
  misc_feature 1..80: note = Artificially Synthesized Probe
  source 1..80: mol_type = other DNA

SEQ ID NO: 46001 - DNA, 80 bp, synthetic construct
  misc_feature 1..80: note = Artificially Synthesized Probe
  source 1..80: mol_type = other DNA
atacttaattaggtatcattaaggtaataatttcatgtttaggtttatttattgtccttaagttcaaggtagagtctttt

SEQ ID NO: 46002 - DNA, 80 bp, synthetic construct
  misc_feature 1..80: note = Artificially Synthesized Probe
  source 1..80: mol_type = other DNA
ggagttcaagaccagcctaggcaacctggcaaaacctcattctctacaaaaaatacaaaaactagccaggcatggtggtg

SEQ ID NO: 46003 - DNA, 80 bp, synthetic construct
  misc_feature 1..80: note = Artificially Synthesized Probe
  source 1..80: mol_type = other DNA
accctctctcagaaagaagaaaagtttatctgtgtattcacacctcaatttagataagtatctctctatagctctggttc

SEQ ID NO: 46004 - DNA, 80 bp, synthetic construct; identical to SEQ ID NO: 23045
  misc_feature 1..80: note = Artificially Synthesized Probe
  source 1..80: mol_type = other DNA

SEQ ID NO: 46005 - DNA, 80 bp, synthetic construct
  misc_feature 1..80: note = Artificially Synthesized Probe
  source 1..80: mol_type = other DNA
gtgttgtactgcgagtttatgtctgaatgtcttttacatgctcttcaaactttccttcttgtccatcttttcttaacatt

SEQ ID NO: 46006 - DNA, 80 bp, synthetic construct
  misc_feature 1..80: note = Artificially Synthesized Probe
  source 1..80: mol_type = other DNA
aaaactaaaaatgttataacctttttatgccttccatagtgaaggcattgctagttctttgtctgagtcttgtagaagtc

SEQ ID NO: 46007 - DNA, 80 bp, synthetic construct
  misc_feature 1..80: note = Artificially Synthesized Probe
  source 1..80: mol_type = other DNA
ctgcaacctccgactccgcctcccgggttgaagccattctgctgcctcagcctcctgagtagctgagattacaggcgccc

SEQ ID NO: 46008 - DNA, 80 bp, synthetic construct
  misc_feature 1..80: note = Artificially Synthesized Probe
  source 1..80: mol_type = other DNA
ttttttttaatgtcacaataatatgaatgaacttattggaggtcgaaaggaaagcactacagcagtgccactcaaaatgc

SEQ ID NO: 46009 - DNA, 80 bp, synthetic construct; identical to SEQ ID NO: 23046
  misc_feature 1..80: note = Artificially Synthesized Probe
  source 1..80: mol_type = other DNA

SEQ ID NO: 46010 - DNA, 80 bp, synthetic construct
  misc_feature 1..80: note = Artificially Synthesized Probe
  source 1..80: mol_type = other DNA
taggtgggcatctgaaatgaattgcatttttgttaatccgatatatagtaagacctttttgtattaccattatggagcta

SEQ ID NO: 46011 - DNA, 80 bp, synthetic construct
  misc_feature 1..80: note = Artificially Synthesized Probe
  source 1..80: mol_type = other DNA
agctacttgggaggctgaggcaggagaattgcttgaatccaggatgcggaggtttcagtaagccaagatcgtgccaatgc

SEQ ID NO: 46012 - DNA, 80 bp, synthetic construct
  misc_feature 1..80: note = Artificially Synthesized Probe
  source 1..80: mol_type = other DNA
acaaattaccttactgggtacttgggaggatcaaatgaacacatacagttaaggtgcctagagtaatatctgccacatgc

SEQ ID NO: 46013 - DNA, 80 bp, synthetic construct; identical to SEQ ID NO: 23047
  misc_feature 1..80: note = Artificially Synthesized Probe
  source 1..80: mol_type = other DNA

SEQ ID NO: 46014 - DNA, 80 bp, synthetic construct
  misc_feature 1..80: note = Artificially Synthesized Probe
  source 1..80: mol_type = other DNA
ccggctaattttttgtatttttagtagagaccgggtttcaccatgttagccaggatggtctcgatatcctgaccttatga

SEQ ID NO: 46015 - DNA, 80 bp, synthetic construct
  misc_feature 1..80: note = Artificially Synthesized Probe
  source 1..80: mol_type = other DNA
tatggccctttatagaaaaggtttgcctaccccgatctagaggtgattcccagagaataatatattatcccagagggtat

SEQ ID NO: 46016 - DNA, 80 bp, synthetic construct
  misc_feature 1..80: note = Artificially Synthesized Probe
  source 1..80: mol_type = other DNA
cttgtagtcgtagacgcatgctcagtaagcagccttctatatactgattcagggaagcaggtttcttccagcttgaggat

SEQ ID NO: 46017 - DNA, 80 bp, synthetic construct; identical to SEQ ID NO: 23048
  misc_feature 1..80: note = Artificially Synthesized Probe
  source 1..80: mol_type = other DNA

SEQ ID NO: 46018 - DNA, 80 bp, synthetic construct
  misc_feature 1..80: note = Artificially Synthesized Probe
  source 1..80: mol_type = other DNA
tatgtatatatagagagagctagtattctgaccttttcttaattgaaagtgtcactgtctatactaatatttttatactt

SEQ ID NO: 46019 - DNA, 80 bp, synthetic construct
  misc_feature 1..80: note = Artificially Synthesized Probe
  source 1..80: mol_type = other DNA
tagacttcagccttcttatttcttaatttcatgctgtttctagagtgcctttctgtcttacaaacaaaattttcatttgg

SEQ ID NO: 46020 - DNA, 80 bp, synthetic construct
  misc_feature 1..80: note = Artificially Synthesized Probe
  source 1..80: mol_type = other DNA
ctccctccctccctctctccttccttccttcctttctttctttccttctttctttcttttctttcttttttttgagactg

SEQ ID NO: 46021 - DNA, 80 bp, synthetic construct
  misc_feature 1..80: note = Artificially Synthesized Probe
  source 1..80: mol_type = other DNA
gagacggggtttcaccgtgttagtcaggatggtctcgatctcctgacctcgtgatctacccgcctcagcctcccaaagtg

SEQ ID NO: 46022 - DNA, 80 bp, synthetic construct; identical to SEQ ID NO: 23001
  misc_feature 1..80: note = Artificially Synthesized Probe
  source 1..80: mol_type = other DNA

SEQ ID NO: 46023 - DNA, 80 bp, synthetic construct; identical to SEQ ID NO: 23049
  misc_feature 1..80: note = Artificially Synthesized Probe
  source 1..80: mol_type = other DNA

SEQ ID NO: 46024 - DNA, 80 bp, synthetic construct
  misc_feature 1..80: note = Artificially Synthesized Probe
  source 1..80: mol_type = other DNA
agttcttgtttaatagttacttcgattttgaaataccatagacttcaaaagtagaatctggagctatgagggaccttaaa

SEQ ID NO: 46025 - DNA, 80 bp, synthetic construct
  misc_feature 1..80: note = Artificially Synthesized Probe
  source 1..80: mol_type = other DNA
ggcaagagagaaaacgcattcaaaatatagtcaccaaaagtgactggtttttgtcttcaatttttaagtgtttgttttca

SEQ ID NO: 46026 - DNA, 80 bp, synthetic construct; identical to SEQ ID NO: 23050
  misc_feature 1..80: note = Artificially Synthesized Probe
  source 1..80: mol_type = other DNA

SEQ ID NO: 46027 - DNA, 80 bp, synthetic construct
  misc_feature 1..80: note = Artificially Synthesized Probe
  source 1..80: mol_type = other DNA
cgaattattcaaatgtcagtattgatttggcacctgctggtactataagtgattggtctttgcctgaagaactttgcaac

SEQ ID NO: 46028 - DNA, 80 bp, synthetic construct
  misc_feature 1..80: note = Artificially Synthesized Probe
  source 1..80: mol_type = other DNA
tagaaagtagctaaagtttcacctaaatgagccataaaaggtgagtaggactttcggagagatggagaaagttgttggga

SEQ ID NO: 46029 - DNA, 80 bp, synthetic construct
  misc_feature 1..80: note = Artificially Synthesized Probe
  source 1..80: mol_type = other DNA
gaggaaaggaataatagggttgcatagtggattgaagcacagtttaggggacatagtacttaatagtgtttttgtaagag

SEQ ID NO: 46030 - DNA, 80 bp, synthetic construct; identical to SEQ ID NO: 23051
  misc_feature 1..80: note = Artificially Synthesized Probe
  source 1..80: mol_type = other DNA

SEQ ID NO: 46031 - DNA, 80 bp, synthetic construct
  misc_feature 1..80: note = Artificially Synthesized Probe
  source 1..80: mol_type = other DNA
gggctgggaggggatagtagctttgtaagctactccagggttagcatatatttgtgttctcatgatatttatttatatca

SEQ ID NO: 46032 - DNA, 80 bp, synthetic construct
  misc_feature 1..80: note = Artificially Synthesized Probe
  source 1..80: mol_type = other DNA
tttttataattaatagtagaatttttatattatagagttttggttatattcagagtctttaaaatgaaacataataaaca

SEQ ID NO: 46033 - DNA, 80 bp, synthetic construct
  misc_feature 1..80: note = Artificially Synthesized Probe
  source 1..80: mol_type = other DNA
ccaaagtcattatggatcctcaaatttgagagtttccctttagctcataatttacccccattacctgtgtatgcagatga

SEQ ID NO: 46034 - DNA, 80 bp, synthetic construct
  misc_feature 1..80: note = Artificially Synthesized Probe
  source 1..80: mol_type = other DNA
cgaggcgggtagttgacctgagatcaggagttcaagaccagcctggccaacatggtgaaaccccatctctaccaaaaata

SEQ ID NO: 46035 - DNA, 80 bp, synthetic construct; identical to SEQ ID NO: 23052
  misc_feature 1..80: note = Artificially Synthesized Probe
  source 1..80: mol_type = other DNA

SEQ ID NO: 46036 - DNA, 80 bp, synthetic construct
  misc_feature 1..80: note = Artificially Synthesized Probe
  source 1..80: mol_type = other DNA
acatgcagggcatacagttccgagaaaggaatgctggtccccagatagatcgaaacatgaaggacgaaggtacagaactt

SEQ ID NO: 46037 - DNA, 80 bp, synthetic construct
  misc_feature 1..80: note = Artificially Synthesized Probe
  source 1..80: mol_type = other DNA
ttatatcttttgtcagccagtttgaaagataattttggtggtttcatttataactataataatcgccatgaactgcatgc

SEQ ID NO: 46038 - DNA, 80 bp, synthetic construct
  misc_feature 1..80: note = Artificially Synthesized Probe
  source 1..80: mol_type = other DNA
atacatgtgccatgttggtgtgctgcacccattaactcatcatttacataggtatatctcctaatgctatccctccccca

SEQ ID NO: 46039 - DNA, 80 bp, synthetic construct
  misc_feature 1..80: note = Artificially Synthesized Probe
  source 1..80: mol_type = other DNA
ccctacaaaggacatgaactcatccttttttatggctgcatagtattccatggtgtatatgtgacacattttcttaatcc

SEQ ID NO: 46040 - DNA, 80 bp, synthetic construct; identical to SEQ ID NO: 23053
  misc_feature 1..80: note = Artificially Synthesized Probe
  source 1..80: mol_type = other DNA

SEQ ID NO: 46041 - DNA, 80 bp, synthetic construct
  misc_feature 1..80: note = Artificially Synthesized Probe
  source 1..80: mol_type = other DNA
gatgtctttgcccactttttgatggggttgtttgtttttttcttgtaaatttgcttgagttctttgtagattctggataa

SEQ ID NO: 46042 - DNA, 80 bp, synthetic construct
  misc_feature 1..80: note = Artificially Synthesized Probe
  source 1..80: mol_type = other DNA
tgagttcaccatattcgtcatctcatggcacactatcatcgccgccaatgcaaggctaatagtaatttatttcattttat

SEQ ID NO: 46043 - DNA, 80 bp, synthetic construct; identical to SEQ ID NO: 23054
  misc_feature 1..80: note = Artificially Synthesized Probe
  source 1..80: mol_type = other DNA

SEQ ID NO: 46044 - DNA, 80 bp, synthetic construct
  misc_feature 1..80: note = Artificially Synthesized Probe
  source 1..80: mol_type = other DNA
cacctgaccactccacccccaaccctggtctctctggcagctactaatctgttctgcaactctatagttttgtcattttg

SEQ ID NO: 46045 - DNA, 80 bp, synthetic construct
  misc_feature 1..80: note = Artificially Synthesized Probe
  source 1..80: mol_type = other DNA
aaaaaaagaataatgaacaaaataagtacttcccaaatctgaaattcttccatcttttaagtaggttgatgaaatttata

SEQ ID NO: 46046 - DNA, 80 bp, synthetic construct
  misc_feature 1..80: note = Artificially Synthesized Probe
  source 1..80: mol_type = other DNA
attgctgagtagtattcccttttatgcatataccagtatttatttaaccattcatccaaaccattcatccattgaaggac

SEQ ID NO: 46047 - DNA, 80 bp, synthetic construct
  misc_feature 1..80: note = Artificially Synthesized Probe
  source 1..80: mol_type = other DNA
tgccaaactattttccagagtgttttaccattttaataaattcccgccagcaaactggagagatccagttttgctacatc

SEQ ID NO: 46048 - DNA, 80 bp, synthetic construct
  misc_feature 1..80: note = Artificially Synthesized Probe
  source 1..80: mol_type = other DNA
tcctgggttcaaacgattcttgtacctcagcctcccaagtagctggactacaggtgcatgccaccacaactagctaattt

SEQ ID NO: 46049 - DNA, 80 bp, synthetic construct; identical to SEQ ID NO: 23055
  misc_feature 1..80: note = Artificially Synthesized Probe
  source 1..80: mol_type = other DNA

SEQ ID NO: 46050 - DNA, 80 bp, synthetic construct
  misc_feature 1..80: note = Artificially Synthesized Probe
  source 1..80: mol_type = other DNA
ggtgggagtctccctatgttccccaggcttgtcttgaattcctgacctcaagcaatcctcttgcctcagcttcctaaagt

SEQ ID NO: 46051 - DNA, 80 bp, synthetic construct
  misc_feature 1..80: note = Artificially Synthesized Probe
  source 1..80: mol_type = other DNA
aaagttacaattttagccattttaagtgtacaattcagtggctttaagtacaatcacattgttgtgcaaccatcatcact

SEQ ID NO: 46052 - DNA, 80 bp, synthetic construct
  misc_feature 1..80: note = Artificially Synthesized Probe
  source 1..80: mol_type = other DNA
acctggcttatttcacttagcataattattttttatcaatacataagagttgtacatacttagcataattcttttgaagt

SEQ ID NO: 46053 - DNA, 80 bp, synthetic construct; identical to SEQ ID NO: 23056
  misc_feature 1..80: note = Artificially Synthesized Probe
  source 1..80: mol_type = other DNA

SEQ ID NO: 46054 - DNA, 80 bp, synthetic construct
  misc_feature 1..80: note = Artificially Synthesized Probe
  source 1..80: mol_type = other DNA
gctgcataatattccattgtatgcatacattttctttattcattcattgtcagtgggcattttattgcttccatctcttg

SEQ ID NO: 46055 - DNA, 80 bp, synthetic construct
  misc_feature 1..80: note = Artificially Synthesized Probe
  source 1..80: mol_type = other DNA
atcactcattatgctagttgcctacaagagagacatggctaatgcaagttaagtatcctagcattagtatgaggaataag

SEQ ID NO: 46056 - DNA, 80 bp, synthetic construct
  misc_feature 1..80: note = Artificially Synthesized Probe
  source 1..80: mol_type = other DNA
gcaacatttacattcccacaactattcaaatttctctgcaactttgctaacacctggtattttctgttcttttgatagtt

SEQ ID NO: 46057 - DNA, 80 bp, synthetic construct
  misc_feature 1..80: note = Artificially Synthesized Probe
  source 1..80: mol_type = other DNA
tttgattttttggttattgacttgtagaagtttcttatatattctggatattaaccccttatcatacatatgagaatttc

SEQ ID NO: 46058 - DNA, 80 bp, synthetic construct; identical to SEQ ID NO: 23057
  misc_feature 1..80: note = Artificially Synthesized Probe
  source 1..80: mol_type = other DNA

SEQ ID NO: 46059 - DNA, 80 bp, synthetic construct
  misc_feature 1..80: note = Artificially Synthesized Probe
  source 1..80: mol_type = other DNA
gttttttgttttttttgctagtagccatcctaaatggctatgaggtggtatctaatggttttgatttgcatttccttaat

SEQ ID NO: 46060 - DNA, 80 bp, synthetic construct
  misc_feature 1..80: note = Artificially Synthesized Probe
  source 1..80: mol_type = other DNA
attagatatggtttgcaaatattttctcccatattgtgggttgtctattcactatcttaaaagtatcctttgataaacaa

SEQ ID NO: 46061 - DNA, 80 bp, synthetic construct; identical to SEQ ID NO: 23058
  misc_feature 1..80: note = Artificially Synthesized Probe
  source 1..80: mol_type = other DNA

SEQ ID NO: 46062 - DNA, 80 bp, synthetic construct
  misc_feature 1..80: note = Artificially Synthesized Probe
  source 1..80: mol_type = other DNA
ttagtgtagctttgtagtaagttttgaaatgaggaagcatgagtcttctaactttgttctttttctagattgttttggct

SEQ ID NO: 46063 - DNA, 80 bp, synthetic construct
  misc_feature 1..80: note = Artificially Synthesized Probe
  source 1..80: mol_type = other DNA
cttttctcattcaggttgcgattttcctggttcttggcctgacaagtagtttttcgtgttttcctagacctttggatgtt

SEQ ID NO: 46064 - DNA, 80 bp, synthetic construct; identical to SEQ ID NO: 23002
  misc_feature 1..80: note = Artificially Synthesized Probe
  source 1..80: mol_type = other DNA

SEQ ID NO: 46065 - DNA, 80 bp, synthetic construct
  misc_feature 1..80: note = Artificially Synthesized Probe
  source 1..80: mol_type = other DNA
ccactcaggaaacctgagtggagttccacactgtgtaatttacttctcaaacctttgggtgtgttaatgctcatctgttt

SEQ ID NO: 46066 - DNA, 80 bp, synthetic construct; identical to SEQ ID NO: 23059
  misc_feature 1..80: note = Artificially Synthesized Probe
  source 1..80: mol_type = other DNA

SEQ ID NO: 46067 - DNA, 80 bp, synthetic construct
  misc_feature 1..80: note = Artificially Synthesized Probe
  source 1..80: mol_type = other DNA
gaaggggagcactgccttaagccatctgctacccccaggtaggggataggagtccaggcttccactcagtctccactgac

SEQ ID NO: 46068 - DNA, 80 bp, synthetic construct
  misc_feature 1..80: note = Artificially Synthesized Probe
  source 1..80: mol_type = other DNA
ttggaactctttgtcattacctgttggaggttgcaggttgcttttccaagtttacatctcacccagactggtatatatgg

SEQ ID NO: 46069 - DNA, 80 bp, synthetic construct
  misc_feature 1..80: note = Artificially Synthesized Probe
  source 1..80: mol_type = other DNA
ggaagatcagggaaaaatgagtcttctcccctttttcataccagaagtttttgaactttctgtagttatgtgtgtttgag

SEQ ID NO: 46070 - DNA, 80 bp, synthetic construct
  misc_feature 1..80: note = Artificially Synthesized Probe
  source 1..80: mol_type = other DNA
tgtccttttgcaacttgttttattcaatcattttgttttggagatttatcttttttatataaatttaaggggtacaaggg

SEQ ID NO: 46071 - DNA, 80 bp, synthetic construct; identical to SEQ ID NO: 23060
  misc_feature 1..80: note = Artificially Synthesized Probe
  source 1..80: mol_type = other DNA

SEQ ID NO: 46072 - DNA, 80 bp, synthetic construct
  misc_feature 1..80: note = Artificially Synthesized Probe
  source 1..80: mol_type = other DNA
gtttcataggggtaactcattcgactgtggagttcttttaattcttatgaaagatttcaaatcctctagaagccaaaatg

SEQ ID NO: 46073 - DNA, 80 bp, synthetic construct
  misc_feature 1..80: note = Artificially Synthesized Probe
  source 1..80: mol_type = other DNA
aatatacacatctccaactttgtgcttgtatattctggatacaaaataataagataccaccaaactgagctttagagtgg

SEQ ID NO: 46074 - DNA, 80 bp, synthetic construct
  misc_feature 1..80: note = Artificially Synthesized Probe
  source 1..80: mol_type = other DNA
atcgtttcaattgtggcacatggatggataaaatgggagaaagtgacagagctagaaacagaggaatcccagccacacca

SEQ ID NO: 46075 - DNA, 80 bp, synthetic construct; identical to SEQ ID NO: 23061
  misc_feature 1..80: note = Artificially Synthesized Probe
  source 1..80: mol_type = other DNA

SEQ ID NO: 46076 - DNA, 80 bp, synthetic construct
  misc_feature 1..80: note = Artificially Synthesized Probe
  source 1..80: mol_type = other DNA
atttatttatttatttttattgatcattcttgggtgtttctcgcagagggggatttggcagggtcataagacaatagtgg

SEQ ID NO: 46077 - DNA, 80 bp, synthetic construct
  misc_feature 1..80: note = Artificially Synthesized Probe
  source 1..80: mol_type = other DNA
cctaatttttaaatcttttttcctaatgtttgtcatttaagaagtttttatcatttcaaatgctaaatacatcatcataa

SEQ ID NO: 46078 - DNA, 80 bp, synthetic construct
  misc_feature 1..80: note = Artificially Synthesized Probe
  source 1..80: mol_type = other DNA
agcctgtagtgcagtagcacaatcatggctcactgcagcctctgtctcccagattcaagcaattctcctgtctcagcctc

SEQ ID NO: 46079 - DNA, 80 bp, synthetic construct
  misc_feature 1..80: note = Artificially Synthesized Probe
  source 1..80: mol_type = other DNA
agccactgcactcggccttttattctaaattttatcttcagtaagaattgtccaaaaaatagttgtgtactgggtgtggt

SEQ ID NO: 46080 - DNA, 80 bp, synthetic construct
  misc_feature 1..80: note = Artificially Synthesized Probe
  source 1..80: mol_type = other DNA
ttttttaaaaatctatttggtacattagatccttgtacttcccttttatttttcttaaaaatgagctttcaaattaatgt

SEQ ID NO: 46081 - DNA, 80 bp, synthetic construct; identical to SEQ ID NO: 23062
  misc_feature 1..80: note = Artificially Synthesized Probe
  source 1..80: mol_type = other DNA

SEQ ID NO: 46082 - DNA, 80 bp, synthetic construct
  misc_feature 1..80: note = Artificially Synthesized Probe
  source 1..80: mol_type = other DNA
ctgttcgctggttgctggaattatccaaaaaaaatattttcccttatcatgaagtcacagtaaaaagacatggtaagctg

SEQ ID NO: 46083 - DNA, 80 bp, synthetic construct
  misc_feature 1..80: note = Artificially Synthesized Probe
  source 1..80: mol_type = other DNA
ccatatttgtcgcaactttgaactgagataagaaagcagcatagctgttgcctttattgtgcatgtctttttcctcactg

SEQ ID NO: 46084 - DNA, 80 bp, synthetic construct
  misc_feature 1..80: note = Artificially Synthesized Probe
  source 1..80: mol_type = other DNA
atattttattaaatcagccaggtgcagtggctcatgcctgtaatctccacactttggggggccaaggcaggcagatcgct

SEQ ID NO: 46085 - DNA, 80 bp, synthetic construct; identical to SEQ ID NO: 23063
  misc_feature 1..80: note = Artificially Synthesized Probe
  source 1..80: mol_type = other DNA

SEQ ID NO: 46086 - DNA, 80 bp, synthetic construct
  misc_feature 1..80: note = Artificially Synthesized Probe
  source 1..80: mol_type = other DNA
cttagggagcatgctgcctccaagcatctgtttaacaaagcacatcttgcaccacccttaatccatttaaccctgagtga

SEQ ID NO: 46087 - DNA, 80 bp, synthetic construct
  misc_feature 1..80: note = Artificially Synthesized Probe
  source 1..80: mol_type = other DNA
aagtggataatttattgccttgtagtagataaaaataaactaaatattactatttgtctgtaactagatgtgtgaattgt

SEQ ID NO: 46088 - DNA, 80 bp, synthetic construct
  misc_feature 1..80: note = Artificially Synthesized Probe
  source 1..80: mol_type = other DNA
cacaaacgtggcatatacaaagatagttatggagcttcaagtccttggtgtgactatcagctcaggcctaattttaccat

SEQ ID NO: 46089 - DNA, 80 bp, synthetic construct
  misc_feature 1..80: note = Artificially Synthesized Probe
  source 1..80: mol_type = other DNA
tcaagtattatgcgtatcacttttaacctgtaacattcagtatccaaaagccgaaagtaatagatgatgactaatgaagt

SEQ ID NO: 46090 - DNA, 80 bp, synthetic construct; identical to SEQ ID NO: 23064
  misc_feature 1..80: note = Artificially Synthesized Probe
  source 1..80: mol_type = other DNA

SEQ ID NO: 46091 - DNA, 80 bp, synthetic construct
  misc_feature 1..80: note = Artificially Synthesized Probe
  source 1..80: mol_type = other DNA
ttgctgcaatcagtttgtccggcaaagaattttagactctctgctgttttaaatctatactttagtctaaaaataaacta

SEQ ID NO: 46092 - DNA, 80 bp, synthetic construct
  misc_feature 1..80: note = Artificially Synthesized Probe
  source 1..80: mol_type = other DNA
atgcatattcttggtcaacaatgcttttctcttctttctctgtatctctgataaatttactcatgctattggagtaaaag

SEQ ID NO: 46093 - DNA, 80 bp, synthetic construct
  misc_feature 1..80: note = Artificially Synthesized Probe
  source 1..80: mol_type = other DNA
gttggaggatcatttgagctcaggagttcaagatcagcctgggcaacatagtgagacttcatctccacaaaaatttaaaa

SEQ ID NO: 46094 - DNA, 80 bp, synthetic construct; identical to SEQ ID NO: 23065
  misc_feature 1..80: note = Artificially Synthesized Probe
  source 1..80: mol_type = other DNA

SEQ ID NO: 46095 - DNA, 80 bp, synthetic construct
  misc_feature 1..80: note = Artificially Synthesized Probe
  source 1..80: mol_type = other DNA
tgggtaggaactaattcttctgtgatcttaaaaatttgtatatttgtttttggcattcactaggcccctgagctctttac

SEQ ID NO: 46096 - DNA, 80 bp, synthetic construct
  misc_feature 1..80: note = Artificially Synthesized Probe
  source 1..80: mol_type = other DNA
tgccagggcaacaaaaggagatgccatctctacaaaaataaaagttaaaaaaaaaattagttgggagagattgtgtacac

SEQ ID NO: 46097 - DNA, 80 bp, synthetic construct; identical to SEQ ID NO: 23003
  misc_feature 1..80: note = Artificially Synthesized Probe
  source 1..80: mol_type = other DNA

SEQ ID NO: 46098 - DNA, 80 bp, synthetic construct
  misc_feature 1..80: note = Artificially Synthesized Probe
  source 1..80: mol_type = other DNA
actcacaattaaagctgactcttgtgaccagctctccaaaaaaagaaaagtaacaaatggagtatagataactgtgttat

SEQ ID NO: 46099 - DNA, 80 bp, synthetic construct
  misc_feature 1..80: note = Artificially Synthesized Probe
  source 1..80: mol_type = other DNA
tataattaataaaaccatgtctttaatttttattaattcaaattattctatatatatttcaattattagataggcttcaa

SEQ ID NO: 46100 - DNA, 80 bp, synthetic construct; identical to SEQ ID NO: 23066
  misc_feature 1..80: note = Artificially Synthesized Probe
  source 1..80: mol_type = other DNA

SEQ ID NO: 46101 - DNA, 80 bp, synthetic construct
  misc_feature 1..80: note = Artificially Synthesized Probe
  source 1..80: mol_type = other DNA
gcagtgatatggtttactgtggaatttatgacaatgcattagacaatgacaactacaatcttgctaaaggtttcaattat

SEQ ID NO: 46102 - DNA, 80 bp, synthetic construct
  misc_feature 1..80: note = Artificially Synthesized Probe
  source 1..80: mol_type = other DNA
tccagattgatgggcccggagactactgcaaagactatagttttggttaaaaatgttctttcccgacattatgttcatct

SEQ ID NO: 46103 - DNA, 80 bp, synthetic construct
  misc_feature 1..80: note = Artificially Synthesized Probe
  source 1..80: mol_type = other DNA
tataattttcactttctcttattttgggttgttatttattttaagttgaggtcttgatattgtgcgatttatacatgtgg

SEQ ID NO: 46104 - DNA, 80 bp, synthetic construct
  misc_feature 1..80: note = Artificially Synthesized Probe
  source 1..80: mol_type = other DNA
tcagaactggtcttttgcctgttagttcaaaaaacatttttcacttccttgtcctaattattagcaaatagacagtgtca

SEQ ID NO: 46105 - DNA, 80 bp, synthetic construct; identical to SEQ ID NO: 23067
  misc_feature 1..80: note = Artificially Synthesized Probe
  source 1..80: mol_type = other DNA

SEQ ID NO: 46106 - DNA, 80 bp, synthetic construct
  misc_feature 1..80: note = Artificially Synthesized Probe
  source 1..80: mol_type = other DNA
attgtgaaatttaaatgtttgttgtctgtttattctgtctgttctttgttagctttttcctctttttgtgcttcttttgc

SEQ ID NO: 46107 - DNA, 80 bp, synthetic construct
  misc_feature 1..80: note = Artificially Synthesized Probe
  source 1..80: mol_type = other DNA
atagttttatttttcccctcccggcctgtgtgctatcatcatcatccattttgcttttacctgttattaccccccacact

SEQ ID NO: 46108 - DNA, 80 bp, synthetic construct
  misc_feature 1..80: note = Artificially Synthesized Probe
  source 1..80: mol_type = other DNA
cttcccagtaggggcggccgggcagaggcgcccctcacctcccggacggggtcgcagccgggcagaggcgctcctcacat

SEQ ID NO: 46109 - DNA, 80 bp, synthetic construct; identical to SEQ ID NO: 23068
  misc_feature 1..80: note = Artificially Synthesized Probe
  source 1..80: mol_type = other DNA

SEQ ID NO: 46110 - DNA, 80 bp, synthetic construct
  misc_feature 1..80: note = Artificially Synthesized Probe
  source 1..80: mol_type = other DNA
cgttgtagttttcatttctcaaagttttatctgggctgtttttatatcttccatgtctctgcttaatgttttgaacatgt

SEQ ID NO: 46111 - DNA, 80 bp, synthetic construct
  misc_feature 1..80: note = Artificially Synthesized Probe
  source 1..80: mol_type = other DNA
cttgcccaggctggtctcgaactcctaggctcaagcagtcccccaacctcggcctcctgaagtgctgagattacaggcat

SEQ ID NO: 46112 - DNA, 80 bp, synthetic construct
  misc_feature 1..80: note = Artificially Synthesized Probe
  source 1..80: mol_type = other DNA
cttgattttaagcttgttagacctgaccagaatagcatttggtctaggaataattattctccattagtgaatcaagaccc

SEQ ID NO: 46113 - DNA, 80 bp, synthetic construct; identical to SEQ ID NO: 23069
  misc_feature 1..80: note = Artificially Synthesized Probe
  source 1..80: mol_type = other DNA

SEQ ID NO: 46114 - DNA, 80 bp, synthetic construct
  misc_feature 1..80: note = Artificially Synthesized Probe
  source 1..80: mol_type = other DNA
tcatttgtttctcatccttcaaggatcgctatttgttgcctaatgtctaatgtcttaatgtccagttcttcagttgtatc

SEQ ID NO: 46115 - DNA, 80 bp, synthetic construct
  misc_feature 1..80: note = Artificially Synthesized Probe
  source 1..80: mol_type = other DNA
aaaaatgttatttagaagccagatctgagcacatggtgtatttattattactatgacccccagtagatagggctagggaa

SEQ ID NO: 46116 - DNA, 80 bp, synthetic construct
  misc_feature 1..80: note = Artificially Synthesized Probe
  source 1..80: mol_type = other DNA
ccaacaatgaataacctacttcccacattgggccatcaccaccacatagagtctgctcacccagcttgggcctgctaccc

SEQ ID NO: 46117 - DNA, 80 bp, synthetic construct; identical to SEQ ID NO: 23070
  misc_feature 1..80: note = Artificially Synthesized Probe
  source 1..80: mol_type = other DNA

SEQ ID NO: 46118 - DNA, 80 bp, synthetic construct
  misc_feature 1..80: note = Artificially Synthesized Probe
  source 1..80: mol_type = other DNA
gttaaacagcagaatattgtctcacagttctggaggccagaaatctgaaaaatcaaggcatgggcagagccatgctccct

SEQ ID NO: 46119 - DNA, 80 bp, synthetic construct
  misc_feature 1..80: note = Artificially Synthesized Probe
  source 1..80: mol_type = other DNA
gaagggtggccgggcagagacgcttctcacttcccagacggggtggcggccgggcagaggctgcagtctcggcactttgg

SEQ ID NO: 46120 - DNA, 80 bp, synthetic construct
  misc_feature 1..80: note = Artificially Synthesized Probe
  source 1..80: mol_type = other DNA
gggctaggacttcaacatacaaattctgtggagatgtaattcaacacattacagatgcccaggtatccaacttcagtcat

SEQ ID NO: 46121 - DNA, 80 bp, synthetic construct
  misc_feature 1..80: note = Artificially Synthesized Probe
  source 1..80: mol_type = other DNA
tatgaagtatttgatgcccactgaagcgtgtatgtaatatagccctgagatacaaaccatagtaatgaaacaaatatgtt

SEQ ID NO: 46122 - DNA, 80 bp, synthetic construct; identical to SEQ ID NO: 23071
  misc_feature 1..80: note = Artificially Synthesized Probe
  source 1..80: mol_type = other DNA

SEQ ID NO: 46123 - DNA, 80 bp, synthetic construct
  misc_feature 1..80: note = Artificially Synthesized Probe
  source 1..80: mol_type = other DNA
cgcctaatcatagttcttagtgtttcttcattacttttacttttacagttttatcaagatcacacataacacatctgcat

SEQ ID NO: 46124 - DNA, 80 bp, synthetic construct
  misc_feature 1..80: note = Artificially Synthesized Probe
  source 1..80: mol_type = other DNA
tttaaaagtctcaaattccaaagatggaatgtcaaagaataatttcagtctaaattcatttgtatgtctttaggatattg

SEQ ID NO: 46125 - DNA, 80 bp, synthetic construct
  misc_feature 1..80: note = Artificially Synthesized Probe
  source 1..80: mol_type = other DNA
atgagaatgcccagtactgtcctttcagctgtgaaacacaagcctggtcaattgctactattcttgagacactttatgat

SEQ ID NO: 46126 - DNA, 80 bp, synthetic construct
  misc_feature 1..80: note = Artificially Synthesized Probe
  source 1..80: mol_type = other DNA
tttttaatgtacagaggtagatttcaatttgaatcagaaagaaatatcattaccaatgaaatgtgtttgagttcagtaag

SEQ ID NO: 46127 - DNA, 80 bp, synthetic construct; identical to SEQ ID NO: 23072
  misc_feature 1..80: note = Artificially Synthesized Probe
  source 1..80: mol_type = other DNA

SEQ ID NO: 46128 - DNA, 80 bp, synthetic construct
  misc_feature 1..80: note = Artificially Synthesized Probe
  source 1..80: mol_type = other DNA
cattaggaaatttatttcctaaaaacagttttgtaaaattagtattgagttctattgagtattataagatagcttacatt

SEQ ID NO: 46129 - DNA, 80 bp, synthetic construct
  misc_feature 1..80: note = Artificially Synthesized Probe
  source 1..80: mol_type = other DNA
tttaacattgagaagaatcttaacaaaaatatggatatgaattcagtagatatcttaaattcaataaaatcactggaagt

SEQ ID NO: 46130 - DNA, 80 bp, synthetic construct
  misc_feature 1..80: note = Artificially Synthesized Probe
  source 1..80: mol_type = other DNA
attatgcattcagttggaagaaagtagtggcaagaattctttcattgctatataatattcagtggctcatttatacctaa

SEQ ID NO: 46131 - DNA, 80 bp, synthetic construct
  misc_feature 1..80: note = Artificially Synthesized Probe
  source 1..80: mol_type = other DNA
tggagaccagcccggccaacacagcgaaaccccgtctccaccaaaaaaatacgaaaaccagtcaggcgtggcggcgcgcg

SEQ ID NO: 46132 - DNA, 80 bp, synthetic construct; identical to SEQ ID NO: 23073
  misc_feature 1..80: note = Artificially Synthesized Probe
  source 1..80: mol_type = other DNA

SEQ ID NO: 46133 - DNA, 80 bp, synthetic construct
  misc_feature 1..80: note = Artificially Synthesized Probe
  source 1..80: mol_type = other DNA
gtttccaaatctccctttcttcttcagttccttccttgttcaatatatacccttctctaaactgtgcgggtaaaaggaat

SEQ ID NO: 46134 - DNA, 80 bp, synthetic construct
  misc_feature 1..80: note = Artificially Synthesized Probe
  source 1..80: mol_type = other DNA
aaaagttcacaatttttttaatgtagccatttggggttatctctagtaaggcagatacccacgttggtaaatttttagga

SEQ ID NO: 46135 - DNA, 80 bp, synthetic construct; identical to SEQ ID NO: 23074
  misc_feature 1..80: note = Artificially Synthesized Probe
  source 1..80: mol_type = other DNA

SEQ ID NO: 46136 - DNA, 80 bp, synthetic construct
  misc_feature 1..80: note = Artificially Synthesized Probe
  source 1..80: mol_type = other DNA
atccatttctgatatgtcttgaactactgtgtctagtgggcaaatgtcattgttacctctgtgtgttaagaaaataaaaa

SEQ ID NO: 46137 - DNA, 80 bp, synthetic construct; identical to SEQ ID NO: 23004
  misc_feature 1..80: note = Artificially Synthesized Probe
  source 1..80: mol_type = other DNA

SEQ ID NO: 46138 - DNA, 80 bp, synthetic construct
  misc_feature 1..80: note = Artificially Synthesized Probe
  source 1..80: mol_type = other DNA
tacttaagctaggttaagtagctttacgggttatattatcttaaataacagtctctatattactttgtaaggagaggtag

SEQ ID NO: 46139 - DNA, 80 bp, synthetic construct
  misc_feature 1..80: note = Artificially Synthesized Probe
  source 1..80: mol_type = other DNA
gtaaacatgagtgagaaagttaagtgcttttttgaaggaaattgatgcttggagcagagtttggcacatattttcctgca

SEQ ID NO: 46140 - DNA, 80 bp, synthetic construct
  misc_feature 1..80: note = Artificially Synthesized Probe
  source 1..80: mol_type = other DNA
ggatatactttgccaacccttgctatagtgaaagcattttgaatatatatttttagaaatgcttctttcatcattatatg

SEQ ID NO: 46141 - DNA, 80 bp, synthetic construct
  misc_feature 1..80: note = Artificially Synthesized Probe
  source 1..80: mol_type = other DNA
aatattaatttttagtgagagccaaaaggttttttctacccactaataaataaaatgtattatttaaatattatttattt

SEQ ID NO: 46142 - DNA, 80 bp, synthetic construct
  misc_feature 1..80: note = Artificially Synthesized Probe
  source 1..80: mol_type = other DNA
gctctaagataaatattatttccaagggtctaaaacttgatttgtgcaaagatggtgctgtgttctccatatatcactaa

SEQ ID NO: 46143 - DNA, 80 bp, synthetic construct; identical to SEQ ID NO: 23005
  misc_feature 1..80: note = Artificially Synthesized Probe
  source 1..80: mol_type = other DNA

SEQ ID NO: 46144 - DNA, 80 bp, synthetic construct
  misc_feature 1..80: note = Artificially Synthesized Probe
  source 1..80: mol_type = other DNA
tgcttctcagtcactaagtattttacttcatgttttaattctttctgtaattatttcttagtctatcccttcataattgt

SEQ ID NO: 46145 - DNA, 80 bp, synthetic construct
  misc_feature 1..80: note = Artificially Synthesized Probe
  source 1..80: mol_type = other DNA
tttcccgtttgtagtagtattatggtgtatgtactctacctccctgcctactgccatgtttcagccatacttttttccag

SEQ ID NO: 46146 - DNA, 80 bp, synthetic construct
  misc_feature 1..80: note = Artificially Synthesized Probe
  source 1..80: mol_type = other DNA
gaagcaattctgccccagcctcctgagtagttgggattacaggtgcacaccaccacacccagctatttttgcgtttagta

SEQ ID NO: 46147 - DNA, 80 bp, synthetic construct
  misc_feature 1..80: note = Artificially Synthesized Probe
  source 1..80: mol_type = other DNA
cagcttgtagatttaccataatttatttaatcactgccaatcattagatatttaggttgttgtcagtttatttcatttca

SEQ ID NO: 46148 - DNA, 80 bp, synthetic construct; identical to SEQ ID NO: 23006
  misc_feature 1..80: note = Artificially Synthesized Probe
  source 1..80: mol_type = other DNA

SEQ ID NO: 46149 - DNA, 80 bp, synthetic construct
  misc_feature 1..80: note = Artificially Synthesized Probe
  source 1..80: mol_type = other DNA
cgtccccggcgcggcccgcgcgctcctccgccgcctctcgcctgcgccatggccggccggtcccacccgggcccgctgcg

SEQ ID NO: 46150 - DNA, 80 bp, synthetic construct
  misc_feature 1..80: note = Artificially Synthesized Probe
  source 1..80: mol_type = other DNA
tggtgctgtgagatcagcgcgtgtgtgtgtgcagtgcatggtgctgtgagatcagcgtgtgtgtgtgtgcagtgcatggt

SEQ ID NO: 46151 - DNA, 80 bp, synthetic construct
  misc_feature 1..80: note = Artificially Synthesized Probe
  source 1..80: mol_type = other DNA
tgtgtgagatcagcatgtgtgtgtgtgcagtgcatggtgctgtgagatcagcgtgtgtgtgcagcgcatggtgctgtgtg

SEQ ID NO: 46152 - DNA, 80 bp, synthetic construct
  misc_feature 1..80: note = Artificially Synthesized Probe
  source 1..80: mol_type = other DNA
gtgtgtgtgtgcagtgcatggtgctgtgtgagatcagcatgtgtgtgtgtgtgtgtgcagcgcatggtgctgtgagatca

SEQ ID NO: 46153 - DNA, 80 bp, synthetic construct
  misc_feature 1..80: note = Artificially Synthesized Probe
  source 1..80: mol_type = other DNA
gcgtgtgtgtgtgtgcagtgcatggtgctgtgtgagatcagcatgtgtgtgtgtgtgcagtgcatggtgctgagtgtgag

SEQ ID NO: 46154 - DNA, 80 bp, synthetic construct; identical to SEQ ID NO: 23085
  misc_feature 1..80: note = Artificially Synthesized Probe
  source 1..80: mol_type = other DNA

SEQ ID NO: 46155 - DNA, 80 bp, synthetic construct; identical to SEQ ID NO: 23086
  misc_feature 1..80: note = Artificially Synthesized Probe
  source 1..80: mol_type = other DNA

SEQ ID NO: 46156 - DNA, 80 bp, synthetic construct
  misc_feature 1..80: note = Artificially Synthesized Probe
  source 1..80: mol_type = other DNA
gggccccctttgctggcagatcccagggtctctctgtgtgggggcaaacttcccaggcagtgtttgaggccccctctgcc

SEQ ID NO: 46157 - DNA, 80 bp, synthetic construct
  misc_feature 1..80: note = Artificially Synthesized Probe
  source 1..80: mol_type = other DNA
actcagagctgggaggtgagaaatggggaatgcatgtgaaccacctgcctctgcacacagcaagtcctgttctgggtttt

SEQ ID NO: 46158 - DNA, 80 bp, synthetic construct; identical to SEQ ID NO: 23087
  misc_feature 1..80: note = Artificially Synthesized Probe
  source 1..80: mol_type = other DNA

SEQ ID NO: 46159 - DNA, 80 bp, synthetic construct
  misc_feature 1..80: note = Artificially Synthesized Probe
  source 1..80: mol_type = other DNA
tccccctgcctgggtcatctgcctcctggagcctactgttggggggcgtggaagaggctctgcctgcgcaactggagggg

SEQ ID NO: 46160 - DNA, 80 bp, synthetic construct
  misc_feature 1..80: note = Artificially Synthesized Probe
  source 1..80: mol_type = other DNA
ttcccagctaaggtggggttggtgggatttggctggggcccttggaggagcctgaccaggaggtgagacagggcacctgg

SEQ ID NO: 46161 - DNA, 80 bp, synthetic construct
  misc_feature 1..80: note = Artificially Synthesized Probe
  source 1..80: mol_type = other DNA
tgccggcagctgtcgtctgcagagtgggtgagaccgagtgtggcagatggcttggtccgcggtgctggaggggactggcg

SEQ ID NO: 46162 - DNA, 80 bp, synthetic construct
  misc_feature 1..80: note = Artificially Synthesized Probe
  source 1..80: mol_type = other DNA
gcggtcgccgagagattctggcctccagggtggtcgggcctggcatggactctaggggatggtgcacacaccggaccgga

SEQ ID NO: 46163 - DNA, 80 bp, synthetic construct; identical to SEQ ID NO: 23088
  misc_feature 1..80: note = Artificially Synthesized Probe
  source 1..80: mol_type = other DNA

SEQ ID NO: 46164 - DNA, 80 bp, synthetic construct
  misc_feature 1..80: note = Artificially Synthesized Probe
  source 1..80: mol_type = other DNA
gccagggcggggccgcgggcgcagacactcgcgggcacacgcacgacgacgcgcacacgcggtcgcacgcggccccccga

SEQ ID NO: 46165 - DNA, 80 bp, synthetic construct
  misc_feature 1..80: note = Artificially Synthesized Probe
  source 1..80: mol_type = other DNA
ggcccagccccaccgctgccctcgactcaatcccagttgaacgcccgcagcctcagtcccacccccggcccagccccagc

SEQ ID NO: 46166 - DNA, 80 bp, synthetic construct
  misc_feature 1..80: note = Artificially Synthesized Probe
  source 1..80: mol_type = other DNA
cgggcccagccccagccccagccccagccgagcacccccggccccgcctgcccggcgttcccttttgtgcggcgctctcc

SEQ ID NO: 46167 - DNA, 80 bp, synthetic construct
  misc_feature 1..80: note = Artificially Synthesized Probe
  source 1..80: mol_type = other DNA
ccggcgcggcctccgcaggcggcgctttcttctcgctcccgacgcggccgcccctcctgcctgcccgctcctatcgccgc

SEQ ID NO: 46168 - DNA, 80 bp, synthetic construct; identical to SEQ ID NO: 23089
  misc_feature 1..80: note = Artificially Synthesized Probe
  source 1..80: mol_type = other DNA

SEQ ID NO: 46169 - DNA, 80 bp, synthetic construct
  misc_feature 1..80: note = Artificially Synthesized Probe
  source 1..80: mol_type = other DNA
agagtggggcgcagagccggagccccgggccatgcctccgctgccgctggcgcgggacacccggcagccgcctggcgcct

SEQ ID NO: 46170 - DNA, 80 bp, synthetic construct
  misc_feature 1..80: note = Artificially Synthesized Probe
  source 1..80: mol_type = other DNA
tccctgtccccgtgagggccgccaggtcggctgtagcctttaccacaggccaccgtcagagcagctgccctcagggcccc

SEQ ID NO: 46171 - DNA, 80 bp, synthetic construct
  misc_feature 1..80: note = Artificially Synthesized Probe
  source 1..80: mol_type = other DNA
agaggctggaggccgcggcgggtccgcggggctcccggcagcttcccggggatgggatgggtcactctgcggacccctcg

SEQ ID NO: 46172 - DNA, 80 bp, synthetic construct
  misc_feature 1..80: note = Artificially Synthesized Probe
  source 1..80: mol_type = other DNA
ggtcctgcctgcacccctgtggctggggccccatctgacaggggtcaggccatgactatttggctggaggggcagagaaa

SEQ ID NO: 46173 - DNA, 80 bp, synthetic construct; identical to SEQ ID NO: 23090
  misc_feature 1..80: note = Artificially Synthesized Probe
  source 1..80: mol_type = other DNA

SEQ ID NO: 46174 - DNA, 80 bp, synthetic construct
  misc_feature 1..80: note = Artificially Synthesized Probe
  source 1..80: mol_type = other DNA
cgcagtaggaactcggggtctagaggccgccgcctgacggcactggacctcggctctcacttctctgggcctcagccccc

SEQ ID NO: 46175 - DNA, 80 bp, synthetic construct
  misc_feature 1..80: note = Artificially Synthesized Probe
  source 1..80: mol_type = other DNA
tcagcaaggggtggggctggacagaggctggaagtggacaggagcttgcagggaaggctgagctgggggagggccctgac

SEQ ID NO: 46176 - DNA, 80 bp, synthetic construct
  misc_feature 1..80: note = Artificially Synthesized Probe
  source 1..80: mol_type = other DNA
gtttgggccactgtcatcggggtggtgtgagggtgtgaggggaagagaggaagtggtcagctttgcagaggaacacagac

SEQ ID NO: 46177 - DNA, 80 bp, synthetic construct; identical to SEQ ID NO: 23091
  misc_feature 1..80: note = Artificially Synthesized Probe
  source 1..80: mol_type = other DNA

SEQ ID NO: 46178 - DNA, 80 bp, synthetic construct
  misc_feature 1..80: note = Artificially Synthesized Probe
  source 1..80: mol_type = other DNA
ggagctggattcaggggtgtgagatggaggccctctgcttcctcgaccgcctgccaggctggggtgacctgtagtcagct

SEQ ID NO: 46179 - DNA, 80 bp, synthetic construct
  misc_feature 1..80: note = Artificially Synthesized Probe
  source 1..80: mol_type = other DNA
ctacccctgggctctagccctgcaacctgtctgttggcccccagcccctgatggccctccaacacccgccccccaacccc

SEQ ID NO: 46180 - DNA, 80 bp, synthetic construct
  misc_feature 1..80: note = Artificially Synthesized Probe
  source 1..80: mol_type = other DNA
tgtgggtcagggcagcacagcaccatgggtggtttgtgacctgaggcatttgaggggacacgggttgcaggggcctgcaa

SEQ ID NO: 46181 - DNA, 80 bp, synthetic construct; identical to SEQ ID NO: 23076
  misc_feature 1..80: note = Artificially Synthesized Probe
  source 1..80: mol_type = other DNA

SEQ ID NO: 46182 - DNA, 80 bp, synthetic construct
  misc_feature 1..80: note = Artificially Synthesized Probe
  source 1..80: mol_type = other DNA
gagacaggtctatgcaggtctatgctggtggctggggccgggcagggccagggcaagaactgcgtttccaccacctgtga

SEQ ID NO: 46183 - DNA, 80 bp, synthetic construct; identical to SEQ ID NO: 23092
  misc_feature 1..80: note = Artificially Synthesized Probe
  source 1..80: mol_type = other DNA

SEQ ID NO: 46184 - DNA, 80 bp, synthetic construct
  misc_feature 1..80: note = Artificially Synthesized Probe
  source 1..80: mol_type = other DNA
gggaggggctcctgcaggaggtggagctaagacaggcgtggcaggacccccaaaaatgacccatcgggaacacagggctc

SEQ ID NO: 46185 - DNA, 80 bp, synthetic construct
  misc_feature 1..80: note = Artificially Synthesized Probe
  source 1..80: mol_type = other DNA
tggctgctgcaatgcgctgtgcctggcgggtacgtgcgtgtgtgccatcaccacgtgcacctgtcttcaggtgatctcgt

SEQ ID NO: 46186 - DNA, 80 bp, synthetic construct; identical to SEQ ID NO: 23093
  misc_feature 1..80: note = Artificially Synthesized Probe
  source 1..80: mol_type = other DNA

SEQ ID NO: 46187 - DNA, 80 bp, synthetic construct
  misc_feature 1..80: note = Artificially Synthesized Probe
  source 1..80: mol_type = other DNA
gggagccagtgctcagcctggcttcaaggtcccgccaggtacccaaggtctctccactgccctgccacattggtccagca

SEQ ID NO: 46188 - DNA, 80 bp, synthetic construct
  misc_feature 1..80: note = Artificially Synthesized Probe
  source 1..80: mol_type = other DNA
tggactatggagggagctgcgggtcctggtggatgaggagcatgcccgccatccaggaacagtgcccttggccatggtgt

SEQ ID NO: 46189 - DNA, 80 bp, synthetic construct
  misc_feature 1..80: note = Artificially Synthesized Probe
  source 1..80: mol_type = other DNA
ctgggcatcagcaggtgcccgttggatttggactgggagtcccagggccttggacaaggcagggccaaagggagagggag

SEQ ID NO: 46190 - DNA, 80 bp, synthetic construct; identical to SEQ ID NO: 23094
  misc_feature 1..80: note = Artificially Synthesized Probe
  source 1..80: mol_type = other DNA

SEQ ID NO: 46191 - DNA, 80 bp, synthetic construct
  misc_feature 1..80: note = Artificially Synthesized Probe
  source 1..80: mol_type = other DNA
gggggcacagccaaggtttggggaggaagacagggatctggtggggggagcatgggtaggttgcagggatggcaggcgga

SEQ ID NO: 46192 - DNA, 80 bp, synthetic construct
  misc_feature 1..80: note = Artificially Synthesized Probe
  source 1..80: mol_type = other DNA
cccagcttccgcccagcgggctgactcagaggtctccccacatctctgcccagggcttgagtctactgtggacatttgcc

SEQ ID NO: 46193 - DNA, 80 bp, synthetic construct
  misc_feature 1..80: note = Artificially Synthesized Probe
  source 1..80: mol_type = other DNA
tgctgggaagtgatgggtggtagccacccctctgacatgacttattaatgataattggacccaattaaacatttattaaa

SEQ ID NO: 46194 - DNA, 80 bp, synthetic construct
  misc_feature 1..80: note = Artificially Synthesized Probe
  source 1..80: mol_type = other DNA
cttattaatgataattggacccaattaaacatttattaaatccagacagctgcagccgctaacggacccttccctgatcc

SEQ ID NO: 46195 - DNA, 80 bp, synthetic construct
  misc_feature 1..80: note = Artificially Synthesized Probe
  source 1..80: mol_type = other DNA
ggcgctgtggtctgcagctgtaagaactaaaatgagcaacagttcctgcacctctccaagaaggaagttcgctttgacag

SEQ ID NO: 46196 - DNA, 80 bp, synthetic construct; identical to SEQ ID NO: 23095
  misc_feature 1..80: note = Artificially Synthesized Probe
  source 1..80: mol_type = other DNA

SEQ ID NO: 46197 - DNA, 80 bp, synthetic construct
  misc_feature 1..80: note = Artificially Synthesized Probe
  source 1..80: mol_type = other DNA
gctggacgctgcagcagcgcgggaaggggctcccccggctccatggggtgaatcggtgaggggctccggtgccgatgtgg

SEQ ID NO: 46198 - DNA, 80 bp, synthetic construct
  misc_feature 1..80: note = Artificially Synthesized Probe
  source 1..80: mol_type = other DNA
gcgcctgcaggtgcggggtgggggagaaaggtcatccctggagaggcccggggctggcgggaatcctcggcgggcggggt

SEQ ID NO: 46199 - DNA, 80 bp, synthetic construct
  misc_feature 1..80: note = Artificially Synthesized Probe
  source 1..80: mol_type = other DNA
ttctcccctacccgccccagcgtgccggggaatgctgtgcggcttcggcgccgtgtgcgagcccaacgcggaggggccgg

SEQ ID NO: 46200 - DNA, 80 bp, synthetic construct
  misc_feature 1..80: note = Artificially Synthesized Probe
  source 1..80: mol_type = other DNA
gcggggcggggccggtgcctggggcggggaggggcggggcctatgagatggagcgaggctgggaggggcttcggggccag

SEQ ID NO: 46201 - DNA, 80 bp, synthetic construct
  misc_feature 1..80: note = Artificially Synthesized Probe
  source 1..80: mol_type = other DNA
gagcgggggcgggggcggcccgtctgaccggcaaagccccgcccgcaggctcgcgggacccctgctccaacgtgacctgc

SEQ ID NO: 46202 - DNA, 80 bp, synthetic construct
  misc_feature 1..80: note = Artificially Synthesized Probe
  source 1..80: mol_type = other DNA
agaatgtcttcaagaagttcgacggcccttgtggtgagcgcggcggcgggcgcacggctcgagctctgtgggcgcgcggc

SEQ ID NO: 46203 - DNA, 80 bp, synthetic construct
  misc_feature 1..80: note = Artificially Synthesized Probe
  source 1..80: mol_type = other DNA
cggagtcacctacgaaaacgactgtgtcatgggccgatcgggggccgcccggggtctcctcctgcagaaagtgcgctccg

SEQ ID NO: 46204 - DNA, 80 bp, synthetic construct
  misc_feature 1..80: note = Artificially Synthesized Probe
  source 1..80: mol_type = other DNA
ggctttggagaccccctcatctgtgacaaccaggtgtccactggggacaccaggatcttctttgtgaaccctgcaccccc

SEQ ID NO: 46205 - DNA, 80 bp, synthetic construct
  misc_feature 1..80: note = Artificially Synthesized Probe
  source 1..80: mol_type = other DNA
tgggcggctcccctctgggagggccgcctgctcccctgctccctgcacatcccagggcagggatggagggtgctccagcc

SEQ ID NO: 46206 - DNA, 80 bp, synthetic construct; identical to SEQ ID NO: 23096
  misc_feature 1..80: note = Artificially Synthesized Probe
  source 1..80: mol_type = other DNA

SEQ ID NO: 46207 - DNA, 80 bp, synthetic construct
  misc_feature 1..80: note = Artificially Synthesized Probe
  source 1..80: mol_type = other DNA
ggtacctggatacctgggggctggtgaggcagaggcggggccttgtccaggctccctggtccctgacctcagccacgccc

SEQ ID NO: 46208 - DNA, 80 bp, synthetic construct
  misc_feature 1..80: note = Artificially Synthesized Probe
  source 1..80: mol_type = other DNA
cagtggccgtcgtgtcccgtcgtgttcgtcttggtcagttcgcccatcttctggtctttctctctgcgtctgtctcttct

SEQ ID NO: 46209 - DNA, 80 bp, synthetic construct
  misc_feature 1..80: note = Artificially Synthesized Probe
  source 1..80: mol_type = other DNA
cagagcaagtggacagacacctcctcccccgtgcagccctgggtgtgactctgggggtgcaggctcctcccacccacaga

SEQ ID NO: 46210 - DNA, 80 bp, synthetic construct; identical to SEQ ID NO: 23097
  misc_feature 1..80: note = Artificially Synthesized Probe
  source 1..80: mol_type = other DNA

SEQ ID NO: 46211 - DNA, 80 bp, synthetic construct
  misc_feature 1..80: note = Artificially Synthesized Probe
  source 1..80: mol_type = other DNA
gacgtgtgctgtgaagaacgggcaggcagcgtgtgaatgcctgcaggcgtgctcgagcctctacgatcctgtgtgcggca

SEQ ID NO: 46212 - DNA, 80 bp, synthetic construct
  misc_feature 1..80: note = Artificially Synthesized Probe
  source 1..80: mol_type = other DNA
agctcctccccagaccgctgcgggcagtgccgctttggagccctgtgcgaggccgagaccgggcgctgcgtgtgcccctc

SEQ ID NO: 46213 - DNA, 80 bp, synthetic construct; identical to SEQ ID NO: 23098
  misc_feature 1..80: note = Artificially Synthesized Probe
  source 1..80: mol_type = other DNA

SEQ ID NO: 46214 - DNA, 80 bp, synthetic construct
  misc_feature 1..80: note = Artificially Synthesized Probe
  source 1..80: mol_type = other DNA
gcagggccgtgcgagcagggtaggccgggggacgctggcgaaaactgctgggctctggctttggacaagaagcccctggg

SEQ ID NO: 46215 - DNA, 80 bp, synthetic construct
  misc_feature 1..80: note = Artificially Synthesized Probe
  source 1..80: mol_type = other DNA
gttgcaggggtcgctgtgcggggtcctttcgtgctgtgccggaggctgcagcacacggtgtcttgtggtccaacctcatt

SEQ ID NO: 46216 - DNA, 80 bp, synthetic construct
  misc_feature 1..80: note = Artificially Synthesized Probe
  source 1..80: mol_type = other DNA
tcctgcaaggtgcgcccacccggaccccggcctcccctcgcgacgcctgccgccccgccgggacccccgccccaggccgt

SEQ ID NO: 46217 - DNA, 80 bp, synthetic construct
  misc_feature 1..80: note = Artificially Synthesized Probe
  source 1..80: mol_type = other DNA
cccaggcagcccggtgagctctgtacccctggctctcggcgggcggcggggacggggctgcggccgctcacactgacacc

SEQ ID NO: 46218 - DNA, 80 bp, synthetic construct
  misc_feature 1..80: note = Artificially Synthesized Probe
  source 1..80: mol_type = other DNA
ctgggtttccgtgtctggatgtgggcgtgcccgtgtgctgcgttgggcccctgtggacgtgtgtattgtgttgtaagtga

SEQ ID NO: 46219 - DNA, 80 bp, synthetic construct
  misc_feature 1..80: note = Artificially Synthesized Probe
  source 1..80: mol_type = other DNA
atccggtcgatgtatcacatcaattaggtaaaagtggtgcccggtgtgtgtgatgcgcgtgcacagatgtgtgtctgcag

SEQ ID NO: 46220 - DNA, 80 bp, synthetic construct; identical to SEQ ID NO: 23099
  misc_feature 1..80: note = Artificially Synthesized Probe
  source 1..80: mol_type = other DNA

SEQ ID NO: 46221 - DNA, 80 bp, synthetic construct
  misc_feature 1..80: note = Artificially Synthesized Probe
  source 1..80: mol_type = other DNA
caccttcgccccgctgccgcctgtggcccccttacactgtgcccagacgccctacggctgctgccaggacaatatcaccg

SEQ ID NO: 46222 - DNA, 80 bp, synthetic construct
  misc_feature 1..80: note = Artificially Synthesized Probe
  source 1..80: mol_type = other DNA
cccagccacaggccagtgctcctgccgcccaggtgtggggggcctcaggtgtgaccgctgtgagcctggcttctggaact

SEQ ID NO: 46223 - DNA, 80 bp, synthetic construct; identical to SEQ ID NO: 23100
  misc_feature 1..80: note = Artificially Synthesized Probe
  source 1..80: mol_type = other DNA

SEQ ID NO: 46224 - DNA, 80 bp, synthetic construct
  misc_feature 1..80: note = Artificially Synthesized Probe
  source 1..80: mol_type = other DNA
gggccagcgctaccctggggcttcatggggtggggtggggtcacccgagccacagaggtttcccatgcccgtgccccaga

SEQ ID NO: 46225 - DNA, 80 bp, synthetic construct
  misc_feature 1..80: note = Artificially Synthesized Probe
  source 1..80: mol_type = other DNA
ggcctcgccttgaacatccttgttctctgccccaggtctgtgggtcagatggagtcacatacggcaacgagtgtcagctg

SEQ ID NO: 46226 - DNA, 80 bp, synthetic construct
  misc_feature 1..80: note = Artificially Synthesized Probe
  source 1..80: mol_type = other DNA
cggtccccccgccaacctccctctccttgcagaggctgttgctcccagcactcacccgacatctgcctccgtgactgtga

SEQ ID NO: 46227 - DNA, 80 bp, synthetic construct; identical to SEQ ID NO: 23077
  misc_feature 1..80: note = Artificially Synthesized Probe
  source 1..80: mol_type = other DNA

SEQ ID NO: 46228 - DNA, 80 bp, synthetic construct
  misc_feature 1..80: note = Artificially Synthesized Probe
  source 1..80: mol_type = other DNA
ggtgccccccacggcaccctcccctgcacccagcctggtggcgtccgcctttggtgaatctggcagcactgatggaagca

SEQ ID NO: 46229 - DNA, 80 bp, synthetic construct; identical to SEQ ID NO: 23101
  misc_feature 1..80: note = Artificially Synthesized Probe
  source 1..80: mol_type = other DNA

SEQ ID NO: 46230 - DNA, 80 bp, synthetic construct
  misc_feature 1..80: note = Artificially Synthesized Probe
  source 1..80: mol_type = other DNA
gcgtgccggggaccccacgcctaacccgtctctctcgttgcaagccggtgtggcacactgctctgaggagtcctcctggt

SEQ ID NO: 46231 - DNA, 80 bp, synthetic construct
  misc_feature 1..80: note = Artificially Synthesized Probe
  source 1..80: mol_type = other DNA
agccaccaaggtgttccagggcgtcctggagctggagggcgtcgagggccaggagctgttctacacgcccgagatggctg

SEQ ID NO: 46232 - DNA, 80 bp, synthetic construct; identical to SEQ ID NO: 23102
  misc_feature 1..80: note = Artificially Synthesized Probe
  source 1..80: mol_type = other DNA

SEQ ID NO: 46233 - DNA, 80 bp, synthetic construct
  misc_feature 1..80: note = Artificially Synthesized Probe
  source 1..80: mol_type = other DNA
ctcctccccagccacagccttcagggcacccgacgtggcccgggccctgctccggcagatccaggtgtccaggcgccggt

SEQ ID NO: 46234 - DNA, 80 bp, synthetic construct
  misc_feature 1..80: note = Artificially Synthesized Probe
  source 1..80: mol_type = other DNA
tcctggccctgctcccaggaaaccctaacagctccctgtgccggcagactggtttcctgcgtttatcacgggggccacgt

SEQ ID NO: 46235 - DNA, 80 bp, synthetic construct
  misc_feature 1..80: note = Artificially Synthesized Probe
  source 1..80: mol_type = other DNA
cagccgtgtgcccggacgtcggcccccggccccccagcagcctccaaagccctgtgactcacagccctgcttccacgggg

SEQ ID NO: 46236 - DNA, 80 bp, synthetic construct; identical to SEQ ID NO: 23103
  misc_feature 1..80: note = Artificially Synthesized Probe
  source 1..80: mol_type = other DNA

SEQ ID NO: 46237 - DNA, 80 bp, synthetic construct
  misc_feature 1..80: note = Artificially Synthesized Probe
  source 1..80: mol_type = other DNA
tgaacctggcaggcggaggttgcggtgagccaggatcgcgccactgcactccagccggggcaaaaagagcaaaactccgt

SEQ ID NO: 46238 - DNA, 80 bp, synthetic construct
  misc_feature 1..80: note = Artificially Synthesized Probe
  source 1..80: mol_type = other DNA
ccgcgcctaccacacgctgcgcctggcactggaattccgggcgctggagcctcaggggctgctgctgtacaatggcaacg

SEQ ID NO: 46239 - DNA, 80 bp, synthetic construct
  misc_feature 1..80: note = Artificially Synthesized Probe
  source 1..80: mol_type = other DNA
cctggtgggggcagaaatcccatggcagcccccgcaggacaagtcccagttggggactgagatcgttggctggggaatgt

SEQ ID NO: 46240 - DNA, 80 bp, synthetic construct
  misc_feature 1..80: note = Artificially Synthesized Probe
  source 1..80: mol_type = other DNA
cggggcagctcaggtaggcggggtggggacggggccgggcgatggtcctgagcacctgctcctgccctcaggtttgacac

SEQ ID NO: 46241 - DNA, 80 bp, synthetic construct; identical to SEQ ID NO: 23104
  misc_feature 1..80: note = Artificially Synthesized Probe
  source 1..80: mol_type = other DNA

SEQ ID NO: 46242 - DNA, 80 bp, synthetic construct
  misc_feature 1..80: note = Artificially Synthesized Probe
  source 1..80: mol_type = other DNA
cttggcattgggccgggggctgccacccgaggctctggcgtgggcgagtgcggggaccacccctgcctgcccaacccctg

SEQ ID NO: 46243 - DNA, 80 bp, synthetic construct
  misc_feature 1..80: note = Artificially Synthesized Probe
  source 1..80: mol_type = other DNA
ccgtcttcctccatccaggaccaacctgtgccgatgagaagagcccctgccagcccaacccctgccatggggcggcgccc

SEQ ID NO: 46244 - DNA, 80 bp, synthetic construct
  misc_feature 1..80: note = Artificially Synthesized Probe
  source 1..80: mol_type = other DNA
atgcggctcagtctagtctgggttttgagttaggatccacacacggctggcatggggtgcaggaggccccgggggtcagg

SEQ ID NO: 46245 - DNA, 80 bp, synthetic construct; identical to SEQ ID NO: 23105
  misc_feature 1..80: note = Artificially Synthesized Probe
  source 1..80: mol_type = other DNA

SEQ ID NO: 46246 - DNA, 80 bp, synthetic construct
  misc_feature 1..80: note = Artificially Synthesized Probe
  source 1..80: mol_type = other DNA
ggtggctctgggaggcctggggcactggcccggggccggggcaccagcaggtcgctcaggccctgggtggtcgcgtggcc

SEQ ID NO: 46247 - DNA, 80 bp, synthetic construct
  misc_feature 1..80: note = Artificially Synthesized Probe
  source 1..80: mol_type = other DNA
ctctgggccgcgaggggactcccgctgctgcctgctcttcctcctcgggcggcagccccgcccctgccggcgctcacgga

SEQ ID NO: 46248 - DNA, 80 bp, synthetic construct
  misc_feature 1..80: note = Artificially Synthesized Probe
  source 1..80: mol_type = other DNA
aacccctagggtagctcctcccccactaaggaccctgccatttctgtgtgattaacgctgccccctagataggcaatggg

SEQ ID NO: 46249 - DNA, 80 bp, synthetic construct
  misc_feature 1..80: note = Artificially Synthesized Probe
  source 1..80: mol_type = other DNA
cgtgctgctgccgtgtcctctggcttcgacggtgccatccagctggtatgtgggggcggggcgtcccagcagggcctccg

SEQ ID NO: 46250 - DNA, 80 bp, synthetic construct
  misc_feature 1..80: note = Artificially Synthesized Probe
  source 1..80: mol_type = other DNA
ccggcaggaaactttgctgccctgacactagcctggctcttgaggggtccttgtggggtcctggactgtccactgctctt

SEQ ID NO: 46251 - DNA, 80 bp, synthetic construct; identical to SEQ ID NO: 23106
  misc_feature 1..80: note = Artificially Synthesized Probe
  source 1..80: mol_type = other DNA

SEQ ID NO: 46252 - DNA, 80 bp, synthetic construct
  misc_feature 1..80: note = Artificially Synthesized Probe
  source 1..80: mol_type = other DNA
gtgaccgagaggtaacgtgccatcctctgctggctgtcggttccatctgtgccctcggggcgggacaccggacccccaca

SEQ ID NO: 46253 - DNA, 80 bp, synthetic construct
  misc_feature 1..80: note = Artificially Synthesized Probe
  source 1..80: mol_type = other DNA
ctctcactcccactcctccatccttcctggtggggagcagagtccggagcccccggggaactttccatcccttgtggcgg

SEQ ID NO: 46254 - DNA, 80 bp, synthetic construct
  misc_feature 1..80: note = Artificially Synthesized Probe
  source 1..80: mol_type = other DNA
tgcacttccgcgtgtgtgaacatgcagctgtgtctgtgcgtgtctatgtatatggagtggatgtgcaagtgtgtgtgaat

SEQ ID NO: 46255 - DNA, 80 bp, synthetic construct; identical to SEQ ID NO: 23107
  misc_feature 1..80: note = Artificially Synthesized Probe
  source 1..80: mol_type = other DNA

SEQ ID NO: 46256 - DNA, 80 bp, synthetic construct
  misc_feature 1..80: note = Artificially Synthesized Probe
  source 1..80: mol_type = other DNA
gtgtatatgtgggggggacatgtagatatgcgtgtgtgactatgcggccgtgtgtgtgcatggctccatgtatgtgtgtg

SEQ ID NO: 46257 - DNA, 80 bp, synthetic construct
  misc_feature 1..80: note = Artificially Synthesized Probe
  source 1..80: mol_type = other DNA
gtgtccgtgtgtgtgcatgggtccatgtgtgtatagtgtgtacacatgggtccatgtatgtgtgtgtatatgagggagac

SEQ ID NO: 46258 - DNA, 80 bp, synthetic construct
  misc_feature 1..80: note = Artificially Synthesized Probe
  source 1..80: mol_type = other DNA
tgtgtgtccgagtgtgtgcatgggtccgtgtatatgcgtgtatatatggggggatatgtagatgtgtgtgtgtatgaaca

SEQ ID NO: 46259 - DNA, 80 bp, synthetic construct
  misc_feature 1..80: note = Artificially Synthesized Probe
  source 1..80: mol_type = other DNA
tatatatggggggatatgtagatgtgtgtgtgtatgaacaggtgtaagtggggagcactcaggtgtgtctgtgtgtgttc

SEQ ID NO: 46260 - DNA, 80 bp, synthetic construct; identical to SEQ ID NO: 23108
  misc_feature 1..80: note = Artificially Synthesized Probe
  source 1..80: mol_type = other DNA

SEQ ID NO: 46261 - DNA, 80 bp, synthetic construct
  misc_feature 1..80: note = Artificially Synthesized Probe
  source 1..80: mol_type = other DNA
tgcattggccccgcctgtcccctgctcacccgcctccctctcttcctgcttctaagccccgaaactctggattccggggc

SEQ ID NO: 46262 - DNA, 80 bp, synthetic construct
  misc_feature 1..80: note = Artificially Synthesized Probe
  source 1..80: mol_type = other DNA
cgtcacagcccttgtggcctccgcagctggggcccttgtcctcccgcctcccccaccctgtcctgttgccaccttcctag

SEQ ID NO: 46263 - DNA, 80 bp, synthetic construct; identical to SEQ ID NO: 23078
  misc_feature 1..80: note = Artificially Synthesized Probe
  source 1..80: mol_type = other DNA

SEQ ID NO: 46264 - DNA, 80 bp, synthetic construct
  misc_feature 1..80: note = Artificially Synthesized Probe
  source 1..80: mol_type = other DNA
gggcagactatgtggcactggccattgtggacgggcacctgcaactgagctacaacctgggctcccagcccgtggtgctg

SEQ ID NO: 46265 - DNA, 80 bp, synthetic construct; identical to SEQ ID NO: 23109
  misc_feature 1..80: note = Artificially Synthesized Probe
  source 1..80: mol_type = other DNA

SEQ ID NO: 46266 - DNA, 80 bp, synthetic construct
  misc_feature 1..80: note = Artificially Synthesized Probe
  source 1..80: mol_type = other DNA
gatacctcgggggttctccaggctgaggcacctgcagggcataggaaggatgcagggcttatggtctagaggaggcagag

SEQ ID NO: 46267 - DNA, 80 bp, synthetic construct
  misc_feature 1..80: note = Artificially Synthesized Probe
  source 1..80: mol_type = other DNA
tggacactgatggagccctgtggcttggtgagtgttttggggagactagagagggatgcccaagggtctcatgatatccg

SEQ ID NO: 46268 - DNA, 80 bp, synthetic construct
  misc_feature 1..80: note = Artificially Synthesized Probe
  source 1..80: mol_type = other DNA
ggggtgcccatcagcatcactgagtcacagccgggtgactcccactgtctgtgctgcagggggcctgccggagctgcccg

SEQ ID NO: 46269 - DNA, 80 bp, synthetic construct; identical to SEQ ID NO: 23110
  misc_feature 1..80: note = Artificially Synthesized Probe
  source 1..80: mol_type = other DNA

SEQ ID NO: 46270 - DNA, 80 bp, synthetic construct
  misc_feature 1..80: note = Artificially Synthesized Probe
  source 1..80: mol_type = other DNA
gccccacggtgtccccgccgggaagcagccccggctcctgaatcaccctcgctccgtcaggcgggactcgtgtcccagag

SEQ ID NO: 46271 - DNA, 80 bp, synthetic construct
  misc_feature 1..80: note = Artificially Synthesized Probe
  source 1..80: mol_type = other DNA
cagctctgcgttgctcccgtgctgcctgcgccagccccaggctgctgaggagcagaggccagaccagggccgatctgggt

SEQ ID NO: 46272 - DNA, 80 bp, synthetic construct
  misc_feature 1..80: note = Artificially Synthesized Probe
  source 1..80: mol_type = other DNA
ttcatgtgttgattttatttgacccctggagtggtgggtctcatctttcccatctcgcctgagagcggctgagggctgcc

SEQ ID NO: 46273 - DNA, 80 bp, synthetic construct
  misc_feature 1..80: note = Artificially Synthesized Probe
  source 1..80: mol_type = other DNA
tcatctttcccatctcgcctgagagcggctgagggctgcctcactgcaaatcctccccacagcgtcagtgaaagtcgtcc

SEQ ID NO: 46274 - DNA, 80 bp, synthetic construct; identical to SEQ ID NO: 23111
  misc_feature 1..80: note = Artificially Synthesized Probe
  source 1..80: mol_type = other DNA

SEQ ID NO: 46275 - DNA, 80 bp, synthetic construct
  misc_feature 1..80: note = Artificially Synthesized Probe
  source 1..80: mol_type = other DNA
ggcacatggcaggagagtcaccccggctgaacgaggctctgcatcttaccgaagccgctctacgggtgccaggcactggc

SEQ ID NO: 46276 - DNA, 80 bp, synthetic construct
  misc_feature 1..80: note = Artificially Synthesized Probe
  source 1..80: mol_type = other DNA
acccgggaggggctgtggccaccggaccccctggggtggggctggccaggggagggttagccagggaggactgtcatggg

SEQ ID NO: 46277 - DNA, 80 bp, synthetic construct
  misc_feature 1..80: note = Artificially Synthesized Probe
  source 1..80: mol_type = other DNA
ggtaaatgcctcccagaagcctggggtgagccctgagggacaaggtctctggagccagtctggctggagaagggacaatt

SEQ ID NO: 46278 - DNA, 80 bp, synthetic construct
  misc_feature 1..80: note = Artificially Synthesized Probe
  source 1..80: mol_type = other DNA
ctctccccatctgactccgaccccacctcccagggcacaggatggcgtctgggcagcccctagtcttcagaagctacccc

SEQ ID NO: 46279 - DNA, 80 bp, synthetic construct; identical to SEQ ID NO: 23079
  misc_feature 1..80: note = Artificially Synthesized Probe
  source 1..80: mol_type = other DNA

SEQ ID NO: 46280 - DNA, 80 bp, synthetic construct
  misc_feature 1..80: note = Artificially Synthesized Probe
  source 1..80: mol_type = other DNA
ggcctggcctccgcagtgccagctgcccagggctggcggctgagcgggcgactcctccggccctcgccaccctgtcctgt

SEQ ID NO: 46281 - DNA, 80 bp, synthetic construct
  misc_feature 1..80: note = Artificially Synthesized Probe
  source 1..80: mol_type = other DNA
agacaagtgcacctcgcccacggactgcggctgccgcgcgccctccctaccggccgagaaggagaggggcctggggaggg

SEQ ID NO: 46282 - DNA, 80 bp, synthetic construct
  misc_feature 1..80: note = Artificially Synthesized Probe
  source 1..80: mol_type = other DNA
ccctgccggggcctggcacagggacagggcagggggccagggtcagagtgagtctggcgccttcccagcccggccctgcc

SEQ ID NO: 46283 - DNA, 80 bp, synthetic construct; identical to SEQ ID NO: 23080
  misc_feature 1..80: note = Artificially Synthesized Probe
  source 1..80: mol_type = other DNA

SEQ ID NO: 46284 - DNA, 80 bp, synthetic construct
  misc_feature 1..80: note = Artificially Synthesized Probe
  source 1..80: mol_type = other DNA
cctctctggccctcccccaggcaggtctgggctcgaggctgctgccccaatctccctcctgcagctgggagggggtctgc

SEQ ID NO: 46285 - DNA, 80 bp, synthetic construct
  misc_feature 1..80: note = Artificially Synthesized Probe
  source 1..80: mol_type = other DNA
ccggggctcctggtgggaagtcggggctcggtgcttcccgcctgcgtgaatggacttgtcccgtctttgacttctcctgg

SEQ ID NO: 46286 - DNA, 80 bp, synthetic construct
  misc_feature 1..80: note = Artificially Synthesized Probe
  source 1..80: mol_type = other DNA
accccaccccactccctcactccccacccagagaacagccctggctccattgttcctgcagactagagagggaaggttgt

SEQ ID NO: 46287 - DNA, 80 bp, synthetic construct; identical to SEQ ID NO: 23081
  misc_feature 1..80: note = Artificially Synthesized Probe
  source 1..80: mol_type = other DNA

SEQ ID NO: 46288 - DNA, 80 bp, synthetic construct
  misc_feature 1..80: note = Artificially Synthesized Probe
  source 1..80: mol_type = other DNA
cggcctgggtggggcaggaacggaccccctccctgcagtcctggttctggcaccccctccccacttggactgggctcccc

SEQ ID NO: 46289 - DNA, 80 bp, synthetic construct
  misc_feature 1..80: note = Artificially Synthesized Probe
  source 1..80: mol_type = other DNA
ctggaggaggaggctctgtacccctgcacctcctgcctgctgggtgagctgctgggagctgcactggggctcagagcagt

SEQ ID NO: 46290 - DNA, 80 bp, synthetic construct
  misc_feature 1..80: note = Artificially Synthesized Probe
  source 1..80: mol_type = other DNA
gcagctcacagcaggacctgggaaagggagacggcccctcccagccccctcctcctgcagtccccccacggagcagaggc

SEQ ID NO: 46291 - DNA, 80 bp, synthetic construct
  misc_feature 1..80: note = Artificially Synthesized Probe
  source 1..80: mol_type = other DNA
cctccactagtgggccatggttcttaccaccctatgtccctgggttcagcccgggctggtgctgcaggtgtgaggctggt

SEQ ID NO: 46292 - DNA, 80 bp, synthetic construct
  misc_feature 1..80: note = Artificially Synthesized Probe
  source 1..80: mol_type = other DNA
tgcggggggggggcgtgcaggagcagagaggtgggcggggccgtcaccgggcctcgtgtgcttgggggcagggccggtgc

SEQ ID NO: 46293 - DNA, 80 bp, synthetic construct; identical to SEQ ID NO: 23082
  misc_feature 1..80: note = Artificially Synthesized Probe
  source 1..80: mol_type = other DNA

SEQ ID NO: 46294 - DNA, 80 bp, synthetic construct
  misc_feature 1..80: note = Artificially Synthesized Probe
  source 1..80: mol_type = other DNA
gtcgctggcctgagcctccctgccccgccgtttggcagccaccttggccaccctcacactgggccctaggagaagcaagc

SEQ ID NO: 46295 - DNA, 80 bp, synthetic construct
  misc_feature 1..80: note = Artificially Synthesized Probe
  source 1..80: mol_type = other DNA
tgaccttcactgatttcatcatcagtgccttccccattcacacactcacggttggcacctccacggggcttcccagggaa

SEQ ID NO: 46296 - DNA, 80 bp, synthetic construct
  misc_feature 1..80: note = Artificially Synthesized Probe
  source 1..80: mol_type = other DNA
tcccctgctggccgttctctctcccgtggggaaacgccccccccccccccccgccctgcacctggctggcggcacctgtg

SEQ ID NO: 46297 - DNA, 80 bp, synthetic construct; identical to SEQ ID NO: 23083
  misc_feature 1..80: note = Artificially Synthesized Probe
  source 1..80: mol_type = other DNA

SEQ ID NO: 46298 - DNA, 80 bp, synthetic construct
  misc_feature 1..80: note = Artificially Synthesized Probe
  source 1..80: mol_type = other DNA
cccagcccctcgtgggccaagggcgcccacacccacgccaccctttccgaaggaaccgagccccagcccctcgtgggcca

SEQ ID NO: 46299 - DNA, 80 bp, synthetic construct
  misc_feature 1..80: note = Artificially Synthesized Probe
  source 1..80: mol_type = other DNA
gagccccagcccctcgtgggccaagggcgcccacacccacgccaccctctcccaaggaaccgagccccagcccctcgtgg

SEQ ID NO: 46300 - DNA, 80 bp, synthetic construct
  misc_feature 1..80: note = Artificially Synthesized Probe
  source 1..80: mol_type = other DNA
tgtgcctgtgtccacacgggaacatatgggtgggaggtgaggagaacgtgccttcccagtgtatgggtgggggttgaggg

SEQ ID NO: 46301 - DNA, 80 bp, synthetic construct
  misc_feature 1..80: note = Artificially Synthesized Probe
  source 1..80: mol_type = other DNA
agaattgaggctggggctggggtcagcagtggggctgaatggggcagagtgggggtcaaggagcaggggtggtgctgggc

SEQ ID NO: 46302 - DNA, 80 bp, synthetic construct; identical to SEQ ID NO: 23084
  misc_feature 1..80: note = Artificially Synthesized Probe
  source 1..80: mol_type = other DNA

SEQ ID NO: 46303 - DNA, 80 bp, synthetic construct; identical to SEQ ID NO: 23075
  misc_feature 1..80: note = Artificially Synthesized Probe
  source 1..80: mol_type = other DNA

SEQ ID NO: 46304 - DNA, 80 bp, synthetic construct
  misc_feature 1..80: note = Artificially Synthesized Probe
  source 1..80: mol_type = other DNA
gctgtgtgagatcagcatgtgtgtgtgtgtgtgcagtgcatggtgctgtgagatcagcatgtgtgtgtgcagtgcatggt

SEQ ID NO: 46305 - DNA, 80 bp, synthetic construct; identical to SEQ ID NO: 23112
  misc_feature 1..80: note = Artificially Synthesized Probe
  source 1..80: mol_type = other DNA

SEQ ID NO: 46306 - DNA, 80 bp, synthetic construct
  misc_feature 1..80: note = Artificially Synthesized Probe
  source 1..80: mol_type = other DNA
ggggacctaattggaggtgaggctgcagaggcatgcagggccatgtggtttctgggcagtatttcagaggattagcaggg

SEQ ID NO: 46307 - DNA, 80 bp, synthetic construct
  misc_feature 1..80: note = Artificially Synthesized Probe
  source 1..80: mol_type = other DNA
tagggatcagccacctaactggatttaggaagacagagagggaaacatgagtcaaagagaactaaggtttggagtcaggc

SEQ ID NO: 46308 - DNA, 80 bp, synthetic construct
  misc_feature 1..80: note = Artificially Synthesized Probe
  source 1..80: mol_type = other DNA
ttctgaaggttctgttcctggttgagtctctaaactcggaggctgagaacaaaaaagtaaagcaggcagacacacctgta

SEQ ID NO: 46309 - DNA, 80 bp, synthetic construct; identical to SEQ ID NO: 23123
  misc_feature 1..80: note = Artificially Synthesized Probe
  source 1..80: mol_type = other DNA

SEQ ID NO: 46310 - DNA, 80 bp, synthetic construct
  misc_feature 1..80: note = Artificially Synthesized Probe
  source 1..80: mol_type = other DNA
gaaagagctgttgtcaatctgcagaatgttctgatgcactaactcagagaaaaaaatgtaataaagtaagataggagagt

SEQ ID NO: 46311 - DNA, 80 bp, synthetic construct
  misc_feature 1..80: note = Artificially Synthesized Probe
  source 1..80: mol_type = other DNA
gagagttgaattaacagtaattagatccccctttgggtcttaagtaggaaacagacaccccaaatatgaaacaactgccc

SEQ ID NO: 46312 - DNA, 80 bp, synthetic construct; identical to SEQ ID NO: 23124
  misc_feature 1..80: note = Artificially Synthesized Probe
  source 1..80: mol_type = other DNA

SEQ ID NO: 46313 - DNA, 80 bp, synthetic construct
  misc_feature 1..80: note = Artificially Synthesized Probe
  source 1..80: mol_type = other DNA
cagacgcctgtaatcccagctactcgggagactgaggcagcagaatctcttgaacccaggaggtggaggttgcagtaagc

SEQ ID NO: 46314 - DNA, 80 bp, synthetic construct; identical to SEQ ID NO: 23113
  misc_feature 1..80: note = Artificially Synthesized Probe
  source 1..80: mol_type = other DNA

SEQ ID NO: 46315 - DNA, 80 bp, synthetic construct
  misc_feature 1..80: note = Artificially Synthesized Probe
  source 1..80: mol_type = other DNA
ctgtctctactaaaaacacaaaaaattagctgggcgtggtggcgggtgcctgtagtcccagctactccggaggttgaggc

SEQ ID NO: 46316 - DNA, 80 bp, synthetic construct
  misc_feature 1..80: note = Artificially Synthesized Probe
  source 1..80: mol_type = other DNA
gaaagaaagaaagaaagaaagaaagaaagaaagaaagaaagaaagaaagaaagaaagaaagaaagaaagaaagaaagaaa

SEQ ID NO: 46317 - DNA, 80 bp, synthetic construct
  misc_feature 1..80: note = Artificially Synthesized Probe
  source 1..80: mol_type = other DNA
acaggaaggagggtttgagagaaagttcccagaatcctctgaagtcagagatggctcccactgcacgttgcagaatattg

SEQ ID NO: 46318 - DNA, 80 bp, synthetic construct; identical to SEQ ID NO: 23125
  misc_feature 1..80: note = Artificially Synthesized Probe
  source 1..80: mol_type = other DNA

SEQ ID NO: 46319 - DNA, 80 bp, synthetic construct
  misc_feature 1..80: note = Artificially Synthesized Probe
  source 1..80: mol_type = other DNA
gatgcgtcactgggataatagtagcccacgatttctgagacaaagctgcaggaaagagatgctggtaccactggagtaac

SEQ ID NO: 46320 - DNA, 80 bp, synthetic construct
  misc_feature 1..80: note = Artificially Synthesized Probe
  source 1..80: mol_type = other DNA
cacttccttcctgcacaggggcctggggggtgggcaggggagtgcacgaagagtctgattcatgctgccacccccctccc

SEQ ID NO: 46321 - DNA, 80 bp, synthetic construct; identical to SEQ ID NO: 23126
  misc_feature 1..80: note = Artificially Synthesized Probe
  source 1..80: mol_type = other DNA

SEQ ID NO: 46322 - DNA, 80 bp, synthetic construct
  misc_feature 1..80: note = Artificially Synthesized Probe
  source 1..80: mol_type = other DNA
ggcagaaattggtgtaggtgaagtgggccaggcccgtgctcatgaggtagatgaggccttgcctcccgatggacgtgacc

SEQ ID NO: 46323 - DNA, 80 bp, synthetic construct
  misc_feature 1..80: note = Artificially Synthesized Probe
  source 1..80: mol_type = other DNA
cagcttgacgccccattacgtgcgtgggaggagatccttaggtatttggtaactaaaagaatgaactgaaagccggggag

SEQ ID NO: 46324 - DNA, 80 bp, synthetic construct
  misc_feature 1..80: note = Artificially Synthesized Probe
  source 1..80: mol_type = other DNA
cggagaccggcggagtgggcggggctggtggaagaggcagtgattgtacaggtgttctcacaccccaggtgtcctcacaa

SEQ ID NO: 46325 - DNA, 80 bp, synthetic construct
  misc_feature 1..80: note = Artificially Synthesized Probe
  source 1..80: mol_type = other DNA
aaggtccctttcatacctgatccaactgctctgtgaactaaaagaacgaaccacacctttcatacaaccgagatcaaagt

SEQ ID NO: 46326 - DNA, 80 bp, synthetic construct
  misc_feature 1..80: note = Artificially Synthesized Probe
  source 1..80: mol_type = other DNA
gcgtggccctcgcgatggtgttcacctgcagcgtgtatcgagtgtgggggagtaggagctgcgagcggagcggatcacgt

SEQ ID NO: 46327 - DNA, 80 bp, synthetic construct; identical to SEQ ID NO: 23127
  misc_feature 1..80: note = Artificially Synthesized Probe
  source 1..80: mol_type = other DNA

SEQ ID NO: 46328 - DNA, 80 bp, synthetic construct
  misc_feature 1..80: note = Artificially Synthesized Probe
  source 1..80: mol_type = other DNA
ctggatggccaagggcaccagcgccccctgggggctgagccacagcaggcacagtggggcggccacgtactgctggcggc

SEQ ID NO: 46329 - DNA, 80 bp, synthetic construct
  misc_feature 1..80: note = Artificially Synthesized Probe
  source 1..80: mol_type = other DNA
cccccagctgaggtctcagaaattcttggtgcctgaattaatggccaaagtggggtaccccgcccttcccaaaatgtccg

SEQ ID NO: 46330 - DNA, 80 bp, synthetic construct; identical to SEQ ID NO: 23128
  misc_feature 1..80: note = Artificially Synthesized Probe
  source 1..80: mol_type = other DNA

SEQ ID NO: 46331 - DNA, 80 bp, synthetic construct
  misc_feature 1..80: note = Artificially Synthesized Probe
  source 1..80: mol_type = other DNA
ccctgcagccaccctgcgcgttcacaccatttcaccaggccccatctcaggcctcaaagcctcccaaccccagtctgacc

SEQ ID NO: 46332 - DNA, 80 bp, synthetic construct
  misc_feature 1..80: note = Artificially Synthesized Probe
  source 1..80: mol_type = other DNA
agatccttacccacctctagctctgtctgcaggcatgtgtcctgtcccagcaagggggccaccatgtcattggtgacagg

SEQ ID NO: 46333 - DNA, 80 bp, synthetic construct
  misc_feature 1..80: note = Artificially Synthesized Probe
  source 1..80: mol_type = other DNA
agtcctgccaagtcctttgcttatcattgtggtttaggttttcttcccaaaaactctatgaggtaggaatcattatatct

SEQ ID NO: 46334 - DNA, 80 bp, synthetic construct
  misc_feature 1..80: note = Artificially Synthesized Probe
  source 1..80: mol_type = other DNA
agattccctaaatgactgtgaccctctcccaggcaagcagagtgtctctctctcctgaatcccctgtttttgtcccctcc

SEQ ID NO: 46335 - DNA, 80 bp, synthetic construct
  misc_feature 1..80: note = Artificially Synthesized Probe
  source 1..80: mol_type = other DNA
tggaacttttgccaacacaatcaccatcatcctccactgccacactttacagcacagccaatcactatcgagaaatatca

SEQ ID NO: 46336 - DNA, 80 bp, synthetic construct; identical to SEQ ID NO: 23129
  misc_feature 1..80: note = Artificially Synthesized Probe
  source 1..80: mol_type = other DNA

SEQ ID NO: 46337 - DNA, 80 bp, synthetic construct
  misc_feature 1..80: note = Artificially Synthesized Probe
  source 1..80: mol_type = other DNA
agatgcctaacaatccacatgggagaaaaagtctagtacccggtggaggctctgtggcctcggaagaccctggttcatat

SEQ ID NO: 46338 - DNA, 80 bp, synthetic construct
  misc_feature 1..80: note = Artificially Synthesized Probe
  source 1..80: mol_type = other DNA
ccccagctgccaagcctgactagcccatggagatccccaccagccagcttctaccaacctttccagtattttctcccacc

SEQ ID NO: 46339 - DNA, 80 bp, synthetic construct
  misc_feature 1..80: note = Artificially Synthesized Probe
  source 1..80: mol_type = other DNA
gatgtctgtgctgtttgaatttttacagtgagcactattttttttttccttctttttaagatgggatctccctgtgttac

SEQ ID NO: 46340 - DNA, 80 bp, synthetic construct; identical to SEQ ID NO: 23130
  misc_feature 1..80: note = Artificially Synthesized Probe
  source 1..80: mol_type = other DNA

SEQ ID NO: 46341 - DNA, 80 bp, synthetic construct
  misc_feature 1..80: note = Artificially Synthesized Probe
  source 1..80: mol_type = other DNA
atgaacacatgccttggatctttcacactcatcatttcccacattgtattgtaagcccagtggacatatattatccccat

SEQ ID NO: 46342 - DNA, 80 bp, synthetic construct
  misc_feature 1..80: note = Artificially Synthesized Probe
  source 1..80: mol_type = other DNA
ggccgatcacctgaggtcaggagttcgagaccagcctggccaacatggtgaaaccccgtctctactaaaaatgcaaaaat

SEQ ID NO: 46343 - DNA, 80 bp, synthetic construct; identical to SEQ ID NO: 23131
  misc_feature 1..80: note = Artificially Synthesized Probe
  source 1..80: mol_type = other DNA

SEQ ID NO: 46344 - DNA, 80 bp, synthetic construct
  misc_feature 1..80: note = Artificially Synthesized Probe
  source 1..80: mol_type = other DNA
gagaccagcctaaccaacatgaagaaaccccatctctactaaaaatacaaaattagccggcatggtggcacctgcctgta

SEQ ID NO: 46345 - DNA, 80 bp, synthetic construct
  misc_feature 1..80: note = Artificially Synthesized Probe
  source 1..80: mol_type = other DNA
caaaaaaaaaaaaaaaaagtgatgtgccctgaaaagtgtgggcacctggggaagggagggtggcaaggggggatgaatga

SEQ ID NO: 46346 - DNA, 80 bp, synthetic construct
  misc_feature 1..80: note = Artificially Synthesized Probe
  source 1..80: mol_type = other DNA
gaactggggagcacaagggggagacaagggcaggaagggggcagggggcatgtagagagggaagactgtggggcagggag

SEQ ID NO: 46347 - DNA, 80 bp, synthetic construct
  misc_feature 1..80: note = Artificially Synthesized Probe
  source 1..80: mol_type = other DNA
atcttttttttttttttttttgagacagagtctcgcactgtcgcccaggttggagtgcagtggcgcgatctcggctcact

SEQ ID NO: 46348 - DNA, 80 bp, synthetic construct; identical to SEQ ID NO: 23132
  misc_feature 1..80: note = Artificially Synthesized Probe
  source 1..80: mol_type = other DNA

SEQ ID NO: 46349 - DNA, 80 bp, synthetic construct
  misc_feature 1..80: note = Artificially Synthesized Probe
  source 1..80: mol_type = other DNA
tcctgagctaaaataacctcctcactcttgtcccctgtgccagaccctttggggccatctcccatcctgatgcttgaatg

SEQ ID NO: 46350 - DNA, 80 bp, synthetic construct
  misc_feature 1..80: note = Artificially Synthesized Probe
  source 1..80: mol_type = other DNA
cctggtctacacaagttgtcgtctttgtcaaggcaaatttcttgtctgactccatctcctgaaagctgttgacgtctacc

SEQ ID NO: 46351 - DNA, 80 bp, synthetic construct
  misc_feature 1..80: note = Artificially Synthesized Probe
  source 1..80: mol_type = other DNA
ggacatttctccatgaaagcactggcttcacatagggtagcatttaaggatggcattaatgcccacactgggttagagat

SEQ ID NO: 46352 - DNA, 80 bp, synthetic construct; identical to SEQ ID NO: 23133
  misc_feature 1..80: note = Artificially Synthesized Probe
  source 1..80: mol_type = other DNA

SEQ ID NO: 46353 - DNA, 80 bp, synthetic construct
  misc_feature 1..80: note = Artificially Synthesized Probe
  source 1..80: mol_type = other DNA
gagagtcctgacaaatagttcttgctgtggggaatgaaaattactcttggtataagtctcttttccaacaacatcttctg

SEQ ID NO: 46354 - DNA, 80 bp, synthetic construct
  misc_feature 1..80: note = Artificially Synthesized Probe
  source 1..80: mol_type = other DNA
tttatctcccctccagactataaactccctgagggcagaagtcgtcttgtattcctttttcttctttttcttcttctgta

SEQ ID NO: 46355 - DNA, 80 bp, synthetic construct
  misc_feature 1..80: note = Artificially Synthesized Probe
  source 1..80: mol_type = other DNA
ccccttaaaggtgctagggacaaaggggaccacatgttagacccaggcacacagtccttctgtgcccagtttccaggctt

SEQ ID NO: 46356 - DNA, 80 bp, synthetic construct
  misc_feature 1..80: note = Artificially Synthesized Probe
  source 1..80: mol_type = other DNA
tagtgaggtctatggaaaacttattacggaccatggggtaatattcatttgcctcactttgacctagaatatccctcctt

SEQ ID NO: 46357 - DNA, 80 bp, synthetic construct
  misc_feature 1..80: note = Artificially Synthesized Probe
  source 1..80: mol_type = other DNA
gaaaagctagtagtaggggagggaatggggcctctccagctaaaatctctgagcagccagggcttctctacctgttaaaa

SEQ ID NO: 46358 - DNA, 80 bp, synthetic construct; identical to SEQ ID NO: 23134
  misc_feature 1..80: note = Artificially Synthesized Probe
  source 1..80: mol_type = other DNA

SEQ ID NO: 46359 - DNA, 80 bp, synthetic construct; identical to SEQ ID NO: 23114
  misc_feature 1..80: note = Artificially Synthesized Probe
  source 1..80: mol_type = other DNA

SEQ ID NO: 46360 - DNA, 80 bp, synthetic construct
  misc_feature 1..80: note = Artificially Synthesized Probe
  source 1..80: mol_type = other DNA
gcaggggaagtgggatacactaccatccggttcggtgacacagatgcggctacagtaccaagagtccttgcggaagaaag

SEQ ID NO: 46361 - DNA, 80 bp, synthetic construct
  misc_feature 1..80: note = Artificially Synthesized Probe
  source 1..80: mol_type = other DNA
agcctattcgggcatacaaacctgagctgctcccagcccataccgggcttttgtatgaattagaaaaagcttccccgggc

SEQ ID NO: 46362 - DNA, 80 bp, synthetic construct
  misc_feature 1..80: note = Artificially Synthesized Probe
  source 1..80: mol_type = other DNA
agctacttgggaggctgaggcaggagaatcgcttaaacccgggaggtggaggttgcagtgacctgagatcacaccactgc

SEQ ID NO: 46363 - DNA, 80 bp, synthetic construct; identical to SEQ ID NO: 23135
  misc_feature 1..80: note = Artificially Synthesized Probe
  source 1..80: mol_type = other DNA

SEQ ID NO: 46364 - DNA, 80 bp, synthetic construct
  misc_feature 1..80: note = Artificially Synthesized Probe
  source 1..80: mol_type = other DNA
ctcccgcctgcggcccctgcccctctgaggtcgcgcttccctgtctcctttgtactcaccgatccaggggcgaagtccct

SEQ ID NO: 46365 - DNA, 80 bp, synthetic construct
  misc_feature 1..80: note = Artificially Synthesized Probe
  source 1..80: mol_type = other DNA
ggccgcagcagcagccggcctggaggagaagagcggcacgccggacagggctgggtttctgggcggagggctaggggctg

SEQ ID NO: 46366 - DNA, 80 bp, synthetic construct
  misc_feature 1..80: note = Artificially Synthesized Probe
  source 1..80: mol_type = other DNA
gctggctcacccagatggatatcaggagcctgggttccactgcggagggagggatcagatgctgagatggagaaaaggag

SEQ ID NO: 46367 - DNA, 80 bp, synthetic construct; identical to SEQ ID NO: 23136
  misc_feature 1..80: note = Artificially Synthesized Probe
  source 1..80: mol_type = other DNA

SEQ ID NO: 46368 - DNA, 80 bp, synthetic construct
  misc_feature 1..80: note = Artificially Synthesized Probe
  source 1..80: mol_type = other DNA
tgctctggagtagggcaggtcaggaaagcgaaatacagcgccggcaaacagggtctgaatgccccgcgtggcattctttc

SEQ ID NO: 46369 - DNA, 80 bp, synthetic construct
  misc_feature 1..80: note = Artificially Synthesized Probe
  source 1..80: mol_type = other DNA
ggtacagtccctgcgtcgcagcctcggcgggggctctaagaacgggaggcagaaaaagctcaatcagcagcaggcgagct

SEQ ID NO: 46370 - DNA, 80 bp, synthetic construct
  misc_feature 1..80: note = Artificially Synthesized Probe
  source 1..80: mol_type = other DNA
ttggtttttgttttttttttttttttttttttgagacggagtctcgctctgtcacccaggctggagtgcagtggcgcgat

SEQ ID NO: 46371 - DNA, 80 bp, synthetic construct
  misc_feature 1..80: note = Artificially Synthesized Probe
  source 1..80: mol_type = other DNA
ccaaacctcaggtgatccacctgcctcagcctcccaaagtgctgagattacaggcgtgagccactacacccagcctgaaa

SEQ ID NO: 46372 - DNA, 80 bp, synthetic construct
  misc_feature 1..80: note = Artificially Synthesized Probe
  source 1..80: mol_type = other DNA
aggttgaaccaacctttcattcctttcattcctagaataaattagactttatcatggtgtgttattgttttattattcac

SEQ ID NO: 46373 - DNA, 80 bp, synthetic construct
  misc_feature 1..80: note = Artificially Synthesized Probe
  source 1..80: mol_type = other DNA
aatttaagcaatcttcccacctcagccacccgagtagctgggatcacagccatacgccatcatgcccggctagttttctt

SEQ ID NO: 46374 - DNA, 80 bp, synthetic construct; identical to SEQ ID NO: 23115
  misc_feature 1..80: note = Artificially Synthesized Probe
  source 1..80: mol_type = other DNA

SEQ ID NO: 46375 - DNA, 80 bp, synthetic construct
  misc_feature 1..80: note = Artificially Synthesized Probe
  source 1..80: mol_type = other DNA
cctgagatgggtggatcacctgaggtcaggagttcgagaccagcctgactaacatggagaaaccccatctctactaaaag

SEQ ID NO: 46376 - DNA, 80 bp, synthetic construct
  misc_feature 1..80: note = Artificially Synthesized Probe
  source 1..80: mol_type = other DNA
aaaaaaaaaaagtaaaaaatcttctctgcatttgtggttatacgcctttcccattcctaatgctgtgtatttatgttccc

SEQ ID NO: 46377 - DNA, 80 bp, synthetic construct
  misc_feature 1..80: note = Artificially Synthesized Probe
  source 1..80: mol_type = other DNA
accaaaaatcaaaaaattagccaggcgtggtgatgcctgtggcctcagctacaggagaggctggggtgagagaatttctt

SEQ ID NO: 46378 - DNA, 80 bp, synthetic construct; identical to SEQ ID NO: 23116
  misc_feature 1..80: note = Artificially Synthesized Probe
  source 1..80: mol_type = other DNA

SEQ ID NO: 46379 - DNA, 80 bp, synthetic construct
  misc_feature 1..80: note = Artificially Synthesized Probe
  source 1..80: mol_type = other DNA
agtggggcaagaagtgaagcggttccttcctttcggaggggctattgtgcattggactttggtcagcggcttttaacctg

SEQ ID NO: 46380 - DNA, 80 bp, synthetic construct
  misc_feature 1..80: note = Artificially Synthesized Probe
  source 1..80: mol_type = other DNA
tctgggaacttccagcacagcccagtcaccagctgattgcatgcaagtgtttcaccctagccagtaccctctggactgcc

SEQ ID NO: 46381 - DNA, 80 bp, synthetic construct
  misc_feature 1..80: note = Artificially Synthesized Probe
  source 1..80: mol_type = other DNA
taaagatggggtcttgttatgtggcccaggctgaagtgcagtggctattcacaggcatggtcatgcacactgcagccttg

SEQ ID NO: 46382 - DNA, 80 bp, synthetic construct; identical to SEQ ID NO: 23117
  misc_feature 1..80: note = Artificially Synthesized Probe
  source 1..80: mol_type = other DNA

SEQ ID NO: 46383 - DNA, 80 bp, synthetic construct
  misc_feature 1..80: note = Artificially Synthesized Probe
  source 1..80: mol_type = other DNA
gcaacctctgcctcccgggtttaagtgattctcttacctcagccttctgagtagctgggttacaggcatgcatcatcatg

SEQ ID NO: 46384 - DNA, 80 bp, synthetic construct
  misc_feature 1..80: note = Artificially Synthesized Probe
  source 1..80: mol_type = other DNA
gagctatgtatttggttcacattttaaaatcatgtacacaaaggatctgatttaataactgagacatgatggctcctcag

SEQ ID NO: 46385 - DNA, 80 bp, synthetic construct
  misc_feature 1..80: note = Artificially Synthesized Probe
  source 1..80: mol_type = other DNA
tagggacaggacccagagtcctgccattcccaggatataaggtagcaagttaaaacttgccaggaagatcaaatatgtgg

SEQ ID NO: 46386 - DNA, 80 bp, synthetic construct
  misc_feature 1..80: note = Artificially Synthesized Probe
  source 1..80: mol_type = other DNA
acacactaatacgcccgattaatttttgtgttttgggtagagacagggtttcaccatgtttcctaggctgctcttgaatt

SEQ ID NO: 46387 - DNA, 80 bp, synthetic construct; identical to SEQ ID NO: 23118
  misc_feature 1..80: note = Artificially Synthesized Probe
  source 1..80: mol_type = other DNA

SEQ ID NO: 46388 - DNA, 80 bp, synthetic construct
  misc_feature 1..80: note = Artificially Synthesized Probe
  source 1..80: mol_type = other DNA
tgggtggatcacaaggtcaggaattcgagaccagcctggccaacatggtgaaaccccatctctactaaaaatacaaaaat

SEQ ID NO: 46389 - DNA, 80 bp, synthetic construct
  misc_feature 1..80: note = Artificially Synthesized Probe
  source 1..80: mol_type = other DNA
aagccttgattggctaccctttgtcttctaaacgaacactgtgcagacaaagccctaccttcctctccgctctgctattt

SEQ ID NO: 46390 - DNA, 80 bp, synthetic construct
  misc_feature 1..80: note = Artificially Synthesized Probe
  source 1..80: mol_type = other DNA
ccctgctcttcctctctgtccaactcctacttgtcctgcagatttcaacttagatgtcactttctccaagaagccttcct

SEQ ID NO: 46391 - DNA, 80 bp, synthetic construct
  misc_feature 1..80: note = Artificially Synthesized Probe
  source 1..80: mol_type = other DNA
tgcttggacctttctttcttcttgggtggtatttgggggtggttagatggagacgctgttctcaatgaggggagggtcca

SEQ ID NO: 46392 - DNA, 80 bp, synthetic construct; identical to SEQ ID NO: 23119
  misc_feature 1..80: note = Artificially Synthesized Probe
  source 1..80: mol_type = other DNA

SEQ ID NO: 46393 - DNA, 80 bp, synthetic construct
  misc_feature 1..80: note = Artificially Synthesized Probe
  source 1..80: mol_type = other DNA
gataaatggatggacggacagattggtaactaaactggtatttgcttcagtctatgtcttttgggattatcattttctga

SEQ ID NO: 46394 - DNA, 80 bp, synthetic construct
  misc_feature 1..80: note = Artificially Synthesized Probe
  source 1..80: mol_type = other DNA
accaaccagaagaggaggaggttgttacagctgatgttcacttcagggagggtgtctaggtaagtcttcagggtggtggt

SEQ ID NO: 46395 - DNA, 80 bp, synthetic construct; identical to SEQ ID NO: 23120
  misc_feature 1..80: note = Artificially Synthesized Probe
  source 1..80: mol_type = other DNA

SEQ ID NO: 46396 - DNA, 80 bp, synthetic construct
  misc_feature 1..80: note = Artificially Synthesized Probe
  source 1..80: mol_type = other DNA
gccacacagagcaagctgctactccacctggctgggttctaaccatgagaggagcccctaagttcttctcccaaattaac

SEQ ID NO: 46397 - DNA, 80 bp, synthetic construct
  misc_feature 1..80: note = Artificially Synthesized Probe
  source 1..80: mol_type = other DNA
agtccattgctgagacctgatgtccccaggcctgccctttgtagcctcacctgcccactgttgacagcagcgtgctgggc

SEQ ID NO: 46398 - DNA, 80 bp, synthetic construct
  misc_feature 1..80: note = Artificially Synthesized Probe
  source 1..80: mol_type = other DNA
agtgaggaagtagggaacaccgagccatgactgtcttgtcgggctggttagggatggccaccaccaagatttgtggtctc

SEQ ID NO: 46399 - DNA, 80 bp, synthetic construct
  misc_feature 1..80: note = Artificially Synthesized Probe
  source 1..80: mol_type = other DNA
aatcctacccggttcaccaagatttgttcaagcacccagtatccaaccatcctctgctgggcttagcagcagagacccac

SEQ ID NO: 46400 - DNA, 80 bp, synthetic construct; identical to SEQ ID NO: 23121
  misc_feature 1..80: note = Artificially Synthesized Probe
  source 1..80: mol_type = other DNA

SEQ ID NO: 46401 - DNA, 80 bp, synthetic construct
  misc_feature 1..80: note = Artificially Synthesized Probe
  source 1..80: mol_type = other DNA
acctgacgtccccacctaagcatctacaccacctcacactgcacactggcaaggacaaatgcccgtcagattacgtcacc

SEQ ID NO: 46402 - DNA, 80 bp, synthetic construct
  misc_feature 1..80: note = Artificially Synthesized Probe
  source 1..80: mol_type = other DNA
agaggtcaggatgacattcagatgggatggggaataacggaggaccacatgtaacagcaaatccagtcaaggtggcttct

SEQ ID NO: 46403 - DNA, 80 bp, synthetic construct
  misc_feature 1..80: note = Artificially Synthesized Probe
  source 1..80: mol_type = other DNA
cattcagaattcagggcctgcacacttactatacctctgcctgctactcttgccccaattatcttcagaactagcacctc

SEQ ID NO: 46404 - DNA, 80 bp, synthetic construct; identical to SEQ ID NO: 23122
  misc_feature 1..80: note = Artificially Synthesized Probe
  source 1..80: mol_type = other DNA

SEQ ID NO: 46405 - DNA, 80 bp, synthetic construct
  misc_feature 1..80: note = Artificially Synthesized Probe
  source 1..80: mol_type = other DNA
attttttaaaaaggtaactggatgcagtgatgtggtggtgcatgcctgtagtcccagctaccagggaggctgaggcatga

SEQ ID NO: 46406 - DNA, 80 bp, synthetic construct
  misc_feature 1..80: note = Artificially Synthesized Probe
  source 1..80: mol_type = other DNA
attaatttatttatttctttacacataactgaaagtgatgttacagtacataagttatttacaactgtgcagtaatgtgt

SEQ ID NO: 46407 - DNA, 80 bp, synthetic construct
  misc_feature 1..80: note = Artificially Synthesized Probe
  source 1..80: mol_type = other DNA
ctgtctctacaaaaaacaaaaatcagtcaggcacggtggtgtgcttgtggtaccggctactccagaggctgaggtgggag

SEQ ID NO: 46408 - DNA, 80 bp, synthetic construct
  misc_feature 1..80: note = Artificially Synthesized Probe
  source 1..80: mol_type = other DNA
agggaaagaccgcagaggtcaccgtgggtgcagtgcccctcgtgctccctgggagcagagctcagagcttggcagggtgg

SEQ ID NO: 46409 - DNA, 80 bp, synthetic construct; identical to SEQ ID NO: 23244
  misc_feature 1..80: note = Artificially Synthesized Probe
  source 1..80: mol_type = other DNA

SEQ ID NO: 46410 - DNA, 80 bp, synthetic construct
  misc_feature 1..80: note = Artificially Synthesized Probe
  source 1..80: mol_type = other DNA
gcctcctgaatagctgggattacaggtgcctgctgccgtgcctggctaatttttgtgttttttttttttttttttttttt

SEQ ID NO: 46411 - DNA, 80 bp, synthetic construct
  misc_feature 1..80: note = Artificially Synthesized Probe
  source 1..80: mol_type = other DNA
cagcccagagcttcttttgtgcagcattttctcttgctctcaatttaatttcttgctctaagggaaaagacagcaataaa

SEQ ID NO: 46412 - DNA, 80 bp, synthetic construct; identical to SEQ ID NO: 23245
  misc_feature 1..80: note = Artificially Synthesized Probe
  source 1..80: mol_type = other DNA

SEQ ID NO: 46413 - DNA, 80 bp, synthetic construct
  misc_feature 1..80: note = Artificially Synthesized Probe
  source 1..80: mol_type = other DNA
acttgggagtcaaccaagatgtaagcagcagactgagagaccccccactggcacccattcctccacagcaagcccacagc

SEQ ID NO: 46414 - DNA, 80 bp, synthetic construct
  misc_feature 1..80: note = Artificially Synthesized Probe
  source 1..80: mol_type = other DNA
ggcagtgcagcgacctacacctaggtacgcccgagaaatgcccacacgtctccacgacactcgcaggtctgtgttcacag

SEQ ID NO: 46415 - DNA, 80 bp, synthetic construct
  misc_feature 1..80: note = Artificially Synthesized Probe
  source 1..80: mol_type = other DNA
aacagcacaaagctctgccgtatcagacacaaaggcccacagattgtccttcacatgaacgtctggaataggcagataaa

SEQ ID NO: 46416 - DNA, 80 bp, synthetic construct; identical to SEQ ID NO: 23246
  misc_feature 1..80: note = Artificially Synthesized Probe
  source 1..80: mol_type = other DNA

SEQ ID NO: 46417 - DNA, 80 bp, synthetic construct
  misc_feature 1..80: note = Artificially Synthesized Probe
  source 1..80: mol_type = other DNA
ttctttcttacatctcatgtcatctatggttatctcagaagaaaacaaacaaaaaccaaacacggggggcccagcccacc

SEQ ID NO: 46418 - DNA, 80 bp, synthetic construct
  misc_feature 1..80: note = Artificially Synthesized Probe
  source 1..80: mol_type = other DNA
gaggaagaatctcaggcatggcaggaagaagacacactgctgttcaactggaaaaggatcagactcagtaaaatgctctt

SEQ ID NO: 46419 - DNA, 80 bp, synthetic construct
  misc_feature 1..80: note = Artificially Synthesized Probe
  source 1..80: mol_type = other DNA
gcccaactatgtggcagctctgaggatgagaagatgtttctggaaggagctgtgagccacagtgcagtccagaaggggag

SEQ ID NO: 46420 - DNA, 80 bp, synthetic construct
  misc_feature 1..80: note = Artificially Synthesized Probe
  source 1..80: mol_type = other DNA
gcctcaggcggcctgggcccacagagccaacgcgtgtggagggcccctggctgtacctcacgccacctgcgagtttcagt

SEQ ID NO: 46421 - DNA, 80 bp, synthetic construct; identical to SEQ ID NO: 23247
  misc_feature 1..80: note = Artificially Synthesized Probe
  source 1..80: mol_type = other DNA

SEQ ID NO: 46422 - DNA, 80 bp, synthetic construct
  misc_feature 1..80: note = Artificially Synthesized Probe
  source 1..80: mol_type = other DNA
catgatgctggtcagaggcagccgaagatggcagcaacctccctgctgatgtcagccccagacgacccccaggccggctc

SEQ ID NO: 46423 - DNA, 80 bp, synthetic construct
  misc_feature 1..80: note = Artificially Synthesized Probe
  source 1..80: mol_type = other DNA
gctctcctagttgagaaaaatgtgtttggcaatgttatagctgccccgtctcatgacgaaggggacttgttcaggtgaga

SEQ ID NO: 46424 - DNA, 80 bp, synthetic construct
  misc_feature 1..80: note = Artificially Synthesized Probe
  source 1..80: mol_type = other DNA
ctgaagaaaggccacctacacagagaggcaggttcagcatgacaccactaggcaattctcacagaacagaaacaaataaa

SEQ ID NO: 46425 - DNA, 80 bp, synthetic construct; identical to SEQ ID NO: 23248
  misc_feature 1..80: note = Artificially Synthesized Probe
  source 1..80: mol_type = other DNA

SEQ ID NO: 46426 - DNA, 80 bp, synthetic construct
  misc_feature 1..80: note = Artificially Synthesized Probe
  source 1..80: mol_type = other DNA
caccccctcaggatgactagatggatatgagaggtggtctcgggtgtggagggcgatgcggactccctcctgcaccccct

SEQ ID NO: 46427 - DNA, 80 bp, synthetic construct
  misc_feature 1..80: note = Artificially Synthesized Probe
  source 1..80: mol_type = other DNA
tgactggcctgttacagaacaggaggctgctccatagaaatcagctggaagaaagaacccacagaggctctaaagatggg

SEQ ID NO: 46428 - DNA, 80 bp, synthetic construct
  misc_feature 1..80: note = Artificially Synthesized Probe
  source 1..80: mol_type = other DNA
aaggaccggcgcccactcccaggaggaaaagcagcggcagcgcacggcaagatggatcctgacactcagagctggggaaa

SEQ ID NO: 46429 - DNA, 80 bp, synthetic construct
  misc_feature 1..80: note = Artificially Synthesized Probe
  source 1..80: mol_type = other DNA
acagcacggacggggtcgacaaggcagtggcaggcggagtgagaggcggctcagggcaccagctgcccactgagtcactg

SEQ ID NO: 46430 - DNA, 80 bp, synthetic construct; identical to SEQ ID NO: 23249
  misc_feature 1..80: note = Artificially Synthesized Probe
  source 1..80: mol_type = other DNA

SEQ ID NO: 46431 - DNA, 80 bp, synthetic construct
  misc_feature 1..80: note = Artificially Synthesized Probe
  source 1..80: mol_type = other DNA
gaacgccacacgctggggctggatggaccctggggggcctgagaacaggagggcaggggaggccgtgcacagctcaggcc

SEQ ID NO: 46432 - DNA, 80 bp, synthetic construct
  misc_feature 1..80: note = Artificially Synthesized Probe
  source 1..80: mol_type = other DNA
gtccccgtttacggaccccggaagctcccgggtgacccagtccacctcagagagtatcacccacagaatgcaagctgact

SEQ ID NO: 46433 - DNA, 80 bp, synthetic construct
  misc_feature 1..80: note = Artificially Synthesized Probe
  source 1..80: mol_type = other DNA
aagcccttctgagggatgccctgtgggaatgacagaagcaatggaaaaggccttcacagatcatccaatgcaactggaaa

SEQ ID NO: 46434 - DNA, 80 bp, synthetic construct
  misc_feature 1..80: note = Artificially Synthesized Probe
  source 1..80: mol_type = other DNA
tacagatgcgcaggaagctcaattccaaaacacacgccttccaccgggggcaaccccaacagggagccaggccaccctct

SEQ ID NO: 46435 - DNA, 80 bp, synthetic construct; identical to SEQ ID NO: 23250
  misc_feature 1..80: note = Artificially Synthesized Probe
  source 1..80: mol_type = other DNA

SEQ ID NO: 46436 - DNA, 80 bp, synthetic construct
  misc_feature 1..80: note = Artificially Synthesized Probe
  source 1..80: mol_type = other DNA
cctgacagacgcctgtgtagggttacaagattggtagaaccttattcttacttttagttagagctgctattaattgcact

SEQ ID NO: 46437 - DNA, 80 bp, synthetic construct
  misc_feature 1..80: note = Artificially Synthesized Probe
  source 1..80: mol_type = other DNA
ccagagtggagacaacacgcaagtgtgaggcccgcagagaggggtgttaacccgagacaaaaatgatcaatagttttact

SEQ ID NO: 46438 - DNA, 80 bp, synthetic construct
  misc_feature 1..80: note = Artificially Synthesized Probe
  source 1..80: mol_type = other DNA
atcaatgagattttatgcttattgaacctagtaattctcttcacttaaaaaatattactagagagccgaggtcagcgagt

SEQ ID NO: 46439 - DNA, 80 bp, synthetic construct; identical to SEQ ID NO: 23251
  misc_feature 1..80: note = Artificially Synthesized Probe
  source 1..80: mol_type = other DNA

SEQ ID NO: 46440 - DNA, 80 bp, synthetic construct
  misc_feature 1..80: note = Artificially Synthesized Probe
  source 1..80: mol_type = other DNA
gagagcatcgggaaaagcacttcaactctgctcaggtaaggaccagaaaaaaacaggaactaaaacatgccagctgaaga

SEQ ID NO: 46441 - DNA, 80 bp, synthetic construct
  misc_feature 1..80: note = Artificially Synthesized Probe
  source 1..80: mol_type = other DNA
agagatttgtgaccatttggaaagaattacaaaccatacagcccaggaataccgaaaaaagtcagaaaaagtatgtcatg

SEQ ID NO: 46442 - DNA, 80 bp, synthetic construct; identical to SEQ ID NO: 23252
  misc_feature 1..80: note = Artificially Synthesized Probe
  source 1..80: mol_type = other DNA

SEQ ID NO: 46443 - DNA, 80 bp, synthetic construct; identical to SEQ ID NO: 23148
  misc_feature 1..80: note = Artificially Synthesized Probe
  source 1..80: mol_type = other DNA

SEQ ID NO: 46444 - DNA, 80 bp, synthetic construct
  misc_feature 1..80: note = Artificially Synthesized Probe
  source 1..80: mol_type = other DNA
gcggtagcatgggcctggagtcccagctactcagaaggctgagataaatggatcgtttgagcccgggagtccaagactgc

SEQ ID NO: 46445 - DNA, 80 bp, synthetic construct
  misc_feature 1..80: note = Artificially Synthesized Probe
  source 1..80: mol_type = other DNA
gcccaagcgattctcctgtctcagcctcccgagtgattacaggcgcccgccaccacgcccagttaatttttaaattttta

SEQ ID NO: 46446 - DNA, 80 bp, synthetic construct
  misc_feature 1..80: note = Artificially Synthesized Probe
  source 1..80: mol_type = other DNA
ttgcagttctcaagtctttttcattgtgtttactcaataccataaaccctaaatgacaccacagacccacacaaagtgcc

SEQ ID NO: 46447 - DNA, 80 bp, synthetic construct
  misc_feature 1..80: note = Artificially Synthesized Probe
  source 1..80: mol_type = other DNA
catccgtgaagccatcaccgcagctacagcaacaggcttgaaaatttttttgtgaaatacctttttatctcactgaaaac

SEQ ID NO: 46448 - DNA, 80 bp, synthetic construct; identical to SEQ ID NO: 23253
  misc_feature 1..80: note = Artificially Synthesized Probe
  source 1..80: mol_type = other DNA

SEQ ID NO: 46449 - DNA, 80 bp, synthetic construct
  misc_feature 1..80: note = Artificially Synthesized Probe
  source 1..80: mol_type = other DNA
gcaacttccacctgctgggttcaagctattctcctgcctcagcctcccaagtagctgggaccacaggcgcccaccaccat

SEQ ID NO: 46450 - DNA, 80 bp, synthetic construct
  misc_feature 1..80: note = Artificially Synthesized Probe
  source 1..80: mol_type = other DNA
tgaatgcaggtgaaactcccctattctggcgaaaaaaatcctgtaagaacatttgttagtaagaaagagaagcgagcact

SEQ ID NO: 46451 - DNA, 80 bp, synthetic construct; identical to SEQ ID NO: 23254
  misc_feature 1..80: note = Artificially Synthesized Probe
  source 1..80: mol_type = other DNA

SEQ ID NO: 46452 - DNA, 80 bp, synthetic construct
  misc_feature 1..80: note = Artificially Synthesized Probe
  source 1..80: mol_type = other DNA
acgtggtcttcctgtccccaaacacagcgtatctaattcagcctctagatcggggtcataggacctgtaaggctcattac

SEQ ID NO: 46453 - DNA, 80 bp, synthetic construct
  misc_feature 1..80: note = Artificially Synthesized Probe
  source 1..80: mol_type = other DNA
gtcaaacccaaaacaatgaactcctgctggagaaaactatgtctggaggttgtgtgtgattccacagggtttacaacagc

SEQ ID NO: 46454 - DNA, 80 bp, synthetic construct
  misc_feature 1..80: note = Artificially Synthesized Probe
  source 1..80: mol_type = other DNA
catttcaaaactcaagagctaagagataccacaccagagaaattagaagacaacctggtggtgatgagtgcttctgaccc

SEQ ID NO: 46455 - DNA, 80 bp, synthetic construct
  misc_feature 1..80: note = Artificially Synthesized Probe
  source 1..80: mol_type = other DNA
tcatcgtgcaggtatggaggctcagggaacccacgcgggtccaagggagaagggggcggggcaggggcaggagacacagg

SEQ ID NO: 46456 - DNA, 80 bp, synthetic construct; identical to SEQ ID NO: 23255
  misc_feature 1..80: note = Artificially Synthesized Probe
  source 1..80: mol_type = other DNA

SEQ ID NO: 46457 - DNA, 80 bp, synthetic construct
  misc_feature 1..80: note = Artificially Synthesized Probe
  source 1..80: mol_type = other DNA
taacaacaccttcttttctctagcttactttactgtaagaatacagtatacaatacatacgacatataaaatatgagggg

SEQ ID NO: 46458 - DNA, 80 bp, synthetic construct
  misc_feature 1..80: note = Artificially Synthesized Probe
  source 1..80: mol_type = other DNA
agcgggaaaaaaagtgctttgtatatgtcagtgttggattaaaatgtgttgactgtttatgtgatcaggaaggcactggt

SEQ ID NO: 46459 - DNA, 80 bp, synthetic construct
  misc_feature 1..80: note = Artificially Synthesized Probe
  source 1..80: mol_type = other DNA
caacaaaattaaatactcggggtataaaaggttatatgtggacttgactgtaccaggggtcagtgccactaatccccaag

SEQ ID NO: 46460 - DNA, 80 bp, synthetic construct
  misc_feature 1..80: note = Artificially Synthesized Probe
  source 1..80: mol_type = other DNA
taaagatattaagctaaatgtacgtgctataaggctacagatacagcaggctggaaatagtctggctgagaacacacaac

SEQ ID NO: 46461 - DNA, 80 bp, synthetic construct; identical to SEQ ID NO: 23256
  misc_feature 1..80: note = Artificially Synthesized Probe
  source 1..80: mol_type = other DNA

SEQ ID NO: 46462 - DNA, 80 bp, synthetic construct
  misc_feature 1..80: note = Artificially Synthesized Probe
  source 1..80: mol_type = other DNA
tcaagacgcctcctgcagtcgtagacaagccgggctgaggcattcactgtcgcttagaactgaaaacttagggtcgtcca

SEQ ID NO: 46463 - DNA, 80 bp, synthetic construct
  misc_feature 1..80: note = Artificially Synthesized Probe
  source 1..80: mol_type = other DNA
acaggctcatgcttttttaatcctatcttgaaaacttagggctttctcacaaagaccttgtgccagttcctaagtggaac

SEQ ID NO: 46464 - DNA, 80 bp, synthetic construct
  misc_feature 1..80: note = Artificially Synthesized Probe
  source 1..80: mol_type = other DNA
tccaggagtccaacttgaacatttttttaaagagacaaagtcttgctctgtcgcccagacagagctcagtcacggctcac

SEQ ID NO: 46465 - DNA, 80 bp, synthetic construct
  misc_feature 1..80: note = Artificially Synthesized Probe
  source 1..80: mol_type = other DNA
acggatttgcgaagaacgtgttggttcttgtgattcacaaagaacttggactgagtacaacgggcaaagaagatgtcagc

SEQ ID NO: 46466 - DNA, 80 bp, synthetic construct; identical to SEQ ID NO: 23257
  misc_feature 1..80: note = Artificially Synthesized Probe
  source 1..80: mol_type = other DNA

SEQ ID NO: 46467 - DNA, 80 bp, synthetic construct
  misc_feature 1..80: note = Artificially Synthesized Probe
  source 1..80: mol_type = other DNA
gggtctgcagaacagctgggcagcttccggcttttgcctccacagcagaagtggggctgtgtctcctcaggtggcagaag

SEQ ID NO: 46468 - DNA, 80 bp, synthetic construct
  misc_feature 1..80: note = Artificially Synthesized Probe
  source 1..80: mol_type = other DNA
acccacttcacaggttcaagcaattctcctgtctctgccccccgagtagttggtattacaggcatgtgccacgacgcctg

SEQ ID NO: 46469 - DNA, 80 bp, synthetic construct
  misc_feature 1..80: note = Artificially Synthesized Probe
  source 1..80: mol_type = other DNA
agccactgtgcccagcccaatgatgccattttaactccttttctcctaagtggattagagctccctgagccttcagatag

SEQ ID NO: 46470 - DNA, 80 bp, synthetic construct; identical to SEQ ID NO: 23258
  misc_feature 1..80: note = Artificially Synthesized Probe
  source 1..80: mol_type = other DNA

SEQ ID NO: 46471 - DNA, 80 bp, synthetic construct
  misc_feature 1..80: note = Artificially Synthesized Probe
  source 1..80: mol_type = other DNA
aatgcagctcagaggtcgtgggcagaggacagctgaggcaggcagacggagcacgcatccctgcttcccagtgtgggccc

SEQ ID NO: 46472 - DNA, 80 bp, synthetic construct
  misc_feature 1..80: note = Artificially Synthesized Probe
  source 1..80: mol_type = other DNA
gagtttgagaccagcccggccaacatggcgaaaccctatttctactgaaaattaaaaaataaaaataataagctgggcat

SEQ ID NO: 46473 - DNA, 80 bp, synthetic construct
  misc_feature 1..80: note = Artificially Synthesized Probe
  source 1..80: mol_type = other DNA
ggggtgagaagggcaagcaagagttcagactattagaagcaagacaccaagaaactcccagacaccaacacctaccagtt

SEQ ID NO: 46474 - DNA, 80 bp, synthetic construct; identical to SEQ ID NO: 23259
  misc_feature 1..80: note = Artificially Synthesized Probe
  source 1..80: mol_type = other DNA

SEQ ID NO: 46475 - DNA, 80 bp, synthetic construct
  misc_feature 1..80: note = Artificially Synthesized Probe
  source 1..80: mol_type = other DNA
attcagactggagaatacctgtcagcatatacacccctccttaccgaatttatacactttgtgaacaagtgttccccgag

SEQ ID NO: 46476 - DNA, 80 bp, synthetic construct
  misc_feature 1..80: note = Artificially Synthesized Probe
  source 1..80: mol_type = other DNA
gttctatcttcaatgtagtgtgtctgagatcgtttaactaaaagtgctttacaaaccgtgcaagcagccagcacgactgt

SEQ ID NO: 46477 - DNA, 80 bp, synthetic construct
  misc_feature 1..80: note = Artificially Synthesized Probe
  source 1..80: mol_type = other DNA
catcaaatggatttaaggccactgaccagggcaggagtgacccaagcaaagttaaaaggtgtctagaaattccttgagcc

SEQ ID NO: 46478 - DNA, 80 bp, synthetic construct
  misc_feature 1..80: note = Artificially Synthesized Probe
  source 1..80: mol_type = other DNA
ggctcactgccacctccgcctcccaggttcaagcaattctcctgcctcggcctcctgaatagctgggatcacaggtgcgt

SEQ ID NO: 46479 - DNA, 80 bp, synthetic construct
  misc_feature 1..80: note = Artificially Synthesized Probe
  source 1..80: mol_type = other DNA
taggagcccgtgtaggtgacgtactcggcgtagcactggggcgcctgcggcgtgatacagcacaggatcttgcgcttctc

SEQ ID NO: 46480 - DNA, 80 bp, synthetic construct
  misc_feature 1..80: note = Artificially Synthesized Probe
  source 1..80: mol_type = other DNA
ccaaagtgctgagattacaggcctgagccaccacacttggccgacaaataaacaattccccccctccagtagatggggtc

SEQ ID NO: 46481 - DNA, 80 bp, synthetic construct; identical to SEQ ID NO: 23260
  misc_feature 1..80: note = Artificially Synthesized Probe
  source 1..80: mol_type = other DNA

SEQ ID NO: 46482 - DNA, 80 bp, synthetic construct
  misc_feature 1..80: note = Artificially Synthesized Probe
  source 1..80: mol_type = other DNA
cgtgccaggcttgtaaagcgtaacttttaataaaggtagttattcaattatgccatgtcatatacctctctcgtctggat

SEQ ID NO: 46483 - DNA, 80 bp, synthetic construct
  misc_feature 1..80: note = Artificially Synthesized Probe
  source 1..80: mol_type = other DNA
tcagctggctgaaagctcaagataaccggctctgccagaagcactgccattaggatttccagggaacccctcctagccat

SEQ ID NO: 46484 - DNA, 80 bp, synthetic construct; identical to SEQ ID NO: 23261
  misc_feature 1..80: note = Artificially Synthesized Probe
  source 1..80: mol_type = other DNA

SEQ ID NO: 46485 - DNA, 80 bp, synthetic construct
  misc_feature 1..80: note = Artificially Synthesized Probe
  source 1..80: mol_type = other DNA
gctgtacccgctcctggcatctagttactacacgtggcggtagcgccagctgtgctacatgtctgtccccataaccgctg

SEQ ID NO: 46486 - DNA, 80 bp, synthetic construct
  misc_feature 1..80: note = Artificially Synthesized Probe
  source 1..80: mol_type = other DNA
gcagcagacgtccagcccctgcactcggaccagcaaagcagcagacggaaagccaagaaggcccaatgccaagagcccaa

SEQ ID NO: 46487 - DNA, 80 bp, synthetic construct
  misc_feature 1..80: note = Artificially Synthesized Probe
  source 1..80: mol_type = other DNA
agcaagataaagaatctgaaactgggaggctgaggcaggcaggtcacctgagctcagcagttcaagaccagcctggccaa

SEQ ID NO: 46488 - DNA, 80 bp, synthetic construct
  misc_feature 1..80: note = Artificially Synthesized Probe
  source 1..80: mol_type = other DNA
gggtgacagagcgagactccatctcaaaaacaaacaaaaacaaacatttctcaaggctgggcacggtggctcacgcctgt

SEQ ID NO: 46489 - DNA, 80 bp, synthetic construct
  misc_feature 1..80: note = Artificially Synthesized Probe
  source 1..80: mol_type = other DNA
gcagagcagaacgggatgggatgaaatgggacaggacaagatgggaatgggacgagatggaaatgggacaggatgggacg

SEQ ID NO: 46490 - DNA, 80 bp, synthetic construct; identical to SEQ ID NO: 23262
  misc_feature 1..80: note = Artificially Synthesized Probe
  source 1..80: mol_type = other DNA

SEQ ID NO: 46491 - DNA, 80 bp, synthetic construct; identical to SEQ ID NO: 23149
  misc_feature 1..80: note = Artificially Synthesized Probe
  source 1..80: mol_type = other DNA

SEQ ID NO: 46492 - DNA, 80 bp, synthetic construct
  misc_feature 1..80: note = Artificially Synthesized Probe
  source 1..80: mol_type = other DNA
ttttcttttttttttttttttttttttttttttgagactacgtttctgtcgcccaggctggagtgcagtggcacaatctc

SEQ ID NO: 46493 - DNA, 80 bp, synthetic construct
  misc_feature 1..80: note = Artificially Synthesized Probe
  source 1..80: mol_type = other DNA
acctcaggtcctccacctcccaaagtgctgggattacaggcgtgagccactgtacccggccttgagaaatggtgtttttt

SEQ ID NO: 46494 - DNA, 80 bp, synthetic construct
  misc_feature 1..80: note = Artificially Synthesized Probe
  source 1..80: mol_type = other DNA
ctgacctcaggtgatccacccgcttcagcctcccaaagtgctgggattacaggcgtgagccaccggacccagcagacaga

SEQ ID NO: 46495 - DNA, 80 bp, synthetic construct; identical to SEQ ID NO: 23263
  misc_feature 1..80: note = Artificially Synthesized Probe
  source 1..80: mol_type = other DNA

SEQ ID NO: 46496 - DNA, 80 bp, synthetic construct
  misc_feature 1..80: note = Artificially Synthesized Probe
  source 1..80: mol_type = other DNA
ttaggccagacaccagcggctcgccaagagctccatttgtgaccgttccctccgtaggcaacccggtggtccccactccc

SEQ ID NO: 46497 - DNA, 80 bp, synthetic construct
  misc_feature 1..80: note = Artificially Synthesized Probe
  source 1..80: mol_type = other DNA
aaggggatgccagggcttctcctattcctcagattttcgtttttaagtaaagtcattacagattaagaaaatacaatacc

SEQ ID NO: 46498 - DNA, 80 bp, synthetic construct; identical to SEQ ID NO: 23264
  misc_feature 1..80: note = Artificially Synthesized Probe
  source 1..80: mol_type = other DNA

SEQ ID NO: 46499 - DNA, 80 bp, synthetic construct
  misc_feature 1..80: note = Artificially Synthesized Probe
  source 1..80: mol_type = other DNA
gaaagggggctcttctctggaaggatggcagtggcccgcaacgaccttgcatcctgcaagatgcccgcggggaggagtgt

SEQ ID NO: 46500 - DNA, 80 bp, synthetic construct
  misc_feature 1..80: note = Artificially Synthesized Probe
  source 1..80: mol_type = other DNA
ccaaaatagcactgtagaatccttccagatggcacaatgacttgtaaacagcatctccataaagcagaagcctgaagact

SEQ ID NO: 46501 - DNA, 80 bp, synthetic construct
  misc_feature 1..80: note = Artificially Synthesized Probe
  source 1..80: mol_type = other DNA
tcgactgggtgctctggaggccgcccgtggtgacaggccagggctgctttcagacctcctggaaggtgcaggagccacag

SEQ ID NO: 46502 - DNA, 80 bp, synthetic construct; identical to SEQ ID NO: 23265
  misc_feature 1..80: note = Artificially Synthesized Probe
  source 1..80: mol_type = other DNA

SEQ ID NO: 46503 - DNA, 80 bp, synthetic construct
  misc_feature 1..80: note = Artificially Synthesized Probe
  source 1..80: mol_type = other DNA
tctgcggcttccggctggatgccgccaggagggccttcggctggggcggcggcacgggaggcctcagtgtcgtcctcggg

SEQ ID NO: 46504 - DNA, 80 bp, synthetic construct
  misc_feature 1..80: note = Artificially Synthesized Probe
  source 1..80: mol_type = other DNA
ggctgaggcgggcagatcacgaggtcaggagaccgagaccatcccggctaacacagtgaaaccccatctctactaaaaat

SEQ ID NO: 46505 - DNA, 80 bp, synthetic construct
  misc_feature 1..80: note = Artificially Synthesized Probe
  source 1..80: mol_type = other DNA
aaataaaaaaagaaaaagaaaaaaaaaaaaaaaaaagactgtgcttggccgggcacggtagcttgcgcctgtaatcccaa

SEQ ID NO: 46506 - DNA, 80 bp, synthetic construct
  misc_feature 1..80: note = Artificially Synthesized Probe
  source 1..80: mol_type = other DNA
caggagaatcgcttcttgaacccaggaggcagaggctgcagtgagccgagatggtgccaccgcactccagcctgggcaac

SEQ ID NO: 46507 - DNA, 80 bp, synthetic construct; identical to SEQ ID NO: 23266
  misc_feature 1..80: note = Artificially Synthesized Probe
  source 1..80: mol_type = other DNA

SEQ ID NO: 46508 - DNA, 80 bp, synthetic construct
  misc_feature 1..80: note = Artificially Synthesized Probe
  source 1..80: mol_type = other DNA
ctcctgacctcgtgatctgcccgccttggcctcccaaagtactgggattataagcgtgagccaccacgcccagcctccat

SEQ ID NO: 46509 - DNA, 80 bp, synthetic construct
  misc_feature 1..80: note = Artificially Synthesized Probe
  source 1..80: mol_type = other DNA
gcctgaatgctgcatgtgtgtctctgactgggaataaggatcactggaaaatatttgcacctgagaagatggggctgaag

SEQ ID NO: 46510 - DNA, 80 bp, synthetic construct
  misc_feature 1..80: note = Artificially Synthesized Probe
  source 1..80: mol_type = other DNA
agaaggttctggaaggcactgccacagcccggggaatgatgaacccaaaactgaaccaagctccagcctgtctcacaaat

SEQ ID NO: 46511 - DNA, 80 bp, synthetic construct; identical to SEQ ID NO: 23267
  misc_feature 1..80: note = Artificially Synthesized Probe
  source 1..80: mol_type = other DNA

SEQ ID NO: 46512 - DNA, 80 bp, synthetic construct
  misc_feature 1..80: note = Artificially Synthesized Probe
  source 1..80: mol_type = other DNA
ttggcttcctacagtgctgggattacaggcgtgagccaccacacccgacctacaactttgctgtaaacctaaaatttttc

SEQ ID NO: 46513 - DNA, 80 bp, synthetic construct
  misc_feature 1..80: note = Artificially Synthesized Probe
  source 1..80: mol_type = other DNA
gtcaaaaactaaaaacacggaagctaggaaaagacactggaatgaacctctagagatgaagatgacgctgtgtgagacga

SEQ ID NO: 46514 - DNA, 80 bp, synthetic construct
  misc_feature 1..80: note = Artificially Synthesized Probe
  source 1..80: mol_type = other DNA
tccggatccccacgggccctctcttccggcaccgtctccgcctccaccgcagcttctagagccacgtccagctttggctc

SEQ ID NO: 46515 - DNA, 80 bp, synthetic construct; identical to SEQ ID NO: 23268
  misc_feature 1..80: note = Artificially Synthesized Probe
  source 1..80: mol_type = other DNA

SEQ ID NO: 46516 - DNA, 80 bp, synthetic construct
  misc_feature 1..80: note = Artificially Synthesized Probe
  source 1..80: mol_type = other DNA
agagagaagatcactggggcgaacaccgagtgtgacggggagcaccgagagaaagaagatcactggggcgaacaccgagt

SEQ ID NO: 46517 - DNA, 80 bp, synthetic construct
  misc_feature 1..80: note = Artificially Synthesized Probe
  source 1..80: mol_type = other DNA
gagaagatcactggggcgaacaccgagtgtggcggggagcaccgagagagaagatcactggggcgaacaccgagtgtggc

SEQ ID NO: 46518 - DNA, 80 bp, synthetic construct
  misc_feature 1..80: note = Artificially Synthesized Probe
  source 1..80: mol_type = other DNA
aaaaatacgtgaaggaataaagcctgaacatttccacattttgatgaaaactgtaaactctagtgatccaagaagctcaa

SEQ ID NO: 46519 - DNA, 80 bp, synthetic construct
  misc_feature 1..80: note = Artificially Synthesized Probe
  source 1..80: mol_type = other DNA
cacccgtaagtcctgcagaaaaacacctgtgaaaatctttcaaaaacaatgctgctggtaatggttgtctaactctgggg

SEQ ID NO: 46520 - DNA, 80 bp, synthetic construct; identical to SEQ ID NO: 23269
  misc_feature 1..80: note = Artificially Synthesized Probe
  source 1..80: mol_type = other DNA

SEQ ID NO: 46521 - DNA, 80 bp, synthetic construct
  misc_feature 1..80: note = Artificially Synthesized Probe
  source 1..80: mol_type = other DNA
ctactcgggaggctgaagcaggagaatggtgtgaacccggaaggcggagcttgcagtgagccgagatcgcgccactgaac

SEQ ID NO: 46522 - DNA, 80 bp, synthetic construct
  misc_feature 1..80: note = Artificially Synthesized Probe
  source 1..80: mol_type = other DNA
tcttgcgggactcagtcctctccctggtggaccccgtgccgtctccaggtagacagtgtccaggctgcacgggattgtgg

SEQ ID NO: 46523 - DNA, 80 bp, synthetic construct
  misc_feature 1..80: note = Artificially Synthesized Probe
  source 1..80: mol_type = other DNA
taactgagcttagaaatacatgaagtcaagctacacagacagatacacaaaaccacaaactcagtaatgattttaatacc

SEQ ID NO: 46524 - DNA, 80 bp, synthetic construct
  misc_feature 1..80: note = Artificially Synthesized Probe
  source 1..80: mol_type = other DNA
attcttaaatatctgctagccttaataaagaaatcaatgtactttatgttcttagctcccacaatttagcctaaatatct

SEQ ID NO: 46525 - DNA, 80 bp, synthetic construct; identical to SEQ ID NO: 23150
  misc_feature 1..80: note = Artificially Synthesized Probe
  source 1..80: mol_type = other DNA

SEQ ID NO: 46526 - DNA, 80 bp, synthetic construct
  misc_feature 1..80: note = Artificially Synthesized Probe
  source 1..80: mol_type = other DNA
gccaatcgggacaaatacagaatgtgaggtcccgttccagccaatggaaaccggacacagcagttggtataaaaaaaccg

SEQ ID NO: 46527 - DNA, 80 bp, synthetic construct
  misc_feature 1..80: note = Artificially Synthesized Probe
  source 1..80: mol_type = other DNA
agcaagcatttcaaacacactgatggcccattcctgaaggatcacaagaagctaaaattcattacctgtataagggagtt

SEQ ID NO: 46528 - DNA, 80 bp, synthetic construct
  misc_feature 1..80: note = Artificially Synthesized Probe
  source 1..80: mol_type = other DNA
ttccatgagcagcactgtgatgccacgctgagatgctccagggtccatgcagttcaagaacatggtcgtgatgtgttgaa

SEQ ID NO: 46529 - DNA, 80 bp, synthetic construct
  misc_feature 1..80: note = Artificially Synthesized Probe
  source 1..80: mol_type = other DNA
tgcacttaagcaaactcgtggataggaagtcccccaaggctgcttttctctaaacactaggttaggaaaaaagaaaactg

SEQ ID NO: 46530 - DNA, 80 bp, synthetic construct; identical to SEQ ID NO: 23271
  misc_feature 1..80: note = Artificially Synthesized Probe
  source 1..80: mol_type = other DNA

SEQ ID NO: 46531 - DNA, 80 bp, synthetic construct
  misc_feature 1..80: note = Artificially Synthesized Probe
  source 1..80: mol_type = other DNA
cacgacgccagcctcattcacctgttcccacaggtgacatggctcccaccctgggaccaagagagtccactgtacacatt

SEQ ID NO: 46532 - DNA, 80 bp, synthetic construct
  misc_feature 1..80: note = Artificially Synthesized Probe
  source 1..80: mol_type = other DNA
cacctcagtcccccatgtagctgggattacaggcgtgtgccaccatatccagctgcttttttttttttttttttgtattt

SEQ ID NO: 46533 - DNA, 80 bp, synthetic construct
  misc_feature 1..80: note = Artificially Synthesized Probe
  source 1..80: mol_type = other DNA
ctcagaggatttgtaagggttagaaggggaagcagccgggccgatggaaacatgcaggaactatcccagctgggcctatt

SEQ ID NO: 46534 - DNA, 80 bp, synthetic construct; identical to SEQ ID NO: 23272
  misc_feature 1..80: note = Artificially Synthesized Probe
  source 1..80: mol_type = other DNA

SEQ ID NO: 46535 - DNA, 80 bp, synthetic construct
  misc_feature 1..80: note = Artificially Synthesized Probe
  source 1..80: mol_type = other DNA
atgtcctcctgaggtcaacgggcaggtggcaggagcctctgacctgcttccctccacgacatgggcacgttctgggactg

SEQ ID NO: 46536 - DNA, 80 bp, synthetic construct
  misc_feature 1..80: note = Artificially Synthesized Probe
  source 1..80: mol_type = other DNA
aaggcgggcagatcacctgaggtcgggagttcaagaccagactggccaacatggtgaaaccctgtctctattaaaataca

SEQ ID NO: 46537 - DNA, 80 bp, synthetic construct
  misc_feature 1..80: note = Artificially Synthesized Probe
  source 1..80: mol_type = other DNA
ggggcttccggaagtgacttgcagttgctgaagaaggactccagcccggagggaggggcgtagggagccgcctctgaggt

SEQ ID NO: 46538 - DNA, 80 bp, synthetic construct
  misc_feature 1..80: note = Artificially Synthesized Probe
  source 1..80: mol_type = other DNA
aaaaaaaacaaacaaccttttgtggaaaaacgagtgtattttccactcctcgtctcaataaaacctgcgaagactgcttt

SEQ ID NO: 46539 - DNA, 80 bp, synthetic construct
  misc_feature 1..80: note = Artificially Synthesized Probe
  source 1..80: mol_type = other DNA
ggatgctgtaaaattacacacagccatctccataatatatggccccgagagttacacacatgaggttattgagttatttt

SEQ ID NO: 46540 - DNA, 80 bp, synthetic construct; identical to SEQ ID NO: 23273
  misc_feature 1..80: note = Artificially Synthesized Probe
  source 1..80: mol_type = other DNA

SEQ ID NO: 46541 - DNA, 80 bp, synthetic construct
  misc_feature 1..80: note = Artificially Synthesized Probe
  source 1..80: mol_type = other DNA
atccaagagactcctggtctaaaaagttagaggcttggtcaattttaaggcagcgtcttaacagaaagaattatgcaagc

SEQ ID NO: 46542 - DNA, 80 bp, synthetic construct
  misc_feature 1..80: note = Artificially Synthesized Probe
  source 1..80: mol_type = other DNA
cgcttgctactggcatgcaaagatcaaagagaggagacagcgctgggatgccagcccacggctgggacacgtgctgcttc

SEQ ID NO: 46543 - DNA, 80 bp, synthetic construct; identical to SEQ ID NO: 23274
  misc_feature 1..80: note = Artificially Synthesized Probe
  source 1..80: mol_type = other DNA

SEQ ID NO: 46544 - DNA, 80 bp, synthetic construct
  misc_feature 1..80: note = Artificially Synthesized Probe
  source 1..80: mol_type = other DNA
actacgtcccgagcacgcagcattcatcttgtgcatatccttcatgacaaaacaagtatgcacaaagcactgctgccgca

SEQ ID NO: 46545 - DNA, 80 bp, synthetic construct
  misc_feature 1..80: note = Artificially Synthesized Probe
  source 1..80: mol_type = other DNA
tgttgtcaatgtgaaaattcaagctttcaaagataagaattttggaaaactccaagagcagacagcttctgaagaactaa

SEQ ID NO: 46546 - DNA, 80 bp, synthetic construct
  misc_feature 1..80: note = Artificially Synthesized Probe
  source 1..80: mol_type = other DNA
cacacacacgcgacggagccgcactcgccgcaagagagaccaaagggaagccctgagactcccctgctgctggaaacgct

SEQ ID NO: 46547 - DNA, 80 bp, synthetic construct; identical to SEQ ID NO: 23275
  misc_feature 1..80: note = Artificially Synthesized Probe
  source 1..80: mol_type = other DNA

SEQ ID NO: 46548 - DNA, 80 bp, synthetic construct
  misc_feature 1..80: note = Artificially Synthesized Probe
  source 1..80: mol_type = other DNA
caccaccacacccggctaatttttatatttttagtaaagacggggtttcaccatgttggtcaggctggtctcaaactcct

SEQ ID NO: 46549 - DNA, 80 bp, synthetic construct
  misc_feature 1..80: note = Artificially Synthesized Probe
  source 1..80: mol_type = other DNA
gggcagaaacgctttggggactcggggaatctctgtggagacttcagcaggaggtccgagcccacaggccagctcacagg

SEQ ID NO: 46550 - DNA, 80 bp, synthetic construct
  misc_feature 1..80: note = Artificially Synthesized Probe
  source 1..80: mol_type = other DNA
ctgttgttaattggaattggtatacagacattttccaatccttcaggtttcaactggcaaatgccagcagacatacccac

SEQ ID NO: 46551 - DNA, 80 bp, synthetic construct
  misc_feature 1..80: note = Artificially Synthesized Probe
  source 1..80: mol_type = other DNA
ccaactccacggattccaccgtaagtgctgtcaactggatgcgcatttacaaaatctgagttttctcaaagaagctgaag

SEQ ID NO: 46552 - DNA, 80 bp, synthetic construct; identical to SEQ ID NO: 23276
  misc_feature 1..80: note = Artificially Synthesized Probe
  source 1..80: mol_type = other DNA

SEQ ID NO: 46553 - DNA, 80 bp, synthetic construct
  misc_feature 1..80: note = Artificially Synthesized Probe
  source 1..80: mol_type = other DNA
ggcagcaggcggtggccagggacaagcggcccgtgccacgtctcccagctagctcaccaccagcacacaaaccttcgtcc

SEQ ID NO: 46554 - DNA, 80 bp, synthetic construct
  misc_feature 1..80: note = Artificially Synthesized Probe
  source 1..80: mol_type = other DNA
aataaaattaaattgtgtttggagaatctggtgacgctgtgaaacagctgaagattacctgtaacctcagcgctctggga

SEQ ID NO: 46555 - DNA, 80 bp, synthetic construct
  misc_feature 1..80: note = Artificially Synthesized Probe
  source 1..80: mol_type = other DNA
cctgtgacctcagcactctgggaggctgacatgagggacactgtgaaacagctgaagactacctgtgacctcagcactct

SEQ ID NO: 46556 - DNA, 80 bp, synthetic construct
  misc_feature 1..80: note = Artificially Synthesized Probe
  source 1..80: mol_type = other DNA
gagaccagcctgggcaacacagggagaccccatctcttaaaaaaaatttttttttaacaaaacaataaaaaaacaaaaat

SEQ ID NO: 46557 - DNA, 80 bp, synthetic construct; identical to SEQ ID NO: 23277
  misc_feature 1..80: note = Artificially Synthesized Probe
  source 1..80: mol_type = other DNA

SEQ ID NO: 46558 - DNA, 80 bp, synthetic construct
  misc_feature 1..80: note = Artificially Synthesized Probe
  source 1..80: mol_type = other DNA
ttttaaaattgttaacaagctccatgctctgtgagacgcagtttccaagcaaggcattttcagtgttgcctcaacagaaa

SEQ ID NO: 46559 - DNA, 80 bp, synthetic construct
  misc_feature 1..80: note = Artificially Synthesized Probe
  source 1..80: mol_type = other DNA
ttcttcatttatccgtaagagaagcccagagagacaactacaagtgacccaagacactcataggtgagtggattaaacac

SEQ ID NO: 46560 - DNA, 80 bp, synthetic construct
  misc_feature 1..80: note = Artificially Synthesized Probe
  source 1..80: mol_type = other DNA
tcctcggaggtgtccaggtccgggggaagggccccttcgagggaaggaaccagcagctcggctctgggggaaggggaagg

SEQ ID NO: 46561 - DNA, 80 bp, synthetic construct
  misc_feature 1..80: note = Artificially Synthesized Probe
  source 1..80: mol_type = other DNA
aaagatcagcgaatgccaggggctggggagagggagggacggagggatgtgcagcaggaacacgggggacctggggcagt

SEQ ID NO: 46562 - DNA, 80 bp, synthetic construct; identical to SEQ ID NO: 23278
  misc_feature 1..80: note = Artificially Synthesized Probe
  source 1..80: mol_type = other DNA

SEQ ID NO: 46563 - DNA, 80 bp, synthetic construct
  misc_feature 1..80: note = Artificially Synthesized Probe
  source 1..80: mol_type = other DNA
agagggcagcctctgccccaggcttcctgcgctgggggccggtcatctgctgccccaggcttccctgcgctggaggccgg

SEQ ID NO: 46564 - DNA, 80 bp, synthetic construct
  misc_feature 1..80: note = Artificially Synthesized Probe
  source 1..80: mol_type = other DNA
tgccccaggcttccctgcgctgggggacggtcatctgctgccccaggcttccctgcgctgggggacggtcatctgctgcc

SEQ ID NO: 46565 - DNA, 80 bp, synthetic construct
  misc_feature 1..80: note = Artificially Synthesized Probe
  source 1..80: mol_type = other DNA
ccctgcgctgggggacggtcatctgctgccccaggcttccctgcgctgggggccggtcatctgctgccccaggcttccct

SEQ ID NO: 46566 - DNA, 80 bp, synthetic construct
  misc_feature 1..80: note = Artificially Synthesized Probe
  source 1..80: mol_type = other DNA
ggccggtcatctgctgccccaggcttccctgcgctgggggccggtcatctgctgccccaggcttccctgcgctgggggat

SEQ ID NO: 46567 - DNA, 80 bp, synthetic construct; identical to SEQ ID NO: 23279
  misc_feature 1..80: note = Artificially Synthesized Probe
  source 1..80: mol_type = other DNA

SEQ ID NO: 46568 - DNA, 80 bp, synthetic construct
  misc_feature 1..80: note = Artificially Synthesized Probe
  source 1..80: mol_type = other DNA
gtgatctcgactcattgcaacctctgcctcccaagttcaagcaattctcctgcctcagccttccaagacggccgccacca

SEQ ID NO: 46569 - DNA, 80 bp, synthetic construct
  misc_feature 1..80: note = Artificially Synthesized Probe
  source 1..80: mol_type = other DNA
atgcagccactaaatatcacgctgggataatgggaaattaatgctaagctttaaaatgcagaatgtgaagccttatatcc

SEQ ID NO: 46570 - DNA, 80 bp, synthetic construct
  misc_feature 1..80: note = Artificially Synthesized Probe
  source 1..80: mol_type = other DNA
gaagtcctagccccccaacaccacagacgatggccttcctgggaaacatggtctttgcagatgatccaggtgagatcgct

SEQ ID NO: 46571 - DNA, 80 bp, synthetic construct; identical to SEQ ID NO: 23151
  misc_feature 1..80: note = Artificially Synthesized Probe
  source 1..80: mol_type = other DNA

SEQ ID NO: 46572 - DNA, 80 bp, synthetic construct; identical to SEQ ID NO: 23280
  misc_feature 1..80: note = Artificially Synthesized Probe
  source 1..80: mol_type = other DNA

SEQ ID NO: 46573 - DNA, 80 bp, synthetic construct
  misc_feature 1..80: note = Artificially Synthesized Probe
  source 1..80: mol_type = other DNA
gaaatcctgacttttccataaggcactgaatctgtgtaacttttagagtaaggaggacgacctacagttcactgcatgaa

SEQ ID NO: 46574 - DNA, 80 bp, synthetic construct
  misc_feature 1..80: note = Artificially Synthesized Probe
  source 1..80: mol_type = other DNA
gtatctgggattgagcgcttatttaaatcggtaggcacatcaatttaaatttaggtagtagctcagcctgtacctaacac

SEQ ID NO: 46575 - DNA, 80 bp, synthetic construct; identical to SEQ ID NO: 23281
  misc_feature 1..80: note = Artificially Synthesized Probe
  source 1..80: mol_type = other DNA

SEQ ID NO: 46576 - DNA, 80 bp, synthetic construct
  misc_feature 1..80: note = Artificially Synthesized Probe
  source 1..80: mol_type = other DNA
gggaggaggtgggcggggtggggcctgcagaccctccaggctctcccgggggaaggagccccatcagggccagcactgcg

SEQ ID NO: 46577 - DNA, 80 bp, synthetic construct
  misc_feature 1..80: note = Artificially Synthesized Probe
  source 1..80: mol_type = other DNA
acgctgctgtcatcactgcacgtggacacatcatcaacctctcagcgtgacgtgccctcgtgctttcaggtaaaacacta

SEQ ID NO: 46578 - DNA, 80 bp, synthetic construct
  misc_feature 1..80: note = Artificially Synthesized Probe
  source 1..80: mol_type = other DNA
cctgaccggcccctcctgactggccccagcaccgcgtggaagaacatggaggagctcatctgtctgaggataggaagcag

SEQ ID NO: 46579 - DNA, 80 bp, synthetic construct; identical to SEQ ID NO: 23282
  misc_feature 1..80: note = Artificially Synthesized Probe
  source 1..80: mol_type = other DNA

SEQ ID NO: 46580 - DNA, 80 bp, synthetic construct
  misc_feature 1..80: note = Artificially Synthesized Probe
  source 1..80: mol_type = other DNA
tggtgacatgcgtctggagtcccagctactcggaaggctgaggaaggggcatcatttcagtccaagagttgaggctgcag

SEQ ID NO: 46581 - DNA, 80 bp, synthetic construct
  misc_feature 1..80: note = Artificially Synthesized Probe
  source 1..80: mol_type = other DNA
tataactaaaattccaaactacaggaaactctcagagcaaacgctgcatcacataagctgctagcccggcacatgattgt

SEQ ID NO: 46582 - DNA, 80 bp, synthetic construct
  misc_feature 1..80: note = Artificially Synthesized Probe
  source 1..80: mol_type = other DNA
caggcgctggtgggagcggtgggcacgggcgtggagtgctgcgagtcggcgcagtcgaacacgaggtccgcgtagtcatc

SEQ ID NO: 46583 - DNA, 80 bp, synthetic construct
  misc_feature 1..80: note = Artificially Synthesized Probe
  source 1..80: mol_type = other DNA
taaatcaccagcaaagactctgagaacatcaacatctgtgtaactaaggaaaatggaagtgcaggaaggaatacattttt

SEQ ID NO: 46584 - DNA, 80 bp, synthetic construct; identical to SEQ ID NO: 23283
  misc_feature 1..80: note = Artificially Synthesized Probe
  source 1..80: mol_type = other DNA

SEQ ID NO: 46585 - DNA, 80 bp, synthetic construct
  misc_feature 1..80: note = Artificially Synthesized Probe
  source 1..80: mol_type = other DNA
atgtgctcagccacgcctacctcgcaaggtcattctgaggatgaaggcatcatggatccaaatgccaccttgacgctgaa

SEQ ID NO: 46586 - DNA, 80 bp, synthetic construct
  misc_feature 1..80: note = Artificially Synthesized Probe
  source 1..80: mol_type = other DNA
tgtagtttgttgttttaaataaaactgaaatcagacttccaaaaagaaacatctaaaaacttctcctctcccatcccacc

SEQ ID NO: 46587 - DNA, 80 bp, synthetic construct
  misc_feature 1..80: note = Artificially Synthesized Probe
  source 1..80: mol_type = other DNA
aaaaaataaataaataaaaaatcttgtggaaggaggtaccacatatgcggtctgttgtggaacaaaatgccgttacgtgg

SEQ ID NO: 46588 - DNA, 80 bp, synthetic construct
  misc_feature 1..80: note = Artificially Synthesized Probe
  source 1..80: mol_type = other DNA
cacctcggcttccccaactagctgtgactacaggcacgtgccaccacacctggctcatttttttttttttttttttttgg

SEQ ID NO: 46589 - DNA, 80 bp, synthetic construct; identical to SEQ ID NO: 23284
  misc_feature 1..80: note = Artificially Synthesized Probe
  source 1..80: mol_type = other DNA

SEQ ID NO: 46590 - DNA, 80 bp, synthetic construct
  misc_feature 1..80: note = Artificially Synthesized Probe
  source 1..80: mol_type = other DNA
gtctggccaacatggtaaagccccgtctctactaaaaagacaaaaacttaccgggcgtggtggcacacacctgcaatctc

SEQ ID NO: 46591 - DNA, 80 bp, synthetic construct
  misc_feature 1..80: note = Artificially Synthesized Probe
  source 1..80: mol_type = other DNA
cctaagtctggttatgccctttgttttctatttcttaataataaaaacacagcaaggggtttggtgctgtgagcaagggg

SEQ ID NO: 46592 - DNA, 80 bp, synthetic construct
  misc_feature 1..80: note = Artificially Synthesized Probe
  source 1..80: mol_type = other DNA
ccggcgcgctctgagacttgcggtcagtcctagaggagaagcagcagctgctgagaaggccgcacgggcaaaggagccac

SEQ ID NO: 46593 - DNA, 80 bp, synthetic construct
  misc_feature 1..80: note = Artificially Synthesized Probe
  source 1..80: mol_type = other DNA
gagtctgcacctgatgctgggtgtagcttattttccgcggcaggtggaataggagtcgactctttgagctttttgtcttt

SEQ ID NO: 46594 - DNA, 80 bp, synthetic construct; identical to SEQ ID NO: 23285
  misc_feature 1..80: note = Artificially Synthesized Probe
  source 1..80: mol_type = other DNA

SEQ ID NO: 46595 - DNA, 80 bp, synthetic construct
  misc_feature 1..80: note = Artificially Synthesized Probe
  source 1..80: mol_type = other DNA
ggaatatggaaggggaaaaggaaaagggaacaggagacaaatcagcaacattaagaacatcaggccggacgtggtggctc

SEQ ID NO: 46596 - DNA, 80 bp, synthetic construct
  misc_feature 1..80: note = Artificially Synthesized Probe
  source 1..80: mol_type = other DNA
aattagccggacatggtggcaggcatctgtaaccccaggtactcgggaggctgaggctggtgaagcccaggtactcggga

SEQ ID NO: 46597 - DNA, 80 bp, synthetic construct; identical to SEQ ID NO: 23286
  misc_feature 1..80: note = Artificially Synthesized Probe
  source 1..80: mol_type = other DNA

SEQ ID NO: 46598 - DNA, 80 bp, synthetic construct
  misc_feature 1..80: note = Artificially Synthesized Probe
  source 1..80: mol_type = other DNA
cacgttcgcctcgtcagggctgttgcacgacagccgcacacacctaagaaacaaactccttctgggccgcgcaacatggc

SEQ ID NO: 46599 - DNA, 80 bp, synthetic construct; identical to SEQ ID NO: 23138
  misc_feature 1..80: note = Artificially Synthesized Probe
  source 1..80: mol_type = other DNA

SEQ ID NO: 46600 - DNA, 80 bp, synthetic construct
  misc_feature 1..80: note = Artificially Synthesized Probe
  source 1..80: mol_type = other DNA
tggtgtgcccctgcagtcccagctacttgagaggctgaagcaggaggatcgcttgagcccaggaggcagaggctgcaatg

SEQ ID NO: 46601 - DNA, 80 bp, synthetic construct
  misc_feature 1..80: note = Artificially Synthesized Probe
  source 1..80: mol_type = other DNA
ttttaagtaaagaacaaacacatctatagcgaagtgtggaaaatcactgtggtcactccccagctacagctgccatgcag

SEQ ID NO: 46602 - DNA, 80 bp, synthetic construct; identical to SEQ ID NO: 23287
  misc_feature 1..80: note = Artificially Synthesized Probe
  source 1..80: mol_type = other DNA

SEQ ID NO: 46603 - DNA, 80 bp, synthetic construct
  misc_feature 1..80: note = Artificially Synthesized Probe
  source 1..80: mol_type = other DNA
cgttagaaacggcctcaccctgaccctgagcgtggtggcaagtggccgacccagattccctcaccctgctctggcacacc

SEQ ID NO: 46604 - DNA, 80 bp, synthetic construct
  misc_feature 1..80: note = Artificially Synthesized Probe
  source 1..80: mol_type = other DNA
ctccatttgcttcatcctctccttgtgccgcttgtggcgctcctcgatctccaggtccttctgggacagcatcctctcga

SEQ ID NO: 46605 - DNA, 80 bp, synthetic construct
  misc_feature 1..80: note = Artificially Synthesized Probe
  source 1..80: mol_type = other DNA
ctagagtccagcgctaatacaaccacctctggcctcagagtccccgggactcactcactcacttcactgatcagccgtgg

SEQ ID NO: 46606 - DNA, 80 bp, synthetic construct
  misc_feature 1..80: note = Artificially Synthesized Probe
  source 1..80: mol_type = other DNA
ttactgggaaatacaagtgaacaggccgctgtggagtgcggtttctaaaagtaggaggaatacagaaaaggcggccccaa

SEQ ID NO: 46607 - DNA, 80 bp, synthetic construct; identical to SEQ ID NO: 23288
  misc_feature 1..80: note = Artificially Synthesized Probe
  source 1..80: mol_type = other DNA

SEQ ID NO: 46608 - DNA, 80 bp, synthetic construct
  misc_feature 1..80: note = Artificially Synthesized Probe
  source 1..80: mol_type = other DNA
gccattcttcctccgtgggttgcagccagggtttcctgtgggtcgtcttgtgcacgtcacggccctgcccacagcataaa

SEQ ID NO: 46609 - DNA, 80 bp, synthetic construct
  misc_feature 1..80: note = Artificially Synthesized Probe
  source 1..80: mol_type = other DNA
aagatcctgttgtaccaaaacacacacacacacgaaaactggttgtcgtgttactaaaagtttccattacaacactgaag

SEQ ID NO: 46610 - DNA, 80 bp, synthetic construct
  misc_feature 1..80: note = Artificially Synthesized Probe
  source 1..80: mol_type = other DNA
tgtcgcccaggctggagtgtagtggcacaatctcaactcactgcaagctccgcctcccgggttcacgccattctcctgcc

SEQ ID NO: 46611 - DNA, 80 bp, synthetic construct; identical to SEQ ID NO: 23289
  misc_feature 1..80: note = Artificially Synthesized Probe
  source 1..80: mol_type = other DNA

SEQ ID NO: 46612 - DNA, 80 bp, synthetic construct
  misc_feature 1..80: note = Artificially Synthesized Probe
  source 1..80: mol_type = other DNA
aataaattttaaacaaaggctgactgtaccaaggaaatggagataataaacagaaaaagactcatggacactggtgttgg

SEQ ID NO: 46613 - DNA, 80 bp, synthetic construct
  misc_feature 1..80: note = Artificially Synthesized Probe
  source 1..80: mol_type = other DNA
ccttttctttctctgcaccgtccttgaatttctccttcagtttggcatcgccgagcctcgggccctcgtccctggacttg

SEQ ID NO: 46614 - DNA, 80 bp, synthetic construct
  misc_feature 1..80: note = Artificially Synthesized Probe
  source 1..80: mol_type = other DNA
aggtccctaaagcagttgctatcctgctgacgtgctgacaccatcagatatgaacaagaatcccagttttatttttccta

SEQ ID NO: 46615 - DNA, 80 bp, synthetic construct
  misc_feature 1..80: note = Artificially Synthesized Probe
  source 1..80: mol_type = other DNA
gtggccaactgtggccagggcaagacagaaaccacatgtgcgtgaacacgtgttctacacagagccttatgtactgggcc

SEQ ID NO: 46616 - DNA, 80 bp, synthetic construct
  misc_feature 1..80: note = Artificially Synthesized Probe
  source 1..80: mol_type = other DNA
caggaggcaggttcctgaagctgcctgcagagagaagggtggccagggcagaaggcagcagcacaggggctcgggcccac

SEQ ID NO: 46617 - DNA, 80 bp, synthetic construct; identical to SEQ ID NO: 23290
  misc_feature 1..80: note = Artificially Synthesized Probe
  source 1..80: mol_type = other DNA

SEQ ID NO: 46618 - DNA, 80 bp, synthetic construct
  misc_feature 1..80: note = Artificially Synthesized Probe
  source 1..80: mol_type = other DNA
aggcacacacaaccacgcctggctaatttttgtattttttggagagatggggtcttgccacgttgcccaggctggtctcg

SEQ ID NO: 46619 - DNA, 80 bp, synthetic construct
  misc_feature 1..80: note = Artificially Synthesized Probe
  source 1..80: mol_type = other DNA
tctagagtggggaaaaaaagagactagaattctcagcagaacttgaggaatccaatggccagtaacgaagatgcctccca

SEQ ID NO: 46620 - DNA, 80 bp, synthetic construct; identical to SEQ ID NO: 23291
  misc_feature 1..80: note = Artificially Synthesized Probe
  source 1..80: mol_type = other DNA

SEQ ID NO: 46621 - DNA, 80 bp, synthetic construct
  misc_feature 1..80: note = Artificially Synthesized Probe
  source 1..80: mol_type = other DNA
ctcccagagtctcctggccgtgccccatccctcccctcagccaggtactgggctgagatgcctcccagagtctcctggcc

SEQ ID NO: 46622 - DNA, 80 bp, synthetic construct
  misc_feature 1..80: note = Artificially Synthesized Probe
  source 1..80: mol_type = other DNA
tctccttcctcctaccttcctcttcttctcaacaaaatctaagcaagttgtaaatgggccttctggtggcaatgatgtat

SEQ ID NO: 46623 - DNA, 80 bp, synthetic construct
  misc_feature 1..80: note = Artificially Synthesized Probe
  source 1..80: mol_type = other DNA
caattacatctgggaagaaacaagcaggacaggaaaaaggtacattggtgtttttgcatccataaagttcacttcaattt

SEQ ID NO: 46624 - DNA, 80 bp, synthetic construct
  misc_feature 1..80: note = Artificially Synthesized Probe
  source 1..80: mol_type = other DNA
aaagaaatacagtaaccgcaatattataacctacaaacaaaaagccattctcagtcccccagcaggacctctccatgcct

SEQ ID NO: 46625 - DNA, 80 bp, synthetic construct; identical to SEQ ID NO: 23152
  misc_feature 1..80: note = Artificially Synthesized Probe
  source 1..80: mol_type = other DNA

SEQ ID NO: 46626 - DNA, 80 bp, synthetic construct; identical to SEQ ID NO: 23292
  misc_feature 1..80: note = Artificially Synthesized Probe
  source 1..80: mol_type = other DNA

SEQ ID NO: 46627 - DNA, 80 bp, synthetic construct
  misc_feature 1..80: note = Artificially Synthesized Probe
  source 1..80: mol_type = other DNA
gataataatggaagtatggtgttacctgtttctaaatcttaacaaaaacttatgttgaaaatggaagtggactgggcgca

SEQ ID NO: 46628 - DNA, 80 bp, synthetic construct
  misc_feature 1..80: note = Artificially Synthesized Probe
  source 1..80: mol_type = other DNA
cttgggaggctgaggcaggagaatggcgtgaacccgggaggcggagcttgcagtgagccgaggtcgcaccactgcactcc

SEQ ID NO: 46629 - DNA, 80 bp, synthetic construct
  misc_feature 1..80: note = Artificially Synthesized Probe
  source 1..80: mol_type = other DNA
gaaacagccgacaagctccccaggggtgagggtgccagggagactctgcactcccacaacgccctaggatgcagaggggc

SEQ ID NO: 46630 - DNA, 80 bp, synthetic construct
  misc_feature 1..80: note = Artificially Synthesized Probe
  source 1..80: mol_type = other DNA
gagctgacttccagcccagccaccaccacgggcctgcacaccctccgccacgggcctgcacaccctccaggatgccacag

SEQ ID NO: 46631 - DNA, 80 bp, synthetic construct; identical to SEQ ID NO: 23293
  misc_feature 1..80: note = Artificially Synthesized Probe
  source 1..80: mol_type = other DNA

SEQ ID NO: 46632 - DNA, 80 bp, synthetic construct
  misc_feature 1..80: note = Artificially Synthesized Probe
  source 1..80: mol_type = other DNA
gcctgagaggactaacccttctgttttgccaagaaagatgtcagcttcaactacttttatactggagaaacaatttacaa

SEQ ID NO: 46633 - DNA, 80 bp, synthetic construct
  misc_feature 1..80: note = Artificially Synthesized Probe
  source 1..80: mol_type = other DNA
tagcaccagtcagcccatcacacaaggctgtcggggaccctatgtcactgcggccacacctggcccaacctcagggcagg

SEQ ID NO: 46634 - DNA, 80 bp, synthetic construct
  misc_feature 1..80: note = Artificially Synthesized Probe
  source 1..80: mol_type = other DNA
caaggaatcaaagtgaaacacgggaatgacacaaataccaacatgaaaaatatcagagcacctgtaacattcttattctt

SEQ ID NO: 46635 - DNA, 80 bp, synthetic construct; identical to SEQ ID NO: 23294
  misc_feature 1..80: note = Artificially Synthesized Probe
  source 1..80: mol_type = other DNA

SEQ ID NO: 46636 - DNA, 80 bp, synthetic construct
  misc_feature 1..80: note = Artificially Synthesized Probe
  source 1..80: mol_type = other DNA
cctccttgtaatcttcgcccttctctttcttctcggccttctctttcttggctcgctctcggtcgtggctcttcttggat

SEQ ID NO: 46637 - DNA, 80 bp, synthetic construct
  misc_feature 1..80: note = Artificially Synthesized Probe
  source 1..80: mol_type = other DNA
agcgcagtggtgcgatctcggtttactgcaagctccgcctcccaggttcacgccattctcctgcctcagcctcccgagta

SEQ ID NO: 46638 - DNA, 80 bp, synthetic construct
  misc_feature 1..80: note = Artificially Synthesized Probe
  source 1..80: mol_type = other DNA
cgcccggcaagctattctttttttaaaccctgcattttaatgccagataaaacaatggagaacaggcattcaagaccagc

SEQ ID NO: 46639 - DNA, 80 bp, synthetic construct
  misc_feature 1..80: note = Artificially Synthesized Probe
  source 1..80: mol_type = other DNA
tccaggccctgcacaacaaagctagactctgtctcaaaaaaaaaaaaaaaaaaaaacaatggagaaccagcctcagtgag

SEQ ID NO: 46640 - DNA, 80 bp, synthetic construct; identical to SEQ ID NO: 23295
  misc_feature 1..80: note = Artificially Synthesized Probe
  source 1..80: mol_type = other DNA

SEQ ID NO: 46641 - DNA, 80 bp, synthetic construct
  misc_feature 1..80: note = Artificially Synthesized Probe
  source 1..80: mol_type = other DNA
ctgtcagcagagttgctgatagcttgctcccctttaatcagagaagcctgtattttgaatccatcgatttttttttttcc

SEQ ID NO: 46642 - DNA, 80 bp, synthetic construct
  misc_feature 1..80: note = Artificially Synthesized Probe
  source 1..80: mol_type = other DNA
ttttaatagagatggggtttcaccatgttggcaggctggtctggaactcctggcctcaagtgatccacccaccttgacat

SEQ ID NO: 46643 - DNA, 80 bp, synthetic construct
  misc_feature 1..80: note = Artificially Synthesized Probe
  source 1..80: mol_type = other DNA
agagcaggggttcaagacaggcctggacaacgtaacaagactctgtttctacaaaaaaaaaaaaaaaattaaaaaaagaa

SEQ ID NO: 46644 - DNA, 80 bp, synthetic construct; identical to SEQ ID NO: 23296
  misc_feature 1..80: note = Artificially Synthesized Probe
  source 1..80: mol_type = other DNA

SEQ ID NO: 46645 - DNA, 80 bp, synthetic construct
  misc_feature 1..80: note = Artificially Synthesized Probe
  source 1..80: mol_type = other DNA
aaagcagtcaggtgtattttaaagtggcctgactccaggcgactgagataaggaacagatacaccaaactatgaagctcc

SEQ ID NO: 46646 - DNA, 80 bp, synthetic construct
  misc_feature 1..80: note = Artificially Synthesized Probe
  source 1..80: mol_type = other DNA
tttaatttagccaagttttctcttcaactgctgtcaatccacatatcagagaaaataacctgccagttcaccatgcgtct

SEQ ID NO: 46647 - DNA, 80 bp, synthetic construct; identical to SEQ ID NO: 23297
  misc_feature 1..80: note = Artificially Synthesized Probe
  source 1..80: mol_type = other DNA

SEQ ID NO: 46648 - DNA, 80 bp, synthetic construct
  misc_feature 1..80: note = Artificially Synthesized Probe
  source 1..80: mol_type = other DNA
cctcgctgattttatcgttggagtcttctctgtactcatggagagcctcttcttccaacttttcaagcaggcttttttcc

SEQ ID NO: 46649 - DNA, 80 bp, synthetic construct
  misc_feature 1..80: note = Artificially Synthesized Probe
  source 1..80: mol_type = other DNA
ccaggcaagaccaccaggatcctaacgagcagaacagctcccaggatacagaatcctcacgcaaactgttaacacaacat

SEQ ID NO: 46650 - DNA, 80 bp, synthetic construct
  misc_feature 1..80: note = Artificially Synthesized Probe
  source 1..80: mol_type = other DNA
caaggatcccattcattaatccaaaaatgcttacctgttaccactctgaatacactctaagtgaaatccagaacaaaatt

SEQ ID NO: 46651 - DNA, 80 bp, synthetic construct
  misc_feature 1..80: note = Artificially Synthesized Probe
  source 1..80: mol_type = other DNA
ggactgtcttttaaatccaatggaggtgtgtcccagagcagggctgtatatattctgaaacaagagagtgagattagctc

SEQ ID NO: 46652 - DNA, 80 bp, synthetic construct; identical to SEQ ID NO: 23298
  misc_feature 1..80: note = Artificially Synthesized Probe
  source 1..80: mol_type = other DNA

SEQ ID NO: 46653 - DNA, 80 bp, synthetic construct
  misc_feature 1..80: note = Artificially Synthesized Probe
  source 1..80: mol_type = other DNA
actcttgtcccccaggctggagtgcagtggcgtgatctcagctcactgcaacctccacctcccctcctgggttcaagcga

SEQ ID NO: 46654 - DNA, 80 bp, synthetic construct
  misc_feature 1..80: note = Artificially Synthesized Probe
  source 1..80: mol_type = other DNA
tttaactttaagaagcatattaagttttaaactacataaaaggtgcaaaaaaagataaggtggttttcatttccactgag

SEQ ID NO: 46655 - DNA, 80 bp, synthetic construct
  misc_feature 1..80: note = Artificially Synthesized Probe
  source 1..80: mol_type = other DNA
aaccccgtctctactgaaaatacaaaaaattaaccaggtgtggtggcttgtacctgtaaccccaactacttgggaggctg

SEQ ID NO: 46656 - DNA, 80 bp, synthetic construct
  misc_feature 1..80: note = Artificially Synthesized Probe
  source 1..80: mol_type = other DNA
ccaagaataaaacaaaccagtctaaatgggggaaaaaaaatctatacccatgttacttcagtcccatccaaacatcaggc

SEQ ID NO: 46657 - DNA, 80 bp, synthetic construct; identical to SEQ ID NO: 23299
  misc_feature 1..80: note = Artificially Synthesized Probe
  source 1..80: mol_type = other DNA

SEQ ID NO: 46658 - DNA, 80 bp, synthetic construct
  misc_feature 1..80: note = Artificially Synthesized Probe
  source 1..80: mol_type = other DNA
gagtccccatctctacaaaaaattcaaaaaattagctgggcatggtggcgtgcgcctgtagccggagctactcacaccac

SEQ ID NO: 46659 - DNA, 80 bp, synthetic construct
  misc_feature 1..80: note = Artificially Synthesized Probe
  source 1..80: mol_type = other DNA
tgtccttcctgtccttgtacttttctgtggactctttatccttcttctccttgtgcttttcaaagactttctcttttttg

SEQ ID NO: 46660 - DNA, 80 bp, synthetic construct
  misc_feature 1..80: note = Artificially Synthesized Probe
  source 1..80: mol_type = other DNA
aggaaccccagcatcgacctccagagtcctgagagcactcaaagcatcatgagtccaacgatttgcaagctcactgccac

SEQ ID NO: 46661 - DNA, 80 bp, synthetic construct
  misc_feature 1..80: note = Artificially Synthesized Probe
  source 1..80: mol_type = other DNA
aaacacgccggtgagaactgctgctttaatgcagctgctgtttcccatgtatgaagaaactgggcccaaatcaggtgaaa

SEQ ID NO: 46662 - DNA, 80 bp, synthetic construct; identical to SEQ ID NO: 23300
  misc_feature 1..80: note = Artificially Synthesized Probe
  source 1..80: mol_type = other DNA

SEQ ID NO: 46663 - DNA, 80 bp, synthetic construct
  misc_feature 1..80: note = Artificially Synthesized Probe
  source 1..80: mol_type = other DNA
cttcatttagaatacatgttcacatcaaaaccaccaccacgactataaacaagctatgttgtcaaacagaaaagcaccag

SEQ ID NO: 46664 - DNA, 80 bp, synthetic construct; identical to SEQ ID NO: 23301
  misc_feature 1..80: note = Artificially Synthesized Probe
  source 1..80: mol_type = other DNA

SEQ ID NO: 46665 - DNA, 80 bp, synthetic construct
  misc_feature 1..80: note = Artificially Synthesized Probe
  source 1..80: mol_type = other DNA
aagggtcggtgtgtgatgacggagtcagggatgggaccatcacccgtccatgtctgggggcgggggtgagacacgaaggg

SEQ ID NO: 46666 - DNA, 80 bp, synthetic construct
  misc_feature 1..80: note = Artificially Synthesized Probe
  source 1..80: mol_type = other DNA
atgacggagtcagggatgggaccatcacccgtccatgtctgggggcgggggtgagacacgaagggtcggtgtgtgatgac

SEQ ID NO: 46667 - DNA, 80 bp, synthetic construct
  misc_feature 1..80: note = Artificially Synthesized Probe
  source 1..80: mol_type = other DNA
cccatccatgtcttggggcaggggtgggggtaaccaaaaccagaatccagttaaaacaacagggagttgcttctacctat

SEQ ID NO: 46668 - DNA, 80 bp, synthetic construct
  misc_feature 1..80: note = Artificially Synthesized Probe
  source 1..80: mol_type = other DNA
gttttaaatgctcttaccactctggactccttactctcatcaacccctttaagtgggttatttgccacgttagggatagg

SEQ ID NO: 46669 - DNA, 80 bp, synthetic construct; identical to SEQ ID NO: 23153
  misc_feature 1..80: note = Artificially Synthesized Probe
  source 1..80: mol_type = other DNA

SEQ ID NO: 46670 - DNA, 80 bp, synthetic construct; identical to SEQ ID NO: 23302
  misc_feature 1..80: note = Artificially Synthesized Probe
  source 1..80: mol_type = other DNA

SEQ ID NO: 46671 - DNA, 80 bp, synthetic construct
  misc_feature 1..80: note = Artificially Synthesized Probe
  source 1..80: mol_type = other DNA
tcagtaataaacacacttttcaatatgtcaagtaataacacgatattcgcgctgacccaatcgcaccccacctctttcaa

SEQ ID NO: 46672 - DNA, 80 bp, synthetic construct
  misc_feature 1..80: note = Artificially Synthesized Probe
  source 1..80: mol_type = other DNA
caagattgctcatgtttttattacagtctcccttttctcccctaagagaatcacaagtttcaggagactctgactgacac

SEQ ID NO: 46673 - DNA, 80 bp, synthetic construct
  misc_feature 1..80: note = Artificially Synthesized Probe
  source 1..80: mol_type = other DNA
catagtcttcaatccgctaagatgagcaattctttctgtccacactgactaaccccaactgacagcagagaaaaaccacg

SEQ ID NO: 46674 - DNA, 80 bp, synthetic construct
  misc_feature 1..80: note = Artificially Synthesized Probe
  source 1..80: mol_type = other DNA
gccttggtctcaaaacgctgctagccagagctatgaccttatgcaaacaatgattttcattcgcgttaggctgggtggga

SEQ ID NO: 46675 - DNA, 80 bp, synthetic construct; identical to SEQ ID NO: 23303
  misc_feature 1..80: note = Artificially Synthesized Probe
  source 1..80: mol_type = other DNA

SEQ ID NO: 46676 - DNA, 80 bp, synthetic construct
  misc_feature 1..80: note = Artificially Synthesized Probe
  source 1..80: mol_type = other DNA
tccactcagttgttcacagctgttttattcataagcaccagaaactggaatcagcccagatgtgcttcgatggtgtaaga

SEQ ID NO: 46677 - DNA, 80 bp, synthetic construct
  misc_feature 1..80: note = Artificially Synthesized Probe
  source 1..80: mol_type = other DNA
attgggaaatcaaaacttaagcgggtaagaggacagggtacaaccttgtaagcgggtaaggggacggcgtacaacgggat

SEQ ID NO: 46678 - DNA, 80 bp, synthetic construct
  misc_feature 1..80: note = Artificially Synthesized Probe
  source 1..80: mol_type = other DNA
cttctccttcttctctttcccttggtcgagagacgctttcctttctttgtctttgccatgtgtgtctttatgtttttcct

SEQ ID NO: 46679 - DNA, 80 bp, synthetic construct; identical to SEQ ID NO: 23304
  misc_feature 1..80: note = Artificially Synthesized Probe
  source 1..80: mol_type = other DNA

SEQ ID NO: 46680 - DNA, 80 bp, synthetic construct
  misc_feature 1..80: note = Artificially Synthesized Probe
  source 1..80: mol_type = other DNA
cacacctctgcactccaggctgggtgacaagagcaaaactctgtctcaaaaaaaaaaaagagagagaaagaaaaaagtct

SEQ ID NO: 46681 - DNA, 80 bp, synthetic construct
  misc_feature 1..80: note = Artificially Synthesized Probe
  source 1..80: mol_type = other DNA
aaacagagcgaacattacgctgagcaaaaaggccaatcgaaaaggttacatttctacgactccatttatatgacactctt

SEQ ID NO: 46682 - DNA, 80 bp, synthetic construct
  misc_feature 1..80: note = Artificially Synthesized Probe
  source 1..80: mol_type = other DNA
gcccccagtggtgaacacgcacagaactcaaatcaatcaatctctctctctaacacacacgtacaagtaaacttcaggca

SEQ ID NO: 46683 - DNA, 80 bp, synthetic construct; identical to SEQ ID NO: 23305
  misc_feature 1..80: note = Artificially Synthesized Probe
  source 1..80: mol_type = other DNA

SEQ ID NO: 46684 - DNA, 80 bp, synthetic construct
  misc_feature 1..80: note = Artificially Synthesized Probe
  source 1..80: mol_type = other DNA
tattatctcccctttgcacatgagaaaactgaggccctagaagtgtgagaaatttagtcaaggtcacattttaaatggtg

SEQ ID NO: 46685 - DNA, 80 bp, synthetic construct
  misc_feature 1..80: note = Artificially Synthesized Probe
  source 1..80: mol_type = other DNA
acctaccatccagcctcatctcattttagttctcaatcaaaaaaagacacagccaattggattccactcccacaatggtg

SEQ ID NO: 46686 - DNA, 80 bp, synthetic construct
  misc_feature 1..80: note = Artificially Synthesized Probe
  source 1..80: mol_type = other DNA
aggtgcagttatttgtttcctgtttctggtgtttcttttttaagggtggggtgctattcatttcgttttctctgatttaa

SEQ ID NO: 46687 - DNA, 80 bp, synthetic construct
  misc_feature 1..80: note = Artificially Synthesized Probe
  source 1..80: mol_type = other DNA
caaacaattctctttataccatttagcagaaaaaggtgcaaagtggatgaatgcagaacgagaacaagggggaacgattt

SEQ ID NO: 46688 - DNA, 80 bp, synthetic construct; identical to SEQ ID NO: 23306
  misc_feature 1..80: note = Artificially Synthesized Probe
  source 1..80: mol_type = other DNA

SEQ ID NO: 46689 - DNA, 80 bp, synthetic construct
  misc_feature 1..80: note = Artificially Synthesized Probe
  source 1..80: mol_type = other DNA
aacagccccaataacacacaggagaaggtggaggaaggacagtgctggactgtgcaatacctgcctccctcccgcaggag

SEQ ID NO: 46690 - DNA, 80 bp, synthetic construct
  misc_feature 1..80: note = Artificially Synthesized Probe
  source 1..80: mol_type = other DNA
cttctctcgtgctgggtggtgccgttcccacggctccaggcccttcccaaagtcgccgtcggacttgtccttgaagccac

SEQ ID NO: 46691 - DNA, 80 bp, synthetic construct
  misc_feature 1..80: note = Artificially Synthesized Probe
  source 1..80: mol_type = other DNA
acacacacacacaaatctgaaatcctgaccaatgaagacataagaccaacctttcagaaagcctaaatcaggcgcatata

SEQ ID NO: 46692 - DNA, 80 bp, synthetic construct
  misc_feature 1..80: note = Artificially Synthesized Probe
  source 1..80: mol_type = other DNA
ggaaacagaaaagacggagaaatccgggaagcggctgtttcacttcagtgtgaagctcctactcaacaatcgcttagtta

SEQ ID NO: 46693 - DNA, 80 bp, synthetic construct; identical to SEQ ID NO: 23307
  misc_feature 1..80: note = Artificially Synthesized Probe
  source 1..80: mol_type = other DNA

SEQ ID NO: 46694 - DNA, 80 bp, synthetic construct
  misc_feature 1..80: note = Artificially Synthesized Probe
  source 1..80: mol_type = other DNA
cacaaaacactgttgaaagaaaccgaagacctaaataagtggagggaaaaaatcccatattcatggatcaaaagacacag

SEQ ID NO: 46695 - DNA, 80 bp, synthetic construct
  misc_feature 1..80: note = Artificially Synthesized Probe
  source 1..80: mol_type = other DNA
acttttttcagagtagaaaagacataattaaaatgtctaggggccggggtggtggctcacgcctgtaatcacagcacttt

SEQ ID NO: 46696 - DNA, 80 bp, synthetic construct; identical to SEQ ID NO: 23308
  misc_feature 1..80: note = Artificially Synthesized Probe
  source 1..80: mol_type = other DNA

SEQ ID NO: 46697 - DNA, 80 bp, synthetic construct
  misc_feature 1..80: note = Artificially Synthesized Probe
  source 1..80: mol_type = other DNA
cccagcactttgggaggccaaggcagatggatcacttgaggtcagcagtttgagaccagcctggccaacatggtgaaacg

SEQ ID NO: 46698 - DNA, 80 bp, synthetic construct
  misc_feature 1..80: note = Artificially Synthesized Probe
  source 1..80: mol_type = other DNA
aagactccatctcaaaaaaatagattaattaattaaaataaaattctttggccgggcacggtggttcacgcctataatcc

SEQ ID NO: 46699 - DNA, 80 bp, synthetic construct
  misc_feature 1..80: note = Artificially Synthesized Probe
  source 1..80: mol_type = other DNA
aaaatgttgtgaacctgggaggcggagcttgcagtgagccgagactgcgccctacactccagcctgggtgacagagcgag

SEQ ID NO: 46700 - DNA, 80 bp, synthetic construct
  misc_feature 1..80: note = Artificially Synthesized Probe
  source 1..80: mol_type = other DNA
cacgaagtcaggagttcgagaccagcctggccaacatagtgaaaccccgtctccactaaaaatacaaaaattagccaggc

SEQ ID NO: 46701 - DNA, 80 bp, synthetic construct; identical to SEQ ID NO: 23154
  misc_feature 1..80: note = Artificially Synthesized Probe
  source 1..80: mol_type = other DNA

SEQ ID NO: 46702 - DNA, 80 bp, synthetic construct; identical to SEQ ID NO: 23309
  misc_feature 1..80: note = Artificially Synthesized Probe
  source 1..80: mol_type = other DNA

SEQ ID NO: 46703 - DNA, 80 bp, synthetic construct
  misc_feature 1..80: note = Artificially Synthesized Probe
  source 1..80: mol_type = other DNA
ttctagtacacagcagggattctcaactctcacgctcagacgttctagtacacagcagggactctcaactctcacgctca

SEQ ID NO: 46704 - DNA, 80 bp, synthetic construct
  misc_feature 1..80: note = Artificially Synthesized Probe
  source 1..80: mol_type = other DNA
cgcgctcagacgttctagtacacagcagggactctcaactctcgcgctcagacgttctagtacacagcagggactctcaa

SEQ ID NO: 46705 - DNA, 80 bp, synthetic construct
  misc_feature 1..80: note = Artificially Synthesized Probe
  source 1..80: mol_type = other DNA
actctcaactctcgcgctcagtcgttctagtacacagcagggactctcaactctcacgctcagtcgttctagtacacagc

SEQ ID NO: 46706 - DNA, 80 bp, synthetic construct
  misc_feature 1..80: note = Artificially Synthesized Probe
  source 1..80: mol_type = other DNA
tacacagcaggtactctcaactctcgcgctcagacgttctagtacacagcagggactctcaactctcgcgctcagacgtt

SEQ ID NO: 46707 - DNA, 80 bp, synthetic construct
  misc_feature 1..80: note = Artificially Synthesized Probe
  source 1..80: mol_type = other DNA
cagacgttctagtacacagcagggactctcaactctcgcgctcagtcgttctagtacatagcagggactctcaactctca

SEQ ID NO: 46708 - DNA, 80 bp, synthetic construct
  misc_feature 1..80: note = Artificially Synthesized Probe
  source 1..80: mol_type = other DNA
aactctcacgctcagtcgttctagtacacagcagggactctcaactctcacgctcagtcgttctagtacacagcagggat

SEQ ID NO: 46709 - DNA, 80 bp, synthetic construct; identical to SEQ ID NO: 23310
  misc_feature 1..80: note = Artificially Synthesized Probe
  source 1..80: mol_type = other DNA

SEQ ID NO: 46710 - DNA, 80 bp, synthetic construct
  misc_feature 1..80: note = Artificially Synthesized Probe
  source 1..80: mol_type = other DNA
tttctttcttaagacaaaagggagtttgctcctcacatatgaccttacgcagtttctgtctgagaatcatcatgttcgtc

SEQ ID NO: 46711 - DNA, 80 bp, synthetic construct
  misc_feature 1..80: note = Artificially Synthesized Probe
  source 1..80: mol_type = other DNA
actcaaccctgcttccagaagcctagggttaacatctgctccttcctcctgtttgcattcagtgaaatcctctcctctcc

SEQ ID NO: 46712 - DNA, 80 bp, synthetic construct
  misc_feature 1..80: note = Artificially Synthesized Probe
  source 1..80: mol_type = other DNA
atggacaacatctttacccacatgtctgcatcagctctgcgttgttcaccgacaaatcccgtgtctggaagagtcctggc

SEQ ID NO: 46713 - DNA, 80 bp, synthetic construct
  misc_feature 1..80: note = Artificially Synthesized Probe
  source 1..80: mol_type = other DNA
ggatgaatcggacaagtcagaaaaccaccgatctcgctgatcgtcagaaaggctaaatttggtgtcttcattctccagaa

SEQ ID NO: 46714 - DNA, 80 bp, synthetic construct; identical to SEQ ID NO: 23312
  misc_feature 1..80: note = Artificially Synthesized Probe
  source 1..80: mol_type = other DNA

SEQ ID NO: 46715 - DNA, 80 bp, synthetic construct
  misc_feature 1..80: note = Artificially Synthesized Probe
  source 1..80: mol_type = other DNA
cctcccgagtagctgggactacaagtgctaccacgcctagctgatttttgtagagatggggttttgcgatgttggcgagc

SEQ ID NO: 46716 - DNA, 80 bp, synthetic construct
  misc_feature 1..80: note = Artificially Synthesized Probe
  source 1..80: mol_type = other DNA
ctgctgaatcccagctctgccaatcagagttgaacccactgaacccactgcaacaatgtccaactagagacactgtcaat

SEQ ID NO: 46717 - DNA, 80 bp, synthetic construct
  misc_feature 1..80: note = Artificially Synthesized Probe
  source 1..80: mol_type = other DNA
cacttataaatcctgtccatttccagctcccccccatcactgtcactcctccctactgcaaccgctctgacttctagttc

SEQ ID NO: 46718 - DNA, 80 bp, synthetic construct; identical to SEQ ID NO: 23313
  misc_feature 1..80: note = Artificially Synthesized Probe
  source 1..80: mol_type = other DNA

SEQ ID NO: 46719 - DNA, 80 bp, synthetic construct
  misc_feature 1..80: note = Artificially Synthesized Probe
  source 1..80: mol_type = other DNA
gccgcctcccagagcccgtggcatgcactgtgttgaggggtgctgtctggctgcctccccagcctctgagcaaccgcaaa

SEQ ID NO: 46720 - DNA, 80 bp, synthetic construct
  misc_feature 1..80: note = Artificially Synthesized Probe
  source 1..80: mol_type = other DNA
ttgcttttatatttttatactatgtcaccaccatacccgagaccttaccagtcacacactcacccccattcatattctat

SEQ ID NO: 46721 - DNA, 80 bp, synthetic construct
  misc_feature 1..80: note = Artificially Synthesized Probe
  source 1..80: mol_type = other DNA
cctgtgaggtcgaggctgcagggggctttatcacagccccacactccagccatgggtgacagagaccctatctctctctc

SEQ ID NO: 46722 - DNA, 80 bp, synthetic construct
  misc_feature 1..80: note = Artificially Synthesized Probe
  source 1..80: mol_type = other DNA
tctcccttggcctctgagcattttacccttttgatccattcagcttctttagaacagatggatattcaccataagatgta

SEQ ID NO: 46723 - DNA, 80 bp, synthetic construct; identical to SEQ ID NO: 23314
  misc_feature 1..80: note = Artificially Synthesized Probe
  source 1..80: mol_type = other DNA

SEQ ID NO: 46724 - DNA, 80 bp, synthetic construct
  misc_feature 1..80: note = Artificially Synthesized Probe
  source 1..80: mol_type = other DNA
cctaacagcatgccaagttcagactcctttttctttgcacctcactaccaccgacaggctttcaaacatactattcagaa

SEQ ID NO: 46725 - DNA, 80 bp, synthetic construct
  misc_feature 1..80: note = Artificially Synthesized Probe
  source 1..80: mol_type = other DNA
gggctgggcacgccaccttcacgagagtaagagagaaggaacgggcttggacgcagcagggctgggcacgccaccttcac

SEQ ID NO: 46726 - DNA, 80 bp, synthetic construct
  misc_feature 1..80: note = Artificially Synthesized Probe
  source 1..80: mol_type = other DNA
tgatttcttctttctctcctctttgtacagtctcagtttttcttctttcggagacttttccttcagcgatctctcctttt

SEQ ID NO: 46727 - DNA, 80 bp, synthetic construct; identical to SEQ ID NO: 23315
  misc_feature 1..80: note = Artificially Synthesized Probe
  source 1..80: mol_type = other DNA

SEQ ID NO: 46728 - DNA, 80 bp, synthetic construct
  misc_feature 1..80: note = Artificially Synthesized Probe
  source 1..80: mol_type = other DNA
atgcaaacaggaccaagagaagggccatacggcagcagcaccccagtgcctccaagatgccactcacccatggtgcaccc

SEQ ID NO: 46729 - DNA, 80 bp, synthetic construct
  misc_feature 1..80: note = Artificially Synthesized Probe
  source 1..80: mol_type = other DNA
ataaagcaattcttctctaacttgagaattctcatactcttcttctccacgcaagtcggaaagacctagtctgagaaaga

SEQ ID NO: 46730 - DNA, 80 bp, synthetic construct
  misc_feature 1..80: note = Artificially Synthesized Probe
  source 1..80: mol_type = other DNA
gctggcccgacaatccatgcctataaattccacaacagatgtctcctgaggtccaaaatctgctcttattaaagagtggc

SEQ ID NO: 46731 - DNA, 80 bp, synthetic construct; identical to SEQ ID NO: 23316
  misc_feature 1..80: note = Artificially Synthesized Probe
  source 1..80: mol_type = other DNA

SEQ ID NO: 46732 - DNA, 80 bp, synthetic construct
  misc_feature 1..80: note = Artificially Synthesized Probe
  source 1..80: mol_type = other DNA
ctgtctagctaaaggtctgtaaatgcaccaatcagcactctgtacaaatgcatcaatcagcgctgtctagctaaaggttt

SEQ ID NO: 46733 - DNA, 80 bp, synthetic construct
  misc_feature 1..80: note = Artificially Synthesized Probe
  source 1..80: mol_type = other DNA
cgtgggcagggccgaataagggaataaaagctggccacatgagccagcagcagcaacccactggggtccccttccatgct

SEQ ID NO: 46734 - DNA, 80 bp, synthetic construct
  misc_feature 1..80: note = Artificially Synthesized Probe
  source 1..80: mol_type = other DNA
cacatctgaaaatctgaaggaacaaactccggacacaccatctttaagaactgtgacactcaccgcgagggtccacagct

SEQ ID NO: 46735 - DNA, 80 bp, synthetic construct
  misc_feature 1..80: note = Artificially Synthesized Probe
  source 1..80: mol_type = other DNA
ttcacacacacacacacacacacacacacacacacacacacgctttcggtctgttcgctcaaggaacaggaagccttttt

SEQ ID NO: 46736 - DNA, 80 bp, synthetic construct; identical to SEQ ID NO: 23317
  misc_feature 1..80: note = Artificially Synthesized Probe
  source 1..80: mol_type = other DNA

SEQ ID NO: 46737 - DNA, 80 bp, synthetic construct
  misc_feature 1..80: note = Artificially Synthesized Probe
  source 1..80: mol_type = other DNA
gtgctttaacacttttagcttgttttcagtggaaagatcattctctaacagtatagccttatctgacttctgcttggagt

SEQ ID NO: 46738 - DNA, 80 bp, synthetic construct
  misc_feature 1..80: note = Artificially Synthesized Probe
  source 1..80: mol_type = other DNA
tgaaacctatctgtactaacaatacaaaaatgagctgggcgtgatggctcagaacctgtagtcccagctacgtgggaggc

SEQ ID NO: 46739 - DNA, 80 bp, synthetic construct
  misc_feature 1..80: note = Artificially Synthesized Probe
  source 1..80: mol_type = other DNA
agtttctcctgacagatgacattcatcaacaagagattcaagcagaaaagaccactgtctctaacagcaagtattataca

SEQ ID NO: 46740 - DNA, 80 bp, synthetic construct
  misc_feature 1..80: note = Artificially Synthesized Probe
  source 1..80: mol_type = other DNA
tcttcctggaataactattcctctaagctgctccttcagatacaaaataaaaagtaactctcaacactgacaagtcaacg

SEQ ID NO: 46741 - DNA, 80 bp, synthetic construct; identical to SEQ ID NO: 23318
  misc_feature 1..80: note = Artificially Synthesized Probe
  source 1..80: mol_type = other DNA

SEQ ID NO: 46742 - DNA, 80 bp, synthetic construct
  misc_feature 1..80: note = Artificially Synthesized Probe
  source 1..80: mol_type = other DNA
taaaaagtgacatacgaggaaggagatgtcacagaagaaaacgacaacacacacccaaacggcatcagcctgtgtgtgac

SEQ ID NO: 46743 - DNA, 80 bp, synthetic construct
  misc_feature 1..80: note = Artificially Synthesized Probe
  source 1..80: mol_type = other DNA
tatgacagagaattttttaaaaagccaccaaaaaaataccaaaaagtgaaagactgtattgtttgccccaacatctgttt

SEQ ID NO: 46744 - DNA, 80 bp, synthetic construct; identical to SEQ ID NO: 23319
  misc_feature 1..80: note = Artificially Synthesized Probe
  source 1..80: mol_type = other DNA

SEQ ID NO: 46745 - DNA, 80 bp, synthetic construct
  misc_feature 1..80: note = Artificially Synthesized Probe
  source 1..80: mol_type = other DNA
catccgctcctccgccatgcctctccactactcctaatgccactcccagctccagcaacccaccctccagggcacctcga

SEQ ID NO: 46746 - DNA, 80 bp, synthetic construct
  misc_feature 1..80: note = Artificially Synthesized Probe
  source 1..80: mol_type = other DNA
cacaagtccattgtatttctagacaccaacaccaggcagagtccaccatgaaggcaagtggcagtgtcccaaggagagcc

SEQ ID NO: 46747 - DNA, 80 bp, synthetic construct
  misc_feature 1..80: note = Artificially Synthesized Probe
  source 1..80: mol_type = other DNA
gatacattaaaggtataaatgcaaagggcaaaagtacaaaatgtgcagaaggcgtaggaagctatctttatggccttggg

SEQ ID NO: 46748 - DNA, 80 bp, synthetic construct; identical to SEQ ID NO: 23155
  misc_feature 1..80: note = Artificially Synthesized Probe
  source 1..80: mol_type = other DNA

SEQ ID NO: 46749 - DNA, 80 bp, synthetic construct
  misc_feature 1..80: note = Artificially Synthesized Probe
  source 1..80: mol_type = other DNA
acatccagctaatttgtgtgtgtgtgtgcgtatttttagtagatacagggtttcactaggttgggccaggctggtcttga

SEQ ID NO: 46750 - DNA, 80 bp, synthetic construct; identical to SEQ ID NO: 23320
  misc_feature 1..80: note = Artificially Synthesized Probe
  source 1..80: mol_type = other DNA

SEQ ID NO: 46751 - DNA, 80 bp, synthetic construct
  misc_feature 1..80: note = Artificially Synthesized Probe
  source 1..80: mol_type = other DNA
gttgcatgcctgtgatcccagctgctggagaggctgagatgggagactgcttgagccaatgagttcgtgatcataccact

SEQ ID NO: 46752 - DNA, 80 bp, synthetic construct
  misc_feature 1..80: note = Artificially Synthesized Probe
  source 1..80: mol_type = other DNA
tcttccattcatatagaagataaacatcacaatgggaaactccctctgtgtggcacgttgttcaaatccacatgcatgca

SEQ ID NO: 46753 - DNA, 80 bp, synthetic construct
  misc_feature 1..80: note = Artificially Synthesized Probe
  source 1..80: mol_type = other DNA
aagcagacaacactaaattaatgattttacttttaaggagataaaatgttccttgacttgcaatggggttacctcccaat

SEQ ID NO: 46754 - DNA, 80 bp, synthetic construct; identical to SEQ ID NO: 23321
  misc_feature 1..80: note = Artificially Synthesized Probe
  source 1..80: mol_type = other DNA

SEQ ID NO: 46755 - DNA, 80 bp, synthetic construct
  misc_feature 1..80: note = Artificially Synthesized Probe
  source 1..80: mol_type = other DNA
caccaaaggtgttctcaacacaactccgtccccctcagaactctgtggaacgttttcattcccaatgatcaccaacagag

SEQ ID NO: 46756 - DNA, 80 bp, synthetic construct
  misc_feature 1..80: note = Artificially Synthesized Probe
  source 1..80: mol_type = other DNA
ttaactccataatctgtgacttggctcttatgaggaagctgacaaagaatcagagactcagaggagatcacagcctttca

SEQ ID NO: 46757 - DNA, 80 bp, synthetic construct
  misc_feature 1..80: note = Artificially Synthesized Probe
  source 1..80: mol_type = other DNA
ggaagaattcagtgtgctgtaattagaaatgaacattttatcaatatgttcacgtaaaatgtacatgttcccctgggggg

SEQ ID NO: 46758 - DNA, 80 bp, synthetic construct; identical to SEQ ID NO: 23322
  misc_feature 1..80: note = Artificially Synthesized Probe
  source 1..80: mol_type = other DNA

SEQ ID NO: 46759 - DNA, 80 bp, synthetic construct
  misc_feature 1..80: note = Artificially Synthesized Probe
  source 1..80: mol_type = other DNA
tgtgctggtctgtgtggctggggttctgcttctgggcggcagagctcccgtgagacgaggtggaggaggcagagagggag

SEQ ID NO: 46760 - DNA, 80 bp, synthetic construct
  misc_feature 1..80: note = Artificially Synthesized Probe
  source 1..80: mol_type = other DNA
taagagggaaaggaagaaagcataagaaaatatcaagcacaaactaagggccccaaaaaatccaactcacagcaacgtgg

SEQ ID NO: 46761 - DNA, 80 bp, synthetic construct
  misc_feature 1..80: note = Artificially Synthesized Probe
  source 1..80: mol_type = other DNA
atcctggtgtggctggtgtgtgtcacagtcaaaacggaaagagagagcgcatcgtggtttataaaaaataagtttccttg

SEQ ID NO: 46762 - DNA, 80 bp, synthetic construct
  misc_feature 1..80: note = Artificially Synthesized Probe
  source 1..80: mol_type = other DNA
aaaatacaaaaattagccgggcgtggtggtgggcgcctgtagtcccagctactcgggaggctgaggcaggaaaatggcgt

SEQ ID NO: 46763 - DNA, 80 bp, synthetic construct; identical to SEQ ID NO: 23323
  misc_feature 1..80: note = Artificially Synthesized Probe
  source 1..80: mol_type = other DNA

SEQ ID NO: 46764 - DNA, 80 bp, synthetic construct
  misc_feature 1..80: note = Artificially Synthesized Probe
  source 1..80: mol_type = other DNA
cagcagatggagaccatcctggctaacatggtaaaaccccacctctactaaaaatacaaaaaattagctgggtgtggtgg

SEQ ID NO: 46765 - DNA, 80 bp, synthetic construct
  misc_feature 1..80: note = Artificially Synthesized Probe
  source 1..80: mol_type = other DNA
gcaaacctgactcttaaaaaattaaacataccctgcataactgaacagtgtccacaagcaggaatctctctggatggcaa

SEQ ID NO: 46766 - DNA, 80 bp, synthetic construct
  misc_feature 1..80: note = Artificially Synthesized Probe
  source 1..80: mol_type = other DNA
atccttgtactgaaagcaaaatcagggttagctgtgactaagatccaagaaataaactttttaaaaagtaataaacatga

SEQ ID NO: 46767 - DNA, 80 bp, synthetic construct; identical to SEQ ID NO: 23324
  misc_feature 1..80: note = Artificially Synthesized Probe
  source 1..80: mol_type = other DNA

SEQ ID NO: 46768 - DNA, 80 bp, synthetic construct
  misc_feature 1..80: note = Artificially Synthesized Probe
  source 1..80: mol_type = other DNA
agcttctctagaaaatgcttttgaatctgtctcagaaaaccacctgttttgtagagaccaagactcttcctccattttgg

SEQ ID NO: 46769 - DNA, 80 bp, synthetic construct
  misc_feature 1..80: note = Artificially Synthesized Probe
  source 1..80: mol_type = other DNA
aaacctgtttccaccagctggacagtatcattcaggaacggttttacgcatcaaagactcatttccagataaagctgaag

SEQ ID NO: 46770 - DNA, 80 bp, synthetic construct; identical to SEQ ID NO: 23325
  misc_feature 1..80: note = Artificially Synthesized Probe
  source 1..80: mol_type = other DNA

SEQ ID NO: 46771 - DNA, 80 bp, synthetic construct
  misc_feature 1..80: note = Artificially Synthesized Probe
  source 1..80: mol_type = other DNA
ttgtttctttctttcgcttctttttcactttatttttttccttctgctgcttggcattagaaggctctcgtgtcttacta

SEQ ID NO: 46772 - DNA, 80 bp, synthetic construct
  misc_feature 1..80: note = Artificially Synthesized Probe
  source 1..80: mol_type = other DNA
cagactggagtgcaatggtgcaatcttggctcactgcgacctctgcctcccaggcccaagcaattctcctgcctcagccc

SEQ ID NO: 46773 - DNA, 80 bp, synthetic construct
  misc_feature 1..80: note = Artificially Synthesized Probe
  source 1..80: mol_type = other DNA
agtatttcaaatcgaacttgttcacagtcaaggcaagcatggcatgcttgctttggccagcacatgtactaaaaattcga

SEQ ID NO: 46774 - DNA, 80 bp, synthetic construct
  misc_feature 1..80: note = Artificially Synthesized Probe
  source 1..80: mol_type = other DNA
tcccacagcaagcaccaccctgcaccactagtattagcaccacccacatggaagggtgccagacacatacctactagctg

SEQ ID NO: 46775 - DNA, 80 bp, synthetic construct
  misc_feature 1..80: note = Artificially Synthesized Probe
  source 1..80: mol_type = other DNA
ttgaataggggtgaacagtgatgacccatgaccaagatgcattaagaaacagatctgcacaggaaggtggaacaaggccc

SEQ ID NO: 46776 - DNA, 80 bp, synthetic construct; identical to SEQ ID NO: 23326
  misc_feature 1..80: note = Artificially Synthesized Probe
  source 1..80: mol_type = other DNA

SEQ ID NO: 46777 - DNA, 80 bp, synthetic construct
  misc_feature 1..80: note = Artificially Synthesized Probe
  source 1..80: mol_type = other DNA
ttaaaatcacaagcagaagaaacaacactctgtatgcccttccaggtggaaatgcagtcagcagaaaactgtctccatga

SEQ ID NO: 46778 - DNA, 80 bp, synthetic construct
  misc_feature 1..80: note = Artificially Synthesized Probe
  source 1..80: mol_type = other DNA
aactccttgcacatgacagacttgctgggaagagcaggtgcgtactaaacattttctttgggctccagaaagcactaacg

SEQ ID NO: 46779 - DNA, 80 bp, synthetic construct; identical to SEQ ID NO: 23327
  misc_feature 1..80: note = Artificially Synthesized Probe
  source 1..80: mol_type = other DNA

SEQ ID NO: 46780 - DNA, 80 bp, synthetic construct
  misc_feature 1..80: note = Artificially Synthesized Probe
  source 1..80: mol_type = other DNA
aactatgatgtaacaaccaagtaaccctacagtgtgagaaatgcatgaggggcttaagctcagggaaccaccacctaaag

SEQ ID NO: 46781 - DNA, 80 bp, synthetic construct
  misc_feature 1..80: note = Artificially Synthesized Probe
  source 1..80: mol_type = other DNA
tgggtgagggtgcccaggcactcaccaactgaagtccccatctctccacggcaggcccacctcagaggaggcaaatgtta

SEQ ID NO: 46782 - DNA, 80 bp, synthetic construct
  misc_feature 1..80: note = Artificially Synthesized Probe
  source 1..80: mol_type = other DNA
tagagataaaactattggatttcgtttcttttctgtagtcctttttcaataggtgcttgtcgtccaccggaggaaccctg

SEQ ID NO: 46783 - DNA, 80 bp, synthetic construct
  misc_feature 1..80: note = Artificially Synthesized Probe
  source 1..80: mol_type = other DNA
cactgctcagccgtttcgaaccactggctgagcaaattcagcctctctgaggttcaggtaaactaagaggtcatctcctt

SEQ ID NO: 46784 - DNA, 80 bp, synthetic construct; identical to SEQ ID NO: 23328
  misc_feature 1..80: note = Artificially Synthesized Probe
  source 1..80: mol_type = other DNA

SEQ ID NO: 46785 - DNA, 80 bp, synthetic construct
  misc_feature 1..80: note = Artificially Synthesized Probe
  source 1..80: mol_type = other DNA
agaaaccccgtctctactaaaaatacaaaattagccaggtggtgcatgcctgtaatcccagctactcaggaggctgaggc

SEQ ID NO: 46786 - DNA, 80 bp, synthetic construct
  misc_feature 1..80: note = Artificially Synthesized Probe
  source 1..80: mol_type = other DNA
gttcctgcctaagagaatatgaagctttgttttgttcttcagatggatccacacttagaaccaccatctttaaaaaaaaa

SEQ ID NO: 46787 - DNA, 80 bp, synthetic construct
  misc_feature 1..80: note = Artificially Synthesized Probe
  source 1..80: mol_type = other DNA
acaagaaaacagcttctaatatgaaaacagatgaggttctcctaaagcttctgtgacagctgcatctaaacagtttaaca

SEQ ID NO: 46788 - DNA, 80 bp, synthetic construct; identical to SEQ ID NO: 23329
  misc_feature 1..80: note = Artificially Synthesized Probe
  source 1..80: mol_type = other DNA

SEQ ID NO: 46789 - DNA, 80 bp, synthetic construct
  misc_feature 1..80: note = Artificially Synthesized Probe
  source 1..80: mol_type = other DNA
tgacagtgccaccagccacagccatgcccagcaagcagcttcctgtccagtgagcaccaaggggcccttctcacacacag

SEQ ID NO: 46790 - DNA, 80 bp, synthetic construct
  misc_feature 1..80: note = Artificially Synthesized Probe
  source 1..80: mol_type = other DNA
gtgcctcacgggccaggtcctgcttaaagcctgaatgaagcaaagcttggaaaggacccaacacaacctgccaccaactg

SEQ ID NO: 46791 - DNA, 80 bp, synthetic construct
  misc_feature 1..80: note = Artificially Synthesized Probe
  source 1..80: mol_type = other DNA
attagtaccaaaagtttaatcactattgctgccctgtctcctactaccccattccttgccctcattaaactcctaaagac

SEQ ID NO: 46792 - DNA, 80 bp, synthetic construct; identical to SEQ ID NO: 23330
  misc_feature 1..80: note = Artificially Synthesized Probe
  source 1..80: mol_type = other DNA

SEQ ID NO: 46793 - DNA, 80 bp, synthetic construct
  misc_feature 1..80: note = Artificially Synthesized Probe
  source 1..80: mol_type = other DNA
tcgtaccctaagtgtccacattccacctgttctcactcctcctacacagccacctttggccctaagaacactgcatccgg

SEQ ID NO: 46794 - DNA, 80 bp, synthetic construct; identical to SEQ ID NO: 23156
  misc_feature 1..80: note = Artificially Synthesized Probe
  source 1..80: mol_type = other DNA

SEQ ID NO: 46795 - DNA, 80 bp, synthetic construct
  misc_feature 1..80: note = Artificially Synthesized Probe
  source 1..80: mol_type = other DNA
cactctgtcacccaagctggagtgcactggcacaatctcagctcactgcaacctccacttcccaggttcaagcaattgtc

SEQ ID NO: 46796 - DNA, 80 bp, synthetic construct
  misc_feature 1..80: note = Artificially Synthesized Probe
  source 1..80: mol_type = other DNA
gattacaggcatggagagttgggccatctattctctcactgaagcagggatgactttgtcacatgcacccttgcagacac

SEQ ID NO: 46797 - DNA, 80 bp, synthetic construct; identical to SEQ ID NO: 23331
  misc_feature 1..80: note = Artificially Synthesized Probe
  source 1..80: mol_type = other DNA

SEQ ID NO: 46798 - DNA, 80 bp, synthetic construct
  misc_feature 1..80: note = Artificially Synthesized Probe
  source 1..80: mol_type = other DNA
aaatcacacgaaagtactcaaagtcttggccaaagcaaacctactacagcacctaaacacaaatctccattttctttttt

SEQ ID NO: 46799 - DNA, 80 bp, synthetic construct
  misc_feature 1..80: note = Artificially Synthesized Probe
  source 1..80: mol_type = other DNA
atttaacatttaaaagtaaagttaaactgcttctgaggccttacagtaccctaaaatcattttcaaagtccaagacgaga

SEQ ID NO: 46800 - DNA, 80 bp, synthetic construct
  misc_feature 1..80: note = Artificially Synthesized Probe
  source 1..80: mol_type = other DNA
ggcatctgttcatgttttacttgcccatatcaccattgtatttagttcttggtagcagccatcaaccatcataaagcagc

SEQ ID NO: 46801 - DNA, 80 bp, synthetic construct
  misc_feature 1..80: note = Artificially Synthesized Probe
  source 1..80: mol_type = other DNA
tgcctaaccaacacagtgaaacccagtctctacaaaaaaaaaaaaaaaaagaaaaatttgcaggcatgaggaatgttggt

SEQ ID NO: 46802 - DNA, 80 bp, synthetic construct; identical to SEQ ID NO: 23332
  misc_feature 1..80: note = Artificially Synthesized Probe
  source 1..80: mol_type = other DNA

SEQ ID NO: 46803 - DNA, 80 bp, synthetic construct
  misc_feature 1..80: note = Artificially Synthesized Probe
  source 1..80: mol_type = other DNA
aatacaaaattaccagggcgtggtggtacatgcctgtaatcccagctactcgggaggctgaggcaggagaatcacttgaa

SEQ ID NO: 46804 - DNA, 80 bp, synthetic construct
  misc_feature 1..80: note = Artificially Synthesized Probe
  source 1..80: mol_type = other DNA
tcaaagtcatagacaggcagagccacactgaagaatgcagtcctggctacaggtcccagctcctgcttcactgagcaccc

SEQ ID NO: 46805 - DNA, 80 bp, synthetic construct
  misc_feature 1..80: note = Artificially Synthesized Probe
  source 1..80: mol_type = other DNA
ggcagtgacacacctgggcggggtctcccgcagtccagaagctcctgtaagcccccagcatccgaggaggagctgatcag

SEQ ID NO: 46806 - DNA, 80 bp, synthetic construct
  misc_feature 1..80: note = Artificially Synthesized Probe
  source 1..80: mol_type = other DNA
gctgcagggaagaacctgagtgatgagagtacatgattctgactctgaccctgacttcctcttaacctccatacccaaat

SEQ ID NO: 46807 - DNA, 80 bp, synthetic construct; identical to SEQ ID NO: 23333
  misc_feature 1..80: note = Artificially Synthesized Probe
  source 1..80: mol_type = other DNA

SEQ ID NO: 46808 - DNA, 80 bp, synthetic construct
  misc_feature 1..80: note = Artificially Synthesized Probe
  source 1..80: mol_type = other DNA
tatcattcccaaattctctttcgctatgcatacattcctaaactcctactttctccaaattctcaaaacattctatttta

SEQ ID NO: 46809 - DNA, 80 bp, synthetic construct
  misc_feature 1..80: note = Artificially Synthesized Probe
  source 1..80: mol_type = other DNA
atcacacagaaactaaatatgccttccatcagccatgaaaatgactaatgaaaatgtaaatgaccacgtggcccaatcct

SEQ ID NO: 46810 - DNA, 80 bp, synthetic construct; identical to SEQ ID NO: 23334
  misc_feature 1..80: note = Artificially Synthesized Probe
  source 1..80: mol_type = other DNA

SEQ ID NO: 46811 - DNA, 80 bp, synthetic construct
  misc_feature 1..80: note = Artificially Synthesized Probe
  source 1..80: mol_type = other DNA
gggtgtgaacagattaactgtgaattgacaggagggatcttactgaagtgccaaaaattttctaaaattggattatggtg

SEQ ID NO: 46812 - DNA, 80 bp, synthetic construct
  misc_feature 1..80: note = Artificially Synthesized Probe
  source 1..80: mol_type = other DNA
gcaatcctcacacctcagcctcccaagtagctaagattactaaaggcacatgccatcaagactggttaatttttgtattt

SEQ ID NO: 46813 - DNA, 80 bp, synthetic construct
  misc_feature 1..80: note = Artificially Synthesized Probe
  source 1..80: mol_type = other DNA
agctcagacatcaccagtgtaaattgttacatggaatcatataataccctttggatgttccaaactccggtgagtcactg

SEQ ID NO: 46814 - DNA, 80 bp, synthetic construct
  misc_feature 1..80: note = Artificially Synthesized Probe
  source 1..80: mol_type = other DNA
cccatttcacaaattacttttagtaagcaaacttaactaaaaatcactgaacggcatacttacaatgcatcaatttatga

SEQ ID NO: 46815 - DNA, 80 bp, synthetic construct; identical to SEQ ID NO: 23335
  misc_feature 1..80: note = Artificially Synthesized Probe
  source 1..80: mol_type = other DNA

SEQ ID NO: 46816 - DNA, 80 bp, synthetic construct
  misc_feature 1..80: note = Artificially Synthesized Probe
  source 1..80: mol_type = other DNA
ggctgcagcaggagaatcgcttgaacctgggaggtggaggttgcagtaagccgagatcacaccactgcactccagcctgg

SEQ ID NO: 46817 - DNA, 80 bp, synthetic construct
  misc_feature 1..80: note = Artificially Synthesized Probe
  source 1..80: mol_type = other DNA
aatggctccaggaaccccaagttctctcccacaccctgggcgtgattaaaactagtaacacctttctgttagaaaccaca

SEQ ID NO: 46818 - DNA, 80 bp, synthetic construct
  misc_feature 1..80: note = Artificially Synthesized Probe
  source 1..80: mol_type = other DNA
tttcagcggcgtctcgcctttcctgttgctctgctgcgggttccctccgtaccgcagcagcagcttcaccacctacaaga

SEQ ID NO: 46819 - DNA, 80 bp, synthetic construct
  misc_feature 1..80: note = Artificially Synthesized Probe
  source 1..80: mol_type = other DNA
agtgtggtggcgggagcctgtaatctcagctcaggaggctgaggcaggaggcaggaaaatctccagacctgggaggcaga

SEQ ID NO: 46820 - DNA, 80 bp, synthetic construct; identical to SEQ ID NO: 23336
  misc_feature 1..80: note = Artificially Synthesized Probe
  source 1..80: mol_type = other DNA

SEQ ID NO: 46821 - DNA, 80 bp, synthetic construct
  misc_feature 1..80: note = Artificially Synthesized Probe
  source 1..80: mol_type = other DNA
ttgttgttgttgttgccgttttcataatagtatttaacaagataaatatcttggctcctttttgtttttattgccctgcc

SEQ ID NO: 46822 - DNA, 80 bp, synthetic construct
  misc_feature 1..80: note = Artificially Synthesized Probe
  source 1..80: mol_type = other DNA
aaccatgtttataacaacttccaacttaaaatggaagaggaatcccttggagaacacacatttccttatggaagtttcct

SEQ ID NO: 46823 - DNA, 80 bp, synthetic construct
  misc_feature 1..80: note = Artificially Synthesized Probe
  source 1..80: mol_type = other DNA
tgaccatcacttgtattgcatactttaaaaagtgtggctaacagaaaggaggcaagacagatgttatttaaataaaagca

SEQ ID NO: 46824 - DNA, 80 bp, synthetic construct; identical to SEQ ID NO: 23337
  misc_feature 1..80: note = Artificially Synthesized Probe
  source 1..80: mol_type = other DNA

SEQ ID NO: 46825 - DNA, 80 bp, synthetic construct
  misc_feature 1..80: note = Artificially Synthesized Probe
  source 1..80: mol_type = other DNA
ctgagtggacctacatggagcacacagaagagcacccggcaggtagtacatgtttcacaataatccttccacaatgcaaa

SEQ ID NO: 46826 - DNA, 80 bp, synthetic construct
  misc_feature 1..80: note = Artificially Synthesized Probe
  source 1..80: mol_type = other DNA
cttacagaccaaggccacagaccacaacttctgcaggcttgcctgggacacaggggcagataaggagagcacctgaggcc

SEQ ID NO: 46827 - DNA, 80 bp, synthetic construct
  misc_feature 1..80: note = Artificially Synthesized Probe
  source 1..80: mol_type = other DNA
ataagcactgctcatatattaatgccaattttctccttcacaaattataactctgtcttaaaccaagccactatgaaagc

SEQ ID NO: 46828 - DNA, 80 bp, synthetic construct; identical to SEQ ID NO: 23338
  misc_feature 1..80: note = Artificially Synthesized Probe
  source 1..80: mol_type = other DNA

SEQ ID NO: 46829 - DNA, 80 bp, synthetic construct
  misc_feature 1..80: note = Artificially Synthesized Probe
  source 1..80: mol_type = other DNA
ctgggtgtggtgggcgaggctgtggctcctctgtgggaagggctgcagccgcgggggctcccgcacccctcctgtgctct

SEQ ID NO: 46830 - DNA, 80 bp, synthetic construct
  misc_feature 1..80: note = Artificially Synthesized Probe
  source 1..80: mol_type = other DNA
ctgttagggttcctcaagctgctcccctgagtgtttctagggttcctcaagctgctcccctgggtgcttctagggttcct

SEQ ID NO: 46831 - DNA, 80 bp, synthetic construct
  misc_feature 1..80: note = Artificially Synthesized Probe
  source 1..80: mol_type = other DNA
ttcctcaagctgctcccctgggtgcttctagcattcctcaagctgcttccctgggtgcttctagggttcctcaagctgct

SEQ ID NO: 46832 - DNA, 80 bp, synthetic construct
  misc_feature 1..80: note = Artificially Synthesized Probe
  source 1..80: mol_type = other DNA
gagcccacatagctatataagctactcagtaagaaaaaccacacaggagctacacgcaccacatcatggacaaacctcaa

SEQ ID NO: 46833 - DNA, 80 bp, synthetic construct
  misc_feature 1..80: note = Artificially Synthesized Probe
  source 1..80: mol_type = other DNA
gatttgggcaggagagagctgtggagaggaacttacctgctcacacacctcatccttggagacagcagcccccattgctg

SEQ ID NO: 46834 - DNA, 80 bp, synthetic construct; identical to SEQ ID NO: 23339
  misc_feature 1..80: note = Artificially Synthesized Probe
  source 1..80: mol_type = other DNA

SEQ ID NO: 46835 - DNA, 80 bp, synthetic construct
  misc_feature 1..80: note = Artificially Synthesized Probe
  source 1..80: mol_type = other DNA
ctgtagtcccagctacccgggaggctaaggcaggagaatcatttgaacccaggaggcggatgttgcagtgaaccgagatt

SEQ ID NO: 46836 - DNA, 80 bp, synthetic construct
  misc_feature 1..80: note = Artificially Synthesized Probe
  source 1..80: mol_type = other DNA
cctaaccaacatggaaaaaccctgtctctactaaaaatagaaaattagccgagcgtggtggcatgtgccagtaatgccag

SEQ ID NO: 46837 - DNA, 80 bp, synthetic construct; identical to SEQ ID NO: 23340
  misc_feature 1..80: note = Artificially Synthesized Probe
  source 1..80: mol_type = other DNA

SEQ ID NO: 46838 - DNA, 80 bp, synthetic construct
  misc_feature 1..80: note = Artificially Synthesized Probe
  source 1..80: mol_type = other DNA
cacaagtaaacaggaatacagttccaagacatacaacatagatggactccaaaaacacgttatgtgaaagaagccggaca

SEQ ID NO: 46839 - DNA, 80 bp, synthetic construct
  misc_feature 1..80: note = Artificially Synthesized Probe
  source 1..80: mol_type = other DNA
gcacaaagttgtaaatgtgctacaggccatggaattgtacacattcaaatggtcagagtggtggggtgttcgttatgtga

SEQ ID NO: 46840 - DNA, 80 bp, synthetic construct
  misc_feature 1..80: note = Artificially Synthesized Probe
  source 1..80: mol_type = other DNA
acgcccggctaattttttgtatttttagtagagacggggtttcaccgttttagccgggatggtctcgatctcctgacctc

SEQ ID NO: 46841 - DNA, 80 bp, synthetic construct
  misc_feature 1..80: note = Artificially Synthesized Probe
  source 1..80: mol_type = other DNA
agaggttagggagaagagtgttatggaaagggttggggggacagaatagaggaaacaaagaccaagtttctgcaagctgc

SEQ ID NO: 46842 - DNA, 80 bp, synthetic construct
  misc_feature 1..80: note = Artificially Synthesized Probe
  source 1..80: mol_type = other DNA
ttgggaggatgaggtgggcagatcatgcggtcaggagttcaagaccagcccagtcaatatggtaaaaccctgtctctact

SEQ ID NO: 46843 - DNA, 80 bp, synthetic construct; identical to SEQ ID NO: 23341
  misc_feature 1..80: note = Artificially Synthesized Probe
  source 1..80: mol_type = other DNA

SEQ ID NO: 46844 - DNA, 80 bp, synthetic construct
  misc_feature 1..80: note = Artificially Synthesized Probe
  source 1..80: mol_type = other DNA
ataaacatcactgaagaaatccaggtacatgtgaaacacacaagtgtggagctgaatggagccacgcgaaccaatacaca

SEQ ID NO: 46845 - DNA, 80 bp, synthetic construct
  misc_feature 1..80: note = Artificially Synthesized Probe
  source 1..80: mol_type = other DNA
gtggccccaggaaagcagtgacacaaaaagaaaaaaaaaagctttctgaaacggtgctttagaggtttaaccaaaataaa

SEQ ID NO: 46846 - DNA, 80 bp, synthetic construct
  misc_feature 1..80: note = Artificially Synthesized Probe
  source 1..80: mol_type = other DNA
cccgggttcaggccattctcctgcctcagcctcctgagtagctgggactacaggcgcccgccaccacgcccggctaattt

SEQ ID NO: 46847 - DNA, 80 bp, synthetic construct; identical to SEQ ID NO: 23342
  misc_feature 1..80: note = Artificially Synthesized Probe
  source 1..80: mol_type = other DNA

SEQ ID NO: 46848 - DNA, 80 bp, synthetic construct
  misc_feature 1..80: note = Artificially Synthesized Probe
  source 1..80: mol_type = other DNA
gtgccctaggcctcagcttcctgctgctgactggctgcctgcatctcctctgcggccccggcctcatgaagctgcccact

SEQ ID NO: 46849 - DNA, 80 bp, synthetic construct
  misc_feature 1..80: note = Artificially Synthesized Probe
  source 1..80: mol_type = other DNA
ggaagactgtgctagatgaaataaccatacatgcatttattcacatgggaaatggatcagacaatggctgccaatgctaa

SEQ ID NO: 46850 - DNA, 80 bp, synthetic construct; identical to SEQ ID NO: 23157
  misc_feature 1..80: note = Artificially Synthesized Probe
  source 1..80: mol_type = other DNA

SEQ ID NO: 46851 - DNA, 80 bp, synthetic construct
  misc_feature 1..80: note = Artificially Synthesized Probe
  source 1..80: mol_type = other DNA
tgaagccagcagagagagcttggaaaagagaattcagacccatcttcaagttaacaaaaacaattactgactcatacgaa

SEQ ID NO: 46852 - DNA, 80 bp, synthetic construct; identical to SEQ ID NO: 23343
  misc_feature 1..80: note = Artificially Synthesized Probe
  source 1..80: mol_type = other DNA

SEQ ID NO: 46853 - DNA, 80 bp, synthetic construct
  misc_feature 1..80: note = Artificially Synthesized Probe
  source 1..80: mol_type = other DNA
ctgggaagcctaggcaagaggatttcttgaggcgtctgagaccagccccatgtctacaaacaataaaaaagtagctgggc

SEQ ID NO: 46854 - DNA, 80 bp, synthetic construct
  misc_feature 1..80: note = Artificially Synthesized Probe
  source 1..80: mol_type = other DNA
gccaggtgcggtggctcacacctgtaatcccagcactttgagaggctgaggtaggtggatcatttgaggtccggagtttg

SEQ ID NO: 46855 - DNA, 80 bp, synthetic construct
  misc_feature 1..80: note = Artificially Synthesized Probe
  source 1..80: mol_type = other DNA
gccactgcactccagcctgggcaacagactaagacaccgtctcaaaaacaacaagaacaaaaaacattaaaaaataaaat

SEQ ID NO: 46856 - DNA, 80 bp, synthetic construct
  misc_feature 1..80: note = Artificially Synthesized Probe
  source 1..80: mol_type = other DNA
tgtaatcccagctactcaggaggctgaagcaggaaaattgcttgaacttgggaggtgggggatgcagtgagccaagatag

SEQ ID NO: 46857 - DNA, 80 bp, synthetic construct; identical to SEQ ID NO: 23344
  misc_feature 1..80: note = Artificially Synthesized Probe
  source 1..80: mol_type = other DNA

SEQ ID NO: 46858 - DNA, 80 bp, synthetic construct
  misc_feature 1..80: note = Artificially Synthesized Probe
  source 1..80: mol_type = other DNA
agaggtgccttggacagtgacattcataagagaagaaaggacaaatatcgtatgacccccccccccaacaggagacgcac

SEQ ID NO: 46859 - DNA, 80 bp, synthetic construct
  misc_feature 1..80: note = Artificially Synthesized Probe
  source 1..80: mol_type = other DNA
gagaagaaaggacaaatatcgtatgaccccccccccccccttataggagaggtgccttgagtggtgacattcataagaga

SEQ ID NO: 46860 - DNA, 80 bp, synthetic construct
  misc_feature 1..80: note = Artificially Synthesized Probe
  source 1..80: mol_type = other DNA
gagttcttatgtgtgtgagttttctatggtgactacacaaaacctcaggcttacaattgtggaggtcagaggtcaaggtg

SEQ ID NO: 46861 - DNA, 80 bp, synthetic construct
  misc_feature 1..80: note = Artificially Synthesized Probe
  source 1..80: mol_type = other DNA
gtgatggctttgcaccgtgtgaatctaataccagagaactgcacactcaaaaatggtacaaatggtcaattttatactgc

SEQ ID NO: 46862 - DNA, 80 bp, synthetic construct; identical to SEQ ID NO: 23345
  misc_feature 1..80: note = Artificially Synthesized Probe
  source 1..80: mol_type = other DNA

SEQ ID NO: 46863 - DNA, 80 bp, synthetic construct
  misc_feature 1..80: note = Artificially Synthesized Probe
  source 1..80: mol_type = other DNA
tcccattaaaacattaagttttgaaaactagggttctcatttaagcctgtctcacagcagctcagctctcagaatgttca

SEQ ID NO: 46864 - DNA, 80 bp, synthetic construct
  misc_feature 1..80: note = Artificially Synthesized Probe
  source 1..80: mol_type = other DNA
cagcatcttcttaatcactggtatacttccgtctgtcacgagcttcatttaaaaaaagcgtcacgctccctctccctccc

SEQ ID NO: 46865 - DNA, 80 bp, synthetic construct
  misc_feature 1..80: note = Artificially Synthesized Probe
  source 1..80: mol_type = other DNA
tcagcctgccgagtgcctgcgattgcaggctcacgccgccacgcctgactggttttggtggagacggggtttcgctgtgt

SEQ ID NO: 46866 - DNA, 80 bp, synthetic construct; identical to SEQ ID NO: 23346
  misc_feature 1..80: note = Artificially Synthesized Probe
  source 1..80: mol_type = other DNA

SEQ ID NO: 46867 - DNA, 80 bp, synthetic construct
  misc_feature 1..80: note = Artificially Synthesized Probe
  source 1..80: mol_type = other DNA
cccggccgcccatcgtctgagatgtggggagcgcctctgccccgccgccccgtctgggatgtgaggagcacctctgcccg

SEQ ID NO: 46868 - DNA, 80 bp, synthetic construct
  misc_feature 1..80: note = Artificially Synthesized Probe
  source 1..80: mol_type = other DNA
gcccagctgccccgtccgggagggaggtggaggtggggggggtcagcccccccgccaggccagccgccccgtccgggagg

SEQ ID NO: 46869 - DNA, 80 bp, synthetic construct
  misc_feature 1..80: note = Artificially Synthesized Probe
  source 1..80: mol_type = other DNA
caccccgtctgggaggtgtgcccaacagctcattgagaacgggccatgatgacagtggcggttttgtggaatagaaagcg

SEQ ID NO: 46870 - DNA, 80 bp, synthetic construct; identical to SEQ ID NO: 23347
  misc_feature 1..80: note = Artificially Synthesized Probe
  source 1..80: mol_type = other DNA

SEQ ID NO: 46871 - DNA, 80 bp, synthetic construct
  misc_feature 1..80: note = Artificially Synthesized Probe
  source 1..80: mol_type = other DNA
cccctctatgagaaacacccaagaattatcaataaaaaataaataaattaaaaaaaaaaaaagcctcacactggataagt

SEQ ID NO: 46872 - DNA, 80 bp, synthetic construct
  misc_feature 1..80: note = Artificially Synthesized Probe
  source 1..80: mol_type = other DNA
ggttctaacctctcctgcttctggcatctctcagactcagcaggaaaggctctcaagctttaagggcccatggggctgcc

SEQ ID NO: 46873 - DNA, 80 bp, synthetic construct
  misc_feature 1..80: note = Artificially Synthesized Probe
  source 1..80: mol_type = other DNA
tggtggaagttcttcctgttcagactgcaattctatttacaaaaaacaatagtactgtagtactattagaccacaacgct

SEQ ID NO: 46874 - DNA, 80 bp, synthetic construct; identical to SEQ ID NO: 23348
  misc_feature 1..80: note = Artificially Synthesized Probe
  source 1..80: mol_type = other DNA

SEQ ID NO: 46875 - DNA, 80 bp, synthetic construct
  misc_feature 1..80: note = Artificially Synthesized Probe
  source 1..80: mol_type = other DNA
tcccagcactttgggaggccgaggcaggcagatcacgaggtcaggagttcaagaccagccaggccaacatggtgaaacct

SEQ ID NO: 46876 - DNA, 80 bp, synthetic construct
  misc_feature 1..80: note = Artificially Synthesized Probe
  source 1..80: mol_type = other DNA
gagactccatcttaaaaaaaaaaaaaaaagaaaagaaaagaaaaagaaaaaaagaaaagaataaatctgtaacagcactg

SEQ ID NO: 46877 - DNA, 80 bp, synthetic construct
  misc_feature 1..80: note = Artificially Synthesized Probe
  source 1..80: mol_type = other DNA
ccactgcagaggaaaagcaagcttcaaggatgaaaaaccaataaagctacacagttccaagttcatctactatgattact

SEQ ID NO: 46878 - DNA, 80 bp, synthetic construct; identical to SEQ ID NO: 23349
  misc_feature 1..80: note = Artificially Synthesized Probe
  source 1..80: mol_type = other DNA

SEQ ID NO: 46879 - DNA, 80 bp, synthetic construct
  misc_feature 1..80: note = Artificially Synthesized Probe
  source 1..80: mol_type = other DNA
ctcccacatatcaacagaaaatcctacaagtttccacaaaatcctaaaaagcttaactaaaaaagaatcatgaattagac

SEQ ID NO: 46880 - DNA, 80 bp, synthetic construct
  misc_feature 1..80: note = Artificially Synthesized Probe
  source 1..80: mol_type = other DNA
gggaacacttgctcctccagcattccaccatgagacaaaggaaaaagtcgcttctgtgtgtccaccagcacacgactccc

SEQ ID NO: 46881 - DNA, 80 bp, synthetic construct; identical to SEQ ID NO: 23158
  misc_feature 1..80: note = Artificially Synthesized Probe
  source 1..80: mol_type = other DNA

SEQ ID NO: 46882 - DNA, 80 bp, synthetic construct
  misc_feature 1..80: note = Artificially Synthesized Probe
  source 1..80: mol_type = other DNA
ccacctcctgagttcacgccattctcctgcctcagcctcccgagtagctgggactgcaggcgcccgccaccatgcccggc

SEQ ID NO: 46883 - DNA, 80 bp, synthetic construct; identical to SEQ ID NO: 23350
  misc_feature 1..80: note = Artificially Synthesized Probe
  source 1..80: mol_type = other DNA

SEQ ID NO: 46884 - DNA, 80 bp, synthetic construct
  misc_feature 1..80: note = Artificially Synthesized Probe
  source 1..80: mol_type = other DNA
tgatcttatttatctaaaacccaaaagacttaattctcatttatgggaaacattcacaataggcaaatccagagagatag

SEQ ID NO: 46885 - DNA, 80 bp, synthetic construct
  misc_feature 1..80: note = Artificially Synthesized Probe
  source 1..80: mol_type = other DNA
aaattttgtattctgtgaaccagatctcgttcatttttcaaaagaaagtcatcacccaacggggtaaaattcctaatgcc

SEQ ID NO: 46886 - DNA, 80 bp, synthetic construct
  misc_feature 1..80: note = Artificially Synthesized Probe
  source 1..80: mol_type = other DNA
aaaagctgttgaactgtattccacatgttcgacatggaaaatataaaaaagacaactcggtagcagcaaacaaaagatgc

SEQ ID NO: 46887 - DNA, 80 bp, synthetic construct; identical to SEQ ID NO: 23351
  misc_feature 1..80: note = Artificially Synthesized Probe
  source 1..80: mol_type = other DNA

SEQ ID NO: 46888 - DNA, 80 bp, synthetic construct
  misc_feature 1..80: note = Artificially Synthesized Probe
  source 1..80: mol_type = other DNA
gccacagcaggtggatcgcttgagcccaggagtttgagatgggccagggcaacatggctaaaccccatctctacaaaaaa

SEQ ID NO: 46889 - DNA, 80 bp, synthetic construct
  misc_feature 1..80: note = Artificially Synthesized Probe
  source 1..80: mol_type = other DNA
ttgtctctaaaaagaaaccctgggctcaagtggccatccagcctcagcctcccaagtagctgggactacaggcacacgct

SEQ ID NO: 46890 - DNA, 80 bp, synthetic construct
  misc_feature 1..80: note = Artificially Synthesized Probe
  source 1..80: mol_type = other DNA
accatagtgccattcattatcttacccagaagtttaacggtcatattttaacatcaaatagggactcagtgttctgagtt

SEQ ID NO: 46891 - DNA, 80 bp, synthetic construct
  misc_feature 1..80: note = Artificially Synthesized Probe
  source 1..80: mol_type = other DNA
acgcaggatgcactgcacagctgatcccaaatgctgttgtgaatctaatcaagataccgtaagacatactgcatatgttt

SEQ ID NO: 46892 - DNA, 80 bp, synthetic construct; identical to SEQ ID NO: 23137
  misc_feature 1..80: note = Artificially Synthesized Probe
  source 1..80: mol_type = other DNA

SEQ ID NO: 46893 - DNA, 80 bp, synthetic construct
  misc_feature 1..80: note = Artificially Synthesized Probe
  source 1..80: mol_type = other DNA
ctcagcctcccgagtagctgggactacagatgcgcaccaccatacccaggtaagtttttttgtatttttagtagagacgg

SEQ ID NO: 46894 - DNA, 80 bp, synthetic construct; identical to SEQ ID NO: 23352
  misc_feature 1..80: note = Artificially Synthesized Probe
  source 1..80: mol_type = other DNA

SEQ ID NO: 46895 - DNA, 80 bp, synthetic construct
  misc_feature 1..80: note = Artificially Synthesized Probe
  source 1..80: mol_type = other DNA
tattttgcaccccttgaacccagtctcactcaccgatttgctgttaccaacagaatgaagcaaaagttggccaggtgcaa

SEQ ID NO: 46896 - DNA, 80 bp, synthetic construct
  misc_feature 1..80: note = Artificially Synthesized Probe
  source 1..80: mol_type = other DNA
ctcaggaggctgaggctggagaattgcttgggaacctgggaggcagaggttgcagtgagccgagatcgcgccactgcact

SEQ ID NO: 46897 - DNA, 80 bp, synthetic construct; identical to SEQ ID NO: 23353
  misc_feature 1..80: note = Artificially Synthesized Probe
  source 1..80: mol_type = other DNA

SEQ ID NO: 46898 - DNA, 80 bp, synthetic construct
  misc_feature 1..80: note = Artificially Synthesized Probe
  source 1..80: mol_type = other DNA
atgaaatcccacagcaaacatcatggttaatggtgaaaaagtggacacttttcaattaccatcagaaataagcctgtgtc

SEQ ID NO: 46899 - DNA, 80 bp, synthetic construct
  misc_feature 1..80: note = Artificially Synthesized Probe
  source 1..80: mol_type = other DNA
gctgtagcgcaatcttggctcactgcaacctctgcctcccaggttcaagagattctccagcctctgcctcctgagcagct

SEQ ID NO: 46900 - DNA, 80 bp, synthetic construct
  misc_feature 1..80: note = Artificially Synthesized Probe
  source 1..80: mol_type = other DNA
acctggttgatctccactcatcacttcttttgaacaccgtactggagattctagtccaagagaaaggagataaaacgtac

SEQ ID NO: 46901 - DNA, 80 bp, synthetic construct; identical to SEQ ID NO: 23354
  misc_feature 1..80: note = Artificially Synthesized Probe
  source 1..80: mol_type = other DNA

SEQ ID NO: 46902 - DNA, 80 bp, synthetic construct
  misc_feature 1..80: note = Artificially Synthesized Probe
  source 1..80: mol_type = other DNA
tcccgggttcacgccactctcctacctcagcctctcgagtagctgggactacaggcgcccgccaccacgcccggctaatt

SEQ ID NO: 46903 - DNA, 80 bp, synthetic construct
  misc_feature 1..80: note = Artificially Synthesized Probe
  source 1..80: mol_type = other DNA
gccccgtgtgacccctcagccttgctgtcctgcctgcaaccaggggctctccacggagctctgatgaagacatcagtgag

SEQ ID NO: 46904 - DNA, 80 bp, synthetic construct
  misc_feature 1..80: note = Artificially Synthesized Probe
  source 1..80: mol_type = other DNA
aagaaaaccaaaagcgaggaaaaatgaagtaacttactcatggtcatagcttatcactaagattcaaaccctttctacaa

SEQ ID NO: 46905 - DNA, 80 bp, synthetic construct
  misc_feature 1..80: note = Artificially Synthesized Probe
  source 1..80: mol_type = other DNA
aacgtaggtagggaatactggttaacaccatagactgagaaaggagggtaaatactaaagtattagtctctaagaaatct

SEQ ID NO: 46906 - DNA, 80 bp, synthetic construct; identical to SEQ ID NO: 23355
  misc_feature 1..80: note = Artificially Synthesized Probe
  source 1..80: mol_type = other DNA

SEQ ID NO: 46907 - DNA, 80 bp, synthetic construct
  misc_feature 1..80: note = Artificially Synthesized Probe
  source 1..80: mol_type = other DNA
aaaaaaaaggaaatctcatgaaagcatgggagccaaagccttccttcctacatcctcaatttaaaagcatgactgaggct

SEQ ID NO: 46908 - DNA, 80 bp, synthetic construct
  misc_feature 1..80: note = Artificially Synthesized Probe
  source 1..80: mol_type = other DNA
ccctccaaactagttactatctggaaattctagcgatttccaaatcacagctttcgaggaactgtgtgcaaaacctaaaa

SEQ ID NO: 46909 - DNA, 80 bp, synthetic construct
  misc_feature 1..80: note = Artificially Synthesized Probe
  source 1..80: mol_type = other DNA
tgctagaggctgctctgagaaaaagcttcaggtaacaaattaggccaccatggagacacttaagatatgatttcatgacc

SEQ ID NO: 46910 - DNA, 80 bp, synthetic construct
  misc_feature 1..80: note = Artificially Synthesized Probe
  source 1..80: mol_type = other DNA
cttgggaggatgaggaaggagagttgcttgaactcaggaggcagaggttgcagtgagctgagatgatgccactgcactcc

SEQ ID NO: 46911 - DNA, 80 bp, synthetic construct; identical to SEQ ID NO: 23356
  misc_feature 1..80: note = Artificially Synthesized Probe
  source 1..80: mol_type = other DNA

SEQ ID NO: 46912 - DNA, 80 bp, synthetic construct
  misc_feature 1..80: note = Artificially Synthesized Probe
  source 1..80: mol_type = other DNA
tttttctgagactgaagctgctgtcaacactgcccaataaacactcgcaggacacagctaaggaagacagaaaagtgaga

SEQ ID NO: 46913 - DNA, 80 bp, synthetic construct
  misc_feature 1..80: note = Artificially Synthesized Probe
  source 1..80: mol_type = other DNA
aaaaccgtctcagactcaacaataaacctaggaatgaaaagatccaaagcaaaggagcagcaaggctggaaaagctccgg

SEQ ID NO: 46914 - DNA, 80 bp, synthetic construct
  misc_feature 1..80: note = Artificially Synthesized Probe
  source 1..80: mol_type = other DNA
tgtgcactggccacacctcttggtgttacctcattccagacgagggtgggtctgccttgcaggtctaacagtcccacagt

SEQ ID NO: 46915 - DNA, 80 bp, synthetic construct; identical to SEQ ID NO: 23357
  misc_feature 1..80: note = Artificially Synthesized Probe
  source 1..80: mol_type = other DNA

SEQ ID NO: 46916 - DNA, 80 bp, synthetic construct
  misc_feature 1..80: note = Artificially Synthesized Probe
  source 1..80: mol_type = other DNA
gagctcaaccatgagatcaagaggctcactgggggccagacatagtggctcatgtctgtgatcccagcactgtgggaggc

SEQ ID NO: 46917 - DNA, 80 bp, synthetic construct
  misc_feature 1..80: note = Artificially Synthesized Probe
  source 1..80: mol_type = other DNA
ggctgcaataagtcaggatcacaccactgccctccagccgaggcaagaaagcaagaccctgcctcaaaaaaaaaaaagga

SEQ ID NO: 46918 - DNA, 80 bp, synthetic construct
  misc_feature 1..80: note = Artificially Synthesized Probe
  source 1..80: mol_type = other DNA
ggcagactggactagagtagaattccaccaggccctgaccagctgcttcactgaccacatccatcatctcatctcacctc

SEQ ID NO: 46919 - DNA, 80 bp, synthetic construct
  misc_feature 1..80: note = Artificially Synthesized Probe
  source 1..80: mol_type = other DNA
atgcaaatggaggagagagaagagacgcaccgctctcccacagactgatacgtcatggaggagagagagatgcaaccaat

SEQ ID NO: 46920 - DNA, 80 bp, synthetic construct; identical to SEQ ID NO: 23358
  misc_feature 1..80: note = Artificially Synthesized Probe
  source 1..80: mol_type = other DNA

SEQ ID NO: 46921 - DNA, 80 bp, synthetic construct
  misc_feature 1..80: note = Artificially Synthesized Probe
  source 1..80: mol_type = other DNA
aacaagaaaacaaagacttgcgtcccacaatcagcaagagataacttctgccacaacctgaaagagctcaaaagcacacc

SEQ ID NO: 46922 - DNA, 80 bp, synthetic construct
  misc_feature 1..80: note = Artificially Synthesized Probe
  source 1..80: mol_type = other DNA
gtgagataataaatgtgttgtgtgtcaatttgttacacagcagtagaaaataaatacactggcctggcatggtgactcat

SEQ ID NO: 46923 - DNA, 80 bp, synthetic construct; identical to SEQ ID NO: 23359
  misc_feature 1..80: note = Artificially Synthesized Probe
  source 1..80: mol_type = other DNA

SEQ ID NO: 46924 - DNA, 80 bp, synthetic construct
  misc_feature 1..80: note = Artificially Synthesized Probe
  source 1..80: mol_type = other DNA
caagttttttataattaacaaaatgctgccttcaaggttacatatgccaccaacgtcaatcctcagaacactgcataaca

SEQ ID NO: 46925 - DNA, 80 bp, synthetic construct; identical to SEQ ID NO: 23159
  misc_feature 1..80: note = Artificially Synthesized Probe
  source 1..80: mol_type = other DNA

SEQ ID NO: 46926 - DNA, 80 bp, synthetic construct
  misc_feature 1..80: note = Artificially Synthesized Probe
  source 1..80: mol_type = other DNA
ctcctcacccctgctggtgcagtgagatgaggacctcaagtaagggggtggcagccgggacttccacaattcagggcaat

SEQ ID NO: 46927 - DNA, 80 bp, synthetic construct
  misc_feature 1..80: note = Artificially Synthesized Probe
  source 1..80: mol_type = other DNA
taggaaaaaaggcaatgaccactccactggagaacaaagcccacagcatttaagctggagggacaagaaaatccaatcat

SEQ ID NO: 46928 - DNA, 80 bp, synthetic construct; identical to SEQ ID NO: 23360
  misc_feature 1..80: note = Artificially Synthesized Probe
  source 1..80: mol_type = other DNA

SEQ ID NO: 46929 - DNA, 80 bp, synthetic construct
  misc_feature 1..80: note = Artificially Synthesized Probe
  source 1..80: mol_type = other DNA
aaaacagtactacagcaagtcaacaacaaacaattacaatcaaaattctgttctatgctgtgatatctccacgaaacaca

SEQ ID NO: 46930 - DNA, 80 bp, synthetic construct
  misc_feature 1..80: note = Artificially Synthesized Probe
  source 1..80: mol_type = other DNA
tgcctcagtctcccggaattacaggcacgcaccaccatgcccagctaatttttgtatttttactagagacgaggtttcac

SEQ ID NO: 46931 - DNA, 80 bp, synthetic construct
  misc_feature 1..80: note = Artificially Synthesized Probe
  source 1..80: mol_type = other DNA
ccctgtctctactaaaaaaatttaaaaattaaccaggcgtggtggtgggcacctgtagtcccagctacttgggaggctga

SEQ ID NO: 46932 - DNA, 80 bp, synthetic construct
  misc_feature 1..80: note = Artificially Synthesized Probe
  source 1..80: mol_type = other DNA
gcaaattatgagaacaaaaaaaattcagccaatgccttctcacatcaaaataccaaaactacaaagccaatttcaggtat

SEQ ID NO: 46933 - DNA, 80 bp, synthetic construct; identical to SEQ ID NO: 23361
  misc_feature 1..80: note = Artificially Synthesized Probe
  source 1..80: mol_type = other DNA

SEQ ID NO: 46934 - DNA, 80 bp, synthetic construct
  misc_feature 1..80: note = Artificially Synthesized Probe
  source 1..80: mol_type = other DNA
cgatatcatttacacatcaacatcaggaataaatacaaaccaaaacctggccaaaccaggagaggtgcctggaccaggac

SEQ ID NO: 46935 - DNA, 80 bp, synthetic construct
  misc_feature 1..80: note = Artificially Synthesized Probe
  source 1..80: mol_type = other DNA
ttggtctcacagccaacagtttggacacatatcctagaggtatactacacttccagcaaagagatgggggcccaaggccc

SEQ ID NO: 46936 - DNA, 80 bp, synthetic construct
  misc_feature 1..80: note = Artificially Synthesized Probe
  source 1..80: mol_type = other DNA
tttatacacgggcacagactggaacacatgatatggtaacaatctataatacgaggagctcgttaagctcagagatgaaa

SEQ ID NO: 46937 - DNA, 80 bp, synthetic construct
  misc_feature 1..80: note = Artificially Synthesized Probe
  source 1..80: mol_type = other DNA
agaattagctagttaaatttatatctcagaaaacaggcacaatagaagtataaaagccatcacctttaagtcatttcccc

SEQ ID NO: 46938 - DNA, 80 bp, synthetic construct
  misc_feature 1..80: note = Artificially Synthesized Probe
  source 1..80: mol_type = other DNA
tccgcacctgcagccagcagctgcttcgcgacgtcgtagtagccccggttacaggcctcgtgcagcgccgtccagcctgg

SEQ ID NO: 46939 - DNA, 80 bp, synthetic construct; identical to SEQ ID NO: 23362
  misc_feature 1..80: note = Artificially Synthesized Probe
  source 1..80: mol_type = other DNA

SEQ ID NO: 46940 - DNA, 80 bp, synthetic construct
  misc_feature 1..80: note = Artificially Synthesized Probe
  source 1..80: mol_type = other DNA
gatccacccgcttcagcctcccaaagtgctgggattacaggtgtgagccactgggcccggcagtatttagcattttaata

SEQ ID NO: 46941 - DNA, 80 bp, synthetic construct
  misc_feature 1..80: note = Artificially Synthesized Probe
  source 1..80: mol_type = other DNA
ggtggcaggcaggagaactgcttgaatgcaggagaactgcttgaacgcaggaggcgaaggtttcagtgagccaagatcac

SEQ ID NO: 46942 - DNA, 80 bp, synthetic construct
  misc_feature 1..80: note = Artificially Synthesized Probe
  source 1..80: mol_type = other DNA
aaacaatggcttaatgagaggagcgcttaataaactgaaattttgtttaacactttcaggaacagttcccaacgttgttg

SEQ ID NO: 46943 - DNA, 80 bp, synthetic construct; identical to SEQ ID NO: 23363
  misc_feature 1..80: note = Artificially Synthesized Probe
  source 1..80: mol_type = other DNA

SEQ ID NO: 46944 - DNA, 80 bp, synthetic construct
  misc_feature 1..80: note = Artificially Synthesized Probe
  source 1..80: mol_type = other DNA
ctcattactttccaaagagaatgggtctcaaggtctcaaggacccactgccctccaaaaaagcaacctggacatcctgct

SEQ ID NO: 46945 - DNA, 80 bp, synthetic construct
  misc_feature 1..80: note = Artificially Synthesized Probe
  source 1..80: mol_type = other DNA
gcagtttctgcccgtgacatttctcattaggactttccacaattcttgaggcttaatgcaaattccttattcccatgact

SEQ ID NO: 46946 - DNA, 80 bp, synthetic construct
  misc_feature 1..80: note = Artificially Synthesized Probe
  source 1..80: mol_type = other DNA
ttttcttttcttttttgagatgttctcactctgtcaccggggctagagaccagtggcatgatctcagctcactgcaacct

SEQ ID NO: 46947 - DNA, 80 bp, synthetic construct; identical to SEQ ID NO: 23364
  misc_feature 1..80: note = Artificially Synthesized Probe
  source 1..80: mol_type = other DNA

SEQ ID NO: 46948 - DNA, 80 bp, synthetic construct
  misc_feature 1..80: note = Artificially Synthesized Probe
  source 1..80: mol_type = other DNA
ccagcctgaccaacacggagaaaccccatgtctactaaaaatacaaaaaaattagctgggcttggtagcacatgcctgta

SEQ ID NO: 46949 - DNA, 80 bp, synthetic construct
  misc_feature 1..80: note = Artificially Synthesized Probe
  source 1..80: mol_type = other DNA
cccctaaattctctttactgtggcacctcgttagcacgatccatatctagcttattaaccctacggactgacaacctgca

SEQ ID NO: 46950 - DNA, 80 bp, synthetic construct
  misc_feature 1..80: note = Artificially Synthesized Probe
  source 1..80: mol_type = other DNA
tggctcacacctgtaatcccagcactttgggaggccgagggggcggatcacgagttcaggagattgagaccatcctggct

SEQ ID NO: 46951 - DNA, 80 bp, synthetic construct
  misc_feature 1..80: note = Artificially Synthesized Probe
  source 1..80: mol_type = other DNA
cctgggtgacagagcgagactccatctcaaaaaaaaaaaaaaaaaaactagccgggcgtgatggcacacacctctaatcc

SEQ ID NO: 46952 - DNA, 80 bp, synthetic construct; identical to SEQ ID NO: 23365
  misc_feature 1..80: note = Artificially Synthesized Probe
  source 1..80: mol_type = other DNA

SEQ ID NO: 46953 - DNA, 80 bp, synthetic construct
  misc_feature 1..80: note = Artificially Synthesized Probe
  source 1..80: mol_type = other DNA
tgaacccaggaggcggaggttgcagtgagccgagatcacaccactgcactccagcctgggcgacagagtgagactccatc

SEQ ID NO: 46954 - DNA, 80 bp, synthetic construct
  misc_feature 1..80: note = Artificially Synthesized Probe
  source 1..80: mol_type = other DNA
ctttctatactccttctagcagcaggcttcaacctccaaaatctctaacccccttctgtttggacccaaaaccactatct

SEQ ID NO: 46955 - DNA, 80 bp, synthetic construct
  misc_feature 1..80: note = Artificially Synthesized Probe
  source 1..80: mol_type = other DNA
ccccagatagccatttcctttcctcaactgagatgcccacttctccctccagaatgtgggcaaatcacaccagtgacgtc

SEQ ID NO: 46956 - DNA, 80 bp, synthetic construct
  misc_feature 1..80: note = Artificially Synthesized Probe
  source 1..80: mol_type = other DNA
tgtttgccccattccctccactgggaatcaattcatcttctctttttccaagtctttttaatgaataccagttaacacca

SEQ ID NO: 46957 - DNA, 80 bp, synthetic construct; identical to SEQ ID NO: 23366
  misc_feature 1..80: note = Artificially Synthesized Probe
  source 1..80: mol_type = other DNA

SEQ ID NO: 46958 - DNA, 80 bp, synthetic construct
  misc_feature 1..80: note = Artificially Synthesized Probe
  source 1..80: mol_type = other DNA
cagtgctttcatctaggcatccaccgcctgcaaactctgacacatcatcttctgcctcaaaacaagtaagcaaatgaaat

SEQ ID NO: 46959 - DNA, 80 bp, synthetic construct
  misc_feature 1..80: note = Artificially Synthesized Probe
  source 1..80: mol_type = other DNA
aaacctcccgtgtcggaaacggaaaccaaggctgagagcctcctgaaggctgaagagctgctacagcaggagctccaggg

SEQ ID NO: 46960 - DNA, 80 bp, synthetic construct
  misc_feature 1..80: note = Artificially Synthesized Probe
  source 1..80: mol_type = other DNA
tcccgaagtcgaagatgcccttactctgatttctgcagtgacattctactgattctttttttaaaacagaaacatagctt

SEQ ID NO: 46961 - DNA, 80 bp, synthetic construct
  misc_feature 1..80: note = Artificially Synthesized Probe
  source 1..80: mol_type = other DNA
gccacagcactgcacccagtgagcagccaatgaacatctgtgaaggaaatcagtgaaacatcagaaaaagcagagtttgt

SEQ ID NO: 46962 - DNA, 80 bp, synthetic construct; identical to SEQ ID NO: 23367
  misc_feature 1..80: note = Artificially Synthesized Probe
  source 1..80: mol_type = other DNA

SEQ ID NO: 46963 - DNA, 80 bp, synthetic construct
  misc_feature 1..80: note = Artificially Synthesized Probe
  source 1..80: mol_type = other DNA
ggaacctgtgaatgccttaggttacgtggaaaagggaactgaggttactaatcagcagagagggagatgacctcgcagtg

SEQ ID NO: 46964 - DNA, 80 bp, synthetic construct
  misc_feature 1..80: note = Artificially Synthesized Probe
  source 1..80: mol_type = other DNA
gcactccagcctgggcaacagagccgagactctccaaaaaagcgggtgggcagcaggagtcagagagatgccatgaggct

SEQ ID NO: 46965 - DNA, 80 bp, synthetic construct; identical to SEQ ID NO: 23368
  misc_feature 1..80: note = Artificially Synthesized Probe
  source 1..80: mol_type = other DNA

SEQ ID NO: 46966 - DNA, 80 bp, synthetic construct
  misc_feature 1..80: note = Artificially Synthesized Probe
  source 1..80: mol_type = other DNA
actctctaaaacttcaccgtaccattagcttctactaaatgtccttttttacaagagtcagtttcaacatcatcttcttt

SEQ ID NO: 46967 - DNA, 80 bp, synthetic construct
  misc_feature 1..80: note = Artificially Synthesized Probe
  source 1..80: mol_type = other DNA
aaagataaaggatacaattcaaagatacctctcgcatgtgtcaggggaaaaatgcctgtgagaaaatgtttaggccgggc

SEQ ID NO: 46968 - DNA, 80 bp, synthetic construct
  misc_feature 1..80: note = Artificially Synthesized Probe
  source 1..80: mol_type = other DNA
cacggaagcacacggcactgctctagagaagtttcttttagaaaaatgctttaaaaaaaaaaggtgctaaattaggtttg

SEQ ID NO: 46969 - DNA, 80 bp, synthetic construct
  misc_feature 1..80: note = Artificially Synthesized Probe
  source 1..80: mol_type = other DNA
ctactcgggaagatgaggtaggagaatcgcctgaacccgggaggcggaggttgcggtgagccaagatcatgcctgggcaa

SEQ ID NO: 46970 - DNA, 80 bp, synthetic construct
  misc_feature 1..80: note = Artificially Synthesized Probe
  source 1..80: mol_type = other DNA
aaacatacaattatagtgaagaaaaaatccacaaagtctaaaaattccttgaaatccgaatcaactgtggggctgtggaa

SEQ ID NO: 46971 - DNA, 80 bp, synthetic construct; identical to SEQ ID NO: 23369
  misc_feature 1..80: note = Artificially Synthesized Probe
  source 1..80: mol_type = other DNA

SEQ ID NO: 46972 - DNA, 80 bp, synthetic construct
  misc_feature 1..80: note = Artificially Synthesized Probe
  source 1..80: mol_type = other DNA
tgaatgcagcagtaagctaatcctaactctagtaaaacctcaggaaccaagcagcctacgcaatcttccctttacttgga

SEQ ID NO: 46973 - DNA, 80 bp, synthetic construct
  misc_feature 1..80: note = Artificially Synthesized Probe
  source 1..80: mol_type = other DNA
tttacataaaaaataacctctgatatcataaagttattaggcatttacaaataacatttcaatttcagccattcttaaaa

SEQ ID NO: 46974 - DNA, 80 bp, synthetic construct; identical to SEQ ID NO: 23370
  misc_feature 1..80: note = Artificially Synthesized Probe
  source 1..80: mol_type = other DNA

SEQ ID NO: 46975 - DNA, 80 bp, synthetic construct
  misc_feature 1..80: note = Artificially Synthesized Probe
  source 1..80: mol_type = other DNA
aggattcggtcctctaggcccctgaaaaatctcagccatacagacaggacggcttacttttattttcacactgaaaaccc

SEQ ID NO: 46976 - DNA, 80 bp, synthetic construct
  misc_feature 1..80: note = Artificially Synthesized Probe
  source 1..80: mol_type = other DNA
ggggttccagaccagcctgaccaacatggggaaaccccatctctactttaaaaaaaaaaaaaaaaaaacactaactggga

SEQ ID NO: 46977 - DNA, 80 bp, synthetic construct
  misc_feature 1..80: note = Artificially Synthesized Probe
  source 1..80: mol_type = other DNA
cttagagctagaatagtatctgaatgttttcaaccacaatcaaccagttcccctccaccaaataccctagccccttactg

SEQ ID NO: 46978 - DNA, 80 bp, synthetic construct; identical to SEQ ID NO: 23160
  misc_feature 1..80: note = Artificially Synthesized Probe
  source 1..80: mol_type = other DNA

SEQ ID NO: 46979 - DNA, 80 bp, synthetic construct
  misc_feature 1..80: note = Artificially Synthesized Probe
  source 1..80: mol_type = other DNA
tgtctttccctccaaagagatcattttttcttcattaaaatgctaaaactttcatatcactccacctgctcagctacatg

SEQ ID NO: 46980 - DNA, 80 bp, synthetic construct; identical to SEQ ID NO: 23371
  misc_feature 1..80: note = Artificially Synthesized Probe
  source 1..80: mol_type = other DNA

SEQ ID NO: 46981 - DNA, 80 bp, synthetic construct
  misc_feature 1..80: note = Artificially Synthesized Probe
  source 1..80: mol_type = other DNA
gaaggctgaggcctacacaacacaggaagaccctgtttctacaaaaagtaaaataaattagctgggcacggcggcacatg

SEQ ID NO: 46982 - DNA, 80 bp, synthetic construct
  misc_feature 1..80: note = Artificially Synthesized Probe
  source 1..80: mol_type = other DNA
ggaagtgatattacactaagacgcaaaggctgagtaggagttatcttggagtttggggggatctgcatgagatggcagcg

SEQ ID NO: 46983 - DNA, 80 bp, synthetic construct
  misc_feature 1..80: note = Artificially Synthesized Probe
  source 1..80: mol_type = other DNA
aacatttgaggccaggcatggtggctcacgtctataatcccagcactttgggaggccgaggcaggtggatcacttgaggt

SEQ ID NO: 46984 - DNA, 80 bp, synthetic construct; identical to SEQ ID NO: 23372
  misc_feature 1..80: note = Artificially Synthesized Probe
  source 1..80: mol_type = other DNA

SEQ ID NO: 46985 - DNA, 80 bp, synthetic construct
  misc_feature 1..80: note = Artificially Synthesized Probe
  source 1..80: mol_type = other DNA
acaagggatgcaccatcattttcaccgattaactacaaataccttgctattaagagacactcacccattacacttacgat

SEQ ID NO: 46986 - DNA, 80 bp, synthetic construct
  misc_feature 1..80: note = Artificially Synthesized Probe
  source 1..80: mol_type = other DNA
gatgatgggctctctgcccatatgcaaaataagactcctcttatatttgatgaagcataacctttctatgtcaaatctac

SEQ ID NO: 46987 - DNA, 80 bp, synthetic construct
  misc_feature 1..80: note = Artificially Synthesized Probe
  source 1..80: mol_type = other DNA
gaaaccccatctctactaaaaatacaaaaattagccaggcgtggcggtgggcgcctgtaatcccagctactcgggaggct

SEQ ID NO: 46988 - DNA, 80 bp, synthetic construct; identical to SEQ ID NO: 23373
  misc_feature 1..80: note = Artificially Synthesized Probe
  source 1..80: mol_type = other DNA

SEQ ID NO: 46989 - DNA, 80 bp, synthetic construct
  misc_feature 1..80: note = Artificially Synthesized Probe
  source 1..80: mol_type = other DNA
agaaaagcatctggcggtggcaatgcaagtcagaaggctgacgcaaatgagagctgcaaaagaggaactcaggttttaaa

SEQ ID NO: 46990 - DNA, 80 bp, synthetic construct
  misc_feature 1..80: note = Artificially Synthesized Probe
  source 1..80: mol_type = other DNA
ggacaggtccctccaggggcctggagtgaggtttatggaacacagcagagtaaaatttaaaattcctcagttctcttaca

SEQ ID NO: 46991 - DNA, 80 bp, synthetic construct
  misc_feature 1..80: note = Artificially Synthesized Probe
  source 1..80: mol_type = other DNA
cttgtggggaacttttcaacaaacttaagaggcatcacgaagaacagagaaaacgtcacagcaacttggtctttgttccc

SEQ ID NO: 46992 - DNA, 80 bp, synthetic construct; identical to SEQ ID NO: 23374
  misc_feature 1..80: note = Artificially Synthesized Probe
  source 1..80: mol_type = other DNA

SEQ ID NO: 46993 - DNA, 80 bp, synthetic construct
  misc_feature 1..80: note = Artificially Synthesized Probe
  source 1..80: mol_type = other DNA
gtctccgattttgaacgttatgccatagactaggtctgcacacaacaaaaacagtaactgtttcgatggcactttttcca

SEQ ID NO: 46994 - DNA, 80 bp, synthetic construct
  misc_feature 1..80: note = Artificially Synthesized Probe
  source 1..80: mol_type = other DNA
gatattgctctaatgactgcataaaactctctcctcatgtaagaaagcctgaaatctaatttctctaccataaaaccctg

SEQ ID NO: 46995 - DNA, 80 bp, synthetic construct
  misc_feature 1..80: note = Artificially Synthesized Probe
  source 1..80: mol_type = other DNA
aaccttccaaaaacacaacagaagcagaaaatcttaatggggcaccaggaaaagagcaagcctcgagaaaaatcaagact

SEQ ID NO: 46996 - DNA, 80 bp, synthetic construct
  misc_feature 1..80: note = Artificially Synthesized Probe
  source 1..80: mol_type = other DNA
gccctgccaggggatgatgaaatgaggaacggaaattaacatttcaggcaacgtctcacattgttccttgaggccaaggg

SEQ ID NO: 46997 - DNA, 80 bp, synthetic construct; identical to SEQ ID NO: 23375
  misc_feature 1..80: note = Artificially Synthesized Probe
  source 1..80: mol_type = other DNA

SEQ ID NO: 46998 - DNA, 80 bp, synthetic construct
  misc_feature 1..80: note = Artificially Synthesized Probe
  source 1..80: mol_type = other DNA
ccctcacggccgctccgagcccccgaggcccgccccggagccccctgtccgcctctcacggccgccccgggcccccacgg

SEQ ID NO: 46999 - DNA, 80 bp, synthetic construct
  misc_feature 1..80: note = Artificially Synthesized Probe
  source 1..80: mol_type = other DNA
caccccgggcccccaaagacccccggctgccccgaacccggacccgtaggcccgctccgggacccattattggtccctca

SEQ ID NO: 47000 - DNA, 80 bp, synthetic construct
  misc_feature 1..80: note = Artificially Synthesized Probe
  source 1..80: mol_type = other DNA
cgcctctcaccgtgctccgagggctgcgcggctccgcgacggctcagcggcggggcgcgggcgctgcccatgcagcccgc

SEQ ID NO: 47001 - DNA, 80 bp, synthetic construct
  misc_feature 1..80: note = Artificially Synthesized Probe
  source 1..80: mol_type = other DNA
ctgcacccggaaggctgagttgggaacatcgcttgagcccaggagttcaaagcttcagtgagtcgtgatcacgccactgc

SEQ ID NO: 47002 - DNA, 80 bp, synthetic construct
  misc_feature 1..80: note = Artificially Synthesized Probe
  source 1..80: mol_type = other DNA
tgatggggcgtctggccgcgggctcggcggcggcgcctccccggctggggccctcggtccatcgcgcaccgtctcagggc

SEQ ID NO: 47003 - DNA, 80 bp, synthetic construct; identical to SEQ ID NO: 23161
  misc_feature 1..80: note = Artificially Synthesized Probe
  source 1..80: mol_type = other DNA

SEQ ID NO: 47004 - DNA, 80 bp, synthetic construct
  misc_feature 1..80: note = Artificially Synthesized Probe
  source 1..80: mol_type = other DNA
agggctccaattgggggaggctcagggctccaatggggggaggctcagggctccaatggggtgaggctcagggctccagc

SEQ ID NO: 47005 - DNA, 80 bp, synthetic construct; identical to SEQ ID NO: 23139
  misc_feature 1..80: note = Artificially Synthesized Probe
  source 1..80: mol_type = other DNA

SEQ ID NO: 47006 - DNA, 80 bp, synthetic construct
  misc_feature 1..80: note = Artificially Synthesized Probe
  source 1..80: mol_type = other DNA
cttgacgttgacgtctgccccctcgctgatgagctctttgatgcgccgggcgtccccgcggatggcggctcggtgcaggc

SEQ ID NO: 47007 - DNA, 80 bp, synthetic construct
  misc_feature 1..80: note = Artificially Synthesized Probe
  source 1..80: mol_type = other DNA
tgctttgtccaatcttcaagagcccaggccaccatcacgaggtccctttgcacagggcttgtcctcagcacagccatgag

SEQ ID NO: 47008 - DNA, 80 bp, synthetic construct
  misc_feature 1..80: note = Artificially Synthesized Probe
  source 1..80: mol_type = other DNA
caaacagcagcccggccttccgggtgacaggctccttcttaatcctcttccgctcagggccctgcttctctgtgaggcgg

SEQ ID NO: 47009 - DNA, 80 bp, synthetic construct; identical to SEQ ID NO: 23162
  misc_feature 1..80: note = Artificially Synthesized Probe
  source 1..80: mol_type = other DNA

SEQ ID NO: 47010 - DNA, 80 bp, synthetic construct
  misc_feature 1..80: note = Artificially Synthesized Probe
  source 1..80: mol_type = other DNA
tccctcctccaaacagtgcagatataaaatggcagacacagtttaaaacacatcagtaaatcaaggccaactggtcagta

SEQ ID NO: 47011 - DNA, 80 bp, synthetic construct
  misc_feature 1..80: note = Artificially Synthesized Probe
  source 1..80: mol_type = other DNA
gagcactaacaagacacggtgtgagagctcggctgtttccacctcagcctcctcgtaacaagcacaccctgcactcatct

SEQ ID NO: 47012 - DNA, 80 bp, synthetic construct
  misc_feature 1..80: note = Artificially Synthesized Probe
  source 1..80: mol_type = other DNA
tggaaatcaggggccagacacctctgaatcctcctccagctgccctgcgggttctggggttttctaggtcatggggtgaa

SEQ ID NO: 47013 - DNA, 80 bp, synthetic construct; identical to SEQ ID NO: 23163
  misc_feature 1..80: note = Artificially Synthesized Probe
  source 1..80: mol_type = other DNA

SEQ ID NO: 47014 - DNA, 80 bp, synthetic construct
  misc_feature 1..80: note = Artificially Synthesized Probe
  source 1..80: mol_type = other DNA
ctagttctttccaaggtatctgaggctgatttcttaggaattcggtctggggcatgctgagaatgtggattcgtatgtcc

SEQ ID NO: 47015 - DNA, 80 bp, synthetic construct
  misc_feature 1..80: note = Artificially Synthesized Probe
  source 1..80: mol_type = other DNA
agcccctcatagaacctggcaaacacggtggttggggaggcagcctcgccaccggccaatgagccccagcctacagccat

SEQ ID NO: 47016 - DNA, 80 bp, synthetic construct
  misc_feature 1..80: note = Artificially Synthesized Probe
  source 1..80: mol_type = other DNA
gtagggctggtggttctcatctgtgcccacatcagcacctttctgagagctgcagtatgacacacgggtgcttggttcag

SEQ ID NO: 47017 - DNA, 80 bp, synthetic construct
  misc_feature 1..80: note = Artificially Synthesized Probe
  source 1..80: mol_type = other DNA
ctgcggctgcctccctctaggaaagaggcgacgaagctgctggagaaaccccagctcccccaccgatagccctcaagtcc

SEQ ID NO: 47018 - DNA, 80 bp, synthetic construct; identical to SEQ ID NO: 23164
  misc_feature 1..80: note = Artificially Synthesized Probe
  source 1..80: mol_type = other DNA

SEQ ID NO: 47019 - DNA, 80 bp, synthetic construct
  misc_feature 1..80: note = Artificially Synthesized Probe
  source 1..80: mol_type = other DNA
gttggggttgcggagggaggagctggggcagagttgtggctgcggagggaggagctggggcagagttggggctgcagagc

SEQ ID NO: 47020 - DNA, 80 bp, synthetic construct
  misc_feature 1..80: note = Artificially Synthesized Probe
  source 1..80: mol_type = other DNA
ggaggagctggggcagagttggggctgcggagggaggagctggggcagaggtggggctgcggagggaggagctggggcgg

SEQ ID NO: 47021 - DNA, 80 bp, synthetic construct
  misc_feature 1..80: note = Artificially Synthesized Probe
  source 1..80: mol_type = other DNA
ggccaggagcccacgctgcgtccccgctctgaggggcagcaaagagctgctttgtggcaaacagaacatgtcccactcct

SEQ ID NO: 47022 - DNA, 80 bp, synthetic construct; identical to SEQ ID NO: 23165
  misc_feature 1..80: note = Artificially Synthesized Probe
  source 1..80: mol_type = other DNA

SEQ ID NO: 47023 - DNA, 80 bp, synthetic construct
  misc_feature 1..80: note = Artificially Synthesized Probe
  source 1..80: mol_type = other DNA
tccctgtcctgaaacaggactttttacttgtcctgacaccaaaaaagtccaatatgaaaccagatctcccaggatgccaa

SEQ ID NO: 47024 - DNA, 80 bp, synthetic construct
  misc_feature 1..80: note = Artificially Synthesized Probe
  source 1..80: mol_type = other DNA
tggccactccagtggcttctggggtagagggaaagccccacccacggagcgagacccccatgtgccacagcccatggctc

SEQ ID NO: 47025 - DNA, 80 bp, synthetic construct
  misc_feature 1..80: note = Artificially Synthesized Probe
  source 1..80: mol_type = other DNA
gggtcccgcactgcctgcctgcctgcccctcctaccccaggcctgggatgacctggagccgtgtgcccctgagaaacgct

SEQ ID NO: 47026 - DNA, 80 bp, synthetic construct; identical to SEQ ID NO: 23166
  misc_feature 1..80: note = Artificially Synthesized Probe
  source 1..80: mol_type = other DNA

SEQ ID NO: 47027 - DNA, 80 bp, synthetic construct
  misc_feature 1..80: note = Artificially Synthesized Probe
  source 1..80: mol_type = other DNA
cctgcagtcggaacacggcctgcaggctctgagggctttgtgggctcaggcagcctggggctgagggcagaggtccaggg

SEQ ID NO: 47028 - DNA, 80 bp, synthetic construct
  misc_feature 1..80: note = Artificially Synthesized Probe
  source 1..80: mol_type = other DNA
gtgagcagccctcgcgaccgggataagggtgtgctgcccttcccggcacctcccccgcccctgcccaccgccctggccag

SEQ ID NO: 47029 - DNA, 80 bp, synthetic construct
  misc_feature 1..80: note = Artificially Synthesized Probe
  source 1..80: mol_type = other DNA
ctctgaggctggcagcacacctcactacccagctggccagtggaagattccacggaaccctctcctcctcagcacagagc

SEQ ID NO: 47030 - DNA, 80 bp, synthetic construct
  misc_feature 1..80: note = Artificially Synthesized Probe
  source 1..80: mol_type = other DNA
ctggaggcgagcgtcccgaggcaaacggcggtggcacctggctctgtgcaggtgggatgggggggatgtgacgcgcctgg

SEQ ID NO: 47031 - DNA, 80 bp, synthetic construct; identical to SEQ ID NO: 23167
  misc_feature 1..80: note = Artificially Synthesized Probe
  source 1..80: mol_type = other DNA

SEQ ID NO: 47032 - DNA, 80 bp, synthetic construct
  misc_feature 1..80: note = Artificially Synthesized Probe
  source 1..80: mol_type = other DNA
taacatcctccctttgctgttctgaaaacttcacgtcagagtcatatttaaatgtgtaattactgctctttctcctgctt

SEQ ID NO: 47033 - DNA, 80 bp, synthetic construct
  misc_feature 1..80: note = Artificially Synthesized Probe
  source 1..80: mol_type = other DNA
caggcttcctgtctcactttctttctgtgctccagagtctaggcaatctcttttgttagaacttccaattcaccaatact

SEQ ID NO: 47034 - DNA, 80 bp, synthetic construct; identical to SEQ ID NO: 23168
  misc_feature 1..80: note = Artificially Synthesized Probe
  source 1..80: mol_type = other DNA

SEQ ID NO: 47035 - DNA, 80 bp, synthetic construct
  misc_feature 1..80: note = Artificially Synthesized Probe
  source 1..80: mol_type = other DNA
ggcaggaatgggtcagaagtctcattggtgacctctcaaagcccctcatccctcctcagcacctgtccctcttagctggg

SEQ ID NO: 47036 - DNA, 80 bp, synthetic construct
  misc_feature 1..80: note = Artificially Synthesized Probe
  source 1..80: mol_type = other DNA
gtggaggtgtgtggcctcagctgctcatctgaacaaatgccttttgtatcaatcatttagcacctctaatttctaggctt

SEQ ID NO: 47037 - DNA, 80 bp, synthetic construct
  misc_feature 1..80: note = Artificially Synthesized Probe
  source 1..80: mol_type = other DNA
aaactcgaagacgtcaaaatacattcttgattctgctccacaaagggatgtttccatggcgatattttcaaacaacagaa

SEQ ID NO: 47038 - DNA, 80 bp, synthetic construct
  misc_feature 1..80: note = Artificially Synthesized Probe
  source 1..80: mol_type = other DNA
tacagcacttctggccaagaagtctaaatcacagccgatctacacgaggcggatggtccacaacgccaagttcctacccg

SEQ ID NO: 47039 - DNA, 80 bp, synthetic construct
  misc_feature 1..80: note = Artificially Synthesized Probe
  source 1..80: mol_type = other DNA
gggacaggacctcacctccccgaaagcatcggccagattaagagaatctgaaattgtcaccgcccatcacagaactgggc

SEQ ID NO: 47040 - DNA, 80 bp, synthetic construct; identical to SEQ ID NO: 23169
  misc_feature 1..80: note = Artificially Synthesized Probe
  source 1..80: mol_type = other DNA

SEQ ID NO: 47041 - DNA, 80 bp, synthetic construct
  misc_feature 1..80: note = Artificially Synthesized Probe
  source 1..80: mol_type = other DNA
acctccatgccttccccatctccaggccggggtggggtaggggtagggtggggtggggcggaaggaccagttccacagga

SEQ ID NO: 47042 - DNA, 80 bp, synthetic construct
  misc_feature 1..80: note = Artificially Synthesized Probe
  source 1..80: mol_type = other DNA
acggtttcccaccctgggcctcctttccacacacacagcatcgtgggtattttaaaataaacaagatcaacgtccaaacc

SEQ ID NO: 47043 - DNA, 80 bp, synthetic construct
  misc_feature 1..80: note = Artificially Synthesized Probe
  source 1..80: mol_type = other DNA
gacaggctgagaaatgggcccaaagtcccacagcatggagccaggaggtagcagacggcccctgcccgcccccctcactt

SEQ ID NO: 47044 - DNA, 80 bp, synthetic construct; identical to SEQ ID NO: 23170
  misc_feature 1..80: note = Artificially Synthesized Probe
  source 1..80: mol_type = other DNA

SEQ ID NO: 47045 - DNA, 80 bp, synthetic construct
  misc_feature 1..80: note = Artificially Synthesized Probe
  source 1..80: mol_type = other DNA
tcatgtgaaaatattttattttgacgtgctttttcttgagtgcctgaatgtggtggctcttagggtaaccccagaatcct

SEQ ID NO: 47046 - DNA, 80 bp, synthetic construct
  misc_feature 1..80: note = Artificially Synthesized Probe
  source 1..80: mol_type = other DNA
tttccagagactcacgaggtggcagagagtcaggctgtggcaggggcccctgtgtatcgaggagaggaggaagagtctgc

SEQ ID NO: 47047 - DNA, 80 bp, synthetic construct
  misc_feature 1..80: note = Artificially Synthesized Probe
  source 1..80: mol_type = other DNA
gtgccctgtgtggggtgcctgccctgtgtggggtgtgtggggtctgtgccctgtgtggggtgcctgccctgtgtgggatg

SEQ ID NO: 47048 - DNA, 80 bp, synthetic construct; identical to SEQ ID NO: 23171
  misc_feature 1..80: note = Artificially Synthesized Probe
  source 1..80: mol_type = other DNA

SEQ ID NO: 47049 - DNA, 80 bp, synthetic construct
  misc_feature 1..80: note = Artificially Synthesized Probe
  source 1..80: mol_type = other DNA
ccctgtgtggggtgcctgccctgtgtggggtgtgtggggtctgtaccctgtgtggggtgcgtggggtctgtgccctgtgt

SEQ ID NO: 47050 - DNA, 80 bp, synthetic construct; identical to SEQ ID NO: 23140
  misc_feature 1..80: note = Artificially Synthesized Probe
  source 1..80: mol_type = other DNA

SEQ ID NO: 47051 - DNA, 80 bp, synthetic construct
  misc_feature 1..80: note = Artificially Synthesized Probe
  source 1..80: mol_type = other DNA
gtggggtctgtgccctgtgtggggtgcctgccctgtgtggggtgcgtgcggtctgtgccctgtgtggggtgcctgccctg

SEQ ID NO: 47052 - DNA, 80 bp, synthetic construct
  misc_feature 1..80: note = Artificially Synthesized Probe
  source 1..80: mol_type = other DNA
acatccccacacacgtgagtgccttgggaccctcgtcaacacactgagctgaggccactggtccacggcacactgcagtg

SEQ ID NO: 47053 - DNA, 80 bp, synthetic construct
  misc_feature 1..80: note = Artificially Synthesized Probe
  source 1..80: mol_type = other DNA
ttgtcgcctctagcactgggcaaggtctggcattcagagttccaagaagtcccacagataccagtggctaagtctgtctt

SEQ ID NO: 47054 - DNA, 80 bp, synthetic construct; identical to SEQ ID NO: 23172
  misc_feature 1..80: note = Artificially Synthesized Probe
  source 1..80: mol_type = other DNA

SEQ ID NO: 47055 - DNA, 80 bp, synthetic construct
  misc_feature 1..80: note = Artificially Synthesized Probe
  source 1..80: mol_type = other DNA
agaaccccagggaggccaggcaatgatgcacagcaacctcaaaaacattcgctggttgactgattatttatttatctatt

SEQ ID NO: 47056 - DNA, 80 bp, synthetic construct
  misc_feature 1..80: note = Artificially Synthesized Probe
  source 1..80: mol_type = other DNA
tttttaagttttgggaaaccttacacatataaaaaagtagacaaagtagtatcatttgaagcaaatcccagatatcatat

SEQ ID NO: 47057 - DNA, 80 bp, synthetic construct; identical to SEQ ID NO: 23173
  misc_feature 1..80: note = Artificially Synthesized Probe
  source 1..80: mol_type = other DNA

SEQ ID NO: 47058 - DNA, 80 bp, synthetic construct
  misc_feature 1..80: note = Artificially Synthesized Probe
  source 1..80: mol_type = other DNA
cttacagaggcctggtcctaggacgggctcttgcccagcgctctggaagacacagaggtgatgctgtcacatgctcacgt

SEQ ID NO: 47059 - DNA, 80 bp, synthetic construct
  misc_feature 1..80: note = Artificially Synthesized Probe
  source 1..80: mol_type = other DNA
actggaccgcgggcagggccgactcaaccctgcatctgggaggcgggaagccatccccacagcaacatggaggtctctga

SEQ ID NO: 47060 - DNA, 80 bp, synthetic construct
  misc_feature 1..80: note = Artificially Synthesized Probe
  source 1..80: mol_type = other DNA
ccctgcccatctccctaaacagcctccctaaaatgcgcgtggaggcagctgggcctttgtctcctgggcaccgggtgccc

SEQ ID NO: 47061 - DNA, 80 bp, synthetic construct
  misc_feature 1..80: note = Artificially Synthesized Probe
  source 1..80: mol_type = other DNA
accctgcaccaatgtttctcttctcatccctgctggtgtgcgcctctccctccaccccactcatttctgagcaagaacgg

SEQ ID NO: 47062 - DNA, 80 bp, synthetic construct
  misc_feature 1..80: note = Artificially Synthesized Probe
  source 1..80: mol_type = other DNA
caatcttggctcactgcaacctccacctattgggttcacgcaattctcctgcctcagcctcccgagtagctgggattaca

SEQ ID NO: 47063 - DNA, 80 bp, synthetic construct; identical to SEQ ID NO: 23174
  misc_feature 1..80: note = Artificially Synthesized Probe
  source 1..80: mol_type = other DNA

SEQ ID NO: 47064 - DNA, 80 bp, synthetic construct
  misc_feature 1..80: note = Artificially Synthesized Probe
  source 1..80: mol_type = other DNA
cctggaaaattctattttcaaaatgttctttactgttttcccacctcacagggattctcacctaccctgtcctcacctag

SEQ ID NO: 47065 - DNA, 80 bp, synthetic construct
  misc_feature 1..80: note = Artificially Synthesized Probe
  source 1..80: mol_type = other DNA
cccggaagcttctgacaacacaacagggccctgggtgagagcttctctgcaccatgatgaaacggccaccacaaagagac

SEQ ID NO: 47066 - DNA, 80 bp, synthetic construct; identical to SEQ ID NO: 23175
  misc_feature 1..80: note = Artificially Synthesized Probe
  source 1..80: mol_type = other DNA

SEQ ID NO: 47067 - DNA, 80 bp, synthetic construct
  misc_feature 1..80: note = Artificially Synthesized Probe
  source 1..80: mol_type = other DNA
aggtcccttacacaacccatccacacattctgtccactcacttccccgtgtctcccagtgttcttcctcggagctgtccg

SEQ ID NO: 47068 - DNA, 80 bp, synthetic construct
  misc_feature 1..80: note = Artificially Synthesized Probe
  source 1..80: mol_type = other DNA
gcagagtctccacctggctactgtgagcacatccctggagcaccccacataggacaggaggggccacaggcctgcggcag

SEQ ID NO: 47069 - DNA, 80 bp, synthetic construct
  misc_feature 1..80: note = Artificially Synthesized Probe
  source 1..80: mol_type = other DNA
cgcatcctggcacagcctctacgccttgtgctatggctgcattcaagaagtctcaggaagccagggacagagccgagggc

SEQ ID NO: 47070 - DNA, 80 bp, synthetic construct
  misc_feature 1..80: note = Artificially Synthesized Probe
  source 1..80: mol_type = other DNA
gaggcctctgggctccctgcaagcagctcaagacagaatccactgggaaggtgtcactgcagaaggcgctgaccccacca

SEQ ID NO: 47071 - DNA, 80 bp, synthetic construct; identical to SEQ ID NO: 23176
  misc_feature 1..80: note = Artificially Synthesized Probe
  source 1..80: mol_type = other DNA

SEQ ID NO: 47072 - DNA, 80 bp, synthetic construct
  misc_feature 1..80: note = Artificially Synthesized Probe
  source 1..80: mol_type = other DNA
gcagcctccacctccagggttcaagcgattctcctgcttcagccttcctgagtagctgggattacaggcagccaccacgc

SEQ ID NO: 47073 - DNA, 80 bp, synthetic construct
  misc_feature 1..80: note = Artificially Synthesized Probe
  source 1..80: mol_type = other DNA
agggcatgcacacagatacacgggcatgtgcacatgggcacacatacacacaggcatacacacttgggcacacactctgg

SEQ ID NO: 47074 - DNA, 80 bp, synthetic construct
  misc_feature 1..80: note = Artificially Synthesized Probe
  source 1..80: mol_type = other DNA
gtctccctcccgtgtccagctgtcagaagacccacaggtgagcagccccatacctcgcccagggctggacatgcaccggg

SEQ ID NO: 47075 - DNA, 80 bp, synthetic construct
  misc_feature 1..80: note = Artificially Synthesized Probe
  source 1..80: mol_type = other DNA
agccggaggtgcgggggccagggacgccctgcctgggctgctccgggctgcctgtggagggctgactgcaggaggggccg

SEQ ID NO: 47076 - DNA, 80 bp, synthetic construct; identical to SEQ ID NO: 23177
  misc_feature 1..80: note = Artificially Synthesized Probe
  source 1..80: mol_type = other DNA

SEQ ID NO: 47077 - DNA, 80 bp, synthetic construct
  misc_feature 1..80: note = Artificially Synthesized Probe
  source 1..80: mol_type = other DNA
tggcccatttctcatcctgcgcaccggagggacgctcaggaaatcgctggtgtgtgtggagaaagcagaggagacacaca

SEQ ID NO: 47078 - DNA, 80 bp, synthetic construct
  misc_feature 1..80: note = Artificially Synthesized Probe
  source 1..80: mol_type = other DNA
acctcccactccgcagacatgcgccacttacctcccactccgcagacacgcaccacctcccactccgcagacacgcacca

SEQ ID NO: 47079 - DNA, 80 bp, synthetic construct
  misc_feature 1..80: note = Artificially Synthesized Probe
  source 1..80: mol_type = other DNA
gcagacacgcgccacccacctcccactccgcagacacgcgccatctacctcccactccgcagacacgcgccacctcccac

SEQ ID NO: 47080 - DNA, 80 bp, synthetic construct; identical to SEQ ID NO: 23178
  misc_feature 1..80: note = Artificially Synthesized Probe
  source 1..80: mol_type = other DNA

SEQ ID NO: 47081 - DNA, 80 bp, synthetic construct
  misc_feature 1..80: note = Artificially Synthesized Probe
  source 1..80: mol_type = other DNA
ttcacgggttcatggtgaagctgacaatgccgtctgtttctcagaacatgtggagcaccgacagaaacccacacacctgc

SEQ ID NO: 47082 - DNA, 80 bp, synthetic construct
  misc_feature 1..80: note = Artificially Synthesized Probe
  source 1..80: mol_type = other DNA
acccacctcccactccgcagacacgcgccacttacctcccactccgcagacacgcgccacctcccactccgcagacacgc

SEQ ID NO: 47083 - DNA, 80 bp, synthetic construct
  misc_feature 1..80: note = Artificially Synthesized Probe
  source 1..80: mol_type = other DNA
cacttacctcccactccgcagacacgcgccacctacctcccactccgcagacacgcgccacctcccattccacagacacg

SEQ ID NO: 47084 - DNA, 80 bp, synthetic construct
  misc_feature 1..80: note = Artificially Synthesized Probe
  source 1..80: mol_type = other DNA
cagcgcttgggacgtggggagggggacggtgcgacacacacagcgctcgggacgtggggagggggcagtgtgacacacac

SEQ ID NO: 47085 - DNA, 80 bp, synthetic construct
  misc_feature 1..80: note = Artificially Synthesized Probe
  source 1..80: mol_type = other DNA
gaagccttcagagcaccggaggcctcagctgctccagggctgagatgcccaactgttcctgggagaagcccaagcatccc

SEQ ID NO: 47086 - DNA, 80 bp, synthetic construct; identical to SEQ ID NO: 23179
  misc_feature 1..80: note = Artificially Synthesized Probe
  source 1..80: mol_type = other DNA

SEQ ID NO: 47087 - DNA, 80 bp, synthetic construct
  misc_feature 1..80: note = Artificially Synthesized Probe
  source 1..80: mol_type = other DNA
cggccctcggcctgggtgcccagatgcagctcccccgccgcctggctgcagctccactgagcttttctatggccccctcg

SEQ ID NO: 47088 - DNA, 80 bp, synthetic construct
  misc_feature 1..80: note = Artificially Synthesized Probe
  source 1..80: mol_type = other DNA
ccaccatcaccctaatctcagaacctgatgagggaaagtttctaccaaacatgtgaaggttctaccaaacatgtgaagag

SEQ ID NO: 47089 - DNA, 80 bp, synthetic construct
  misc_feature 1..80: note = Artificially Synthesized Probe
  source 1..80: mol_type = other DNA
gttctaccaaacatgtgaagaggccaccatcaccctcatctcagaacctgatgagggcattctatgaaaagaaaatgata

SEQ ID NO: 47090 - DNA, 80 bp, synthetic construct
  misc_feature 1..80: note = Artificially Synthesized Probe
  source 1..80: mol_type = other DNA
aaaataaagaaaagaaaaccacgtgctcatgtcaacagctacagaaaaggcctgggataaaattccacactgtttgtgat

SEQ ID NO: 47091 - DNA, 80 bp, synthetic construct; identical to SEQ ID NO: 23141
  misc_feature 1..80: note = Artificially Synthesized Probe
  source 1..80: mol_type = other DNA

SEQ ID NO: 47092 - DNA, 80 bp, synthetic construct; identical to SEQ ID NO: 23180
  misc_feature 1..80: note = Artificially Synthesized Probe
  source 1..80: mol_type = other DNA

SEQ ID NO: 47093 - DNA, 80 bp, synthetic construct
  misc_feature 1..80: note = Artificially Synthesized Probe
  source 1..80: mol_type = other DNA
aaaaaatgacacaactaaactgcccgtccaaaggcaaatgaacaattctagaatacaaatggaataccgcagggggtgcg

SEQ ID NO: 47094 - DNA, 80 bp, synthetic construct
  misc_feature 1..80: note = Artificially Synthesized Probe
  source 1..80: mol_type = other DNA
aataagactgggctcaatccctttcttcacacatggaagcttctagaagacagcacaggaggacatgttcaccaccagaa

SEQ ID NO: 47095 - DNA, 80 bp, synthetic construct
  misc_feature 1..80: note = Artificially Synthesized Probe
  source 1..80: mol_type = other DNA
ccacagccacgaagggagagaatgccaacaggagcaaaatcctgcaagtcagacactgtggagcaactgatgtctcccac

SEQ ID NO: 47096 - DNA, 80 bp, synthetic construct; identical to SEQ ID NO: 23181
  misc_feature 1..80: note = Artificially Synthesized Probe
  source 1..80: mol_type = other DNA

SEQ ID NO: 47097 - DNA, 80 bp, synthetic construct
  misc_feature 1..80: note = Artificially Synthesized Probe
  source 1..80: mol_type = other DNA
ctctaacctttcctcaccagcacaagaggactgtcagcaggaaccacgtgcacatgctacagaatgttctcatttcctaa

SEQ ID NO: 47098 - DNA, 80 bp, synthetic construct
  misc_feature 1..80: note = Artificially Synthesized Probe
  source 1..80: mol_type = other DNA
gtaggctctgcacatgtcatatgcagattccctatcacatcacgacttccactcatgggaagcacacacagaggaaagag

SEQ ID NO: 47099 - DNA, 80 bp, synthetic construct
  misc_feature 1..80: note = Artificially Synthesized Probe
  source 1..80: mol_type = other DNA
aaactgtctatgtgcggggtccgcctgtgtgtggggtgcggggtccgcctgtatgtggcatgcagggtctgcctgtgagc

SEQ ID NO: 47100 - DNA, 80 bp, synthetic construct; identical to SEQ ID NO: 23182
  misc_feature 1..80: note = Artificially Synthesized Probe
  source 1..80: mol_type = other DNA

SEQ ID NO: 47101 - DNA, 80 bp, synthetic construct
  misc_feature 1..80: note = Artificially Synthesized Probe
  source 1..80: mol_type = other DNA
ttaccccaaaataatccgtattttttatactactgcaaacatttttacaatttcagccctctattatttacgagtattta

SEQ ID NO: 47102 - DNA, 80 bp, synthetic construct
  misc_feature 1..80: note = Artificially Synthesized Probe
  source 1..80: mol_type = other DNA
acacgcacagaatgggaggaaacgcctgcaaaccgctcctgtcacacagattctcaagcagaacatagaaggcatgcaat

SEQ ID NO: 47103 - DNA, 80 bp, synthetic construct
  misc_feature 1..80: note = Artificially Synthesized Probe
  source 1..80: mol_type = other DNA
gtctgcaggacgatgctgactgcagtggagatggccagtgtttctttgtctgttctcaattttaggtggaaagaattcag

SEQ ID NO: 47104 - DNA, 80 bp, synthetic construct; identical to SEQ ID NO: 23183
  misc_feature 1..80: note = Artificially Synthesized Probe
  source 1..80: mol_type = other DNA

SEQ ID NO: 47105 - DNA, 80 bp, synthetic construct
  misc_feature 1..80: note = Artificially Synthesized Probe
  source 1..80: mol_type = other DNA
taacacaacaactgtctatctagatagaaaacaagaacctctatgtttacctcacaccacatacaaaacatgaacctcta

SEQ ID NO: 47106 - DNA, 80 bp, synthetic construct
  misc_feature 1..80: note = Artificially Synthesized Probe
  source 1..80: mol_type = other DNA
gacctacatctaagaactaaaactatcaaacttacagaacacaggaaaaacttctgtgaccttcgtttgccaaagatagg

SEQ ID NO: 47107 - DNA, 80 bp, synthetic construct
  misc_feature 1..80: note = Artificially Synthesized Probe
  source 1..80: mol_type = other DNA
ctttagttgatcagaatggaacaaaaaattttaaaaatgtactccgttctccaactcctgaaatgcctctgcagttgctg

SEQ ID NO: 47108 - DNA, 80 bp, synthetic construct
  misc_feature 1..80: note = Artificially Synthesized Probe
  source 1..80: mol_type = other DNA
ttaaagtgggaagtttttgctttattctaataatgaaaatcaggaacacagggaaggacttccacttcttttttcttccc

SEQ ID NO: 47109 - DNA, 80 bp, synthetic construct
  misc_feature 1..80: note = Artificially Synthesized Probe
  source 1..80: mol_type = other DNA
tttagtagagatggggttttgccatgttggccaggctggtctcgaactcccgacctcgggtgatcctcatgcctcggcct

SEQ ID NO: 47110 - DNA, 80 bp, synthetic construct; identical to SEQ ID NO: 23184
  misc_feature 1..80: note = Artificially Synthesized Probe
  source 1..80: mol_type = other DNA

SEQ ID NO: 47111 - DNA, 80 bp, synthetic construct
  misc_feature 1..80: note = Artificially Synthesized Probe
  source 1..80: mol_type = other DNA
agtctggcttcctctgtgatgctgctctatgtccttttctgccttagtgaaaagatggacagaaatcaccctctccacga

SEQ ID NO: 47112 - DNA, 80 bp, synthetic construct
  misc_feature 1..80: note = Artificially Synthesized Probe
  source 1..80: mol_type = other DNA
acagcctgaggtgggacacgccgaggcccagccatgcgcctcccagcttctcagctaaggtcactctggaatacttatct

SEQ ID NO: 47113 - DNA, 80 bp, synthetic construct
  misc_feature 1..80: note = Artificially Synthesized Probe
  source 1..80: mol_type = other DNA
atgcccatggacgccatctccagcctctcggcctccacacagctcgccaggtctcagtggggctgtgaatgtgggttcct

SEQ ID NO: 47114 - DNA, 80 bp, synthetic construct
  misc_feature 1..80: note = Artificially Synthesized Probe
  source 1..80: mol_type = other DNA
atcacttcaccccggttaaaatagcctttatccaaaagacagacaatcacaattgctcgcgaggatgtggggaaaaggga

SEQ ID NO: 47115 - DNA, 80 bp, synthetic construct; identical to SEQ ID NO: 23185
  misc_feature 1..80: note = Artificially Synthesized Probe
  source 1..80: mol_type = other DNA

SEQ ID NO: 47116 - DNA, 80 bp, synthetic construct
  misc_feature 1..80: note = Artificially Synthesized Probe
  source 1..80: mol_type = other DNA
tgcactgcagagttgtgggctccatttccatcttccacgtatatgtcactgagatcacgattcttttggaaaaatctaaa

SEQ ID NO: 47117 - DNA, 80 bp, synthetic construct
  misc_feature 1..80: note = Artificially Synthesized Probe
  source 1..80: mol_type = other DNA
gcctcttctaacagcagctgcaaccaggagtgcgtcttcccaggcattctatttcaagctactgttcaagctaagaaagc

SEQ ID NO: 47118 - DNA, 80 bp, synthetic construct; identical to SEQ ID NO: 23186
  misc_feature 1..80: note = Artificially Synthesized Probe
  source 1..80: mol_type = other DNA

SEQ ID NO: 47119 - DNA, 80 bp, synthetic construct
  misc_feature 1..80: note = Artificially Synthesized Probe
  source 1..80: mol_type = other DNA
acaacaaaaaaccacacatacaactgaacccataacacagctaccttactggaaaagcccagagtgaaatccacacatcc

SEQ ID NO: 47120 - DNA, 80 bp, synthetic construct
  misc_feature 1..80: note = Artificially Synthesized Probe
  source 1..80: mol_type = other DNA
gacctgctctctgtggctcttccggcctttctcgtctcgtgctaccctgccgagactgccttccctgcaagtccactgac

SEQ ID NO: 47121 - DNA, 80 bp, synthetic construct
  misc_feature 1..80: note = Artificially Synthesized Probe
  source 1..80: mol_type = other DNA
cacctcgccatcaatgccagggccaggatctcctttccccacattccttctgcatcctacccaggccaccactaccaccc

SEQ ID NO: 47122 - DNA, 80 bp, synthetic construct; identical to SEQ ID NO: 23187
  misc_feature 1..80: note = Artificially Synthesized Probe
  source 1..80: mol_type = other DNA

SEQ ID NO: 47123 - DNA, 80 bp, synthetic construct
  misc_feature 1..80: note = Artificially Synthesized Probe
  source 1..80: mol_type = other DNA
atgcaaagtattctgcacccttgcagagctggctgctccccgtgaatgctgagtcccaggacccaaccccacgagatgag

SEQ ID NO: 47124 - DNA, 80 bp, synthetic construct
  misc_feature 1..80: note = Artificially Synthesized Probe
  source 1..80: mol_type = other DNA
ctcagcaggacacgcccatcacgaccaccaaaccctgactctccgtaggcttcacacacacgtgtgtccccgcctgtgag

SEQ ID NO: 47125 - DNA, 80 bp, synthetic construct
  misc_feature 1..80: note = Artificially Synthesized Probe
  source 1..80: mol_type = other DNA
ctcacgcctgtaatcccagcactttgggaggctgaggcgggcagatcacctgaggtcaagagtttcagactagccttgcc

SEQ ID NO: 47126 - DNA, 80 bp, synthetic construct
  misc_feature 1..80: note = Artificially Synthesized Probe
  source 1..80: mol_type = other DNA
gctgctgtcgtttagcacctgcacgtgtccgtattcacaaaatgcttcacgattcaccaaaaagaagtggactgagtcgc

SEQ ID NO: 47127 - DNA, 80 bp, synthetic construct
  misc_feature 1..80: note = Artificially Synthesized Probe
  source 1..80: mol_type = other DNA
cagaaggcggcccagagcaaccggcaaccaggaacacactgaggggaccctgcccaccagggaccaccgagggtcagaca

SEQ ID NO: 47128 - DNA, 80 bp, synthetic construct; identical to SEQ ID NO: 23188
  misc_feature 1..80: note = Artificially Synthesized Probe
  source 1..80: mol_type = other DNA

SEQ ID NO: 47129 - DNA, 80 bp, synthetic construct
  misc_feature 1..80: note = Artificially Synthesized Probe
  source 1..80: mol_type = other DNA
catcaccccccacactgcaaggcaggaagtctgcacaccaggaatcagcgttaaccgcacattaataaaatgcagtggtt

SEQ ID NO: 47130 - DNA, 80 bp, synthetic construct
  misc_feature 1..80: note = Artificially Synthesized Probe
  source 1..80: mol_type = other DNA
attgaggctcaggccaacttctgtacataaagctattatttaacgcttgacttcggtccccaaataacaaatacaaaaaa

SEQ ID NO: 47131 - DNA, 80 bp, synthetic construct
  misc_feature 1..80: note = Artificially Synthesized Probe
  source 1..80: mol_type = other DNA
ccacctcatccccatctgggtgcggtgagcatgcagggctgggagggggcagcattacctttttcccagtctgcttctcc

SEQ ID NO: 47132 - DNA, 80 bp, synthetic construct; identical to SEQ ID NO: 23189
  misc_feature 1..80: note = Artificially Synthesized Probe
  source 1..80: mol_type = other DNA

SEQ ID NO: 47133 - DNA, 80 bp, synthetic construct
  misc_feature 1..80: note = Artificially Synthesized Probe
  source 1..80: mol_type = other DNA
cagctttgagcaggaaggagaacagagaagggtcaagcactttgtagtggcagaaagggacgcatggcctagggtgtggc

SEQ ID NO: 47134 - DNA, 80 bp, synthetic construct
  misc_feature 1..80: note = Artificially Synthesized Probe
  source 1..80: mol_type = other DNA
gtccacagccccagcctcacgccccactcaccacctgggaaggagctcctgtccccaccaggcctgtgctttttgcacac

SEQ ID NO: 47135 - DNA, 80 bp, synthetic construct; identical to SEQ ID NO: 23190
  misc_feature 1..80: note = Artificially Synthesized Probe
  source 1..80: mol_type = other DNA

SEQ ID NO: 47136 - DNA, 80 bp, synthetic construct
  misc_feature 1..80: note = Artificially Synthesized Probe
  source 1..80: mol_type = other DNA
ctttccgaagcagccactcccgaactatttgctctgccccgtccctctctttctgcaggaaacccaacaggcagttgggg

SEQ ID NO: 47137 - DNA, 80 bp, synthetic construct; identical to SEQ ID NO: 23142
  misc_feature 1..80: note = Artificially Synthesized Probe
  source 1..80: mol_type = other DNA

SEQ ID NO: 47138 - DNA, 80 bp, synthetic construct
  misc_feature 1..80: note = Artificially Synthesized Probe
  source 1..80: mol_type = other DNA
cggagcatgggcctcctccctgcctgtgggccttctaggtttgttcaccatcacagccaggcctcccgggtgcactcacg

SEQ ID NO: 47139 - DNA, 80 bp, synthetic construct
  misc_feature 1..80: note = Artificially Synthesized Probe
  source 1..80: mol_type = other DNA
ggagaagcagcttctgcaactcgctcccctgcatttacccatctcgctcatgcacgaagtatggcttttgaaacacgatg

SEQ ID NO: 47140 - DNA, 80 bp, synthetic construct; identical to SEQ ID NO: 23191
  misc_feature 1..80: note = Artificially Synthesized Probe
  source 1..80: mol_type = other DNA

SEQ ID NO: 47141 - DNA, 80 bp, synthetic construct
  misc_feature 1..80: note = Artificially Synthesized Probe
  source 1..80: mol_type = other DNA
tccctgatgcctgaggccagacatattttctctctctacctgaaccaatgaattttacattctcttccaattttccacca

SEQ ID NO: 47142 - DNA, 80 bp, synthetic construct
  misc_feature 1..80: note = Artificially Synthesized Probe
  source 1..80: mol_type = other DNA
aattaacattttaaaaaatccagactgtctgctctcaggacggaaaaacggggccttcaccatgtagagtccaccgtcct

SEQ ID NO: 47143 - DNA, 80 bp, synthetic construct
  misc_feature 1..80: note = Artificially Synthesized Probe
  source 1..80: mol_type = other DNA
gctttgcccaggcaccttccccaatggaccagggatctgggagtccactcaggaggtggaggaagtgggtcgcacccacc

SEQ ID NO: 47144 - DNA, 80 bp, synthetic construct
  misc_feature 1..80: note = Artificially Synthesized Probe
  source 1..80: mol_type = other DNA
cgcctggccttggctacaacatgttaccgatggcagcgatgtgctcgaggccctgcaaccccagcccccgcctctccatg

SEQ ID NO: 47145 - DNA, 80 bp, synthetic construct; identical to SEQ ID NO: 23192
  misc_feature 1..80: note = Artificially Synthesized Probe
  source 1..80: mol_type = other DNA

SEQ ID NO: 47146 - DNA, 80 bp, synthetic construct
  misc_feature 1..80: note = Artificially Synthesized Probe
  source 1..80: mol_type = other DNA
agtgacttctaccaggggctgcacggcactcaggagtcaggccaacaggctctgctgactcatgggtgttgtctgagggt

SEQ ID NO: 47147 - DNA, 80 bp, synthetic construct
  misc_feature 1..80: note = Artificially Synthesized Probe
  source 1..80: mol_type = other DNA
ccgggggagactcttccctggaaggtgacttggctgtccctgcctagactcattttaagtgcagcctaaatctccctcat

SEQ ID NO: 47148 - DNA, 80 bp, synthetic construct
  misc_feature 1..80: note = Artificially Synthesized Probe
  source 1..80: mol_type = other DNA
ttctctctcacttgtgggatctaaaaatcagaacaattgagctcatggacacagagtagaacgacggttaccagaggctg

SEQ ID NO: 47149 - DNA, 80 bp, synthetic construct
  misc_feature 1..80: note = Artificially Synthesized Probe
  source 1..80: mol_type = other DNA
tggccctgaccgcccccaggccacgcattccttgttacttcacctcctggcggatggcaaccgtcccagcttcgtggact

SEQ ID NO: 47150 - DNA, 80 bp, synthetic construct; identical to SEQ ID NO: 23193
  misc_feature 1..80: note = Artificially Synthesized Probe
  source 1..80: mol_type = other DNA

SEQ ID NO: 47151 - DNA, 80 bp, synthetic construct
  misc_feature 1..80: note = Artificially Synthesized Probe
  source 1..80: mol_type = other DNA
tcctcccggaaggtggcttcaagagcactcaggaggtgacagatgctgtcaagaccggcccagggaaggcacagggcagg

SEQ ID NO: 47152 - DNA, 80 bp, synthetic construct
  misc_feature 1..80: note = Artificially Synthesized Probe
  source 1..80: mol_type = other DNA
tgatgcagaagtggttacactgactacggcaaggtcagtttggcaaaacccccaggaatttcagcctatctggtctcttc

SEQ ID NO: 47153 - DNA, 80 bp, synthetic construct
  misc_feature 1..80: note = Artificially Synthesized Probe
  source 1..80: mol_type = other DNA
ggcgggactgtggggaggggactgtggggcggggcctgcagggcagggtgtggggcgggagctgcggggcggggactgtg

SEQ ID NO: 47154 - DNA, 80 bp, synthetic construct; identical to SEQ ID NO: 23194
  misc_feature 1..80: note = Artificially Synthesized Probe
  source 1..80: mol_type = other DNA

SEQ ID NO: 47155 - DNA, 80 bp, synthetic construct
  misc_feature 1..80: note = Artificially Synthesized Probe
  source 1..80: mol_type = other DNA
cctctgcctctcctgagacagcaagacccatctctcctcttcctcttcagcctcctcaacgtgaaaacccggaggacgaa

SEQ ID NO: 47156 - DNA, 80 bp, synthetic construct
  misc_feature 1..80: note = Artificially Synthesized Probe
  source 1..80: mol_type = other DNA
gctctggtcaacagaaggctgttagttaagtttggggaaagttaaaagttctacacaaattttcaactgcacaggaggct

SEQ ID NO: 47157 - DNA, 80 bp, synthetic construct
  misc_feature 1..80: note = Artificially Synthesized Probe
  source 1..80: mol_type = other DNA
cttccacagtatgttgatagaacaggcctttacgtacgtcctgggcaaatgctcctctccttatgtaagttaataactcc

SEQ ID NO: 47158 - DNA, 80 bp, synthetic construct
  misc_feature 1..80: note = Artificially Synthesized Probe
  source 1..80: mol_type = other DNA
aagcccttcaagggaagctctcccagaaccttcaatcccagctccaattccaaagacaggaacacactcatgactgacag

SEQ ID NO: 47159 - DNA, 80 bp, synthetic construct; identical to SEQ ID NO: 23195
  misc_feature 1..80: note = Artificially Synthesized Probe
  source 1..80: mol_type = other DNA

SEQ ID NO: 47160 - DNA, 80 bp, synthetic construct
  misc_feature 1..80: note = Artificially Synthesized Probe
  source 1..80: mol_type = other DNA
gagcgttaactggattgtttgtaactcaagggctaaatgcttgaggggatggacacccattggagaaataaagagggaag

SEQ ID NO: 47161 - DNA, 80 bp, synthetic construct
  misc_feature 1..80: note = Artificially Synthesized Probe
  source 1..80: mol_type = other DNA
gtttcgccatgcttccgaggctggtgtctgaaggatgctttacggcaacccctgccttttccagctgagccctgccggct

SEQ ID NO: 47162 - DNA, 80 bp, synthetic construct
  misc_feature 1..80: note = Artificially Synthesized Probe
  source 1..80: mol_type = other DNA
ctgtgtgcaaagcccttgagtgacacaccctatgacccacagcactgtggcaatcccaggtatggaagagaagcaccact

SEQ ID NO: 47163 - DNA, 80 bp, synthetic construct
  misc_feature 1..80: note = Artificially Synthesized Probe
  source 1..80: mol_type = other DNA
ggctgagccgagggcaggggggctgagccgagggcagggggtctgagctaagggcacgggggctaagcccagggcagggg

SEQ ID NO: 47164 - DNA, 80 bp, synthetic construct; identical to SEQ ID NO: 23196
  misc_feature 1..80: note = Artificially Synthesized Probe
  source 1..80: mol_type = other DNA

SEQ ID NO: 47165 - DNA, 80 bp, synthetic construct
  misc_feature 1..80: note = Artificially Synthesized Probe
  source 1..80: mol_type = other DNA
caaacccccagtgtgcccagctactttttgtatttttggtagagacagggtttcaccatgttggccagggtggtctccat

SEQ ID NO: 47166 - DNA, 80 bp, synthetic construct
  misc_feature 1..80: note = Artificially Synthesized Probe
  source 1..80: mol_type = other DNA
gacacatgcttggtcactgggctgtggaacatacaggagccccgtgctccggaacacggaccacccgacaggagcacgga

SEQ ID NO: 47167 - DNA, 80 bp, synthetic construct; identical to SEQ ID NO: 23197
  misc_feature 1..80: note = Artificially Synthesized Probe
  source 1..80: mol_type = other DNA

SEQ ID NO: 47168 - DNA, 80 bp, synthetic construct
  misc_feature 1..80: note = Artificially Synthesized Probe
  source 1..80: mol_type = other DNA
gttcttggacctacaccagtggtttgccaggggttcttgggccttcggccacagactgaaagctgcgctgttggcttccc

SEQ ID NO: 47169 - DNA, 80 bp, synthetic construct; identical to SEQ ID NO: 23143
  misc_feature 1..80: note = Artificially Synthesized Probe
  source 1..80: mol_type = other DNA

SEQ ID NO: 47170 - DNA, 80 bp, synthetic construct
  misc_feature 1..80: note = Artificially Synthesized Probe
  source 1..80: mol_type = other DNA
gactcgtacacacaagtactggtgaaggggtggagcaaaggaaactagtccactctcatcagggccaactcacgcacctg

SEQ ID NO: 47171 - DNA, 80 bp, synthetic construct
  misc_feature 1..80: note = Artificially Synthesized Probe
  source 1..80: mol_type = other DNA
gaacactacacagcagaggaggcaaacacatcacaacgtaagtcaatctcacaaataatgttgaggaaccctgtctctac

SEQ ID NO: 47172 - DNA, 80 bp, synthetic construct
  misc_feature 1..80: note = Artificially Synthesized Probe
  source 1..80: mol_type = other DNA
cccctctcccctctcctctctctctctctctctctcacacacacacacacacacacacacagagtaataatgttggggac

SEQ ID NO: 47173 - DNA, 80 bp, synthetic construct; identical to SEQ ID NO: 23198
  misc_feature 1..80: note = Artificially Synthesized Probe
  source 1..80: mol_type = other DNA

SEQ ID NO: 47174 - DNA, 80 bp, synthetic construct
  misc_feature 1..80: note = Artificially Synthesized Probe
  source 1..80: mol_type = other DNA
tgacgacggagcagcttcaggcttcccagcatgtcgggcaggcctagccatgcccaatacacactgcagggcacccactg

SEQ ID NO: 47175 - DNA, 80 bp, synthetic construct
  misc_feature 1..80: note = Artificially Synthesized Probe
  source 1..80: mol_type = other DNA
gtgatgaagacaaagaaaagcaggcgtgtgtgttaaaggtacaattgcacagctaaaaataatcatggccgtaaggcagg

SEQ ID NO: 47176 - DNA, 80 bp, synthetic construct
  misc_feature 1..80: note = Artificially Synthesized Probe
  source 1..80: mol_type = other DNA
ctgcagaaggggacgcagccaccgccccccccaccccgctgcagaaggtgcacaccactcagcaaccacccacccactgc

SEQ ID NO: 47177 - DNA, 80 bp, synthetic construct; identical to SEQ ID NO: 23199
  misc_feature 1..80: note = Artificially Synthesized Probe
  source 1..80: mol_type = other DNA

SEQ ID NO: 47178 - DNA, 80 bp, synthetic construct
  misc_feature 1..80: note = Artificially Synthesized Probe
  source 1..80: mol_type = other DNA
ggcttaacacaaagcctgcccgccaggggctgctggtggcatccgggcacatctgcacgtggggctgacaggactaagga

SEQ ID NO: 47179 - DNA, 80 bp, synthetic construct
  misc_feature 1..80: note = Artificially Synthesized Probe
  source 1..80: mol_type = other DNA
agaggttggaaatgcagaggtggggaatgcagaggttggaaatgcagagggcacctacacttctgatgacagcgaaatat

SEQ ID NO: 47180 - DNA, 80 bp, synthetic construct
  misc_feature 1..80: note = Artificially Synthesized Probe
  source 1..80: mol_type = other DNA
gctgaggcaggagaatcgcttgaacccggaagccagaggttgcagtgagccaagatcacaccaccacactccagcctggc

SEQ ID NO: 47181 - DNA, 80 bp, synthetic construct; identical to SEQ ID NO: 23200
  misc_feature 1..80: note = Artificially Synthesized Probe
  source 1..80: mol_type = other DNA

SEQ ID NO: 47182 - DNA, 80 bp, synthetic construct
  misc_feature 1..80: note = Artificially Synthesized Probe
  source 1..80: mol_type = other DNA
ttcagcaaggacacagaatccaagatcaacacacaaacacctatcctatttctgcaataatcctatgaaaacaagaaata

SEQ ID NO: 47183 - DNA, 80 bp, synthetic construct
  misc_feature 1..80: note = Artificially Synthesized Probe
  source 1..80: mol_type = other DNA
accatttataggtgctccaaataaaaataaatgcttaggttcatatggaacaaaactagaaaaacctatacacattttag

SEQ ID NO: 47184 - DNA, 80 bp, synthetic construct
  misc_feature 1..80: note = Artificially Synthesized Probe
  source 1..80: mol_type = other DNA
ctttgaaagacctagtttaaagagtgaaaagacaaactgcagacagggaaaaatatctgcaaatcacaagtcagatagca

SEQ ID NO: 47185 - DNA, 80 bp, synthetic construct; identical to SEQ ID NO: 23201
  misc_feature 1..80: note = Artificially Synthesized Probe
  source 1..80: mol_type = other DNA

SEQ ID NO: 47186 - DNA, 80 bp, synthetic construct
  misc_feature 1..80: note = Artificially Synthesized Probe
  source 1..80: mol_type = other DNA
gaaaatggaacctcatgtgaacacaaagacctgtttgcgaatgttcacagaactttcactgataatagacaatggggaaa

SEQ ID NO: 47187 - DNA, 80 bp, synthetic construct
  misc_feature 1..80: note = Artificially Synthesized Probe
  source 1..80: mol_type = other DNA
tttcattcacatcacggcatcccctcagcagtaaaagggatggctatggatacacccaagcgtatgggtgaatctgcaga

SEQ ID NO: 47188 - DNA, 80 bp, synthetic construct
  misc_feature 1..80: note = Artificially Synthesized Probe
  source 1..80: mol_type = other DNA
ctgctgagtgagtggacatacccaggagcacgggcgaaatcagcggaggcccctgctgagtgagtggacacacccaggcg

SEQ ID NO: 47189 - DNA, 80 bp, synthetic construct
  misc_feature 1..80: note = Artificially Synthesized Probe
  source 1..80: mol_type = other DNA
gcgaaatcagtggaggcccctgctgagtgagtggacatacccaggcgcacgggcgaatctgcagaggcccctggtgagtg

SEQ ID NO: 47190 - DNA, 80 bp, synthetic construct; identical to SEQ ID NO: 23202
  misc_feature 1..80: note = Artificially Synthesized Probe
  source 1..80: mol_type = other DNA

SEQ ID NO: 47191 - DNA, 80 bp, synthetic construct
  misc_feature 1..80: note = Artificially Synthesized Probe
  source 1..80: mol_type = other DNA
agactcccatgggtgatgaatagtctatacttttaggtgatggtgtttccccaacggtatacgtttcccaaaacccactg

SEQ ID NO: 47192 - DNA, 80 bp, synthetic construct
  misc_feature 1..80: note = Artificially Synthesized Probe
  source 1..80: mol_type = other DNA
cagcaaagcctagtgcactgctcagagtgcccagggctggggtggcgtcaaggggggcacatattacgagggctctcggt

SEQ ID NO: 47193 - DNA, 80 bp, synthetic construct
  misc_feature 1..80: note = Artificially Synthesized Probe
  source 1..80: mol_type = other DNA
gttttgtgtatttggctttggaatcatgcattttacatcatttaaaacattaaatataaaatgagactgggtgcagtgaa

SEQ ID NO: 47194 - DNA, 80 bp, synthetic construct
  misc_feature 1..80: note = Artificially Synthesized Probe
  source 1..80: mol_type = other DNA
gggaggcagaggctgccgtgagcagagatcacaccactgcactccagcctgggcgacagacaagagtgagaccttgtctc

SEQ ID NO: 47195 - DNA, 80 bp, synthetic construct; identical to SEQ ID NO: 23203
  misc_feature 1..80: note = Artificially Synthesized Probe
  source 1..80: mol_type = other DNA

SEQ ID NO: 47196 - DNA, 80 bp, synthetic construct
  misc_feature 1..80: note = Artificially Synthesized Probe
  source 1..80: mol_type = other DNA
tggccgctcgcacaccgggagggctgctgctggctctggcagaaggcccaaattccttggtgcacagacacggctgcgga

SEQ ID NO: 47197 - DNA, 80 bp, synthetic construct
  misc_feature 1..80: note = Artificially Synthesized Probe
  source 1..80: mol_type = other DNA
ggaagcaaggggctgcgtgagggtcctcgtgacacggcagtaggtttccccagtacagtgactggggggggggggggggg

SEQ ID NO: 47198 - DNA, 80 bp, synthetic construct; identical to SEQ ID NO: 23204
  misc_feature 1..80: note = Artificially Synthesized Probe
  source 1..80: mol_type = other DNA

SEQ ID NO: 47199 - DNA, 80 bp, synthetic construct
  misc_feature 1..80: note = Artificially Synthesized Probe
  source 1..80: mol_type = other DNA
tcctgagtagctgggactacaggtgcctgccaccatgcccggctaatttttctattttgaggagagatggggtttcgcca

SEQ ID NO: 47200 - DNA, 80 bp, synthetic construct
  misc_feature 1..80: note = Artificially Synthesized Probe
  source 1..80: mol_type = other DNA
tagaaaatttaaaattagatgcacagttcacatcatatatctcatggacagaacaactctatgggacagaagaccccgat

SEQ ID NO: 47201 - DNA, 80 bp, synthetic construct
  misc_feature 1..80: note = Artificially Synthesized Probe
  source 1..80: mol_type = other DNA
ttgataccgctgggtgtgtggtgacactgagaaagttcaaggcacccagcgattcaggagatagagatttatagatatgt

SEQ ID NO: 47202 - DNA, 80 bp, synthetic construct; identical to SEQ ID NO: 23205
  misc_feature 1..80: note = Artificially Synthesized Probe
  source 1..80: mol_type = other DNA

SEQ ID NO: 47203 - DNA, 80 bp, synthetic construct
  misc_feature 1..80: note = Artificially Synthesized Probe
  source 1..80: mol_type = other DNA
ttaaaaactcagtagcatgcagtggctgatgcctctaatcccagaactttgggaggctgaggtggaagggatcattcgat

SEQ ID NO: 47204 - DNA, 80 bp, synthetic construct
  misc_feature 1..80: note = Artificially Synthesized Probe
  source 1..80: mol_type = other DNA
atggacaggtcagtggtggctggaggatgatttctgaggcaggagtccctggcacatgggctgcttgaaggcagacagga

SEQ ID NO: 47205 - DNA, 80 bp, synthetic construct
  misc_feature 1..80: note = Artificially Synthesized Probe
  source 1..80: mol_type = other DNA
ttacaagcagactataaacactgaaacagacaaaaaactaaaaacccaactcatgagaaacacctggtgaacgctcttca

SEQ ID NO: 47206 - DNA, 80 bp, synthetic construct
  misc_feature 1..80: note = Artificially Synthesized Probe
  source 1..80: mol_type = other DNA
acacctgcaggccaagacaaatgcaagaaaacagcctcgtctgctcactgattctcaccaacttcctctataaaatgagg

SEQ ID NO: 47207 - DNA, 80 bp, synthetic construct
  misc_feature 1..80: note = Artificially Synthesized Probe
  source 1..80: mol_type = other DNA
gcgctgagaccaggcagggctctcctccggcagggcctggtctgcactgccctctctgaggaaagtgccccgctgccctg

SEQ ID NO: 47208 - DNA, 80 bp, synthetic construct; identical to SEQ ID NO: 23206
  misc_feature 1..80: note = Artificially Synthesized Probe
  source 1..80: mol_type = other DNA

SEQ ID NO: 47209 - DNA, 80 bp, synthetic construct
  misc_feature 1..80: note = Artificially Synthesized Probe
  source 1..80: mol_type = other DNA
tggccaagctcaacaatgctctgggaactccagtcaaagatgcatcacaacttttgggtcatgcctaaggtcaattccag

SEQ ID NO: 47210 - DNA, 80 bp, synthetic construct
  misc_feature 1..80: note = Artificially Synthesized Probe
  source 1..80: mol_type = other DNA
ccccctggacacagcatcatcacccacaggccgcacgacctcagggtccaccgggtgctgtgcagtctatggttggacga

SEQ ID NO: 47211 - DNA, 80 bp, synthetic construct
  misc_feature 1..80: note = Artificially Synthesized Probe
  source 1..80: mol_type = other DNA
tgtcagagtcggaaccctacagtgtgtagtccttggagacgggctgctttcactcaggcctggcagctcgtctgttttta

SEQ ID NO: 47212 - DNA, 80 bp, synthetic construct; identical to SEQ ID NO: 23207
  misc_feature 1..80: note = Artificially Synthesized Probe
  source 1..80: mol_type = other DNA

SEQ ID NO: 47213 - DNA, 80 bp, synthetic construct
  misc_feature 1..80: note = Artificially Synthesized Probe
  source 1..80: mol_type = other DNA
gctgaggtgggtggatcacttaagcccagttcaagaccagcctgggtaacatgatgaaaccctgtgttttaaaaaaaaaa

SEQ ID NO: 47214 - DNA, 80 bp, synthetic construct
  misc_feature 1..80: note = Artificially Synthesized Probe
  source 1..80: mol_type = other DNA
tacggccaagtttctgaagttggtgacatgtgagggtaccccaagactgaacagaaacaacctcctctcaggttctgagt

SEQ ID NO: 47215 - DNA, 80 bp, synthetic construct; identical to SEQ ID NO: 23144
  misc_feature 1..80: note = Artificially Synthesized Probe
  source 1..80: mol_type = other DNA

SEQ ID NO: 47216 - DNA, 80 bp, synthetic construct
  misc_feature 1..80: note = Artificially Synthesized Probe
  source 1..80: mol_type = other DNA
tgcggcatgctatggggccatgagaagcagccaggtgggtaggccagaccctgacccagagcaagcagagcccagcgcag

SEQ ID NO: 47217 - DNA, 80 bp, synthetic construct; identical to SEQ ID NO: 23208
  misc_feature 1..80: note = Artificially Synthesized Probe
  source 1..80: mol_type = other DNA

SEQ ID NO: 47218 - DNA, 80 bp, synthetic construct
  misc_feature 1..80: note = Artificially Synthesized Probe
  source 1..80: mol_type = other DNA
gccatttcctccacggatgttataccgcaaagaacaataaaaaacgactaacactgattgctgaccacctccccaaataa

SEQ ID NO: 47219 - DNA, 80 bp, synthetic construct
  misc_feature 1..80: note = Artificially Synthesized Probe
  source 1..80: mol_type = other DNA
ccagtgcacccccaagcaggggctgcaacagggctgcacagagggctccagttccttccagcacaggaacaaatccacac

SEQ ID NO: 47220 - DNA, 80 bp, synthetic construct
  misc_feature 1..80: note = Artificially Synthesized Probe
  source 1..80: mol_type = other DNA
aacgctataccactcccatgaaagcctgtgcgtgctgcctcaggaccctgtagcagaacagcgagtgacgtcgctttggc

SEQ ID NO: 47221 - DNA, 80 bp, synthetic construct
  misc_feature 1..80: note = Artificially Synthesized Probe
  source 1..80: mol_type = other DNA
gaccagtctggaagggatggaggcgctgtggccaagtgcagtctctctcggggtctctccccgcccgggtggacagggcg

SEQ ID NO: 47222 - DNA, 80 bp, synthetic construct; identical to SEQ ID NO: 23209
  misc_feature 1..80: note = Artificially Synthesized Probe
  source 1..80: mol_type = other DNA

SEQ ID NO: 47223 - DNA, 80 bp, synthetic construct
  misc_feature 1..80: note = Artificially Synthesized Probe
  source 1..80: mol_type = other DNA
cttttattagagtttctaaataaagaagtgatggccaacatcacaggaaaccttagatactattcctgccagttggtttg

SEQ ID NO: 47224 - DNA, 80 bp, synthetic construct
  misc_feature 1..80: note = Artificially Synthesized Probe
  source 1..80: mol_type = other DNA
gccacatcaacagagctggacctggtgcctggctgggagcaggtgccggggagcagccaccaaatgcacacacgccaggg

SEQ ID NO: 47225 - DNA, 80 bp, synthetic construct
  misc_feature 1..80: note = Artificially Synthesized Probe
  source 1..80: mol_type = other DNA
ggagtccaggaggactcctgtagcaggacattgcccagatttctcacaatgtcctctacaattaagagcacaaccactgt

SEQ ID NO: 47226 - DNA, 80 bp, synthetic construct; identical to SEQ ID NO: 23210
  misc_feature 1..80: note = Artificially Synthesized Probe
  source 1..80: mol_type = other DNA

SEQ ID NO: 47227 - DNA, 80 bp, synthetic construct
  misc_feature 1..80: note = Artificially Synthesized Probe
  source 1..80: mol_type = other DNA
gggactgagctgctgaggcccagcccagtggcctgagggccttgcccgtgcggggagctgtctgctgtctgctgcagcct

SEQ ID NO: 47228 - DNA, 80 bp, synthetic construct
  misc_feature 1..80: note = Artificially Synthesized Probe
  source 1..80: mol_type = other DNA
agctcaggaggtggagactagcctgggcaacatggtgaaaccctggctctaccaaaaaaaaaaaaaaaaaaaaaaaaaaa

SEQ ID NO: 47229 - DNA, 80 bp, synthetic construct
  misc_feature 1..80: note = Artificially Synthesized Probe
  source 1..80: mol_type = other DNA
aaaacaaaaaactgcaaattaaaacgccaaacgcacagattaatggaggaagccccatgcccaaatgctcccaaggaaac

SEQ ID NO: 47230 - DNA, 80 bp, synthetic construct; identical to SEQ ID NO: 23211
  misc_feature 1..80: note = Artificially Synthesized Probe
  source 1..80: mol_type = other DNA

SEQ ID NO: 47231 - DNA, 80 bp, synthetic construct
  misc_feature 1..80: note = Artificially Synthesized Probe
  source 1..80: mol_type = other DNA
cccagataatttttttgtattttttatagtagagatggggtttcaccgtgttagccaggatggtctcaatctcctgacct

SEQ ID NO: 47232 - DNA, 80 bp, synthetic construct
  misc_feature 1..80: note = Artificially Synthesized Probe
  source 1..80: mol_type = other DNA
aatgcctgttcctctccctctgttctctaatggtgtggtcttcagtctactgtgtgtggaatccccctctattgggacca

SEQ ID NO: 47233 - DNA, 80 bp, synthetic construct
  misc_feature 1..80: note = Artificially Synthesized Probe
  source 1..80: mol_type = other DNA
ctcaggagccccaggggcccccactatggccatcccaggacgccgcccgtcaggctcccaggacactgccccaagcaccc

SEQ ID NO: 47234 - DNA, 80 bp, synthetic construct; identical to SEQ ID NO: 23212
  misc_feature 1..80: note = Artificially Synthesized Probe
  source 1..80: mol_type = other DNA

SEQ ID NO: 47235 - DNA, 80 bp, synthetic construct
  misc_feature 1..80: note = Artificially Synthesized Probe
  source 1..80: mol_type = other DNA
tctctactaaaaatacaaaaattagctgggcgtggtggcatgcaactgtaatcccagctacttgggaggctgagacagga

SEQ ID NO: 47236 - DNA, 80 bp, synthetic construct
  misc_feature 1..80: note = Artificially Synthesized Probe
  source 1..80: mol_type = other DNA
tgctcttttcagcatttagaaaatcagccaggcaaaacaatcatttccctttcttagctaaaaggtttgccaaatgaata

SEQ ID NO: 47237 - DNA, 80 bp, synthetic construct
  misc_feature 1..80: note = Artificially Synthesized Probe
  source 1..80: mol_type = other DNA
cactggacttaggacccaggaaggaatgatgagtccatctgctcgtgacctgagtctctaaaccaggaggacagacgtcc

SEQ ID NO: 47238 - DNA, 80 bp, synthetic construct
  misc_feature 1..80: note = Artificially Synthesized Probe
  source 1..80: mol_type = other DNA
ttttgctgtttaggtcaaaatcatgcattaggcaatagaacgacctagagatgtctgaattccccctcagtacaaccaaa

SEQ ID NO: 47239 - DNA, 80 bp, synthetic construct
  misc_feature 1..80: note = Artificially Synthesized Probe
  source 1..80: mol_type = other DNA
gcatgcagacgggccctacctggctctccaggggcatgttgtagacctcggagtccagcagcatcgtgcaggcgctgaat

SEQ ID NO: 47240 - DNA, 80 bp, synthetic construct; identical to SEQ ID NO: 23213
  misc_feature 1..80: note = Artificially Synthesized Probe
  source 1..80: mol_type = other DNA

SEQ ID NO: 47241 - DNA, 80 bp, synthetic construct
  misc_feature 1..80: note = Artificially Synthesized Probe
  source 1..80: mol_type = other DNA
cattttgccatatttgctttagaattctaacatttaaaaattacaaattacataatggttgaagccccttatataagccc

SEQ ID NO: 47242 - DNA, 80 bp, synthetic construct
  misc_feature 1..80: note = Artificially Synthesized Probe
  source 1..80: mol_type = other DNA
ttgtgctctggggtctatctgtgtggatacaggcagttctactattcttatgacaactgcagtgtgcgctcctcgttgtc

SEQ ID NO: 47243 - DNA, 80 bp, synthetic construct; identical to SEQ ID NO: 23214
  misc_feature 1..80: note = Artificially Synthesized Probe
  source 1..80: mol_type = other DNA

SEQ ID NO: 47244 - DNA, 80 bp, synthetic construct
  misc_feature 1..80: note = Artificially Synthesized Probe
  source 1..80: mol_type = other DNA
cccctgagtagctgagattacaggcatgcgccaccatgcctggctagtttttgtatttttagtagagatggggtttcaca

SEQ ID NO: 47245 - DNA, 80 bp, synthetic construct
  misc_feature 1..80: note = Artificially Synthesized Probe
  source 1..80: mol_type = other DNA
agagatcttggttagacaaggggaaacagtactttgcacatcatctttttttctaacatgattacattctacaaaaagag

SEQ ID NO: 47246 - DNA, 80 bp, synthetic construct
  misc_feature 1..80: note = Artificially Synthesized Probe
  source 1..80: mol_type = other DNA
ctggggagaggatgcacagcttttgcccaattctcagagagtccagacctgaaaaacgtttaggaaggcaccttttcaat

SEQ ID NO: 47247 - DNA, 80 bp, synthetic construct
  misc_feature 1..80: note = Artificially Synthesized Probe
  source 1..80: mol_type = other DNA
ttaataagtcataacccaagtcatgtggactgtttatatgcaatattagaaaagaaatcaaggtttccactgcgaaaagc

SEQ ID NO: 47248 - DNA, 80 bp, synthetic construct; identical to SEQ ID NO: 23215
  misc_feature 1..80: note = Artificially Synthesized Probe
  source 1..80: mol_type = other DNA

SEQ ID NO: 47249 - DNA, 80 bp, synthetic construct
  misc_feature 1..80: note = Artificially Synthesized Probe
  source 1..80: mol_type = other DNA
tgcagtgacaccagctgatttctgaaagctgtaaatagaggataatggcataaaaaaaattccagattaaaggaccaccc

SEQ ID NO: 47250 - DNA, 80 bp, synthetic construct
  misc_feature 1..80: note = Artificially Synthesized Probe
  source 1..80: mol_type = other DNA
gcctgcgccgtgaaaagccctggccgtggcgcccccctgcctgtgccagcccacttacccgctcgatgctgtgctgtaga

SEQ ID NO: 47251 - DNA, 80 bp, synthetic construct
  misc_feature 1..80: note = Artificially Synthesized Probe
  source 1..80: mol_type = other DNA
cctacaaaagcaaaataaggtccttgggttaactctctctgcacaaacgtgcacaaacaaaaagtggccaagagatggca

SEQ ID NO: 47252 - DNA, 80 bp, synthetic construct
  misc_feature 1..80: note = Artificially Synthesized Probe
  source 1..80: mol_type = other DNA
ggcccacggcgggagtgctgcacctcctccacgaacagcagccacggcccatggcaggagtgctgcacctccacccacag

SEQ ID NO: 47253 - DNA, 80 bp, synthetic construct; identical to SEQ ID NO: 23216
  misc_feature 1..80: note = Artificially Synthesized Probe
  source 1..80: mol_type = other DNA

SEQ ID NO: 47254 - DNA, 80 bp, synthetic construct
  misc_feature 1..80: note = Artificially Synthesized Probe
  source 1..80: mol_type = other DNA
tcggaaaacgttgaactccccagagatgttgaggccttgggaagacagcattcggtccaggataaaccagcaatactctg

SEQ ID NO: 47255 - DNA, 80 bp, synthetic construct
  misc_feature 1..80: note = Artificially Synthesized Probe
  source 1..80: mol_type = other DNA
cctgagcaggatatgccttttccttatttcccctctatcatctttctgaggcattatatggaaaactgggtgaataaatc

SEQ ID NO: 47256 - DNA, 80 bp, synthetic construct; identical to SEQ ID NO: 23217
  misc_feature 1..80: note = Artificially Synthesized Probe
  source 1..80: mol_type = other DNA

SEQ ID NO: 47257 - DNA, 80 bp, synthetic construct
  misc_feature 1..80: note = Artificially Synthesized Probe
  source 1..80: mol_type = other DNA
tttgagacgcagtcttgctgttgtcacccaggctggagtgcagtggtgcgatctcggctcactgcagcctcagcctcccg

SEQ ID NO: 47258 - DNA, 80 bp, synthetic construct
  misc_feature 1..80: note = Artificially Synthesized Probe
  source 1..80: mol_type = other DNA
gagccaccgcactgggcctgagcgcattttttaaaaagcaatacctgtgttcccaaaaacagaaaaattgacatttagtt

SEQ ID NO: 47259 - DNA, 80 bp, synthetic construct
  misc_feature 1..80: note = Artificially Synthesized Probe
  source 1..80: mol_type = other DNA
ttatgtgtaatctcttaaaagccagggtacacaggtattcctaacacataatgtatgtgtgagtgagtgagcgagcaaat

SEQ ID NO: 47260 - DNA, 80 bp, synthetic construct; identical to SEQ ID NO: 23218
  misc_feature 1..80: note = Artificially Synthesized Probe
  source 1..80: mol_type = other DNA

SEQ ID NO: 47261 - DNA, 80 bp, synthetic construct
  misc_feature 1..80: note = Artificially Synthesized Probe
  source 1..80: mol_type = other DNA
acactcacggccagctctgaccgactgaacccaggggcacatcacagacataaatatcggtgcaggcggccagccactcc

SEQ ID NO: 47262 - DNA, 80 bp, synthetic construct; identical to SEQ ID NO: 23145
  misc_feature 1..80: note = Artificially Synthesized Probe
  source 1..80: mol_type = other DNA

SEQ ID NO: 47263 - DNA, 80 bp, synthetic construct
  misc_feature 1..80: note = Artificially Synthesized Probe
  source 1..80: mol_type = other DNA
taagtcatcactagggcttaacgatccatttcaaattacatctgcacggtgctttactttcatacgttattttatttgga

SEQ ID NO: 47264 - DNA, 80 bp, synthetic construct
  misc_feature 1..80: note = Artificially Synthesized Probe
  source 1..80: mol_type = other DNA
ctgctgtccacacactcctagaaaatatccatctgtctgaagcgagtgacacagattttaccctcttgaggataaaataa

SEQ ID NO: 47265 - DNA, 80 bp, synthetic construct
  misc_feature 1..80: note = Artificially Synthesized Probe
  source 1..80: mol_type = other DNA
ggaagaaagagggccagaaatgagggcaccctcatgcatgctgggagctgccgacaccttcagactgggaagaacaaaga

SEQ ID NO: 47266 - DNA, 80 bp, synthetic construct; identical to SEQ ID NO: 23219
  misc_feature 1..80: note = Artificially Synthesized Probe
  source 1..80: mol_type = other DNA

SEQ ID NO: 47267 - DNA, 80 bp, synthetic construct
  misc_feature 1..80: note = Artificially Synthesized Probe
  source 1..80: mol_type = other DNA
ctaaaatctgggagcatccaccaggaaatggaaaaggcaaactcccaacataaccacaaaaagacactgtacaatctcca

SEQ ID NO: 47268 - DNA, 80 bp, synthetic construct
  misc_feature 1..80: note = Artificially Synthesized Probe
  source 1..80: mol_type = other DNA
gtgccccatctggggaggctctgccctcgtgggtggacgaacgctggctgctattaagggctagcactgggaggcagtcc

SEQ ID NO: 47269 - DNA, 80 bp, synthetic construct
  misc_feature 1..80: note = Artificially Synthesized Probe
  source 1..80: mol_type = other DNA
ttacagcggcataaacaggctaagggaaaaaagtaaatggactaagaaatacaagaccaagtttgtcagattggaatgga

SEQ ID NO: 47270 - DNA, 80 bp, synthetic construct; identical to SEQ ID NO: 23220
  misc_feature 1..80: note = Artificially Synthesized Probe
  source 1..80: mol_type = other DNA

SEQ ID NO: 47271 - DNA, 80 bp, synthetic construct
  misc_feature 1..80: note = Artificially Synthesized Probe
  source 1..80: mol_type = other DNA
ccactaacaacacaaaaaaaaaaaattagccgggcgtggtgccgggcgcttgtaatcccagctactcgggaggctgaggc

SEQ ID NO: 47272 - DNA, 80 bp, synthetic construct
  misc_feature 1..80: note = Artificially Synthesized Probe
  source 1..80: mol_type = other DNA
attaaagtgcctttcagtaaagaacagacaaggagacaaccctaacccagactacaagacagaagatctgaaagcaagac

SEQ ID NO: 47273 - DNA, 80 bp, synthetic construct
  misc_feature 1..80: note = Artificially Synthesized Probe
  source 1..80: mol_type = other DNA
tagaaaataacacaataatcacgcaatccatttttcaagctcccagggaacaacagtcatccaaacttgatcacacagac

SEQ ID NO: 47274 - DNA, 80 bp, synthetic construct
  misc_feature 1..80: note = Artificially Synthesized Probe
  source 1..80: mol_type = other DNA
agaggagatacagcgagacagcaggagggggctgggggtaggctgagcttcctgtgttcacagggagggcccatgcaccc

SEQ ID NO: 47275 - DNA, 80 bp, synthetic construct; identical to SEQ ID NO: 23221
  misc_feature 1..80: note = Artificially Synthesized Probe
  source 1..80: mol_type = other DNA

SEQ ID NO: 47276 - DNA, 80 bp, synthetic construct
  misc_feature 1..80: note = Artificially Synthesized Probe
  source 1..80: mol_type = other DNA
atgacctataaaatagagaacaagctacacgacacaataggaaagcaactagacaaaataggaaggcgcgaactgtctgc

SEQ ID NO: 47277 - DNA, 80 bp, synthetic construct
  misc_feature 1..80: note = Artificially Synthesized Probe
  source 1..80: mol_type = other DNA
cttgctgaaatggaaatgtgaatgaaaacactgccacagcagcacctgggtgagggcttctttcaatctctggcagtgta

SEQ ID NO: 47278 - DNA, 80 bp, synthetic construct
  misc_feature 1..80: note = Artificially Synthesized Probe
  source 1..80: mol_type = other DNA
gtcaggagatcaagaccatcctggctagcacggtgaaaccccgtctctactaaaaaatacaaaaaaattagccgggcgtg

SEQ ID NO: 47279 - DNA, 80 bp, synthetic construct; identical to SEQ ID NO: 23222
  misc_feature 1..80: note = Artificially Synthesized Probe
  source 1..80: mol_type = other DNA

SEQ ID NO: 47280 - DNA, 80 bp, synthetic construct
  misc_feature 1..80: note = Artificially Synthesized Probe
  source 1..80: mol_type = other DNA
ctgaggaaactcccttctgttcttactttgcagagcactttcctcatgaataggtatgggattttgtctttttttttttg

SEQ ID NO: 47281 - DNA, 80 bp, synthetic construct
  misc_feature 1..80: note = Artificially Synthesized Probe
  source 1..80: mol_type = other DNA
acagatagggtttcaccatgttgcccaagctgctctgcaactcctggactcaaacagtcctcccatctcagcctcccaaa

SEQ ID NO: 47282 - DNA, 80 bp, synthetic construct
  misc_feature 1..80: note = Artificially Synthesized Probe
  source 1..80: mol_type = other DNA
ccccgcttgctcatgaggtatcgctatcctttctatctcctataacttaaatttacatcagtattaatgtgggtgtttct

SEQ ID NO: 47283 - DNA, 80 bp, synthetic construct; identical to SEQ ID NO: 23223
  misc_feature 1..80: note = Artificially Synthesized Probe
  source 1..80: mol_type = other DNA

SEQ ID NO: 47284 - DNA, 80 bp, synthetic construct
  misc_feature 1..80: note = Artificially Synthesized Probe
  source 1..80: mol_type = other DNA
ctcatgtccatactaaaaatttgttgcttctttttctcctgatccatttggctaaggggctaccagttttattgtcttta

SEQ ID NO: 47285 - DNA, 80 bp, synthetic construct
  misc_feature 1..80: note = Artificially Synthesized Probe
  source 1..80: mol_type = other DNA
ccaccagcagaagggttctcacagaggtgggtcggccattctgaaactacatgcatgctggaagtgaatgaggaagtaaa

SEQ ID NO: 47286 - DNA, 80 bp, synthetic construct
  misc_feature 1..80: note = Artificially Synthesized Probe
  source 1..80: mol_type = other DNA
ggataatcgcttgaacctgggaggcggaggttacagtgagtctagatggcaccactgcactctagcctgggggacagagt

SEQ ID NO: 47287 - DNA, 80 bp, synthetic construct; identical to SEQ ID NO: 23224
  misc_feature 1..80: note = Artificially Synthesized Probe
  source 1..80: mol_type = other DNA

SEQ ID NO: 47288 - DNA, 80 bp, synthetic construct
  misc_feature 1..80: note = Artificially Synthesized Probe
  source 1..80: mol_type = other DNA
tcaactaatttcttaacaaatgtaaagaaattgaatggcaaaataatcttttccacaaatgatgctggaaataattgaat

SEQ ID NO: 47289 - DNA, 80 bp, synthetic construct
  misc_feature 1..80: note = Artificially Synthesized Probe
  source 1..80: mol_type = other DNA
aaagtacccaagacaaaactatgaagttggacttcatcaaactaaaaactttagctgctctaaagacactattaagaaat

SEQ ID NO: 47290 - DNA, 80 bp, synthetic construct
  misc_feature 1..80: note = Artificially Synthesized Probe
  source 1..80: mol_type = other DNA
ttagaaatgagcaaatggcagatatgaaagtgaagacacatgcttcaccaaagcaaatacatggatagtcccttcccccc

SEQ ID NO: 47291 - DNA, 80 bp, synthetic construct
  misc_feature 1..80: note = Artificially Synthesized Probe
  source 1..80: mol_type = other DNA
cacaaaactgagtggtcactttggaaaagagtctggcaggttcttaacaagttaaacattcatgtaacatgtgaccgaga

SEQ ID NO: 47292 - DNA, 80 bp, synthetic construct; identical to SEQ ID NO: 23225
  misc_feature 1..80: note = Artificially Synthesized Probe
  source 1..80: mol_type = other DNA

SEQ ID NO: 47293 - DNA, 80 bp, synthetic construct
  misc_feature 1..80: note = Artificially Synthesized Probe
  source 1..80: mol_type = other DNA
gaaataggatgacatgctgctgcaaagaggaaagggggaactttcttggggtgatggaaatactactctgtatcatgact

SEQ ID NO: 47294 - DNA, 80 bp, synthetic construct
  misc_feature 1..80: note = Artificially Synthesized Probe
  source 1..80: mol_type = other DNA
gctaccataagatgctaatggagtggaacgggtcccatggcataaacacctaccactgtgttacgatttctttccacgat

SEQ ID NO: 47295 - DNA, 80 bp, synthetic construct; identical to SEQ ID NO: 23226
  misc_feature 1..80: note = Artificially Synthesized Probe
  source 1..80: mol_type = other DNA

SEQ ID NO: 47296 - DNA, 80 bp, synthetic construct
  misc_feature 1..80: note = Artificially Synthesized Probe
  source 1..80: mol_type = other DNA
gccacagcagtcgtaccagggccaccactccccacaggtggacccacacggtaatggcaaggcggagccgggtggccaag

SEQ ID NO: 47297 - DNA, 80 bp, synthetic construct
  misc_feature 1..80: note = Artificially Synthesized Probe
  source 1..80: mol_type = other DNA
ggccgccaaacacatctggaaaagcagaatacattcctgaaggggatggcatccatggccctagggaaggaagaccagat

SEQ ID NO: 47298 - DNA, 80 bp, synthetic construct
  misc_feature 1..80: note = Artificially Synthesized Probe
  source 1..80: mol_type = other DNA
gcgaactttttcaagaaaacactggatacagactctcgggcaggtctgtaagttaaggcatggagacgaagcttctctct

SEQ ID NO: 47299 - DNA, 80 bp, synthetic construct
  misc_feature 1..80: note = Artificially Synthesized Probe
  source 1..80: mol_type = other DNA
agtgacgattaaaggtccaagtttctttctgaggtgacagcaatgttctagaactgacagtcctggtggttgaacagacc

SEQ ID NO: 47300 - DNA, 80 bp, synthetic construct
  misc_feature 1..80: note = Artificially Synthesized Probe
  source 1..80: mol_type = other DNA
ctgcctcccaggttcaagcaattctcacgcctccgctgaaatgacaggcacaagccaccaggcccaggtaatttgtgtag

SEQ ID NO: 47301 - DNA, 80 bp, synthetic construct; identical to SEQ ID NO: 23227
  misc_feature 1..80: note = Artificially Synthesized Probe
  source 1..80: mol_type = other DNA

SEQ ID NO: 47302 - DNA, 80 bp, synthetic construct
  misc_feature 1..80: note = Artificially Synthesized Probe
  source 1..80: mol_type = other DNA
aggagggcacttgctgatgctgggcacagaggaatgtcagggcagatcttcaaggctcacacccttcagagcttctggca

SEQ ID NO: 47303 - DNA, 80 bp, synthetic construct
  misc_feature 1..80: note = Artificially Synthesized Probe
  source 1..80: mol_type = other DNA
tctgtccgctccactcatcagcaccaaagtgttctgtgcctggcccttctccacccaattcaccagtttattgaagcctc

SEQ ID NO: 47304 - DNA, 80 bp, synthetic construct; identical to SEQ ID NO: 23228
  misc_feature 1..80: note = Artificially Synthesized Probe
  source 1..80: mol_type = other DNA

SEQ ID NO: 47305 - DNA, 80 bp, synthetic construct
  misc_feature 1..80: note = Artificially Synthesized Probe
  source 1..80: mol_type = other DNA
aggtggatcatgaggtcaggagttcaagaccagcctggccaatatggtgaaaccccgtctctactaaaaatacaaaaatt

SEQ ID NO: 47306 - DNA, 80 bp, synthetic construct
  misc_feature 1..80: note = Artificially Synthesized Probe
  source 1..80: mol_type = other DNA
agagagagagagagagagaaagtaaacaaagtttctatttatttctccagaggatctcaaaagtagagctggaaatacca

SEQ ID NO: 47307 - DNA, 80 bp, synthetic construct
  misc_feature 1..80: note = Artificially Synthesized Probe
  source 1..80: mol_type = other DNA
agcctccctagtagctgggattacaggcatgcacaaccacgcttgcctaatttctttgtatttttagtagagacagggtt

SEQ ID NO: 47308 - DNA, 80 bp, synthetic construct
  misc_feature 1..80: note = Artificially Synthesized Probe
  source 1..80: mol_type = other DNA
aaggggtggctcctgacagcacagctccagttagcggacacaggagagggagacaggcccagcgcacaggagtgactgct

SEQ ID NO: 47309 - DNA, 80 bp, synthetic construct; identical to SEQ ID NO: 23229
  misc_feature 1..80: note = Artificially Synthesized Probe
  source 1..80: mol_type = other DNA

SEQ ID NO: 47310 - DNA, 80 bp, synthetic construct
  misc_feature 1..80: note = Artificially Synthesized Probe
  source 1..80: mol_type = other DNA
gagcacccagccctgcagggctctcgggagctgcccgcccaacagtcccatgcctggcactccctcaggtgccgcctgca

SEQ ID NO: 47311 - DNA, 80 bp, synthetic construct
  misc_feature 1..80: note = Artificially Synthesized Probe
  source 1..80: mol_type = other DNA
gaaacactgtatctcaccctagaatttgaaaagcctccttttccttctcactgtcaatcttttttgaagtctcaaaaatg

SEQ ID NO: 47312 - DNA, 80 bp, synthetic construct
  misc_feature 1..80: note = Artificially Synthesized Probe
  source 1..80: mol_type = other DNA
ctcttgatagggagggcacttctaggctggaatactcaagagatttgattgtgtgtcatcaaagcatgctttaaatacaa

SEQ ID NO: 47313 - DNA, 80 bp, synthetic construct
  misc_feature 1..80: note = Artificially Synthesized Probe
  source 1..80: mol_type = other DNA
acctgtaatcccagctactcataagggaggctgaggcaggagaaatcgcttgaacccaggaggcggaggttgcagtgagc

SEQ ID NO: 47314 - DNA, 80 bp, synthetic construct; identical to SEQ ID NO: 23230
  misc_feature 1..80: note = Artificially Synthesized Probe
  source 1..80: mol_type = other DNA

SEQ ID NO: 47315 - DNA, 80 bp, synthetic construct
  misc_feature 1..80: note = Artificially Synthesized Probe
  source 1..80: mol_type = other DNA
tgatgctcgggaggcgggcagagggctcacggagggagggcggagggctcacaccctgaggctcggaaggcgggcagagg

SEQ ID NO: 47316 - DNA, 80 bp, synthetic construct
  misc_feature 1..80: note = Artificially Synthesized Probe
  source 1..80: mol_type = other DNA
agtttctgctgcttgtaccataaacttttcatcagccagactgtttgcctgaaagacctaatcaaggctgacaagaattc

SEQ ID NO: 47317 - DNA, 80 bp, synthetic construct; identical to SEQ ID NO: 23231
  misc_feature 1..80: note = Artificially Synthesized Probe
  source 1..80: mol_type = other DNA

SEQ ID NO: 47318 - DNA, 80 bp, synthetic construct
  misc_feature 1..80: note = Artificially Synthesized Probe
  source 1..80: mol_type = other DNA
tgcgcagcccaatggaaaggcagagtgaccgatgagataaacaccacaggaacagggtgctccccccagcacagctcggg

SEQ ID NO: 47319 - DNA, 80 bp, synthetic construct; identical to SEQ ID NO: 23146
  misc_feature 1..80: note = Artificially Synthesized Probe
  source 1..80: mol_type = other DNA

SEQ ID NO: 47320 - DNA, 80 bp, synthetic construct
  misc_feature 1..80: note = Artificially Synthesized Probe
  source 1..80: mol_type = other DNA
gtctcaaaacaaatacaagaaagaatctggaaaaccttagttactatgaactagtgcttttcactaacaaaacacaagta

SEQ ID NO: 47321 - DNA, 80 bp, synthetic construct
  misc_feature 1..80: note = Artificially Synthesized Probe
  source 1..80: mol_type = other DNA
cagttctcggtggcaagccatccgctgaggtgagaaggatgtgatccatcagccaaccctgcctagatgatgacaccagc

SEQ ID NO: 47322 - DNA, 80 bp, synthetic construct
  misc_feature 1..80: note = Artificially Synthesized Probe
  source 1..80: mol_type = other DNA
aggtcaggagatcgagaccatcctggctaacacagtaaaaccccatctctactaaaaatacaaaaaaaaaaaaaaaatta

SEQ ID NO: 47323 - DNA, 80 bp, synthetic construct; identical to SEQ ID NO: 23232
  misc_feature 1..80: note = Artificially Synthesized Probe
  source 1..80: mol_type = other DNA

SEQ ID NO: 47324 - DNA, 80 bp, synthetic construct
  misc_feature 1..80: note = Artificially Synthesized Probe
  source 1..80: mol_type = other DNA
cagcagggcatgtcccaatgctaatggttcaacagccaggcttgacatcttttattctaaaaatctaccacagaatagcc

SEQ ID NO: 47325 - DNA, 80 bp, synthetic construct
  misc_feature 1..80: note = Artificially Synthesized Probe
  source 1..80: mol_type = other DNA
caggattcacctctcatctgtcaaatctgctgataaaagtcacaccatgaaggaagggcagtcagggactgtgctcacca

SEQ ID NO: 47326 - DNA, 80 bp, synthetic construct; identical to SEQ ID NO: 23233
  misc_feature 1..80: note = Artificially Synthesized Probe
  source 1..80: mol_type = other DNA

SEQ ID NO: 47327 - DNA, 80 bp, synthetic construct
  misc_feature 1..80: note = Artificially Synthesized Probe
  source 1..80: mol_type = other DNA
gccctaacgaggaatgcctgtcacagccaatgctgcggactccactcacagggtccagggacaaacagcagctgcacaag

SEQ ID NO: 47328 - DNA, 80 bp, synthetic construct
  misc_feature 1..80: note = Artificially Synthesized Probe
  source 1..80: mol_type = other DNA
ggatgaaagtaatgaaaagtagtaaatcctttcaaaacaatcagatttagttatgatgctcaatttctgaaatcaatctc

SEQ ID NO: 47329 - DNA, 80 bp, synthetic construct
  misc_feature 1..80: note = Artificially Synthesized Probe
  source 1..80: mol_type = other DNA
ccacgtggctttgctagaatgccaccacgtgcgggcagacacaggccacagcccccacacctcactctggcatcagcact

SEQ ID NO: 47330 - DNA, 80 bp, synthetic construct; identical to SEQ ID NO: 23234
  misc_feature 1..80: note = Artificially Synthesized Probe
  source 1..80: mol_type = other DNA

SEQ ID NO: 47331 - DNA, 80 bp, synthetic construct
  misc_feature 1..80: note = Artificially Synthesized Probe
  source 1..80: mol_type = other DNA
ctatctctgctgtttctgaacttttctgcccatctaaaatcagttcaaaattaatgatttaggccgagcgcagtggctca

SEQ ID NO: 47332 - DNA, 80 bp, synthetic construct
  misc_feature 1..80: note = Artificially Synthesized Probe
  source 1..80: mol_type = other DNA
taagatttcaactgtttacccaggatgctgcctgcagctcatttcagtgacaacccacaagctgccctcgctggccctgt

SEQ ID NO: 47333 - DNA, 80 bp, synthetic construct
  misc_feature 1..80: note = Artificially Synthesized Probe
  source 1..80: mol_type = other DNA
gagcgcagtggtgcgatcatggctcaccacagcctcgacctcctgggctcaagtgatcctcccacttcagcctccagagc

SEQ ID NO: 47334 - DNA, 80 bp, synthetic construct
  misc_feature 1..80: note = Artificially Synthesized Probe
  source 1..80: mol_type = other DNA
acatcattgtcactgtcctcatctaaaagactgattctggaagaaaaaaaaaatcaatctgaaacaagatcacggaaatg

SEQ ID NO: 47335 - DNA, 80 bp, synthetic construct
  misc_feature 1..80: note = Artificially Synthesized Probe
  source 1..80: mol_type = other DNA
aaaaagcagactcccagggaactgcagccagctcctggagccagccccagcagaggagcaggaagaccttccagcctgcg

SEQ ID NO: 47336 - DNA, 80 bp, synthetic construct; identical to SEQ ID NO: 23235
  misc_feature 1..80: note = Artificially Synthesized Probe
  source 1..80: mol_type = other DNA

SEQ ID NO: 47337 - DNA, 80 bp, synthetic construct
  misc_feature 1..80: note = Artificially Synthesized Probe
  source 1..80: mol_type = other DNA
gggacttgtgcccggcggggtccagttcctgcaccttcagctgccactccatcctctgcacggcgttcagggccgcggcc

SEQ ID NO: 47338 - DNA, 80 bp, synthetic construct
  misc_feature 1..80: note = Artificially Synthesized Probe
  source 1..80: mol_type = other DNA
gctacaaaaccctaagaacagagagtgccatggatgccaaaatcagcatcacatagtttatatgttttttaacttttagg

SEQ ID NO: 47339 - DNA, 80 bp, synthetic construct
  misc_feature 1..80: note = Artificially Synthesized Probe
  source 1..80: mol_type = other DNA
gacccccgtgtctggtgtttccttccctgtgtttttaagttcttatcatttagatcccacttgtaaagtcagaacatgta

SEQ ID NO: 47340 - DNA, 80 bp, synthetic construct
  misc_feature 1..80: note = Artificially Synthesized Probe
  source 1..80: mol_type = other DNA
gtattagggatggggcttcactatgttgcccaagctggcctgaaactcctgggttcaggcaatcctctcgaattggtctc

SEQ ID NO: 47341 - DNA, 80 bp, synthetic construct; identical to SEQ ID NO: 23236
  misc_feature 1..80: note = Artificially Synthesized Probe
  source 1..80: mol_type = other DNA

SEQ ID NO: 47342 - DNA, 80 bp, synthetic construct
  misc_feature 1..80: note = Artificially Synthesized Probe
  source 1..80: mol_type = other DNA
gaagaggagaagaaaagatttcgattcactaaaaactcctgttaagcctccaagaaagatccaagtaatcagatacctgg

SEQ ID NO: 47343 - DNA, 80 bp, synthetic construct
  misc_feature 1..80: note = Artificially Synthesized Probe
  source 1..80: mol_type = other DNA
ctgaggcaggagaattgcttgaaccggggaggtggagcttgcagtgagccgacatcacgccactgcactccagcctgggt

SEQ ID NO: 47344 - DNA, 80 bp, synthetic construct
  misc_feature 1..80: note = Artificially Synthesized Probe
  source 1..80: mol_type = other DNA
catcaggtgagaggctccttgtctctcacatccagatggatccgatccaactcacacagtgaacgactccaaacctgggc

SEQ ID NO: 47345 - DNA, 80 bp, synthetic construct
  misc_feature 1..80: note = Artificially Synthesized Probe
  source 1..80: mol_type = other DNA
tgcgcaccccttaggaaaccccagcagcacatcccccttcttcctcccgcagagggcctgccccaagcagcaggaaacgg

SEQ ID NO: 47346 - DNA, 80 bp, synthetic construct; identical to SEQ ID NO: 23237
  misc_feature 1..80: note = Artificially Synthesized Probe
  source 1..80: mol_type = other DNA

SEQ ID NO: 47347 - DNA, 80 bp, synthetic construct
  misc_feature 1..80: note = Artificially Synthesized Probe
  source 1..80: mol_type = other DNA
ctcctgctgaaacaccaatcagtagaagatcaccacccagaaatatcactttcaagcttaaggatcacaagttacaaaga

SEQ ID NO: 47348 - DNA, 80 bp, synthetic construct
  misc_feature 1..80: note = Artificially Synthesized Probe
  source 1..80: mol_type = other DNA
ggggcagcaatggggtatgagctggcacagccttgcaacaccctggatgggcggccaggggcttgtgagagtggctccag

SEQ ID NO: 47349 - DNA, 80 bp, synthetic construct; identical to SEQ ID NO: 23238
  misc_feature 1..80: note = Artificially Synthesized Probe
  source 1..80: mol_type = other DNA

SEQ ID NO: 47350 - DNA, 80 bp, synthetic construct
  misc_feature 1..80: note = Artificially Synthesized Probe
  source 1..80: mol_type = other DNA
cacgaaagttccatctagacccaaacctaaattgcacagctacagaatgaagtgaacagcactgaagccggaagggacaa

SEQ ID NO: 47351 - DNA, 80 bp, synthetic construct; identical to SEQ ID NO: 23270
  misc_feature 1..80: note = Artificially Synthesized Probe
  source 1..80: mol_type = other DNA

SEQ ID NO: 47352 - DNA, 80 bp, synthetic construct
  misc_feature 1..80: note = Artificially Synthesized Probe
  source 1..80: mol_type = other DNA
ctccttcctttgttctcctctgcctttgcctcttttaaaaagttctaagttgctagccaatcgggacaaatacagaatgt

SEQ ID NO: 47353 - DNA, 80 bp, synthetic construct
  misc_feature 1..80: note = Artificially Synthesized Probe
  source 1..80: mol_type = other DNA
ctggcgagtgtaccctttctgcagaaggtataaaaaatggccttgctgaggaaattaaatttacgttcaagtgctatttc

SEQ ID NO: 47354 - DNA, 80 bp, synthetic construct
  misc_feature 1..80: note = Artificially Synthesized Probe
  source 1..80: mol_type = other DNA
ggcagggattctgtgggccacctccaaggtgggactgatgcgagctcaagcgaatgcacagcccaggacccggcaccacc

SEQ ID NO: 47355 - DNA, 80 bp, synthetic construct; identical to SEQ ID NO: 23239
  misc_feature 1..80: note = Artificially Synthesized Probe
  source 1..80: mol_type = other DNA

SEQ ID NO: 47356 - DNA, 80 bp, synthetic construct
  misc_feature 1..80: note = Artificially Synthesized Probe
  source 1..80: mol_type = other DNA
gaaatctctcaagggggaaaaaaaaccttacatagttcacaattctgagtccagaatctaggagaaaccaccaaaacttt

SEQ ID NO: 47357 - DNA, 80 bp, synthetic construct
  misc_feature 1..80: note = Artificially Synthesized Probe
  source 1..80: mol_type = other DNA
agtcaggaagtggagtgctagccctatgcggtgactcatgcctggagcacagcacttcaggaggctgcggcaaggaggac

SEQ ID NO: 47358 - DNA, 80 bp, synthetic construct
  misc_feature 1..80: note = Artificially Synthesized Probe
  source 1..80: mol_type = other DNA
gggtgtggtgagctatcattgtgccatgccactgcattcctgcccagccgaccaagtgacacgctgatttaaaacacaca

SEQ ID NO: 47359 - DNA, 80 bp, synthetic construct; identical to SEQ ID NO: 23240
  misc_feature 1..80: note = Artificially Synthesized Probe
  source 1..80: mol_type = other DNA

SEQ ID NO: 47360 - DNA, 80 bp, synthetic construct
  misc_feature 1..80: note = Artificially Synthesized Probe
  source 1..80: mol_type = other DNA
taactccagagcagagcctttccatgtatttttcttaacctattcgccctcaaaacagcgctgagcacagcagtcagacc

SEQ ID NO: 47361 - DNA, 80 bp, synthetic construct
  misc_feature 1..80: note = Artificially Synthesized Probe
  source 1..80: mol_type = other DNA
ccatgggccgcgggctggacaagcttgccctatctcacactgttccctgtcagactgtaaacactactcagaatcacaca

SEQ ID NO: 47362 - DNA, 80 bp, synthetic construct
  misc_feature 1..80: note = Artificially Synthesized Probe
  source 1..80: mol_type = other DNA
tatgttaattttcaaattttggcatggaaatcacattctaagacgcttcccaagctttctggaggatgctatgaattctg

SEQ ID NO: 47363 - DNA, 80 bp, synthetic construct; identical to SEQ ID NO: 23241
  misc_feature 1..80: note = Artificially Synthesized Probe
  source 1..80: mol_type = other DNA

SEQ ID NO: 47364 - DNA, 80 bp, synthetic construct
  misc_feature 1..80: note = Artificially Synthesized Probe
  source 1..80: mol_type = other DNA
gtgcaggggagcctcccagatgagaggcctgtgcttggtcccacagggtgcagccttaccgtgctgctgagacactctgc

SEQ ID NO: 47365 - DNA, 80 bp, synthetic construct; identical to SEQ ID NO: 23147
  misc_feature 1..80: note = Artificially Synthesized Probe
  source 1..80: mol_type = other DNA

SEQ ID NO: 47366 - DNA, 80 bp, synthetic construct
  misc_feature 1..80: note = Artificially Synthesized Probe
  source 1..80: mol_type = other DNA
cagtgtctgtggaaggtggtctctccgcagaaacccaacgttttttttaactttgttttaggttcgggttgcaggtttgt

SEQ ID NO: 47367 - DNA, 80 bp, synthetic construct; identical to SEQ ID NO: 23242
  misc_feature 1..80: note = Artificially Synthesized Probe
  source 1..80: mol_type = other DNA

SEQ ID NO: 47368 - DNA, 80 bp, synthetic construct
  misc_feature 1..80: note = Artificially Synthesized Probe
  source 1..80: mol_type = other DNA
atgatctcattctttttcatggctgcacagtattccacggtgtatatgcaccacattttctttatccaatccgtcactga

SEQ ID NO: 47369 - DNA, 80 bp, synthetic construct
  misc_feature 1..80: note = Artificially Synthesized Probe
  source 1..80: mol_type = other DNA
gaatcgccatactgctttccacagggttgaactaatttacactcctgccaacagtgtataagtgctccctttaatccaca

SEQ ID NO: 47370 - DNA, 80 bp, synthetic construct
  misc_feature 1..80: note = Artificially Synthesized Probe
  source 1..80: mol_type = other DNA
taacccgagctgtttcctgtatctgtcatgagggtgctgagacatgtctagacagaggtgcggcacagtcaactggacac

SEQ ID NO: 47371 - DNA, 80 bp, synthetic construct; identical to SEQ ID NO: 23243
  misc_feature 1..80: note = Artificially Synthesized Probe
  source 1..80: mol_type = other DNA

SEQ ID NO: 47372 - DNA, 80 bp, synthetic construct
  misc_feature 1..80: note = Artificially Synthesized Probe
  source 1..80: mol_type = other DNA
cactacctcaactctccaccccgcacccatcggtgaggaagagcaggcacctcagggggacagtccatacatcccccttc

SEQ ID NO: 47373 - DNA, 80 bp, synthetic construct
  misc_feature 1..80: note = Artificially Synthesized Probe
  source 1..80: mol_type = other DNA
cagacctcccaccactgcttccactggggaaaggccggggatgctcaacgcaaccttagccggcaactcaggggagagac

SEQ ID NO: 47374 - DNA, 80 bp, synthetic construct
  misc_feature 1..80: note = Artificially Synthesized Probe
  source 1..80: mol_type = other DNA
acaagtccacattgcttgggggcctctataaatcctccatggcacaaaacctcccttgaccaggaaagctcccaaaggct

SEQ ID NO: 47375 - DNA, 80 bp, synthetic construct
  misc_feature 1..80: note = Artificially Synthesized Probe
  source 1..80: mol_type = other DNA
tagatcctgctccaggagccgggaagccttgccctggccagctgtgctgggcacctcccctgcctgcttcctggcccact

SEQ ID NO: 47376 - DNA, 80 bp, synthetic construct
  misc_feature 1..80: note = Artificially Synthesized Probe
  source 1..80: mol_type = other DNA
tgtgagggctgaggaccactggactaaatgggatggtgctgaaaagcagttatgcactcagaggaggcacttctgcactg

SEQ ID NO: 47377 - DNA, 80 bp, synthetic construct
  misc_feature 1..80: note = Artificially Synthesized Probe
  source 1..80: mol_type = other DNA
gtgaccgatcaaaggtgaggcgacgttcgatgttgaaaaccaaaagctggaggcactgcccctcaagccaggaggcaggc

SEQ ID NO: 47378 - DNA, 80 bp, synthetic construct; identical to SEQ ID NO: 23387
  misc_feature 1..80: note = Artificially Synthesized Probe
  source 1..80: mol_type = other DNA

SEQ ID NO: 47379 - DNA, 80 bp, synthetic construct
  misc_feature 1..80: note = Artificially Synthesized Probe
  source 1..80: mol_type = other DNA
cctcctcagcgcctcctgggctgtgctctgctactacgccgaagacctgcgcctgaagctgcccttgcaggtacgtggga

SEQ ID NO: 47380 - DNA, 80 bp, synthetic construct
  misc_feature 1..80: note = Artificially Synthesized Probe
  source 1..80: mol_type = other DNA
aggtggtggcatcccccacagtgggctcccgggaggtggggtcgggtgaacagtgcgtgtgcactgagctggcccctcca

SEQ ID NO: 47381 - DNA, 80 bp, synthetic construct
  misc_feature 1..80: note = Artificially Synthesized Probe
  source 1..80: mol_type = other DNA
ctacttaccagttcccaccccttttccacttgagggtctctgggctacaaattgacaagctgagcagcctcagagcctga

SEQ ID NO: 47382 - DNA, 80 bp, synthetic construct
  misc_feature 1..80: note = Artificially Synthesized Probe
  source 1..80: mol_type = other DNA
gacgtttccttccaggagttacccaaccaggcctccaactggtcggccggcctgctggcatggctgggcatccccaacgt

SEQ ID NO: 47383 - DNA, 80 bp, synthetic construct
  misc_feature 1..80: note = Artificially Synthesized Probe
  source 1..80: mol_type = other DNA
cctacggataagagagggagaggtgtctgtactccaggcccacctttctgggccttctcaggctccactgagtacccagg

SEQ ID NO: 47384 - DNA, 80 bp, synthetic construct; identical to SEQ ID NO: 23388
  misc_feature 1..80: note = Artificially Synthesized Probe
  source 1..80: mol_type = other DNA

SEQ ID NO: 47385 - DNA, 80 bp, synthetic construct
  misc_feature 1..80: note = Artificially Synthesized Probe
  source 1..80: mol_type = other DNA
tctgtctcgtcacagcgtccccaactgtggaggtagaatacagggacacgtttggcccatgctggctccctcctggaaac

SEQ ID NO: 47386 - DNA, 80 bp, synthetic construct
  misc_feature 1..80: note = Artificially Synthesized Probe
  source 1..80: mol_type = other DNA
ggtgggaaattcagcctcactccgtgttgccccacctatggcttcccaagattctggtttcccagggagggcccctaccc

SEQ ID NO: 47387 - DNA, 80 bp, synthetic construct
  misc_feature 1..80: note = Artificially Synthesized Probe
  source 1..80: mol_type = other DNA
tctgggtatctgggggcctgctgtggcctcctgttcctggggatgtgaaaaggcataatcgggagctgctgacctgccgg

SEQ ID NO: 47388 - DNA, 80 bp, synthetic construct; identical to SEQ ID NO: 23389
  misc_feature 1..80: note = Artificially Synthesized Probe
  source 1..80: mol_type = other DNA

SEQ ID NO: 47389 - DNA, 80 bp, synthetic construct
  misc_feature 1..80: note = Artificially Synthesized Probe
  source 1..80: mol_type = other DNA
cgctacacagggcaggccatgacctgggattgggaaggggtggggaagggcccagttcccctccgggaccccagggctca

SEQ ID NO: 47390 - DNA, 80 bp, synthetic construct
  misc_feature 1..80: note = Artificially Synthesized Probe
  source 1..80: mol_type = other DNA
ctacccaagagaggccctgctgaccaccacagggcacacagtcacgtggctgcccaggtagggggcagggcacaccctgg

SEQ ID NO: 47391 - DNA, 80 bp, synthetic construct; identical to SEQ ID NO: 23390
  misc_feature 1..80: note = Artificially Synthesized Probe
  source 1..80: mol_type = other DNA

SEQ ID NO: 47392 - DNA, 80 bp, synthetic construct
  misc_feature 1..80: note = Artificially Synthesized Probe
  source 1..80: mol_type = other DNA
agaaaaacctgcttgggatccaccagctgctggcagagggtgtcctcagtgccgccttccccctgcatgacgtgagctcg

SEQ ID NO: 47393 - DNA, 80 bp, synthetic construct
  misc_feature 1..80: note = Artificially Synthesized Probe
  source 1..80: mol_type = other DNA
tggcctgtccggggcctcaggtccggctctgcggggactgcagcccacactgcggtgcccaacacgggaacaggccggtc

SEQ ID NO: 47394 - DNA, 80 bp, synthetic construct; identical to SEQ ID NO: 23377
  misc_feature 1..80: note = Artificially Synthesized Probe
  source 1..80: mol_type = other DNA

SEQ ID NO: 47395 - DNA, 80 bp, synthetic construct
  misc_feature 1..80: note = Artificially Synthesized Probe
  source 1..80: mol_type = other DNA
taccatcatccctgagaaaacagccactgtggggagcagaaggccatttattcccccacccgcccaagccttcccccttg

SEQ ID NO: 47396 - DNA, 80 bp, synthetic construct
  misc_feature 1..80: note = Artificially Synthesized Probe
  source 1..80: mol_type = other DNA
ggtggctcctcccgccagccagggcccagaatgcacagcacaggacacgagcctggggactctccaacccagagaaggtg

SEQ ID NO: 47397 - DNA, 80 bp, synthetic construct; identical to SEQ ID NO: 23391
  misc_feature 1..80: note = Artificially Synthesized Probe
  source 1..80: mol_type = other DNA

SEQ ID NO: 47398 - DNA, 80 bp, synthetic construct
  misc_feature 1..80: note = Artificially Synthesized Probe
  source 1..80: mol_type = other DNA
ttttccagcactgggcgcgctggggcaagtggaacaagtaccagcccctggaccacgtgcgcaggtacttcggggagaag

SEQ ID NO: 47399 - DNA, 80 bp, synthetic construct
  misc_feature 1..80: note = Artificially Synthesized Probe
  source 1..80: mol_type = other DNA
ccgggctgccctcctggctcccctcaagcccactcactctaactgggcgccatgacgatgccgggccctggcctcctaat

SEQ ID NO: 47400 - DNA, 80 bp, synthetic construct; identical to SEQ ID NO: 23392
  misc_feature 1..80: note = Artificially Synthesized Probe
  source 1..80: mol_type = other DNA

SEQ ID NO: 47401 - DNA, 80 bp, synthetic construct
  misc_feature 1..80: note = Artificially Synthesized Probe
  source 1..80: mol_type = other DNA
gcacagcatcggggcagagggacagctcctgtgtgccaggactcacccggccatctcaggacctggagcagcaaccctgg

SEQ ID NO: 47402 - DNA, 80 bp, synthetic construct
  misc_feature 1..80: note = Artificially Synthesized Probe
  source 1..80: mol_type = other DNA
gtgggggtacatgctgagggcctggggtaactgagggattgcggctgtggtcagatgaggcaggggccagggtgggggtt

SEQ ID NO: 47403 - DNA, 80 bp, synthetic construct
  misc_feature 1..80: note = Artificially Synthesized Probe
  source 1..80: mol_type = other DNA
gtggagagcctggtgggctggagccccagcagcactggtgttggggtcaatgtggtaggggtgtccagagtctagggcag

SEQ ID NO: 47404 - DNA, 80 bp, synthetic construct
  misc_feature 1..80: note = Artificially Synthesized Probe
  source 1..80: mol_type = other DNA
tgatggtggacccctgccatcctctctacagggttttacacaggctggctcctgccagcggcagtggtgggcacactggt

SEQ ID NO: 47405 - DNA, 80 bp, synthetic construct
  misc_feature 1..80: note = Artificially Synthesized Probe
  source 1..80: mol_type = other DNA
acagcccacgcctcggaggtaacagcacccaggagactgtggtgcgacttgagaggtcctcccctgcctgggtctatgcc

SEQ ID NO: 47406 - DNA, 80 bp, synthetic construct; identical to SEQ ID NO: 23393
  misc_feature 1..80: note = Artificially Synthesized Probe
  source 1..80: mol_type = other DNA

SEQ ID NO: 47407 - DNA, 80 bp, synthetic construct
  misc_feature 1..80: note = Artificially Synthesized Probe
  source 1..80: mol_type = other DNA
cggtggataggagtgctcccaggctgacaggtggtcaggagtgctcccaggctgataggtggacaggagtgctcccaggc

SEQ ID NO: 47408 - DNA, 80 bp, synthetic construct
  misc_feature 1..80: note = Artificially Synthesized Probe
  source 1..80: mol_type = other DNA
aggagtgctcccagtctgacaggtggacaggagtgctcccaggctgacacaggtggacaggagtgctcccagcctgacac

SEQ ID NO: 47409 - DNA, 80 bp, synthetic construct
  misc_feature 1..80: note = Artificially Synthesized Probe
  source 1..80: mol_type = other DNA
tcccagtctgacaggtggacaggagtgctcccaggctgacaggtgggcaggagtgctcccagcctgacacaggtgggcag

SEQ ID NO: 47410 - DNA, 80 bp, synthetic construct; identical to SEQ ID NO: 23394
  misc_feature 1..80: note = Artificially Synthesized Probe
  source 1..80: mol_type = other DNA

SEQ ID NO: 47411 - DNA, 80 bp, synthetic construct
  misc_feature 1..80: note = Artificially Synthesized Probe
  source 1..80: mol_type = other DNA
aggtagacaggagtgctcccagtctgacaggtggacaggagtgctcccaggctgacaggtggacaggagtgctcccaggc

SEQ ID NO: 47412 - DNA, 80 bp, synthetic construct
  misc_feature 1..80: note = Artificially Synthesized Probe
  source 1..80: mol_type = other DNA
acaggagtgttcccagtctgacaagtggacaggagtgctcccaggctgacaggtggacaggagtgctcccagtctgacag

SEQ ID NO: 47413 - DNA, 80 bp, synthetic construct
  misc_feature 1..80: note = Artificially Synthesized Probe
  source 1..80: mol_type = other DNA
tcccagcctgacaggtggacaggagtgctcccaggctgacacaggtggacaggagtgctcccagcctgacacaggtgggc

SEQ ID NO: 47414 - DNA, 80 bp, synthetic construct
  misc_feature 1..80: note = Artificially Synthesized Probe
  source 1..80: mol_type = other DNA
tgacacaggtgggcaggagtgctcccaggctgacacaggtggacaggagtgctcccaggctgacaggtggacaggagtgc

SEQ ID NO: 47415 - DNA, 80 bp, synthetic construct; identical to SEQ ID NO: 23395
  misc_feature 1..80: note = Artificially Synthesized Probe
  source 1..80: mol_type = other DNA

SEQ ID NO: 47416 - DNA, 80 bp, synthetic construct
  misc_feature 1..80: note = Artificially Synthesized Probe
  source 1..80: mol_type = other DNA
ctgatgttcagacaggagctccaggagggtaaggggggcctggccaggcaaaggcaagaccagggcggggccctccctgt

SEQ ID NO: 47417 - DNA, 80 bp, synthetic construct
  misc_feature 1..80: note = Artificially Synthesized Probe
  source 1..80: mol_type = other DNA
agacattgtcatggcatatattttaaaacaactattttttttaagaaatgctgggcctggcaaaggcagtggtggacaga

SEQ ID NO: 47418 - DNA, 80 bp, synthetic construct
  misc_feature 1..80: note = Artificially Synthesized Probe
  source 1..80: mol_type = other DNA
aggacagcttcgagatgtgcccactttgcctcgactgccctttctggctgctctccagcgcctgtgccctggcccaggta

SEQ ID NO: 47419 - DNA, 80 bp, synthetic construct
  misc_feature 1..80: note = Artificially Synthesized Probe
  source 1..80: mol_type = other DNA
gaacgctccatgagctccttaacctttgttctcttgcctggaactggggttacacccggcacacacctcccagcacttgg

SEQ ID NO: 47420 - DNA, 80 bp, synthetic construct; identical to SEQ ID NO: 23396
  misc_feature 1..80: note = Artificially Synthesized Probe
  source 1..80: mol_type = other DNA

SEQ ID NO: 47421 - DNA, 80 bp, synthetic construct
  misc_feature 1..80: note = Artificially Synthesized Probe
  source 1..80: mol_type = other DNA
tcctaggaccacaaatggggacttaaaacagcagaagcttattctcacaggcccggggccagagtccagaatcaagctgt

SEQ ID NO: 47422 - DNA, 80 bp, synthetic construct
  misc_feature 1..80: note = Artificially Synthesized Probe
  source 1..80: mol_type = other DNA
cttctcccctcttgtaagggtttgtccagagtactctcatctggagatccttaccttacatctacaaaggcccttattca

SEQ ID NO: 47423 - DNA, 80 bp, synthetic construct; identical to SEQ ID NO: 23397
  misc_feature 1..80: note = Artificially Synthesized Probe
  source 1..80: mol_type = other DNA

SEQ ID NO: 47424 - DNA, 80 bp, synthetic construct
  misc_feature 1..80: note = Artificially Synthesized Probe
  source 1..80: mol_type = other DNA
ccaaggcgggtggatcacaaggtcagaagatcgagaccatcctggctaacacggtgaaacctcgtctctactaaaaatac

SEQ ID NO: 47425 - DNA, 80 bp, synthetic construct
  misc_feature 1..80: note = Artificially Synthesized Probe
  source 1..80: mol_type = other DNA
aacaaacaaaaaatacacagtcgggggatgtgtgtgggatgcacactcccattccaggaggaaggaacactggaaggaac

SEQ ID NO: 47426 - DNA, 80 bp, synthetic construct
  misc_feature 1..80: note = Artificially Synthesized Probe
  source 1..80: mol_type = other DNA
ctgctggagtactggaagcggaagagcgccacgctggcctaccgctgggactgctctgactacgaggacactgaggtgag

SEQ ID NO: 47427 - DNA, 80 bp, synthetic construct; identical to SEQ ID NO: 23398
  misc_feature 1..80: note = Artificially Synthesized Probe
  source 1..80: mol_type = other DNA

SEQ ID NO: 47428 - DNA, 80 bp, synthetic construct
  misc_feature 1..80: note = Artificially Synthesized Probe
  source 1..80: mol_type = other DNA
tcttcctggttctcctgggccacacgtctgccccagcagcctgcgggtggacacgggaccccttcctgccgccccaagca

SEQ ID NO: 47429 - DNA, 80 bp, synthetic construct
  misc_feature 1..80: note = Artificially Synthesized Probe
  source 1..80: mol_type = other DNA
gtggggtcccggctgagagcaggtgtgagtcatacggagggcctgggagggtctccccgtgggtgcgggcatggggcatt

SEQ ID NO: 47430 - DNA, 80 bp, synthetic construct
  misc_feature 1..80: note = Artificially Synthesized Probe
  source 1..80: mol_type = other DNA
gccaagatgtcaggaatccccaattcctgggatgggatggctctccaacactcacagtggctgccttgacacccagatgt

SEQ ID NO: 47431 - DNA, 80 bp, synthetic construct
  misc_feature 1..80: note = Artificially Synthesized Probe
  source 1..80: mol_type = other DNA
tgagggtgctggggtgcccaagacaccgtgaagggtctcacgggcctccctgcccccgcaggtggccgtggtggtcatgt

SEQ ID NO: 47432 - DNA, 80 bp, synthetic construct; identical to SEQ ID NO: 23399
  misc_feature 1..80: note = Artificially Synthesized Probe
  source 1..80: mol_type = other DNA

SEQ ID NO: 47433 - DNA, 80 bp, synthetic construct
  misc_feature 1..80: note = Artificially Synthesized Probe
  source 1..80: mol_type = other DNA
ctgttgcccaagctggagtgcactggcacgatcatggctcactgtagccttgacctcccaggctcaagggatcctcctgc

SEQ ID NO: 47434 - DNA, 80 bp, synthetic construct
  misc_feature 1..80: note = Artificially Synthesized Probe
  source 1..80: mol_type = other DNA
gccacagcacctggttttctttctcttattttttgtttttggcaccccaggtgggacacaaacaatccctgggttaggaa

SEQ ID NO: 47435 - DNA, 80 bp, synthetic construct
  misc_feature 1..80: note = Artificially Synthesized Probe
  source 1..80: mol_type = other DNA
caggctgcaaggtcccccaggtgggagatgtccctctaggatagggccgctgagcctctgttgggtggtgtggggtatcg

SEQ ID NO: 47436 - DNA, 80 bp, synthetic construct
  misc_feature 1..80: note = Artificially Synthesized Probe
  source 1..80: mol_type = other DNA
tagtcttgaacaaaagctggcagccccaccctggagcccaggttctaggagaggggacagaactggctgcctgcacagct

SEQ ID NO: 47437 - DNA, 80 bp, synthetic construct; identical to SEQ ID NO: 23400
  misc_feature 1..80: note = Artificially Synthesized Probe
  source 1..80: mol_type = other DNA

SEQ ID NO: 47438 - DNA, 80 bp, synthetic construct
  misc_feature 1..80: note = Artificially Synthesized Probe
  source 1..80: mol_type = other DNA
agtgttgggatatagggtattatcaattttcccaactcctgttaatcaacatgtttttgggtgacttcggaaatgtcaca

SEQ ID NO: 47439 - DNA, 80 bp, synthetic construct
  misc_feature 1..80: note = Artificially Synthesized Probe
  source 1..80: mol_type = other DNA
aagttcgaggacgccttcaccctcaaggtgttcatcttccagttcgtcaacttctactcctcacccgtctacattgcctt

SEQ ID NO: 47440 - DNA, 80 bp, synthetic construct
  misc_feature 1..80: note = Artificially Synthesized Probe
  source 1..80: mol_type = other DNA
catgcttcccgccaacctgacccttgccatgggcctggcccaaggaggaggggagccggctggaggcccagggctggtgg

SEQ ID NO: 47441 - DNA, 80 bp, synthetic construct
  misc_feature 1..80: note = Artificially Synthesized Probe
  source 1..80: mol_type = other DNA
cctcctggcacctctgagcaaacaggggctgcccacctcttggtccctacccagctcgggggtccacaggaggcccagct

SEQ ID NO: 47442 - DNA, 80 bp, synthetic construct
  misc_feature 1..80: note = Artificially Synthesized Probe
  source 1..80: mol_type = other DNA
gccactgtgccaggtggggacccagcctagacgtgtgggccacagggagaaggtggagcgttggactctagggaggcagg

SEQ ID NO: 47443 - DNA, 80 bp, synthetic construct; identical to SEQ ID NO: 23401
  misc_feature 1..80: note = Artificially Synthesized Probe
  source 1..80: mol_type = other DNA

SEQ ID NO: 47444 - DNA, 80 bp, synthetic construct
  misc_feature 1..80: note = Artificially Synthesized Probe
  source 1..80: mol_type = other DNA
ccagctgtgcagctgaccactcagggctcccagcctctcttcaccacttattctgacccccgatatgccccattcagaac

SEQ ID NO: 47445 - DNA, 80 bp, synthetic construct
  misc_feature 1..80: note = Artificially Synthesized Probe
  source 1..80: mol_type = other DNA
aaaaccctaccccaccccagctgtcccagcccgtattactctttccccattttaacccaattcacacctgagaaaagtgt

SEQ ID NO: 47446 - DNA, 80 bp, synthetic construct
  misc_feature 1..80: note = Artificially Synthesized Probe
  source 1..80: mol_type = other DNA
cacacaggggtcgcaggggctggcctcctcacaggcttggcgtgctgccgccatggctgtcagggatctccctgtggcca

SEQ ID NO: 47447 - DNA, 80 bp, synthetic construct; identical to SEQ ID NO: 23402
  misc_feature 1..80: note = Artificially Synthesized Probe
  source 1..80: mol_type = other DNA

SEQ ID NO: 47448 - DNA, 80 bp, synthetic construct
  misc_feature 1..80: note = Artificially Synthesized Probe
  source 1..80: mol_type = other DNA
ctaagtggacccctgctgagtgacccctggcctgaaagacctcttctccttttggaagaggaggaggaggagagaaactt

SEQ ID NO: 47449 - DNA, 80 bp, synthetic construct
  misc_feature 1..80: note = Artificially Synthesized Probe
  source 1..80: mol_type = other DNA
gggtgccacaacggaccagccagagggctctcaattgttaagtgggaaaagttcccaactcaaactggcttaaacgaaaa

SEQ ID NO: 47450 - DNA, 80 bp, synthetic construct
  misc_feature 1..80: note = Artificially Synthesized Probe
  source 1..80: mol_type = other DNA
acgcacctgtagtctcagctactcgggaggctgaggcagaagaattgcttgaacccaggaggtggaggctgcagggagtt

SEQ ID NO: 47451 - DNA, 80 bp, synthetic construct; identical to SEQ ID NO: 23403
  misc_feature 1..80: note = Artificially Synthesized Probe
  source 1..80: mol_type = other DNA

SEQ ID NO: 47452 - DNA, 80 bp, synthetic construct; identical to SEQ ID NO: 23378
  misc_feature 1..80: note = Artificially Synthesized Probe
  source 1..80: mol_type = other DNA

SEQ ID NO: 47453 - DNA, 80 bp, synthetic construct
  misc_feature 1..80: note = Artificially Synthesized Probe
  source 1..80: mol_type = other DNA
tttccaatgcagtcttccagctggacctgggggctcctgtgaggtcgggagggagtgttatggtgggagcatctctgcaa

SEQ ID NO: 47454 - DNA, 80 bp, synthetic construct
  misc_feature 1..80: note = Artificially Synthesized Probe
  source 1..80: mol_type = other DNA
ggcacaggagctcctggtcatcatggtgggcaagcaggtcatcaacaacatgcaggaggtcctcatcccgtgagtccccc

SEQ ID NO: 47455 - DNA, 80 bp, synthetic construct
  misc_feature 1..80: note = Artificially Synthesized Probe
  source 1..80: mol_type = other DNA
gcccgccctgcagctgccctgtggctggctgaggtcttctgggttgtagttgtgggagacgctacccctgggaccagctt

SEQ ID NO: 47456 - DNA, 80 bp, synthetic construct; identical to SEQ ID NO: 23404
  misc_feature 1..80: note = Artificially Synthesized Probe
  source 1..80: mol_type = other DNA

SEQ ID NO: 47457 - DNA, 80 bp, synthetic construct
  misc_feature 1..80: note = Artificially Synthesized Probe
  source 1..80: mol_type = other DNA
agagatggccctgcctcttggaactattggtgctgtgaaaccacaagaccataaggtgcagggtggagctctgtgcctgg

SEQ ID NO: 47458 - DNA, 80 bp, synthetic construct
  misc_feature 1..80: note = Artificially Synthesized Probe
  source 1..80: mol_type = other DNA
gctttgcaattccgggaggagcccattacccctaaagccttaaggaacaatgcggggggctgggcgggtggactgccctc

SEQ ID NO: 47459 - DNA, 80 bp, synthetic construct; identical to SEQ ID NO: 23405
  misc_feature 1..80: note = Artificially Synthesized Probe
  source 1..80: mol_type = other DNA

SEQ ID NO: 47460 - DNA, 80 bp, synthetic construct
  misc_feature 1..80: note = Artificially Synthesized Probe
  source 1..80: mol_type = other DNA
gccgtgggcagggatgggtggccactctgctcaagggcctcccagcctgacattcctgtgtctgcatctgccctgaaatg

SEQ ID NO: 47461 - DNA, 80 bp, synthetic construct
  misc_feature 1..80: note = Artificially Synthesized Probe
  source 1..80: mol_type = other DNA
ggacctagaaagcatgggccagagcaagggaagaattaggagagcaggccctgggggctgacagaagtcctccaagggtg

SEQ ID NO: 47462 - DNA, 80 bp, synthetic construct
  misc_feature 1..80: note = Artificially Synthesized Probe
  source 1..80: mol_type = other DNA
acctgtgccgtccctgcagtgcagggtctgactctgagctgacaaaagggagaaggaatcatcaggcagtttgtttgttt

SEQ ID NO: 47463 - DNA, 80 bp, synthetic construct
  misc_feature 1..80: note = Artificially Synthesized Probe
  source 1..80: mol_type = other DNA
agccactctggggccagttgcttggggatggggcactggggtgagggcctcggggtgagcaaaccacagtgggaagaaca

SEQ ID NO: 47464 - DNA, 80 bp, synthetic construct
  misc_feature 1..80: note = Artificially Synthesized Probe
  source 1..80: mol_type = other DNA
cggctaattttgtatttttagtagaggcggagtttcaccgtgttggccaggctggtctcgaactcctgacctcaggtgat

SEQ ID NO: 47465 - DNA, 80 bp, synthetic construct; identical to SEQ ID NO: 23406
  misc_feature 1..80: note = Artificially Synthesized Probe
  source 1..80: mol_type = other DNA

SEQ ID NO: 47466 - DNA, 80 bp, synthetic construct
  misc_feature 1..80: note = Artificially Synthesized Probe
  source 1..80: mol_type = other DNA
agcgcagggcaggacagccggcctgaggccggtcaggagaggcggccctggcgctgcgcggtccaggacgagggagacca

SEQ ID NO: 47467 - DNA, 80 bp, synthetic construct
  misc_feature 1..80: note = Artificially Synthesized Probe
  source 1..80: mol_type = other DNA
cgtggccgcctgtccgctcgcgccgctcttcgccctgctcaacaactgggtggagatccgcttggacgcgcgcaagttcg

SEQ ID NO: 47468 - DNA, 80 bp, synthetic construct
  misc_feature 1..80: note = Artificially Synthesized Probe
  source 1..80: mol_type = other DNA
agcgggggcgcgcaggggcgggccgggggcagcgggggcgcgcaggggcggggctgggggcatcgggggctcgtaggggc

SEQ ID NO: 47469 - DNA, 80 bp, synthetic construct
  misc_feature 1..80: note = Artificially Synthesized Probe
  source 1..80: mol_type = other DNA
ggggcggagcgggggccgcctcgcgctgacccctccggcgcccaggccttcctcctggccttctcgtccgacttcctgcc

SEQ ID NO: 47470 - DNA, 80 bp, synthetic construct
  misc_feature 1..80: note = Artificially Synthesized Probe
  source 1..80: mol_type = other DNA
gcggggctcgggtggggtgggggtgcggcggtggggagccgggaggggcgggcgccgccgggcaaggccgggggaggggg

SEQ ID NO: 47471 - DNA, 80 bp, synthetic construct
  misc_feature 1..80: note = Artificially Synthesized Probe
  source 1..80: mol_type = other DNA
aaagaaggaagaggtttttttattcggccgggggcgtcggcagactcgtgtcttcagagcggagctcgccgaaaaagaaa

SEQ ID NO: 47472 - DNA, 80 bp, synthetic construct
  misc_feature 1..80: note = Artificially Synthesized Probe
  source 1..80: mol_type = other DNA
acaccagtagttttggtcaggggttaatattattgttattttaaccgccagggccaggtggtggcgccaaggtcatctag

SEQ ID NO: 47473 - DNA, 80 bp, synthetic construct
  misc_feature 1..80: note = Artificially Synthesized Probe
  source 1..80: mol_type = other DNA
tcaggtcatttctgactcttatctcttgcactccaccccttttgtaccttcaaaatctctttgatccacccccaacccac

SEQ ID NO: 47474 - DNA, 80 bp, synthetic construct; identical to SEQ ID NO: 23407
  misc_feature 1..80: note = Artificially Synthesized Probe
  source 1..80: mol_type = other DNA

SEQ ID NO: 47475 - DNA, 80 bp, synthetic construct
  misc_feature 1..80: note = Artificially Synthesized Probe
  source 1..80: mol_type = other DNA
cttactttttccttttattctttatcttttttattcctcctctcctgacttctggtggatgggtaaaagtgttctggttg

SEQ ID NO: 47476 - DNA, 80 bp, synthetic construct
  misc_feature 1..80: note = Artificially Synthesized Probe
  source 1..80: mol_type = other DNA
tatagctcactgcaccctagacttcctgggctcaagcaatcctcccacctcagcttcccgagaagccagaactacaggcg

SEQ ID NO: 47477 - DNA, 80 bp, synthetic construct
  misc_feature 1..80: note = Artificially Synthesized Probe
  source 1..80: mol_type = other DNA
gcacacgttctaaactatatattatcctaacaaagcctgaatgaactcagttttgtttcctctctctgtgtatgactagg

SEQ ID NO: 47478 - DNA, 80 bp, synthetic construct; identical to SEQ ID NO: 23408
  misc_feature 1..80: note = Artificially Synthesized Probe
  source 1..80: mol_type = other DNA

SEQ ID NO: 47479 - DNA, 80 bp, synthetic construct
  misc_feature 1..80: note = Artificially Synthesized Probe
  source 1..80: mol_type = other DNA
gctgaagtatatcctttagtaattctttcagtaaaggtatgtggttagtggggtcttcacatgcagaaatgcatacacat

SEQ ID NO: 47480 - DNA, 80 bp, synthetic construct
  misc_feature 1..80: note = Artificially Synthesized Probe
  source 1..80: mol_type = other DNA
ttattcttttgtgacttggcttttctgattggaagcattcatagcatttaagaatttttctggctgggcatggtacctca

SEQ ID NO: 47481 - DNA, 80 bp, synthetic construct
  misc_feature 1..80: note = Artificially Synthesized Probe
  source 1..80: mol_type = other DNA
ggccaagaccatcctggttaacaccgtgaaaccccatctctactaaaaatacaaaaattagctgggcgtggtgctggacg

SEQ ID NO: 47482 - DNA, 80 bp, synthetic construct; identical to SEQ ID NO: 23409
  misc_feature 1..80: note = Artificially Synthesized Probe
  source 1..80: mol_type = other DNA

SEQ ID NO: 47483 - DNA, 80 bp, synthetic construct
  misc_feature 1..80: note = Artificially Synthesized Probe
  source 1..80: mol_type = other DNA
ttattattatttttttgagacggagtcttgctctgttgcccaggctggagtgcaatggcgcgatcttggctcactgcacg

SEQ ID NO: 47484 - DNA, 80 bp, synthetic construct
  misc_feature 1..80: note = Artificially Synthesized Probe
  source 1..80: mol_type = other DNA
gatccgcctgcctcggcctcccaaagtgctgggattacaggcctgagccacctttcacgcccgtcctattctcttttttc

SEQ ID NO: 47485 - DNA, 80 bp, synthetic construct; identical to SEQ ID NO: 23379
  misc_feature 1..80: note = Artificially Synthesized Probe
  source 1..80: mol_type = other DNA

SEQ ID NO: 47486 - DNA, 80 bp, synthetic construct
  misc_feature 1..80: note = Artificially Synthesized Probe
  source 1..80: mol_type = other DNA
ttttagtagagacaaaggtttcaccatgttggccaggctggtctcaaactccgaacctcaggtatctgcccacttcagcc

SEQ ID NO: 47487 - DNA, 80 bp, synthetic construct
  misc_feature 1..80: note = Artificially Synthesized Probe
  source 1..80: mol_type = other DNA
cagcctcctgagtagctgggattacaggtgcctgccaccatgcccagctactcttttatatttttagtagagacggaggt

SEQ ID NO: 47488 - DNA, 80 bp, synthetic construct; identical to SEQ ID NO: 23410
  misc_feature 1..80: note = Artificially Synthesized Probe
  source 1..80: mol_type = other DNA

SEQ ID NO: 47489 - DNA, 80 bp, synthetic construct
  misc_feature 1..80: note = Artificially Synthesized Probe
  source 1..80: mol_type = other DNA
ataaataaataaataaataaataaataaataaataaataaagtgctgggattacaggcatgagccaccgcgcccggctga

SEQ ID NO: 47490 - DNA, 80 bp, synthetic construct
  misc_feature 1..80: note = Artificially Synthesized Probe
  source 1..80: mol_type = other DNA
gtctcccagtccccagtctctcttctgctgtgtctggccacttaaaagtttattccattcatttgagggattttttttcc

SEQ ID NO: 47491 - DNA, 80 bp, synthetic construct
  misc_feature 1..80: note = Artificially Synthesized Probe
  source 1..80: mol_type = other DNA
catggagtgcaacatgtaactttatattagaaaatggaatgtcacatctttaccatgggacagagacacaggaagatgtc

SEQ ID NO: 47492 - DNA, 80 bp, synthetic construct; identical to SEQ ID NO: 23411
  misc_feature 1..80: note = Artificially Synthesized Probe
  source 1..80: mol_type = other DNA

SEQ ID NO: 47493 - DNA, 80 bp, synthetic construct
  misc_feature 1..80: note = Artificially Synthesized Probe
  source 1..80: mol_type = other DNA
gttaaaggtattgtcagagtatcctgtttgggaagaattcccatttcaggcaccctcgatgaagagccaggccaggaaca

SEQ ID NO: 47494 - DNA, 80 bp, synthetic construct
  misc_feature 1..80: note = Artificially Synthesized Probe
  source 1..80: mol_type = other DNA
gaatcttcttgccatccgcctggccttcgtcattgtgtttgaggtagccgaggcacctgctggttctcccatccatggca

SEQ ID NO: 47495 - DNA, 80 bp, synthetic construct
  misc_feature 1..80: note = Artificially Synthesized Probe
  source 1..80: mol_type = other DNA
tctccacaggagccccagggccacgaaagctggggtggcctctgccccttctggggttccttttcctgcacagctgcttt

SEQ ID NO: 47496 - DNA, 80 bp, synthetic construct; identical to SEQ ID NO: 23412
  misc_feature 1..80: note = Artificially Synthesized Probe
  source 1..80: mol_type = other DNA

SEQ ID NO: 47497 - DNA, 80 bp, synthetic construct
  misc_feature 1..80: note = Artificially Synthesized Probe
  source 1..80: mol_type = other DNA
cataagaagtaccacagcctgggccaggcacagtggctcatgcctgtaatcccagcactttgggaggccaaggcgggtgg

SEQ ID NO: 47498 - DNA, 80 bp, synthetic construct
  misc_feature 1..80: note = Artificially Synthesized Probe
  source 1..80: mol_type = other DNA
aggcaagtctgggagcagccaggcccctgccccgtgcactccctgaggtcacagggccctgcccagccgcccactgtgcc

SEQ ID NO: 47499 - DNA, 80 bp, synthetic construct
  misc_feature 1..80: note = Artificially Synthesized Probe
  source 1..80: mol_type = other DNA
ctcctgagccctgcgagcagcgtccttttcctcttccctcaggcagcggctgtgtgaaccgctggctgctgttgtgcctc

SEQ ID NO: 47500 - DNA, 80 bp, synthetic construct
  misc_feature 1..80: note = Artificially Synthesized Probe
  source 1..80: mol_type = other DNA
tccctcggtggcctccccaggcccctggacacgacagttctcctcaggcaggtgggctttgtggtcctcgccgcccctgg

SEQ ID NO: 47501 - DNA, 80 bp, synthetic construct; identical to SEQ ID NO: 23413
  misc_feature 1..80: note = Artificially Synthesized Probe
  source 1..80: mol_type = other DNA

SEQ ID NO: 47502 - DNA, 80 bp, synthetic construct
  misc_feature 1..80: note = Artificially Synthesized Probe
  source 1..80: mol_type = other DNA
ctgttccttggggcctagtacccagcaagcacccaaatgggggaggttttgggatgagaggaggaaacgtgtatacctgt

SEQ ID NO: 47503 - DNA, 80 bp, synthetic construct
  misc_feature 1..80: note = Artificially Synthesized Probe
  source 1..80: mol_type = other DNA
ttgctaaaaaatggatctgtgctcatctgtattgatgtccttggagttctacaagtggaacttaagtgtcaaaaagaata

SEQ ID NO: 47504 - DNA, 80 bp, synthetic construct
  misc_feature 1..80: note = Artificially Synthesized Probe
  source 1..80: mol_type = other DNA
gggcatctgtaatcccagctatttgggaggctgaggcaggagaatcgtttgaacccgggaggcggaggttgtagtgagct

SEQ ID NO: 47505 - DNA, 80 bp, synthetic construct; identical to SEQ ID NO: 23414
  misc_feature 1..80: note = Artificially Synthesized Probe
  source 1..80: mol_type = other DNA

SEQ ID NO: 47506 - DNA, 80 bp, synthetic construct
  misc_feature 1..80: note = Artificially Synthesized Probe
  source 1..80: mol_type = other DNA
agccattccacgtgtgctttcgctcagcacaatgcttactacaaacccacgtgtacttccttccagctggttgcttttta

SEQ ID NO: 47507 - DNA, 80 bp, synthetic construct
  misc_feature 1..80: note = Artificially Synthesized Probe
  source 1..80: mol_type = other DNA
gaggtcgcgccattgcactccagcctgggcagcaagagcaaaactccatctccaagaaaaaaaaaagtaccacggcctgc

SEQ ID NO: 47508 - DNA, 80 bp, synthetic construct
  misc_feature 1..80: note = Artificially Synthesized Probe
  source 1..80: mol_type = other DNA
acacgagttgtcatggattagggcacaccctaatagccatcacgtgtctttaatgacctaatctccaaatacagtttcat

SEQ ID NO: 47509 - DNA, 80 bp, synthetic construct; identical to SEQ ID NO: 23380
  misc_feature 1..80: note = Artificially Synthesized Probe
  source 1..80: mol_type = other DNA

SEQ ID NO: 47510 - DNA, 80 bp, synthetic construct
  misc_feature 1..80: note = Artificially Synthesized Probe
  source 1..80: mol_type = other DNA
aatgtccttagtaccaatgacctgtacacttaaatgtggttaagatggttttttgtttggttggttggttttttgttttt

SEQ ID NO: 47511 - DNA, 80 bp, synthetic construct
  misc_feature 1..80: note = Artificially Synthesized Probe
  source 1..80: mol_type = other DNA
taatttttgtgtttgtagtagagacggggtttcgccatgttggttgggcaggtcttgaactcctgacctcaggtgatccg

SEQ ID NO: 47512 - DNA, 80 bp, synthetic construct
  misc_feature 1..80: note = Artificially Synthesized Probe
  source 1..80: mol_type = other DNA
cccaggggctcccccatggagcaggtcccttcgttggggtggggggcatccccattctttctgcagagagctctgaggag

SEQ ID NO: 47513 - DNA, 80 bp, synthetic construct
  misc_feature 1..80: note = Artificially Synthesized Probe
  source 1..80: mol_type = other DNA
gccacaggcctacccctccctcccagccccaccaggccctcagaccacatctcctgctaccagaagctccccacccttca

SEQ ID NO: 47514 - DNA, 80 bp, synthetic construct; identical to SEQ ID NO: 23381
  misc_feature 1..80: note = Artificially Synthesized Probe
  source 1..80: mol_type = other DNA

SEQ ID NO: 47515 - DNA, 80 bp, synthetic construct
  misc_feature 1..80: note = Artificially Synthesized Probe
  source 1..80: mol_type = other DNA
gcaacctccacctcccaggttcaagtgatctctggcctcagcctcccaagtagctgggattacaggcatgtgccaccacg

SEQ ID NO: 47516 - DNA, 80 bp, synthetic construct
  misc_feature 1..80: note = Artificially Synthesized Probe
  source 1..80: mol_type = other DNA
ttttttgctgctttcgtgagatcttgcacatcttttagtagatgtattccaaatagcattacttggaaaatttcactgcc

SEQ ID NO: 47517 - DNA, 80 bp, synthetic construct
  misc_feature 1..80: note = Artificially Synthesized Probe
  source 1..80: mol_type = other DNA
aagctccgtctcctgggttcacaccattctcccgcctcagcctcctgagtagctgggactacaggtgccggccaccacgc

SEQ ID NO: 47518 - DNA, 80 bp, synthetic construct
  misc_feature 1..80: note = Artificially Synthesized Probe
  source 1..80: mol_type = other DNA
aggcgtgagccaccaaacccagccacaataagatattgtaaaagagcgagacagaatgcccacattcacataacttttac

SEQ ID NO: 47519 - DNA, 80 bp, synthetic construct; identical to SEQ ID NO: 23382
  misc_feature 1..80: note = Artificially Synthesized Probe
  source 1..80: mol_type = other DNA

SEQ ID NO: 47520 - DNA, 80 bp, synthetic construct
  misc_feature 1..80: note = Artificially Synthesized Probe
  source 1..80: mol_type = other DNA
tgaatagcttggtgctccaagggcctgggggactttctcacagacccggtggctccgtcttcttcccaagctccagcccc

SEQ ID NO: 47521 - DNA, 80 bp, synthetic construct
  misc_feature 1..80: note = Artificially Synthesized Probe
  source 1..80: mol_type = other DNA
catccattgctgtctcatgccagaaaatcaggggcttcggaaactttcttcagctttgatgattctctatggcaggacgg

SEQ ID NO: 47522 - DNA, 80 bp, synthetic construct
  misc_feature 1..80: note = Artificially Synthesized Probe
  source 1..80: mol_type = other DNA
gaacctggaagtgctcctggagtcctcctagccctggctgggaccagagaggggatcgggaaggaaccggccctgagtgt

SEQ ID NO: 47523 - DNA, 80 bp, synthetic construct; identical to SEQ ID NO: 23376
  misc_feature 1..80: note = Artificially Synthesized Probe
  source 1..80: mol_type = other DNA

SEQ ID NO: 47524 - DNA, 80 bp, synthetic construct; identical to SEQ ID NO: 23383
  misc_feature 1..80: note = Artificially Synthesized Probe
  source 1..80: mol_type = other DNA

SEQ ID NO: 47525 - DNA, 80 bp, synthetic construct
  misc_feature 1..80: note = Artificially Synthesized Probe
  source 1..80: mol_type = other DNA
tcaggccccaaagtcctgctggaccccccagccaccgtgagctcctccgtgtggctagggagctgctgtccagaggcgga

SEQ ID NO: 47526 - DNA, 80 bp, synthetic construct
  misc_feature 1..80: note = Artificially Synthesized Probe
  source 1..80: mol_type = other DNA
tttgggtaggcgtgtcatttgtgtttatgactctcagtgtgcttatagaattaacagcttaaaaagtcctttcacatgtt

SEQ ID NO: 47527 - DNA, 80 bp, synthetic construct
  misc_feature 1..80: note = Artificially Synthesized Probe
  source 1..80: mol_type = other DNA
gggcttggggcagctggggattggggtgcagagcccagctctcaccctgctgtgtcccccactcattgccaggtctgtcc

SEQ ID NO: 47528 - DNA, 80 bp, synthetic construct; identical to SEQ ID NO: 23384
  misc_feature 1..80: note = Artificially Synthesized Probe
  source 1..80: mol_type = other DNA

SEQ ID NO: 47529 - DNA, 80 bp, synthetic construct
  misc_feature 1..80: note = Artificially Synthesized Probe
  source 1..80: mol_type = other DNA
tttgcttatggatgccgtgagaatgggcatttgacttgttcccagtctgggatgattatgaaaatcagctactgtcaatt

SEQ ID NO: 47530 - DNA, 80 bp, synthetic construct
  misc_feature 1..80: note = Artificially Synthesized Probe
  source 1..80: mol_type = other DNA
cctgaggccccttgctctgtatcttctcaacacttgatactgcagacttttaacgttttaccaaccagttgggatatagt

SEQ ID NO: 47531 - DNA, 80 bp, synthetic construct
  misc_feature 1..80: note = Artificially Synthesized Probe
  source 1..80: mol_type = other DNA
agattacaggcacccaccaccacgcccagccaatttttgtatttttagtagagacggggtttcaccgtattgcccaggct

SEQ ID NO: 47532 - DNA, 80 bp, synthetic construct; identical to SEQ ID NO: 23385
  misc_feature 1..80: note = Artificially Synthesized Probe
  source 1..80: mol_type = other DNA

SEQ ID NO: 47533 - DNA, 80 bp, synthetic construct
  misc_feature 1..80: note = Artificially Synthesized Probe
  source 1..80: mol_type = other DNA
gatcttggctcactacaacttctgtctcctgggttcaagtgattctcctgcctcagcctcccgagtagctgggattacag

SEQ ID NO: 47534 - DNA, 80 bp, synthetic construct
  misc_feature 1..80: note = Artificially Synthesized Probe
  source 1..80: mol_type = other DNA
cctggccccgttttgccagcccaagactaggagccacggcacctgtcctcccacagagagagacccccggggcgaaggtg

SEQ ID NO: 47535 - DNA, 80 bp, synthetic construct
  misc_feature 1..80: note = Artificially Synthesized Probe
  source 1..80: mol_type = other DNA
cctccctcttccttattaaggcttaggagcttgttgtctgttctggacacttagccattgctggtggcgtgtgtgacaga

SEQ ID NO: 47536 - DNA, 80 bp, synthetic construct
  misc_feature 1..80: note = Artificially Synthesized Probe
  source 1..80: mol_type = other DNA
cagaacacacagggagcagcccctacttgccacatcaccccaccccagggtgcccctccctgccccgctctccctggctt

SEQ ID NO: 47537 - DNA, 80 bp, synthetic construct; identical to SEQ ID NO: 23386
  misc_feature 1..80: note = Artificially Synthesized Probe
  source 1..80: mol_type = other DNA

SEQ ID NO: 47538 - DNA, 80 bp, synthetic construct
  misc_feature 1..80: note = Artificially Synthesized Probe
  source 1..80: mol_type = other DNA
gaggtaatacatatttattgttggtttaagctacagagttttggggtaccttgtgaacatttctagattctaaatggcat

SEQ ID NO: 47539 - DNA, 80 bp, synthetic construct
  misc_feature 1..80: note = Artificially Synthesized Probe
  source 1..80: mol_type = other DNA
ttcctacacacctatcagaatggctatatgtgtgtgtataggtgtgcgtgcacagacacgcatgcaaaacaccaaatgct

SEQ ID NO: 47540 - DNA, 80 bp, synthetic construct
  misc_feature 1..80: note = Artificially Synthesized Probe
  source 1..80: mol_type = other DNA
atcccagcactttgggaggccgaggtgggcggatcatgaggtcaggagatcgagaccatcctggctaacacggtgaaaac

SEQ ID NO: 47541 - DNA, 80 bp, synthetic construct; identical to SEQ ID NO: 23426
  misc_feature 1..80: note = Artificially Synthesized Probe
  source 1..80: mol_type = other DNA

SEQ ID NO: 47542 - DNA, 80 bp, synthetic construct
  misc_feature 1..80: note = Artificially Synthesized Probe
  source 1..80: mol_type = other DNA
cacctgtaatccctgctattctggaggctgagacaggagaattgcttgaacccgggaggcagaggttgcagtgagcagag

SEQ ID NO: 47543 - DNA, 80 bp, synthetic construct
  misc_feature 1..80: note = Artificially Synthesized Probe
  source 1..80: mol_type = other DNA
aaagaaagagagggtatttgggccagggacagtggctcacacctgtaatcccagcactttgggaggcctaggtgggtgga

SEQ ID NO: 47544 - DNA, 80 bp, synthetic construct; identical to SEQ ID NO: 23416
  misc_feature 1..80: note = Artificially Synthesized Probe
  source 1..80: mol_type = other DNA

SEQ ID NO: 47545 - DNA, 80 bp, synthetic construct
  misc_feature 1..80: note = Artificially Synthesized Probe
  source 1..80: mol_type = other DNA
ggagcttgcagtgagccaagaatgtgccactgcactccacccttggtgacagaatgagattccatctaaaaaaaaaaaaa

SEQ ID NO: 47546 - DNA, 80 bp, synthetic construct; identical to SEQ ID NO: 23427
  misc_feature 1..80: note = Artificially Synthesized Probe
  source 1..80: mol_type = other DNA

SEQ ID NO: 47547 - DNA, 80 bp, synthetic construct
  misc_feature 1..80: note = Artificially Synthesized Probe
  source 1..80: mol_type = other DNA
actcgggaggctgcagcaggagaatggcgtgaacccgggaggcggagcttgcagtgagccaaatttgcgccactgcactc

SEQ ID NO: 47548 - DNA, 80 bp, synthetic construct
  misc_feature 1..80: note = Artificially Synthesized Probe
  source 1..80: mol_type = other DNA
gtagcagagtcaatacaagcccaaacctcagcatcacacaatatatacccttgtaacaaatctgcacgtgtaccccatga

SEQ ID NO: 47549 - DNA, 80 bp, synthetic construct
  misc_feature 1..80: note = Artificially Synthesized Probe
  source 1..80: mol_type = other DNA
tttaaaccacaactcgagaggaaggagaaaagataactgaatgagtaataagtgtaaaaagatacttgtaaagaacatat

SEQ ID NO: 47550 - DNA, 80 bp, synthetic construct
  misc_feature 1..80: note = Artificially Synthesized Probe
  source 1..80: mol_type = other DNA
gagaaaaaagcaacaattgctgctcttaggtatagaacctaatagtaggtccagcactagaattgagagatgggaagtaa

SEQ ID NO: 47551 - DNA, 80 bp, synthetic construct; identical to SEQ ID NO: 23428
  misc_feature 1..80: note = Artificially Synthesized Probe
  source 1..80: mol_type = other DNA

SEQ ID NO: 47552 - DNA, 80 bp, synthetic construct
  misc_feature 1..80: note = Artificially Synthesized Probe
  source 1..80: mol_type = other DNA
tgcactccagcctgggcgacagagcaagacgttgtctttaaaaaataaaaaaaatttaaaaatttaaaaaaagacggccg

SEQ ID NO: 47553 - DNA, 80 bp, synthetic construct
  misc_feature 1..80: note = Artificially Synthesized Probe
  source 1..80: mol_type = other DNA
tgcctgtaatcccagctattcgggaggctgaggcaggagaatcacttgaacctgggaggtggaggttacagtaagccaag

SEQ ID NO: 47554 - DNA, 80 bp, synthetic construct
  misc_feature 1..80: note = Artificially Synthesized Probe
  source 1..80: mol_type = other DNA
aagagggacattaaagctgagacctgaatgtaaatttagagagcaagacatgtggacgtcggggaaggggagagctttcc

SEQ ID NO: 47555 - DNA, 80 bp, synthetic construct
  misc_feature 1..80: note = Artificially Synthesized Probe
  source 1..80: mol_type = other DNA
tgttttagaaacaggatcttgttataccacgcaggctggagcatattggcgtgatcatagctcactgcagcttgcaacgc

SEQ ID NO: 47556 - DNA, 80 bp, synthetic construct; identical to SEQ ID NO: 23429
  misc_feature 1..80: note = Artificially Synthesized Probe
  source 1..80: mol_type = other DNA

SEQ ID NO: 47557 - DNA, 80 bp, synthetic construct
  misc_feature 1..80: note = Artificially Synthesized Probe
  source 1..80: mol_type = other DNA
tttttgaacagagaagagtcacaggctctggaagacacttcctttaaaacagagcatgctttaccctaggctgtgtgtgt

SEQ ID NO: 47558 - DNA, 80 bp, synthetic construct
  misc_feature 1..80: note = Artificially Synthesized Probe
  source 1..80: mol_type = other DNA
ttttttgcagagagtggttctagctggggagaagaactaaaatgagaaattagccagatatctaggaaataggacgaagt

SEQ ID NO: 47559 - DNA, 80 bp, synthetic construct
  misc_feature 1..80: note = Artificially Synthesized Probe
  source 1..80: mol_type = other DNA
tgaaccagtaatctactccgagggagccttacataaacagaggccacatcataggaaaaaggcatttgatgatgggaaga

SEQ ID NO: 47560 - DNA, 80 bp, synthetic construct; identical to SEQ ID NO: 23430
  misc_feature 1..80: note = Artificially Synthesized Probe
  source 1..80: mol_type = other DNA

SEQ ID NO: 47561 - DNA, 80 bp, synthetic construct
  misc_feature 1..80: note = Artificially Synthesized Probe
  source 1..80: mol_type = other DNA
acaggcatgtgctaccgtgcccagctaattttgtatttttaatagagacgttgtttctccatgttggtcaggctggtctc

SEQ ID NO: 47562 - DNA, 80 bp, synthetic construct
  misc_feature 1..80: note = Artificially Synthesized Probe
  source 1..80: mol_type = other DNA
tacttcaactccaaactgatatctatattaccttctgccccatcacactcacactattgcaatagtcttctaactggtct

SEQ ID NO: 47563 - DNA, 80 bp, synthetic construct; identical to SEQ ID NO: 23431
  misc_feature 1..80: note = Artificially Synthesized Probe
  source 1..80: mol_type = other DNA

SEQ ID NO: 47564 - DNA, 80 bp, synthetic construct
  misc_feature 1..80: note = Artificially Synthesized Probe
  source 1..80: mol_type = other DNA
tggcttacacctgtaatcccagtactttgggaggccgaggctagtggatcacttgagcccaggagttcaagaccagcctg

SEQ ID NO: 47565 - DNA, 80 bp, synthetic construct
  misc_feature 1..80: note = Artificially Synthesized Probe
  source 1..80: mol_type = other DNA
ccagcctaggcaacagggcgagtcttaaaaaaaaaaaaaaaaaaatttggttaggcatggtggctcatgcctgtattcct

SEQ ID NO: 47566 - DNA, 80 bp, synthetic construct
  misc_feature 1..80: note = Artificially Synthesized Probe
  source 1..80: mol_type = other DNA
aaggatgcttctttttgcatcaacatttgtgtccctaaagtgacttactagaattatgcagtgcagctccagtgcgtaca

SEQ ID NO: 47567 - DNA, 80 bp, synthetic construct
  misc_feature 1..80: note = Artificially Synthesized Probe
  source 1..80: mol_type = other DNA
agctgaaattacttccttcagcctgaagtgttcttcctctcccatgcatttttctaacactgactgtgcacaaatttatc

SEQ ID NO: 47568 - DNA, 80 bp, synthetic construct
  misc_feature 1..80: note = Artificially Synthesized Probe
  source 1..80: mol_type = other DNA
tggagtgcagtggcgtgatctcaggtcactgcaacctccgcctcctgtgttcaagtgatcctcctgcctcagcctcccga

SEQ ID NO: 47569 - DNA, 80 bp, synthetic construct; identical to SEQ ID NO: 23432
  misc_feature 1..80: note = Artificially Synthesized Probe
  source 1..80: mol_type = other DNA

SEQ ID NO: 47570 - DNA, 80 bp, synthetic construct
  misc_feature 1..80: note = Artificially Synthesized Probe
  source 1..80: mol_type = other DNA
accattcttgcattgttcaagaatacttgccaagcccccggatccattttacctttctcagaagtcatggtgctctgtct

SEQ ID NO: 47571 - DNA, 80 bp, synthetic construct
  misc_feature 1..80: note = Artificially Synthesized Probe
  source 1..80: mol_type = other DNA
tcccgtatagaaagcctgtagtctctagtctagttgctgctggacattagaccccctaaaaagaataaagcagttcattt

SEQ ID NO: 47572 - DNA, 80 bp, synthetic construct
  misc_feature 1..80: note = Artificially Synthesized Probe
  source 1..80: mol_type = other DNA
tctactaaaaatacaaaaaattagccgggcgtggtggtgggcgcctgtagtcccagctactggggaggctgaggcaggag

SEQ ID NO: 47573 - DNA, 80 bp, synthetic construct; identical to SEQ ID NO: 23417
  misc_feature 1..80: note = Artificially Synthesized Probe
  source 1..80: mol_type = other DNA

SEQ ID NO: 47574 - DNA, 80 bp, synthetic construct
  misc_feature 1..80: note = Artificially Synthesized Probe
  source 1..80: mol_type = other DNA
agtctgaaaaatgtaagatgattttgccatcttcttgaaatctttaaacagggtggaagactctggaataaaaaaggatt

SEQ ID NO: 47575 - DNA, 80 bp, synthetic construct
  misc_feature 1..80: note = Artificially Synthesized Probe
  source 1..80: mol_type = other DNA
ccgcctcccgggttcacgccattctcctgcctcagcctcccgagtagctgggactacaggcgcccgccaccacgcctggc

SEQ ID NO: 47576 - DNA, 80 bp, synthetic construct
  misc_feature 1..80: note = Artificially Synthesized Probe
  source 1..80: mol_type = other DNA
ttttttagagatggggtctcactatgttgcccaggctgatcttgaacccctggcttcaagtgatcctcctgccttggcct

SEQ ID NO: 47577 - DNA, 80 bp, synthetic construct
  misc_feature 1..80: note = Artificially Synthesized Probe
  source 1..80: mol_type = other DNA
ttctggcctaaaaacagctactatcaccacagtctgttgtaaacaatgaagtttctttgtttactgtttttacctgatgc

SEQ ID NO: 47578 - DNA, 80 bp, synthetic construct; identical to SEQ ID NO: 23418
  misc_feature 1..80: note = Artificially Synthesized Probe
  source 1..80: mol_type = other DNA

SEQ ID NO: 47579 - DNA, 80 bp, synthetic construct
  misc_feature 1..80: note = Artificially Synthesized Probe
  source 1..80: mol_type = other DNA
aaaaagcagcccacactgtcatgccacatttagagagatcttagaaatcttttcctgctcccctcttctttttttatttt

SEQ ID NO: 47580 - DNA, 80 bp, synthetic construct
  misc_feature 1..80: note = Artificially Synthesized Probe
  source 1..80: mol_type = other DNA
atgtccagctaatttttttgtatttttagtagagacggggtttcaccatgttggccaggctggtctcaaactcctgacct

SEQ ID NO: 47581 - DNA, 80 bp, synthetic construct; identical to SEQ ID NO: 23419
  misc_feature 1..80: note = Artificially Synthesized Probe
  source 1..80: mol_type = other DNA

SEQ ID NO: 47582 - DNA, 80 bp, synthetic construct
  misc_feature 1..80: note = Artificially Synthesized Probe
  source 1..80: mol_type = other DNA
gtgtgccccaccatgcctagctatattctaacttttctattttacacctagaggtgctatgttccaatccttatcttttc

SEQ ID NO: 47583 - DNA, 80 bp, synthetic construct
  misc_feature 1..80: note = Artificially Synthesized Probe
  source 1..80: mol_type = other DNA
attctacttgctctcagtggtgtctttagatttaacactctctatgtctgaaagctgtaactcaagggaaactcagaatt

SEQ ID NO: 47584 - DNA, 80 bp, synthetic construct
  misc_feature 1..80: note = Artificially Synthesized Probe
  source 1..80: mol_type = other DNA
ctgtcctatgtctgaaaaatgggcagacattataaaacgaagatgaagttaaagtgacaaatgagtttcccaggtatttc

SEQ ID NO: 47585 - DNA, 80 bp, synthetic construct
  misc_feature 1..80: note = Artificially Synthesized Probe
  source 1..80: mol_type = other DNA
gtgcaatcacagctcactgcagcctcaacctcctaggctcaaacaattctcccacctcagcctcccaagtagctgggact

SEQ ID NO: 47586 - DNA, 80 bp, synthetic construct
  misc_feature 1..80: note = Artificially Synthesized Probe
  source 1..80: mol_type = other DNA
aaaaggcaaaaatgaaagaaagaatggaaaatggcaaaagagaaaaggaacaataaagaaagctatatccacagttcctt

SEQ ID NO: 47587 - DNA, 80 bp, synthetic construct; identical to SEQ ID NO: 23420
  misc_feature 1..80: note = Artificially Synthesized Probe
  source 1..80: mol_type = other DNA

SEQ ID NO: 47588 - DNA, 80 bp, synthetic construct
  misc_feature 1..80: note = Artificially Synthesized Probe
  source 1..80: mol_type = other DNA
tttaaggactctgccaaaatctcttttcccagatgcccaatcccaaacaaggtagtctgccttaaggcttcaacaaaaat

SEQ ID NO: 47589 - DNA, 80 bp, synthetic construct
  misc_feature 1..80: note = Artificially Synthesized Probe
  source 1..80: mol_type = other DNA
ccaaaaatacaaaaattagccaggtgtgattgcgggcacctataatcccagctactcgggtggctgaggcaggagaatca

SEQ ID NO: 47590 - DNA, 80 bp, synthetic construct; identical to SEQ ID NO: 23421
  misc_feature 1..80: note = Artificially Synthesized Probe
  source 1..80: mol_type = other DNA

SEQ ID NO: 47591 - DNA, 80 bp, synthetic construct
  misc_feature 1..80: note = Artificially Synthesized Probe
  source 1..80: mol_type = other DNA
gaaagaaagaaatggaaatacaggaaatgttatgacacgatgggtagagaagcctaatgtagacatgggcatggacagct

SEQ ID NO: 47592 - DNA, 80 bp, synthetic construct
  misc_feature 1..80: note = Artificially Synthesized Probe
  source 1..80: mol_type = other DNA
gatctcttgaagccagaaatttgagaccagcctgggcaacacagtgagaccccattcctacaaaatgtaaaattagcagg

SEQ ID NO: 47593 - DNA, 80 bp, synthetic construct
  misc_feature 1..80: note = Artificially Synthesized Probe
  source 1..80: mol_type = other DNA
ttatttcatttgttattttttttgtggaggcgtgttctctctgtgttgcccaggttggtctcaaactcctgagctcaaga

SEQ ID NO: 47594 - DNA, 80 bp, synthetic construct
  misc_feature 1..80: note = Artificially Synthesized Probe
  source 1..80: mol_type = other DNA
tgcatgaccctggtcagattactccatggttatgaaatcatgcctcacctggcctacaaactaatcagtgtcactccgtg

SEQ ID NO: 47595 - DNA, 80 bp, synthetic construct; identical to SEQ ID NO: 23415
  misc_feature 1..80: note = Artificially Synthesized Probe
  source 1..80: mol_type = other DNA

SEQ ID NO: 47596 - DNA, 80 bp, synthetic construct; identical to SEQ ID NO: 23422
  misc_feature 1..80: note = Artificially Synthesized Probe
  source 1..80: mol_type = other DNA

SEQ ID NO: 47597 - DNA, 80 bp, synthetic construct
  misc_feature 1..80: note = Artificially Synthesized Probe
  source 1..80: mol_type = other DNA
ttgtcaaatgtagaccctaagattgcctattccacaaggttgtcggaagactcacgtaacacaatgaatggaaaacattt

SEQ ID NO: 47598 - DNA, 80 bp, synthetic construct
  misc_feature 1..80: note = Artificially Synthesized Probe
  source 1..80: mol_type = other DNA
cctgtgtaagaatacttctctttcttatctctactattcggtttgccatgcatatgcttatggatttttagtttgggttg

SEQ ID NO: 47599 - DNA, 80 bp, synthetic construct
  misc_feature 1..80: note = Artificially Synthesized Probe
  source 1..80: mol_type = other DNA
gaatcatttgaaccaactgcatttcgtactaagttactacccttgaattgagcctcatgtgtatgtttcctcgccatgac

SEQ ID NO: 47600 - DNA, 80 bp, synthetic construct; identical to SEQ ID NO: 23423
  misc_feature 1..80: note = Artificially Synthesized Probe
  source 1..80: mol_type = other DNA

SEQ ID NO: 47601 - DNA, 80 bp, synthetic construct
  misc_feature 1..80: note = Artificially Synthesized Probe
  source 1..80: mol_type = other DNA
agatggtcgcttaagcctaagatatcaaggccagcctgggtaaaatggggaaatttccgtctctacaaaaagatacagaa

SEQ ID NO: 47602 - DNA, 80 bp, synthetic construct
  misc_feature 1..80: note = Artificially Synthesized Probe
  source 1..80: mol_type = other DNA
taataataattaaactaaaattataaataaataacaaaaaaaatacccaaaactatttcctggaaaagaattgaagtcta

SEQ ID NO: 47603 - DNA, 80 bp, synthetic construct
  misc_feature 1..80: note = Artificially Synthesized Probe
  source 1..80: mol_type = other DNA
cgcctgtagttctagctacccagaaggctgaggtcagaggattgcttgaggctaggaattcggagtttgaggctgtgggt

SEQ ID NO: 47604 - DNA, 80 bp, synthetic construct
  misc_feature 1..80: note = Artificially Synthesized Probe
  source 1..80: mol_type = other DNA
gcaatcttggctcactgtaaactttgcctccagggttcaagtgattctcgtgcctgagcctcccaagtagctgggattac

SEQ ID NO: 47605 - DNA, 80 bp, synthetic construct; identical to SEQ ID NO: 23424
  misc_feature 1..80: note = Artificially Synthesized Probe
  source 1..80: mol_type = other DNA

SEQ ID NO: 47606 - DNA, 80 bp, synthetic construct
  misc_feature 1..80: note = Artificially Synthesized Probe
  source 1..80: mol_type = other DNA
gaaaaaggaagtctgtgagacctcactgtaagaggctcatgacaataaaattgagtctgagaactcttctcaagctaata

SEQ ID NO: 47607 - DNA, 80 bp, synthetic construct
  misc_feature 1..80: note = Artificially Synthesized Probe
  source 1..80: mol_type = other DNA
atacaaaaattagccgggtgtggtggcacatgcctgtaatcccagctacttgggaggccgaggcacaagaatcacttgaa

SEQ ID NO: 47608 - DNA, 80 bp, synthetic construct
  misc_feature 1..80: note = Artificially Synthesized Probe
  source 1..80: mol_type = other DNA
tggctcatgcctgtaatcccagcactttgggaggctgaggcaggcagatcacctgaggtcaggtgttcgagaccagcctg

SEQ ID NO: 47609 - DNA, 80 bp, synthetic construct; identical to SEQ ID NO: 23425
  misc_feature 1..80: note = Artificially Synthesized Probe
  source 1..80: mol_type = other DNA

SEQ ID NO: 47610 - DNA, 80 bp, synthetic construct
  misc_feature 1..80: note = Artificially Synthesized Probe
  source 1..80: mol_type = other DNA
tttgggagagctgaccttttgtgacttttgggagagctgccaaaagtgaaacttagtgcctcagacaagcaggggcaagt

SEQ ID NO: 47611 - DNA, 80 bp, synthetic construct
  misc_feature 1..80: note = Artificially Synthesized Probe
  source 1..80: mol_type = other DNA
aggatcatcactaaaggccaggagttccaaaccagcctgggcaacacagggagacccccttatctactaaaactaaaaaa

SEQ ID NO: 47612 - DNA, 80 bp, synthetic construct
  misc_feature 1..80: note = Artificially Synthesized Probe
  source 1..80: mol_type = other DNA
gaattttattcacttttcttatttttaatgggttagaggatgggtggcagaaatactgggaggatgggagatccatccct

SEQ ID NO: 47613 - DNA, 80 bp, synthetic construct; identical to SEQ ID NO: 23434
  misc_feature 1..80: note = Artificially Synthesized Probe
  source 1..80: mol_type = other DNA

SEQ ID NO: 47614 - DNA, 80 bp, synthetic construct
  misc_feature 1..80: note = Artificially Synthesized Probe
  source 1..80: mol_type = other DNA
acaaaaattagccgggcatgaaggagggcgcttgtaattccagctacttgggaggctgaggcaggagaattgcttgaacc

SEQ ID NO: 47615 - DNA, 80 bp, synthetic construct
  misc_feature 1..80: note = Artificially Synthesized Probe
  source 1..80: mol_type = other DNA
gcaaaatctatgtaatttcttcagccaaaaatgtgtcacaacactcccttggtgacaacagcttttctgttcactcaact

SEQ ID NO: 47616 - DNA, 80 bp, synthetic construct
  misc_feature 1..80: note = Artificially Synthesized Probe
  source 1..80: mol_type = other DNA
ctgcagctggaaagagggatctgggactcaggccagaggcgtgtgagcagctcagagcagctctgagcccaggggagcca

SEQ ID NO: 47617 - DNA, 80 bp, synthetic construct
  misc_feature 1..80: note = Artificially Synthesized Probe
  source 1..80: mol_type = other DNA
cctgccatccccactcccacccaggctctttgccctgctgtgtggtcaccccactgctgcttctgaacgggccgcctccc

SEQ ID NO: 47618 - DNA, 80 bp, synthetic construct; identical to SEQ ID NO: 23435
  misc_feature 1..80: note = Artificially Synthesized Probe
  source 1..80: mol_type = other DNA

SEQ ID NO: 47619 - DNA, 80 bp, synthetic construct
  misc_feature 1..80: note = Artificially Synthesized Probe
  source 1..80: mol_type = other DNA
cccgtctgtactaaaaatacaaaaattagccaggcgtggtggcaggcatctgtaatcccagctacttgggaggctgaggc

SEQ ID NO: 47620 - DNA, 80 bp, synthetic construct
  misc_feature 1..80: note = Artificially Synthesized Probe
  source 1..80: mol_type = other DNA
ttcatctttggttttcccctttctgttgcacagaaacacgatggctctgttaacagccgaaacattccgcttacagttta

SEQ ID NO: 47621 - DNA, 80 bp, synthetic construct
  misc_feature 1..80: note = Artificially Synthesized Probe
  source 1..80: mol_type = other DNA
aaccccatctgatgtgtgcagaaaatacatgaaatgcctgcctataaatttctcaatttttgatgtaacaccctctgtgt

SEQ ID NO: 47622 - DNA, 80 bp, synthetic construct
  misc_feature 1..80: note = Artificially Synthesized Probe
  source 1..80: mol_type = other DNA
tctcagctcagtcactacttcgggaaagccgaggtgccgtgccacggtccgagtgcaactccatcacacccctgtcctct

SEQ ID NO: 47623 - DNA, 80 bp, synthetic construct; identical to SEQ ID NO: 23436
  misc_feature 1..80: note = Artificially Synthesized Probe
  source 1..80: mol_type = other DNA

SEQ ID NO: 47624 - DNA, 80 bp, synthetic construct
  misc_feature 1..80: note = Artificially Synthesized Probe
  source 1..80: mol_type = other DNA
ggcctctctcttctcccctcccttctctctgtttgggaccctccccagaaaaagtgccatgcagaaatttgctttattaa

SEQ ID NO: 47625 - DNA, 80 bp, synthetic construct
  misc_feature 1..80: note = Artificially Synthesized Probe
  source 1..80: mol_type = other DNA
tggtgcaagccccagcagaaggggctgcggcttctgtgtggatcccaggtcccggtggaggtcatgggcttcccaggtag

SEQ ID NO: 47626 - DNA, 80 bp, synthetic construct
  misc_feature 1..80: note = Artificially Synthesized Probe
  source 1..80: mol_type = other DNA
ggcgggggcgggttggaggaggttggcagggggtgggggggtggcggggagcggggggtctgtgggaggccaggaaggaa

SEQ ID NO: 47627 - DNA, 80 bp, synthetic construct; identical to SEQ ID NO: 23437
  misc_feature 1..80: note = Artificially Synthesized Probe
  source 1..80: mol_type = other DNA

SEQ ID NO: 47628 - DNA, 80 bp, synthetic construct
  misc_feature 1..80: note = Artificially Synthesized Probe
  source 1..80: mol_type = other DNA
gaattttgttcacagtgctttgatgaactttgtgtaagattactttgtttcaatacaaagtcttaggagagggtgtgggg

SEQ ID NO: 47629 - DNA, 80 bp, synthetic construct
  misc_feature 1..80: note = Artificially Synthesized Probe
  source 1..80: mol_type = other DNA
ttttttcttttcttttcttttcttttttgagacagggtctcactctgtcacccaggcaggagggcagtggtgtgatctcg

SEQ ID NO: 47630 - DNA, 80 bp, synthetic construct
  misc_feature 1..80: note = Artificially Synthesized Probe
  source 1..80: mol_type = other DNA
agaactcttggcctcaagtgacctgccttccttggcctcccaaagtgctgggattacaggtgtgagccaccgtgccccgc

SEQ ID NO: 47631 - DNA, 80 bp, synthetic construct
  misc_feature 1..80: note = Artificially Synthesized Probe
  source 1..80: mol_type = other DNA
ccaataggtagtttttcaaccctggcccccctcccaccctctcttcttttggagtctccagcgtctattatttacatctt

SEQ ID NO: 47632 - DNA, 80 bp, synthetic construct
  misc_feature 1..80: note = Artificially Synthesized Probe
  source 1..80: mol_type = other DNA
ttctgcacctataatcccagctactcaggaggctgaggcgggagaattgcttgaacccaggaggtgggaggttgcagtga

SEQ ID NO: 47633 - DNA, 80 bp, synthetic construct; identical to SEQ ID NO: 23438
  misc_feature 1..80: note = Artificially Synthesized Probe
  source 1..80: mol_type = other DNA

SEQ ID NO: 47634 - DNA, 80 bp, synthetic construct
  misc_feature 1..80: note = Artificially Synthesized Probe
  source 1..80: mol_type = other DNA
aaaataataataacccaagatgaattaaagacttaaatgtaagacctcaaactataaaaatcttagaagaaaacccggga

SEQ ID NO: 47635 - DNA, 80 bp, synthetic construct
  misc_feature 1..80: note = Artificially Synthesized Probe
  source 1..80: mol_type = other DNA
tcccttttctaagatgctcttgtcacctccgtgtttttctccaggccttctgggcccttctggtgccagttcttttctct

SEQ ID NO: 47636 - DNA, 80 bp, synthetic construct; identical to SEQ ID NO: 23439
  misc_feature 1..80: note = Artificially Synthesized Probe
  source 1..80: mol_type = other DNA

SEQ ID NO: 47637 - DNA, 80 bp, synthetic construct
  misc_feature 1..80: note = Artificially Synthesized Probe
  source 1..80: mol_type = other DNA
aatccagccgggtacggtggctcacgcctgtaatcctagcactttgggaggctgagatgctcggccaataaatttctatt

SEQ ID NO: 47638 - DNA, 80 bp, synthetic construct; identical to SEQ ID NO: 23433
  misc_feature 1..80: note = Artificially Synthesized Probe
  source 1..80: mol_type = other DNA

SEQ ID NO: 47639 - DNA, 80 bp, synthetic construct
  misc_feature 1..80: note = Artificially Synthesized Probe
  source 1..80: mol_type = other DNA
agatcctctcagcacttagaagagtggcctgggcctggggatggaagtgctaccctgattttttgtttcgttttgttttt

SEQ ID NO: 47640 - DNA, 80 bp, synthetic construct
  misc_feature 1..80: note = Artificially Synthesized Probe
  source 1..80: mol_type = other DNA
cgatcacgaccctctcacgtgcacccacttagagttgtgagcccttaaaaggaacagggattgctcactcggggagctcg

SEQ ID NO: 47641 - DNA, 80 bp, synthetic construct
  misc_feature 1..80: note = Artificially Synthesized Probe
  source 1..80: mol_type = other DNA
tcctgcctcagcaggactacaggcgcccgccaccgcgcccggctaattttttgtattttcagtagagacagggtttcacc

SEQ ID NO: 47642 - DNA, 80 bp, synthetic construct; identical to SEQ ID NO: 23441
  misc_feature 1..80: note = Artificially Synthesized Probe
  source 1..80: mol_type = other DNA

SEQ ID NO: 47643 - DNA, 80 bp, synthetic construct
  misc_feature 1..80: note = Artificially Synthesized Probe
  source 1..80: mol_type = other DNA
tgagccgagatcataccactgcactccagcctggctgacacagcaagactccgtctcaaaacaaaacaaaacaaaaatag

SEQ ID NO: 47644 - DNA, 80 bp, synthetic construct
  misc_feature 1..80: note = Artificially Synthesized Probe
  source 1..80: mol_type = other DNA
aaaaacaaattttgaacccctgcccatcttcctggcaggcccagccccagcccaggggaccccagacgtctccagtgcct

SEQ ID NO: 47645 - DNA, 80 bp, synthetic construct; identical to SEQ ID NO: 23442
  misc_feature 1..80: note = Artificially Synthesized Probe
  source 1..80: mol_type = other DNA

SEQ ID NO: 47646 - DNA, 80 bp, synthetic construct
  misc_feature 1..80: note = Artificially Synthesized Probe
  source 1..80: mol_type = other DNA
agtcaggaagattgagaggtgagagtgctgaacggggaggggctttggggctaagggaagtgcccgggaccccacctgac

SEQ ID NO: 47647 - DNA, 80 bp, synthetic construct
  misc_feature 1..80: note = Artificially Synthesized Probe
  source 1..80: mol_type = other DNA
acatggtgaaaccttgtctctactaaaaatacaaaaaaattaggcaggcatggtggcgtgcacctgtaatcccagctagt

SEQ ID NO: 47648 - DNA, 80 bp, synthetic construct
  misc_feature 1..80: note = Artificially Synthesized Probe
  source 1..80: mol_type = other DNA
gtaattccagcactatgggaggctgagatgggaggattgcttgagcccaggagttcgagaccagcctgaccaacatggcg

SEQ ID NO: 47649 - DNA, 80 bp, synthetic construct
  misc_feature 1..80: note = Artificially Synthesized Probe
  source 1..80: mol_type = other DNA
tcctataaactggtggttctacagggaagtaaaggagcaggcctacagggtgtctggtacatgtagatgctcagtatatc

SEQ ID NO: 47650 - DNA, 80 bp, synthetic construct
  misc_feature 1..80: note = Artificially Synthesized Probe
  source 1..80: mol_type = other DNA
tttggaaggccgaggtgggtggatcacttgaggtcaggagtgcgagaaccccgtccctaatagaaatgcaaaaaaaatta

SEQ ID NO: 47651 - DNA, 80 bp, synthetic construct; identical to SEQ ID NO: 23443
  misc_feature 1..80: note = Artificially Synthesized Probe
  source 1..80: mol_type = other DNA

SEQ ID NO: 47652 - DNA, 80 bp, synthetic construct
  misc_feature 1..80: note = Artificially Synthesized Probe
  source 1..80: mol_type = other DNA
tggagaaaccctgtctctactaaaaatacaaaattagccgggcgtggtggtgcattcctgtagtcctagctactcgggag

SEQ ID NO: 47653 - DNA, 80 bp, synthetic construct
  misc_feature 1..80: note = Artificially Synthesized Probe
  source 1..80: mol_type = other DNA
aggctgagcaggcggatcacgaggtcaggagttcgagactagcctgctcaacataatgaaaccctctctgtactaaaaat

SEQ ID NO: 47654 - DNA, 80 bp, synthetic construct
  misc_feature 1..80: note = Artificially Synthesized Probe
  source 1..80: mol_type = other DNA
aaaaaaggaaggcattggtagcaagagatggcaggccttgaaagccaggccagggtgaagtgtttctttttttttttttt

SEQ ID NO: 47655 - DNA, 80 bp, synthetic construct; identical to SEQ ID NO: 23444
  misc_feature 1..80: note = Artificially Synthesized Probe
  source 1..80: mol_type = other DNA

SEQ ID NO: 47656 - DNA, 80 bp, synthetic construct
  misc_feature 1..80: note = Artificially Synthesized Probe
  source 1..80: mol_type = other DNA
caattctcctgcctcagcctcatgagtacttggaactacaggtgtgtgacaccacacatggtattttttgtatttttagt

SEQ ID NO: 47657 - DNA, 80 bp, synthetic construct
  misc_feature 1..80: note = Artificially Synthesized Probe
  source 1..80: mol_type = other DNA
aagccctccagcaaggattcaggttggtgctgagtgcctgggagggacacccgcctacactctgcaagaaactcaaaaag

SEQ ID NO: 47658 - DNA, 80 bp, synthetic construct
  misc_feature 1..80: note = Artificially Synthesized Probe
  source 1..80: mol_type = other DNA
acagaagttggcccacccagcccagcggtcctcctaatcccacagacagtggggatggagattctgcaaggggaagaggt

SEQ ID NO: 47659 - DNA, 80 bp, synthetic construct; identical to SEQ ID NO: 23445
  misc_feature 1..80: note = Artificially Synthesized Probe
  source 1..80: mol_type = other DNA

SEQ ID NO: 47660 - DNA, 80 bp, synthetic construct
  misc_feature 1..80: note = Artificially Synthesized Probe
  source 1..80: mol_type = other DNA
aaaagtgggatgggagaattgcggagttggagatttggaagagtgaaggtggctacaggcctggggtcccggcttagagg

SEQ ID NO: 47661 - DNA, 80 bp, synthetic construct; identical to SEQ ID NO: 23440
  misc_feature 1..80: note = Artificially Synthesized Probe
  source 1..80: mol_type = other DNA

SEQ ID NO: 47662 - DNA, 80 bp, synthetic construct
  misc_feature 1..80: note = Artificially Synthesized Probe
  source 1..80: mol_type = other DNA
cgtccggagctggtgaggacagcctgccagagtctggtaagaaagggactcagggtgcggggacaggggggcgtcagcag

SEQ ID NO: 47663 - DNA, 80 bp, synthetic construct; identical to SEQ ID NO: 23451
  misc_feature 1..80: note = Artificially Synthesized Probe
  source 1..80: mol_type = other DNA

SEQ ID NO: 47664 - DNA, 80 bp, synthetic construct
  misc_feature 1..80: note = Artificially Synthesized Probe
  source 1..80: mol_type = other DNA
agaaagccttctaggctgggctcagtggctcacacctgtactcccagcaccctggggaggccgagatgggaggatcgctt

SEQ ID NO: 47665 - DNA, 80 bp, synthetic construct
  misc_feature 1..80: note = Artificially Synthesized Probe
  source 1..80: mol_type = other DNA
atggtgaaaccccatctctactaaaaatacaaaaatcaggtggggcacagtggctcaagcctgtaatcctagcactttgg

SEQ ID NO: 47666 - DNA, 80 bp, synthetic construct
  misc_feature 1..80: note = Artificially Synthesized Probe
  source 1..80: mol_type = other DNA
cagaggttgcagtgagccgagaacacgccactgcactccagcctgggtgacagagcgagactccatctcaaaaaatacga

SEQ ID NO: 47667 - DNA, 80 bp, synthetic construct; identical to SEQ ID NO: 23450
  misc_feature 1..80: note = Artificially Synthesized Probe
  source 1..80: mol_type = other DNA

SEQ ID NO: 47668 - DNA, 80 bp, synthetic construct; identical to SEQ ID NO: 23452
  misc_feature 1..80: note = Artificially Synthesized Probe
  source 1..80: mol_type = other DNA

SEQ ID NO: 47669 - DNA, 80 bp, synthetic construct
  misc_feature 1..80: note = Artificially Synthesized Probe
  source 1..80: mol_type = other DNA
gctctgtttcttgtcctcctggtattgggatttggtgagtgtgggcttccggggagggaagccttggggaggggaatgag

SEQ ID NO: 47670 - DNA, 80 bp, synthetic construct
  misc_feature 1..80: note = Artificially Synthesized Probe
  source 1..80: mol_type = other DNA
cttcctcacccaggtgaaggaatctctctccagttactgggagtcagcaaagacagccgcccagaacctgtacgagaaga

SEQ ID NO: 47671 - DNA, 80 bp, synthetic construct
  misc_feature 1..80: note = Artificially Synthesized Probe
  source 1..80: mol_type = other DNA
caggcccccagcccgtcctccctcagacccaggagtccaggcccccagcccctcctccctcagacccaggagtccaggtc

SEQ ID NO: 47672 - DNA, 80 bp, synthetic construct; identical to SEQ ID NO: 23453
  misc_feature 1..80: note = Artificially Synthesized Probe
  source 1..80: mol_type = other DNA

SEQ ID NO: 47673 - DNA, 80 bp, synthetic construct
  misc_feature 1..80: note = Artificially Synthesized Probe
  source 1..80: mol_type = other DNA
agcacctactttatgtatggagctctaacccatgggtccatgggaataaagcagtgaatagtaacaataaataatcgtaa

SEQ ID NO: 47674 - DNA, 80 bp, synthetic construct
  misc_feature 1..80: note = Artificially Synthesized Probe
  source 1..80: mol_type = other DNA
tgacagagaaaccccatttctaaaaaagagaaagaaaaagggataggtacaatggctcatgcctgtaatcccagcactct

SEQ ID NO: 47675 - DNA, 80 bp, synthetic construct
  misc_feature 1..80: note = Artificially Synthesized Probe
  source 1..80: mol_type = other DNA
aagcggaggttgcagtgagcccagatcgtgccactgtactctagcctgggtgacagagcaagactcagtcttggcggaaa

SEQ ID NO: 47676 - DNA, 80 bp, synthetic construct
  misc_feature 1..80: note = Artificially Synthesized Probe
  source 1..80: mol_type = other DNA
aaattagacaggcatggtggtgcatgcttgtatttccagttactcaggaggctgaggcaggagaatcgctcgaacccgga

SEQ ID NO: 47677 - DNA, 80 bp, synthetic construct
  misc_feature 1..80: note = Artificially Synthesized Probe
  source 1..80: mol_type = other DNA
tgagcacagagggacagaggcacggaacccccagaaatgtccctcctcagaaacaggctccaggccctgcctgccctgtg

SEQ ID NO: 47678 - DNA, 80 bp, synthetic construct; identical to SEQ ID NO: 23447
  misc_feature 1..80: note = Artificially Synthesized Probe
  source 1..80: mol_type = other DNA

SEQ ID NO: 47679 - DNA, 80 bp, synthetic construct
  misc_feature 1..80: note = Artificially Synthesized Probe
  source 1..80: mol_type = other DNA
ggcgggtggatcgcaaggtcaggagatttgagatcatcctggctaacagatgggtaaaaacccatctctactaaaaatac

SEQ ID NO: 47680 - DNA, 80 bp, synthetic construct
  misc_feature 1..80: note = Artificially Synthesized Probe
  source 1..80: mol_type = other DNA
ttaacacgtatgtagacaatgtgcaaggcaccattccatgtgcatcgtatgtagtaactcttaattctcacgataaccct

SEQ ID NO: 47681 - DNA, 80 bp, synthetic construct
  misc_feature 1..80: note = Artificially Synthesized Probe
  source 1..80: mol_type = other DNA
gaactgacagcaaggctaagccaatgtctgcccctgggggcagaaagtcacctcctgctctccctccactgtccacagag

SEQ ID NO: 47682 - DNA, 80 bp, synthetic construct; identical to SEQ ID NO: 23448
  misc_feature 1..80: note = Artificially Synthesized Probe
  source 1..80: mol_type = other DNA

SEQ ID NO: 47683 - DNA, 80 bp, synthetic construct
  misc_feature 1..80: note = Artificially Synthesized Probe
  source 1..80: mol_type = other DNA
actccaccctgggcaacagagcaagagactgactctgtctcataaaaaaaaagaaaaaagaaaaaaaaaaagagatggct

SEQ ID NO: 47684 - DNA, 80 bp, synthetic construct
  misc_feature 1..80: note = Artificially Synthesized Probe
  source 1..80: mol_type = other DNA
cacctagcatgccagccagaggcccaggaaggaaccctgagccccccaccaaagctaaagatgagtcgctggagcctggt

SEQ ID NO: 47685 - DNA, 80 bp, synthetic construct; identical to SEQ ID NO: 23446
  misc_feature 1..80: note = Artificially Synthesized Probe
  source 1..80: mol_type = other DNA

SEQ ID NO: 47686 - DNA, 80 bp, synthetic construct
  misc_feature 1..80: note = Artificially Synthesized Probe
  source 1..80: mol_type = other DNA
gagtggggctgtgacccctaggtctgggaggagtggagggttagagctgagagcaggaactcctaggtcacagagaggag

SEQ ID NO: 47687 - DNA, 80 bp, synthetic construct
  misc_feature 1..80: note = Artificially Synthesized Probe
  source 1..80: mol_type = other DNA
cctcttgaagaagacccacagcctgtgccccaggcttgtctgtggggacaaggaccagggttaaaatgttcataaaagcc

SEQ ID NO: 47688 - DNA, 80 bp, synthetic construct; identical to SEQ ID NO: 23449
  misc_feature 1..80: note = Artificially Synthesized Probe
  source 1..80: mol_type = other DNA

SEQ ID NO: 47689 - DNA, 80 bp, synthetic construct
  misc_feature 1..80: note = Artificially Synthesized Probe
  source 1..80: mol_type = other DNA
ttgcatatgcatttttttttttttttttgagacggagtctcactctgtcacccaggctggagtgcagtggtagcagtggt

SEQ ID NO: 47690 - DNA, 80 bp, synthetic construct
  misc_feature 1..80: note = Artificially Synthesized Probe
  source 1..80: mol_type = other DNA
gctcactgcaacgtccgcctcccgggttcacgccattctcctgcctcagcctcccgagtagctgggactacaggagccca

SEQ ID NO: 47691 - DNA, 80 bp, synthetic construct
  misc_feature 1..80: note = Artificially Synthesized Probe
  source 1..80: mol_type = other DNA
ctgggcgcatccctgtagccggcgggcgcgcgatccgggacggacggggtcgcgggggacgcgggggacgcgggggacgg

SEQ ID NO: 47692 - DNA, 80 bp, synthetic construct
  misc_feature 1..80: note = Artificially Synthesized Probe
  source 1..80: mol_type = other DNA
gtagatccatgcattgacctgaaagagtgtttctaaacaggaaaattcaccctggcaccggcgattttttagatgttcat

SEQ ID NO: 47693 - DNA, 80 bp, synthetic construct
  misc_feature 1..80: note = Artificially Synthesized Probe
  source 1..80: mol_type = other DNA
attaaaatagagggatcgcatattaaaatggaggggttaaaacggatggtgtttctggtaccagaacatgaatatcagtt

SEQ ID NO: 47694 - DNA, 80 bp, synthetic construct; identical to SEQ ID NO: 23562
  misc_feature 1..80: note = Artificially Synthesized Probe
  source 1..80: mol_type = other DNA

SEQ ID NO: 47695 - DNA, 80 bp, synthetic construct
  misc_feature 1..80: note = Artificially Synthesized Probe
  source 1..80: mol_type = other DNA
ccttctgctgtagataatctgaaatgttaacggagtataaaatacagaagagaaatgcagagcgtgggtaacgccattgc

SEQ ID NO: 47696 - DNA, 80 bp, synthetic construct
  misc_feature 1..80: note = Artificially Synthesized Probe
  source 1..80: mol_type = other DNA
aagtggccactctctaaagagaatgagctgaacgtgcagataagccccctttcgtcttcagatcagctatatattcttta

SEQ ID NO: 47697 - DNA, 80 bp, synthetic construct
  misc_feature 1..80: note = Artificially Synthesized Probe
  source 1..80: mol_type = other DNA
ccggggaagggtaagcagggctgggctgcctgctgcgactgcagaggcctggggcacgcagctgtctggacaccaccctc

SEQ ID NO: 47698 - DNA, 80 bp, synthetic construct
  misc_feature 1..80: note = Artificially Synthesized Probe
  source 1..80: mol_type = other DNA
ctaaacatttcttttgctttggaaaaactggagaaagataaagggaagtggacctatgtggtttatacagcgacgtttgg

SEQ ID NO: 47699 - DNA, 80 bp, synthetic construct; identical to SEQ ID NO: 23563
  misc_feature 1..80: note = Artificially Synthesized Probe
  source 1..80: mol_type = other DNA

SEQ ID NO: 47700 - DNA, 80 bp, synthetic construct
  misc_feature 1..80: note = Artificially Synthesized Probe
  source 1..80: mol_type = other DNA
ggaggcagggcccgcggcccggggtgggacgcacctcgcagctctgaatgggccacttgggagatgattcttaaggggcg

SEQ ID NO: 47701 - DNA, 80 bp, synthetic construct
  misc_feature 1..80: note = Artificially Synthesized Probe
  source 1..80: mol_type = other DNA
cacagcacctgaggccttgttagttaaagaggggacacgtgtttcacatttgtagctctgttttgcctttgcttggcaag

SEQ ID NO: 47702 - DNA, 80 bp, synthetic construct
  misc_feature 1..80: note = Artificially Synthesized Probe
  source 1..80: mol_type = other DNA
gacaatgtcttattctttaagaaataaagatgtttcttctcaccctggtctctggccagggtttcccagcagctcccctg

SEQ ID NO: 47703 - DNA, 80 bp, synthetic construct
  misc_feature 1..80: note = Artificially Synthesized Probe
  source 1..80: mol_type = other DNA
gctgatgggatctaaagattaagataccaaaggttgaatctccttaggtgttcacttctaaaaagctaacttctgagagt

SEQ ID NO: 47704 - DNA, 80 bp, synthetic construct; identical to SEQ ID NO: 23564
  misc_feature 1..80: note = Artificially Synthesized Probe
  source 1..80: mol_type = other DNA

SEQ ID NO: 47705 - DNA, 80 bp, synthetic construct
  misc_feature 1..80: note = Artificially Synthesized Probe
  source 1..80: mol_type = other DNA
gaaagggagctgatcacttttggaaaagatttacagttcttaggaatgcaaatatttgtttcttttccttttcatctaaa

SEQ ID NO: 47706 - DNA, 80 bp, synthetic construct
  misc_feature 1..80: note = Artificially Synthesized Probe
  source 1..80: mol_type = other DNA
aatgaaatattgcatctgaaattaggctggaattgcagtagacgttcctggttcttgcaaaccagaggacattcttgaag

SEQ ID NO: 47707 - DNA, 80 bp, synthetic construct; identical to SEQ ID NO: 23565
  misc_feature 1..80: note = Artificially Synthesized Probe
  source 1..80: mol_type = other DNA

SEQ ID NO: 47708 - DNA, 80 bp, synthetic construct; identical to SEQ ID NO: 23464
  misc_feature 1..80: note = Artificially Synthesized Probe
  source 1..80: mol_type = other DNA

SEQ ID NO: 47709 - DNA, 80 bp, synthetic construct
  misc_feature 1..80: note = Artificially Synthesized Probe
  source 1..80: mol_type = other DNA
cttcccacaaaagcatgaaagtaggatgtctgtatgtagcgacaacaaatacaagaataaggagagtttaacaacattct

SEQ ID NO: 47710 - DNA, 80 bp, synthetic construct
  misc_feature 1..80: note = Artificially Synthesized Probe
  source 1..80: mol_type = other DNA
ttaaattgggaaactaactgtgctatgtgttctcgttgtagagattcaaacacacaggaagttcatgtacactgttgcag

SEQ ID NO: 47711 - DNA, 80 bp, synthetic construct
  misc_feature 1..80: note = Artificially Synthesized Probe
  source 1..80: mol_type = other DNA
tagtgaaaccccgtctgtactttcacatagtgaaaccccatctctactaagaatgcaaaaattagccggatgtggtggca

SEQ ID NO: 47712 - DNA, 80 bp, synthetic construct
  misc_feature 1..80: note = Artificially Synthesized Probe
  source 1..80: mol_type = other DNA
ataccacatgttgacttccaatgagctacttgggatgcattcttactgatgtttttcctatttgaaaggtttattttctt

SEQ ID NO: 47713 - DNA, 80 bp, synthetic construct; identical to SEQ ID NO: 23566
  misc_feature 1..80: note = Artificially Synthesized Probe
  source 1..80: mol_type = other DNA

SEQ ID NO: 47714 - DNA, 80 bp, synthetic construct
  misc_feature 1..80: note = Artificially Synthesized Probe
  source 1..80: mol_type = other DNA
attatggaagccgccacatggtcgttttcttctttcctcctaattctctgattcagatcggaagttgcacccatcaaatg

SEQ ID NO: 47715 - DNA, 80 bp, synthetic construct
  misc_feature 1..80: note = Artificially Synthesized Probe
  source 1..80: mol_type = other DNA
ctgatgtccccacgatctgtgtagggacggaggagggaaggtagggcatgctcactgcgttacagagaattagcaagctc

SEQ ID NO: 47716 - DNA, 80 bp, synthetic construct; identical to SEQ ID NO: 23567
  misc_feature 1..80: note = Artificially Synthesized Probe
  source 1..80: mol_type = other DNA

SEQ ID NO: 47717 - DNA, 80 bp, synthetic construct
  misc_feature 1..80: note = Artificially Synthesized Probe
  source 1..80: mol_type = other DNA
tcccagaatttcccttttaaaaataaagaaatcaaggtggttgcaaattttttaaaagtactggcaagtgtccctaggaa

SEQ ID NO: 47718 - DNA, 80 bp, synthetic construct
  misc_feature 1..80: note = Artificially Synthesized Probe
  source 1..80: mol_type = other DNA
tcagcactttttcactcctgagaagtccacagtcatgagcctggcttgcacgtctcagagcctgtacgctggcctggtca

SEQ ID NO: 47719 - DNA, 80 bp, synthetic construct
  misc_feature 1..80: note = Artificially Synthesized Probe
  source 1..80: mol_type = other DNA
ctgaggccaaatccagatggtcacaaaacacaaacccaggacagtggggttctcccgagtcttagagaagaaggtctttc

SEQ ID NO: 47720 - DNA, 80 bp, synthetic construct
  misc_feature 1..80: note = Artificially Synthesized Probe
  source 1..80: mol_type = other DNA
cgtcacccttgcccaaggcccgggtgccttgcttcttccccaaaaggtgtttgttgaatatacagacatctttcagaagt

SEQ ID NO: 47721 - DNA, 80 bp, synthetic construct; identical to SEQ ID NO: 23568
  misc_feature 1..80: note = Artificially Synthesized Probe
  source 1..80: mol_type = other DNA

SEQ ID NO: 47722 - DNA, 80 bp, synthetic construct
  misc_feature 1..80: note = Artificially Synthesized Probe
  source 1..80: mol_type = other DNA
gccgctgcttgtgggagctctgggtacggggctttccttccagcttccttggtgctggctgaggctgctctcctggcccc

SEQ ID NO: 47723 - DNA, 80 bp, synthetic construct
  misc_feature 1..80: note = Artificially Synthesized Probe
  source 1..80: mol_type = other DNA
tttcccaggccatccaccacttgttcttgtaccccgagaccatgtcccagctcactcccccatcatcaccaccctggtcc

SEQ ID NO: 47724 - DNA, 80 bp, synthetic construct
  misc_feature 1..80: note = Artificially Synthesized Probe
  source 1..80: mol_type = other DNA
tgtacttagaatagaattccagtcctccagtccttgttccttgctcacaaggcattctgccctccaaccacccccgttct

SEQ ID NO: 47725 - DNA, 80 bp, synthetic construct
  misc_feature 1..80: note = Artificially Synthesized Probe
  source 1..80: mol_type = other DNA
ggttccggcctggcctgtgcgcacctgcgccaagaaggcctggacttctttctcactccggtaggtggagtaagcacagg

SEQ ID NO: 47726 - DNA, 80 bp, synthetic construct; identical to SEQ ID NO: 23569
  misc_feature 1..80: note = Artificially Synthesized Probe
  source 1..80: mol_type = other DNA

SEQ ID NO: 47727 - DNA, 80 bp, synthetic construct
  misc_feature 1..80: note = Artificially Synthesized Probe
  source 1..80: mol_type = other DNA
cactcaactctttcatgaagcttcgtggaggaatgtgtgttgataggactttttcatataatctggatttttttctgttt

SEQ ID NO: 47728 - DNA, 80 bp, synthetic construct
  misc_feature 1..80: note = Artificially Synthesized Probe
  source 1..80: mol_type = other DNA
gctgtgttttcgccttgtcagacgcgttgcatgatctgtaactgagatctgctgaacgtgtctcttcgcatctttctcac

SEQ ID NO: 47729 - DNA, 80 bp, synthetic construct
  misc_feature 1..80: note = Artificially Synthesized Probe
  source 1..80: mol_type = other DNA
gagctctgagctttcaagggacttaaaaatgtgaaattctgtgggcaatttccagatttttaagtgttagttcaaaacgt

SEQ ID NO: 47730 - DNA, 80 bp, synthetic construct; identical to SEQ ID NO: 23570
  misc_feature 1..80: note = Artificially Synthesized Probe
  source 1..80: mol_type = other DNA

SEQ ID NO: 47731 - DNA, 80 bp, synthetic construct
  misc_feature 1..80: note = Artificially Synthesized Probe
  source 1..80: mol_type = other DNA
tagactttgcgtccttttacgtttcctcctcgtggatttatgtcttgagttggaaccttatgaatgtgaaatcaatcggg

SEQ ID NO: 47732 - DNA, 80 bp, synthetic construct
  misc_feature 1..80: note = Artificially Synthesized Probe
  source 1..80: mol_type = other DNA
agtgtgtgaatgtcagagaaaattgtagctctgccctgagcccacatatttctggaggttgccgtgtgccgtgctttaaa

SEQ ID NO: 47733 - DNA, 80 bp, synthetic construct
  misc_feature 1..80: note = Artificially Synthesized Probe
  source 1..80: mol_type = other DNA
agtgcacatgtgcagacgtgtgtgtccctgtgtgcatgtgacggcaggtgcacgtacttgtgggtgtgtgtgcacatgtg

SEQ ID NO: 47734 - DNA, 80 bp, synthetic construct
  misc_feature 1..80: note = Artificially Synthesized Probe
  source 1..80: mol_type = other DNA
gcaagcccatgttcactggggctaataattaccctacaacacttttagcctaattgcaacataaaagcatttccattaac

SEQ ID NO: 47735 - DNA, 80 bp, synthetic construct; identical to SEQ ID NO: 23571
  misc_feature 1..80: note = Artificially Synthesized Probe
  source 1..80: mol_type = other DNA

SEQ ID NO: 47736 - DNA, 80 bp, synthetic construct
  misc_feature 1..80: note = Artificially Synthesized Probe
  source 1..80: mol_type = other DNA
caactcatacttgatataaagtgtgaaagaccttgtcagtagatctttggatatattttcaaaccagaatatttcacgac

SEQ ID NO: 47737 - DNA, 80 bp, synthetic construct
  misc_feature 1..80: note = Artificially Synthesized Probe
  source 1..80: mol_type = other DNA
aacatctgcccagttattttggatgcagttccttttaatgatgactgaatcatcttctctgctattattgtaaatggtcg

SEQ ID NO: 47738 - DNA, 80 bp, synthetic construct
  misc_feature 1..80: note = Artificially Synthesized Probe
  source 1..80: mol_type = other DNA
cacacatggaggggataggcaggggggcgggtggggggtcttgagggctgcgtgtcccacagctgtctgtgcttcccgac

SEQ ID NO: 47739 - DNA, 80 bp, synthetic construct; identical to SEQ ID NO: 23572
  misc_feature 1..80: note = Artificially Synthesized Probe
  source 1..80: mol_type = other DNA

SEQ ID NO: 47740 - DNA, 80 bp, synthetic construct
  misc_feature 1..80: note = Artificially Synthesized Probe
  source 1..80: mol_type = other DNA
tgccgaagtcaaggcttcttgcctgtggctaaatttccttctagccgggcacagtggctcatgcctgtaatgccaacact

SEQ ID NO: 47741 - DNA, 80 bp, synthetic construct
  misc_feature 1..80: note = Artificially Synthesized Probe
  source 1..80: mol_type = other DNA
ggctgaggcaggagcatcacttgagcccaggaggtccaggcttcattgagccaagatctcgccactgcactccagcctgg

SEQ ID NO: 47742 - DNA, 80 bp, synthetic construct; identical to SEQ ID NO: 23465
  misc_feature 1..80: note = Artificially Synthesized Probe
  source 1..80: mol_type = other DNA

SEQ ID NO: 47743 - DNA, 80 bp, synthetic construct
  misc_feature 1..80: note = Artificially Synthesized Probe
  source 1..80: mol_type = other DNA
aaacattgctttaagaaatgtgttcagtatgaacctgtagagtcctccaggacttagggaaaatttgcatttgattgagg

SEQ ID NO: 47744 - DNA, 80 bp, synthetic construct; identical to SEQ ID NO: 23573
  misc_feature 1..80: note = Artificially Synthesized Probe
  source 1..80: mol_type = other DNA

SEQ ID NO: 47745 - DNA, 80 bp, synthetic construct
  misc_feature 1..80: note = Artificially Synthesized Probe
  source 1..80: mol_type = other DNA
aaaggtaaccaacccaatagaagatgttcaaaggacatgaacaggcagctcacagaaaaagaaagaaataaacaataaac

SEQ ID NO: 47746 - DNA, 80 bp, synthetic construct
  misc_feature 1..80: note = Artificially Synthesized Probe
  source 1..80: mol_type = other DNA
accccccacaaccccccatcagccccgtcctggagtggtgcgtttgttacagtcagtgagcctgcatgggcctgtcatca

SEQ ID NO: 47747 - DNA, 80 bp, synthetic construct
  misc_feature 1..80: note = Artificially Synthesized Probe
  source 1..80: mol_type = other DNA
agccctccctcccccagtctcggcaaccactggtcttcagggtgccatttcttcagattgacagaaggtaaacactaagt

SEQ ID NO: 47748 - DNA, 80 bp, synthetic construct; identical to SEQ ID NO: 23574
  misc_feature 1..80: note = Artificially Synthesized Probe
  source 1..80: mol_type = other DNA

SEQ ID NO: 47749 - DNA, 80 bp, synthetic construct
  misc_feature 1..80: note = Artificially Synthesized Probe
  source 1..80: mol_type = other DNA
gaggctgtggtgcctgatgagcccacccgtgtctgctgttagtggccgtgtgacgtgccagcgtgtgtgtgtgaagttgg

SEQ ID NO: 47750 - DNA, 80 bp, synthetic construct
  misc_feature 1..80: note = Artificially Synthesized Probe
  source 1..80: mol_type = other DNA
ggataacacaggtgtgttttcacccaataaaatggaccaactcatcattaaaaattcctctgggccgggcacagcggctc

SEQ ID NO: 47751 - DNA, 80 bp, synthetic construct
  misc_feature 1..80: note = Artificially Synthesized Probe
  source 1..80: mol_type = other DNA
gaagtgggaggatcacttgagcccacgaagctgaggctgcagtgagccaagatcgcactgctatactccagcctgggcaa

SEQ ID NO: 47752 - DNA, 80 bp, synthetic construct; identical to SEQ ID NO: 23575
  misc_feature 1..80: note = Artificially Synthesized Probe
  source 1..80: mol_type = other DNA

SEQ ID NO: 47753 - DNA, 80 bp, synthetic construct
  misc_feature 1..80: note = Artificially Synthesized Probe
  source 1..80: mol_type = other DNA
gggcccaggatgctcgaggcccgagtgccggacagggctgagcagtaagtgaagagcggggcacttcacaggcacagagc

SEQ ID NO: 47754 - DNA, 80 bp, synthetic construct
  misc_feature 1..80: note = Artificially Synthesized Probe
  source 1..80: mol_type = other DNA
ccgtcttcagccaggaaagggctctccggctggcccctggagacgtgggtttggttaggaatgcgaggtccacactgggg

SEQ ID NO: 47755 - DNA, 80 bp, synthetic construct
  misc_feature 1..80: note = Artificially Synthesized Probe
  source 1..80: mol_type = other DNA
ggttggggtacatgttagatgatttttggcagtattgttcctgttacttttcatatccatctgacacttcttatttcacg

SEQ ID NO: 47756 - DNA, 80 bp, synthetic construct
  misc_feature 1..80: note = Artificially Synthesized Probe
  source 1..80: mol_type = other DNA
catcagtacagccatcctagtaattgcgtatttacagagggagctcagccatatagtatacggtgatcttggatcagccg

SEQ ID NO: 47757 - DNA, 80 bp, synthetic construct; identical to SEQ ID NO: 23576
  misc_feature 1..80: note = Artificially Synthesized Probe
  source 1..80: mol_type = other DNA

SEQ ID NO: 47758 - DNA, 80 bp, synthetic construct
  misc_feature 1..80: note = Artificially Synthesized Probe
  source 1..80: mol_type = other DNA
tgatctgggcttgggttgagcgggttgggagatgctagccatatttggaagaaaaaggcacctgaggctctgaggcttcg

SEQ ID NO: 47759 - DNA, 80 bp, synthetic construct
  misc_feature 1..80: note = Artificially Synthesized Probe
  source 1..80: mol_type = other DNA
gggtgcttggtgcagcacccccaacgtggcagggggcacccacctgtctgtcagggccgtcaggagcagatgggaagaca

SEQ ID NO: 47760 - DNA, 80 bp, synthetic construct; identical to SEQ ID NO: 23577
  misc_feature 1..80: note = Artificially Synthesized Probe
  source 1..80: mol_type = other DNA

SEQ ID NO: 47761 - DNA, 80 bp, synthetic construct
  misc_feature 1..80: note = Artificially Synthesized Probe
  source 1..80: mol_type = other DNA
gaaggaaggaaagagaggaaaaaggtttctggccctcatcctccactgaagggaaaaacaatgaaataataaaataggcg

SEQ ID NO: 47762 - DNA, 80 bp, synthetic construct
  misc_feature 1..80: note = Artificially Synthesized Probe
  source 1..80: mol_type = other DNA
cttgggaggctgaggcaggaggactgcttgaggctaggagttcaaggccagcctgggcagcatagcgagaccctatatct

SEQ ID NO: 47763 - DNA, 80 bp, synthetic construct
  misc_feature 1..80: note = Artificially Synthesized Probe
  source 1..80: mol_type = other DNA
ccaaacactgtggaatcccagtccccagaaaccctgaacactgtggaatcccagtccccagaaacccccgaacactggaa

SEQ ID NO: 47764 - DNA, 80 bp, synthetic construct; identical to SEQ ID NO: 23578
  misc_feature 1..80: note = Artificially Synthesized Probe
  source 1..80: mol_type = other DNA

SEQ ID NO: 47765 - DNA, 80 bp, synthetic construct
  misc_feature 1..80: note = Artificially Synthesized Probe
  source 1..80: mol_type = other DNA
tcagccctgccgcccctgcagctgtttcccaggtagaggccctgggtcatggtgacttcctcccacgcaggagtcagcat

SEQ ID NO: 47766 - DNA, 80 bp, synthetic construct
  misc_feature 1..80: note = Artificially Synthesized Probe
  source 1..80: mol_type = other DNA
atggttaagacattgatgacacaggcccggctctcagtcccaggatggctgggctgccagcgtgagtgagggtgctgtgg

SEQ ID NO: 47767 - DNA, 80 bp, synthetic construct
  misc_feature 1..80: note = Artificially Synthesized Probe
  source 1..80: mol_type = other DNA
agggatggtgcccatgtggctagctggtcgagggtgaggagggattcactaggagaaaaaccgggatgccacctcagaga

SEQ ID NO: 47768 - DNA, 80 bp, synthetic construct
  misc_feature 1..80: note = Artificially Synthesized Probe
  source 1..80: mol_type = other DNA
ccgctgaaggtagccagcagcctttgacttgacttcttggagcacagttctgtgtagttttcttttaaacagcacttttg

SEQ ID NO: 47769 - DNA, 80 bp, synthetic construct
  misc_feature 1..80: note = Artificially Synthesized Probe
  source 1..80: mol_type = other DNA
aggaggttgcgctgggttaaaaactccatgggtttggtttttttaaatcatctttccagaagtttggattgtgattgtga

SEQ ID NO: 47770 - DNA, 80 bp, synthetic construct; identical to SEQ ID NO: 23579
  misc_feature 1..80: note = Artificially Synthesized Probe
  source 1..80: mol_type = other DNA

SEQ ID NO: 47771 - DNA, 80 bp, synthetic construct
  misc_feature 1..80: note = Artificially Synthesized Probe
  source 1..80: mol_type = other DNA
tcattggtgaattctaaccaaacatctttaaaaagaattaacagtactctttcccaaactctccaaaaatattgatgagg

SEQ ID NO: 47772 - DNA, 80 bp, synthetic construct
  misc_feature 1..80: note = Artificially Synthesized Probe
  source 1..80: mol_type = other DNA
ttgcaaattgaaatcaacagcgtactgaaaggattgtgtaccctggaaaaatgagatggattcctgaaatgcaaagatgg

SEQ ID NO: 47773 - DNA, 80 bp, synthetic construct
  misc_feature 1..80: note = Artificially Synthesized Probe
  source 1..80: mol_type = other DNA
tgataaaaacaatcaaactaagactagaaggtgatttttcctcaacctgccaaaggacatctataaaacactcacagcta

SEQ ID NO: 47774 - DNA, 80 bp, synthetic construct; identical to SEQ ID NO: 23580
  misc_feature 1..80: note = Artificially Synthesized Probe
  source 1..80: mol_type = other DNA

SEQ ID NO: 47775 - DNA, 80 bp, synthetic construct
  misc_feature 1..80: note = Artificially Synthesized Probe
  source 1..80: mol_type = other DNA
aatgagacaagaaaacaacttcatttataatgctgtcagaaagaaaaatacttggagaaatttttaatcaaaaagtgcaa

SEQ ID NO: 47776 - DNA, 80 bp, synthetic construct
  misc_feature 1..80: note = Artificially Synthesized Probe
  source 1..80: mol_type = other DNA
gacagcacaattgcagcacaggtgcgggtgtgtccccacagtcacgctgaacagcgtcagggagcgcagtggctgtgctg

SEQ ID NO: 47777 - DNA, 80 bp, synthetic construct
  misc_feature 1..80: note = Artificially Synthesized Probe
  source 1..80: mol_type = other DNA
tttctgctgcctttttttttttaaacaaaacttgacaagcacatcctgagattcatctggaaatgcaggggatccagaat

SEQ ID NO: 47778 - DNA, 80 bp, synthetic construct
  misc_feature 1..80: note = Artificially Synthesized Probe
  source 1..80: mol_type = other DNA
aattttcaacacggtgccaaaactattccatttgaatgttgaatggcctcttcaacaggtgctgctggcacaacaggtgc

SEQ ID NO: 47779 - DNA, 80 bp, synthetic construct; identical to SEQ ID NO: 23581
  misc_feature 1..80: note = Artificially Synthesized Probe
  source 1..80: mol_type = other DNA

SEQ ID NO: 47780 - DNA, 80 bp, synthetic construct
  misc_feature 1..80: note = Artificially Synthesized Probe
  source 1..80: mol_type = other DNA
gcaagggaactgaatggatatttctccaaagaagatgtacagtcgacccataggcacacgagaagatggtcagcattgtt

SEQ ID NO: 47781 - DNA, 80 bp, synthetic construct
  misc_feature 1..80: note = Artificially Synthesized Probe
  source 1..80: mol_type = other DNA
aagacagtttgtgatttcttcagaaagtaactcgtggcatgaccaggtgacccagcatttccagtcgtaggtgtagattc

SEQ ID NO: 47782 - DNA, 80 bp, synthetic construct
  misc_feature 1..80: note = Artificially Synthesized Probe
  source 1..80: mol_type = other DNA
atacatgaggattggtttcagccatagaaaggagtgaagccccaactcacgtcacgtggatgaacctggaaaatgccaaa

SEQ ID NO: 47783 - DNA, 80 bp, synthetic construct; identical to SEQ ID NO: 23582
  misc_feature 1..80: note = Artificially Synthesized Probe
  source 1..80: mol_type = other DNA

SEQ ID NO: 47784 - DNA, 80 bp, synthetic construct
  misc_feature 1..80: note = Artificially Synthesized Probe
  source 1..80: mol_type = other DNA
ttcttccttttctttttccctatttttctttttaatttgagtgagacttgtgcatgctttggggctcaatgacagaagcc

SEQ ID NO: 47785 - DNA, 80 bp, synthetic construct
  misc_feature 1..80: note = Artificially Synthesized Probe
  source 1..80: mol_type = other DNA
tcagagggaggagggatcaaaaacagacccacgctagaaccatctggaatccgaaccaagacttcccaactcccaggcag

SEQ ID NO: 47786 - DNA, 80 bp, synthetic construct; identical to SEQ ID NO: 23583
  misc_feature 1..80: note = Artificially Synthesized Probe
  source 1..80: mol_type = other DNA

SEQ ID NO: 47787 - DNA, 80 bp, synthetic construct
  misc_feature 1..80: note = Artificially Synthesized Probe
  source 1..80: mol_type = other DNA
gaatgggcattttagaggtggggctctcacttcacatcaggggacctggggggttccagtttgctccaggggggtggaca

SEQ ID NO: 47788 - DNA, 80 bp, synthetic construct
  misc_feature 1..80: note = Artificially Synthesized Probe
  source 1..80: mol_type = other DNA
cggcactttgggaggccgaggcgggcagatcacgagctcaggagatcgagaccatcctggccaacatggtgaaaccccgt

SEQ ID NO: 47789 - DNA, 80 bp, synthetic construct
  misc_feature 1..80: note = Artificially Synthesized Probe
  source 1..80: mol_type = other DNA
gcaccccacctgtccccccgcaccccacctgtccccccgcactccacctgtccccccgcaccccacctgtccccccgcac

SEQ ID NO: 47790 - DNA, 80 bp, synthetic construct
  misc_feature 1..80: note = Artificially Synthesized Probe
  source 1..80: mol_type = other DNA
ccagcctcccgcatcgtgtcgcctccctcgggatcccagcttcccgcaccgtgctacctccctggggaccccagcctcct

SEQ ID NO: 47791 - DNA, 80 bp, synthetic construct
  misc_feature 1..80: note = Artificially Synthesized Probe
  source 1..80: mol_type = other DNA
tggaatctcaactgaaataagaggcgatgccatgggagaagggatctcccatccactgaagtcgcatccctgaattcctg

SEQ ID NO: 47792 - DNA, 80 bp, synthetic construct; identical to SEQ ID NO: 23584
  misc_feature 1..80: note = Artificially Synthesized Probe
  source 1..80: mol_type = other DNA

SEQ ID NO: 47793 - DNA, 80 bp, synthetic construct
  misc_feature 1..80: note = Artificially Synthesized Probe
  source 1..80: mol_type = other DNA
tgatcccagagagcctgaactccaggcagcccctgaggccatgttggggggtcgctgtgttagcagctcctgctggctgt

SEQ ID NO: 47794 - DNA, 80 bp, synthetic construct
  misc_feature 1..80: note = Artificially Synthesized Probe
  source 1..80: mol_type = other DNA
gaggaggcacagactcagaaccagggtcaggctgcaggcaggcagtggggccccatgccatagcttggagacatcgagga

SEQ ID NO: 47795 - DNA, 80 bp, synthetic construct
  misc_feature 1..80: note = Artificially Synthesized Probe
  source 1..80: mol_type = other DNA
ggatgattggaaaatggcaggcagttgggttgctggtgtttggttgctggagacgcctgtgatttggagcaaagcctgct

SEQ ID NO: 47796 - DNA, 80 bp, synthetic construct; identical to SEQ ID NO: 23585
  misc_feature 1..80: note = Artificially Synthesized Probe
  source 1..80: mol_type = other DNA

SEQ ID NO: 47797 - DNA, 80 bp, synthetic construct
  misc_feature 1..80: note = Artificially Synthesized Probe
  source 1..80: mol_type = other DNA
tgctgccaggtaatggggtgggacaaggcccagggacagacgtgggagtacggagcatggtcagcccactttagcgcttc

SEQ ID NO: 47798 - DNA, 80 bp, synthetic construct
  misc_feature 1..80: note = Artificially Synthesized Probe
  source 1..80: mol_type = other DNA
agaacacagaacaggaggcctccctttggctgggagggctgttggggagaggccaacagaggcctatgtttgtgaatgcc

SEQ ID NO: 47799 - DNA, 80 bp, synthetic construct
  misc_feature 1..80: note = Artificially Synthesized Probe
  source 1..80: mol_type = other DNA
gaagggctgttttgcttctttgcctgctggtgggtattggaagacatttgcagttttaaggggaaggcatgaagtaaggg

SEQ ID NO: 47800 - DNA, 80 bp, synthetic construct; identical to SEQ ID NO: 23466
  misc_feature 1..80: note = Artificially Synthesized Probe
  source 1..80: mol_type = other DNA

SEQ ID NO: 47801 - DNA, 80 bp, synthetic construct
  misc_feature 1..80: note = Artificially Synthesized Probe
  source 1..80: mol_type = other DNA
tgccttctggctggggcctcatgtggtgaagaaagagccctggggtctcctccgcttcctataagggtgctaatcccatc

SEQ ID NO: 47802 - DNA, 80 bp, synthetic construct; identical to SEQ ID NO: 23586
  misc_feature 1..80: note = Artificially Synthesized Probe
  source 1..80: mol_type = other DNA

SEQ ID NO: 47803 - DNA, 80 bp, synthetic construct
  misc_feature 1..80: note = Artificially Synthesized Probe
  source 1..80: mol_type = other DNA
ggtccatgatagccgttcttttctcaggggctaactgtacaagtcattgttaaaatactacaggagatttctcttagtga

SEQ ID NO: 47804 - DNA, 80 bp, synthetic construct
  misc_feature 1..80: note = Artificially Synthesized Probe
  source 1..80: mol_type = other DNA
ctagagcaaatgtttgctgcaggaataggctgtccttgttgggacaaaaccaagtcacatccgtaattgccaaagcacgc

SEQ ID NO: 47805 - DNA, 80 bp, synthetic construct; identical to SEQ ID NO: 23587
  misc_feature 1..80: note = Artificially Synthesized Probe
  source 1..80: mol_type = other DNA

SEQ ID NO: 47806 - DNA, 80 bp, synthetic construct
  misc_feature 1..80: note = Artificially Synthesized Probe
  source 1..80: mol_type = other DNA
aagcaaagcaggataggaaagcctgcgctctggggactcacagccccgcccccatcccagcaccccacccactgtcagca

SEQ ID NO: 47807 - DNA, 80 bp, synthetic construct
  misc_feature 1..80: note = Artificially Synthesized Probe
  source 1..80: mol_type = other DNA
gctcgaaagccactcctgtatggcaggttcttgatgctttgttttagatactgtctttgacctctcctgtagaagagaaa

SEQ ID NO: 47808 - DNA, 80 bp, synthetic construct
  misc_feature 1..80: note = Artificially Synthesized Probe
  source 1..80: mol_type = other DNA
gctgggcgctgagccttccttgggacttttcacccttcagctcatagtttccaggcggccgatgatggatccatcccaag

SEQ ID NO: 47809 - DNA, 80 bp, synthetic construct; identical to SEQ ID NO: 23588
  misc_feature 1..80: note = Artificially Synthesized Probe
  source 1..80: mol_type = other DNA

SEQ ID NO: 47810 - DNA, 80 bp, synthetic construct
  misc_feature 1..80: note = Artificially Synthesized Probe
  source 1..80: mol_type = other DNA
gagaaaggtacacgggttagaggcaacctcggtgacaccagaagttcagttttgtttgtgatgcttctgacagtgattct

SEQ ID NO: 47811 - DNA, 80 bp, synthetic construct
  misc_feature 1..80: note = Artificially Synthesized Probe
  source 1..80: mol_type = other DNA
cagccccaccattgaaaacgatgccggtgaggtccaggtgagtcacctgtggggagttgccagccacgtgggctgacgcc

SEQ ID NO: 47812 - DNA, 80 bp, synthetic construct
  misc_feature 1..80: note = Artificially Synthesized Probe
  source 1..80: mol_type = other DNA
atatttcatagaaataagcattattgcatttcatgctgtatttagacattccggtgggggcatgctcataccgtgctgaa

SEQ ID NO: 47813 - DNA, 80 bp, synthetic construct
  misc_feature 1..80: note = Artificially Synthesized Probe
  source 1..80: mol_type = other DNA
ggttttcatgtgtgtgtgtgtgtgtgtgtgtggcaacaagacataaaattatctttttgtgctattgctggaatataaaa

SEQ ID NO: 47814 - DNA, 80 bp, synthetic construct; identical to SEQ ID NO: 23589
  misc_feature 1..80: note = Artificially Synthesized Probe
  source 1..80: mol_type = other DNA

SEQ ID NO: 47815 - DNA, 80 bp, synthetic construct
  misc_feature 1..80: note = Artificially Synthesized Probe
  source 1..80: mol_type = other DNA
agtaggttacatcaccaggcagatgtttcctgctctgtcccgcatgttcaaaggaggatatttttgatgggaaagtgctg

SEQ ID NO: 47816 - DNA, 80 bp, synthetic construct
  misc_feature 1..80: note = Artificially Synthesized Probe
  source 1..80: mol_type = other DNA
taacttttctgaagaccatggactacaccgtaagggaattcagtaaatgaaaccggactcaagatggtgagttaacgaac

SEQ ID NO: 47817 - DNA, 80 bp, synthetic construct
  misc_feature 1..80: note = Artificially Synthesized Probe
  source 1..80: mol_type = other DNA
ccatacttgggggacgtattgcttcttctactcactgttctgtctctgaggttatttgaatgaacctggatggtgttgtt

SEQ ID NO: 47818 - DNA, 80 bp, synthetic construct
  misc_feature 1..80: note = Artificially Synthesized Probe
  source 1..80: mol_type = other DNA
tgcagctgcatcaccgttcaccacctcagctgcccctgcctcccacctcgccagcggacctcacgtgggctccaactccc

SEQ ID NO: 47819 - DNA, 80 bp, synthetic construct; identical to SEQ ID NO: 23590
  misc_feature 1..80: note = Artificially Synthesized Probe
  source 1..80: mol_type = other DNA

SEQ ID NO: 47820 - DNA, 80 bp, synthetic construct
  misc_feature 1..80: note = Artificially Synthesized Probe
  source 1..80: mol_type = other DNA
caacctccgcctcccgggttcaagcaattctcctgcctcagctcctgagtagttgggataacaggtgcctaccaccacgc

SEQ ID NO: 47821 - DNA, 80 bp, synthetic construct
  misc_feature 1..80: note = Artificially Synthesized Probe
  source 1..80: mol_type = other DNA
attacaggcatgagccactgcgcccggcctaccctttttattaaatgcaagctttggccagcattacaggagcccttcca

SEQ ID NO: 47822 - DNA, 80 bp, synthetic construct; identical to SEQ ID NO: 23591
  misc_feature 1..80: note = Artificially Synthesized Probe
  source 1..80: mol_type = other DNA

SEQ ID NO: 47823 - DNA, 80 bp, synthetic construct
  misc_feature 1..80: note = Artificially Synthesized Probe
  source 1..80: mol_type = other DNA
tgtgtagggagcacaggcagctctgagtccagaaacaaaggcgtggtttctgtgtcagcccctgatatggtttggctgtg

SEQ ID NO: 47824 - DNA, 80 bp, synthetic construct
  misc_feature 1..80: note = Artificially Synthesized Probe
  source 1..80: mol_type = other DNA
gaagctgctgccgtgtttctcattagctttagaaagtaacagcaccggcttacgtacaggacagcgctgtggattcacta

SEQ ID NO: 47825 - DNA, 80 bp, synthetic construct
  misc_feature 1..80: note = Artificially Synthesized Probe
  source 1..80: mol_type = other DNA
acctctgtcgatacggagtctttggctctggtgtgaggttgtttttcatgctctttatcagagatgaactttgggtcaaa

SEQ ID NO: 47826 - DNA, 80 bp, synthetic construct
  misc_feature 1..80: note = Artificially Synthesized Probe
  source 1..80: mol_type = other DNA
taaacagagaaacactggggattagcttttctgtgtgtgaaggccgcgatgctgacgattgtgtcagagttgtggtggaa

SEQ ID NO: 47827 - DNA, 80 bp, synthetic construct; identical to SEQ ID NO: 23592
  misc_feature 1..80: note = Artificially Synthesized Probe
  source 1..80: mol_type = other DNA

SEQ ID NO: 47828 - DNA, 80 bp, synthetic construct
  misc_feature 1..80: note = Artificially Synthesized Probe
  source 1..80: mol_type = other DNA
acgatgttgttcttcacgcagagccctggagaggccgttcagttcccctctagggtccaactgcggctgagggccggtta

SEQ ID NO: 47829 - DNA, 80 bp, synthetic construct
  misc_feature 1..80: note = Artificially Synthesized Probe
  source 1..80: mol_type = other DNA
ccagaagcaaaaggtttagacagattcatccaggggcttgattcatggctgaagcggccaagcagagccatgcagacgac

SEQ ID NO: 47830 - DNA, 80 bp, synthetic construct
  misc_feature 1..80: note = Artificially Synthesized Probe
  source 1..80: mol_type = other DNA
acgacaggcctgtggggtttccagcaccccgtcaccgccccaccaactctgctacacaaaccagacccgaagccactcat

SEQ ID NO: 47831 - DNA, 80 bp, synthetic construct; identical to SEQ ID NO: 23593
  misc_feature 1..80: note = Artificially Synthesized Probe
  source 1..80: mol_type = other DNA

SEQ ID NO: 47832 - DNA, 80 bp, synthetic construct
  misc_feature 1..80: note = Artificially Synthesized Probe
  source 1..80: mol_type = other DNA
tctgtgttttatattgtggagaaggaagccgggatctccgttgttcctttgtgtgttttatattgtgaagaaggaagccg

SEQ ID NO: 47833 - DNA, 80 bp, synthetic construct
  misc_feature 1..80: note = Artificially Synthesized Probe
  source 1..80: mol_type = other DNA
tgaataagtctcacgagatctgatgggtttatcaggggtttccacttttgcttcttcctcattttctcttgccgccgcca

SEQ ID NO: 47834 - DNA, 80 bp, synthetic construct
  misc_feature 1..80: note = Artificially Synthesized Probe
  source 1..80: mol_type = other DNA
tcctttctgtattttatgttgtgaagaaggaagccgggatctccgtctttcctttctgtattttatattgtgaagaagga

SEQ ID NO: 47835 - DNA, 80 bp, synthetic construct
  misc_feature 1..80: note = Artificially Synthesized Probe
  source 1..80: mol_type = other DNA
ggaaacagcctaagctaggaacaaagtatgatgcaagaagacatttgccacagcatttaatttttaacagcacgaaacag

SEQ ID NO: 47836 - DNA, 80 bp, synthetic construct; identical to SEQ ID NO: 23594
  misc_feature 1..80: note = Artificially Synthesized Probe
  source 1..80: mol_type = other DNA

SEQ ID NO: 47837 - DNA, 80 bp, synthetic construct
  misc_feature 1..80: note = Artificially Synthesized Probe
  source 1..80: mol_type = other DNA
cctaatttatgtttttattatgatatatgggattgtacatgttgaggaccccaaatccaaaaacaaaatgcgaaatgctc

SEQ ID NO: 47838 - DNA, 80 bp, synthetic construct
  misc_feature 1..80: note = Artificially Synthesized Probe
  source 1..80: mol_type = other DNA
gcctggctaatttttgtatttttagtagaggtggggtttcatcatgttggccaggctggtctcgaactcctgaactcaag

SEQ ID NO: 47839 - DNA, 80 bp, synthetic construct
  misc_feature 1..80: note = Artificially Synthesized Probe
  source 1..80: mol_type = other DNA
cacttgtggtcccaagaatttcagataagtgacactcagcctgtaaatacatagaattgtgcataacgcacagtttcaca

SEQ ID NO: 47840 - DNA, 80 bp, synthetic construct; identical to SEQ ID NO: 23595
  misc_feature 1..80: note = Artificially Synthesized Probe
  source 1..80: mol_type = other DNA

SEQ ID NO: 47841 - DNA, 80 bp, synthetic construct
  misc_feature 1..80: note = Artificially Synthesized Probe
  source 1..80: mol_type = other DNA
ggtgcactctcactgttcctctggaggatagccaggtgctccctgaaaggaggtgcactctcactgtttttctggatggg

SEQ ID NO: 47842 - DNA, 80 bp, synthetic construct
  misc_feature 1..80: note = Artificially Synthesized Probe
  source 1..80: mol_type = other DNA
ggtgcttcctgaaaggaggtgcactctcactgttcctctggaggatagccaggtgcatcctggaaggaggcacactctca

SEQ ID NO: 47843 - DNA, 80 bp, synthetic construct
  misc_feature 1..80: note = Artificially Synthesized Probe
  source 1..80: mol_type = other DNA
ttctctggatgggtagctaggagcatcctgaaaggaagtgcactctcactgtttctctggatgggtagctaggagcatcc

SEQ ID NO: 47844 - DNA, 80 bp, synthetic construct; identical to SEQ ID NO: 23467
  misc_feature 1..80: note = Artificially Synthesized Probe
  source 1..80: mol_type = other DNA

SEQ ID NO: 47845 - DNA, 80 bp, synthetic construct; identical to SEQ ID NO: 23596
  misc_feature 1..80: note = Artificially Synthesized Probe
  source 1..80: mol_type = other DNA

SEQ ID NO: 47846 - DNA, 80 bp, synthetic construct
  misc_feature 1..80: note = Artificially Synthesized Probe
  source 1..80: mol_type = other DNA
ttgccactctcctctttgggaaatggactctcaccacggtggaagattcagtgatgtcatttgccttggccagagtagga

SEQ ID NO: 47847 - DNA, 80 bp, synthetic construct
  misc_feature 1..80: note = Artificially Synthesized Probe
  source 1..80: mol_type = other DNA
taagaagacctgcaggtgtttctgatacgatcgtgactttaaaatttgaatcacatcacctgaaaactgaaagtcctaat

SEQ ID NO: 47848 - DNA, 80 bp, synthetic construct
  misc_feature 1..80: note = Artificially Synthesized Probe
  source 1..80: mol_type = other DNA
tttctaatcaagacttaggaaaatttgggatatttccatagggtaagtaagaaggtattttatgcagaatggaaaaatga

SEQ ID NO: 47849 - DNA, 80 bp, synthetic construct; identical to SEQ ID NO: 23597
  misc_feature 1..80: note = Artificially Synthesized Probe
  source 1..80: mol_type = other DNA

SEQ ID NO: 47850 - DNA, 80 bp, synthetic construct
  misc_feature 1..80: note = Artificially Synthesized Probe
  source 1..80: mol_type = other DNA
gctctgcacgagaaagacaaggacaaatccagggacagcctggctcctggccccgagcctcaggacgaagaccagaagga

SEQ ID NO: 47851 - DNA, 80 bp, synthetic construct
  misc_feature 1..80: note = Artificially Synthesized Probe
  source 1..80: mol_type = other DNA
agatcagaggacagcaccatctatgatctcctgaaggatcctgtctcgctgagaagcaaagcacgccgggccaagaaagc

SEQ ID NO: 47852 - DNA, 80 bp, synthetic construct
  misc_feature 1..80: note = Artificially Synthesized Probe
  source 1..80: mol_type = other DNA
atttgcaatcaagggtgacttctcagctaatcctacagcctgagtggttaagctgtgtctacactggttgggaataaatt

SEQ ID NO: 47853 - DNA, 80 bp, synthetic construct
  misc_feature 1..80: note = Artificially Synthesized Probe
  source 1..80: mol_type = other DNA
ccacattctttttgactgctgtagtccatatgtgaatactaaatgttaaacttcatcagcgtcagacctattgtatcata

SEQ ID NO: 47854 - DNA, 80 bp, synthetic construct; identical to SEQ ID NO: 23598
  misc_feature 1..80: note = Artificially Synthesized Probe
  source 1..80: mol_type = other DNA

SEQ ID NO: 47855 - DNA, 80 bp, synthetic construct
  misc_feature 1..80: note = Artificially Synthesized Probe
  source 1..80: mol_type = other DNA
gtcggtgctgggtgaagtgtgagctgtcacccttaaaaagggccaggcatagaaaggagtaatgcccagtgttgttcatc

SEQ ID NO: 47856 - DNA, 80 bp, synthetic construct
  misc_feature 1..80: note = Artificially Synthesized Probe
  source 1..80: mol_type = other DNA
caacaccaaattattcctcccttctcgtataaatagagtgactatccacaggagaaaagtgtgtgctttagtattagagg

SEQ ID NO: 47857 - DNA, 80 bp, synthetic construct
  misc_feature 1..80: note = Artificially Synthesized Probe
  source 1..80: mol_type = other DNA
actatccacaggagaaaagtgtgtgctttagtattagaggagataggcagagaagtcttgcttagttccttcgtgcagct

SEQ ID NO: 47858 - DNA, 80 bp, synthetic construct
  misc_feature 1..80: note = Artificially Synthesized Probe
  source 1..80: mol_type = other DNA
aacgcatcagtttctattctgcagttgcagagccagccccgcgtgagaacgtgcataatgagtgcacaccatcatgtcaa

SEQ ID NO: 47859 - DNA, 80 bp, synthetic construct; identical to SEQ ID NO: 23599
  misc_feature 1..80: note = Artificially Synthesized Probe
  source 1..80: mol_type = other DNA

SEQ ID NO: 47860 - DNA, 80 bp, synthetic construct
  misc_feature 1..80: note = Artificially Synthesized Probe
  source 1..80: mol_type = other DNA
gagagtaaacaacagggcttaaggaaacagaattctcggaagacacacaaagccacgtggctgttaggtagagcgtgctg

SEQ ID NO: 47861 - DNA, 80 bp, synthetic construct
  misc_feature 1..80: note = Artificially Synthesized Probe
  source 1..80: mol_type = other DNA
ggctgcctggctcctcggctgcgtcgtattactaatgttgggcaggtgaatctgtgacctttgtttcttcagcagttgag

SEQ ID NO: 47862 - DNA, 80 bp, synthetic construct; identical to SEQ ID NO: 23468
  misc_feature 1..80: note = Artificially Synthesized Probe
  source 1..80: mol_type = other DNA

SEQ ID NO: 47863 - DNA, 80 bp, synthetic construct
  misc_feature 1..80: note = Artificially Synthesized Probe
  source 1..80: mol_type = other DNA
ccagggaaagatgacatcaacctaaactcttgaggactcatagctgtattggagcattgttaattttctttgttgggaga

SEQ ID NO: 47864 - DNA, 80 bp, synthetic construct; identical to SEQ ID NO: 23455
  misc_feature 1..80: note = Artificially Synthesized Probe
  source 1..80: mol_type = other DNA

SEQ ID NO: 47865 - DNA, 80 bp, synthetic construct
  misc_feature 1..80: note = Artificially Synthesized Probe
  source 1..80: mol_type = other DNA
tcagcgtctggtcctgctgctgtgtgcacgccggaggcagtcctcttcagacctcatgtgttcattccttcaaagagcca

SEQ ID NO: 47866 - DNA, 80 bp, synthetic construct; identical to SEQ ID NO: 23469
  misc_feature 1..80: note = Artificially Synthesized Probe
  source 1..80: mol_type = other DNA

SEQ ID NO: 47867 - DNA, 80 bp, synthetic construct
  misc_feature 1..80: note = Artificially Synthesized Probe
  source 1..80: mol_type = other DNA
tggatgccgtccagtgtggttgctgtctggcatggaagctgtctggtgtggggactgtccagcgtggaaggtgtctggag

SEQ ID NO: 47868 - DNA, 80 bp, synthetic construct
  misc_feature 1..80: note = Artificially Synthesized Probe
  source 1..80: mol_type = other DNA
ggaagctgtccgatatggggactgtctggtgtggaagctgtctggtgtggggagtgtctggtgtggggactgtctggtgt

SEQ ID NO: 47869 - DNA, 80 bp, synthetic construct; identical to SEQ ID NO: 23470
  misc_feature 1..80: note = Artificially Synthesized Probe
  source 1..80: mol_type = other DNA

SEQ ID NO: 47870 - DNA, 80 bp, synthetic construct
  misc_feature 1..80: note = Artificially Synthesized Probe
  source 1..80: mol_type = other DNA
gggactgtctggtgtggaagctgtctggtgtggggagtgtctggtgtggaagctgtctggtgtgggactgtctgctgtgg

SEQ ID NO: 47871 - DNA, 80 bp, synthetic construct
  misc_feature 1..80: note = Artificially Synthesized Probe
  source 1..80: mol_type = other DNA
tgtctggtgtgggtactgtctggtgtggggactgtcttgtgtggaagctgtctggtgtggggactgtctggtgtggaagc

SEQ ID NO: 47872 - DNA, 80 bp, synthetic construct
  misc_feature 1..80: note = Artificially Synthesized Probe
  source 1..80: mol_type = other DNA
tgtccgatatggggactgtcctgtgtggaagctgtccgatatggggactgtctggtgtggaagctgtctggtgtggggac

SEQ ID NO: 47873 - DNA, 80 bp, synthetic construct
  misc_feature 1..80: note = Artificially Synthesized Probe
  source 1..80: mol_type = other DNA
tgtccggtgtggaatctgtccggtgtggggactgtcctgtgtggaagctgtctggtgtggggactgtctggtgtggaagc

SEQ ID NO: 47874 - DNA, 80 bp, synthetic construct
  misc_feature 1..80: note = Artificially Synthesized Probe
  source 1..80: mol_type = other DNA
tgtccggtgtggggactgtccggtgtggaatctgtccggtgtggggactgtccggtgtggaagctgtctgatatggggac

SEQ ID NO: 47875 - DNA, 80 bp, synthetic construct; identical to SEQ ID NO: 23471
  misc_feature 1..80: note = Artificially Synthesized Probe
  source 1..80: mol_type = other DNA

SEQ ID NO: 47876 - DNA, 80 bp, synthetic construct
  misc_feature 1..80: note = Artificially Synthesized Probe
  source 1..80: mol_type = other DNA
agccccactccccttccatgggcccctgggcactgaaggtgaggtctgagtacccctcccgactgtggccagtaggtcat

SEQ ID NO: 47877 - DNA, 80 bp, synthetic construct
  misc_feature 1..80: note = Artificially Synthesized Probe
  source 1..80: mol_type = other DNA
atcctgtgactccccacatattccaggtggagcgatgacctcacttgccccctctcccggccggtgggtggaagggcaag

SEQ ID NO: 47878 - DNA, 80 bp, synthetic construct
  misc_feature 1..80: note = Artificially Synthesized Probe
  source 1..80: mol_type = other DNA
ctacgtcttggagttgcgctggcgaggtggacctaaaaggaaaaagctagggtaaaagtaatctatgtagaaggttattt

SEQ ID NO: 47879 - DNA, 80 bp, synthetic construct
  misc_feature 1..80: note = Artificially Synthesized Probe
  source 1..80: mol_type = other DNA
attggtttattgattagtgatgcctgtgcattgttaagctacagagtgtgttacggtgtccagagcagcatcaccaggct

SEQ ID NO: 47880 - DNA, 80 bp, synthetic construct; identical to SEQ ID NO: 23472
  misc_feature 1..80: note = Artificially Synthesized Probe
  source 1..80: mol_type = other DNA

SEQ ID NO: 47881 - DNA, 80 bp, synthetic construct
  misc_feature 1..80: note = Artificially Synthesized Probe
  source 1..80: mol_type = other DNA
cgggaactggggccgcggcgggaactggggccgcggcgggaactggggccgcgaccggaactggggccgcgaccggaact

SEQ ID NO: 47882 - DNA, 80 bp, synthetic construct
  misc_feature 1..80: note = Artificially Synthesized Probe
  source 1..80: mol_type = other DNA
cgccgaaccacgaggccaggtgctggggatggggcgggggtggtggcacgtggcaggcacctgagcaagtctgggggatg

SEQ ID NO: 47883 - DNA, 80 bp, synthetic construct
  misc_feature 1..80: note = Artificially Synthesized Probe
  source 1..80: mol_type = other DNA
aagtagtgtctgtctgcttctgagagtgccagagccagtggccagctctctgcactaggataagggaattcgccggcctg

SEQ ID NO: 47884 - DNA, 80 bp, synthetic construct
  misc_feature 1..80: note = Artificially Synthesized Probe
  source 1..80: mol_type = other DNA
gcctcggaggagctggcctgtgggtgacactcagggaccatgccccctgtggtcccatgtgcttttcctgatgcggcgag

SEQ ID NO: 47885 - DNA, 80 bp, synthetic construct; identical to SEQ ID NO: 23473
  misc_feature 1..80: note = Artificially Synthesized Probe
  source 1..80: mol_type = other DNA

SEQ ID NO: 47886 - DNA, 80 bp, synthetic construct
  misc_feature 1..80: note = Artificially Synthesized Probe
  source 1..80: mol_type = other DNA
ccagctaagtctggaagaaacccatttggtttacatgttgacttctccctttagaatacagtgggaaattcagcaaggag

SEQ ID NO: 47887 - DNA, 80 bp, synthetic construct
  misc_feature 1..80: note = Artificially Synthesized Probe
  source 1..80: mol_type = other DNA
ttctgtgcaggagtgacttaatgtccatatgggtggaatgctgcaaggaggaacaatttcactgttgctgattaataata

SEQ ID NO: 47888 - DNA, 80 bp, synthetic construct
  misc_feature 1..80: note = Artificially Synthesized Probe
  source 1..80: mol_type = other DNA
ataggtggtgagtcttctaattatggctagtaatgacagttagctcttcctttttgcggggttctctgtcgacagcccta

SEQ ID NO: 47889 - DNA, 80 bp, synthetic construct
  misc_feature 1..80: note = Artificially Synthesized Probe
  source 1..80: mol_type = other DNA
taggtgggcctgtgggtcaggttgtgctgctgctctcatcaaggacggggtacttctggaaccactgaattgctggtcac

SEQ ID NO: 47890 - DNA, 80 bp, synthetic construct; identical to SEQ ID NO: 23474
  misc_feature 1..80: note = Artificially Synthesized Probe
  source 1..80: mol_type = other DNA

SEQ ID NO: 47891 - DNA, 80 bp, synthetic construct
  misc_feature 1..80: note = Artificially Synthesized Probe
  source 1..80: mol_type = other DNA
tcttcattgtcacctcacctgagttaaattgttgccaaaaagactatgccagggttgccagctcgcgctccggccagtgg

SEQ ID NO: 47892 - DNA, 80 bp, synthetic construct
  misc_feature 1..80: note = Artificially Synthesized Probe
  source 1..80: mol_type = other DNA
ctgtgtgggctccaggccccttggcactgtgggtgtgggtcttgggagatgctgggatttggtcgtctgtgccccccaac

SEQ ID NO: 47893 - DNA, 80 bp, synthetic construct
  misc_feature 1..80: note = Artificially Synthesized Probe
  source 1..80: mol_type = other DNA
gaatccaggggtcaccggggcctgctggacgacagagacgggagaatccaggggtgagcagtggccaccccagaaacagc

SEQ ID NO: 47894 - DNA, 80 bp, synthetic construct; identical to SEQ ID NO: 23475
  misc_feature 1..80: note = Artificially Synthesized Probe
  source 1..80: mol_type = other DNA

SEQ ID NO: 47895 - DNA, 80 bp, synthetic construct
  misc_feature 1..80: note = Artificially Synthesized Probe
  source 1..80: mol_type = other DNA
accccatatctgcaaaaagaataataatgtaataataattagttgtaatagttgtaataattagaccccatctctgcaaa

SEQ ID NO: 47896 - DNA, 80 bp, synthetic construct
  misc_feature 1..80: note = Artificially Synthesized Probe
  source 1..80: mol_type = other DNA
ccctgtctaaaaaataaaggtggaacatgaggcagagagcaaaatcttttactgcttttcattcctatcaaatgagatga

SEQ ID NO: 47897 - DNA, 80 bp, synthetic construct
  misc_feature 1..80: note = Artificially Synthesized Probe
  source 1..80: mol_type = other DNA
tggaaatgagtggttgtcttggatagttttctgtttgaaggggtgagcaccagagcttgcgtgcttttctgttgcctccc

SEQ ID NO: 47898 - DNA, 80 bp, synthetic construct
  misc_feature 1..80: note = Artificially Synthesized Probe
  source 1..80: mol_type = other DNA
gcataactctttatagacagatgagacctccaggatttctcagcagtaagaaaagtcatttgtataaggtgctatttgta

SEQ ID NO: 47899 - DNA, 80 bp, synthetic construct; identical to SEQ ID NO: 23476
  misc_feature 1..80: note = Artificially Synthesized Probe
  source 1..80: mol_type = other DNA

SEQ ID NO: 47900 - DNA, 80 bp, synthetic construct
  misc_feature 1..80: note = Artificially Synthesized Probe
  source 1..80: mol_type = other DNA
actccactttgtgtgtagttgtgctaatcagagatgtggcctctgatggaggcaggactgggggtgcccagggttccctg

SEQ ID NO: 47901 - DNA, 80 bp, synthetic construct
  misc_feature 1..80: note = Artificially Synthesized Probe
  source 1..80: mol_type = other DNA
tggtcactagctccaggctgcaggaatgtggagctctccacagttcgccactgttaacatttcacccaggagggtgtcct

SEQ ID NO: 47902 - DNA, 80 bp, synthetic construct; identical to SEQ ID NO: 23477
  misc_feature 1..80: note = Artificially Synthesized Probe
  source 1..80: mol_type = other DNA

SEQ ID NO: 47903 - DNA, 80 bp, synthetic construct
  misc_feature 1..80: note = Artificially Synthesized Probe
  source 1..80: mol_type = other DNA
tttccccatatttcttttctacataattgtagtcattgaatataaatttttaactttttttttttgagacggagtctcgc

SEQ ID NO: 47904 - DNA, 80 bp, synthetic construct
  misc_feature 1..80: note = Artificially Synthesized Probe
  source 1..80: mol_type = other DNA
ttcaccgtgttggccaggctggtctcgaactcctgacctcaagtgatctgcccacgttggcctccgaaagtgatgggatg

SEQ ID NO: 47905 - DNA, 80 bp, synthetic construct
  misc_feature 1..80: note = Artificially Synthesized Probe
  source 1..80: mol_type = other DNA
gttgtgtgttccagtggaatcattctttagtccatgcccattcctcacctttaccaggtccctgtgccttctctagaaat

SEQ ID NO: 47906 - DNA, 80 bp, synthetic construct
  misc_feature 1..80: note = Artificially Synthesized Probe
  source 1..80: mol_type = other DNA
ttcctggaaaaaacagaacccctctcataagtttggggaggatttgacaagttagcatttatgaagtacttagacctagc

SEQ ID NO: 47907 - DNA, 80 bp, synthetic construct; identical to SEQ ID NO: 23478
  misc_feature 1..80: note = Artificially Synthesized Probe
  source 1..80: mol_type = other DNA

SEQ ID NO: 47908 - DNA, 80 bp, synthetic construct
  misc_feature 1..80: note = Artificially Synthesized Probe
  source 1..80: mol_type = other DNA
tggttatgaatagcctcttgtggctgaagctgtttgcagcctggtgctttttaaaggacttttctttaaacaatagagct

SEQ ID NO: 47909 - DNA, 80 bp, synthetic construct
  misc_feature 1..80: note = Artificially Synthesized Probe
  source 1..80: mol_type = other DNA
tgttaatcgttgcatgtctttaaaagttcttcatggacttggaacagtcagagcgctgtctgctcacgagggaaggtggc

SEQ ID NO: 47910 - DNA, 80 bp, synthetic construct
  misc_feature 1..80: note = Artificially Synthesized Probe
  source 1..80: mol_type = other DNA
cgtgtgcgtgtgtctttgtgtatgtgtttgtgtttgtatgcatgtgtgtgcgtttgtgtgtgcgtgtgtttgtgtgtgtg

SEQ ID NO: 47911 - DNA, 80 bp, synthetic construct
  misc_feature 1..80: note = Artificially Synthesized Probe
  source 1..80: mol_type = other DNA
agttgcacttctgcccggctcccccgaaatcgctgggtcccacccggaggtggctgcgcccccgaccccctgcgcagatg

SEQ ID NO: 47912 - DNA, 80 bp, synthetic construct
  misc_feature 1..80: note = Artificially Synthesized Probe
  source 1..80: mol_type = other DNA
gaaaattgaagtgttctatgcgtcttcttttgcatcgtgcatattgtatttgtcgtcctctcttcagtatctctgtaaaa

SEQ ID NO: 47913 - DNA, 80 bp, synthetic construct; identical to SEQ ID NO: 23479
  misc_feature 1..80: note = Artificially Synthesized Probe
  source 1..80: mol_type = other DNA

SEQ ID NO: 47914 - DNA, 80 bp, synthetic construct
  misc_feature 1..80: note = Artificially Synthesized Probe
  source 1..80: mol_type = other DNA
tgtaaatgtagggaagctacatttcaggtactacaaatgactttacagtttataatctaaattgggtaattaaaaaaatt

SEQ ID NO: 47915 - DNA, 80 bp, synthetic construct
  misc_feature 1..80: note = Artificially Synthesized Probe
  source 1..80: mol_type = other DNA
tgccgttaatataagtgatagtatctgcatggttatgtttcaaacattagcagtttttttccctgacaaacctaggcagc

SEQ ID NO: 47916 - DNA, 80 bp, synthetic construct; identical to SEQ ID NO: 23480
  misc_feature 1..80: note = Artificially Synthesized Probe
  source 1..80: mol_type = other DNA

SEQ ID NO: 47917 - DNA, 80 bp, synthetic construct
  misc_feature 1..80: note = Artificially Synthesized Probe
  source 1..80: mol_type = other DNA
gacggcaaatgctgagaagggcgtagggcggccgtgtggacacagcaaatgccgaggagggcatggggcagccacgtgga

SEQ ID NO: 47918 - DNA, 80 bp, synthetic construct
  misc_feature 1..80: note = Artificially Synthesized Probe
  source 1..80: mol_type = other DNA
ggggcagccacgtggacacagggcaaatgctgaggagggcgtggggcggccacgtgggcatggacagcaaatgctgagga

SEQ ID NO: 47919 - DNA, 80 bp, synthetic construct; identical to SEQ ID NO: 23481
  misc_feature 1..80: note = Artificially Synthesized Probe
  source 1..80: mol_type = other DNA

SEQ ID NO: 47920 - DNA, 80 bp, synthetic construct
  misc_feature 1..80: note = Artificially Synthesized Probe
  source 1..80: mol_type = other DNA
gggccggctgcatggacacagagggcaaatgctgaggagggcgtgggccggctgcatggacacagagggcaaatgctgag

SEQ ID NO: 47921 - DNA, 80 bp, synthetic construct
  misc_feature 1..80: note = Artificially Synthesized Probe
  source 1..80: mol_type = other DNA
gatggcaaatgctaaggagggcgtggggcagtcgcgtggacacagacggcaaatgctgaggagggtgtggggcggccgcg

SEQ ID NO: 47922 - DNA, 80 bp, synthetic construct; identical to SEQ ID NO: 23456
  misc_feature 1..80: note = Artificially Synthesized Probe
  source 1..80: mol_type = other DNA

SEQ ID NO: 47923 - DNA, 80 bp, synthetic construct
  misc_feature 1..80: note = Artificially Synthesized Probe
  source 1..80: mol_type = other DNA
gtggggcaaccgcgtgggcatggacggcaagtgcggaagacggcatgggccacccgcgtggacacagatggcaaatgctg

SEQ ID NO: 47924 - DNA, 80 bp, synthetic construct
  misc_feature 1..80: note = Artificially Synthesized Probe
  source 1..80: mol_type = other DNA
cggcgtatttatttaaatgagttgaaaacttaatgtccactcaatacctgcccatataggtgttgatagcagctttattc

SEQ ID NO: 47925 - DNA, 80 bp, synthetic construct; identical to SEQ ID NO: 23482
  misc_feature 1..80: note = Artificially Synthesized Probe
  source 1..80: mol_type = other DNA

SEQ ID NO: 47926 - DNA, 80 bp, synthetic construct
  misc_feature 1..80: note = Artificially Synthesized Probe
  source 1..80: mol_type = other DNA
tgggctttagttagcgacgtacctcaacatcattacacgcctgtccaaacccatagaaggcacagcaccaggagcgaggc

SEQ ID NO: 47927 - DNA, 80 bp, synthetic construct
  misc_feature 1..80: note = Artificially Synthesized Probe
  source 1..80: mol_type = other DNA
aggcctaacacacaccgtgggctttagttagtgacgtacctcagtgttggcttctcagttgcaacaagtgttccactctg

SEQ ID NO: 47928 - DNA, 80 bp, synthetic construct
  misc_feature 1..80: note = Artificially Synthesized Probe
  source 1..80: mol_type = other DNA
tcttaaaagcaaccaaactggggtgggcacgttggctcttgcctgtaatcccagcactttgggaggccgaggcaggagga

SEQ ID NO: 47929 - DNA, 80 bp, synthetic construct; identical to SEQ ID NO: 23483
  misc_feature 1..80: note = Artificially Synthesized Probe
  source 1..80: mol_type = other DNA

SEQ ID NO: 47930 - DNA, 80 bp, synthetic construct
  misc_feature 1..80: note = Artificially Synthesized Probe
  source 1..80: mol_type = other DNA
acaaaacttagaattgataagaattaaataacaacaacaactgaggctcttggtcacactggccaccccaagtgcaatag

SEQ ID NO: 47931 - DNA, 80 bp, synthetic construct
  misc_feature 1..80: note = Artificially Synthesized Probe
  source 1..80: mol_type = other DNA
ctagaacctctccatcatcctggagaggaccggggagcagcaccgtttctgtcctgagggccctctagaacctctccatc

SEQ ID NO: 47932 - DNA, 80 bp, synthetic construct; identical to SEQ ID NO: 23484
  misc_feature 1..80: note = Artificially Synthesized Probe
  source 1..80: mol_type = other DNA

SEQ ID NO: 47933 - DNA, 80 bp, synthetic construct
  misc_feature 1..80: note = Artificially Synthesized Probe
  source 1..80: mol_type = other DNA
gccttaattgatgagccaattacctgcatactcacaagtgtaaaaagtcaggttggtaagaagtcagtgccaccaaggca

SEQ ID NO: 47934 - DNA, 80 bp, synthetic construct
  misc_feature 1..80: note = Artificially Synthesized Probe
  source 1..80: mol_type = other DNA
tgtttcatgcgtgcgttgcttatagtttgcctgggtagaaaggtaagtggcgtgaaataagacagaagggaagcgtagct

SEQ ID NO: 47935 - DNA, 80 bp, synthetic construct
  misc_feature 1..80: note = Artificially Synthesized Probe
  source 1..80: mol_type = other DNA
gtggccagagggcagcctgtcctgggcaggccagaggagaggggcaggggaagaatggtccccaggttagatttgggccg

SEQ ID NO: 47936 - DNA, 80 bp, synthetic construct
  misc_feature 1..80: note = Artificially Synthesized Probe
  source 1..80: mol_type = other DNA
gaggggcacagagcctctccctaggtgcagccctgcccaggccgcccttccctgcttccctgccagctgcctacccagag

SEQ ID NO: 47937 - DNA, 80 bp, synthetic construct; identical to SEQ ID NO: 23485
  misc_feature 1..80: note = Artificially Synthesized Probe
  source 1..80: mol_type = other DNA

SEQ ID NO: 47938 - DNA, 80 bp, synthetic construct
  misc_feature 1..80: note = Artificially Synthesized Probe
  source 1..80: mol_type = other DNA
cgggggagcctcctgggttgcaggccggaagtcccaggtcagggtgctggcaggctgtgtgtgctccccgggaatgtagg

SEQ ID NO: 47939 - DNA, 80 bp, synthetic construct
  misc_feature 1..80: note = Artificially Synthesized Probe
  source 1..80: mol_type = other DNA
tgtaaaccaattgcacctgcagtcacctgtttgcagacgagctcaccagcagactgggggtgaggatttcagcacaggga

SEQ ID NO: 47940 - DNA, 80 bp, synthetic construct
  misc_feature 1..80: note = Artificially Synthesized Probe
  source 1..80: mol_type = other DNA
tggggtctgtgatgcccaggatcccccagggcccagggcagtgtctgggatggacatgctcagcacacaccaccttgaac

SEQ ID NO: 47941 - DNA, 80 bp, synthetic construct; identical to SEQ ID NO: 23486
  misc_feature 1..80: note = Artificially Synthesized Probe
  source 1..80: mol_type = other DNA

SEQ ID NO: 47942 - DNA, 80 bp, synthetic construct
  misc_feature 1..80: note = Artificially Synthesized Probe
  source 1..80: mol_type = other DNA
aagcccctccaagtctaaactaacaagatttaaacttttggaggaatttcttgattgctttgatttcccttgtatagtag

SEQ ID NO: 47943 - DNA, 80 bp, synthetic construct
  misc_feature 1..80: note = Artificially Synthesized Probe
  source 1..80: mol_type = other DNA
tgagcagaggtgccggctccgagaacgcatgcggttcttctcagggtcatacctgtacctggcacacgggacatgcactg

SEQ ID NO: 47944 - DNA, 80 bp, synthetic construct
  misc_feature 1..80: note = Artificially Synthesized Probe
  source 1..80: mol_type = other DNA
ttcttcctgtatggggtacagtgtgggttccggtcccaacagctcatgtttctccccttgcagatatttgagagcctatt

SEQ ID NO: 47945 - DNA, 80 bp, synthetic construct
  misc_feature 1..80: note = Artificially Synthesized Probe
  source 1..80: mol_type = other DNA
gcaggggtccttgcctgggtggcagacagggccacagccccaggtccgtctagggaggggcagggttacctgtaaggaca

SEQ ID NO: 47946 - DNA, 80 bp, synthetic construct; identical to SEQ ID NO: 23487
  misc_feature 1..80: note = Artificially Synthesized Probe
  source 1..80: mol_type = other DNA

SEQ ID NO: 47947 - DNA, 80 bp, synthetic construct
  misc_feature 1..80: note = Artificially Synthesized Probe
  source 1..80: mol_type = other DNA
cccacctcagccttcggagtaggtgggaccacaggtccacgccttcaccccaggctaatttttgtacctttttttttttt

SEQ ID NO: 47948 - DNA, 80 bp, synthetic construct
  misc_feature 1..80: note = Artificially Synthesized Probe
  source 1..80: mol_type = other DNA
tacataaacattttcactgatcattttcgtcacggcatttagtcggcattgtttccgcagcacgtttatttggcaaacat

SEQ ID NO: 47949 - DNA, 80 bp, synthetic construct
  misc_feature 1..80: note = Artificially Synthesized Probe
  source 1..80: mol_type = other DNA
cccttctgaaataggttttgtttacggtcgcttgggagacagtgaggactggtttgaaagtacatagttaacaaggctca

SEQ ID NO: 47950 - DNA, 80 bp, synthetic construct
  misc_feature 1..80: note = Artificially Synthesized Probe
  source 1..80: mol_type = other DNA
agaaggacagcaacacacactcctatcagacgtatgttttaaaaataacacatttctgaatcctttttcttgattcaatt

SEQ ID NO: 47951 - DNA, 80 bp, synthetic construct; identical to SEQ ID NO: 23488
  misc_feature 1..80: note = Artificially Synthesized Probe
  source 1..80: mol_type = other DNA

SEQ ID NO: 47952 - DNA, 80 bp, synthetic construct
  misc_feature 1..80: note = Artificially Synthesized Probe
  source 1..80: mol_type = other DNA
gggttgtgtgtctgtgggttgctccctagcagggctccccctcagccccctccggagctgcctgcagccgagctgggccg

SEQ ID NO: 47953 - DNA, 80 bp, synthetic construct
  misc_feature 1..80: note = Artificially Synthesized Probe
  source 1..80: mol_type = other DNA
agcaggaggtttcctcaggaacgtgtgctgggaagaaatcccagcccttgggaaaggctggcaggggctgggttcctctc

SEQ ID NO: 47954 - DNA, 80 bp, synthetic construct; identical to SEQ ID NO: 23489
  misc_feature 1..80: note = Artificially Synthesized Probe
  source 1..80: mol_type = other DNA

SEQ ID NO: 47955 - DNA, 80 bp, synthetic construct
  misc_feature 1..80: note = Artificially Synthesized Probe
  source 1..80: mol_type = other DNA
taaaagtaaagtggatgatactgaattctcttccagaccatcagcccagccgggtgatgttcatctgctgggtgcacaga

SEQ ID NO: 47956 - DNA, 80 bp, synthetic construct
  misc_feature 1..80: note = Artificially Synthesized Probe
  source 1..80: mol_type = other DNA
tgccccaccttcctgagaagctgggattacaggtgcccgccaacacgcctggctaatttttttatttttagtagagatgg

SEQ ID NO: 47957 - DNA, 80 bp, synthetic construct; identical to SEQ ID NO: 23457
  misc_feature 1..80: note = Artificially Synthesized Probe
  source 1..80: mol_type = other DNA

SEQ ID NO: 47958 - DNA, 80 bp, synthetic construct
  misc_feature 1..80: note = Artificially Synthesized Probe
  source 1..80: mol_type = other DNA
tgactcagaattctaatgatacttattttgccccttaaaaaggttaactacaagcgcagtacagcacagaggaacttagt

SEQ ID NO: 47959 - DNA, 80 bp, synthetic construct; identical to SEQ ID NO: 23490
  misc_feature 1..80: note = Artificially Synthesized Probe
  source 1..80: mol_type = other DNA

SEQ ID NO: 47960 - DNA, 80 bp, synthetic construct
  misc_feature 1..80: note = Artificially Synthesized Probe
  source 1..80: mol_type = other DNA
cccaggtgggtccccatgtgagtcaccaggtgagttcccaggtgagtccccaggtgagtccccaggtgggtccccaggtg

SEQ ID NO: 47961 - DNA, 80 bp, synthetic construct
  misc_feature 1..80: note = Artificially Synthesized Probe
  source 1..80: mol_type = other DNA
aaaggatgatttctaggagccagagagttatgatttcttcatgatgtacctgaaaggacttaatttaagattggctaagt

SEQ ID NO: 47962 - DNA, 80 bp, synthetic construct
  misc_feature 1..80: note = Artificially Synthesized Probe
  source 1..80: mol_type = other DNA
aaagaaatattcagaacatgtgggatgaagtagctgtagaggtttcgctttctaagtttggaggtgggttgggtgctttc

SEQ ID NO: 47963 - DNA, 80 bp, synthetic construct; identical to SEQ ID NO: 23491
  misc_feature 1..80: note = Artificially Synthesized Probe
  source 1..80: mol_type = other DNA

SEQ ID NO: 47964 - DNA, 80 bp, synthetic construct
  misc_feature 1..80: note = Artificially Synthesized Probe
  source 1..80: mol_type = other DNA
cacctgcctcttggttgtttgcacggtgtttctttgtgcatagtacccgcctctctgcttgcacggtgtttctttgtgcg

SEQ ID NO: 47965 - DNA, 80 bp, synthetic construct
  misc_feature 1..80: note = Artificially Synthesized Probe
  source 1..80: mol_type = other DNA
ctttgtgtgcagcacgcgcctctctgcttacacggtgtttctttgtgcatagcaccagcctctcggttgtttgcccggtg

SEQ ID NO: 47966 - DNA, 80 bp, synthetic construct
  misc_feature 1..80: note = Artificially Synthesized Probe
  source 1..80: mol_type = other DNA
tgcatggcgtttctttgtgcacagcacccgcctctcagcttgcatggtgtttctttgtgtgtagcaccagactcttggtg

SEQ ID NO: 47967 - DNA, 80 bp, synthetic construct; identical to SEQ ID NO: 23492
  misc_feature 1..80: note = Artificially Synthesized Probe
  source 1..80: mol_type = other DNA

SEQ ID NO: 47968 - DNA, 80 bp, synthetic construct
  misc_feature 1..80: note = Artificially Synthesized Probe
  source 1..80: mol_type = other DNA
cccgacctcaagtgatccacctgcctcagcctcccaaagcgctgggattacaggcgtgagccactgcatgccccgtcaaa

SEQ ID NO: 47969 - DNA, 80 bp, synthetic construct
  misc_feature 1..80: note = Artificially Synthesized Probe
  source 1..80: mol_type = other DNA
accagccgcccacccccgtgcccagcgctgaggaggagaatgtgggtctccatgtgccctgcgggtacttggtgcctgta

SEQ ID NO: 47970 - DNA, 80 bp, synthetic construct
  misc_feature 1..80: note = Artificially Synthesized Probe
  source 1..80: mol_type = other DNA
gtggcctgtggttccctcctctgcatgccccggatgtggcctgtggttccgtagagtccgggcctgaccttcccccctcc

SEQ ID NO: 47971 - DNA, 80 bp, synthetic construct
  misc_feature 1..80: note = Artificially Synthesized Probe
  source 1..80: mol_type = other DNA
gtggttccgtagagtccgggcctgaccttccccctgcccccacccaggtcattagatgtttgtttacagagttggaaaat

SEQ ID NO: 47972 - DNA, 80 bp, synthetic construct; identical to SEQ ID NO: 23493
  misc_feature 1..80: note = Artificially Synthesized Probe
  source 1..80: mol_type = other DNA

SEQ ID NO: 47973 - DNA, 80 bp, synthetic construct
  misc_feature 1..80: note = Artificially Synthesized Probe
  source 1..80: mol_type = other DNA
agagtcctcagtggaaggtcagagccacctggggcagcacaaagggctcagagtcggccactgaggacggtgttccctgt

SEQ ID NO: 47974 - DNA, 80 bp, synthetic construct
  misc_feature 1..80: note = Artificially Synthesized Probe
  source 1..80: mol_type = other DNA
tggagcccgttctctgctgtccttacatggccctgccatgtgtagtcacgcaccagctgtgtctgcagagccacagggtt

SEQ ID NO: 47975 - DNA, 80 bp, synthetic construct
  misc_feature 1..80: note = Artificially Synthesized Probe
  source 1..80: mol_type = other DNA
ttttccttttttgcccagatctgtttctatgctgtctttcccaggaacgcgctgcaggattcccagggttcatgggatgt

SEQ ID NO: 47976 - DNA, 80 bp, synthetic construct; identical to SEQ ID NO: 23494
  misc_feature 1..80: note = Artificially Synthesized Probe
  source 1..80: mol_type = other DNA

SEQ ID NO: 47977 - DNA, 80 bp, synthetic construct
  misc_feature 1..80: note = Artificially Synthesized Probe
  source 1..80: mol_type = other DNA
cctggaaatgagggcgtgcagagtgtaggattcttggctgaaggaaaatacgtttgttttaaagtgattttcttatttta

SEQ ID NO: 47978 - DNA, 80 bp, synthetic construct
  misc_feature 1..80: note = Artificially Synthesized Probe
  source 1..80: mol_type = other DNA
ccttgttctaataaagactattttaagtcccggagtagaggagcaggtggttctccggttgcgttttgatcattgaatga

SEQ ID NO: 47979 - DNA, 80 bp, synthetic construct
  misc_feature 1..80: note = Artificially Synthesized Probe
  source 1..80: mol_type = other DNA
cagggcttccccgggacgtacagcccagccaggatccccaggcctgcggtgggaggttgcagagccctgcctggagctcc

SEQ ID NO: 47980 - DNA, 80 bp, synthetic construct
  misc_feature 1..80: note = Artificially Synthesized Probe
  source 1..80: mol_type = other DNA
tatttttaaaaatgtttgggttcaaagtttttctcttccatgggtcacttctgataggggaaataactgtgtaaagtaaa

SEQ ID NO: 47981 - DNA, 80 bp, synthetic construct
  misc_feature 1..80: note = Artificially Synthesized Probe
  source 1..80: mol_type = other DNA
cctggccagcgtgtctgcctccttctgaccttgacagactcagtttgcaccttaatttcccggaaggcggaggaaagaag

SEQ ID NO: 47982 - DNA, 80 bp, synthetic construct; identical to SEQ ID NO: 23495
  misc_feature 1..80: note = Artificially Synthesized Probe
  source 1..80: mol_type = other DNA

SEQ ID NO: 47983 - DNA, 80 bp, synthetic construct
  misc_feature 1..80: note = Artificially Synthesized Probe
  source 1..80: mol_type = other DNA
accacgcccggctaattttttgtattttttttttagtagagacagggtttcaccatgttgaccaggatggacttgatctc

SEQ ID NO: 47984 - DNA, 80 bp, synthetic construct
  misc_feature 1..80: note = Artificially Synthesized Probe
  source 1..80: mol_type = other DNA
gtgtctgccctgacacctgccactcaggaaggtggcccggaacactgaaccagcagatgcatgtgggatttgcagcgcta

SEQ ID NO: 47985 - DNA, 80 bp, synthetic construct; identical to SEQ ID NO: 23496
  misc_feature 1..80: note = Artificially Synthesized Probe
  source 1..80: mol_type = other DNA

SEQ ID NO: 47986 - DNA, 80 bp, synthetic construct
  misc_feature 1..80: note = Artificially Synthesized Probe
  source 1..80: mol_type = other DNA
agccctccgaggtgggagggtctgcttcttctgcactggcgtctcaggctgtccttggatggtctaagttcgtaccccac

SEQ ID NO: 47987 - DNA, 80 bp, synthetic construct
  misc_feature 1..80: note = Artificially Synthesized Probe
  source 1..80: mol_type = other DNA
cacatgtcacaagcgtaaccactcctctcttgaacatcttttgagcgtgccaggcggatgccccttcaggccagtcacag

SEQ ID NO: 47988 - DNA, 80 bp, synthetic construct
  misc_feature 1..80: note = Artificially Synthesized Probe
  source 1..80: mol_type = other DNA
tgctggtgcagtttatttctggctgtttcacaagccctcagtagatcacattttattagattccagtcttgaatacattt

SEQ ID NO: 47989 - DNA, 80 bp, synthetic construct; identical to SEQ ID NO: 23497
  misc_feature 1..80: note = Artificially Synthesized Probe
  source 1..80: mol_type = other DNA

SEQ ID NO: 47990 - DNA, 80 bp, synthetic construct
  misc_feature 1..80: note = Artificially Synthesized Probe
  source 1..80: mol_type = other DNA
gggtcaggacgagtggactgagggtctgataactgggtctgatttcaggcgtccaggtgtgtccaggcttggcccttgtc

SEQ ID NO: 47991 - DNA, 80 bp, synthetic construct
  misc_feature 1..80: note = Artificially Synthesized Probe
  source 1..80: mol_type = other DNA
ttccaatatcttaatgaccgtcagtccctggggactcacagtgggggtttaatgaagaaaacagaaggaatggttgtggt

SEQ ID NO: 47992 - DNA, 80 bp, synthetic construct
  misc_feature 1..80: note = Artificially Synthesized Probe
  source 1..80: mol_type = other DNA
ttgtgccaccaggtaggtccagccacggttctccattagaaattgcagattttatgtaaaattaaaaattagtggtagcg

SEQ ID NO: 47993 - DNA, 80 bp, synthetic construct
  misc_feature 1..80: note = Artificially Synthesized Probe
  source 1..80: mol_type = other DNA
aaatagtgtttctgtttgattcagattttcttttacctttttaggtaactttttgttttgatattattttaaactttaaa

SEQ ID NO: 47994 - DNA, 80 bp, synthetic construct
  misc_feature 1..80: note = Artificially Synthesized Probe
  source 1..80: mol_type = other DNA
acacagggcatcccccagcacccatgaggccatcaccaggacacggggcatcccccagcacccagggggtggtcaccagg

SEQ ID NO: 47995 - DNA, 80 bp, synthetic construct; identical to SEQ ID NO: 23498
  misc_feature 1..80: note = Artificially Synthesized Probe
  source 1..80: mol_type = other DNA

SEQ ID NO: 47996 - DNA, 80 bp, synthetic construct
  misc_feature 1..80: note = Artificially Synthesized Probe
  source 1..80: mol_type = other DNA
ccagcagtgtctctgcgctgccaccgggctcatccttgcacagctccccacaggacgcggtgtcgggacgactgatccct

SEQ ID NO: 47997 - DNA, 80 bp, synthetic construct
  misc_feature 1..80: note = Artificially Synthesized Probe
  source 1..80: mol_type = other DNA
gtgaccacccgctgggggcagagcaccatggtttatgctgggtggccttgcatctctttctcccactgacctgctcctgg

SEQ ID NO: 47998 - DNA, 80 bp, synthetic construct; identical to SEQ ID NO: 23499
  misc_feature 1..80: note = Artificially Synthesized Probe
  source 1..80: mol_type = other DNA

SEQ ID NO: 47999 - DNA, 80 bp, synthetic construct
  misc_feature 1..80: note = Artificially Synthesized Probe
  source 1..80: mol_type = other DNA
tggatattctgactttatggtttgttttctttaagtgaagatcaagtcggtcgagaggacagcgcacttgcccgctgggc

SEQ ID NO: 48000 - DNA, 80 bp, synthetic construct
  misc_feature 1..80: note = Artificially Synthesized Probe
  source 1..80: mol_type = other DNA
catcagatctaaaactctaaaaagatgtttatttactgaaaatagtaacatgggctgactgtgcagaagtttccccgggt

SEQ ID NO: 48001 - DNA, 80 bp, synthetic construct; identical to SEQ ID NO: 23458
  misc_feature 1..80: note = Artificially Synthesized Probe
  source 1..80: mol_type = other DNA

SEQ ID NO: 48002 - DNA, 80 bp, synthetic construct
  misc_feature 1..80: note = Artificially Synthesized Probe
  source 1..80: mol_type = other DNA
cacacgcccaccctgcgcttgcctgtgattcccagggagatgcagtgtctggcacccgttttgaagagggggcgggtggg

SEQ ID NO: 48003 - DNA, 80 bp, synthetic construct; identical to SEQ ID NO: 23500
  misc_feature 1..80: note = Artificially Synthesized Probe
  source 1..80: mol_type = other DNA

SEQ ID NO: 48004 - DNA, 80 bp, synthetic construct
  misc_feature 1..80: note = Artificially Synthesized Probe
  source 1..80: mol_type = other DNA
atttataatctcactccttgaaatgagagcagtctgcaacgtaaacagagcaaagaattccaaactctatttttatgtac

SEQ ID NO: 48005 - DNA, 80 bp, synthetic construct
  misc_feature 1..80: note = Artificially Synthesized Probe
  source 1..80: mol_type = other DNA
gtcccacctgcggcttcaaaggctgaaagatttttagctagatttacttgttttttttaatttttaaaggaaaagcaaga

SEQ ID NO: 48006 - DNA, 80 bp, synthetic construct
  misc_feature 1..80: note = Artificially Synthesized Probe
  source 1..80: mol_type = other DNA
aacaaagatcttagtgtaattagatgattccgctgtgtgcctattaaagcaggatcgttacaggattaaattattgtctt

SEQ ID NO: 48007 - DNA, 80 bp, synthetic construct
  misc_feature 1..80: note = Artificially Synthesized Probe
  source 1..80: mol_type = other DNA
ctttactgtggttgcagatagtaaatgctattaaaagaaagagcgtctgtaatactggagcttgacaacagcagcagata

SEQ ID NO: 48008 - DNA, 80 bp, synthetic construct; identical to SEQ ID NO: 23501
  misc_feature 1..80: note = Artificially Synthesized Probe
  source 1..80: mol_type = other DNA

SEQ ID NO: 48009 - DNA, 80 bp, synthetic construct
  misc_feature 1..80: note = Artificially Synthesized Probe
  source 1..80: mol_type = other DNA
ggttttgcttacagaacttgccttcttttttatgaaacggtttcactttcacagaaccccagtgttgcacgtgatacaga

SEQ ID NO: 48010 - DNA, 80 bp, synthetic construct
  misc_feature 1..80: note = Artificially Synthesized Probe
  source 1..80: mol_type = other DNA
gatgggctcttttcttatttctggaagtctgtgtgccaccgttgtatttttttgtgcgtcagaacgtcaacttcataagc

SEQ ID NO: 48011 - DNA, 80 bp, synthetic construct
  misc_feature 1..80: note = Artificially Synthesized Probe
  source 1..80: mol_type = other DNA
aataatgcttatgctttggtaaggtgctgttagctaccttacagccctcattgtctactagttgggacaaagaacgaaaa

SEQ ID NO: 48012 - DNA, 80 bp, synthetic construct
  misc_feature 1..80: note = Artificially Synthesized Probe
  source 1..80: mol_type = other DNA
actgttttaaggaattacattttgataaaccgtggcatgcacacttacggttttaaggaattacattttgataaaccgtg

SEQ ID NO: 48013 - DNA, 80 bp, synthetic construct; identical to SEQ ID NO: 23502
  misc_feature 1..80: note = Artificially Synthesized Probe
  source 1..80: mol_type = other DNA

SEQ ID NO: 48014 - DNA, 80 bp, synthetic construct
  misc_feature 1..80: note = Artificially Synthesized Probe
  source 1..80: mol_type = other DNA
gggcagtttaatcttacttatcccaagcaaacagaggagtaaaggtacagaaaatgccggcaaagaggtaggaaacacag

SEQ ID NO: 48015 - DNA, 80 bp, synthetic construct
  misc_feature 1..80: note = Artificially Synthesized Probe
  source 1..80: mol_type = other DNA
ttacacgttgatccatacctaggccgatgcaatggaggccgcggagcaccaggcccagggtgaatctcccgagagcaact

SEQ ID NO: 48016 - DNA, 80 bp, synthetic construct
  misc_feature 1..80: note = Artificially Synthesized Probe
  source 1..80: mol_type = other DNA
agcgggggagcttgctgcccatagaatctaaggaaatagttaatgatgcactcgctgcagggaagagcacactgaaccac

SEQ ID NO: 48017 - DNA, 80 bp, synthetic construct; identical to SEQ ID NO: 23503
  misc_feature 1..80: note = Artificially Synthesized Probe
  source 1..80: mol_type = other DNA

SEQ ID NO: 48018 - DNA, 80 bp, synthetic construct
  misc_feature 1..80: note = Artificially Synthesized Probe
  source 1..80: mol_type = other DNA
ctgcaaaataagtacaaacatattggtacgcatagtaaagtgcatcctattgccagtaaaagaaatcctcagattggata

SEQ ID NO: 48019 - DNA, 80 bp, synthetic construct
  misc_feature 1..80: note = Artificially Synthesized Probe
  source 1..80: mol_type = other DNA
attcatgaggaagatatataacagttctaaactcatatgcacctaacagcatagccttaagatatataagcaaaatataa

SEQ ID NO: 48020 - DNA, 80 bp, synthetic construct
  misc_feature 1..80: note = Artificially Synthesized Probe
  source 1..80: mol_type = other DNA
tcacttgaggtcgggagttcaagaccagccgggccaacatggtgaaaccccatctctactaaaaatacaaaaattagaca

SEQ ID NO: 48021 - DNA, 80 bp, synthetic construct; identical to SEQ ID NO: 23504
  misc_feature 1..80: note = Artificially Synthesized Probe
  source 1..80: mol_type = other DNA

SEQ ID NO: 48022 - DNA, 80 bp, synthetic construct
  misc_feature 1..80: note = Artificially Synthesized Probe
  source 1..80: mol_type = other DNA
acatttagaaattaaaaatgatatactactctgtaactcatggtcaaagataaaatggaaatgaaaatattttgtcttga

SEQ ID NO: 48023 - DNA, 80 bp, synthetic construct
  misc_feature 1..80: note = Artificially Synthesized Probe
  source 1..80: mol_type = other DNA
aggaattacattttgataaaccgtggcgtgcacacttaacggttttaaggaattacattttgataaaccgtggcatgcac

SEQ ID NO: 48024 - DNA, 80 bp, synthetic construct
  misc_feature 1..80: note = Artificially Synthesized Probe
  source 1..80: mol_type = other DNA
agttcaagaccagcctggccaagatggtgaaaccccatctctactaaaagtacaaaaattagccgggcatgatggtaggc

SEQ ID NO: 48025 - DNA, 80 bp, synthetic construct; identical to SEQ ID NO: 23505
  misc_feature 1..80: note = Artificially Synthesized Probe
  source 1..80: mol_type = other DNA

SEQ ID NO: 48026 - DNA, 80 bp, synthetic construct; identical to SEQ ID NO: 23454
  misc_feature 1..80: note = Artificially Synthesized Probe
  source 1..80: mol_type = other DNA

SEQ ID NO: 48027 - DNA, 80 bp, synthetic construct
  misc_feature 1..80: note = Artificially Synthesized Probe
  source 1..80: mol_type = other DNA
ggaaaaagttgatcaagaggatgtaactgcagtagaaatttgtaaaaatcataagaggatgctataaataactttttatc

SEQ ID NO: 48028 - DNA, 80 bp, synthetic construct
  misc_feature 1..80: note = Artificially Synthesized Probe
  source 1..80: mol_type = other DNA
ccaacataatgaatggtttgcttaactactgtgcagaacagcccaccaggctcagatgtttttatgctggggtttattga

SEQ ID NO: 48029 - DNA, 80 bp, synthetic construct
  misc_feature 1..80: note = Artificially Synthesized Probe
  source 1..80: mol_type = other DNA
gaaggttgatgctacatttccttccagaaatgtcaggaagttgaatccagcatgaccctaacaagtaagcaagagcctgt

SEQ ID NO: 48030 - DNA, 80 bp, synthetic construct; identical to SEQ ID NO: 23506
  misc_feature 1..80: note = Artificially Synthesized Probe
  source 1..80: mol_type = other DNA

SEQ ID NO: 48031 - DNA, 80 bp, synthetic construct
  misc_feature 1..80: note = Artificially Synthesized Probe
  source 1..80: mol_type = other DNA
taggtgcttgcaggtaaatgtgccacaaagaaagtgaggaccaaaggttagttgatgtaaaaacaagtttgaaatgcatt

SEQ ID NO: 48032 - DNA, 80 bp, synthetic construct
  misc_feature 1..80: note = Artificially Synthesized Probe
  source 1..80: mol_type = other DNA
gtgtcccctttgtaaggacagcacaagcaggagttaatggaccggccatccatagcggtggtggggcagggagccagttt

SEQ ID NO: 48033 - DNA, 80 bp, synthetic construct
  misc_feature 1..80: note = Artificially Synthesized Probe
  source 1..80: mol_type = other DNA
tatatgtgtgtatgtttataagaactcagaagcaatggtgagcaaaaagcaaaagcaagaggagaaagtcacagtgtgct

SEQ ID NO: 48034 - DNA, 80 bp, synthetic construct
  misc_feature 1..80: note = Artificially Synthesized Probe
  source 1..80: mol_type = other DNA
gggtagtgcacccgcatttcctagttgccttgagaggtgcccgcggggtagtgcacccgcatttcctagttgccttgaga

SEQ ID NO: 48035 - DNA, 80 bp, synthetic construct; identical to SEQ ID NO: 23507
  misc_feature 1..80: note = Artificially Synthesized Probe
  source 1..80: mol_type = other DNA

SEQ ID NO: 48036 - DNA, 80 bp, synthetic construct
  misc_feature 1..80: note = Artificially Synthesized Probe
  source 1..80: mol_type = other DNA
tgcagtgtctgattttctgtaaggaacatgagaaaagtgagtccaaagagcattacataagctagcgtggtattcagtgc

SEQ ID NO: 48037 - DNA, 80 bp, synthetic construct
  misc_feature 1..80: note = Artificially Synthesized Probe
  source 1..80: mol_type = other DNA
cactggcttggtcagaaaacacatgccagggtgactggatttaacgttcaattttagaaccacaaatctgccagcccagg

SEQ ID NO: 48038 - DNA, 80 bp, synthetic construct
  misc_feature 1..80: note = Artificially Synthesized Probe
  source 1..80: mol_type = other DNA
ggggtcacaacagcaattgcgtttctaaaacattgaaaaccacccgtttttcacacatctgaatagcctgagttctaaca

SEQ ID NO: 48039 - DNA, 80 bp, synthetic construct; identical to SEQ ID NO: 23508
  misc_feature 1..80: note = Artificially Synthesized Probe
  source 1..80: mol_type = other DNA

SEQ ID NO: 48040 - DNA, 80 bp, synthetic construct
  misc_feature 1..80: note = Artificially Synthesized Probe
  source 1..80: mol_type = other DNA
tctggagggagagtgcagacacacaccggggtgtgtaagcagtggaggttctaagacaggctggaggaacagtggagaca

SEQ ID NO: 48041 - DNA, 80 bp, synthetic construct
  misc_feature 1..80: note = Artificially Synthesized Probe
  source 1..80: mol_type = other DNA
gtgggagagtgcagacacacacggggctgtgtcggggatagaggttctaagacagtctggtgggagagtgcagacacaca

SEQ ID NO: 48042 - DNA, 80 bp, synthetic construct
  misc_feature 1..80: note = Artificially Synthesized Probe
  source 1..80: mol_type = other DNA
gagagtgcagacacacacggggctgtgtcggggatagaggttctaagacagtctggtgggagagtgcagacacacaccag

SEQ ID NO: 48043 - DNA, 80 bp, synthetic construct
  misc_feature 1..80: note = Artificially Synthesized Probe
  source 1..80: mol_type = other DNA
tcttgggcatgtgggtgagctctcaggatgatgcccagccccaaatttcaggcaattgtgcaaggacttgacccattcat

SEQ ID NO: 48044 - DNA, 80 bp, synthetic construct; identical to SEQ ID NO: 23509
  misc_feature 1..80: note = Artificially Synthesized Probe
  source 1..80: mol_type = other DNA

SEQ ID NO: 48045 - DNA, 80 bp, synthetic construct
  misc_feature 1..80: note = Artificially Synthesized Probe
  source 1..80: mol_type = other DNA
tcatgtctaattttgcatttccagtgaaagcaagtgttggctttgaatgttacttatgtgctgagatgtgtatattcctc

SEQ ID NO: 48046 - DNA, 80 bp, synthetic construct
  misc_feature 1..80: note = Artificially Synthesized Probe
  source 1..80: mol_type = other DNA
agttagagagacactcatattctgggagtttgaagaatgtcattttcattctctaaaagtcttgttagtgtcacagcatt

SEQ ID NO: 48047 - DNA, 80 bp, synthetic construct; identical to SEQ ID NO: 23510
  misc_feature 1..80: note = Artificially Synthesized Probe
  source 1..80: mol_type = other DNA

SEQ ID NO: 48048 - DNA, 80 bp, synthetic construct; identical to SEQ ID NO: 23459
  misc_feature 1..80: note = Artificially Synthesized Probe
  source 1..80: mol_type = other DNA

SEQ ID NO: 48049 - DNA, 80 bp, synthetic construct
  misc_feature 1..80: note = Artificially Synthesized Probe
  source 1..80: mol_type = other DNA
catgattcagatttccttccacccccagctctagatgatttggtaaaaccacaaacaggcacaaaacagcccacatggaa

SEQ ID NO: 48050 - DNA, 80 bp, synthetic construct
  misc_feature 1..80: note = Artificially Synthesized Probe
  source 1..80: mol_type = other DNA
tttgaaagttacgaagagcagagtgactcggagtgcaagaatgggattcccaggtccttcctgcgcagcaaccacaaaaa

SEQ ID NO: 48051 - DNA, 80 bp, synthetic construct
  misc_feature 1..80: note = Artificially Synthesized Probe
  source 1..80: mol_type = other DNA
gtagtttggggaaagcataagatattggcaaaggagaagacgtgtcttgtttcatatagttaagtatcgtcatggaaaga

SEQ ID NO: 48052 - DNA, 80 bp, synthetic construct; identical to SEQ ID NO: 23511
  misc_feature 1..80: note = Artificially Synthesized Probe
  source 1..80: mol_type = other DNA

SEQ ID NO: 48053 - DNA, 80 bp, synthetic construct
  misc_feature 1..80: note = Artificially Synthesized Probe
  source 1..80: mol_type = other DNA
cattctcttgcctcagcctcccaagtagctgggattacaggtgcctgccatgactcctagctaattttcgtatttttatt

SEQ ID NO: 48054 - DNA, 80 bp, synthetic construct
  misc_feature 1..80: note = Artificially Synthesized Probe
  source 1..80: mol_type = other DNA
tggaaaagtcttgagattagggtgtgaggtgggatgtcagagctgtaaggcgtgaattctggaattgggtggttgtgagt

SEQ ID NO: 48055 - DNA, 80 bp, synthetic construct
  misc_feature 1..80: note = Artificially Synthesized Probe
  source 1..80: mol_type = other DNA
tggaagccacacgcagtccttgtctgaggctggcgagtcccgtgttactgatagagatggtgaacggatgcccgccatag

SEQ ID NO: 48056 - DNA, 80 bp, synthetic construct; identical to SEQ ID NO: 23512
  misc_feature 1..80: note = Artificially Synthesized Probe
  source 1..80: mol_type = other DNA

SEQ ID NO: 48057 - DNA, 80 bp, synthetic construct
  misc_feature 1..80: note = Artificially Synthesized Probe
  source 1..80: mol_type = other DNA
gtaattctcctgcctcagcctctcaagtagctgggattataggcaccttccactaccagctaatttttgtatttttagta

SEQ ID NO: 48058 - DNA, 80 bp, synthetic construct
  misc_feature 1..80: note = Artificially Synthesized Probe
  source 1..80: mol_type = other DNA
tgctgtagctgagtcagacacttgatttaaactgagatttaagaagagtgctgggctctgacatcacagatggaggctcg

SEQ ID NO: 48059 - DNA, 80 bp, synthetic construct
  misc_feature 1..80: note = Artificially Synthesized Probe
  source 1..80: mol_type = other DNA
aagtccgctgagggctggagccagcccctgaccctggccagcctgcttgctgcaggagtgataagaaagtcgactcatgc

SEQ ID NO: 48060 - DNA, 80 bp, synthetic construct
  misc_feature 1..80: note = Artificially Synthesized Probe
  source 1..80: mol_type = other DNA
cagaggagcccttgactgtctgggcagtgccagtggttcagcagccctccctgctgggcgaaggagctggggaaagccag

SEQ ID NO: 48061 - DNA, 80 bp, synthetic construct
  misc_feature 1..80: note = Artificially Synthesized Probe
  source 1..80: mol_type = other DNA
gatggaagtgctgcaggcagcaccaagttttctcgttcaaagggtcacattttaaaaacgaccaaaataaaactatatgt

SEQ ID NO: 48062 - DNA, 80 bp, synthetic construct; identical to SEQ ID NO: 23513
  misc_feature 1..80: note = Artificially Synthesized Probe
  source 1..80: mol_type = other DNA

SEQ ID NO: 48063 - DNA, 80 bp, synthetic construct
  misc_feature 1..80: note = Artificially Synthesized Probe
  source 1..80: mol_type = other DNA
tagcctggtgtctggatagtgtctgtcttttgatgccatgtttagctcatttctgcatttatctctcttttttttttttg

SEQ ID NO: 48064 - DNA, 80 bp, synthetic construct
  misc_feature 1..80: note = Artificially Synthesized Probe
  source 1..80: mol_type = other DNA
ttaatagagacagggtttcaccacgttgcccaggctggtcttgaactcctgagctcaattgatcctcccacctccgcctc

SEQ ID NO: 48065 - DNA, 80 bp, synthetic construct; identical to SEQ ID NO: 23514
  misc_feature 1..80: note = Artificially Synthesized Probe
  source 1..80: mol_type = other DNA

SEQ ID NO: 48066 - DNA, 80 bp, synthetic construct
  misc_feature 1..80: note = Artificially Synthesized Probe
  source 1..80: mol_type = other DNA
taaagaaaaaccgcgcggctcggtcggtccttgctgtctcaacagcggttctcaaagggtggtccggggctcctggaatc

SEQ ID NO: 48067 - DNA, 80 bp, synthetic construct
  misc_feature 1..80: note = Artificially Synthesized Probe
  source 1..80: mol_type = other DNA
atgccatctggctgtctactagagaggggtttccagaaacgcacaatgccactttctgtttgttttggaaaatacagcaa

SEQ ID NO: 48068 - DNA, 80 bp, synthetic construct
  misc_feature 1..80: note = Artificially Synthesized Probe
  source 1..80: mol_type = other DNA
taaaaccctggtaaacaaaagccatttgggctctccataatttttaagagcgtccagggcccctgagaccggaatgcttg

SEQ ID NO: 48069 - DNA, 80 bp, synthetic construct
  misc_feature 1..80: note = Artificially Synthesized Probe
  source 1..80: mol_type = other DNA
ccacacagcttctggagcagccggctcatccgccctgttgtgcttgggccatcagaagccacagccacagccgccccctg

SEQ ID NO: 48070 - DNA, 80 bp, synthetic construct; identical to SEQ ID NO: 23515
  misc_feature 1..80: note = Artificially Synthesized Probe
  source 1..80: mol_type = other DNA

SEQ ID NO: 48071 - DNA, 80 bp, synthetic construct
  misc_feature 1..80: note = Artificially Synthesized Probe
  source 1..80: mol_type = other DNA
ggctgaggagaattcctttctctggaagctgtggtcctgtgttatgtagaataggtcacttttcagctgcagctggagtc

SEQ ID NO: 48072 - DNA, 80 bp, synthetic construct
  misc_feature 1..80: note = Artificially Synthesized Probe
  source 1..80: mol_type = other DNA
tgatactctgtccggggaccctgaacggcgctggctgaaaaccaagggttcacagcccaaatctggggttgagaaagagc

SEQ ID NO: 48073 - DNA, 80 bp, synthetic construct
  misc_feature 1..80: note = Artificially Synthesized Probe
  source 1..80: mol_type = other DNA
gggatgggggacagcattgcaagtgatggagatgggctggggcaggcgacgcgggtgtgaggccgtgcgtgttgtgtggt

SEQ ID NO: 48074 - DNA, 80 bp, synthetic construct; identical to SEQ ID NO: 23516
  misc_feature 1..80: note = Artificially Synthesized Probe
  source 1..80: mol_type = other DNA

SEQ ID NO: 48075 - DNA, 80 bp, synthetic construct
  misc_feature 1..80: note = Artificially Synthesized Probe
  source 1..80: mol_type = other DNA
gacatggcttccgagtctgacatccgcagcgtgctgcaccccgaccctccctcaggtgtgtcccgtgcgtgtctgcagca

SEQ ID NO: 48076 - DNA, 80 bp, synthetic construct
  misc_feature 1..80: note = Artificially Synthesized Probe
  source 1..80: mol_type = other DNA
gaggttaaaaggctgaactggagctgtgagcgtctgcagttagttgttttgccatttaattcgaggcgagttgtttgaca

SEQ ID NO: 48077 - DNA, 80 bp, synthetic construct
  misc_feature 1..80: note = Artificially Synthesized Probe
  source 1..80: mol_type = other DNA
aaacaaaacctagcccagaactgcacgtgacacatgcgctcacaagaaccagactacttgacagtattcttttaaaacag

SEQ ID NO: 48078 - DNA, 80 bp, synthetic construct
  misc_feature 1..80: note = Artificially Synthesized Probe
  source 1..80: mol_type = other DNA
aagtctctcatcgcacagggtccgtgcctgcaggtcttcttgcggggaggacacggggttggggggggcggccacatctt

SEQ ID NO: 48079 - DNA, 80 bp, synthetic construct; identical to SEQ ID NO: 23517
  misc_feature 1..80: note = Artificially Synthesized Probe
  source 1..80: mol_type = other DNA

SEQ ID NO: 48080 - DNA, 80 bp, synthetic construct
  misc_feature 1..80: note = Artificially Synthesized Probe
  source 1..80: mol_type = other DNA
cagctgaagttccaggtttttctaaacatctaacgaaggcgcagtggtctgtgcagttatgtgtggaaaaggcaggtggt

SEQ ID NO: 48081 - DNA, 80 bp, synthetic construct
  misc_feature 1..80: note = Artificially Synthesized Probe
  source 1..80: mol_type = other DNA
catttcctggttgtttctccagctttctaatgtgcctgtctggtgctaggacgtgggtagcatttgctaatatctgtact

SEQ ID NO: 48082 - DNA, 80 bp, synthetic construct
  misc_feature 1..80: note = Artificially Synthesized Probe
  source 1..80: mol_type = other DNA
gtttctccatgatttaataggaaggaatgaaaggtgcagcgttttgccagctgatgaaaatatctggggagcgagtcata

SEQ ID NO: 48083 - DNA, 80 bp, synthetic construct; identical to SEQ ID NO: 23518
  misc_feature 1..80: note = Artificially Synthesized Probe
  source 1..80: mol_type = other DNA

SEQ ID NO: 48084 - DNA, 80 bp, synthetic construct
  misc_feature 1..80: note = Artificially Synthesized Probe
  source 1..80: mol_type = other DNA
gcccagattccaggagctgatcacaactgcccacctggagcccatgccaggcccctgagccaggatttgcaggctggcag

SEQ ID NO: 48085 - DNA, 80 bp, synthetic construct
  misc_feature 1..80: note = Artificially Synthesized Probe
  source 1..80: mol_type = other DNA
tgcctgtaatcccagcatttttggaggccgaggcgggcagatcacgaggtcaggagatcaagaccatcctggctaacacg

SEQ ID NO: 48086 - DNA, 80 bp, synthetic construct
  misc_feature 1..80: note = Artificially Synthesized Probe
  source 1..80: mol_type = other DNA
gggcgacagagcaagagtccatctcaagaaaaaaaaaaaaaagggcaaatccctaacctcccaacccgagtttcctaagc

SEQ ID NO: 48087 - DNA, 80 bp, synthetic construct; identical to SEQ ID NO: 23519
  misc_feature 1..80: note = Artificially Synthesized Probe
  source 1..80: mol_type = other DNA

SEQ ID NO: 48088 - DNA, 80 bp, synthetic construct
  misc_feature 1..80: note = Artificially Synthesized Probe
  source 1..80: mol_type = other DNA
acctcctgggttcaggcgatcctcctgcctcagcctcctcactagctgggagtacaggtgctcacaaccatgcctggcta

SEQ ID NO: 48089 - DNA, 80 bp, synthetic construct
  misc_feature 1..80: note = Artificially Synthesized Probe
  source 1..80: mol_type = other DNA
caccccacccaactgtgaatttagtttttgtttaaactgttttgagttttggaaagctgtgcttcttaaggcatccagtg

SEQ ID NO: 48090 - DNA, 80 bp, synthetic construct
  misc_feature 1..80: note = Artificially Synthesized Probe
  source 1..80: mol_type = other DNA
tattctaaaacactaagattccaaaatattgccactttgctatctagctattcaaatggcacttctcctttttgaagtta

SEQ ID NO: 48091 - DNA, 80 bp, synthetic construct
  misc_feature 1..80: note = Artificially Synthesized Probe
  source 1..80: mol_type = other DNA
ttactgtactgtagtgttgtgaatatattatttgaatgtaaaattcatgcattttgactttttttttaagatcacagatc

SEQ ID NO: 48092 - DNA, 80 bp, synthetic construct; identical to SEQ ID NO: 23520
  misc_feature 1..80: note = Artificially Synthesized Probe
  source 1..80: mol_type = other DNA

SEQ ID NO: 48093 - DNA, 80 bp, synthetic construct
  misc_feature 1..80: note = Artificially Synthesized Probe
  source 1..80: mol_type = other DNA
ggactcctggtgacaagaggagtatcagacgaaggcaggggagggaggctgtgtgcgcgcacctgtaatcctgggagatt

SEQ ID NO: 48094 - DNA, 80 bp, synthetic construct
  misc_feature 1..80: note = Artificially Synthesized Probe
  source 1..80: mol_type = other DNA
agtgtagctgtgagaaaggggaggaacttgcattcttcgtgggagtcagtcacacagtttttactttcacagagacagag

SEQ ID NO: 48095 - DNA, 80 bp, synthetic construct
  misc_feature 1..80: note = Artificially Synthesized Probe
  source 1..80: mol_type = other DNA
agggtaaaaggaagagaaaacttgaggaaccagagtgacagcaccaagtttgcaggcctttagcagcaggggctgatact

SEQ ID NO: 48096 - DNA, 80 bp, synthetic construct; identical to SEQ ID NO: 23521
  misc_feature 1..80: note = Artificially Synthesized Probe
  source 1..80: mol_type = other DNA

SEQ ID NO: 48097 - DNA, 80 bp, synthetic construct
  misc_feature 1..80: note = Artificially Synthesized Probe
  source 1..80: mol_type = other DNA
cgtgcccggtccctggtgtgtttcactgcatttcatccttgcaaatcccgttgccatccttgtgtactctgtaaggaagc

SEQ ID NO: 48098 - DNA, 80 bp, synthetic construct
  misc_feature 1..80: note = Artificially Synthesized Probe
  source 1..80: mol_type = other DNA
acagcctttaccaggaacagaggatctagcgctttctcctgtgcatgctgtccagctcacccacctcacttcatgctcag

SEQ ID NO: 48099 - DNA, 80 bp, synthetic construct
  misc_feature 1..80: note = Artificially Synthesized Probe
  source 1..80: mol_type = other DNA
cactctgagaacttactgtagcgatgaagccgaaaaccaaaaatagcaaaagaagggaaaagcacaggggaaatgcttcc

SEQ ID NO: 48100 - DNA, 80 bp, synthetic construct
  misc_feature 1..80: note = Artificially Synthesized Probe
  source 1..80: mol_type = other DNA
agaccctgagtggggtgtgaggggtctgtgaggagatactgagtggggtgtgaggggtctgtgaggagacactgagtggg

SEQ ID NO: 48101 - DNA, 80 bp, synthetic construct; identical to SEQ ID NO: 23522
  misc_feature 1..80: note = Artificially Synthesized Probe
  source 1..80: mol_type = other DNA

SEQ ID NO: 48102 - DNA, 80 bp, synthetic construct
  misc_feature 1..80: note = Artificially Synthesized Probe
  source 1..80: mol_type = other DNA
agttgcaaggaaacacggagtggggtgcgggtcatcaggagacagtgattggggtgaggggtctgtgatgagacactgtg

SEQ ID NO: 48103 - DNA, 80 bp, synthetic construct
  misc_feature 1..80: note = Artificially Synthesized Probe
  source 1..80: mol_type = other DNA
ttgcgaggagacacttagtggggcgagggttgcgaggagacagtgagtggggtgagggtttgcgaggagacacttagtgg

SEQ ID NO: 48104 - DNA, 80 bp, synthetic construct; identical to SEQ ID NO: 23460
  misc_feature 1..80: note = Artificially Synthesized Probe
  source 1..80: mol_type = other DNA

SEQ ID NO: 48105 - DNA, 80 bp, synthetic construct
  misc_feature 1..80: note = Artificially Synthesized Probe
  source 1..80: mol_type = other DNA
atactgaggtgatagttttgaggagacagtggggtgagagttgtgaggagacactgagtgtggagggctgtgaggaggca

SEQ ID NO: 48106 - DNA, 80 bp, synthetic construct; identical to SEQ ID NO: 23523
  misc_feature 1..80: note = Artificially Synthesized Probe
  source 1..80: mol_type = other DNA

SEQ ID NO: 48107 - DNA, 80 bp, synthetic construct
  misc_feature 1..80: note = Artificially Synthesized Probe
  source 1..80: mol_type = other DNA
tgtgaggagacactgagtggggtgagagttatgaggagacactgagttgggtgagggttgtgaggagacagtggggtgag

SEQ ID NO: 48108 - DNA, 80 bp, synthetic construct
  misc_feature 1..80: note = Artificially Synthesized Probe
  source 1..80: mol_type = other DNA
gagacactgagtggggtgtgaggggtctgtgaggagacactgtgagtggggtgagggttgtgaggagacgctgagttggg

SEQ ID NO: 48109 - DNA, 80 bp, synthetic construct
  misc_feature 1..80: note = Artificially Synthesized Probe
  source 1..80: mol_type = other DNA
gagtgggtaagagttgtgaggagacactgagtggggtgaggggtatgtgaggagacagtgatgtgaggcatctgtgagga

SEQ ID NO: 48110 - DNA, 80 bp, synthetic construct
  misc_feature 1..80: note = Artificially Synthesized Probe
  source 1..80: mol_type = other DNA
taaaaagaaacaacctttgcacatgaagaaaatctacctgtggccatatgacaagcaccggcaaatctggaaatgaccta

SEQ ID NO: 48111 - DNA, 80 bp, synthetic construct; identical to SEQ ID NO: 23524
  misc_feature 1..80: note = Artificially Synthesized Probe
  source 1..80: mol_type = other DNA

SEQ ID NO: 48112 - DNA, 80 bp, synthetic construct
  misc_feature 1..80: note = Artificially Synthesized Probe
  source 1..80: mol_type = other DNA
gaggagggtttgtgagaagacactaggtggggtgaggtttgtgaggagacactgagtgtggtgagggtttgtgaggagac

SEQ ID NO: 48113 - DNA, 80 bp, synthetic construct
  misc_feature 1..80: note = Artificially Synthesized Probe
  source 1..80: mol_type = other DNA
ggagtctgtgcggagacaccgagtgtggtgtgaggggtctgtgaggagtcaccgagtgccgtgtgagttgtgagaaaacg

SEQ ID NO: 48114 - DNA, 80 bp, synthetic construct; identical to SEQ ID NO: 23525
  misc_feature 1..80: note = Artificially Synthesized Probe
  source 1..80: mol_type = other DNA

SEQ ID NO: 48115 - DNA, 80 bp, synthetic construct
  misc_feature 1..80: note = Artificially Synthesized Probe
  source 1..80: mol_type = other DNA
gaggagacactgagtggggtgagagttttgaggagtcactgagtgtgtaagggtctgtgaggagacactgagtttggcga

SEQ ID NO: 48116 - DNA, 80 bp, synthetic construct
  misc_feature 1..80: note = Artificially Synthesized Probe
  source 1..80: mol_type = other DNA
ggtgtgtgcacatatcagaggaaagaggtttgacctttttgttgtatggcacttttccaagggcctgtctgttgggtact

SEQ ID NO: 48117 - DNA, 80 bp, synthetic construct
  misc_feature 1..80: note = Artificially Synthesized Probe
  source 1..80: mol_type = other DNA
agttcagttttccttttctttgaagggtggattttaatgtctatttccatcttgcttatcccaccgtaatggttcagtga

SEQ ID NO: 48118 - DNA, 80 bp, synthetic construct
  misc_feature 1..80: note = Artificially Synthesized Probe
  source 1..80: mol_type = other DNA
agctttctttattgtagtcatgattcacatcgattttgttttcctcctgccaaatgtgttgtccatgagagttttctctt

SEQ ID NO: 48119 - DNA, 80 bp, synthetic construct; identical to SEQ ID NO: 23526
  misc_feature 1..80: note = Artificially Synthesized Probe
  source 1..80: mol_type = other DNA

SEQ ID NO: 48120 - DNA, 80 bp, synthetic construct
  misc_feature 1..80: note = Artificially Synthesized Probe
  source 1..80: mol_type = other DNA
ttcaggaaagatgatttaagaagtaaagtaatatgatgaaaagctgcggaaagagaaggcatacacggggctacaaggtg

SEQ ID NO: 48121 - DNA, 80 bp, synthetic construct
  misc_feature 1..80: note = Artificially Synthesized Probe
  source 1..80: mol_type = other DNA
ccctggctttgtccagttgccccatgaccttcatgccagggaccctccctgtgggggctgcattcaggatggatttctcc

SEQ ID NO: 48122 - DNA, 80 bp, synthetic construct
  misc_feature 1..80: note = Artificially Synthesized Probe
  source 1..80: mol_type = other DNA
gactgacatcacgtgcagtagccatgaaacccagaatattggttttgtttttgtattttaatattatacctattccagat

SEQ ID NO: 48123 - DNA, 80 bp, synthetic construct; identical to SEQ ID NO: 23527
  misc_feature 1..80: note = Artificially Synthesized Probe
  source 1..80: mol_type = other DNA

SEQ ID NO: 48124 - DNA, 80 bp, synthetic construct
  misc_feature 1..80: note = Artificially Synthesized Probe
  source 1..80: mol_type = other DNA
gtgtgtgtgtgtgtgtgtgtgtgtgtgtgtgtgtgtgtttaatcccagcgatacctgtattttttaaatacattagtatt

SEQ ID NO: 48125 - DNA, 80 bp, synthetic construct
  misc_feature 1..80: note = Artificially Synthesized Probe
  source 1..80: mol_type = other DNA
gttgtgaaaaatgctctttgcccgctaggtggcaacgcagtcccttcaaatagcataatccagggctgcaggtagcctga

SEQ ID NO: 48126 - DNA, 80 bp, synthetic construct
  misc_feature 1..80: note = Artificially Synthesized Probe
  source 1..80: mol_type = other DNA
gtttaggagaaactctattgccctgttttgctctgttttccatgaattggcaaattggaagtacaatgatcactagctgg

SEQ ID NO: 48127 - DNA, 80 bp, synthetic construct; identical to SEQ ID NO: 23528
  misc_feature 1..80: note = Artificially Synthesized Probe
  source 1..80: mol_type = other DNA

SEQ ID NO: 48128 - DNA, 80 bp, synthetic construct
  misc_feature 1..80: note = Artificially Synthesized Probe
  source 1..80: mol_type = other DNA
taagtgttgctaataacattcattgatcaagactggaactattttttatcctgaattcataggaagtatcatctacctga

SEQ ID NO: 48129 - DNA, 80 bp, synthetic construct
  misc_feature 1..80: note = Artificially Synthesized Probe
  source 1..80: mol_type = other DNA
ggtttaagacattatataattgtattaatggggcgaagtatgttttgtacctgtaatgttatttaattaggctacccttg

SEQ ID NO: 48130 - DNA, 80 bp, synthetic construct
  misc_feature 1..80: note = Artificially Synthesized Probe
  source 1..80: mol_type = other DNA
gagagatgagctgagcccacgtccacagaagcccattcccagtgggaggaacagcgtctgcgcggccctgaggtggtgca

SEQ ID NO: 48131 - DNA, 80 bp, synthetic construct
  misc_feature 1..80: note = Artificially Synthesized Probe
  source 1..80: mol_type = other DNA
aagaactacgtagatgctcttaagaggattttggaggtacttaagtgtcgtgttacataatacatacatttctattattc

SEQ ID NO: 48132 - DNA, 80 bp, synthetic construct; identical to SEQ ID NO: 23529
  misc_feature 1..80: note = Artificially Synthesized Probe
  source 1..80: mol_type = other DNA

SEQ ID NO: 48133 - DNA, 80 bp, synthetic construct
  misc_feature 1..80: note = Artificially Synthesized Probe
  source 1..80: mol_type = other DNA
ttgaacccgggaggcagaggttgcagtgagctgagatcatgccattgcactctagcacgggtgacagactgagactgtct

SEQ ID NO: 48134 - DNA, 80 bp, synthetic construct
  misc_feature 1..80: note = Artificially Synthesized Probe
  source 1..80: mol_type = other DNA
caaaacaagacccaggctctgaaaaagaaaagtctgaactgtctttgctcattttgtcttagcaatatgagaagccgctg

SEQ ID NO: 48135 - DNA, 80 bp, synthetic construct
  misc_feature 1..80: note = Artificially Synthesized Probe
  source 1..80: mol_type = other DNA
cggtaattaagctgggacacctggatgtccatggggctctccatgcacctgtcctctcttcccttcttaggctgatgttt

SEQ ID NO: 48136 - DNA, 80 bp, synthetic construct
  misc_feature 1..80: note = Artificially Synthesized Probe
  source 1..80: mol_type = other DNA
tctgaggacatttaacaatatgcactttatcgagtcttggatgccccattagacgatttgctgaagctttttgttgttga

SEQ ID NO: 48137 - DNA, 80 bp, synthetic construct; identical to SEQ ID NO: 23530
  misc_feature 1..80: note = Artificially Synthesized Probe
  source 1..80: mol_type = other DNA

SEQ ID NO: 48138 - DNA, 80 bp, synthetic construct
  misc_feature 1..80: note = Artificially Synthesized Probe
  source 1..80: mol_type = other DNA
ttgtatattggttggattctacctagatgtagaggattatgagtgaaacagattggtttctgtaattatttgagactatg

SEQ ID NO: 48139 - DNA, 80 bp, synthetic construct
  misc_feature 1..80: note = Artificially Synthesized Probe
  source 1..80: mol_type = other DNA
tcaaagatatttgcataataccgtttatggatccttaaaaaaagagaaatattggatatttattttgttattggattttt

SEQ ID NO: 48140 - DNA, 80 bp, synthetic construct
  misc_feature 1..80: note = Artificially Synthesized Probe
  source 1..80: mol_type = other DNA
tcctaaaggacttacggtttcttagaataacatggagtgatttttctctctttgaatattgatagcaagggcaaatgttt

SEQ ID NO: 48141 - DNA, 80 bp, synthetic construct; identical to SEQ ID NO: 23461
  misc_feature 1..80: note = Artificially Synthesized Probe
  source 1..80: mol_type = other DNA

SEQ ID NO: 48142 - DNA, 80 bp, synthetic construct; identical to SEQ ID NO: 23531
  misc_feature 1..80: note = Artificially Synthesized Probe
  source 1..80: mol_type = other DNA

SEQ ID NO: 48143 - DNA, 80 bp, synthetic construct
  misc_feature 1..80: note = Artificially Synthesized Probe
  source 1..80: mol_type = other DNA
ctgtccccccgcaccccacctgtttaccctgcaccccagctgtcccccgcgccgcagctgtcccccccacaccccaccta

SEQ ID NO: 48144 - DNA, 80 bp, synthetic construct
  misc_feature 1..80: note = Artificially Synthesized Probe
  source 1..80: mol_type = other DNA
tatgaaaacatcacagtgaccgaaagagtattttgagggcgagtttcaaatcttctgttttatgttggaaaagggatatc

SEQ ID NO: 48145 - DNA, 80 bp, synthetic construct
  misc_feature 1..80: note = Artificially Synthesized Probe
  source 1..80: mol_type = other DNA
taagcgcttttttttttcatttgggttttaacaccatctgataacaagttacatgtcaaagcttgactctgaatgcagtt

SEQ ID NO: 48146 - DNA, 80 bp, synthetic construct; identical to SEQ ID NO: 23532
  misc_feature 1..80: note = Artificially Synthesized Probe
  source 1..80: mol_type = other DNA

SEQ ID NO: 48147 - DNA, 80 bp, synthetic construct
  misc_feature 1..80: note = Artificially Synthesized Probe
  source 1..80: mol_type = other DNA
cagtgatggggagcacgtcccctgatgggtgtgggttagcgttatttaatcagcaggcaggcagggcttccccagtcgtg

SEQ ID NO: 48148 - DNA, 80 bp, synthetic construct
  misc_feature 1..80: note = Artificially Synthesized Probe
  source 1..80: mol_type = other DNA
ttggaaactgctgctacctggagcgagtgaacacagggcaagtattctcgcccacagcaacgtgtcattgaagctggaat

SEQ ID NO: 48149 - DNA, 80 bp, synthetic construct
  misc_feature 1..80: note = Artificially Synthesized Probe
  source 1..80: mol_type = other DNA
gtgggctctgtcctaagggatcggatcgcagttcccactctcgacagttgtgggctctgtcctaagggatcggatcgcag

SEQ ID NO: 48150 - DNA, 80 bp, synthetic construct; identical to SEQ ID NO: 23533
  misc_feature 1..80: note = Artificially Synthesized Probe
  source 1..80: mol_type = other DNA

SEQ ID NO: 48151 - DNA, 80 bp, synthetic construct
  misc_feature 1..80: note = Artificially Synthesized Probe
  source 1..80: mol_type = other DNA
cctgtgagctgagaggccgaggcacagccaggtctgtgctgtctgccctctccactgcacagccccctcagcagagggac

SEQ ID NO: 48152 - DNA, 80 bp, synthetic construct
  misc_feature 1..80: note = Artificially Synthesized Probe
  source 1..80: mol_type = other DNA
tggccagaacacagacacccaaggacagcccctggaatctgcccagtcccctggcccggggaattcacccctggagctga

SEQ ID NO: 48153 - DNA, 80 bp, synthetic construct
  misc_feature 1..80: note = Artificially Synthesized Probe
  source 1..80: mol_type = other DNA
catggagggacagtggcagccgtggagggacagtgtgtgatggctgtggagagacagtgtgacatctgtggagggacagt

SEQ ID NO: 48154 - DNA, 80 bp, synthetic construct
  misc_feature 1..80: note = Artificially Synthesized Probe
  source 1..80: mol_type = other DNA
cccaggggcagggagggcatggcagccctgcagggaggtgaccccggtgccttcccccacagcaggaacaggaggccagc

SEQ ID NO: 48155 - DNA, 80 bp, synthetic construct
  misc_feature 1..80: note = Artificially Synthesized Probe
  source 1..80: mol_type = other DNA
gaatggctgcccctcgggcctcctcatctcctctctaggcagttacaggaggtggagggtagaggcaggtggagacctgc

SEQ ID NO: 48156 - DNA, 80 bp, synthetic construct; identical to SEQ ID NO: 23534
  misc_feature 1..80: note = Artificially Synthesized Probe
  source 1..80: mol_type = other DNA

SEQ ID NO: 48157 - DNA, 80 bp, synthetic construct
  misc_feature 1..80: note = Artificially Synthesized Probe
  source 1..80: mol_type = other DNA
ctgtccactggaccctcatttctctaaactaaggattctcaattggatacctgtggctgtgaacagtaggcctgttctga

SEQ ID NO: 48158 - DNA, 80 bp, synthetic construct
  misc_feature 1..80: note = Artificially Synthesized Probe
  source 1..80: mol_type = other DNA
ccagggaggatatttcaaaggagagtctatgctggtttctgcctgtgttgatttttcaatgattgctcagcttgcttttt

SEQ ID NO: 48159 - DNA, 80 bp, synthetic construct
  misc_feature 1..80: note = Artificially Synthesized Probe
  source 1..80: mol_type = other DNA
cattctttttaaataaatgtagtcatcaaagtatgaaaaaggatacatactaaaatatcgacatgggctctttccatggt

SEQ ID NO: 48160 - DNA, 80 bp, synthetic construct; identical to SEQ ID NO: 23535
  misc_feature 1..80: note = Artificially Synthesized Probe
  source 1..80: mol_type = other DNA

SEQ ID NO: 48161 - DNA, 80 bp, synthetic construct
  misc_feature 1..80: note = Artificially Synthesized Probe
  source 1..80: mol_type = other DNA
gcgatgcgccagtgagtccctgggtcgttcttggtcgccagggacgacagcaagtgctgactgtgttgtgaggtcacaca

SEQ ID NO: 48162 - DNA, 80 bp, synthetic construct
  misc_feature 1..80: note = Artificially Synthesized Probe
  source 1..80: mol_type = other DNA
gtaagtaagtaagtaactatttttgcctaggttttttccgaaatacattcttttagacagaaggggtgggcgggctgctg

SEQ ID NO: 48163 - DNA, 80 bp, synthetic construct; identical to SEQ ID NO: 23536
  misc_feature 1..80: note = Artificially Synthesized Probe
  source 1..80: mol_type = other DNA

SEQ ID NO: 48164 - DNA, 80 bp, synthetic construct
  misc_feature 1..80: note = Artificially Synthesized Probe
  source 1..80: mol_type = other DNA
tttttgaaaacatacttctaaatatttaagttctctgaggaaggacattcttaaactcagaattccagttatgtaataaa

SEQ ID NO: 48165 - DNA, 80 bp, synthetic construct
  misc_feature 1..80: note = Artificially Synthesized Probe
  source 1..80: mol_type = other DNA
cgtggaggggccgtgcacagtgagtggtgagcgagttgggacgcgaaggctgctctgtgctgctgggattgctggtgtca

SEQ ID NO: 48166 - DNA, 80 bp, synthetic construct
  misc_feature 1..80: note = Artificially Synthesized Probe
  source 1..80: mol_type = other DNA
ctgttgcccctgaaggagaaaatggtctttgccttgatctgacaaaacaaactgcagatcctagatgtgccgagcagttt

SEQ ID NO: 48167 - DNA, 80 bp, synthetic construct
  misc_feature 1..80: note = Artificially Synthesized Probe
  source 1..80: mol_type = other DNA
ctacctcaggtgtgggtactcagggcacccgggatggggcgaggagacaggctgcagagagtcagcaggtacaagcacat

SEQ ID NO: 48168 - DNA, 80 bp, synthetic construct
  misc_feature 1..80: note = Artificially Synthesized Probe
  source 1..80: mol_type = other DNA
ctccggtcttgcctgcgttcttcctggttagtgctcccagaccttctttctaagacaggtgctgtgaagccacagctgtc

SEQ ID NO: 48169 - DNA, 80 bp, synthetic construct; identical to SEQ ID NO: 23537
  misc_feature 1..80: note = Artificially Synthesized Probe
  source 1..80: mol_type = other DNA

SEQ ID NO: 48170 - DNA, 80 bp, synthetic construct
  misc_feature 1..80: note = Artificially Synthesized Probe
  source 1..80: mol_type = other DNA
caccagtgtgtgggtttggtgcagaactagtgttaagattgttcttttttgccttgatagaattcgttgtgactcatagg

SEQ ID NO: 48171 - DNA, 80 bp, synthetic construct
  misc_feature 1..80: note = Artificially Synthesized Probe
  source 1..80: mol_type = other DNA
caagacgcagaaccacatttttttttctcactctaagttctgggatatgtgtgcagaatgtgcaggtttgttccataggt

SEQ ID NO: 48172 - DNA, 80 bp, synthetic construct; identical to SEQ ID NO: 23538
  misc_feature 1..80: note = Artificially Synthesized Probe
  source 1..80: mol_type = other DNA

SEQ ID NO: 48173 - DNA, 80 bp, synthetic construct
  misc_feature 1..80: note = Artificially Synthesized Probe
  source 1..80: mol_type = other DNA
tcctcgtgcttgtctgaaaccttaactgggagaagaggtagctcaactccctttttttaaagactactttttaagagaaa

SEQ ID NO: 48174 - DNA, 80 bp, synthetic construct
  misc_feature 1..80: note = Artificially Synthesized Probe
  source 1..80: mol_type = other DNA
aggagggcgtacccttgtgctgtgcattcggtgggttcggatgaacgtttagtgacatggacccaccacgatagtgtcat

SEQ ID NO: 48175 - DNA, 80 bp, synthetic construct
  misc_feature 1..80: note = Artificially Synthesized Probe
  source 1..80: mol_type = other DNA
gtgcatgggttcatctgtctgactcaacttgagaaggagaatctatcatcatcgtgagcatcgttccaagtgcacagtat

SEQ ID NO: 48176 - DNA, 80 bp, synthetic construct
  misc_feature 1..80: note = Artificially Synthesized Probe
  source 1..80: mol_type = other DNA
catcatcccttcccaagaactgactttatttttccccaggatggcagatgccactgcctcctttccattgtcagctggcg

SEQ ID NO: 48177 - DNA, 80 bp, synthetic construct
  misc_feature 1..80: note = Artificially Synthesized Probe
  source 1..80: mol_type = other DNA
gatcctatggggctgtggccctgggtcaggagtgccctggagggtggcacatggccgggtggagttggatgggctccctt

SEQ ID NO: 48178 - DNA, 80 bp, synthetic construct; identical to SEQ ID NO: 23539
  misc_feature 1..80: note = Artificially Synthesized Probe
  source 1..80: mol_type = other DNA

SEQ ID NO: 48179 - DNA, 80 bp, synthetic construct
  misc_feature 1..80: note = Artificially Synthesized Probe
  source 1..80: mol_type = other DNA
ccaatgtggaaattgtatgtaaaaccttaacagcctgtcttaacagcattttcttaggaaagagattcatacattcatta

SEQ ID NO: 48180 - DNA, 80 bp, synthetic construct
  misc_feature 1..80: note = Artificially Synthesized Probe
  source 1..80: mol_type = other DNA
tgggaggctgaggtgggaagatcgctggaacccaggagttcaagaccagcctgggcatgatagtgagaacccatatctaa

SEQ ID NO: 48181 - DNA, 80 bp, synthetic construct
  misc_feature 1..80: note = Artificially Synthesized Probe
  source 1..80: mol_type = other DNA
tgtttcaaaaaaaaaaaaaattcacaaacattttttgtcttcacctatgcatgggctaagctgcattgagcgtgaaaaga

SEQ ID NO: 48182 - DNA, 80 bp, synthetic construct; identical to SEQ ID NO: 23540
  misc_feature 1..80: note = Artificially Synthesized Probe
  source 1..80: mol_type = other DNA

SEQ ID NO: 48183 - DNA, 80 bp, synthetic construct
  misc_feature 1..80: note = Artificially Synthesized Probe
  source 1..80: mol_type = other DNA
tgtattcagttatattcttgacatggttcatgttatttaaaatcatgctccctgtggcacttgaacctccgaatacacat

SEQ ID NO: 48184 - DNA, 80 bp, synthetic construct
  misc_feature 1..80: note = Artificially Synthesized Probe
  source 1..80: mol_type = other DNA
aaaagacagcacagaccaccggggctgaggactctgtttttcttgtgggctgagttgttataagtattggccgggtgcag

SEQ ID NO: 48185 - DNA, 80 bp, synthetic construct
  misc_feature 1..80: note = Artificially Synthesized Probe
  source 1..80: mol_type = other DNA
agaaacaaattagctgggtgtggtggtgcacacctgtggtcccagctactcgagaggctgaggcacgagaatcaattgaa

SEQ ID NO: 48186 - DNA, 80 bp, synthetic construct; identical to SEQ ID NO: 23541
  misc_feature 1..80: note = Artificially Synthesized Probe
  source 1..80: mol_type = other DNA

SEQ ID NO: 48187 - DNA, 80 bp, synthetic construct
  misc_feature 1..80: note = Artificially Synthesized Probe
  source 1..80: mol_type = other DNA
tttccgtaaagcgctcagtttggaaaagtcaccctgagactccataccagacttctcctcatctttttcttttccgggta

SEQ ID NO: 48188 - DNA, 80 bp, synthetic construct
  misc_feature 1..80: note = Artificially Synthesized Probe
  source 1..80: mol_type = other DNA
ggtttagtccacccagggggtcctgtggccccgctctgctggtgcctgtcgaaggggcagctgcagtcgaatcaccacgc

SEQ ID NO: 48189 - DNA, 80 bp, synthetic construct
  misc_feature 1..80: note = Artificially Synthesized Probe
  source 1..80: mol_type = other DNA
ttaatgtgtgccaccgtcagctcacggtaagtgcataaattctctatagtagtcctaccatcatcacatgttacctttgc

SEQ ID NO: 48190 - DNA, 80 bp, synthetic construct; identical to SEQ ID NO: 23542
  misc_feature 1..80: note = Artificially Synthesized Probe
  source 1..80: mol_type = other DNA

SEQ ID NO: 48191 - DNA, 80 bp, synthetic construct
  misc_feature 1..80: note = Artificially Synthesized Probe
  source 1..80: mol_type = other DNA
tctccaatgcatggaatattgtagtgagatgaggatatgtgagaaactaaaaggtcttcaaatacaggtagatgataagg

SEQ ID NO: 48192 - DNA, 80 bp, synthetic construct
  misc_feature 1..80: note = Artificially Synthesized Probe
  source 1..80: mol_type = other DNA
ggaacatttacagcatggaatttgcccaacacgatgtgttaggagcctgtcctcccagtgagagccagctgttaaacgtt

SEQ ID NO: 48193 - DNA, 80 bp, synthetic construct
  misc_feature 1..80: note = Artificially Synthesized Probe
  source 1..80: mol_type = other DNA
acatccaccttctctgaactctgaaaattaccctctctgactttgcctcggactcctcatccgtgcaatagggttgatca

SEQ ID NO: 48194 - DNA, 80 bp, synthetic construct
  misc_feature 1..80: note = Artificially Synthesized Probe
  source 1..80: mol_type = other DNA
aaataagtccaaaaaatatgtgagtctttaatgacactccttcttgtaagagaaagaaccctgttcatttgactcatacc

SEQ ID NO: 48195 - DNA, 80 bp, synthetic construct; identical to SEQ ID NO: 23543
  misc_feature 1..80: note = Artificially Synthesized Probe
  source 1..80: mol_type = other DNA

SEQ ID NO: 48196 - DNA, 80 bp, synthetic construct
  misc_feature 1..80: note = Artificially Synthesized Probe
  source 1..80: mol_type = other DNA
tgtcaagttggggacattaatgcttgttccacctgccctgggagacaagatcatagaagtgaaatgaccttgtaaacggc

SEQ ID NO: 48197 - DNA, 80 bp, synthetic construct
  misc_feature 1..80: note = Artificially Synthesized Probe
  source 1..80: mol_type = other DNA
cacttgactcttgggcagttttaagtacgtttaaaattctcccgctgccagacgtggtgtactttaaagatgaattaaaa

SEQ ID NO: 48198 - DNA, 80 bp, synthetic construct
  misc_feature 1..80: note = Artificially Synthesized Probe
  source 1..80: mol_type = other DNA
agggcttgaatttctttttttgcgaagtgcagtggtgagtcgcaattcctttcccatggacatgttgtcagtgtgagatt

SEQ ID NO: 48199 - DNA, 80 bp, synthetic construct; identical to SEQ ID NO: 23462
  misc_feature 1..80: note = Artificially Synthesized Probe
  source 1..80: mol_type = other DNA

SEQ ID NO: 48200 - DNA, 80 bp, synthetic construct; identical to SEQ ID NO: 23544
  misc_feature 1..80: note = Artificially Synthesized Probe
  source 1..80: mol_type = other DNA

SEQ ID NO: 48201 - DNA, 80 bp, synthetic construct
  misc_feature 1..80: note = Artificially Synthesized Probe
  source 1..80: mol_type = other DNA
ttctacccacactttgatttttttttttttttttttttgagaaagagtctcgctctgtcacccaggctggagtgctgtgg

SEQ ID NO: 48202 - DNA, 80 bp, synthetic construct
  misc_feature 1..80: note = Artificially Synthesized Probe
  source 1..80: mol_type = other DNA
ctcaatctcctgaccttgtgatctgcctgccttggcctcccaaagtgctgggattacaggcgtgagccaccgcgcccggc

SEQ ID NO: 48203 - DNA, 80 bp, synthetic construct
  misc_feature 1..80: note = Artificially Synthesized Probe
  source 1..80: mol_type = other DNA
cgcaggtcgtttccactagactgtacatatgtgttttgtgtttcttcacgtatatgttctatttatgataaaagaagaaa

SEQ ID NO: 48204 - DNA, 80 bp, synthetic construct; identical to SEQ ID NO: 23545
  misc_feature 1..80: note = Artificially Synthesized Probe
  source 1..80: mol_type = other DNA

SEQ ID NO: 48205 - DNA, 80 bp, synthetic construct
  misc_feature 1..80: note = Artificially Synthesized Probe
  source 1..80: mol_type = other DNA
gagaaagtctgaagagttacaattcagcagtgggaagtttctcacttgaacatctgagggatgaacattaccataacgtg

SEQ ID NO: 48206 - DNA, 80 bp, synthetic construct
  misc_feature 1..80: note = Artificially Synthesized Probe
  source 1..80: mol_type = other DNA
gcaggcaccttgccgttcacccgccggagagcctggccgtggttgctaacgcgaaaccaagtaagtgatgctttctctca

SEQ ID NO: 48207 - DNA, 80 bp, synthetic construct
  misc_feature 1..80: note = Artificially Synthesized Probe
  source 1..80: mol_type = other DNA
tgctcatcactgacttgtcccacgtgcagctggggctccttcgggttcgggccgtgcacctggccagtcagaagtggatt

SEQ ID NO: 48208 - DNA, 80 bp, synthetic construct; identical to SEQ ID NO: 23546
  misc_feature 1..80: note = Artificially Synthesized Probe
  source 1..80: mol_type = other DNA

SEQ ID NO: 48209 - DNA, 80 bp, synthetic construct
  misc_feature 1..80: note = Artificially Synthesized Probe
  source 1..80: mol_type = other DNA
tcactttttgggctctacccctgaattgtagaacaatttaaaaaacacgatgcatgggaactttcagttaacctttcata

SEQ ID NO: 48210 - DNA, 80 bp, synthetic construct
  misc_feature 1..80: note = Artificially Synthesized Probe
  source 1..80: mol_type = other DNA
gagacagaggcagagacagagacagagacaggcagaggcagagacagaggcagagagagacagaggcagaggcagagaca

SEQ ID NO: 48211 - DNA, 80 bp, synthetic construct
  misc_feature 1..80: note = Artificially Synthesized Probe
  source 1..80: mol_type = other DNA
cgcttttatttttctcattcccctgatgttaatagtcattctgtttggtaatctgcctagtaggctaattcgtcaagcat

SEQ ID NO: 48212 - DNA, 80 bp, synthetic construct; identical to SEQ ID NO: 23547
  misc_feature 1..80: note = Artificially Synthesized Probe
  source 1..80: mol_type = other DNA

SEQ ID NO: 48213 - DNA, 80 bp, synthetic construct
  misc_feature 1..80: note = Artificially Synthesized Probe
  source 1..80: mol_type = other DNA
atttaaatagctaaaggtgactttgatccataaaatagtatgtattccatgcaatgttatattttcttattcatcttatt

SEQ ID NO: 48214 - DNA, 80 bp, synthetic construct
  misc_feature 1..80: note = Artificially Synthesized Probe
  source 1..80: mol_type = other DNA
ctatcagccacagcaagaggagaaacactgagtatggacaagttctcattgtctattaaaaagaaatatgccacattgga

SEQ ID NO: 48215 - DNA, 80 bp, synthetic construct
  misc_feature 1..80: note = Artificially Synthesized Probe
  source 1..80: mol_type = other DNA
cctcagtgaaaccatttttccatgggacatctttttgcccaatgccttaaacagagagcttaaatgataaacttgttttg

SEQ ID NO: 48216 - DNA, 80 bp, synthetic construct
  misc_feature 1..80: note = Artificially Synthesized Probe
  source 1..80: mol_type = other DNA
acagagaaggtgaaagtgggcaccgtgcttggtgctgggactggcagggcttctatcccgacacgtctggattcatccag

SEQ ID NO: 48217 - DNA, 80 bp, synthetic construct; identical to SEQ ID NO: 23548
  misc_feature 1..80: note = Artificially Synthesized Probe
  source 1..80: mol_type = other DNA

SEQ ID NO: 48218 - DNA, 80 bp, synthetic construct
  misc_feature 1..80: note = Artificially Synthesized Probe
  source 1..80: mol_type = other DNA
gttctaaaattcagtgttggaaatgttggtgtgttacttgatattgacagagtgtaggcagcactgcccagcaacctctg

SEQ ID NO: 48219 - DNA, 80 bp, synthetic construct
  misc_feature 1..80: note = Artificially Synthesized Probe
  source 1..80: mol_type = other DNA
gcgtttgccgtgcggtattagactcagcaggaagctcgccgtccctgcaaaggcgctgtgtggattgtgcatttgctgtg

SEQ ID NO: 48220 - DNA, 80 bp, synthetic construct; identical to SEQ ID NO: 23549
  misc_feature 1..80: note = Artificially Synthesized Probe
  source 1..80: mol_type = other DNA

SEQ ID NO: 48221 - DNA, 80 bp, synthetic construct
  misc_feature 1..80: note = Artificially Synthesized Probe
  source 1..80: mol_type = other DNA
ttttgaaaaatgtcgtgtcccctatggatccatggattggtttaagctcccaaactccctgatgctattttgaaaaatgc

SEQ ID NO: 48222 - DNA, 80 bp, synthetic construct
  misc_feature 1..80: note = Artificially Synthesized Probe
  source 1..80: mol_type = other DNA
cagaggcagagagagaggcagaggcagagacagaggcagagagagacagaggcagaggcagagacagagagacagaggca

SEQ ID NO: 48223 - DNA, 80 bp, synthetic construct
  misc_feature 1..80: note = Artificially Synthesized Probe
  source 1..80: mol_type = other DNA
gctccatcctgtctggcaggtggatttatgagaaagtaatgttcactgttgccattctgtgggggggtttcttcatgcag

SEQ ID NO: 48224 - DNA, 80 bp, synthetic construct
  misc_feature 1..80: note = Artificially Synthesized Probe
  source 1..80: mol_type = other DNA
gatctttataacctcaattcattttcaacagatggactgtcaagcgctcctagttctcgaggtctggtactaagtaggag

SEQ ID NO: 48225 - DNA, 80 bp, synthetic construct
  misc_feature 1..80: note = Artificially Synthesized Probe
  source 1..80: mol_type = other DNA
aagttcttcgtgtgtgtgtgtgtgcacttttattcaactggtctcaagtcagtgtacaggtgaagttcttaaaatgttta

SEQ ID NO: 48226 - DNA, 80 bp, synthetic construct; identical to SEQ ID NO: 23550
  misc_feature 1..80: note = Artificially Synthesized Probe
  source 1..80: mol_type = other DNA

SEQ ID NO: 48227 - DNA, 80 bp, synthetic construct
  misc_feature 1..80: note = Artificially Synthesized Probe
  source 1..80: mol_type = other DNA
tgtcctgagtgccaggagtgcttctgtacagttgagctggatatggcggttggtacaggaggatttgtaacaagacacag

SEQ ID NO: 48228 - DNA, 80 bp, synthetic construct
  misc_feature 1..80: note = Artificially Synthesized Probe
  source 1..80: mol_type = other DNA
tcccagaaaacacagtacctcccccacaaaattcacacggttttaaaaaacaaagcaaaacactactagcaaagaaccag

SEQ ID NO: 48229 - DNA, 80 bp, synthetic construct; identical to SEQ ID NO: 23551
  misc_feature 1..80: note = Artificially Synthesized Probe
  source 1..80: mol_type = other DNA

SEQ ID NO: 48230 - DNA, 80 bp, synthetic construct
  misc_feature 1..80: note = Artificially Synthesized Probe
  source 1..80: mol_type = other DNA
tctctccctggcccctgcccgatgcactgcatggcctcgcctgtaggcagggacagtgcctggtctccaacgtgtcctct

SEQ ID NO: 48231 - DNA, 80 bp, synthetic construct
  misc_feature 1..80: note = Artificially Synthesized Probe
  source 1..80: mol_type = other DNA
tcgtgttttgaaatacacagcagtcgaaatgaaggaaacagaacaaaatgcctctgtgctccattgctgtgggaagggct

SEQ ID NO: 48232 - DNA, 80 bp, synthetic construct
  misc_feature 1..80: note = Artificially Synthesized Probe
  source 1..80: mol_type = other DNA
caaacacaccacctggccaaaggtagcagggaggttggctttccacactgaataccgtggatagtccggaaacagtcttc

SEQ ID NO: 48233 - DNA, 80 bp, synthetic construct
  misc_feature 1..80: note = Artificially Synthesized Probe
  source 1..80: mol_type = other DNA
cggcgtgttcagtgcagatgaacggcctcccttcgtacagacaacatctgtatgctgagaaaggccttcaaacatacata

SEQ ID NO: 48234 - DNA, 80 bp, synthetic construct; identical to SEQ ID NO: 23463
  misc_feature 1..80: note = Artificially Synthesized Probe
  source 1..80: mol_type = other DNA

SEQ ID NO: 48235 - DNA, 80 bp, synthetic construct; identical to SEQ ID NO: 23552
  misc_feature 1..80: note = Artificially Synthesized Probe
  source 1..80: mol_type = other DNA

SEQ ID NO: 48236 - DNA, 80 bp, synthetic construct
  misc_feature 1..80: note = Artificially Synthesized Probe
  source 1..80: mol_type = other DNA
gaaagtgggaaagggtcttccagcatcacacgtgctttcaggacagtcccacagtggtggcgatgccacatgcgtggctc

SEQ ID NO: 48237 - DNA, 80 bp, synthetic construct
  misc_feature 1..80: note = Artificially Synthesized Probe
  source 1..80: mol_type = other DNA
ttccatgcaaagagggatacccatattttctaaatatgacatgcacactagtccacgtgatctgctgatgccaaaatact

SEQ ID NO: 48238 - DNA, 80 bp, synthetic construct
  misc_feature 1..80: note = Artificially Synthesized Probe
  source 1..80: mol_type = other DNA
tagctcctcagccatggggatgggccagatgagtgccatgcctgtgtgtcacatgccagtcattcccataagtctcgtgg

SEQ ID NO: 48239 - DNA, 80 bp, synthetic construct; identical to SEQ ID NO: 23553
  misc_feature 1..80: note = Artificially Synthesized Probe
  source 1..80: mol_type = other DNA

SEQ ID NO: 48240 - DNA, 80 bp, synthetic construct
  misc_feature 1..80: note = Artificially Synthesized Probe
  source 1..80: mol_type = other DNA
taaaatgcttgggttttgttaaaaaccaaactggattttagtcacgggggagaattcttattgttcttctctgttcagtg

SEQ ID NO: 48241 - DNA, 80 bp, synthetic construct
  misc_feature 1..80: note = Artificially Synthesized Probe
  source 1..80: mol_type = other DNA
tacttgcttatagagaaattcaatttgtgcctcttatcagactagggacttatatatgatgctgtttaaaaattaccctc

SEQ ID NO: 48242 - DNA, 80 bp, synthetic construct
  misc_feature 1..80: note = Artificially Synthesized Probe
  source 1..80: mol_type = other DNA
gccttttcctcacaccattgtccgtataccacagttctctatgtgatcctgtatagggaattttcatttaatattatagg

SEQ ID NO: 48243 - DNA, 80 bp, synthetic construct; identical to SEQ ID NO: 23554
  misc_feature 1..80: note = Artificially Synthesized Probe
  source 1..80: mol_type = other DNA

SEQ ID NO: 48244 - DNA, 80 bp, synthetic construct
  misc_feature 1..80: note = Artificially Synthesized Probe
  source 1..80: mol_type = other DNA
aatttaagttaaaaatttttaacgccttctggctctgacgtctcggtctcacatcgtggaggagaggctttaagatgctg

SEQ ID NO: 48245 - DNA, 80 bp, synthetic construct
  misc_feature 1..80: note = Artificially Synthesized Probe
  source 1..80: mol_type = other DNA
attgatctggccacacaaacccttccttgtttgccgcacaaattctgtttcactgacagaccctgaattttcaaacagat

SEQ ID NO: 48246 - DNA, 80 bp, synthetic construct
  misc_feature 1..80: note = Artificially Synthesized Probe
  source 1..80: mol_type = other DNA
agcagagacagaggcagagacagaagcagagggagacagagacagaggcagagacagaggcagagagagacagaggcaga

SEQ ID NO: 48247 - DNA, 80 bp, synthetic construct; identical to SEQ ID NO: 23555
  misc_feature 1..80: note = Artificially Synthesized Probe
  source 1..80: mol_type = other DNA

SEQ ID NO: 48248 - DNA, 80 bp, synthetic construct
  misc_feature 1..80: note = Artificially Synthesized Probe
  source 1..80: mol_type = other DNA
accatgcctggctaattttttttttttttgtatttttagtagggatgaggtttcaccatgttggccaggctggtctcgaa

SEQ ID NO: 48249 - DNA, 80 bp, synthetic construct
  misc_feature 1..80: note = Artificially Synthesized Probe
  source 1..80: mol_type = other DNA
aaacagtttttctgaaactgagaatcacatttgaaaagcactggccgcactgtgtggtttcttgttattcttgggatgtg

SEQ ID NO: 48250 - DNA, 80 bp, synthetic construct
  misc_feature 1..80: note = Artificially Synthesized Probe
  source 1..80: mol_type = other DNA
ggaactcctcctcatctcagttcagaaggttctttaatacactagggaaagagtattctcccttcccatgataggttcac

SEQ ID NO: 48251 - DNA, 80 bp, synthetic construct; identical to SEQ ID NO: 23556
  misc_feature 1..80: note = Artificially Synthesized Probe
  source 1..80: mol_type = other DNA

SEQ ID NO: 48252 - DNA, 80 bp, synthetic construct
  misc_feature 1..80: note = Artificially Synthesized Probe
  source 1..80: mol_type = other DNA
ctgttatgtggatgatggagctgctttgtgggtgatggagctattctgtaaagtgacggaggtgttctgtgagtgatgga

SEQ ID NO: 48253 - DNA, 80 bp, synthetic construct
  misc_feature 1..80: note = Artificially Synthesized Probe
  source 1..80: mol_type = other DNA
ctgttctgtagagtgatagagctgttccaggggtgatggagctcttccgtgggtgatggagctgttctatgggtgatgga

SEQ ID NO: 48254 - DNA, 80 bp, synthetic construct; identical to SEQ ID NO: 23557
  misc_feature 1..80: note = Artificially Synthesized Probe
  source 1..80: mol_type = other DNA

SEQ ID NO: 48255 - DNA, 80 bp, synthetic construct
  misc_feature 1..80: note = Artificially Synthesized Probe
  source 1..80: mol_type = other DNA
gctgttccgtgggtgatggagctattctgtgggtgataaactgttctgtcgagtgatggagctgttctatgggtgatgag

SEQ ID NO: 48256 - DNA, 80 bp, synthetic construct
  misc_feature 1..80: note = Artificially Synthesized Probe
  source 1..80: mol_type = other DNA
gttttgtgggtgatggagctgttctgtcagtgatggagctgttctgtgggtgataaactgttctgtcagtgatggagctg

SEQ ID NO: 48257 - DNA, 80 bp, synthetic construct
  misc_feature 1..80: note = Artificially Synthesized Probe
  source 1..80: mol_type = other DNA
ctatgggtgatggagctgttctatgggtgatggagctgttctgtgggtgatgagctgttctgtcagtgatggagctgttc

SEQ ID NO: 48258 - DNA, 80 bp, synthetic construct
  misc_feature 1..80: note = Artificially Synthesized Probe
  source 1..80: mol_type = other DNA
acggccctcacggctgcctctggctcttctttggcgccctgttaccgcctccaagcccccacccccaggatgctcaccat

SEQ ID NO: 48259 - DNA, 80 bp, synthetic construct
  misc_feature 1..80: note = Artificially Synthesized Probe
  source 1..80: mol_type = other DNA
ccgcaccccgtgtaccccgcctgtccctcagcaccccatgttaactctgcactccaccagttccccgcaccccacctgtc

SEQ ID NO: 48260 - DNA, 80 bp, synthetic construct
  misc_feature 1..80: note = Artificially Synthesized Probe
  source 1..80: mol_type = other DNA
gttcacgtgcatttatacatgtgtgaaaatatatagagccgcacaccaaaaatagaagggtcaatttgattggatgataa

SEQ ID NO: 48261 - DNA, 80 bp, synthetic construct
  misc_feature 1..80: note = Artificially Synthesized Probe
  source 1..80: mol_type = other DNA
ttccttggctcgagcgatcttcctacttcagcctcccaagtatttgggactacaggcgcgcatcacaatgcctggctaat

SEQ ID NO: 48262 - DNA, 80 bp, synthetic construct; identical to SEQ ID NO: 23558
  misc_feature 1..80: note = Artificially Synthesized Probe
  source 1..80: mol_type = other DNA

SEQ ID NO: 48263 - DNA, 80 bp, synthetic construct
  misc_feature 1..80: note = Artificially Synthesized Probe
  source 1..80: mol_type = other DNA
aattctcctgcctcagcctcccgagtaggtgggattacagcatgcaccatcatgcccagctaattttgtatttttagtag

SEQ ID NO: 48264 - DNA, 80 bp, synthetic construct
  misc_feature 1..80: note = Artificially Synthesized Probe
  source 1..80: mol_type = other DNA
aattgcatttgtctagatagttgatacaaatcaggcttaccatgttcataaataccatgtaatcatgtcttcaacataaa

SEQ ID NO: 48265 - DNA, 80 bp, synthetic construct
  misc_feature 1..80: note = Artificially Synthesized Probe
  source 1..80: mol_type = other DNA
ataatttgtgggacgtagcatagaaggaaaatgcagagtcctttcctcaaaattattaagaatttcaggatgtccaggcc

SEQ ID NO: 48266 - DNA, 80 bp, synthetic construct
  misc_feature 1..80: note = Artificially Synthesized Probe
  source 1..80: mol_type = other DNA
gtagtcccagcttattcgggaggctgaggcaggagaatcgtttgaacccgggaggcagaggttgcagtgagctgagatcg

SEQ ID NO: 48267 - DNA, 80 bp, synthetic construct; identical to SEQ ID NO: 23559
  misc_feature 1..80: note = Artificially Synthesized Probe
  source 1..80: mol_type = other DNA

SEQ ID NO: 48268 - DNA, 80 bp, synthetic construct
  misc_feature 1..80: note = Artificially Synthesized Probe
  source 1..80: mol_type = other DNA
ctctgagcctgtgggcccgtcgtgggatttagtgaggaagtatttgaacattacttcctgtagtacacaggaagccctct

SEQ ID NO: 48269 - DNA, 80 bp, synthetic construct
  misc_feature 1..80: note = Artificially Synthesized Probe
  source 1..80: mol_type = other DNA
agttattggaaatgtggttcagattaaatgtcatttctaagtgcctcttactaatagctgttatgtcaacggtgtctaaa

SEQ ID NO: 48270 - DNA, 80 bp, synthetic construct
  misc_feature 1..80: note = Artificially Synthesized Probe
  source 1..80: mol_type = other DNA
taggaagccctcctggccgctgacccccatccccagctccctgtgctgcttccctgggagggagtcttagctggcactgt

SEQ ID NO: 48271 - DNA, 80 bp, synthetic construct; identical to SEQ ID NO: 23560
  misc_feature 1..80: note = Artificially Synthesized Probe
  source 1..80: mol_type = other DNA

SEQ ID NO: 48272 - DNA, 80 bp, synthetic construct
  misc_feature 1..80: note = Artificially Synthesized Probe
  source 1..80: mol_type = other DNA
ctaaatgcttgaaaatgtccactttttaaaagttctagattcacccctcaacttaaaaattatttagtatttgagtcttt

SEQ ID NO: 48273 - DNA, 80 bp, synthetic construct
  misc_feature 1..80: note = Artificially Synthesized Probe
  source 1..80: mol_type = other DNA
ttgttgcatgacttaaatgtaattggccaaatcactcagctgataggaaaccttaaaggaaactatcaggtaacaattga

SEQ ID NO: 48274 - DNA, 80 bp, synthetic construct
  misc_feature 1..80: note = Artificially Synthesized Probe
  source 1..80: mol_type = other DNA
cttttcttcattttgcaaatagggtttaatatcagttctatcttagaaatgtctcagccccccacagtgtgatctgactc

SEQ ID NO: 48275 - DNA, 80 bp, synthetic construct
  misc_feature 1..80: note = Artificially Synthesized Probe
  source 1..80: mol_type = other DNA
tgactggacatcaggtttacaaaggcttattttgaagaaagaagatgaaatcagagctgcggactgctgcagaattcagt

SEQ ID NO: 48276 - DNA, 80 bp, synthetic construct; identical to SEQ ID NO: 23561
  misc_feature 1..80: note = Artificially Synthesized Probe
  source 1..80: mol_type = other DNA

SEQ ID NO: 48277 - DNA, 80 bp, synthetic construct
  misc_feature 1..80: note = Artificially Synthesized Probe
  source 1..80: mol_type = other DNA
ctttgatttggtcactccaacatactgttagacagatgtaagaaagctgaccgacatttacctaaaagtgacaaattgca

SEQ ID NO: 48278 - DNA, 80 bp, synthetic construct
  misc_feature 1..80: note = Artificially Synthesized Probe
  source 1..80: mol_type = other DNA
tttttaaacattaacagatggtgaattttatgaaatgtatttttctcatcagttaaaatgagcctgtgatttttacactt

SEQ ID NO: 48279 - DNA, 80 bp, synthetic construct; identical to SEQ ID NO: 23610
  misc_feature 1..80: note = Artificially Synthesized Probe
  source 1..80: mol_type = other DNA

SEQ ID NO: 48280 - DNA, 80 bp, synthetic construct
  misc_feature 1..80: note = Artificially Synthesized Probe
  source 1..80: mol_type = other DNA
tcgtggtcttgccgacttcaggagtgaagctgcagaccttcacagtgagtgttacagctcttaaaggcatcacgtccaga

SEQ ID NO: 48281 - DNA, 80 bp, synthetic construct
  misc_feature 1..80: note = Artificially Synthesized Probe
  source 1..80: mol_type = other DNA
gaccttctcggtgagtgttacagcttataaaggtagtgcagacccaaagggtgagcagcagcaagatttattgcgaagag

SEQ ID NO: 48282 - DNA, 80 bp, synthetic construct
  misc_feature 1..80: note = Artificially Synthesized Probe
  source 1..80: mol_type = other DNA
tgccgttttacagagtgctgattggtgcttttacaatcctttagctagacacagagtgttgattggtgcatttacaatac

SEQ ID NO: 48283 - DNA, 80 bp, synthetic construct; identical to SEQ ID NO: 23611
  misc_feature 1..80: note = Artificially Synthesized Probe
  source 1..80: mol_type = other DNA

SEQ ID NO: 48284 - DNA, 80 bp, synthetic construct
  misc_feature 1..80: note = Artificially Synthesized Probe
  source 1..80: mol_type = other DNA
aggtgcccgcctctataccaagataatttttttttgtatttttagtagagacggggtttcactatgttggccggactggt

SEQ ID NO: 48285 - DNA, 80 bp, synthetic construct
  misc_feature 1..80: note = Artificially Synthesized Probe
  source 1..80: mol_type = other DNA
caccattccattcactacctttctgatatcgatttttttaactccacgtgagtaagaatatgtgacatttatctttctgt

SEQ ID NO: 48286 - DNA, 80 bp, synthetic construct
  misc_feature 1..80: note = Artificially Synthesized Probe
  source 1..80: mol_type = other DNA
tgtcacctaggctggagtgcagtggtgcaatcttggctcactgcaatctccgcctcctgggttcaagcaattcttttgcc

SEQ ID NO: 48287 - DNA, 80 bp, synthetic construct; identical to SEQ ID NO: 23612
  misc_feature 1..80: note = Artificially Synthesized Probe
  source 1..80: mol_type = other DNA

SEQ ID NO: 48288 - DNA, 80 bp, synthetic construct
  misc_feature 1..80: note = Artificially Synthesized Probe
  source 1..80: mol_type = other DNA
ttttgctggagtagctcgagtgaggaacaattacttttaatagtctattttactgtccagcgcagtaacccccataaccc

SEQ ID NO: 48289 - DNA, 80 bp, synthetic construct
  misc_feature 1..80: note = Artificially Synthesized Probe
  source 1..80: mol_type = other DNA
gactgtattaatttatattcccgttaacagaatacaagcatccccctttctctgcatccttaccagcatttgttattttt

SEQ ID NO: 48290 - DNA, 80 bp, synthetic construct
  misc_feature 1..80: note = Artificially Synthesized Probe
  source 1..80: mol_type = other DNA
ccctttgtatgccttcttttgagaaatgcctgttcatttttaaattggatttttttaaaccagtgagttgagttccttac

SEQ ID NO: 48291 - DNA, 80 bp, synthetic construct; identical to SEQ ID NO: 23613
  misc_feature 1..80: note = Artificially Synthesized Probe
  source 1..80: mol_type = other DNA

SEQ ID NO: 48292 - DNA, 80 bp, synthetic construct
  misc_feature 1..80: note = Artificially Synthesized Probe
  source 1..80: mol_type = other DNA
gagtctcactctgttgcccaggctggagtgcagtggcacgatctgggctcactgcaagctccgccttccaggttcatgcc

SEQ ID NO: 48293 - DNA, 80 bp, synthetic construct
  misc_feature 1..80: note = Artificially Synthesized Probe
  source 1..80: mol_type = other DNA
ggtgtgagccaccacacccggcctccagcaccatttattaaagagttgactgtaaatgtatagatttgtttccgggtttt

SEQ ID NO: 48294 - DNA, 80 bp, synthetic construct
  misc_feature 1..80: note = Artificially Synthesized Probe
  source 1..80: mol_type = other DNA
catataaattttaggacttttaaaaatatttttgtgaagaatgtcattggtatttttttgtttgttttcttttgtttttg

SEQ ID NO: 48295 - DNA, 80 bp, synthetic construct
  misc_feature 1..80: note = Artificially Synthesized Probe
  source 1..80: mol_type = other DNA
ttgaagagacagggtcttactgtgtgcctcggttgactcaaactcctgggctcaagtgatcctcccaccttggcctctca

SEQ ID NO: 48296 - DNA, 80 bp, synthetic construct; identical to SEQ ID NO: 23614
  misc_feature 1..80: note = Artificially Synthesized Probe
  source 1..80: mol_type = other DNA

SEQ ID NO: 48297 - DNA, 80 bp, synthetic construct
  misc_feature 1..80: note = Artificially Synthesized Probe
  source 1..80: mol_type = other DNA
tctttagcttttctaaacataagatcatagtgtctgcaaccaaggacagtttggacagtttcctttccaatttggatgcc

SEQ ID NO: 48298 - DNA, 80 bp, synthetic construct
  misc_feature 1..80: note = Artificially Synthesized Probe
  source 1..80: mol_type = other DNA
ggggtgggagctctctgggtgcagctacagctgcccaagtcatggctgcagactcaggcctcccactccacggagcaggc

SEQ ID NO: 48299 - DNA, 80 bp, synthetic construct
  misc_feature 1..80: note = Artificially Synthesized Probe
  source 1..80: mol_type = other DNA
tgggtaagcattctagcaaagatgccattacagtccggcacggagaaataaaaggagccaagagttgggcaaaagagata

SEQ ID NO: 48300 - DNA, 80 bp, synthetic construct
  misc_feature 1..80: note = Artificially Synthesized Probe
  source 1..80: mol_type = other DNA
cactcttggcagcctgggaagacccccctgtacccccaaccaggctcagagaagtctgctcccactgcctggcctctccc

SEQ ID NO: 48301 - DNA, 80 bp, synthetic construct; identical to SEQ ID NO: 23615
  misc_feature 1..80: note = Artificially Synthesized Probe
  source 1..80: mol_type = other DNA

SEQ ID NO: 48302 - DNA, 80 bp, synthetic construct
  misc_feature 1..80: note = Artificially Synthesized Probe
  source 1..80: mol_type = other DNA
cataagagcccccaattcagccagagctgagcagattttgggacaacctgctacagagaggagctgcccactccagggcc

SEQ ID NO: 48303 - DNA, 80 bp, synthetic construct
  misc_feature 1..80: note = Artificially Synthesized Probe
  source 1..80: mol_type = other DNA
tgctcaccacgttgagggtgaagagaaggatagaagagctgtggccctttggggagcccagacctgggagttccctgagc

SEQ ID NO: 48304 - DNA, 80 bp, synthetic construct
  misc_feature 1..80: note = Artificially Synthesized Probe
  source 1..80: mol_type = other DNA
gcctgccccacagcagctgacatgcttgactgtgcgcagtggccagacccccatgcttgctcactcacacacctgctgcc

SEQ ID NO: 48305 - DNA, 80 bp, synthetic construct; identical to SEQ ID NO: 23616
  misc_feature 1..80: note = Artificially Synthesized Probe
  source 1..80: mol_type = other DNA

SEQ ID NO: 48306 - DNA, 80 bp, synthetic construct
  misc_feature 1..80: note = Artificially Synthesized Probe
  source 1..80: mol_type = other DNA
taaaccctatttggtcatggagtattagtccttttatatatttctagtttgggtacgctaatattttggttaagattttt

SEQ ID NO: 48307 - DNA, 80 bp, synthetic construct
  misc_feature 1..80: note = Artificially Synthesized Probe
  source 1..80: mol_type = other DNA
atcctgctgcctctgcctcccaggtacctaggactgcaggagcatgccaccatgcctggctcgatttttatttaatgttt

SEQ ID NO: 48308 - DNA, 80 bp, synthetic construct
  misc_feature 1..80: note = Artificially Synthesized Probe
  source 1..80: mol_type = other DNA
tattttaattttatatatactttaaattctacaaaatgttgttgttattgttgtcagtgctgttgttttatacaattggc

SEQ ID NO: 48309 - DNA, 80 bp, synthetic construct; identical to SEQ ID NO: 23617
  misc_feature 1..80: note = Artificially Synthesized Probe
  source 1..80: mol_type = other DNA

SEQ ID NO: 48310 - DNA, 80 bp, synthetic construct
  misc_feature 1..80: note = Artificially Synthesized Probe
  source 1..80: mol_type = other DNA
ctcagcctcccgagtagctacaggcgcccgccaccacgcccagctaattttttgtatttttagtagagacggggtttcac

SEQ ID NO: 48311 - DNA, 80 bp, synthetic construct
  misc_feature 1..80: note = Artificially Synthesized Probe
  source 1..80: mol_type = other DNA
ctcctaagatttttctctgggtcgttagctttttatagatgtacagtcacatgcctaggtgtacatttatcctgcttggg

SEQ ID NO: 48312 - DNA, 80 bp, synthetic construct
  misc_feature 1..80: note = Artificially Synthesized Probe
  source 1..80: mol_type = other DNA
cattcttttctgtatttttcatcattttgtaactccatgttttagtctgtgtattttcttctgaattttctttcatttca

SEQ ID NO: 48313 - DNA, 80 bp, synthetic construct
  misc_feature 1..80: note = Artificially Synthesized Probe
  source 1..80: mol_type = other DNA
actttgtctcatttgctttattattttgtgcctgtgtgttcactctctttcttcaaatgtgcacacacattcatgcacac

SEQ ID NO: 48314 - DNA, 80 bp, synthetic construct
  misc_feature 1..80: note = Artificially Synthesized Probe
  source 1..80: mol_type = other DNA
gtacagttatcactcctataaacttatttagtatattttaatattgatgcaatacattatctactgtctattttacaatt

SEQ ID NO: 48315 - DNA, 80 bp, synthetic construct; identical to SEQ ID NO: 23618
  misc_feature 1..80: note = Artificially Synthesized Probe
  source 1..80: mol_type = other DNA

SEQ ID NO: 48316 - DNA, 80 bp, synthetic construct
  misc_feature 1..80: note = Artificially Synthesized Probe
  source 1..80: mol_type = other DNA
cttgacatactactataagcaagaagcctcctagaatgtttatccctccaaaagtcactttaaacttagttgccattgta

SEQ ID NO: 48317 - DNA, 80 bp, synthetic construct
  misc_feature 1..80: note = Artificially Synthesized Probe
  source 1..80: mol_type = other DNA
accatgttatgacacagcaaaaaaggccctcaccagatgccagcccttctatcttggacttgccagcctccagaactgtg

SEQ ID NO: 48318 - DNA, 80 bp, synthetic construct
  misc_feature 1..80: note = Artificially Synthesized Probe
  source 1..80: mol_type = other DNA
gagactgagacagttttgaagtgaacactgaaaaagtctgtctctaaagcagcagactggtcattttcttctgcgggcca

SEQ ID NO: 48319 - DNA, 80 bp, synthetic construct
  misc_feature 1..80: note = Artificially Synthesized Probe
  source 1..80: mol_type = other DNA
ttttgcttcacaatctttgagtatatgttctgaagcagatgggatgaacggaaaaacttcttcctccaggcaaataatca

SEQ ID NO: 48320 - DNA, 80 bp, synthetic construct; identical to SEQ ID NO: 23619
  misc_feature 1..80: note = Artificially Synthesized Probe
  source 1..80: mol_type = other DNA

SEQ ID NO: 48321 - DNA, 80 bp, synthetic construct
  misc_feature 1..80: note = Artificially Synthesized Probe
  source 1..80: mol_type = other DNA
atcgctgctcaggaaggactggtggccattctcaggtggagaaagctttaataaatcttgtattctattcaaaatatcct

SEQ ID NO: 48322 - DNA, 80 bp, synthetic construct; identical to SEQ ID NO: 23601
  misc_feature 1..80: note = Artificially Synthesized Probe
  source 1..80: mol_type = other DNA

SEQ ID NO: 48323 - DNA, 80 bp, synthetic construct
  misc_feature 1..80: note = Artificially Synthesized Probe
  source 1..80: mol_type = other DNA
gtacacatggaacgtgctgaggttcaactgtgaaaaacttttcatatctaacaacagtttcgaagaactccaacgtcaca

SEQ ID NO: 48324 - DNA, 80 bp, synthetic construct; identical to SEQ ID NO: 23620
  misc_feature 1..80: note = Artificially Synthesized Probe
  source 1..80: mol_type = other DNA

SEQ ID NO: 48325 - DNA, 80 bp, synthetic construct
  misc_feature 1..80: note = Artificially Synthesized Probe
  source 1..80: mol_type = other DNA
ggccaacatgattgcctccacattagctttttgctgatccgagagcactgtaagctgtttcaaaatatgaagataatcat

SEQ ID NO: 48326 - DNA, 80 bp, synthetic construct
  misc_feature 1..80: note = Artificially Synthesized Probe
  source 1..80: mol_type = other DNA
tccgtttaccggcttagaaaatctggccaacatcttcttcctggtcaatgctgaaaagaagtcaacatcttcttcctggt

SEQ ID NO: 48327 - DNA, 80 bp, synthetic construct
  misc_feature 1..80: note = Artificially Synthesized Probe
  source 1..80: mol_type = other DNA
aaacctatcattggctaaaagggataagtcaatccaagagacataagccccaactacttcaaggcactgacacatcactt

SEQ ID NO: 48328 - DNA, 80 bp, synthetic construct; identical to SEQ ID NO: 23621
  misc_feature 1..80: note = Artificially Synthesized Probe
  source 1..80: mol_type = other DNA

SEQ ID NO: 48329 - DNA, 80 bp, synthetic construct
  misc_feature 1..80: note = Artificially Synthesized Probe
  source 1..80: mol_type = other DNA
tgtatttaacttgatgttccagtacttgaaagcagaaaaactttacatgatcatcactatatgtcctctgggctagagct

SEQ ID NO: 48330 - DNA, 80 bp, synthetic construct
  misc_feature 1..80: note = Artificially Synthesized Probe
  source 1..80: mol_type = other DNA
cttgctgctatacttggagttttctggttataataggcttgccctctgatcccacagaagaatttataaacatcttccct

SEQ ID NO: 48331 - DNA, 80 bp, synthetic construct
  misc_feature 1..80: note = Artificially Synthesized Probe
  source 1..80: mol_type = other DNA
ctgcacgcctctcgtcgctccgcgtcccctggcaccttctcttgagtggcaggcaagcaagcaagcaagcgggcggggtc

SEQ ID NO: 48332 - DNA, 80 bp, synthetic construct
  misc_feature 1..80: note = Artificially Synthesized Probe
  source 1..80: mol_type = other DNA
cgtctcctgtctatttcttatttattcctttcaaaatggcgtcttatgataagcaaaaaaataaattttcttgaagtcca

SEQ ID NO: 48333 - DNA, 80 bp, synthetic construct
  misc_feature 1..80: note = Artificially Synthesized Probe
  source 1..80: mol_type = other DNA
gctgtcttgaggaaaaagatgaagaatgggagtgttatggagggcatacgcccctctgatcatcaccacaaaggtaggat

SEQ ID NO: 48334 - DNA, 80 bp, synthetic construct; identical to SEQ ID NO: 23622
  misc_feature 1..80: note = Artificially Synthesized Probe
  source 1..80: mol_type = other DNA

SEQ ID NO: 48335 - DNA, 80 bp, synthetic construct
  misc_feature 1..80: note = Artificially Synthesized Probe
  source 1..80: mol_type = other DNA
tatgtatagatctatttttggacttgatcctgttccattcatctgtatctgtctactctagctttgtggcaaatcttgaa

SEQ ID NO: 48336 - DNA, 80 bp, synthetic construct
  misc_feature 1..80: note = Artificially Synthesized Probe
  source 1..80: mol_type = other DNA
tctctccagaagggtttacttttgtttctgtcaagcgaataggctagaggctgaaactttcatctagtaagtgtctgagg

SEQ ID NO: 48337 - DNA, 80 bp, synthetic construct
  misc_feature 1..80: note = Artificially Synthesized Probe
  source 1..80: mol_type = other DNA
gatcacttgagcgcaggaattcaagaccagcctgggcaacatggcaaaaccccatctctacaaaaagtacaaaaattaac

SEQ ID NO: 48338 - DNA, 80 bp, synthetic construct; identical to SEQ ID NO: 23623
  misc_feature 1..80: note = Artificially Synthesized Probe
  source 1..80: mol_type = other DNA

SEQ ID NO: 48339 - DNA, 80 bp, synthetic construct
  misc_feature 1..80: note = Artificially Synthesized Probe
  source 1..80: mol_type = other DNA
tgggactgcaggcgcccaccaccacgcccggctaatttttttgtacttttagtagagacggggtttcaccgtgttagcca

SEQ ID NO: 48340 - DNA, 80 bp, synthetic construct
  misc_feature 1..80: note = Artificially Synthesized Probe
  source 1..80: mol_type = other DNA
tgtctccaaataccagtctcaccttacttggcttctctttttctccagatcttggactagcaaattctcactgcttttgt

SEQ ID NO: 48341 - DNA, 80 bp, synthetic construct
  misc_feature 1..80: note = Artificially Synthesized Probe
  source 1..80: mol_type = other DNA
taactttgttttggaagatacgttcagactttattaatgattttggagacaattgggaaattgcgagcatggaggtttgg

SEQ ID NO: 48342 - DNA, 80 bp, synthetic construct; identical to SEQ ID NO: 23624
  misc_feature 1..80: note = Artificially Synthesized Probe
  source 1..80: mol_type = other DNA

SEQ ID NO: 48343 - DNA, 80 bp, synthetic construct
  misc_feature 1..80: note = Artificially Synthesized Probe
  source 1..80: mol_type = other DNA
catttaacagggggaatcaggctggtggagatggcagtagcaagggaaaaggagcatgtgtccttttcagcaattttttt

SEQ ID NO: 48344 - DNA, 80 bp, synthetic construct
  misc_feature 1..80: note = Artificially Synthesized Probe
  source 1..80: mol_type = other DNA
caccacgcccagctaatttttttgtatttttagtagagacggggtttcaccatgttagccaggatggtctcgatctcctg

SEQ ID NO: 48345 - DNA, 80 bp, synthetic construct
  misc_feature 1..80: note = Artificially Synthesized Probe
  source 1..80: mol_type = other DNA
cccacaatttgaatcttgtttaaaagatggaaggatgagaagtgtgattctcttggcttgtttagaaatagccatagcag

SEQ ID NO: 48346 - DNA, 80 bp, synthetic construct
  misc_feature 1..80: note = Artificially Synthesized Probe
  source 1..80: mol_type = other DNA
agaatagctggaaacctatggctcttgtatacagatgtacactataggcagttgtatagacttccaaacacatacacatt

SEQ ID NO: 48347 - DNA, 80 bp, synthetic construct; identical to SEQ ID NO: 23625
  misc_feature 1..80: note = Artificially Synthesized Probe
  source 1..80: mol_type = other DNA

SEQ ID NO: 48348 - DNA, 80 bp, synthetic construct
  misc_feature 1..80: note = Artificially Synthesized Probe
  source 1..80: mol_type = other DNA
cccaagaccaggagctagtgtatttgcaaagccaagattcaaatctaattctgcctggctccaaaacttattctctgaaa

SEQ ID NO: 48349 - DNA, 80 bp, synthetic construct
  misc_feature 1..80: note = Artificially Synthesized Probe
  source 1..80: mol_type = other DNA
agtgctcagttactaggttttgctgggcaagtgtaaggttgcttgtgggtggtgagaggaacagagcacagaaatgttaa

SEQ ID NO: 48350 - DNA, 80 bp, synthetic construct
  misc_feature 1..80: note = Artificially Synthesized Probe
  source 1..80: mol_type = other DNA
cctggctaacacggtgaaaccccgtctctactaaaaatacaaaaaaattagctgggcgtggtggtgggtgcctgtagtcc

SEQ ID NO: 48351 - DNA, 80 bp, synthetic construct; identical to SEQ ID NO: 23626
  misc_feature 1..80: note = Artificially Synthesized Probe
  source 1..80: mol_type = other DNA

SEQ ID NO: 48352 - DNA, 80 bp, synthetic construct
  misc_feature 1..80: note = Artificially Synthesized Probe
  source 1..80: mol_type = other DNA
atcacttgaacccaggagttcaagaccagcctgggcaacatgatgaaaccctgtctctacaaaaatacaaaaattagccg

SEQ ID NO: 48353 - DNA, 80 bp, synthetic construct
  misc_feature 1..80: note = Artificially Synthesized Probe
  source 1..80: mol_type = other DNA
aagcacaaggtgtcatgagaccatggagagcaagcatttaactcaacacggggaatcagggaagcaggaaggaatgactc

SEQ ID NO: 48354 - DNA, 80 bp, synthetic construct
  misc_feature 1..80: note = Artificially Synthesized Probe
  source 1..80: mol_type = other DNA
catgattgatgtatttcctgaacaactaaagagtggttgctctcagactattaatcttcctttctcttccctatgctttt

SEQ ID NO: 48355 - DNA, 80 bp, synthetic construct
  misc_feature 1..80: note = Artificially Synthesized Probe
  source 1..80: mol_type = other DNA
aatacaaaaattagccaggtgtgatggcgggtgcctactctagaggctgaggcaggagaattgctggaactcaggaggcg

SEQ ID NO: 48356 - DNA, 80 bp, synthetic construct; identical to SEQ ID NO: 23627
  misc_feature 1..80: note = Artificially Synthesized Probe
  source 1..80: mol_type = other DNA

SEQ ID NO: 48357 - DNA, 80 bp, synthetic construct
  misc_feature 1..80: note = Artificially Synthesized Probe
  source 1..80: mol_type = other DNA
tgtagtcccagctactggggaggctgaggcaggagaatggcgtgaacctgggaggcggagcttaaggtgagccgagatcg

SEQ ID NO: 48358 - DNA, 80 bp, synthetic construct
  misc_feature 1..80: note = Artificially Synthesized Probe
  source 1..80: mol_type = other DNA
tgaatctgatccatgggttgaaatcagcaggatacgtatgtgggcaataaatggaaagcatatgtagcatagttagaagt

SEQ ID NO: 48359 - DNA, 80 bp, synthetic construct; identical to SEQ ID NO: 23628
  misc_feature 1..80: note = Artificially Synthesized Probe
  source 1..80: mol_type = other DNA

SEQ ID NO: 48360 - DNA, 80 bp, synthetic construct
  misc_feature 1..80: note = Artificially Synthesized Probe
  source 1..80: mol_type = other DNA
accttgtccctacaaataatacaaaaattagccaggtgtggtggcatgtgcctgtagtcccagccacttgggaggctgaa

SEQ ID NO: 48361 - DNA, 80 bp, synthetic construct
  misc_feature 1..80: note = Artificially Synthesized Probe
  source 1..80: mol_type = other DNA
tagctgtaggataccagcttttgccatagaaaatacccagttacagctcatagaacctaaaagaatttgagttggcaatg

SEQ ID NO: 48362 - DNA, 80 bp, synthetic construct
  misc_feature 1..80: note = Artificially Synthesized Probe
  source 1..80: mol_type = other DNA
acccatgactcagaatcattgcttcgagggccgtattgagcaactctgaaactagatgcagaacagatgtcgttgtagaa

SEQ ID NO: 48363 - DNA, 80 bp, synthetic construct; identical to SEQ ID NO: 23600
  misc_feature 1..80: note = Artificially Synthesized Probe
  source 1..80: mol_type = other DNA

SEQ ID NO: 48364 - DNA, 80 bp, synthetic construct; identical to SEQ ID NO: 23629
  misc_feature 1..80: note = Artificially Synthesized Probe
  source 1..80: mol_type = other DNA

SEQ ID NO: 48365 - DNA, 80 bp, synthetic construct
  misc_feature 1..80: note = Artificially Synthesized Probe
  source 1..80: mol_type = other DNA
tgccgggattgcagacggagtctcgttcactcagtgctcaatggtgcccaggctggagtgcagtggcgtgatctcggctc

SEQ ID NO: 48366 - DNA, 80 bp, synthetic construct; identical to SEQ ID NO: 23602
  misc_feature 1..80: note = Artificially Synthesized Probe
  source 1..80: mol_type = other DNA

SEQ ID NO: 48367 - DNA, 80 bp, synthetic construct
  misc_feature 1..80: note = Artificially Synthesized Probe
  source 1..80: mol_type = other DNA
gaaagtgaggagcgtctcctcctggccgccatcccatctaggaagtgaggagcgcctcttcccagccgccatcacatcta

SEQ ID NO: 48368 - DNA, 80 bp, synthetic construct
  misc_feature 1..80: note = Artificially Synthesized Probe
  source 1..80: mol_type = other DNA
aggagaccctctgcctggcaaccgccccgtctgagaagtgaggagcctctccgcccggcagccaccccatctgggaagtg

SEQ ID NO: 48369 - DNA, 80 bp, synthetic construct
  misc_feature 1..80: note = Artificially Synthesized Probe
  source 1..80: mol_type = other DNA
ccggccagccgccccgtccgggaggtgaggggcgcctctgcccggccgcccctactgggaagtgaggagcccctctgccc

SEQ ID NO: 48370 - DNA, 80 bp, synthetic construct; identical to SEQ ID NO: 23630
  misc_feature 1..80: note = Artificially Synthesized Probe
  source 1..80: mol_type = other DNA

SEQ ID NO: 48371 - DNA, 80 bp, synthetic construct
  misc_feature 1..80: note = Artificially Synthesized Probe
  source 1..80: mol_type = other DNA
ggtcctctgcctaggaaaaccagagacctttgttcacttgtttatctgctgaccttccctccactgttgtcccatgaccc

SEQ ID NO: 48372 - DNA, 80 bp, synthetic construct
  misc_feature 1..80: note = Artificially Synthesized Probe
  source 1..80: mol_type = other DNA
atccaagtgactttaccacaccaagccttaagactgccagactgttctctccattgaaagccattctgcaccactggcca

SEQ ID NO: 48373 - DNA, 80 bp, synthetic construct
  misc_feature 1..80: note = Artificially Synthesized Probe
  source 1..80: mol_type = other DNA
aacatgcatacattttcttaaatgaccctgtggggatgagttaaaaagggaggagtacccagatgcaggcgtctagcaga

SEQ ID NO: 48374 - DNA, 80 bp, synthetic construct
  misc_feature 1..80: note = Artificially Synthesized Probe
  source 1..80: mol_type = other DNA
agggtgcactgacaatctctgggaaaaaagcaaggtctaatattcaaagcttggcaaacatgaccaagactttttctctt

SEQ ID NO: 48375 - DNA, 80 bp, synthetic construct; identical to SEQ ID NO: 23631
  misc_feature 1..80: note = Artificially Synthesized Probe
  source 1..80: mol_type = other DNA

SEQ ID NO: 48376 - DNA, 80 bp, synthetic construct
  misc_feature 1..80: note = Artificially Synthesized Probe
  source 1..80: mol_type = other DNA
tgggattacaggtgcgtgccaccacccccggctaatttttgtgtttttattgagacggggtttcaccatgttggtcagac

SEQ ID NO: 48377 - DNA, 80 bp, synthetic construct
  misc_feature 1..80: note = Artificially Synthesized Probe
  source 1..80: mol_type = other DNA
tagggacaaatttctcatcctcagcattattataaattagggacacagagaaaaacttgctggctcctagtgaaggcatt

SEQ ID NO: 48378 - DNA, 80 bp, synthetic construct
  misc_feature 1..80: note = Artificially Synthesized Probe
  source 1..80: mol_type = other DNA
ttctggttctagtaccatacattaaaattatagctttataatactttttaacatctgacaggatgtgctccccttatcat

SEQ ID NO: 48379 - DNA, 80 bp, synthetic construct
  misc_feature 1..80: note = Artificially Synthesized Probe
  source 1..80: mol_type = other DNA
taatctggagaagtcttgtttcgtaataataattcttaccatgaaggaaaatagcttctctctccgctgattcatgtttt

SEQ ID NO: 48380 - DNA, 80 bp, synthetic construct; identical to SEQ ID NO: 23632
  misc_feature 1..80: note = Artificially Synthesized Probe
  source 1..80: mol_type = other DNA

SEQ ID NO: 48381 - DNA, 80 bp, synthetic construct
  misc_feature 1..80: note = Artificially Synthesized Probe
  source 1..80: mol_type = other DNA
ctcctgagtagctgggattacaggcatgtgccaccacacccggctaatttttgtatttttagtagagacggggtttcacc

SEQ ID NO: 48382 - DNA, 80 bp, synthetic construct
  misc_feature 1..80: note = Artificially Synthesized Probe
  source 1..80: mol_type = other DNA
gaacgtgtgtctcttatgtcagcttaccattattgtccatgtaatttgccattttaacagactaaaaaagaaaagctata

SEQ ID NO: 48383 - DNA, 80 bp, synthetic construct
  misc_feature 1..80: note = Artificially Synthesized Probe
  source 1..80: mol_type = other DNA
gcgattctcctgcctcagcctcccaggtagctgggactacaggtgcacaccacaaggcccggctaatttttatatttttt

SEQ ID NO: 48384 - DNA, 80 bp, synthetic construct; identical to SEQ ID NO: 23633
  misc_feature 1..80: note = Artificially Synthesized Probe
  source 1..80: mol_type = other DNA

SEQ ID NO: 48385 - DNA, 80 bp, synthetic construct
  misc_feature 1..80: note = Artificially Synthesized Probe
  source 1..80: mol_type = other DNA
caaggcaaggatgtctgctctcacatcttctattgaactctctactggacattccagttaattcagtaaggcaagaacaa

SEQ ID NO: 48386 - DNA, 80 bp, synthetic construct
  misc_feature 1..80: note = Artificially Synthesized Probe
  source 1..80: mol_type = other DNA
ctagtttatttctatattgtagcaaagacaatacaaattgacgtgttaaaaaatgccatttataatggtaccaaaaatat

SEQ ID NO: 48387 - DNA, 80 bp, synthetic construct
  misc_feature 1..80: note = Artificially Synthesized Probe
  source 1..80: mol_type = other DNA
cgaggtcaagagatcgagaccatcctggccaacatggtgaaaccccatctctactaaaaatacaaaaattagctgggcat

SEQ ID NO: 48388 - DNA, 80 bp, synthetic construct; identical to SEQ ID NO: 23634
  misc_feature 1..80: note = Artificially Synthesized Probe
  source 1..80: mol_type = other DNA

SEQ ID NO: 48389 - DNA, 80 bp, synthetic construct
  misc_feature 1..80: note = Artificially Synthesized Probe
  source 1..80: mol_type = other DNA
tcttcctatgaatcaaatgggaaaacaaagactcacctcctctactagcaagaattcttgtagataccatgacaggttaa

SEQ ID NO: 48390 - DNA, 80 bp, synthetic construct
  misc_feature 1..80: note = Artificially Synthesized Probe
  source 1..80: mol_type = other DNA
gtattgctataaagatagacaagtcagtagttcagaatagagagtctaggaatagactcacacatgtatggtcaagtgat

SEQ ID NO: 48391 - DNA, 80 bp, synthetic construct
  misc_feature 1..80: note = Artificially Synthesized Probe
  source 1..80: mol_type = other DNA
tttttttttttttttttttttttttttttttttttttttttttttttttttttttttttcctgattaatttttatttatt

SEQ ID NO: 48392 - DNA, 80 bp, synthetic construct; identical to SEQ ID NO: 23635
  misc_feature 1..80: note = Artificially Synthesized Probe
  source 1..80: mol_type = other DNA

SEQ ID NO: 48393 - DNA, 80 bp, synthetic construct
  misc_feature 1..80: note = Artificially Synthesized Probe
  source 1..80: mol_type = other DNA
cttgggtgtttctcacagagggggatttggcagggtcatgggacaatagtggagggaaggtcagcagataaacaagtgaa

SEQ ID NO: 48394 - DNA, 80 bp, synthetic construct
  misc_feature 1..80: note = Artificially Synthesized Probe
  source 1..80: mol_type = other DNA
aaccctgagtggacacagcacatgtttcagagagcacagggttgggggtaaggtcacagatcaacaggatcccaaggcag

SEQ ID NO: 48395 - DNA, 80 bp, synthetic construct
  misc_feature 1..80: note = Artificially Synthesized Probe
  source 1..80: mol_type = other DNA
gttgggcacacctcccagacggggtggtggctgggcagaggggctcctcacttcccagtaggggcggccgggcagaggcg

SEQ ID NO: 48396 - DNA, 80 bp, synthetic construct
  misc_feature 1..80: note = Artificially Synthesized Probe
  source 1..80: mol_type = other DNA
ggacggggcggctggccgggcagaggggctcctcacttcccagtaggggcggccgggcagaggcgcccctcacctcccag

SEQ ID NO: 48397 - DNA, 80 bp, synthetic construct
  misc_feature 1..80: note = Artificially Synthesized Probe
  source 1..80: mol_type = other DNA
gcccctcacctcccagacggggcggctggccgggcggagggctgacccccccacctccctcccggacggggcggctggcc

SEQ ID NO: 48398 - DNA, 80 bp, synthetic construct
  misc_feature 1..80: note = Artificially Synthesized Probe
  source 1..80: mol_type = other DNA
gacggggcggctggccgggtggggggctgacccccccatctccctcccggacggggtggctggccgggctgaggggctcc

SEQ ID NO: 48399 - DNA, 80 bp, synthetic construct
  misc_feature 1..80: note = Artificially Synthesized Probe
  source 1..80: mol_type = other DNA
cgggcggggggctgacccccacacctccctcccggacggggcggctggccgggcagaggggctcctcacttcccagtagg

SEQ ID NO: 48400 - DNA, 80 bp, synthetic construct
  misc_feature 1..80: note = Artificially Synthesized Probe
  source 1..80: mol_type = other DNA
tgcaacctccacctccaggatctgcttctgcatttcctcaatggtaaataaattcaagcgattctcatgcctcagtctcc

SEQ ID NO: 48401 - DNA, 80 bp, synthetic construct
  misc_feature 1..80: note = Artificially Synthesized Probe
  source 1..80: mol_type = other DNA
ctcacttcccagtaggggcggccgggcagaggcgcccctcacctcccagacggggcggctggccgggcggagggctgacc

SEQ ID NO: 48402 - DNA, 80 bp, synthetic construct
  misc_feature 1..80: note = Artificially Synthesized Probe
  source 1..80: mol_type = other DNA
aggcggagggctgacccccccacctccctcccggacggggcggctggccgggtgggggggctgacccccccatctccctc

SEQ ID NO: 48403 - DNA, 80 bp, synthetic construct
  misc_feature 1..80: note = Artificially Synthesized Probe
  source 1..80: mol_type = other DNA
ccccccgcacctccctcccggacggggtggctgccgggcggagacgctcctcacttcccagatggggtggctgccgggcg

SEQ ID NO: 48404 - DNA, 80 bp, synthetic construct
  misc_feature 1..80: note = Artificially Synthesized Probe
  source 1..80: mol_type = other DNA
gaggcgctcctcacatcccagatggggcggcggggcagaggcgctccccacatctcagacgatgggcggccgggcagaga

SEQ ID NO: 48405 - DNA, 80 bp, synthetic construct
  misc_feature 1..80: note = Artificially Synthesized Probe
  source 1..80: mol_type = other DNA
cctcacttcccagacggggtggcggccgggcagaggctgcaatctcggcactttgggaggccaaggcaggcggctgctcc

SEQ ID NO: 48406 - DNA, 80 bp, synthetic construct
  misc_feature 1..80: note = Artificially Synthesized Probe
  source 1..80: mol_type = other DNA
agaaaagcacaatcaataacagaaacattaaattgggctttgtcgaaattaataacttctatcaaaggacactgttaaga

SEQ ID NO: 48407 - DNA, 80 bp, synthetic construct; identical to SEQ ID NO: 23636
  misc_feature 1..80: note = Artificially Synthesized Probe
  source 1..80: mol_type = other DNA

SEQ ID NO: 48408 - DNA, 80 bp, synthetic construct
  misc_feature 1..80: note = Artificially Synthesized Probe
  source 1..80: mol_type = other DNA
actcaggtcagagacaatgaactttattattcatcacacagcaagcagcatgagcattaacttttgcatcagctcttgct

SEQ ID NO: 48409 - DNA, 80 bp, synthetic construct
  misc_feature 1..80: note = Artificially Synthesized Probe
  source 1..80: mol_type = other DNA
aagttgcttgctgcaaagacaatcctgagaaatggcctggctaaagagcagtcaataccttacattcttggtatactcta

SEQ ID NO: 48410 - DNA, 80 bp, synthetic construct; identical to SEQ ID NO: 23637
  misc_feature 1..80: note = Artificially Synthesized Probe
  source 1..80: mol_type = other DNA

SEQ ID NO: 48411 - DNA, 80 bp, synthetic construct; identical to SEQ ID NO: 23603
  misc_feature 1..80: note = Artificially Synthesized Probe
  source 1..80: mol_type = other DNA

SEQ ID NO: 48412 - DNA, 80 bp, synthetic construct
  misc_feature 1..80: note = Artificially Synthesized Probe
  source 1..80: mol_type = other DNA
cactcaggcatcaggagaagcacatgattttgtatgagtcagcttaaaacatagttgtgccagtctgtgtttgtacatgt

SEQ ID NO: 48413 - DNA, 80 bp, synthetic construct
  misc_feature 1..80: note = Artificially Synthesized Probe
  source 1..80: mol_type = other DNA
atgtaactatttgccaggttgcagtgctggatctaagggacatagagaacattaactgttccctacctctccacacttcc

SEQ ID NO: 48414 - DNA, 80 bp, synthetic construct
  misc_feature 1..80: note = Artificially Synthesized Probe
  source 1..80: mol_type = other DNA
ggacaagagcttttttttttttttttttttttgatacagagtctcgctctgttgcccaggctggagtacaatggtgtgat

SEQ ID NO: 48415 - DNA, 80 bp, synthetic construct
  misc_feature 1..80: note = Artificially Synthesized Probe
  source 1..80: mol_type = other DNA
cctgacctcatgatctgcccacctcggcctcccacagtgctgggattacaggtgtgagccaccgcgcccggcccacatgg

SEQ ID NO: 48416 - DNA, 80 bp, synthetic construct; identical to SEQ ID NO: 23638
  misc_feature 1..80: note = Artificially Synthesized Probe
  source 1..80: mol_type = other DNA

SEQ ID NO: 48417 - DNA, 80 bp, synthetic construct
  misc_feature 1..80: note = Artificially Synthesized Probe
  source 1..80: mol_type = other DNA
caaaaccattacctgagaaaaagtcaacaggaatgagataccagtggaatagcttggaagaggtcaaaggtctgatgtca

SEQ ID NO: 48418 - DNA, 80 bp, synthetic construct
  misc_feature 1..80: note = Artificially Synthesized Probe
  source 1..80: mol_type = other DNA
ggtagcttctgattcagaaacacagagtcccttactttgtgcccagttgatgatggtgtcaccatgtccaatgttatgat

SEQ ID NO: 48419 - DNA, 80 bp, synthetic construct; identical to SEQ ID NO: 23639
  misc_feature 1..80: note = Artificially Synthesized Probe
  source 1..80: mol_type = other DNA

SEQ ID NO: 48420 - DNA, 80 bp, synthetic construct
  misc_feature 1..80: note = Artificially Synthesized Probe
  source 1..80: mol_type = other DNA
tttcttttctccttccttccttccttccttcctttctttcctttctttcttcctcactctgttgcccaagtgtatatgac

SEQ ID NO: 48421 - DNA, 80 bp, synthetic construct
  misc_feature 1..80: note = Artificially Synthesized Probe
  source 1..80: mol_type = other DNA
gagatccccagattccacttgtaaaaccattgatctaaaaactacgtcttgacttcagaacacttcttttgatctggaat

SEQ ID NO: 48422 - DNA, 80 bp, synthetic construct
  misc_feature 1..80: note = Artificially Synthesized Probe
  source 1..80: mol_type = other DNA
aacccaggaggcagaggttgcagtgagccgagattgcgccactgtactccagcctgggtgacagagcgagactcagaaaa

SEQ ID NO: 48423 - DNA, 80 bp, synthetic construct
  misc_feature 1..80: note = Artificially Synthesized Probe
  source 1..80: mol_type = other DNA
aagggtacaaaatccatggctaatgttgccagtaagaggccacatcaagtgattgacctggaaatgaaatttaaagtaaa

SEQ ID NO: 48424 - DNA, 80 bp, synthetic construct
  misc_feature 1..80: note = Artificially Synthesized Probe
  source 1..80: mol_type = other DNA
tagctaggattacaggcacataccaccatgcccagctaatttttaaattttttgtagagatagggtcttgctgtgttgcc

SEQ ID NO: 48425 - DNA, 80 bp, synthetic construct
  misc_feature 1..80: note = Artificially Synthesized Probe
  source 1..80: mol_type = other DNA
ggcagatcatgaagtcaggagtttgagaccagcctgatcaacattgtgaaaccccgtctctactaaaaatacaaaaatta

SEQ ID NO: 48426 - DNA, 80 bp, synthetic construct; identical to SEQ ID NO: 23640
  misc_feature 1..80: note = Artificially Synthesized Probe
  source 1..80: mol_type = other DNA

SEQ ID NO: 48427 - DNA, 80 bp, synthetic construct
  misc_feature 1..80: note = Artificially Synthesized Probe
  source 1..80: mol_type = other DNA
ggattgctagagcccaggaagtcgtggctgaagtgggctcatgataatgccactgcactccagcctgtgtgacagagtga

SEQ ID NO: 48428 - DNA, 80 bp, synthetic construct
  misc_feature 1..80: note = Artificially Synthesized Probe
  source 1..80: mol_type = other DNA
gagggagggaagaaggaaggaaggaaggaaggagggagggagggaagaaggaaagaaggaaggaaggagaaagagagaaa

SEQ ID NO: 48429 - DNA, 80 bp, synthetic construct; identical to SEQ ID NO: 23641
  misc_feature 1..80: note = Artificially Synthesized Probe
  source 1..80: mol_type = other DNA

SEQ ID NO: 48430 - DNA, 80 bp, synthetic construct
  misc_feature 1..80: note = Artificially Synthesized Probe
  source 1..80: mol_type = other DNA
cgtgtctgtaatcccagctacttgggaggttgaggcagaagaatcgcttgaatccaggaggtggacgttgcagtgagctg

SEQ ID NO: 48431 - DNA, 80 bp, synthetic construct
  misc_feature 1..80: note = Artificially Synthesized Probe
  source 1..80: mol_type = other DNA
cagcctaggcaagatggcgagacccccatcttaaaaataaatcattatgcattatataatgtgaatgtgagagagcaata

SEQ ID NO: 48432 - DNA, 80 bp, synthetic construct
  misc_feature 1..80: note = Artificially Synthesized Probe
  source 1..80: mol_type = other DNA
gtaagagtctaacttcattgttttgcatgtagatatccacttttcctagtaccatttgttgaaaaaaactcttatttccc

SEQ ID NO: 48433 - DNA, 80 bp, synthetic construct
  misc_feature 1..80: note = Artificially Synthesized Probe
  source 1..80: mol_type = other DNA
acagttacagaaaagtgttcatatcgatgaattttcactatgtgaacactcccagaaaactagaatctagatctagaaac

SEQ ID NO: 48434 - DNA, 80 bp, synthetic construct; identical to SEQ ID NO: 23642
  misc_feature 1..80: note = Artificially Synthesized Probe
  source 1..80: mol_type = other DNA

SEQ ID NO: 48435 - DNA, 80 bp, synthetic construct
  misc_feature 1..80: note = Artificially Synthesized Probe
  source 1..80: mol_type = other DNA
acatctttcacccccttggctatgttaattcctaattcttttgatgcttttgtagattgaatcattttcttaatttcctt

SEQ ID NO: 48436 - DNA, 80 bp, synthetic construct
  misc_feature 1..80: note = Artificially Synthesized Probe
  source 1..80: mol_type = other DNA
cttcctttttaatgcggatggctttgctttcttttccttgcctaattgttctaggtagaacttccagtactattttgagt

SEQ ID NO: 48437 - DNA, 80 bp, synthetic construct
  misc_feature 1..80: note = Artificially Synthesized Probe
  source 1..80: mol_type = other DNA
aagcagtcctcctattcctagtttgtggagtgtttttttttatcatgaaattatgttagagtttgtcaaatgcttttcct

SEQ ID NO: 48438 - DNA, 80 bp, synthetic construct
  misc_feature 1..80: note = Artificially Synthesized Probe
  source 1..80: mol_type = other DNA
tcttgctgcttccaagattttatctttggttttggctttcaaaagtttgattataccgtatctttgtgtggatctctttg

SEQ ID NO: 48439 - DNA, 80 bp, synthetic construct; identical to SEQ ID NO: 23643
  misc_feature 1..80: note = Artificially Synthesized Probe
  source 1..80: mol_type = other DNA

SEQ ID NO: 48440 - DNA, 80 bp, synthetic construct
  misc_feature 1..80: note = Artificially Synthesized Probe
  source 1..80: mol_type = other DNA
tattgatattccccttttgcttgtacttgtttttttcactctccacatcttcctttagttctctgagcatctctaagaca

SEQ ID NO: 48441 - DNA, 80 bp, synthetic construct
  misc_feature 1..80: note = Artificially Synthesized Probe
  source 1..80: mol_type = other DNA
ttctaacaccatacattaaattttgcctgtttgggggctttatatgtgtgtgtaggtgtttttatgcgtggcttctttcg

SEQ ID NO: 48442 - DNA, 80 bp, synthetic construct
  misc_feature 1..80: note = Artificially Synthesized Probe
  source 1..80: mol_type = other DNA
gaaaccaggttctcccctttcctcagggtttactttattttgttactgttttttgttattgttgatgtttcttttttatt

SEQ ID NO: 48443 - DNA, 80 bp, synthetic construct; identical to SEQ ID NO: 23644
  misc_feature 1..80: note = Artificially Synthesized Probe
  source 1..80: mol_type = other DNA

SEQ ID NO: 48444 - DNA, 80 bp, synthetic construct
  misc_feature 1..80: note = Artificially Synthesized Probe
  source 1..80: mol_type = other DNA
tggcccaggctggagtgcagtggcacaatcttggctcaccgcaacctctgcctcccaggttcaagcgattctcctgcctc

SEQ ID NO: 48445 - DNA, 80 bp, synthetic construct
  misc_feature 1..80: note = Artificially Synthesized Probe
  source 1..80: mol_type = other DNA
aaagccttacttggtgggtcatataatgaactaaaatttggaaaacattcacatttgtggaatgcttcagagttttcaag

SEQ ID NO: 48446 - DNA, 80 bp, synthetic construct
  misc_feature 1..80: note = Artificially Synthesized Probe
  source 1..80: mol_type = other DNA
ccagttgcccttgtctctacaaatcaccaaaagaaattggttcctagaaataaggataatgtaggggtgtgccatcccct

SEQ ID NO: 48447 - DNA, 80 bp, synthetic construct; identical to SEQ ID NO: 23645
  misc_feature 1..80: note = Artificially Synthesized Probe
  source 1..80: mol_type = other DNA

SEQ ID NO: 48448 - DNA, 80 bp, synthetic construct
  misc_feature 1..80: note = Artificially Synthesized Probe
  source 1..80: mol_type = other DNA
ggcaaaactattcttaaagtcatgtttcagcagctactaaactagtcttggggttacagcaggccattttagcagctggg

SEQ ID NO: 48449 - DNA, 80 bp, synthetic construct
  misc_feature 1..80: note = Artificially Synthesized Probe
  source 1..80: mol_type = other DNA
actaagtaaggagaagaaaagaactgcagcgtcatagtttttgagtctgtgtaagtacagccctttgactgaaatctgaa

SEQ ID NO: 48450 - DNA, 80 bp, synthetic construct
  misc_feature 1..80: note = Artificially Synthesized Probe
  source 1..80: mol_type = other DNA
cacccggaatttctgaaacaagctgaattagacccttctttggcaggacttgtttttctaggttaactcaattagactgt

SEQ ID NO: 48451 - DNA, 80 bp, synthetic construct; identical to SEQ ID NO: 23646
  misc_feature 1..80: note = Artificially Synthesized Probe
  source 1..80: mol_type = other DNA

SEQ ID NO: 48452 - DNA, 80 bp, synthetic construct; identical to SEQ ID NO: 23604
  misc_feature 1..80: note = Artificially Synthesized Probe
  source 1..80: mol_type = other DNA

SEQ ID NO: 48453 - DNA, 80 bp, synthetic construct
  misc_feature 1..80: note = Artificially Synthesized Probe
  source 1..80: mol_type = other DNA
tcacttgcaccgtaaataggaggaaacaattttcttttcttctgccgcctatagagattctattttcttctctaagttta

SEQ ID NO: 48454 - DNA, 80 bp, synthetic construct
  misc_feature 1..80: note = Artificially Synthesized Probe
  source 1..80: mol_type = other DNA
acatttcctattttcactgtggatctgaaagaaccttcctgcctgtgagatgtggtgaagtttgaaataattttgtagta

SEQ ID NO: 48455 - DNA, 80 bp, synthetic construct
  misc_feature 1..80: note = Artificially Synthesized Probe
  source 1..80: mol_type = other DNA
gctgctactttggaaagttgaaaggacttaacagttatccctcctttcttggaaagttaaacagatttttttgattcact

SEQ ID NO: 48456 - DNA, 80 bp, synthetic construct
  misc_feature 1..80: note = Artificially Synthesized Probe
  source 1..80: mol_type = other DNA
taaatatcgaccctgaccccaaagtcacactttaatgcttctttaaatgtcttcagaaagttgcttgtggtttcagattt

SEQ ID NO: 48457 - DNA, 80 bp, synthetic construct; identical to SEQ ID NO: 23647
  misc_feature 1..80: note = Artificially Synthesized Probe
  source 1..80: mol_type = other DNA

SEQ ID NO: 48458 - DNA, 80 bp, synthetic construct
  misc_feature 1..80: note = Artificially Synthesized Probe
  source 1..80: mol_type = other DNA
agacggagtctcactgtcacccaggctggagtgcaatggcatgatcttggctcactgcaacctctgcctcctgagttcaa

SEQ ID NO: 48459 - DNA, 80 bp, synthetic construct
  misc_feature 1..80: note = Artificially Synthesized Probe
  source 1..80: mol_type = other DNA
aagtgctgggattacaggcgtgagccacagcacccagccagtcattttgggttttctttggttattttggatgccttact

SEQ ID NO: 48460 - DNA, 80 bp, synthetic construct
  misc_feature 1..80: note = Artificially Synthesized Probe
  source 1..80: mol_type = other DNA
aagatttgctcagctatatctccttggttctgacttaatcctcttctgcagaaaatttcatctcacatcaaagcctcttc

SEQ ID NO: 48461 - DNA, 80 bp, synthetic construct; identical to SEQ ID NO: 23648
  misc_feature 1..80: note = Artificially Synthesized Probe
  source 1..80: mol_type = other DNA

SEQ ID NO: 48462 - DNA, 80 bp, synthetic construct
  misc_feature 1..80: note = Artificially Synthesized Probe
  source 1..80: mol_type = other DNA
cagatttcacactgacaaacagctgcctgaaggagtcttgtccttttgtcccttgagaagggacacagcctcaagtcttc

SEQ ID NO: 48463 - DNA, 80 bp, synthetic construct
  misc_feature 1..80: note = Artificially Synthesized Probe
  source 1..80: mol_type = other DNA
aattcagtcacaatagtgaaatcggtacgtgtatgtagatacagcccaagagatcaaataattttagtgttgttaagaaa

SEQ ID NO: 48464 - DNA, 80 bp, synthetic construct
  misc_feature 1..80: note = Artificially Synthesized Probe
  source 1..80: mol_type = other DNA
tttcttacatcctcatcagtggttggtattgtctgtcttttacgtttagccattttgatgggtgtatagtggaatgcttc

SEQ ID NO: 48465 - DNA, 80 bp, synthetic construct; identical to SEQ ID NO: 23649
  misc_feature 1..80: note = Artificially Synthesized Probe
  source 1..80: mol_type = other DNA

SEQ ID NO: 48466 - DNA, 80 bp, synthetic construct
  misc_feature 1..80: note = Artificially Synthesized Probe
  source 1..80: mol_type = other DNA
ggagatcgagaccatcctggctaacacgatgaaaccccgtctctactaaaaatacaaaaaaattaaccgggcgtggtggc

SEQ ID NO: 48467 - DNA, 80 bp, synthetic construct
  misc_feature 1..80: note = Artificially Synthesized Probe
  source 1..80: mol_type = other DNA
attcaagatcgtaatttgcatgacaataaaccatggttttgtgggctctaagtttcttagaagtgtccgcagcaatttag

SEQ ID NO: 48468 - DNA, 80 bp, synthetic construct
  misc_feature 1..80: note = Artificially Synthesized Probe
  source 1..80: mol_type = other DNA
agacatgtttcacttgctatttccaggactacatcttgagcatgggtgtacagtatttttcattggttagcagaatttta

SEQ ID NO: 48469 - DNA, 80 bp, synthetic construct; identical to SEQ ID NO: 23650
  misc_feature 1..80: note = Artificially Synthesized Probe
  source 1..80: mol_type = other DNA

SEQ ID NO: 48470 - DNA, 80 bp, synthetic construct
  misc_feature 1..80: note = Artificially Synthesized Probe
  source 1..80: mol_type = other DNA
tccagaatagctcgaacaactcctaccaacagtatgttattgtgcccgtagggtggactttgtaacaacaaagcaaattg

SEQ ID NO: 48471 - DNA, 80 bp, synthetic construct
  misc_feature 1..80: note = Artificially Synthesized Probe
  source 1..80: mol_type = other DNA
accgggtttttcaaaaaataaaaagacaaagagagagtcaggccgggcacagtggctcatgcctgtaatcccagcacttt

SEQ ID NO: 48472 - DNA, 80 bp, synthetic construct
  misc_feature 1..80: note = Artificially Synthesized Probe
  source 1..80: mol_type = other DNA
aacctgggaggcggaggtggcagtgagctgagatcatgccattgcactcgagcctgggcgacagtgtgagactctgtctc

SEQ ID NO: 48473 - DNA, 80 bp, synthetic construct
  misc_feature 1..80: note = Artificially Synthesized Probe
  source 1..80: mol_type = other DNA
tctcaggcctcagcctcctgagtagctgggactacaggtgtgcgccaccatgcctggctaaattttgtattttttttggt

SEQ ID NO: 48474 - DNA, 80 bp, synthetic construct; identical to SEQ ID NO: 23651
  misc_feature 1..80: note = Artificially Synthesized Probe
  source 1..80: mol_type = other DNA

SEQ ID NO: 48475 - DNA, 80 bp, synthetic construct
  misc_feature 1..80: note = Artificially Synthesized Probe
  source 1..80: mol_type = other DNA
taaatatagatatgagccctttgttgtgtacatgttgcaaatatcatctcccacaaggctatgtggagtcacactggagc

SEQ ID NO: 48476 - DNA, 80 bp, synthetic construct
  misc_feature 1..80: note = Artificially Synthesized Probe
  source 1..80: mol_type = other DNA
atctttgatgctgtcatcatctacttctggccatttttctgaatgacatgaattatgtcatctgtaaagtctccccgaat

SEQ ID NO: 48477 - DNA, 80 bp, synthetic construct
  misc_feature 1..80: note = Artificially Synthesized Probe
  source 1..80: mol_type = other DNA
ttgctctaggaattttggccttagtaagcttttgtggtatggtcttctttttttgttttatttggcctcttccacctctc

SEQ ID NO: 48478 - DNA, 80 bp, synthetic construct; identical to SEQ ID NO: 23652
  misc_feature 1..80: note = Artificially Synthesized Probe
  source 1..80: mol_type = other DNA

SEQ ID NO: 48479 - DNA, 80 bp, synthetic construct
  misc_feature 1..80: note = Artificially Synthesized Probe
  source 1..80: mol_type = other DNA
cccatgccttgtagacaggcagctgagaaggtaccagaaaaaaaaaaaaaggctgcaggtctgtacccttcactgtacca

SEQ ID NO: 48480 - DNA, 80 bp, synthetic construct
  misc_feature 1..80: note = Artificially Synthesized Probe
  source 1..80: mol_type = other DNA
cgccatgttgcccaggctggtcttgaactcctgacctcaagtgatctgcccacctcagcctcccaaagtgctgggattac

SEQ ID NO: 48481 - DNA, 80 bp, synthetic construct
  misc_feature 1..80: note = Artificially Synthesized Probe
  source 1..80: mol_type = other DNA
tatactcctctctttaatttaaaaacctagtgagtttaacattttatgtttttagttttttttgttttagttgtcattgt

SEQ ID NO: 48482 - DNA, 80 bp, synthetic construct
  misc_feature 1..80: note = Artificially Synthesized Probe
  source 1..80: mol_type = other DNA
aggcatgagccaatgtagcccgttgtgtttaacattgtatatgcctctctcctaaatagctatttttagaaaagactgat

SEQ ID NO: 48483 - DNA, 80 bp, synthetic construct
  misc_feature 1..80: note = Artificially Synthesized Probe
  source 1..80: mol_type = other DNA
tctgttgcccaggctggagtgcaatggtgtgatctcggctcactgcaacctccgcctcccgggttcaagcgattctcctg

SEQ ID NO: 48484 - DNA, 80 bp, synthetic construct; identical to SEQ ID NO: 23653
  misc_feature 1..80: note = Artificially Synthesized Probe
  source 1..80: mol_type = other DNA

SEQ ID NO: 48485 - DNA, 80 bp, synthetic construct
  misc_feature 1..80: note = Artificially Synthesized Probe
  source 1..80: mol_type = other DNA
ttttgtggagatgaggtcttgccgtgttgcccaggctggtctcaaactcctggtctcaagcaatcttcctgactccacct

SEQ ID NO: 48486 - DNA, 80 bp, synthetic construct
  misc_feature 1..80: note = Artificially Synthesized Probe
  source 1..80: mol_type = other DNA
tggccaacatggtgaaacactgtcgctactaaaaatagaaaaattagcctggcatggtgatgggcgcctgtaatcccagc

SEQ ID NO: 48487 - DNA, 80 bp, synthetic construct
  misc_feature 1..80: note = Artificially Synthesized Probe
  source 1..80: mol_type = other DNA
aactgtatccaaggcaagagcctcacttgcctcaccccaatcctggcccatcccattctgtgtcttgcattgtcatgctc

SEQ ID NO: 48488 - DNA, 80 bp, synthetic construct
  misc_feature 1..80: note = Artificially Synthesized Probe
  source 1..80: mol_type = other DNA
taagctacttgcagcattagaatgaacttatgacatctcaatattacaactttggggaaaaacattctactgactgtctc

SEQ ID NO: 48489 - DNA, 80 bp, synthetic construct; identical to SEQ ID NO: 23654
  misc_feature 1..80: note = Artificially Synthesized Probe
  source 1..80: mol_type = other DNA

SEQ ID NO: 48490 - DNA, 80 bp, synthetic construct
  misc_feature 1..80: note = Artificially Synthesized Probe
  source 1..80: mol_type = other DNA
ggaggctgatgtgggaggattgcttgagcccaggaggtcaaggctgcagtgagctatggtcttgccattgccttccagcc

SEQ ID NO: 48491 - DNA, 80 bp, synthetic construct
  misc_feature 1..80: note = Artificially Synthesized Probe
  source 1..80: mol_type = other DNA
atggtaaaaccccatctctaccaaaaatacaaaaaaaaaaaaaaaattagccaggtgtggtggcacatgcctgtagtccc

SEQ ID NO: 48492 - DNA, 80 bp, synthetic construct
  misc_feature 1..80: note = Artificially Synthesized Probe
  source 1..80: mol_type = other DNA
agaaaaagttatccatagagagaaagtaacttgccagaagtcacacagggagctagtggcagggctgggaccagaaccca

SEQ ID NO: 48493 - DNA, 80 bp, synthetic construct; identical to SEQ ID NO: 23655
  misc_feature 1..80: note = Artificially Synthesized Probe
  source 1..80: mol_type = other DNA

SEQ ID NO: 48494 - DNA, 80 bp, synthetic construct
  misc_feature 1..80: note = Artificially Synthesized Probe
  source 1..80: mol_type = other DNA
tcttaattttttaacaaggggtcctacatttcatttttcacagggcctggcaaattgtgcctcaactctaacacttcccc

SEQ ID NO: 48495 - DNA, 80 bp, synthetic construct
  misc_feature 1..80: note = Artificially Synthesized Probe
  source 1..80: mol_type = other DNA
cctgaaaaatcacatatgcacagtgtttcacagacaatttcaaggtcaagaattccctcttgctctatcatttccctttc

SEQ ID NO: 48496 - DNA, 80 bp, synthetic construct
  misc_feature 1..80: note = Artificially Synthesized Probe
  source 1..80: mol_type = other DNA
acttcttgatctgtgttcactgtccttcacagggatgagctttaccaagaacccccaggtctctggccattggtgcttgg

SEQ ID NO: 48497 - DNA, 80 bp, synthetic construct; identical to SEQ ID NO: 23656
  misc_feature 1..80: note = Artificially Synthesized Probe
  source 1..80: mol_type = other DNA

SEQ ID NO: 48498 - DNA, 80 bp, synthetic construct
  misc_feature 1..80: note = Artificially Synthesized Probe
  source 1..80: mol_type = other DNA
cacatctcaaaaaaattaaaaaggccgagcacggtggctcacacctgtaatcccagcactttgggaggctgaggcgggcg

SEQ ID NO: 48499 - DNA, 80 bp, synthetic construct; identical to SEQ ID NO: 23605
  misc_feature 1..80: note = Artificially Synthesized Probe
  source 1..80: mol_type = other DNA

SEQ ID NO: 48500 - DNA, 80 bp, synthetic construct
  misc_feature 1..80: note = Artificially Synthesized Probe
  source 1..80: mol_type = other DNA
tgcctttgcctcttcttccattctcatctctcactacacctctgtctcagtaggtacttagccatgccacatgactggga

SEQ ID NO: 48501 - DNA, 80 bp, synthetic construct; identical to SEQ ID NO: 23657
  misc_feature 1..80: note = Artificially Synthesized Probe
  source 1..80: mol_type = other DNA

SEQ ID NO: 48502 - DNA, 80 bp, synthetic construct
  misc_feature 1..80: note = Artificially Synthesized Probe
  source 1..80: mol_type = other DNA
tgggcttgtacaaactttccatgactttccatgccctcttttccacaacttagtcagattcagtcacacttatgcatttg

SEQ ID NO: 48503 - DNA, 80 bp, synthetic construct
  misc_feature 1..80: note = Artificially Synthesized Probe
  source 1..80: mol_type = other DNA
cattctcctgcctcagcctcccaggtagctgggactacaggtgcccgccaccacgcccggctgatttttttttgtatttt

SEQ ID NO: 48504 - DNA, 80 bp, synthetic construct
  misc_feature 1..80: note = Artificially Synthesized Probe
  source 1..80: mol_type = other DNA
cagggaggcaagaattggaaatgaggaatttgctatgttctgaatgtttatgccctctcagattcagatgttgaaatcct

SEQ ID NO: 48505 - DNA, 80 bp, synthetic construct; identical to SEQ ID NO: 23658
  misc_feature 1..80: note = Artificially Synthesized Probe
  source 1..80: mol_type = other DNA

SEQ ID NO: 48506 - DNA, 80 bp, synthetic construct
  misc_feature 1..80: note = Artificially Synthesized Probe
  source 1..80: mol_type = other DNA
gatagaaggtagattctttcattcatataacaaatttttgtcaagtttccactctgtgcctcagactctatagtgagtca

SEQ ID NO: 48507 - DNA, 80 bp, synthetic construct
  misc_feature 1..80: note = Artificially Synthesized Probe
  source 1..80: mol_type = other DNA
gcactggtgccagtctctgagttccctcagtatttattgattattatttttactattttagtgaggggagtgtagcaggg

SEQ ID NO: 48508 - DNA, 80 bp, synthetic construct
  misc_feature 1..80: note = Artificially Synthesized Probe
  source 1..80: mol_type = other DNA
ttgttgtcagtatatctcccctctagccacagggcggttttctcctattttctcctatcttagaataaaatgaatgggaa

SEQ ID NO: 48509 - DNA, 80 bp, synthetic construct
  misc_feature 1..80: note = Artificially Synthesized Probe
  source 1..80: mol_type = other DNA
tccctcaaattggcatccctcaaattggcatctggtaatgtacattgtggggtagactgataatcaaatgacagtgcaac

SEQ ID NO: 48510 - DNA, 80 bp, synthetic construct
  misc_feature 1..80: note = Artificially Synthesized Probe
  source 1..80: mol_type = other DNA
ccacgaggccatatctcaggctgtctcagtggggggaaaccttggacaatacccaggctttcttgggcagaggtccctgc

SEQ ID NO: 48511 - DNA, 80 bp, synthetic construct; identical to SEQ ID NO: 23659
  misc_feature 1..80: note = Artificially Synthesized Probe
  source 1..80: mol_type = other DNA

SEQ ID NO: 48512 - DNA, 80 bp, synthetic construct
  misc_feature 1..80: note = Artificially Synthesized Probe
  source 1..80: mol_type = other DNA
tcctgcctcagcctcccgagtagctgggactacaggtgtctgccaccacgcccgcctaatttttttgtatttttagtaga

SEQ ID NO: 48513 - DNA, 80 bp, synthetic construct
  misc_feature 1..80: note = Artificially Synthesized Probe
  source 1..80: mol_type = other DNA
tatttatttatttatttatttatttatttattttttagagacagagtcttgctccgttgcccaggccggagtgcaatggc

SEQ ID NO: 48514 - DNA, 80 bp, synthetic construct
  misc_feature 1..80: note = Artificially Synthesized Probe
  source 1..80: mol_type = other DNA
ctcctggcctcaagtgatgcacccacctcagcttcccaaagtgctgggcttataggcgtgagtgccgggcccttaaaact

SEQ ID NO: 48515 - DNA, 80 bp, synthetic construct; identical to SEQ ID NO: 23660
  misc_feature 1..80: note = Artificially Synthesized Probe
  source 1..80: mol_type = other DNA

SEQ ID NO: 48516 - DNA, 80 bp, synthetic construct
  misc_feature 1..80: note = Artificially Synthesized Probe
  source 1..80: mol_type = other DNA
tacctcagcctcccaagtagttgggattacaggcatgcgccaccacacccagctaatttttgtatttttagtagagacga

SEQ ID NO: 48517 - DNA, 80 bp, synthetic construct
  misc_feature 1..80: note = Artificially Synthesized Probe
  source 1..80: mol_type = other DNA
ataacagcaacaaggtctgtacagatccaaaaacgtttacctgtaattgcaaaatcccaacaccctgaaaagtataaggt

SEQ ID NO: 48518 - DNA, 80 bp, synthetic construct
  misc_feature 1..80: note = Artificially Synthesized Probe
  source 1..80: mol_type = other DNA
tcatgtgcattgcacgttggatgagccagggaaattattacattaacaagcattttgtgtgtatgtagtagttactttgt

SEQ ID NO: 48519 - DNA, 80 bp, synthetic construct
  misc_feature 1..80: note = Artificially Synthesized Probe
  source 1..80: mol_type = other DNA
ttatgaagatccatgcctttttgctatagaagcattaatattttcattatagggttctcccagaccccttatatgtggtt

SEQ ID NO: 48520 - DNA, 80 bp, synthetic construct; identical to SEQ ID NO: 23661
  misc_feature 1..80: note = Artificially Synthesized Probe
  source 1..80: mol_type = other DNA

SEQ ID NO: 48521 - DNA, 80 bp, synthetic construct
  misc_feature 1..80: note = Artificially Synthesized Probe
  source 1..80: mol_type = other DNA
tgtgcagtgaatagtgtttacattaggcttatggctgctctgatggtgaactgagcttgtacctacattatgaagtgttc

SEQ ID NO: 48522 - DNA, 80 bp, synthetic construct
  misc_feature 1..80: note = Artificially Synthesized Probe
  source 1..80: mol_type = other DNA
gattcagccccctcgttctcaatcctgttcctgggtctaacttaatcttccccaaactcctgccacctttttctttcttc

SEQ ID NO: 48523 - DNA, 80 bp, synthetic construct; identical to SEQ ID NO: 23662
  misc_feature 1..80: note = Artificially Synthesized Probe
  source 1..80: mol_type = other DNA

SEQ ID NO: 48524 - DNA, 80 bp, synthetic construct
  misc_feature 1..80: note = Artificially Synthesized Probe
  source 1..80: mol_type = other DNA
agccctctgttacgcccggacagggccactagagggcttcctggtctagcagtaatgccagcacctgggaaggcacccat

SEQ ID NO: 48525 - DNA, 80 bp, synthetic construct
  misc_feature 1..80: note = Artificially Synthesized Probe
  source 1..80: mol_type = other DNA
gcctccagaggcctgaccatctccctgtgatgctgtgcttcagcggtcacgctcctggtccgctttcatgttccaccccg

SEQ ID NO: 48526 - DNA, 80 bp, synthetic construct
  misc_feature 1..80: note = Artificially Synthesized Probe
  source 1..80: mol_type = other DNA
accttatctatcactggagatggctcacactccttaccctgcccccttgtcttgtatccaataaataacagcacagccag

SEQ ID NO: 48527 - DNA, 80 bp, synthetic construct
  misc_feature 1..80: note = Artificially Synthesized Probe
  source 1..80: mol_type = other DNA
taacacccggctaattttttaaaaattttttgtagagatgaggtctctctatgttgccaggctggtctcaaattcctaag

SEQ ID NO: 48528 - DNA, 80 bp, synthetic construct; identical to SEQ ID NO: 23663
  misc_feature 1..80: note = Artificially Synthesized Probe
  source 1..80: mol_type = other DNA

SEQ ID NO: 48529 - DNA, 80 bp, synthetic construct
  misc_feature 1..80: note = Artificially Synthesized Probe
  source 1..80: mol_type = other DNA
ccactccctgctaagagccttttgttaatcagagcttcccaccacattccaccacatctccatcctttactttccttgtt

SEQ ID NO: 48530 - DNA, 80 bp, synthetic construct
  misc_feature 1..80: note = Artificially Synthesized Probe
  source 1..80: mol_type = other DNA
tgttcagtgtggctttaattttcccccctatggtttgttctttaatgccttttacatttggacacatagtttatgctttt

SEQ ID NO: 48531 - DNA, 80 bp, synthetic construct
  misc_feature 1..80: note = Artificially Synthesized Probe
  source 1..80: mol_type = other DNA
agtgaagtggtacgatctcagctcactgcaacttcctccccctgggttcaggcgattctcctgcctcagcctcctgagta

SEQ ID NO: 48532 - DNA, 80 bp, synthetic construct; identical to SEQ ID NO: 23664
  misc_feature 1..80: note = Artificially Synthesized Probe
  source 1..80: mol_type = other DNA

SEQ ID NO: 48533 - DNA, 80 bp, synthetic construct
  misc_feature 1..80: note = Artificially Synthesized Probe
  source 1..80: mol_type = other DNA
tggtctttttagcaacaatcagaagctaaaaattaaaaacaatattgcttttggaagagatcaatgatacagaataaaaa

SEQ ID NO: 48534 - DNA, 80 bp, synthetic construct
  misc_feature 1..80: note = Artificially Synthesized Probe
  source 1..80: mol_type = other DNA
tttttcctctgcctccacaatccaagtttaccagtcctagctcttgtctcattaggacccagtcctgtactaaaacaaat

SEQ ID NO: 48535 - DNA, 80 bp, synthetic construct
  misc_feature 1..80: note = Artificially Synthesized Probe
  source 1..80: mol_type = other DNA
aggagtttgagatcagcttggccaacatggtgaaaccttgtctctacaaaaaatacaaaaattagctgggcgtggtggca

SEQ ID NO: 48536 - DNA, 80 bp, synthetic construct
  misc_feature 1..80: note = Artificially Synthesized Probe
  source 1..80: mol_type = other DNA
aatagttaagtgctccatcggttagtagatattgatggagcaaacatgatgttcttattccaatccatcatgattcttac

SEQ ID NO: 48537 - DNA, 80 bp, synthetic construct; identical to SEQ ID NO: 23665
  misc_feature 1..80: note = Artificially Synthesized Probe
  source 1..80: mol_type = other DNA

SEQ ID NO: 48538 - DNA, 80 bp, synthetic construct
  misc_feature 1..80: note = Artificially Synthesized Probe
  source 1..80: mol_type = other DNA
ctggaaatcatggtggagagcccctgtcattgaggagttaatatcttagaagggggatgccatatatatatatatataca

SEQ ID NO: 48539 - DNA, 80 bp, synthetic construct
  misc_feature 1..80: note = Artificially Synthesized Probe
  source 1..80: mol_type = other DNA
atatatgatatatataatactatatatatagtattatatatatagtgtatatatatatacacacatacacacaaatgaac

SEQ ID NO: 48540 - DNA, 80 bp, synthetic construct; identical to SEQ ID NO: 23666
  misc_feature 1..80: note = Artificially Synthesized Probe
  source 1..80: mol_type = other DNA

SEQ ID NO: 48541 - DNA, 80 bp, synthetic construct
  misc_feature 1..80: note = Artificially Synthesized Probe
  source 1..80: mol_type = other DNA
gaaatcccgtctttactaaaaatacaaaaattagccaggtgtggtggtgggcacctgtaatcccagctactctggaggct

SEQ ID NO: 48542 - DNA, 80 bp, synthetic construct
  misc_feature 1..80: note = Artificially Synthesized Probe
  source 1..80: mol_type = other DNA
ttctttcttttttttcctccagaatgtcttatttaaaaagaaagctaaaagtatacttctaagttagagcctctattttt

SEQ ID NO: 48543 - DNA, 80 bp, synthetic construct
  misc_feature 1..80: note = Artificially Synthesized Probe
  source 1..80: mol_type = other DNA
tgtctctacaaaaaatacaaaaattagcctggcatagtgatgggcacctgtagccctagctactggggcaggagactgag

SEQ ID NO: 48544 - DNA, 80 bp, synthetic construct
  misc_feature 1..80: note = Artificially Synthesized Probe
  source 1..80: mol_type = other DNA
ctccatcctcctgacacaaactatacctgcattcgttctctctgggtttgggaatctaggatatgagccaacatatatgc

SEQ ID NO: 48545 - DNA, 80 bp, synthetic construct; identical to SEQ ID NO: 23667
  misc_feature 1..80: note = Artificially Synthesized Probe
  source 1..80: mol_type = other DNA

SEQ ID NO: 48546 - DNA, 80 bp, synthetic construct
  misc_feature 1..80: note = Artificially Synthesized Probe
  source 1..80: mol_type = other DNA
acttgcctaacagggtcacaacaccagcccaaagaagcacaaagaaagcaggaaggcctcttaccattacccctgaccca

SEQ ID NO: 48547 - DNA, 80 bp, synthetic construct
  misc_feature 1..80: note = Artificially Synthesized Probe
  source 1..80: mol_type = other DNA
ctctgtgaacctactggatgtcccttctgtctctattgtgggtaagtcacctagcctctgggctctggcccaggagaggg

SEQ ID NO: 48548 - DNA, 80 bp, synthetic construct
  misc_feature 1..80: note = Artificially Synthesized Probe
  source 1..80: mol_type = other DNA
cttagcatatggtagaggctctgaaaggcctgaagttaagacacttggtgaactttgtttaatttagcatttctgaaact

SEQ ID NO: 48549 - DNA, 80 bp, synthetic construct; identical to SEQ ID NO: 23668
  misc_feature 1..80: note = Artificially Synthesized Probe
  source 1..80: mol_type = other DNA

SEQ ID NO: 48550 - DNA, 80 bp, synthetic construct
  misc_feature 1..80: note = Artificially Synthesized Probe
  source 1..80: mol_type = other DNA
ctcttactacctcggcttttgctaggaaacgaggatatttgaggctgggtgaggtggctcacacctgtaatcccagcact

SEQ ID NO: 48551 - DNA, 80 bp, synthetic construct
  misc_feature 1..80: note = Artificially Synthesized Probe
  source 1..80: mol_type = other DNA
tcttgagctcaggtgttcaagaccagcctggtcaacagggtgaaaccccgtccctattaaaaatacaaaaattaaccagg

SEQ ID NO: 48552 - DNA, 80 bp, synthetic construct
  misc_feature 1..80: note = Artificially Synthesized Probe
  source 1..80: mol_type = other DNA
tagccgggaatggtggtgcatgcctatggttccagctatttgggaggctgaggcaggaggattgcttgagcccaggaggt

SEQ ID NO: 48553 - DNA, 80 bp, synthetic construct; identical to SEQ ID NO: 23606
  misc_feature 1..80: note = Artificially Synthesized Probe
  source 1..80: mol_type = other DNA

SEQ ID NO: 48554 - DNA, 80 bp, synthetic construct
  misc_feature 1..80: note = Artificially Synthesized Probe
  source 1..80: mol_type = other DNA
cctgaggtcaagagtttgagaccagcctggccaacatggcaaaaccccatctctactaaaaatacaaaaattagccaggt

SEQ ID NO: 48555 - DNA, 80 bp, synthetic construct; identical to SEQ ID NO: 23669
  misc_feature 1..80: note = Artificially Synthesized Probe
  source 1..80: mol_type = other DNA

SEQ ID NO: 48556 - DNA, 80 bp, synthetic construct
  misc_feature 1..80: note = Artificially Synthesized Probe
  source 1..80: mol_type = other DNA
agccacatagtcattatattggcagagtcaggattcaaatcaggtcctcctggctccagagctctcaggaatggaaaata

SEQ ID NO: 48557 - DNA, 80 bp, synthetic construct
  misc_feature 1..80: note = Artificially Synthesized Probe
  source 1..80: mol_type = other DNA
caggcagatcccagtgcctgcttggatttcccatttgccttccctcagaggacacgttgctatcagtgcctggctccagg

SEQ ID NO: 48558 - DNA, 80 bp, synthetic construct
  misc_feature 1..80: note = Artificially Synthesized Probe
  source 1..80: mol_type = other DNA
ttttgtctctctttgaagcgctgaacaagaaatccaaacagatcggcagaaaagcagcagaaaagaaaagatcttctaag

SEQ ID NO: 48559 - DNA, 80 bp, synthetic construct; identical to SEQ ID NO: 23670
  misc_feature 1..80: note = Artificially Synthesized Probe
  source 1..80: mol_type = other DNA

SEQ ID NO: 48560 - DNA, 80 bp, synthetic construct
  misc_feature 1..80: note = Artificially Synthesized Probe
  source 1..80: mol_type = other DNA
atgaatgtggtgtttcccaaacctcagtcatttcagaaccacatttataactttgccatatctgagttccacctatttat

SEQ ID NO: 48561 - DNA, 80 bp, synthetic construct
  misc_feature 1..80: note = Artificially Synthesized Probe
  source 1..80: mol_type = other DNA
aattagccaggcgtggtggtgggcgcctgtaatcccagctacttgggaggctgaggcaggagaattgcttgtacccggga

SEQ ID NO: 48562 - DNA, 80 bp, synthetic construct; identical to SEQ ID NO: 23671
  misc_feature 1..80: note = Artificially Synthesized Probe
  source 1..80: mol_type = other DNA

SEQ ID NO: 48563 - DNA, 80 bp, synthetic construct
  misc_feature 1..80: note = Artificially Synthesized Probe
  source 1..80: mol_type = other DNA
ctcctgacctcaggtgatccacctgcctcagcctaccaaagtgctgggattacaggggtgagccaccttgcccagctgac

SEQ ID NO: 48564 - DNA, 80 bp, synthetic construct
  misc_feature 1..80: note = Artificially Synthesized Probe
  source 1..80: mol_type = other DNA
taaatctattataaaaaattaaaatttcccaaaacatatgtacacacagacagtacataccattcaaaatagaaagaaaa

SEQ ID NO: 48565 - DNA, 80 bp, synthetic construct
  misc_feature 1..80: note = Artificially Synthesized Probe
  source 1..80: mol_type = other DNA
aaaaccttgttggcttgatattttaaggaactgaaatctagcaatcttactggagagacaagaattggtctccagctgcc

SEQ ID NO: 48566 - DNA, 80 bp, synthetic construct
  misc_feature 1..80: note = Artificially Synthesized Probe
  source 1..80: mol_type = other DNA
gcacaaggagtctcaccaggaaatcacatattgcagtaaaatgtgatccctcaaggttctcgtgtatttttcaatgtgtt

SEQ ID NO: 48567 - DNA, 80 bp, synthetic construct; identical to SEQ ID NO: 23672
  misc_feature 1..80: note = Artificially Synthesized Probe
  source 1..80: mol_type = other DNA

SEQ ID NO: 48568 - DNA, 80 bp, synthetic construct
  misc_feature 1..80: note = Artificially Synthesized Probe
  source 1..80: mol_type = other DNA
gaaatggggtgtcactctgtcactcaggctggagtgcagtggcaccatctcggctcattgcagcctcaacctcccaggct

SEQ ID NO: 48569 - DNA, 80 bp, synthetic construct
  misc_feature 1..80: note = Artificially Synthesized Probe
  source 1..80: mol_type = other DNA
taaactgctgggattacctgcattagccaccatgcccagccagtttacttgattataagagtacagtatataatacatat

SEQ ID NO: 48570 - DNA, 80 bp, synthetic construct
  misc_feature 1..80: note = Artificially Synthesized Probe
  source 1..80: mol_type = other DNA
tggcagatcacttgagtccaggaattcaagaccagcctgagcaacatgatgaaacctcatctctacaaaaaatttaaaaa

SEQ ID NO: 48571 - DNA, 80 bp, synthetic construct; identical to SEQ ID NO: 23673
  misc_feature 1..80: note = Artificially Synthesized Probe
  source 1..80: mol_type = other DNA

SEQ ID NO: 48572 - DNA, 80 bp, synthetic construct
  misc_feature 1..80: note = Artificially Synthesized Probe
  source 1..80: mol_type = other DNA
taggtcaggaatttaagaccagtctgaccaacatggtgaaaccccatctctactaaaaatacaaaaattagctgggtatg

SEQ ID NO: 48573 - DNA, 80 bp, synthetic construct
  misc_feature 1..80: note = Artificially Synthesized Probe
  source 1..80: mol_type = other DNA
aagttaaaacattgttagtaaattctgggtgaatggatggtattgcctaccaaaggctctaaatttgaggcctaaatctc

SEQ ID NO: 48574 - DNA, 80 bp, synthetic construct
  misc_feature 1..80: note = Artificially Synthesized Probe
  source 1..80: mol_type = other DNA
ccgcaaggctgatttgctttcactaactggaattttgtaggagatactggtgacctaagctaagttgcattcaacatact

SEQ ID NO: 48575 - DNA, 80 bp, synthetic construct
  misc_feature 1..80: note = Artificially Synthesized Probe
  source 1..80: mol_type = other DNA
tggtggcgggcgcctgtagtcccagctacttgggaggctgaggcaggagaatggcgtgaacccgggaggcagagtacagt

SEQ ID NO: 48576 - DNA, 80 bp, synthetic construct
  misc_feature 1..80: note = Artificially Synthesized Probe
  source 1..80: mol_type = other DNA
cctgaggttaagagttagagaccagcctagccaacatggtgaaaccccgtctctactaaaaatacaaaaattagctgggc

SEQ ID NO: 48577 - DNA, 80 bp, synthetic construct; identical to SEQ ID NO: 23674
  misc_feature 1..80: note = Artificially Synthesized Probe
  source 1..80: mol_type = other DNA

SEQ ID NO: 48578 - DNA, 80 bp, synthetic construct
  misc_feature 1..80: note = Artificially Synthesized Probe
  source 1..80: mol_type = other DNA
ttatcatatcaactgtaaccaaagcaaggagcactggattaggtattaggaggtaggatctggcactgtgtgatcttgaa

SEQ ID NO: 48579 - DNA, 80 bp, synthetic construct
  misc_feature 1..80: note = Artificially Synthesized Probe
  source 1..80: mol_type = other DNA
ggagtttacattcttgtggagaaaacaggtgaacagcaagtaaatcaataaataggtaaataaattcagatgttaaagag

SEQ ID NO: 48580 - DNA, 80 bp, synthetic construct; identical to SEQ ID NO: 23675
  misc_feature 1..80: note = Artificially Synthesized Probe
  source 1..80: mol_type = other DNA

SEQ ID NO: 48581 - DNA, 80 bp, synthetic construct
  misc_feature 1..80: note = Artificially Synthesized Probe
  source 1..80: mol_type = other DNA
cccgggagtagctgggattacagatgtgccaccatgctgggctaatttttgtatttttagtagagacgggtttctccatg

SEQ ID NO: 48582 - DNA, 80 bp, synthetic construct
  misc_feature 1..80: note = Artificially Synthesized Probe
  source 1..80: mol_type = other DNA
ttcaaaatgttaacatttcaatatgtgattaatttaaaaagttattgaaataatttatttttgttgtgctaaatctttga

SEQ ID NO: 48583 - DNA, 80 bp, synthetic construct
  misc_feature 1..80: note = Artificially Synthesized Probe
  source 1..80: mol_type = other DNA
ttcagtttctaggttgcactagacacatttcacgtactcagtagccacagatgaccagtggctacctgtatcgaaggtac

SEQ ID NO: 48584 - DNA, 80 bp, synthetic construct; identical to SEQ ID NO: 23676
  misc_feature 1..80: note = Artificially Synthesized Probe
  source 1..80: mol_type = other DNA

SEQ ID NO: 48585 - DNA, 80 bp, synthetic construct
  misc_feature 1..80: note = Artificially Synthesized Probe
  source 1..80: mol_type = other DNA
acaataagtgagaccccgtctataaaaacatagaaaataaaataaaaataaatttagccaagcgtggtggtgcgcacatg

SEQ ID NO: 48586 - DNA, 80 bp, synthetic construct
  misc_feature 1..80: note = Artificially Synthesized Probe
  source 1..80: mol_type = other DNA
tcacaggttatcctaatagagtaattcttcattttgttctattgaactgtcttaaggatttgtttcaaacagctaagtta

SEQ ID NO: 48587 - DNA, 80 bp, synthetic construct
  misc_feature 1..80: note = Artificially Synthesized Probe
  source 1..80: mol_type = other DNA
tagggagaagacgaccagggccaggcaagagccaggtaagtctggatggggatggaggtgagggaatctgactgggggag

SEQ ID NO: 48588 - DNA, 80 bp, synthetic construct
  misc_feature 1..80: note = Artificially Synthesized Probe
  source 1..80: mol_type = other DNA
ggtgcggccccggacccccctatctgcgccctgcgtggccacccgcaacagctgcaagccgccggcacccgcctgctgcg

SEQ ID NO: 48589 - DNA, 80 bp, synthetic construct; identical to SEQ ID NO: 23677
  misc_feature 1..80: note = Artificially Synthesized Probe
  source 1..80: mol_type = other DNA

SEQ ID NO: 48590 - DNA, 80 bp, synthetic construct
  misc_feature 1..80: note = Artificially Synthesized Probe
  source 1..80: mol_type = other DNA
tcccaactgagctgagccctgagaataagatggttcctttggccaagtggctctgtgaaaatgaggaagaatctgatcca

SEQ ID NO: 48591 - DNA, 80 bp, synthetic construct; identical to SEQ ID NO: 23607
  misc_feature 1..80: note = Artificially Synthesized Probe
  source 1..80: mol_type = other DNA

SEQ ID NO: 48592 - DNA, 80 bp, synthetic construct
  misc_feature 1..80: note = Artificially Synthesized Probe
  source 1..80: mol_type = other DNA
tgaattgtggtgaatggcaatgtagttctggcaatgttgttccacctggaattgattttcaggtatgatgtgaggtcaag

SEQ ID NO: 48593 - DNA, 80 bp, synthetic construct
  misc_feature 1..80: note = Artificially Synthesized Probe
  source 1..80: mol_type = other DNA
atctccattcttttccatttgtccattagtctgtctttctgccacttgcaccctgtttccatttcctgtaactttgcaat

SEQ ID NO: 48594 - DNA, 80 bp, synthetic construct
  misc_feature 1..80: note = Artificially Synthesized Probe
  source 1..80: mol_type = other DNA
gctggagtgcagcggcatgatctcggctcactgcaagctccgcctcccaggttcacgccattctcctgcctcagcctccc

SEQ ID NO: 48595 - DNA, 80 bp, synthetic construct; identical to SEQ ID NO: 23608
  misc_feature 1..80: note = Artificially Synthesized Probe
  source 1..80: mol_type = other DNA

SEQ ID NO: 48596 - DNA, 80 bp, synthetic construct
  misc_feature 1..80: note = Artificially Synthesized Probe
  source 1..80: mol_type = other DNA
ttattcattggatttattcccaattattttctatttattttataagtggcatatatatatgtatattatatatatatttt

SEQ ID NO: 48597 - DNA, 80 bp, synthetic construct
  misc_feature 1..80: note = Artificially Synthesized Probe
  source 1..80: mol_type = other DNA
tattgtagagacagggtttcgccacgttggcctggctggtctcgaacgcctaacttcaagtgatcctcccacctcggcct

SEQ ID NO: 48598 - DNA, 80 bp, synthetic construct
  misc_feature 1..80: note = Artificially Synthesized Probe
  source 1..80: mol_type = other DNA
cctaggttcaagcaattttcctgccttagcctcccaagtagctgggattacaggcacacgccaccatacccggctaattt

SEQ ID NO: 48599 - DNA, 80 bp, synthetic construct; identical to SEQ ID NO: 23609
  misc_feature 1..80: note = Artificially Synthesized Probe
  source 1..80: mol_type = other DNA

SEQ ID NO: 48600 - DNA, 80 bp, synthetic construct
  misc_feature 1..80: note = Artificially Synthesized Probe
  source 1..80: mol_type = other DNA
cgccgcaacctccgcctcgtgggttaaagcgattctcctgcctcagccttccgagtagctgggattataggcacacgcca

SEQ ID NO: 48601 - DNA, 80 bp, synthetic construct
  misc_feature 1..80: note = Artificially Synthesized Probe
  source 1..80: mol_type = other DNA
ttttcttgaattattggactgggtaaaaccttaagaacaatgatgaataaaagtgaaaatagcaggcatccttatcttag

SEQ ID NO: 48602 - DNA, 80 bp, synthetic construct
  misc_feature 1..80: note = Artificially Synthesized Probe
  source 1..80: mol_type = other DNA
cttggcgtaagtatacaaaccccgagatgcagcagacccagggctgggcgtggggcattcctcagagtgccagtggccac

SEQ ID NO: 48603 - DNA, 80 bp, synthetic construct
  misc_feature 1..80: note = Artificially Synthesized Probe
  source 1..80: mol_type = other DNA
gaggatatacacgagtgcttgataaactggtaaatgcaaagcacacaggaggtggtcttgctaaaatgccacaggtgtga

SEQ ID NO: 48604 - DNA, 80 bp, synthetic construct
  misc_feature 1..80: note = Artificially Synthesized Probe
  source 1..80: mol_type = other DNA
gtgaatattggaggctgcaggaaataattcacacctggcttctaaaaaaatcacaaactattagacagtgagtcaaattc

SEQ ID NO: 48605 - DNA, 80 bp, synthetic construct
  misc_feature 1..80: note = Artificially Synthesized Probe
  source 1..80: mol_type = other DNA
cactggtgaacctggaggacctgagcttgttcaacaaccggatctccaagatcgactccctggacgccctcgtcaagctg

SEQ ID NO: 48606 - DNA, 80 bp, synthetic construct; identical to SEQ ID NO: 23689
  misc_feature 1..80: note = Artificially Synthesized Probe
  source 1..80: mol_type = other DNA

SEQ ID NO: 48607 - DNA, 80 bp, synthetic construct
  misc_feature 1..80: note = Artificially Synthesized Probe
  source 1..80: mol_type = other DNA
gtgaccagcacacacccccatagtcaaggcacaaggagacaagaagccggtgtcctgaggaacaataaaacaaggcctat

SEQ ID NO: 48608 - DNA, 80 bp, synthetic construct
  misc_feature 1..80: note = Artificially Synthesized Probe
  source 1..80: mol_type = other DNA
agatggctcctggcttgcttctgcaacccatcaaccctgggggctgtccagtagcctttgaagattccttttctgcttag

SEQ ID NO: 48609 - DNA, 80 bp, synthetic construct
  misc_feature 1..80: note = Artificially Synthesized Probe
  source 1..80: mol_type = other DNA
agacaggagcatctaaacccaaccaagggtcaagccttctatgcctcagtttcctcacctgtcagatggagatgatggcc

SEQ ID NO: 48610 - DNA, 80 bp, synthetic construct; identical to SEQ ID NO: 23690
  misc_feature 1..80: note = Artificially Synthesized Probe
  source 1..80: mol_type = other DNA

SEQ ID NO: 48611 - DNA, 80 bp, synthetic construct
  misc_feature 1..80: note = Artificially Synthesized Probe
  source 1..80: mol_type = other DNA
tgtctgagatgtatttggggcaggtctacatttaggaaggaattcacccccatgagggtggatttgagggggattgtgag

SEQ ID NO: 48612 - DNA, 80 bp, synthetic construct
  misc_feature 1..80: note = Artificially Synthesized Probe
  source 1..80: mol_type = other DNA
ctgccagagccagggacacgacagtgggcaagtcaggcatggcccaggcacagccccacgaagcccataggctcccaggg

SEQ ID NO: 48613 - DNA, 80 bp, synthetic construct
  misc_feature 1..80: note = Artificially Synthesized Probe
  source 1..80: mol_type = other DNA
gagaggtggcttcaggaagctggagtaagggaggcagggaagaaccaacacacaggcgtgtcactgagactgctgctgca

SEQ ID NO: 48614 - DNA, 80 bp, synthetic construct; identical to SEQ ID NO: 23691
  misc_feature 1..80: note = Artificially Synthesized Probe
  source 1..80: mol_type = other DNA

SEQ ID NO: 48615 - DNA, 80 bp, synthetic construct
  misc_feature 1..80: note = Artificially Synthesized Probe
  source 1..80: mol_type = other DNA
ttgattctcttaatggttgcagtcaaggacacgggcttccttgtctgcatctagcaggatggagagagcaagaactctcc

SEQ ID NO: 48616 - DNA, 80 bp, synthetic construct
  misc_feature 1..80: note = Artificially Synthesized Probe
  source 1..80: mol_type = other DNA
aggtggtggagtctcagaagtttgccctgcatgccagacaggcagcatccaaacccatgcatggtcttgcatgaatcagc

SEQ ID NO: 48617 - DNA, 80 bp, synthetic construct
  misc_feature 1..80: note = Artificially Synthesized Probe
  source 1..80: mol_type = other DNA
gctcttctgcggctggctccctcaggtctcagattaaatgtcacctccccagagagacctctgaatctcctaactgaaag

SEQ ID NO: 48618 - DNA, 80 bp, synthetic construct
  misc_feature 1..80: note = Artificially Synthesized Probe
  source 1..80: mol_type = other DNA
ttgaggtcaggaattcgagataagcttggccaacatggcgaaacccgtctctactaaaaatataaaaatgagccgggtgt

SEQ ID NO: 48619 - DNA, 80 bp, synthetic construct; identical to SEQ ID NO: 23692
  misc_feature 1..80: note = Artificially Synthesized Probe
  source 1..80: mol_type = other DNA

SEQ ID NO: 48620 - DNA, 80 bp, synthetic construct
  misc_feature 1..80: note = Artificially Synthesized Probe
  source 1..80: mol_type = other DNA
aaagcatgctagatttttttttctatcttttgcatagtacagtgtctagatgctatccaatgaagtattgcttttttttt

SEQ ID NO: 48621 - DNA, 80 bp, synthetic construct
  misc_feature 1..80: note = Artificially Synthesized Probe
  source 1..80: mol_type = other DNA
ctaattttttttttttgtatttttagtagagacggggtttcaccatgttagccaggatggtctccatctcctgacctcaa

SEQ ID NO: 48622 - DNA, 80 bp, synthetic construct; identical to SEQ ID NO: 23693
  misc_feature 1..80: note = Artificially Synthesized Probe
  source 1..80: mol_type = other DNA

SEQ ID NO: 48623 - DNA, 80 bp, synthetic construct; identical to SEQ ID NO: 23679
  misc_feature 1..80: note = Artificially Synthesized Probe
  source 1..80: mol_type = other DNA

SEQ ID NO: 48624 - DNA, 80 bp, synthetic construct
  misc_feature 1..80: note = Artificially Synthesized Probe
  source 1..80: mol_type = other DNA
agctcgagaccagcctggtcaacacagcaagaccccatccctacttaaaaacaaaatagggccgggcgcggtggctcacg

SEQ ID NO: 48625 - DNA, 80 bp, synthetic construct
  misc_feature 1..80: note = Artificially Synthesized Probe
  source 1..80: mol_type = other DNA
ctgaggcacgagaatcacttgaacccgggaggcagaggttgcagtgagccaagatcgcacctctgcactccagcctgggc

SEQ ID NO: 48626 - DNA, 80 bp, synthetic construct
  misc_feature 1..80: note = Artificially Synthesized Probe
  source 1..80: mol_type = other DNA
cttggtctttataacacctgtaacacacatgatatccttatacccgtttaacagatgtggacgttgaagctcacagatgt

SEQ ID NO: 48627 - DNA, 80 bp, synthetic construct; identical to SEQ ID NO: 23694
  misc_feature 1..80: note = Artificially Synthesized Probe
  source 1..80: mol_type = other DNA

SEQ ID NO: 48628 - DNA, 80 bp, synthetic construct
  misc_feature 1..80: note = Artificially Synthesized Probe
  source 1..80: mol_type = other DNA
cgcattgatgaccacacagcaagtgtctccctctcagtctcccagccctgtgagacagattcctcaagcccccaggtttc

SEQ ID NO: 48629 - DNA, 80 bp, synthetic construct
  misc_feature 1..80: note = Artificially Synthesized Probe
  source 1..80: mol_type = other DNA
acacactgtcccagggccacctcacagccatcctgcactgtctagttttccagatgaagaagctgaggagggctgggagc

SEQ ID NO: 48630 - DNA, 80 bp, synthetic construct
  misc_feature 1..80: note = Artificially Synthesized Probe
  source 1..80: mol_type = other DNA
tactcacaaggccgaggtagaagaatcgcttgagactaggagtttgaggctgcagtgaactaagaagatgccattgcact

SEQ ID NO: 48631 - DNA, 80 bp, synthetic construct
  misc_feature 1..80: note = Artificially Synthesized Probe
  source 1..80: mol_type = other DNA
gagggaaccaggccatcagaggctcaggcctggctctcaggggcagagtcagggctggaggtagagacctgagtgtcatc

SEQ ID NO: 48632 - DNA, 80 bp, synthetic construct
  misc_feature 1..80: note = Artificially Synthesized Probe
  source 1..80: mol_type = other DNA
gagtacagtgttttatagagtggccaggggcttcaccaagaaggtaacaatttagcaacaacttgaggtaggcaagggag

SEQ ID NO: 48633 - DNA, 80 bp, synthetic construct; identical to SEQ ID NO: 23695
  misc_feature 1..80: note = Artificially Synthesized Probe
  source 1..80: mol_type = other DNA

SEQ ID NO: 48634 - DNA, 80 bp, synthetic construct
  misc_feature 1..80: note = Artificially Synthesized Probe
  source 1..80: mol_type = other DNA
tgcgctcacaaaaacctggtgagggtcatcaggagatgggcattctcatccacgagacctcatggctttcacagccttca

SEQ ID NO: 48635 - DNA, 80 bp, synthetic construct
  misc_feature 1..80: note = Artificially Synthesized Probe
  source 1..80: mol_type = other DNA
cgacgagctgaagcaccaggagaacctgatgcaggcccagctggaggacgagcaggcgcagcgggaggagctagagaagc

SEQ ID NO: 48636 - DNA, 80 bp, synthetic construct
  misc_feature 1..80: note = Artificially Synthesized Probe
  source 1..80: mol_type = other DNA
ctgctgtctgccccagggccagctccgtctcagtccagaccctgaccctactccttactggcattcctgcctccagctgc

SEQ ID NO: 48637 - DNA, 80 bp, synthetic construct; identical to SEQ ID NO: 23696
  misc_feature 1..80: note = Artificially Synthesized Probe
  source 1..80: mol_type = other DNA

SEQ ID NO: 48638 - DNA, 80 bp, synthetic construct
  misc_feature 1..80: note = Artificially Synthesized Probe
  source 1..80: mol_type = other DNA
aggactcagagggcaacaatctgtcctacctgcctggtgtcggtgagctccttgagacatatccttctgagttcatggct

SEQ ID NO: 48639 - DNA, 80 bp, synthetic construct
  misc_feature 1..80: note = Artificially Synthesized Probe
  source 1..80: mol_type = other DNA
gagatgctgtctggatttcagggacatgtgtagtatctggtcagcatggcatgggctggccatgtttggcaagccaggtt

SEQ ID NO: 48640 - DNA, 80 bp, synthetic construct; identical to SEQ ID NO: 23697
  misc_feature 1..80: note = Artificially Synthesized Probe
  source 1..80: mol_type = other DNA

SEQ ID NO: 48641 - DNA, 80 bp, synthetic construct
  misc_feature 1..80: note = Artificially Synthesized Probe
  source 1..80: mol_type = other DNA
ctctgagctaaggcatccagtcacaggtgagtctgtggagccaccttcactggatagagaaaaattcactcaaaaacctg

SEQ ID NO: 48642 - DNA, 80 bp, synthetic construct
  misc_feature 1..80: note = Artificially Synthesized Probe
  source 1..80: mol_type = other DNA
cctatctgtattagtctgttttcacgctcctgataaagatatacttgagactgggcaatttacaaaagaaagaggttttt

SEQ ID NO: 48643 - DNA, 80 bp, synthetic construct
  misc_feature 1..80: note = Artificially Synthesized Probe
  source 1..80: mol_type = other DNA
ccacacctggctaattttttgtatttagtagagactgggtttcactatgttggtcaggctggtctcaaactcctgacctc

SEQ ID NO: 48644 - DNA, 80 bp, synthetic construct
  misc_feature 1..80: note = Artificially Synthesized Probe
  source 1..80: mol_type = other DNA
tcttacagtgagtgaagtggggaccccgggagggtcctgagcagaagtgggacaggatgggacttaggatttcacaggac

SEQ ID NO: 48645 - DNA, 80 bp, synthetic construct
  misc_feature 1..80: note = Artificially Synthesized Probe
  source 1..80: mol_type = other DNA
gtgggcaaagaaagaaagcctgtgcagggaaactcccatatttaaaaccatcagatctcatgagactcattcactatcat

SEQ ID NO: 48646 - DNA, 80 bp, synthetic construct; identical to SEQ ID NO: 23698
  misc_feature 1..80: note = Artificially Synthesized Probe
  source 1..80: mol_type = other DNA

SEQ ID NO: 48647 - DNA, 80 bp, synthetic construct
  misc_feature 1..80: note = Artificially Synthesized Probe
  source 1..80: mol_type = other DNA
tgactttgggcaaggcatttcatctctctgggcatcagtttccatcccacaggatcaccaaggtcctgtaggctttacct

SEQ ID NO: 48648 - DNA, 80 bp, synthetic construct
  misc_feature 1..80: note = Artificially Synthesized Probe
  source 1..80: mol_type = other DNA
accaagacaggccctcagtaagggtgcccttccagatagcacaccagagacagaaacgcacactgcctgcttccccagct

SEQ ID NO: 48649 - DNA, 80 bp, synthetic construct
  misc_feature 1..80: note = Artificially Synthesized Probe
  source 1..80: mol_type = other DNA
acacacattttacctacatctcaatcctggctctctgggcctttgatttcttcatccaccaaatgaaccaaatgagacca

SEQ ID NO: 48650 - DNA, 80 bp, synthetic construct; identical to SEQ ID NO: 23699
  misc_feature 1..80: note = Artificially Synthesized Probe
  source 1..80: mol_type = other DNA

SEQ ID NO: 48651 - DNA, 80 bp, synthetic construct
  misc_feature 1..80: note = Artificially Synthesized Probe
  source 1..80: mol_type = other DNA
gccactcccactgtagggggactgcaactcctgtaccctctgatgacccctgaggccaatggttattgtccccatttgcc

SEQ ID NO: 48652 - DNA, 80 bp, synthetic construct
  misc_feature 1..80: note = Artificially Synthesized Probe
  source 1..80: mol_type = other DNA
gattcaaggtcggccctaccccccaacttatcatcatcgttactattaataacagtattagtatgaccattactattttg

SEQ ID NO: 48653 - DNA, 80 bp, synthetic construct
  misc_feature 1..80: note = Artificially Synthesized Probe
  source 1..80: mol_type = other DNA
gcagagggatcagtgccatcctggagggaagcctggggagccttgggggtgccctaggggcgccttatctcaggctgggg

SEQ ID NO: 48654 - DNA, 80 bp, synthetic construct
  misc_feature 1..80: note = Artificially Synthesized Probe
  source 1..80: mol_type = other DNA
ggggcagatttagtgtctttgttgaagattaaatcggctttttttggcagtcctgtcatgctggtaactcatttagagct

SEQ ID NO: 48655 - DNA, 80 bp, synthetic construct; identical to SEQ ID NO: 23700
  misc_feature 1..80: note = Artificially Synthesized Probe
  source 1..80: mol_type = other DNA

SEQ ID NO: 48656 - DNA, 80 bp, synthetic construct
  misc_feature 1..80: note = Artificially Synthesized Probe
  source 1..80: mol_type = other DNA
aacttaaggcccttccttgttgtgaacttaaagtagagcaaagtccctcgatgcgcaacttcagatctgatggagttggt

SEQ ID NO: 48657 - DNA, 80 bp, synthetic construct
  misc_feature 1..80: note = Artificially Synthesized Probe
  source 1..80: mol_type = other DNA
cagcagaggaatacatttggctcacatatgtgttttatgtggcctgaatagggttttaaaacatttcgaacatcctgctg

SEQ ID NO: 48658 - DNA, 80 bp, synthetic construct; identical to SEQ ID NO: 23701
  misc_feature 1..80: note = Artificially Synthesized Probe
  source 1..80: mol_type = other DNA

SEQ ID NO: 48659 - DNA, 80 bp, synthetic construct
  misc_feature 1..80: note = Artificially Synthesized Probe
  source 1..80: mol_type = other DNA
cggacgagctgaccatcctagtgctccccttctagagccaagagcagtggatcctgctcagcctgcatgcggagtccctg

SEQ ID NO: 48660 - DNA, 80 bp, synthetic construct
  misc_feature 1..80: note = Artificially Synthesized Probe
  source 1..80: mol_type = other DNA
ccctgacaggccctctcctataggttttcctacgctcctcccactcatccccattaggcctcatccattgcacacagtgc

SEQ ID NO: 48661 - DNA, 80 bp, synthetic construct
  misc_feature 1..80: note = Artificially Synthesized Probe
  source 1..80: mol_type = other DNA
ccatttcctcatttgcagaacagagataaccaccttgaagaactgtagtgagaaacagagagggaaagcacttgtgcaag

SEQ ID NO: 48662 - DNA, 80 bp, synthetic construct; identical to SEQ ID NO: 23702
  misc_feature 1..80: note = Artificially Synthesized Probe
  source 1..80: mol_type = other DNA

SEQ ID NO: 48663 - DNA, 80 bp, synthetic construct
  misc_feature 1..80: note = Artificially Synthesized Probe
  source 1..80: mol_type = other DNA
gctttcctatgtgtgtgtacatgtatgcatagcatgccctgttctgtactttgctttcctctgtgtgtgtgtgtgtgtgc

SEQ ID NO: 48664 - DNA, 80 bp, synthetic construct; identical to SEQ ID NO: 23680
  misc_feature 1..80: note = Artificially Synthesized Probe
  source 1..80: mol_type = other DNA

SEQ ID NO: 48665 - DNA, 80 bp, synthetic construct
  misc_feature 1..80: note = Artificially Synthesized Probe
  source 1..80: mol_type = other DNA
gtgtgtgtgcatagcatgccttgttctgtactttgctttcctatattatgcatcttggagagccttccaaaatgaaaaag

SEQ ID NO: 48666 - DNA, 80 bp, synthetic construct
  misc_feature 1..80: note = Artificially Synthesized Probe
  source 1..80: mol_type = other DNA
tagaagtggaactgtgcattggtttttttcatggttattgtccaactgtaacctacagaacctgtaccttccacagccgt

SEQ ID NO: 48667 - DNA, 80 bp, synthetic construct
  misc_feature 1..80: note = Artificially Synthesized Probe
  source 1..80: mol_type = other DNA
cccacttttctatttggtttttggtttctctctctcttcttaaattatttattattattattttcagaatagggtctaac

SEQ ID NO: 48668 - DNA, 80 bp, synthetic construct; identical to SEQ ID NO: 23703
  misc_feature 1..80: note = Artificially Synthesized Probe
  source 1..80: mol_type = other DNA

SEQ ID NO: 48669 - DNA, 80 bp, synthetic construct
  misc_feature 1..80: note = Artificially Synthesized Probe
  source 1..80: mol_type = other DNA
tctctactaaaaatacaaaagttagccagggtggtgatgcatgcctgtaatcccagctacttgggaggctgaggcaggag

SEQ ID NO: 48670 - DNA, 80 bp, synthetic construct
  misc_feature 1..80: note = Artificially Synthesized Probe
  source 1..80: mol_type = other DNA
agctggccgtcggggaccagggcccccaggaggaggccgggcagctggccaagcaggagggcatcctcttcaaggatgtc

SEQ ID NO: 48671 - DNA, 80 bp, synthetic construct
  misc_feature 1..80: note = Artificially Synthesized Probe
  source 1..80: mol_type = other DNA
tatttttcccggtttgtgttttatcttgcaatgttgtctgtggtgcttttgccattcagaatgaaaaatttttttggctg

SEQ ID NO: 48672 - DNA, 80 bp, synthetic construct; identical to SEQ ID NO: 23704
  misc_feature 1..80: note = Artificially Synthesized Probe
  source 1..80: mol_type = other DNA

SEQ ID NO: 48673 - DNA, 80 bp, synthetic construct
  misc_feature 1..80: note = Artificially Synthesized Probe
  source 1..80: mol_type = other DNA
gctacttgggaagctgaggcgagagaatcgctggaaactgggagacagaggttgcagtgaaccaagatcacgtcactgca

SEQ ID NO: 48674 - DNA, 80 bp, synthetic construct
  misc_feature 1..80: note = Artificially Synthesized Probe
  source 1..80: mol_type = other DNA
cagacagggtagctattattatgtcattcgcccccttcaatcatgctgttactccatcctccttcatgactaataccagg

SEQ ID NO: 48675 - DNA, 80 bp, synthetic construct
  misc_feature 1..80: note = Artificially Synthesized Probe
  source 1..80: mol_type = other DNA
tccacttgctcactggggttctgtgtgggttcaattcatctcctcaaagactggaactgtctttccttgccagggtcttt

SEQ ID NO: 48676 - DNA, 80 bp, synthetic construct
  misc_feature 1..80: note = Artificially Synthesized Probe
  source 1..80: mol_type = other DNA
gctctaggggaagggcagtcccacccagccctgggaacccaggataggtgcaaggcagcaatccagctctaagggaaggg

SEQ ID NO: 48677 - DNA, 80 bp, synthetic construct
  misc_feature 1..80: note = Artificially Synthesized Probe
  source 1..80: mol_type = other DNA
gtgggtctctcaaggtcacactgttaagtgacccaggcaggattcaaattcaggttcacctaactctgaagttgtaaggc

SEQ ID NO: 48678 - DNA, 80 bp, synthetic construct; identical to SEQ ID NO: 23705
  misc_feature 1..80: note = Artificially Synthesized Probe
  source 1..80: mol_type = other DNA

SEQ ID NO: 48679 - DNA, 80 bp, synthetic construct
  misc_feature 1..80: note = Artificially Synthesized Probe
  source 1..80: mol_type = other DNA
gtgggtggatcatgaggtcaggagttcaagaccagcctggccaagatggtgaaaccccgtctctactaaaaatacaaaaa

SEQ ID NO: 48680 - DNA, 80 bp, synthetic construct
  misc_feature 1..80: note = Artificially Synthesized Probe
  source 1..80: mol_type = other DNA
aaaaaaaaaaaaaaaaaaaaaaagaatggtttctttcctcctggtacagggagggcacctttcccatgggagatttaact

SEQ ID NO: 48681 - DNA, 80 bp, synthetic construct
  misc_feature 1..80: note = Artificially Synthesized Probe
  source 1..80: mol_type = other DNA
ccaggttcacgccattctcctgcctcagcctcccaagtagctgggactacaggcacccgccaccatgcctggctaatttt

SEQ ID NO: 48682 - DNA, 80 bp, synthetic construct; identical to SEQ ID NO: 23706
  misc_feature 1..80: note = Artificially Synthesized Probe
  source 1..80: mol_type = other DNA

SEQ ID NO: 48683 - DNA, 80 bp, synthetic construct
  misc_feature 1..80: note = Artificially Synthesized Probe
  source 1..80: mol_type = other DNA
aggaaactgaggcatggagagggtaggtagcttctacacgctttcagagccagcaaatggcaaagctgagacttgcactt

SEQ ID NO: 48684 - DNA, 80 bp, synthetic construct
  misc_feature 1..80: note = Artificially Synthesized Probe
  source 1..80: mol_type = other DNA
cattcgagaggagttggaactgcccaacattgagaagatgatcctagaatgcagtgctgacatcagtgagttgttcgatg

SEQ ID NO: 48685 - DNA, 80 bp, synthetic construct; identical to SEQ ID NO: 23707
  misc_feature 1..80: note = Artificially Synthesized Probe
  source 1..80: mol_type = other DNA

SEQ ID NO: 48686 - DNA, 80 bp, synthetic construct
  misc_feature 1..80: note = Artificially Synthesized Probe
  source 1..80: mol_type = other DNA
agttgccgcttctcaggtgacgtgaggaggctgcaactcagcactaagtagtgaaaatgaaaagcgccgctgtctgaaat

SEQ ID NO: 48687 - DNA, 80 bp, synthetic construct
  misc_feature 1..80: note = Artificially Synthesized Probe
  source 1..80: mol_type = other DNA
tgctgctgtggctgggccaagtgatagcacctaatcaattcctcacacgtcaagtgacacctcagacatgggatagattt

SEQ ID NO: 48688 - DNA, 80 bp, synthetic construct
  misc_feature 1..80: note = Artificially Synthesized Probe
  source 1..80: mol_type = other DNA
ggactttcacaacctcacaggcaggctctgcccctctgaatgaatattgaaacggcagctggactgtatgtttttttttt

SEQ ID NO: 48689 - DNA, 80 bp, synthetic construct
  misc_feature 1..80: note = Artificially Synthesized Probe
  source 1..80: mol_type = other DNA
atcctacttgtattactggtggccagaaagccacaagcgcaatcatgcttttcaatgaccctatttttattcacgagaac

SEQ ID NO: 48690 - DNA, 80 bp, synthetic construct; identical to SEQ ID NO: 23708
  misc_feature 1..80: note = Artificially Synthesized Probe
  source 1..80: mol_type = other DNA

SEQ ID NO: 48691 - DNA, 80 bp, synthetic construct
  misc_feature 1..80: note = Artificially Synthesized Probe
  source 1..80: mol_type = other DNA
aggtaacctatttcccagatgaggaagataaggcccaaggaggtgaaatgcctttcccagagttacacagagtgctggag

SEQ ID NO: 48692 - DNA, 80 bp, synthetic construct
  misc_feature 1..80: note = Artificially Synthesized Probe
  source 1..80: mol_type = other DNA
tcctggcaaagttccggtgacagcattaaacattcagatggtgagggagttaatatggttggagaacaacaactttagag

SEQ ID NO: 48693 - DNA, 80 bp, synthetic construct
  misc_feature 1..80: note = Artificially Synthesized Probe
  source 1..80: mol_type = other DNA
catttccaggagactataaacatgtttgaaaggaacattgttgacatggtaggactgtttatcgaaaatgtccaaagcct

SEQ ID NO: 48694 - DNA, 80 bp, synthetic construct; identical to SEQ ID NO: 23709
  misc_feature 1..80: note = Artificially Synthesized Probe
  source 1..80: mol_type = other DNA

SEQ ID NO: 48695 - DNA, 80 bp, synthetic construct
  misc_feature 1..80: note = Artificially Synthesized Probe
  source 1..80: mol_type = other DNA
tgtgctccagctagcagcagccctgtggtcctgccctcctggggctcacagtccctcagggagacaagttgtagaggcaa

SEQ ID NO: 48696 - DNA, 80 bp, synthetic construct
  misc_feature 1..80: note = Artificially Synthesized Probe
  source 1..80: mol_type = other DNA
gtggacggtgctgccagccagaatttccgagctcgccttgggcccttaaagtctgtctcccgccgtctgagagcatcagg

SEQ ID NO: 48697 - DNA, 80 bp, synthetic construct
  misc_feature 1..80: note = Artificially Synthesized Probe
  source 1..80: mol_type = other DNA
acgacctgcgcgcggtaggcggggcgggctgctcggagcctgacagatgtggtccagcccagctctgtggctggactgag

SEQ ID NO: 48698 - DNA, 80 bp, synthetic construct; identical to SEQ ID NO: 23710
  misc_feature 1..80: note = Artificially Synthesized Probe
  source 1..80: mol_type = other DNA

SEQ ID NO: 48699 - DNA, 80 bp, synthetic construct
  misc_feature 1..80: note = Artificially Synthesized Probe
  source 1..80: mol_type = other DNA
cctcccaagtagctggaactacaggcatatgcggccacgcctggctaattttttttattttagtagagatggggtttcac

SEQ ID NO: 48700 - DNA, 80 bp, synthetic construct
  misc_feature 1..80: note = Artificially Synthesized Probe
  source 1..80: mol_type = other DNA
gtgttggaaccaccatttctgatcctgcacaatgccatccggtttgcaccagcacatccactgatgaatggtcacaaaat

SEQ ID NO: 48701 - DNA, 80 bp, synthetic construct
  misc_feature 1..80: note = Artificially Synthesized Probe
  source 1..80: mol_type = other DNA
agacagagatactatgttgtcagggcctgctttagtgcatgcatcattcactccactgccagtttctcagcttctctctg

SEQ ID NO: 48702 - DNA, 80 bp, synthetic construct
  misc_feature 1..80: note = Artificially Synthesized Probe
  source 1..80: mol_type = other DNA
cctatcactgcacacttttacacaacaccttctagtggctttcatgacccctagcgtcagctcctccccatagtccccca

SEQ ID NO: 48703 - DNA, 80 bp, synthetic construct; identical to SEQ ID NO: 23711
  misc_feature 1..80: note = Artificially Synthesized Probe
  source 1..80: mol_type = other DNA

SEQ ID NO: 48704 - DNA, 80 bp, synthetic construct
  misc_feature 1..80: note = Artificially Synthesized Probe
  source 1..80: mol_type = other DNA
ccccctcagtaccagcaacagtgtacaacatgcagcacagatgccaggcatcatctgcagaatgagtgtgagagcgtatg

SEQ ID NO: 48705 - DNA, 80 bp, synthetic construct
  misc_feature 1..80: note = Artificially Synthesized Probe
  source 1..80: mol_type = other DNA
ggtgatagggtcaccgtgacaccagccttccctccctaagctgataactgcagctaattgctattgaccagacacaggaa

SEQ ID NO: 48706 - DNA, 80 bp, synthetic construct
  misc_feature 1..80: note = Artificially Synthesized Probe
  source 1..80: mol_type = other DNA
agaaggcacaggactgaaacgtgcccaatttctaatgactaggacacacagaaaaagatgaatccagaggccaacagcag

SEQ ID NO: 48707 - DNA, 80 bp, synthetic construct; identical to SEQ ID NO: 23712
  misc_feature 1..80: note = Artificially Synthesized Probe
  source 1..80: mol_type = other DNA

SEQ ID NO: 48708 - DNA, 80 bp, synthetic construct
  misc_feature 1..80: note = Artificially Synthesized Probe
  source 1..80: mol_type = other DNA
gggaagtcaaggtgagccatgactgtgccactgcactccagtctgggtgacagagcaagaccctgtctcaaaaaaataaa

SEQ ID NO: 48709 - DNA, 80 bp, synthetic construct
  misc_feature 1..80: note = Artificially Synthesized Probe
  source 1..80: mol_type = other DNA
cacagagatgaaggtaacctgcccaaggacacacagcttataacagatagggttgtgatttgaaccaggcagtttgattg

SEQ ID NO: 48710 - DNA, 80 bp, synthetic construct
  misc_feature 1..80: note = Artificially Synthesized Probe
  source 1..80: mol_type = other DNA
agttgagtgactgttatcagctcatgacctacatggggccaatctgtcccatatctattttcaagtccttccagctttga

SEQ ID NO: 48711 - DNA, 80 bp, synthetic construct
  misc_feature 1..80: note = Artificially Synthesized Probe
  source 1..80: mol_type = other DNA
gcacgatctaggctcactgcaaccttcacctcccgggttcaagtgattctcttgcctcagcctccagagtagctgggact

SEQ ID NO: 48712 - DNA, 80 bp, synthetic construct
  misc_feature 1..80: note = Artificially Synthesized Probe
  source 1..80: mol_type = other DNA
agggcagggtgagtgctcaggcccagggaggatgcaagtccccagggtctgctcaagtggcagtgggtctgacccaagcc

SEQ ID NO: 48713 - DNA, 80 bp, synthetic construct; identical to SEQ ID NO: 23713
  misc_feature 1..80: note = Artificially Synthesized Probe
  source 1..80: mol_type = other DNA

SEQ ID NO: 48714 - DNA, 80 bp, synthetic construct
  misc_feature 1..80: note = Artificially Synthesized Probe
  source 1..80: mol_type = other DNA
cgctggaggcatcacattaccagacttcaaaatatactacaaagttgtagtaaccaaaacagcatggtactggcataaaa

SEQ ID NO: 48715 - DNA, 80 bp, synthetic construct
  misc_feature 1..80: note = Artificially Synthesized Probe
  source 1..80: mol_type = other DNA
ctcagaggcaaggtccaggcaaaggagtggatgcccatcaccaagctgggctgcctggtcaaggacatgaagatcaagtc

SEQ ID NO: 48716 - DNA, 80 bp, synthetic construct
  misc_feature 1..80: note = Artificially Synthesized Probe
  source 1..80: mol_type = other DNA
atggcatgatcttggctcacgacaatctccacctcccaggttcaagtgattctcctgcctcagcctcccgagtagctggg

SEQ ID NO: 48717 - DNA, 80 bp, synthetic construct; identical to SEQ ID NO: 23714
  misc_feature 1..80: note = Artificially Synthesized Probe
  source 1..80: mol_type = other DNA

SEQ ID NO: 48718 - DNA, 80 bp, synthetic construct
  misc_feature 1..80: note = Artificially Synthesized Probe
  source 1..80: mol_type = other DNA
aagatgacaggctgctgcggctctgtgctgctgcaccttattcctgcacccaggggcactggcatcctcttggcctctgt

SEQ ID NO: 48719 - DNA, 80 bp, synthetic construct
  misc_feature 1..80: note = Artificially Synthesized Probe
  source 1..80: mol_type = other DNA
aagtcttcctctcagtaattcactgaccatcttgtcaagacccacaccagagtctctgtgtggaggactcaggcttcagc

SEQ ID NO: 48720 - DNA, 80 bp, synthetic construct; identical to SEQ ID NO: 23681
  misc_feature 1..80: note = Artificially Synthesized Probe
  source 1..80: mol_type = other DNA

SEQ ID NO: 48721 - DNA, 80 bp, synthetic construct
  misc_feature 1..80: note = Artificially Synthesized Probe
  source 1..80: mol_type = other DNA
caccatgcctggttaattttttgtatttttagtagagatggggttttaccaatgttggccggccaggctggtctcaaact

SEQ ID NO: 48722 - DNA, 80 bp, synthetic construct; identical to SEQ ID NO: 23715
  misc_feature 1..80: note = Artificially Synthesized Probe
  source 1..80: mol_type = other DNA

SEQ ID NO: 48723 - DNA, 80 bp, synthetic construct
  misc_feature 1..80: note = Artificially Synthesized Probe
  source 1..80: mol_type = other DNA
caggtcgctggagctcatgagttggagaccagcctgggcaacatggcaaagacccacctctctataaaaaatacaaaaat

SEQ ID NO: 48724 - DNA, 80 bp, synthetic construct
  misc_feature 1..80: note = Artificially Synthesized Probe
  source 1..80: mol_type = other DNA
aaaagacctgaaactataaaatgaccagaagaaaacaagagaaatgctttaggacattggcctgggaaaaaattttatga

SEQ ID NO: 48725 - DNA, 80 bp, synthetic construct
  misc_feature 1..80: note = Artificially Synthesized Probe
  source 1..80: mol_type = other DNA
aatatacaatgaactctaacatctcaatagcaaaaaaacaaacaattcaattaaaaacatctgaacagatgtttctcaaa

SEQ ID NO: 48726 - DNA, 80 bp, synthetic construct; identical to SEQ ID NO: 23716
  misc_feature 1..80: note = Artificially Synthesized Probe
  source 1..80: mol_type = other DNA

SEQ ID NO: 48727 - DNA, 80 bp, synthetic construct
  misc_feature 1..80: note = Artificially Synthesized Probe
  source 1..80: mol_type = other DNA
gactggataaagaaaatgtggtacctatacacaatggaatactattcagccataaaaaaagaatgaaatccatggcaaca

SEQ ID NO: 48728 - DNA, 80 bp, synthetic construct
  misc_feature 1..80: note = Artificially Synthesized Probe
  source 1..80: mol_type = other DNA
ggaatagggagagatttgttaaaggatataccaaattacagctagatagggggaataagttctagtgttctataccacta

SEQ ID NO: 48729 - DNA, 80 bp, synthetic construct
  misc_feature 1..80: note = Artificially Synthesized Probe
  source 1..80: mol_type = other DNA
tcaatatgtacagttatttgtcaatttttttaatgccaatttttttttttttttttgaggtggagtttcactgttgttgc

SEQ ID NO: 48730 - DNA, 80 bp, synthetic construct; identical to SEQ ID NO: 23717
  misc_feature 1..80: note = Artificially Synthesized Probe
  source 1..80: mol_type = other DNA

SEQ ID NO: 48731 - DNA, 80 bp, synthetic construct
  misc_feature 1..80: note = Artificially Synthesized Probe
  source 1..80: mol_type = other DNA
ctttacaaaacagtcctgaagcttaatcaaataaaactattgtacattagaaaaagagagctgggtgtagaaaagccagg

SEQ ID NO: 48732 - DNA, 80 bp, synthetic construct
  misc_feature 1..80: note = Artificially Synthesized Probe
  source 1..80: mol_type = other DNA
cagaaactggagagggatctggaatattctacccataaaaactattctaagagggaaaattgaagtagccaccactctag

SEQ ID NO: 48733 - DNA, 80 bp, synthetic construct
  misc_feature 1..80: note = Artificially Synthesized Probe
  source 1..80: mol_type = other DNA
agcttttgaagctgttttctacatattcaaactctgaggggtatgatttctctgcctggcttagagctccactatgaccc

SEQ ID NO: 48734 - DNA, 80 bp, synthetic construct; identical to SEQ ID NO: 23718
  misc_feature 1..80: note = Artificially Synthesized Probe
  source 1..80: mol_type = other DNA

SEQ ID NO: 48735 - DNA, 80 bp, synthetic construct
  misc_feature 1..80: note = Artificially Synthesized Probe
  source 1..80: mol_type = other DNA
agagagacaaagcttaaagggtttattttccacaggactttgtagagccttcagaatactttgtgcccagcaaatcttta

SEQ ID NO: 48736 - DNA, 80 bp, synthetic construct
  misc_feature 1..80: note = Artificially Synthesized Probe
  source 1..80: mol_type = other DNA
cactacaggaaagaacaaaaaatgcacactccacttgcaaatcctccctgcaatacagagcattcaggtgctctgcctta

SEQ ID NO: 48737 - DNA, 80 bp, synthetic construct
  misc_feature 1..80: note = Artificially Synthesized Probe
  source 1..80: mol_type = other DNA
acaactttttacaagacagcaaagtcaggaacaagagaaggcagaaggatactccaaatggaatccaaagtttggttttg

SEQ ID NO: 48738 - DNA, 80 bp, synthetic construct
  misc_feature 1..80: note = Artificially Synthesized Probe
  source 1..80: mol_type = other DNA
aagcattgtgagaacagatgtcctgggtgaggtgccccctgggcagccatctgccttcaccctggaggaaacatgcttcc

SEQ ID NO: 48739 - DNA, 80 bp, synthetic construct; identical to SEQ ID NO: 23719
  misc_feature 1..80: note = Artificially Synthesized Probe
  source 1..80: mol_type = other DNA

SEQ ID NO: 48740 - DNA, 80 bp, synthetic construct
  misc_feature 1..80: note = Artificially Synthesized Probe
  source 1..80: mol_type = other DNA
atcctagcaggctggatgaacttttctagctgacatggaaatcctccctaggtagtggatagaattttcattaaggaatg

SEQ ID NO: 48741 - DNA, 80 bp, synthetic construct
  misc_feature 1..80: note = Artificially Synthesized Probe
  source 1..80: mol_type = other DNA
gcagatctaaaggaactattttccccttccctcaaactggattcagtgaaagatattaaccaatgatctgatgtaaggaa

SEQ ID NO: 48742 - DNA, 80 bp, synthetic construct
  misc_feature 1..80: note = Artificially Synthesized Probe
  source 1..80: mol_type = other DNA
cctctcatgatggcgatggcattggcagggtaccaagtgatagtccagctgtggtcattgtagaccctggggtggtggtt

SEQ ID NO: 48743 - DNA, 80 bp, synthetic construct; identical to SEQ ID NO: 23720
  misc_feature 1..80: note = Artificially Synthesized Probe
  source 1..80: mol_type = other DNA

SEQ ID NO: 48744 - DNA, 80 bp, synthetic construct
  misc_feature 1..80: note = Artificially Synthesized Probe
  source 1..80: mol_type = other DNA
gaggccgaggcatgcagatcacgaggtcaggagttcgagaccagcctgaccaacatggtgaaaccttgtctctactaaaa

SEQ ID NO: 48745 - DNA, 80 bp, synthetic construct
  misc_feature 1..80: note = Artificially Synthesized Probe
  source 1..80: mol_type = other DNA
aaaaaaaaaaaaaaaaaaaaaaaaaaaaaaaaaaatgttcatgtaggaacaagagaaagagtttgagatgaacagccggt

SEQ ID NO: 48746 - DNA, 80 bp, synthetic construct
  misc_feature 1..80: note = Artificially Synthesized Probe
  source 1..80: mol_type = other DNA
tgctctgggtgctgaggggcagggaagcaggaggagaggctgcagctcccaccacagtgctggggcctgggcctgcccac

SEQ ID NO: 48747 - DNA, 80 bp, synthetic construct
  misc_feature 1..80: note = Artificially Synthesized Probe
  source 1..80: mol_type = other DNA
agcgtggagaggcacccagcatgcgatcagtgccctgtgagcagggttgatgccattaccttactcaggctggcaaggac

SEQ ID NO: 48748 - DNA, 80 bp, synthetic construct; identical to SEQ ID NO: 23721
  misc_feature 1..80: note = Artificially Synthesized Probe
  source 1..80: mol_type = other DNA

SEQ ID NO: 48749 - DNA, 80 bp, synthetic construct
  misc_feature 1..80: note = Artificially Synthesized Probe
  source 1..80: mol_type = other DNA
caaaaaaaagccttcaggctgaggctgaagaacacaaatagagttgtctgtggattacatgattgtttccccagtgcaag

SEQ ID NO: 48750 - DNA, 80 bp, synthetic construct
  misc_feature 1..80: note = Artificially Synthesized Probe
  source 1..80: mol_type = other DNA
tcagcacatttccagggtggagaaatatttaataaaatcagagtcgagagaaagtcacttgcacaattcatctcctacat

SEQ ID NO: 48751 - DNA, 80 bp, synthetic construct
  misc_feature 1..80: note = Artificially Synthesized Probe
  source 1..80: mol_type = other DNA
cgggggagctgtggctgcactgcctctatcctgctgagtgtgctctgcccaggcctcactccttcaggagcttgtgcttg

SEQ ID NO: 48752 - DNA, 80 bp, synthetic construct; identical to SEQ ID NO: 23722
  misc_feature 1..80: note = Artificially Synthesized Probe
  source 1..80: mol_type = other DNA

SEQ ID NO: 48753 - DNA, 80 bp, synthetic construct
  misc_feature 1..80: note = Artificially Synthesized Probe
  source 1..80: mol_type = other DNA
aaaaaggtttaaaaattagctgggtgtggtgggggtgcacctgtagtcccagctatttgagagactgaggtaggaggact

SEQ ID NO: 48754 - DNA, 80 bp, synthetic construct
  misc_feature 1..80: note = Artificially Synthesized Probe
  source 1..80: mol_type = other DNA
agcccggctcaggtcagtcggtcctggcaggggacacagtgggggacgtggcagggatgcagcagactggctggctcagg

SEQ ID NO: 48755 - DNA, 80 bp, synthetic construct
  misc_feature 1..80: note = Artificially Synthesized Probe
  source 1..80: mol_type = other DNA
agcaggcacctgtgctctctgtggcatggatggtctggaagaagtgcagtccaggcccaggcccagggccagtggctgcc

SEQ ID NO: 48756 - DNA, 80 bp, synthetic construct; identical to SEQ ID NO: 23723
  misc_feature 1..80: note = Artificially Synthesized Probe
  source 1..80: mol_type = other DNA

SEQ ID NO: 48757 - DNA, 80 bp, synthetic construct
  misc_feature 1..80: note = Artificially Synthesized Probe
  source 1..80: mol_type = other DNA
tctgtctggagctctaaaaacaagagggaggaacgctcagacacacgatgtggctgtccagacagtgtaagtccaaccaa

SEQ ID NO: 48758 - DNA, 80 bp, synthetic construct
  misc_feature 1..80: note = Artificially Synthesized Probe
  source 1..80: mol_type = other DNA
catactttcattgtataccatcacatacataattcaggttattcctctgtttgtagaggatcgaaaccaaagttcagaga

SEQ ID NO: 48759 - DNA, 80 bp, synthetic construct
  misc_feature 1..80: note = Artificially Synthesized Probe
  source 1..80: mol_type = other DNA
tcctttgttatacaaaaatagttttttccctggcatttttctgagcagaagactacaagaactagggaaatacatcacaa

SEQ ID NO: 48760 - DNA, 80 bp, synthetic construct; identical to SEQ ID NO: 23724
  misc_feature 1..80: note = Artificially Synthesized Probe
  source 1..80: mol_type = other DNA

SEQ ID NO: 48761 - DNA, 80 bp, synthetic construct
  misc_feature 1..80: note = Artificially Synthesized Probe
  source 1..80: mol_type = other DNA
ctggcttcaaaccccagctggcacattttccagaggtgcaaccttgcacctccatttccttctgtgtaaaacagagataa

SEQ ID NO: 48762 - DNA, 80 bp, synthetic construct
  misc_feature 1..80: note = Artificially Synthesized Probe
  source 1..80: mol_type = other DNA
agtggcacaatcctggctcactacaacctccacctcccaggttcaagcaatcctcccacgtcagcttcccaagtagctga

SEQ ID NO: 48763 - DNA, 80 bp, synthetic construct
  misc_feature 1..80: note = Artificially Synthesized Probe
  source 1..80: mol_type = other DNA
ttctgctggtccttgattttgatttctgcgtgtacataaaagtaataaaagccaagtatgcataactatatttcagatgg

SEQ ID NO: 48764 - DNA, 80 bp, synthetic construct
  misc_feature 1..80: note = Artificially Synthesized Probe
  source 1..80: mol_type = other DNA
agctgggcagctacaaactcaatccctgcagggacacaagccaagtcagaacccaaaacagggcagctgccacaacctac

SEQ ID NO: 48765 - DNA, 80 bp, synthetic construct; identical to SEQ ID NO: 23682
  misc_feature 1..80: note = Artificially Synthesized Probe
  source 1..80: mol_type = other DNA

SEQ ID NO: 48766 - DNA, 80 bp, synthetic construct; identical to SEQ ID NO: 23725
  misc_feature 1..80: note = Artificially Synthesized Probe
  source 1..80: mol_type = other DNA

SEQ ID NO: 48767 - DNA, 80 bp, synthetic construct
  misc_feature 1..80: note = Artificially Synthesized Probe
  source 1..80: mol_type = other DNA
ctgatggccttcacagccacctgccaagcccacaagaaactccatacatgccttgtaaagcccatgtgttgtaagatgcc

SEQ ID NO: 48768 - DNA, 80 bp, synthetic construct
  misc_feature 1..80: note = Artificially Synthesized Probe
  source 1..80: mol_type = other DNA
ctgtagcccaagagcagcccaccttttgactagaaacaaaggcctaagcttcagagcatgtgtgtgcattggccaaggag

SEQ ID NO: 48769 - DNA, 80 bp, synthetic construct; identical to SEQ ID NO: 23726
  misc_feature 1..80: note = Artificially Synthesized Probe
  source 1..80: mol_type = other DNA

SEQ ID NO: 48770 - DNA, 80 bp, synthetic construct
  misc_feature 1..80: note = Artificially Synthesized Probe
  source 1..80: mol_type = other DNA
tgcgctggcatgatcttgactcactgcagccttgacctcctaggctcaagcgatcctcccacctcagtctcccaagtagc

SEQ ID NO: 48771 - DNA, 80 bp, synthetic construct
  misc_feature 1..80: note = Artificially Synthesized Probe
  source 1..80: mol_type = other DNA
ccaaagtgttgggattacagccatgagccaccatgaccagtcagcagtcattttttcaaacttttttttttttttttttt

SEQ ID NO: 48772 - DNA, 80 bp, synthetic construct
  misc_feature 1..80: note = Artificially Synthesized Probe
  source 1..80: mol_type = other DNA
aaaaataatttttgtaattttcttccatatatcactgatttttttctgttgcttaaaaaaatccggctggggccgggcgc

SEQ ID NO: 48773 - DNA, 80 bp, synthetic construct; identical to SEQ ID NO: 23727
  misc_feature 1..80: note = Artificially Synthesized Probe
  source 1..80: mol_type = other DNA

SEQ ID NO: 48774 - DNA, 80 bp, synthetic construct
  misc_feature 1..80: note = Artificially Synthesized Probe
  source 1..80: mol_type = other DNA
aaccccatctctactaaaaacacaaaaattagctgggcgtggtgggcgcctgtaatcccagctacttgagaggctgaggc

SEQ ID NO: 48775 - DNA, 80 bp, synthetic construct
  misc_feature 1..80: note = Artificially Synthesized Probe
  source 1..80: mol_type = other DNA
taagtttttctataaactcttaaggatgaggtatttcctgccacaagaatctgatgattttatactatagcaaagatctc

SEQ ID NO: 48776 - DNA, 80 bp, synthetic construct
  misc_feature 1..80: note = Artificially Synthesized Probe
  source 1..80: mol_type = other DNA
gcaaatcagtgaactgattggtaacatcacttttgtggaaaactgctataccaagaaatgtgccttgcaagcttagaaaa

SEQ ID NO: 48777 - DNA, 80 bp, synthetic construct
  misc_feature 1..80: note = Artificially Synthesized Probe
  source 1..80: mol_type = other DNA
gtaatctaggctcactgcaacctctgcctcctgggttcaagcgattctcctgcctcagcctccagagtagctgggattac

SEQ ID NO: 48778 - DNA, 80 bp, synthetic construct
  misc_feature 1..80: note = Artificially Synthesized Probe
  source 1..80: mol_type = other DNA
tacatatccattggatgttacccgtaattttgcaggaagctatccagacttttctccaagtgcatacatatcgtatatgt

SEQ ID NO: 48779 - DNA, 80 bp, synthetic construct; identical to SEQ ID NO: 23728
  misc_feature 1..80: note = Artificially Synthesized Probe
  source 1..80: mol_type = other DNA

SEQ ID NO: 48780 - DNA, 80 bp, synthetic construct
  misc_feature 1..80: note = Artificially Synthesized Probe
  source 1..80: mol_type = other DNA
gtacctagtggctgaaattaaatttgaggtgcttttttcccaggatgaccctatccctgatcatatgaggggagccaaat

SEQ ID NO: 48781 - DNA, 80 bp, synthetic construct
  misc_feature 1..80: note = Artificially Synthesized Probe
  source 1..80: mol_type = other DNA
cactcattcctttgaagttccactaatgtctcgggctcctccaccctgtagctaattcattgtaaaaataaccttcatta

SEQ ID NO: 48782 - DNA, 80 bp, synthetic construct; identical to SEQ ID NO: 23729
  misc_feature 1..80: note = Artificially Synthesized Probe
  source 1..80: mol_type = other DNA

SEQ ID NO: 48783 - DNA, 80 bp, synthetic construct
  misc_feature 1..80: note = Artificially Synthesized Probe
  source 1..80: mol_type = other DNA
gaatgggaatgctgtgccagatgctcagtctttgcatctctaccctcaccccctccaagagactgtgcccctggtcacag

SEQ ID NO: 48784 - DNA, 80 bp, synthetic construct
  misc_feature 1..80: note = Artificially Synthesized Probe
  source 1..80: mol_type = other DNA
tgcagggcctcatgggatgggaatccaagtgggcactatggaaatccactgtcttgtgtaagcaaagtggggaagagagg

SEQ ID NO: 48785 - DNA, 80 bp, synthetic construct; identical to SEQ ID NO: 23678
  misc_feature 1..80: note = Artificially Synthesized Probe
  source 1..80: mol_type = other DNA

SEQ ID NO: 48786 - DNA, 80 bp, synthetic construct
  misc_feature 1..80: note = Artificially Synthesized Probe
  source 1..80: mol_type = other DNA
gtcaggatccctgtatagttttcaagaatcccctttttgtctgagctaggttgaatgggtttctgctccctgcaatcaag

SEQ ID NO: 48787 - DNA, 80 bp, synthetic construct; identical to SEQ ID NO: 23730
  misc_feature 1..80: note = Artificially Synthesized Probe
  source 1..80: mol_type = other DNA

SEQ ID NO: 48788 - DNA, 80 bp, synthetic construct
  misc_feature 1..80: note = Artificially Synthesized Probe
  source 1..80: mol_type = other DNA
agcttctgggctagagaagaggggtggccatgttctgacaccattgtagcccgaggagtcctcctcctaaggggctacag

SEQ ID NO: 48789 - DNA, 80 bp, synthetic construct
  misc_feature 1..80: note = Artificially Synthesized Probe
  source 1..80: mol_type = other DNA
aaagctccgcctcctgggttcacgccattctcctgcctcagcctcccgagtagctgggactacaggtgcccgccaccacg

SEQ ID NO: 48790 - DNA, 80 bp, synthetic construct
  misc_feature 1..80: note = Artificially Synthesized Probe
  source 1..80: mol_type = other DNA
tccagaaacttcacggctgcccggatcagctgatccttgtttctctgggttgggttgtccaatgatgtgttgcacaatgt

SEQ ID NO: 48791 - DNA, 80 bp, synthetic construct
  misc_feature 1..80: note = Artificially Synthesized Probe
  source 1..80: mol_type = other DNA
agagtgtgccacaaccaggctccatgccaaatgctttgtgttgacgctcacaggactcgagggaagcttgcagcagcccc

SEQ ID NO: 48792 - DNA, 80 bp, synthetic construct; identical to SEQ ID NO: 23731
  misc_feature 1..80: note = Artificially Synthesized Probe
  source 1..80: mol_type = other DNA

SEQ ID NO: 48793 - DNA, 80 bp, synthetic construct
  misc_feature 1..80: note = Artificially Synthesized Probe
  source 1..80: mol_type = other DNA
agttcaagaccagcctggccaacatggtaaaaccccatctctactaaaaatacaaaaattagcctggcatggtggtggac

SEQ ID NO: 48794 - DNA, 80 bp, synthetic construct
  misc_feature 1..80: note = Artificially Synthesized Probe
  source 1..80: mol_type = other DNA
ccttgtcaataataggctgcttaggttaccctattcgtttgtagccctaatcaccctaatttcactaggttgtcaaggac

SEQ ID NO: 48795 - DNA, 80 bp, synthetic construct
  misc_feature 1..80: note = Artificially Synthesized Probe
  source 1..80: mol_type = other DNA
catctcatcctgaccacagctccgtgaggtgggtactattatcactcatctttaatcggtggggaatatggggctgcgaa

SEQ ID NO: 48796 - DNA, 80 bp, synthetic construct; identical to SEQ ID NO: 23732
  misc_feature 1..80: note = Artificially Synthesized Probe
  source 1..80: mol_type = other DNA

SEQ ID NO: 48797 - DNA, 80 bp, synthetic construct
  misc_feature 1..80: note = Artificially Synthesized Probe
  source 1..80: mol_type = other DNA
caatgaaggtgacatctgtcctgaaaccaaaggagaaaccagccatccagcacagtgttcctaggagagagagctgcaag

SEQ ID NO: 48798 - DNA, 80 bp, synthetic construct
  misc_feature 1..80: note = Artificially Synthesized Probe
  source 1..80: mol_type = other DNA
acactgtgaacttgttaccaggtgcatggtgtagtacttgatggtatcctgctgggaatcccactcagtagccactgcaa

SEQ ID NO: 48799 - DNA, 80 bp, synthetic construct
  misc_feature 1..80: note = Artificially Synthesized Probe
  source 1..80: mol_type = other DNA
aattggtgcagacaaagccaactctgagtcccttacagaaatatatctcacaaaaagcaggaaggataatcgcaccatga

SEQ ID NO: 48800 - DNA, 80 bp, synthetic construct; identical to SEQ ID NO: 23683
  misc_feature 1..80: note = Artificially Synthesized Probe
  source 1..80: mol_type = other DNA

SEQ ID NO: 48801 - DNA, 80 bp, synthetic construct; identical to SEQ ID NO: 23733
  misc_feature 1..80: note = Artificially Synthesized Probe
  source 1..80: mol_type = other DNA

SEQ ID NO: 48802 - DNA, 80 bp, synthetic construct
  misc_feature 1..80: note = Artificially Synthesized Probe
  source 1..80: mol_type = other DNA
gcatctcggcatgctctcccaccctccccaccaccagtgccacctcatgccagcacaacgagttcaaacctaaagtcggt

SEQ ID NO: 48803 - DNA, 80 bp, synthetic construct
  misc_feature 1..80: note = Artificially Synthesized Probe
  source 1..80: mol_type = other DNA
taacctaattaaccagcttgcttgtgtatccaacaggaactccaaacatttccttcaagaatgggaaaatctatgtcctt

SEQ ID NO: 48804 - DNA, 80 bp, synthetic construct
  misc_feature 1..80: note = Artificially Synthesized Probe
  source 1..80: mol_type = other DNA
acaaagaagtcacattttggaagctataagctataactcagtctctcacatctgtgacaaacacaaaactttcattcatt

SEQ ID NO: 48805 - DNA, 80 bp, synthetic construct
  misc_feature 1..80: note = Artificially Synthesized Probe
  source 1..80: mol_type = other DNA
ggcgtctcactctcttgcccaggctggagtgtagtggtgcaatctcagctcactgaaacctccacctcctgggttcaagc

SEQ ID NO: 48806 - DNA, 80 bp, synthetic construct; identical to SEQ ID NO: 23734
  misc_feature 1..80: note = Artificially Synthesized Probe
  source 1..80: mol_type = other DNA

SEQ ID NO: 48807 - DNA, 80 bp, synthetic construct
  misc_feature 1..80: note = Artificially Synthesized Probe
  source 1..80: mol_type = other DNA
gtggatcacctgaggtcaggagttcgagaccagcctggtcaatgtggtgaaaccccatctctactaaaaatacaaaaatt

SEQ ID NO: 48808 - DNA, 80 bp, synthetic construct
  misc_feature 1..80: note = Artificially Synthesized Probe
  source 1..80: mol_type = other DNA
aaaaaaaaaagaaaaattaaaaattagctaggcatggtggcacatgcctgtagtccccagctactaggaaggctgaagca

SEQ ID NO: 48809 - DNA, 80 bp, synthetic construct; identical to SEQ ID NO: 23735
  misc_feature 1..80: note = Artificially Synthesized Probe
  source 1..80: mol_type = other DNA

SEQ ID NO: 48810 - DNA, 80 bp, synthetic construct
  misc_feature 1..80: note = Artificially Synthesized Probe
  source 1..80: mol_type = other DNA
ccgccaccacgcctggcttttttttttttttttttttttttagtagagacggggtttcaccgtgttagccaggatggtct

SEQ ID NO: 48811 - DNA, 80 bp, synthetic construct
  misc_feature 1..80: note = Artificially Synthesized Probe
  source 1..80: mol_type = other DNA
ccacattggccaggatggtctcgatctcttgaacttgtgatccgcccgcctcggcctcccaaagtgctgtgattacaggc

SEQ ID NO: 48812 - DNA, 80 bp, synthetic construct
  misc_feature 1..80: note = Artificially Synthesized Probe
  source 1..80: mol_type = other DNA
gttctgcctcctcggttcacaccattctcctgcctcagcctcccgagtacctgggactacaggtgcctgccaccacgcct

SEQ ID NO: 48813 - DNA, 80 bp, synthetic construct
  misc_feature 1..80: note = Artificially Synthesized Probe
  source 1..80: mol_type = other DNA
ttttcccatcatatcagttttctataaatctcatttgctatcactaatacttacagacagagggcccaaaattgcattcc

SEQ ID NO: 48814 - DNA, 80 bp, synthetic construct; identical to SEQ ID NO: 23736
  misc_feature 1..80: note = Artificially Synthesized Probe
  source 1..80: mol_type = other DNA

SEQ ID NO: 48815 - DNA, 80 bp, synthetic construct
  misc_feature 1..80: note = Artificially Synthesized Probe
  source 1..80: mol_type = other DNA
cctgtagtcccagctacttgggaggctgaggcaggagaatggcgtgaacccgggaggtggagcttgcagtgagctgagat

SEQ ID NO: 48816 - DNA, 80 bp, synthetic construct
  misc_feature 1..80: note = Artificially Synthesized Probe
  source 1..80: mol_type = other DNA
actaaaattagaagtttacagcaccctactgcttttaaatttctctacatgctgtcctggtcatatccaaatggcaggct

SEQ ID NO: 48817 - DNA, 80 bp, synthetic construct
  misc_feature 1..80: note = Artificially Synthesized Probe
  source 1..80: mol_type = other DNA
agggtcttcccatgtcagcaggaagagccagcagagtgtacaaatgtacaagagtgagcactctagcatacttccaggcc

SEQ ID NO: 48818 - DNA, 80 bp, synthetic construct; identical to SEQ ID NO: 23737
  misc_feature 1..80: note = Artificially Synthesized Probe
  source 1..80: mol_type = other DNA

SEQ ID NO: 48819 - DNA, 80 bp, synthetic construct
  misc_feature 1..80: note = Artificially Synthesized Probe
  source 1..80: mol_type = other DNA
agggaagaagccaccaaaaatttctccaagcagaagaaaaccatgcagaaaatgagacggcagaagggcaaaagaagccc

SEQ ID NO: 48820 - DNA, 80 bp, synthetic construct
  misc_feature 1..80: note = Artificially Synthesized Probe
  source 1..80: mol_type = other DNA
ggacatgtgcaaagctcatctctgcactctccagccatttactgtctagtaggaatacagacactaaaccaggcaaacaa

SEQ ID NO: 48821 - DNA, 80 bp, synthetic construct
  misc_feature 1..80: note = Artificially Synthesized Probe
  source 1..80: mol_type = other DNA
acaggttgcatgaaggaccagggtttctagagagcagttgtggactagacagatggtcagaaggagaatgcaagattctc

SEQ ID NO: 48822 - DNA, 80 bp, synthetic construct
  misc_feature 1..80: note = Artificially Synthesized Probe
  source 1..80: mol_type = other DNA
cgagggggacagatcacttaaagccaggagctcaagagcagcctggccaacatggtgaaaccctgtctctacaaaaaatt

SEQ ID NO: 48823 - DNA, 80 bp, synthetic construct
  misc_feature 1..80: note = Artificially Synthesized Probe
  source 1..80: mol_type = other DNA
aaaaaagaacatgatctggacaattcgtttgggggatccatgttccccaacaatgtcacataagacaaaatgtgagacca

SEQ ID NO: 48824 - DNA, 80 bp, synthetic construct
  misc_feature 1..80: note = Artificially Synthesized Probe
  source 1..80: mol_type = other DNA
atacagtacatatttacttatacatatgtgtttttcagaactctcctggctgccagtgacagaaaccaaactctggctta

SEQ ID NO: 48825 - DNA, 80 bp, synthetic construct; identical to SEQ ID NO: 23738
  misc_feature 1..80: note = Artificially Synthesized Probe
  source 1..80: mol_type = other DNA

SEQ ID NO: 48826 - DNA, 80 bp, synthetic construct
  misc_feature 1..80: note = Artificially Synthesized Probe
  source 1..80: mol_type = other DNA
atctgtaatcctagggcggctctaaccaactcttttcaggtatcaaaattcttcagcccaaatacataaagaactcttac

SEQ ID NO: 48827 - DNA, 80 bp, synthetic construct
  misc_feature 1..80: note = Artificially Synthesized Probe
  source 1..80: mol_type = other DNA
acatggcaacaccctgtctctacaaaaatacaaaaattagccaggcatggtggcacgtgcctgtagtcccagctactcag

SEQ ID NO: 48828 - DNA, 80 bp, synthetic construct
  misc_feature 1..80: note = Artificially Synthesized Probe
  source 1..80: mol_type = other DNA
gggaagattgcttgagtccaggagtttgagaccagcctgggcaacatagcaagaccctgtctgtacaaaaaaattttaaa

SEQ ID NO: 48829 - DNA, 80 bp, synthetic construct; identical to SEQ ID NO: 23739
  misc_feature 1..80: note = Artificially Synthesized Probe
  source 1..80: mol_type = other DNA

SEQ ID NO: 48830 - DNA, 80 bp, synthetic construct
  misc_feature 1..80: note = Artificially Synthesized Probe
  source 1..80: mol_type = other DNA
cttgaaaaacagtctggcagatcctccaaaagttaaacagagttaccatttgacccagtaattctactcttaggtatatg

SEQ ID NO: 48831 - DNA, 80 bp, synthetic construct
  misc_feature 1..80: note = Artificially Synthesized Probe
  source 1..80: mol_type = other DNA
ttggcaataaagaagaatggagtcattgatacatgatacaaggtggataaaacttaaaaacgtttggtcatggtggctca

SEQ ID NO: 48832 - DNA, 80 bp, synthetic construct
  misc_feature 1..80: note = Artificially Synthesized Probe
  source 1..80: mol_type = other DNA
caggaggatcacttgagcccaggagtttgaggttacagtgagctgtgatcgtgccactacactccagcctgggcaacaga

SEQ ID NO: 48833 - DNA, 80 bp, synthetic construct; identical to SEQ ID NO: 23740
  misc_feature 1..80: note = Artificially Synthesized Probe
  source 1..80: mol_type = other DNA

SEQ ID NO: 48834 - DNA, 80 bp, synthetic construct
  misc_feature 1..80: note = Artificially Synthesized Probe
  source 1..80: mol_type = other DNA
ccaaatgtataacatttagcaaactttttctgcaaagaatcagatagtaaatattctaagctttgcaagccatacaatat

SEQ ID NO: 48835 - DNA, 80 bp, synthetic construct
  misc_feature 1..80: note = Artificially Synthesized Probe
  source 1..80: mol_type = other DNA
tattctatgaggatgacaaggcagctaatgcctcggaggtgatagagaagctaaacatcttgtcttggtgacagacaact

SEQ ID NO: 48836 - DNA, 80 bp, synthetic construct
  misc_feature 1..80: note = Artificially Synthesized Probe
  source 1..80: mol_type = other DNA
cgtgcctgagggattcctttggacatatatacagtgtggagatagattccatgtagagaaattatagttcaaagggcact

SEQ ID NO: 48837 - DNA, 80 bp, synthetic construct
  misc_feature 1..80: note = Artificially Synthesized Probe
  source 1..80: mol_type = other DNA
gataagctggtgcagaactaaactgccacaacaacctcatataggtcttcttgttgcaatatctccttctccaacacctc

SEQ ID NO: 48838 - DNA, 80 bp, synthetic construct; identical to SEQ ID NO: 23741
  misc_feature 1..80: note = Artificially Synthesized Probe
  source 1..80: mol_type = other DNA

SEQ ID NO: 48839 - DNA, 80 bp, synthetic construct
  misc_feature 1..80: note = Artificially Synthesized Probe
  source 1..80: mol_type = other DNA
caatacaaaaaaattagccaggtgtggtggtgggcacctgtagtcccagctactcgggacgctgaggcaggagaatggcg

SEQ ID NO: 48840 - DNA, 80 bp, synthetic construct
  misc_feature 1..80: note = Artificially Synthesized Probe
  source 1..80: mol_type = other DNA
tgactacctaccatgtgccaggtacttccaagagcctaactagtaagtttaggctttttaaaaaggaaaagaaggcagta

SEQ ID NO: 48841 - DNA, 80 bp, synthetic construct
  misc_feature 1..80: note = Artificially Synthesized Probe
  source 1..80: mol_type = other DNA
aaaccccatctctactaaaaatacaaaattagccacgtgtggtggcggacacctgtaatcccagctacttgggaggctga

SEQ ID NO: 48842 - DNA, 80 bp, synthetic construct; identical to SEQ ID NO: 23684
  misc_feature 1..80: note = Artificially Synthesized Probe
  source 1..80: mol_type = other DNA

SEQ ID NO: 48843 - DNA, 80 bp, synthetic construct; identical to SEQ ID NO: 23742
  misc_feature 1..80: note = Artificially Synthesized Probe
  source 1..80: mol_type = other DNA

SEQ ID NO: 48844 - DNA, 80 bp, synthetic construct
  misc_feature 1..80: note = Artificially Synthesized Probe
  source 1..80: mol_type = other DNA
agtcaggagttcgagaccagcctagtcaatataaaccccatctctactaaaaatacaaaaattagcagggcatggtggca

SEQ ID NO: 48845 - DNA, 80 bp, synthetic construct
  misc_feature 1..80: note = Artificially Synthesized Probe
  source 1..80: mol_type = other DNA
aaaaaaagaacttgacagccagaaagatcctcaaaggcaacctagtacttcaacgcatggagaaaaatgaggaagtagtt

SEQ ID NO: 48846 - DNA, 80 bp, synthetic construct; identical to SEQ ID NO: 23743
  misc_feature 1..80: note = Artificially Synthesized Probe
  source 1..80: mol_type = other DNA

SEQ ID NO: 48847 - DNA, 80 bp, synthetic construct
  misc_feature 1..80: note = Artificially Synthesized Probe
  source 1..80: mol_type = other DNA
ggcctttttcttctttaattgagcttctctaccaatacatacaggtgggtcttaaagacaaccgtgcctcctgcctccag

SEQ ID NO: 48848 - DNA, 80 bp, synthetic construct
  misc_feature 1..80: note = Artificially Synthesized Probe
  source 1..80: mol_type = other DNA
aggtggaggtgtcaatttctatttaggagagaaggctgcagatggcagaggttgtggtaggagggaaagtcaggaaacct

SEQ ID NO: 48849 - DNA, 80 bp, synthetic construct
  misc_feature 1..80: note = Artificially Synthesized Probe
  source 1..80: mol_type = other DNA
ccaaacttccccttttgaaaacaaagatgacacctgctttccttattaaagggagggcagccataagctttgagaaaacc

SEQ ID NO: 48850 - DNA, 80 bp, synthetic construct
  misc_feature 1..80: note = Artificially Synthesized Probe
  source 1..80: mol_type = other DNA
agccgaagcccgaagcccaccttaccccagctcggccccaacccaaaagaacatgtcatggtcttacctgtcggcggggc

SEQ ID NO: 48851 - DNA, 80 bp, synthetic construct; identical to SEQ ID NO: 23744
  misc_feature 1..80: note = Artificially Synthesized Probe
  source 1..80: mol_type = other DNA

SEQ ID NO: 48852 - DNA, 80 bp, synthetic construct
  misc_feature 1..80: note = Artificially Synthesized Probe
  source 1..80: mol_type = other DNA
tctgtggctctgggtggcagtaccgatccccgcccacctcatagggacacaatgttcctcgatgctcagccgacatctcc

SEQ ID NO: 48853 - DNA, 80 bp, synthetic construct
  misc_feature 1..80: note = Artificially Synthesized Probe
  source 1..80: mol_type = other DNA
cagtttgagaacttgaggaagctgcagctggacaataacatcattgagaagatcgagggcctggagaacctcgcacacct

SEQ ID NO: 48854 - DNA, 80 bp, synthetic construct
  misc_feature 1..80: note = Artificially Synthesized Probe
  source 1..80: mol_type = other DNA
aagaaagctgctattttttaaaagcctagggcttgtgctgggcaaagtgcagcaaagatgtgctcagacacaagaccaca

SEQ ID NO: 48855 - DNA, 80 bp, synthetic construct; identical to SEQ ID NO: 23685
  misc_feature 1..80: note = Artificially Synthesized Probe
  source 1..80: mol_type = other DNA

SEQ ID NO: 48856 - DNA, 80 bp, synthetic construct
  misc_feature 1..80: note = Artificially Synthesized Probe
  source 1..80: mol_type = other DNA
ggcctgagagctccttatgccctgtcttgtttaacccccattttaatcctaagagttgggcatctgttataatcccaatc

SEQ ID NO: 48857 - DNA, 80 bp, synthetic construct
  misc_feature 1..80: note = Artificially Synthesized Probe
  source 1..80: mol_type = other DNA
agggtaggaagtgtgggagaatgagagcgggcactgggatggcagcttcagggaaggggtgaccaaagacaggctggtag

SEQ ID NO: 48858 - DNA, 80 bp, synthetic construct
  misc_feature 1..80: note = Artificially Synthesized Probe
  source 1..80: mol_type = other DNA
ggcatcgtgagccttccaatttgccaaacactcccatcctcctttgtgctgacaattgcaagcccatagcaaacccacag

SEQ ID NO: 48859 - DNA, 80 bp, synthetic construct
  misc_feature 1..80: note = Artificially Synthesized Probe
  source 1..80: mol_type = other DNA
tctagcacccattaatgctgattcatgaatgccatggttttaagcaggagctctctggcctggctgtctctcagacataa

SEQ ID NO: 48860 - DNA, 80 bp, synthetic construct; identical to SEQ ID NO: 23686
  misc_feature 1..80: note = Artificially Synthesized Probe
  source 1..80: mol_type = other DNA

SEQ ID NO: 48861 - DNA, 80 bp, synthetic construct
  misc_feature 1..80: note = Artificially Synthesized Probe
  source 1..80: mol_type = other DNA
gggcaggctctgttaagaggtcacactgcccctcagagtataggcagaagctggtctttgtccagccatggcactaggtg

SEQ ID NO: 48862 - DNA, 80 bp, synthetic construct
  misc_feature 1..80: note = Artificially Synthesized Probe
  source 1..80: mol_type = other DNA
tatacacatttcttcccaactttgcttccagggatgccacgctggtagcttgaaattggccacggtgggagtatttacac

SEQ ID NO: 48863 - DNA, 80 bp, synthetic construct
  misc_feature 1..80: note = Artificially Synthesized Probe
  source 1..80: mol_type = other DNA
attcaaaccccagcttggccaacatactgactttgcacaagatattccactctgtgaacctcagtttcttttttttgaga

SEQ ID NO: 48864 - DNA, 80 bp, synthetic construct
  misc_feature 1..80: note = Artificially Synthesized Probe
  source 1..80: mol_type = other DNA
ggtatgtgccaccatgggtggctaatttttgtatttttagtagaaacagggttttgccatgttgaccaggctgatctcga

SEQ ID NO: 48865 - DNA, 80 bp, synthetic construct; identical to SEQ ID NO: 23687
  misc_feature 1..80: note = Artificially Synthesized Probe
  source 1..80: mol_type = other DNA

SEQ ID NO: 48866 - DNA, 80 bp, synthetic construct
  misc_feature 1..80: note = Artificially Synthesized Probe
  source 1..80: mol_type = other DNA
atctcggctcactccacctccaaggttcaagtggttctcgtgcctcagcctcctgagtagctgggattacaggcatgtgc

SEQ ID NO: 48867 - DNA, 80 bp, synthetic construct
  misc_feature 1..80: note = Artificially Synthesized Probe
  source 1..80: mol_type = other DNA
ttttaaatgtgatcaccctgtggttatcatgctcatatttccaagcccaggaaaaatgctcatttttggcctctaggcca

SEQ ID NO: 48868 - DNA, 80 bp, synthetic construct; identical to SEQ ID NO: 23688
  misc_feature 1..80: note = Artificially Synthesized Probe
  source 1..80: mol_type = other DNA

SEQ ID NO: 48869 - DNA, 80 bp, synthetic construct
  misc_feature 1..80: note = Artificially Synthesized Probe
  source 1..80: mol_type = other DNA
cgtgcacagtgcctggctcacacagcaagccaggcacagtaagtgaaggcagaggcagtacgagggcagtgagagaggtg

SEQ ID NO: 48870 - DNA, 80 bp, synthetic construct
  misc_feature 1..80: note = Artificially Synthesized Probe
  source 1..80: mol_type = other DNA
ttcccaaagatgtggaattagtcaaaagtctcggttggggttgagggagcctgagacagctgtgatggagctggaggaac

SEQ ID NO: 48871 - DNA, 80 bp, synthetic construct
  misc_feature 1..80: note = Artificially Synthesized Probe
  source 1..80: mol_type = other DNA
ttcaaaaacagttttatttcattattatccaagtacctttgaaaagataattaattgtacaagtgtcatcgcatgaaaaa

SEQ ID NO: 48872 - DNA, 80 bp, synthetic construct
  misc_feature 1..80: note = Artificially Synthesized Probe
  source 1..80: mol_type = other DNA
ccctaaccttcatctcccacctgaggtcacggcgtggactcccctgacccagggcccagtccactccctccagcagaggg

SEQ ID NO: 48873 - DNA, 80 bp, synthetic construct
  misc_feature 1..80: note = Artificially Synthesized Probe
  source 1..80: mol_type = other DNA
tctctgagtagcctcgggaccttgccccatggctgtgtggttccaggccccaggcgaagctgctctgggccctgcgggtg

SEQ ID NO: 48874 - DNA, 80 bp, synthetic construct
  misc_feature 1..80: note = Artificially Synthesized Probe
  source 1..80: mol_type = other DNA
tggccacgtgcccactgtccggggagcgatggccaggcccaggcgactggcggccaggtgtcctcagcacacgctgtacg

SEQ ID NO: 48875 - DNA, 80 bp, synthetic construct; identical to SEQ ID NO: 23756
  misc_feature 1..80: note = Artificially Synthesized Probe
  source 1..80: mol_type = other DNA

SEQ ID NO: 48876 - DNA, 80 bp, synthetic construct
  misc_feature 1..80: note = Artificially Synthesized Probe
  source 1..80: mol_type = other DNA
gcaaggcctcaaggaatgcagcgtatgtatcggctgtgggcagagctctgcacagatttagtttagttttattctttttt

SEQ ID NO: 48877 - DNA, 80 bp, synthetic construct
  misc_feature 1..80: note = Artificially Synthesized Probe
  source 1..80: mol_type = other DNA
ctgagccccgtcatggaggtgaccccaactggggccctccctcagcaccacatctgcagtcatggggtgtttgcacagtg

SEQ ID NO: 48878 - DNA, 80 bp, synthetic construct
  misc_feature 1..80: note = Artificially Synthesized Probe
  source 1..80: mol_type = other DNA
ctttggggacagatgcgattctcaccatattggccaggctggtctcgaatgcctgagctcaagcaatctgcctgccttgg

SEQ ID NO: 48879 - DNA, 80 bp, synthetic construct
  misc_feature 1..80: note = Artificially Synthesized Probe
  source 1..80: mol_type = other DNA
cacccagctaatttttgtatttttagtagagacaggatttcactatgttggccaggctggtctcgaactcctgacctcat

SEQ ID NO: 48880 - DNA, 80 bp, synthetic construct; identical to SEQ ID NO: 23757
  misc_feature 1..80: note = Artificially Synthesized Probe
  source 1..80: mol_type = other DNA

SEQ ID NO: 48881 - DNA, 80 bp, synthetic construct
  misc_feature 1..80: note = Artificially Synthesized Probe
  source 1..80: mol_type = other DNA
aaaacagtattgagtaaatctggtgtcaatacaaaagaaagagagggaactaagttaccatgtatctatgtatgtattta

SEQ ID NO: 48882 - DNA, 80 bp, synthetic construct
  misc_feature 1..80: note = Artificially Synthesized Probe
  source 1..80: mol_type = other DNA
ttgtatttttagtagagacggggtttcaccatgttggccaggctggtctcaaactcctaacctcaggtaatccaccaccc

SEQ ID NO: 48883 - DNA, 80 bp, synthetic construct
  misc_feature 1..80: note = Artificially Synthesized Probe
  source 1..80: mol_type = other DNA
cctgcctcagcctgcccagtagctgggactacaggtgcccgccaccacgcccggctaattttttatatttttagtagaga

SEQ ID NO: 48884 - DNA, 80 bp, synthetic construct; identical to SEQ ID NO: 23758
  misc_feature 1..80: note = Artificially Synthesized Probe
  source 1..80: mol_type = other DNA

SEQ ID NO: 48885 - DNA, 80 bp, synthetic construct
  misc_feature 1..80: note = Artificially Synthesized Probe
  source 1..80: mol_type = other DNA
gtggtgccatcacagctcaaggcagcctcaacctccaggggtcaagcgatcctcctgcttcagcctgccaagtagctggg

SEQ ID NO: 48886 - DNA, 80 bp, synthetic construct
  misc_feature 1..80: note = Artificially Synthesized Probe
  source 1..80: mol_type = other DNA
ccactgtgccccacctacctctatattttaatataaacaaacctcccaacgtttagcacccaactctcacacctgcaaaa

SEQ ID NO: 48887 - DNA, 80 bp, synthetic construct
  misc_feature 1..80: note = Artificially Synthesized Probe
  source 1..80: mol_type = other DNA
agccgggggacaggtgggtggtgggcatcccctggcggatgcagctatgctgcctccctttccttggttttgtaggacta

SEQ ID NO: 48888 - DNA, 80 bp, synthetic construct; identical to SEQ ID NO: 23759
  misc_feature 1..80: note = Artificially Synthesized Probe
  source 1..80: mol_type = other DNA

SEQ ID NO: 48889 - DNA, 80 bp, synthetic construct; identical to SEQ ID NO: 23746
  misc_feature 1..80: note = Artificially Synthesized Probe
  source 1..80: mol_type = other DNA

SEQ ID NO: 48890 - DNA, 80 bp, synthetic construct
  misc_feature 1..80: note = Artificially Synthesized Probe
  source 1..80: mol_type = other DNA
atggtgaaaccccgtctctactaaaaatacaaaaaaattagccgggcgtgatggtgggcgcctgtagtcccagctactgg

SEQ ID NO: 48891 - DNA, 80 bp, synthetic construct
  misc_feature 1..80: note = Artificially Synthesized Probe
  source 1..80: mol_type = other DNA
aacaaagcaaaaaaaaaaaaaaaactggagttattccttttagggaaggaccaccactcctgggccctggtggtgctgga

SEQ ID NO: 48892 - DNA, 80 bp, synthetic construct
  misc_feature 1..80: note = Artificially Synthesized Probe
  source 1..80: mol_type = other DNA
tcgtgcctgaaatcccagcacttcgggaagctgaggtaggaggatcacttgaggccaggagttcaagaccagtgtgggta

SEQ ID NO: 48893 - DNA, 80 bp, synthetic construct; identical to SEQ ID NO: 23760
  misc_feature 1..80: note = Artificially Synthesized Probe
  source 1..80: mol_type = other DNA

SEQ ID NO: 48894 - DNA, 80 bp, synthetic construct
  misc_feature 1..80: note = Artificially Synthesized Probe
  source 1..80: mol_type = other DNA
tgcggacatgtccatattcttggtaactctgttcccaatgtttggttttcagacaacagcccagtaaggctcccaggcag

SEQ ID NO: 48895 - DNA, 80 bp, synthetic construct
  misc_feature 1..80: note = Artificially Synthesized Probe
  source 1..80: mol_type = other DNA
agggaccacgcggcactgatgctgctcctgccagccctgcggccccggctaggttcccgatattggaggacaaattccct

SEQ ID NO: 48896 - DNA, 80 bp, synthetic construct; identical to SEQ ID NO: 23761
  misc_feature 1..80: note = Artificially Synthesized Probe
  source 1..80: mol_type = other DNA

SEQ ID NO: 48897 - DNA, 80 bp, synthetic construct
  misc_feature 1..80: note = Artificially Synthesized Probe
  source 1..80: mol_type = other DNA
cctgcgtccaccctcacggtggcatctccaggcttcagggcacagctcacccgggtagcgggtgaaagagtgagtgtacc

SEQ ID NO: 48898 - DNA, 80 bp, synthetic construct
  misc_feature 1..80: note = Artificially Synthesized Probe
  source 1..80: mol_type = other DNA
gacctcccataggaattaatctggctaagagaaaagcaaaggcatttttttttggcacccaggctggagtgcagtggcac

SEQ ID NO: 48899 - DNA, 80 bp, synthetic construct
  misc_feature 1..80: note = Artificially Synthesized Probe
  source 1..80: mol_type = other DNA
tcagcctagggcttggagaagtggctttagttgcagatgagggacatgagctgaaatggccggaagccctttttcttctt

SEQ ID NO: 48900 - DNA, 80 bp, synthetic construct
  misc_feature 1..80: note = Artificially Synthesized Probe
  source 1..80: mol_type = other DNA
ctcctcggctcaagtgcttcactcgcctcagcctcccatagtgttggggtcacaggtgtgcactgcccgcccggccagca

SEQ ID NO: 48901 - DNA, 80 bp, synthetic construct; identical to SEQ ID NO: 23762
  misc_feature 1..80: note = Artificially Synthesized Probe
  source 1..80: mol_type = other DNA

SEQ ID NO: 48902 - DNA, 80 bp, synthetic construct
  misc_feature 1..80: note = Artificially Synthesized Probe
  source 1..80: mol_type = other DNA
agagatggggtttcaccattttggccaggctggtctcaaactcctgacctcaggtgatccgcccgcctcggcctcccaaa

SEQ ID NO: 48903 - DNA, 80 bp, synthetic construct
  misc_feature 1..80: note = Artificially Synthesized Probe
  source 1..80: mol_type = other DNA
ctacaacacaagtgcctagagggccgtgcaccatggcctcaaggaaccaaaagtgaccaggaggtggcagaaagtctcag

SEQ ID NO: 48904 - DNA, 80 bp, synthetic construct
  misc_feature 1..80: note = Artificially Synthesized Probe
  source 1..80: mol_type = other DNA
tcacccccggccccttcaatgcaggtgaccaaggtgggtctctgggcctctgagggtggcatggggccgctgggacatcc

SEQ ID NO: 48905 - DNA, 80 bp, synthetic construct; identical to SEQ ID NO: 23763
  misc_feature 1..80: note = Artificially Synthesized Probe
  source 1..80: mol_type = other DNA

SEQ ID NO: 48906 - DNA, 80 bp, synthetic construct
  misc_feature 1..80: note = Artificially Synthesized Probe
  source 1..80: mol_type = other DNA
tctctgttgtattttattttatttttttgagacaaactcttgctctgtcacccaggctggagtgcaatggcgtgatcttg

SEQ ID NO: 48907 - DNA, 80 bp, synthetic construct
  misc_feature 1..80: note = Artificially Synthesized Probe
  source 1..80: mol_type = other DNA
cctcaggtgatctgcccacctcagcctcccaaagtgctgggattacaggtgtgagccaccgggcccggcctttgttgtat

SEQ ID NO: 48908 - DNA, 80 bp, synthetic construct
  misc_feature 1..80: note = Artificially Synthesized Probe
  source 1..80: mol_type = other DNA
gcagggcagcttcaggacacacagccggcgctccccacccacttcagagaagcactcgaggagacgcctgcagaaggtgt

SEQ ID NO: 48909 - DNA, 80 bp, synthetic construct; identical to SEQ ID NO: 23764
  misc_feature 1..80: note = Artificially Synthesized Probe
  source 1..80: mol_type = other DNA

SEQ ID NO: 48910 - DNA, 80 bp, synthetic construct
  misc_feature 1..80: note = Artificially Synthesized Probe
  source 1..80: mol_type = other DNA
tagtagagacggggtttcaccatgttgcccaggctggtctcgaactgctgagctgaggcaatccgcccacctcagcctcc

SEQ ID NO: 48911 - DNA, 80 bp, synthetic construct
  misc_feature 1..80: note = Artificially Synthesized Probe
  source 1..80: mol_type = other DNA
acaatacatctgcaatgtattttatagtaatataccatatagcttgtttgtttttggttttttttgtttttgtttttgag

SEQ ID NO: 48912 - DNA, 80 bp, synthetic construct
  misc_feature 1..80: note = Artificially Synthesized Probe
  source 1..80: mol_type = other DNA
tagtagagacaggatttcaccgtgttagccaggatggtctcaatctcctgacctcgtgatccgcctgcctcagcctccca

SEQ ID NO: 48913 - DNA, 80 bp, synthetic construct
  misc_feature 1..80: note = Artificially Synthesized Probe
  source 1..80: mol_type = other DNA
tgtgtaactttcaagggtacttcattttaaatttcaaacttcaaaacagctgcaaaaatagaacaaggaattcccgtcca

SEQ ID NO: 48914 - DNA, 80 bp, synthetic construct; identical to SEQ ID NO: 23765
  misc_feature 1..80: note = Artificially Synthesized Probe
  source 1..80: mol_type = other DNA

SEQ ID NO: 48915 - DNA, 80 bp, synthetic construct
  misc_feature 1..80: note = Artificially Synthesized Probe
  source 1..80: mol_type = other DNA
cagggtggcagatgggaggtgggaccctccgtgtgtgtggccttcctgccctcccgccgtgggctctggcgcagtcctgg

SEQ ID NO: 48916 - DNA, 80 bp, synthetic construct
  misc_feature 1..80: note = Artificially Synthesized Probe
  source 1..80: mol_type = other DNA
acaggcttcacttcaaggaacgtggagtatgaaggggccaagggcacgcccaggacactgggtgatgcctcagagctggg

SEQ ID NO: 48917 - DNA, 80 bp, synthetic construct
  misc_feature 1..80: note = Artificially Synthesized Probe
  source 1..80: mol_type = other DNA
gtccacacagatggcaaggaactaacaagccaccctttcccgctgcacccggggcctggaggctgggtggctggggggcc

SEQ ID NO: 48918 - DNA, 80 bp, synthetic construct
  misc_feature 1..80: note = Artificially Synthesized Probe
  source 1..80: mol_type = other DNA
gagaccaagggcaggatgaaaagcccatcatcaggcccagagagcagcacggctgaggggccaacaggagcactcatgcc

SEQ ID NO: 48919 - DNA, 80 bp, synthetic construct; identical to SEQ ID NO: 23766
  misc_feature 1..80: note = Artificially Synthesized Probe
  source 1..80: mol_type = other DNA

SEQ ID NO: 48920 - DNA, 80 bp, synthetic construct
  misc_feature 1..80: note = Artificially Synthesized Probe
  source 1..80: mol_type = other DNA
cgattcacacagtggcaggcaagagacaagctgtgttgaaggcactcggtggcgcgtacaattgacagaggccctgcagg

SEQ ID NO: 48921 - DNA, 80 bp, synthetic construct
  misc_feature 1..80: note = Artificially Synthesized Probe
  source 1..80: mol_type = other DNA
ctgggcctccgtgggtgcagccacaacagggttctgctcctatgagcgtctaagctactcccctcctgctgtccctgctg

SEQ ID NO: 48922 - DNA, 80 bp, synthetic construct
  misc_feature 1..80: note = Artificially Synthesized Probe
  source 1..80: mol_type = other DNA
gtgacagcgcggcccctcaccagggtgcggtaggggatgggttccccgcagaagtagtacgccacaacgatgctgtcaca

SEQ ID NO: 48923 - DNA, 80 bp, synthetic construct
  misc_feature 1..80: note = Artificially Synthesized Probe
  source 1..80: mol_type = other DNA
cagtagcagcagtgagcaggccccgggcagctgtgcccgtgatgtgggtttctcacttgggcctctggctgagggacctc

SEQ ID NO: 48924 - DNA, 80 bp, synthetic construct
  misc_feature 1..80: note = Artificially Synthesized Probe
  source 1..80: mol_type = other DNA
cgcagcagggcctgctcctgtctgtgcctgccgcctctgttggctttcatcttcctggcgactcaaatgtgaccctccag

SEQ ID NO: 48925 - DNA, 80 bp, synthetic construct; identical to SEQ ID NO: 23767
  misc_feature 1..80: note = Artificially Synthesized Probe
  source 1..80: mol_type = other DNA

SEQ ID NO: 48926 - DNA, 80 bp, synthetic construct
  misc_feature 1..80: note = Artificially Synthesized Probe
  source 1..80: mol_type = other DNA
cttgacgttcaggacctgtgacttgaaaatcagaggccggtggctgtgcaggtgccctcgacttgggctgtgacctcatg

SEQ ID NO: 48927 - DNA, 80 bp, synthetic construct
  misc_feature 1..80: note = Artificially Synthesized Probe
  source 1..80: mol_type = other DNA
ggcatcttctcagaagtgataacaaaccaacatcctttcttttcaaccataaagaaattcctgacttggaaactgatgtc

SEQ ID NO: 48928 - DNA, 80 bp, synthetic construct
  misc_feature 1..80: note = Artificially Synthesized Probe
  source 1..80: mol_type = other DNA
ctttgggaggctgaaacgggcggatcacgaggtcaggagatcgagaccatcctggctaatacggtgaaaccccatctcta

SEQ ID NO: 48929 - DNA, 80 bp, synthetic construct; identical to SEQ ID NO: 23768
  misc_feature 1..80: note = Artificially Synthesized Probe
  source 1..80: mol_type = other DNA

SEQ ID NO: 48930 - DNA, 80 bp, synthetic construct
  misc_feature 1..80: note = Artificially Synthesized Probe
  source 1..80: mol_type = other DNA
aaagccaaggcagctttaaagtcaagacgtttacctggagacgaccactgttcagccacaaaaacaccaagttttcccca

SEQ ID NO: 48931 - DNA, 80 bp, synthetic construct
  misc_feature 1..80: note = Artificially Synthesized Probe
  source 1..80: mol_type = other DNA
ctgggccctaaatgctgcctgagacttgatgtcccctgctgccctcagggactggccacttgcagatgttgctgggatca

SEQ ID NO: 48932 - DNA, 80 bp, synthetic construct
  misc_feature 1..80: note = Artificially Synthesized Probe
  source 1..80: mol_type = other DNA
cctgcacgctctcctgcatctccctgcggtgctgcttacggatcctgtatggggggatcccatccctgtccaggagaaag

SEQ ID NO: 48933 - DNA, 80 bp, synthetic construct; identical to SEQ ID NO: 23769
  misc_feature 1..80: note = Artificially Synthesized Probe
  source 1..80: mol_type = other DNA

SEQ ID NO: 48934 - DNA, 80 bp, synthetic construct; identical to SEQ ID NO: 23747
  misc_feature 1..80: note = Artificially Synthesized Probe
  source 1..80: mol_type = other DNA

SEQ ID NO: 48935 - DNA, 80 bp, synthetic construct
  misc_feature 1..80: note = Artificially Synthesized Probe
  source 1..80: mol_type = other DNA
ctcccgggttcacgctattctcctgcctcagcctcctgagtagctgggactacaggtgcccgccaccacgcccagctaat

SEQ ID NO: 48936 - DNA, 80 bp, synthetic construct
  misc_feature 1..80: note = Artificially Synthesized Probe
  source 1..80: mol_type = other DNA
gggggaagaatctgtgacagggactgcatgcggctgcaaagcctcacatattcactgccagccctgcacgggaaacgttt

SEQ ID NO: 48937 - DNA, 80 bp, synthetic construct; identical to SEQ ID NO: 23770
  misc_feature 1..80: note = Artificially Synthesized Probe
  source 1..80: mol_type = other DNA

SEQ ID NO: 48938 - DNA, 80 bp, synthetic construct
  misc_feature 1..80: note = Artificially Synthesized Probe
  source 1..80: mol_type = other DNA
gactacaggtgcccgccaccacgcccggctaattttttgtattatttagtagagacggggtttcactgtgttaaccacga

SEQ ID NO: 48939 - DNA, 80 bp, synthetic construct
  misc_feature 1..80: note = Artificially Synthesized Probe
  source 1..80: mol_type = other DNA
cattaaaacacgaaagtcagattatacatggtctgaataattaccccagggttaagataactcacgcacaaccatccttc

SEQ ID NO: 48940 - DNA, 80 bp, synthetic construct
  misc_feature 1..80: note = Artificially Synthesized Probe
  source 1..80: mol_type = other DNA
atcgagaccatcctggctaacacggtgaaaccccgtctctactaaaaatacaaaaaattagccaggtgtggtggcgagtg

SEQ ID NO: 48941 - DNA, 80 bp, synthetic construct
  misc_feature 1..80: note = Artificially Synthesized Probe
  source 1..80: mol_type = other DNA
ttcggaagcacggcagctccagggatccgtgccgcacccaggggcctctcagagctgccaggagacacaggacgactgaa

SEQ ID NO: 48942 - DNA, 80 bp, synthetic construct; identical to SEQ ID NO: 23771
  misc_feature 1..80: note = Artificially Synthesized Probe
  source 1..80: mol_type = other DNA

SEQ ID NO: 48943 - DNA, 80 bp, synthetic construct
  misc_feature 1..80: note = Artificially Synthesized Probe
  source 1..80: mol_type = other DNA
ccaccggaatgatgctcttcacctgtccactttttacctctgatttgctttcgagtacgtgtagcaatttcacattccaa

SEQ ID NO: 48944 - DNA, 80 bp, synthetic construct
  misc_feature 1..80: note = Artificially Synthesized Probe
  source 1..80: mol_type = other DNA
ctcctatctcaggaagacctacggcccccaaaccttaaaaacatctgaagggcagggattggacaaacagaactgtgcac

SEQ ID NO: 48945 - DNA, 80 bp, synthetic construct
  misc_feature 1..80: note = Artificially Synthesized Probe
  source 1..80: mol_type = other DNA
tttttgagaaaactgagttggcaggttactttttgttgtagtaacagagttttggggaagagggaaaccagatgctagga

SEQ ID NO: 48946 - DNA, 80 bp, synthetic construct; identical to SEQ ID NO: 23772
  misc_feature 1..80: note = Artificially Synthesized Probe
  source 1..80: mol_type = other DNA

SEQ ID NO: 48947 - DNA, 80 bp, synthetic construct
  misc_feature 1..80: note = Artificially Synthesized Probe
  source 1..80: mol_type = other DNA
ctcatctgaaattcaggttttggaaaaatgtttaaagacaggcaaatgaaaagaacaaaccagccaggcacagtggctca

SEQ ID NO: 48948 - DNA, 80 bp, synthetic construct
  misc_feature 1..80: note = Artificially Synthesized Probe
  source 1..80: mol_type = other DNA
gtgcaccgtttgagcctcggagttcgagactgcatagtgaggcctcgtctccacaaaaattataataatcattagccagg

SEQ ID NO: 48949 - DNA, 80 bp, synthetic construct
  misc_feature 1..80: note = Artificially Synthesized Probe
  source 1..80: mol_type = other DNA
tacatacagtgggaccatcacttaaaacatattcataaaaagatgggcagaatcaccagtaggtgagaagtccctctctc

SEQ ID NO: 48950 - DNA, 80 bp, synthetic construct
  misc_feature 1..80: note = Artificially Synthesized Probe
  source 1..80: mol_type = other DNA
aggctgctgcagggagaccctggttcctgcggctcggccccagccctggctaggatggctggtgggcaggtggcgtgtgg

SEQ ID NO: 48951 - DNA, 80 bp, synthetic construct; identical to SEQ ID NO: 23773
  misc_feature 1..80: note = Artificially Synthesized Probe
  source 1..80: mol_type = other DNA

SEQ ID NO: 48952 - DNA, 80 bp, synthetic construct
  misc_feature 1..80: note = Artificially Synthesized Probe
  source 1..80: mol_type = other DNA
acagccagtggtgaggcagctggcctgtgcctgtctttaagctgaaaccccagactctgaaaaccaaagagcaaactcta

SEQ ID NO: 48953 - DNA, 80 bp, synthetic construct
  misc_feature 1..80: note = Artificially Synthesized Probe
  source 1..80: mol_type = other DNA
agacgcactctcactgagacctggggagccaggaaacacttttcctgaagacaaagcccaggcatctctgggtcagcacg

SEQ ID NO: 48954 - DNA, 80 bp, synthetic construct
  misc_feature 1..80: note = Artificially Synthesized Probe
  source 1..80: mol_type = other DNA
atccggggcgggacttacacgctgctgtccgtgagggacagggtgtctgcatcgctggacaggctctgctgctcgctgtc

SEQ ID NO: 48955 - DNA, 80 bp, synthetic construct
  misc_feature 1..80: note = Artificially Synthesized Probe
  source 1..80: mol_type = other DNA
tgacgggcggggcctggttgctctcgcaccccccactcggctaccccgccgccacctgtccttcaagtgactccagaagc

SEQ ID NO: 48956 - DNA, 80 bp, synthetic construct; identical to SEQ ID NO: 23774
  misc_feature 1..80: note = Artificially Synthesized Probe
  source 1..80: mol_type = other DNA

SEQ ID NO: 48957 - DNA, 80 bp, synthetic construct
  misc_feature 1..80: note = Artificially Synthesized Probe
  source 1..80: mol_type = other DNA
agatgttctgctcattctgcagtgcgcgtcgggagaggacactgggttttgatcaggatgaggcccttgggattcagctc

SEQ ID NO: 48958 - DNA, 80 bp, synthetic construct
  misc_feature 1..80: note = Artificially Synthesized Probe
  source 1..80: mol_type = other DNA
aaaattagccaggaaatgacaccttttttcaatctgcacttccctgattaatggtcagattggcagtttagcgtatttgt

SEQ ID NO: 48959 - DNA, 80 bp, synthetic construct; identical to SEQ ID NO: 23775
  misc_feature 1..80: note = Artificially Synthesized Probe
  source 1..80: mol_type = other DNA

SEQ ID NO: 48960 - DNA, 80 bp, synthetic construct
  misc_feature 1..80: note = Artificially Synthesized Probe
  source 1..80: mol_type = other DNA
ggcgtggtggcgggcgcctgtagtcccagactacttcggaggctgaggcgggagaatagcgtgaacctgggaggcggagc

SEQ ID NO: 48961 - DNA, 80 bp, synthetic construct
  misc_feature 1..80: note = Artificially Synthesized Probe
  source 1..80: mol_type = other DNA
cacctgtaatcccagctacttgggaggctgaggcaagagaatcgcttgaacccgggaggcagagattgcagtaagctgag

SEQ ID NO: 48962 - DNA, 80 bp, synthetic construct
  misc_feature 1..80: note = Artificially Synthesized Probe
  source 1..80: mol_type = other DNA
tatttttctttatatgctccagttttttttagaccttcacctgaaatgtgtgtatacaaaatctaggccagtccagcaga

SEQ ID NO: 48963 - DNA, 80 bp, synthetic construct; identical to SEQ ID NO: 23776
  misc_feature 1..80: note = Artificially Synthesized Probe
  source 1..80: mol_type = other DNA

SEQ ID NO: 48964 - DNA, 80 bp, synthetic construct
  misc_feature 1..80: note = Artificially Synthesized Probe
  source 1..80: mol_type = other DNA
cgttcagccaaggtctgaaactaggtgcgcacagagcggtaagactgcgagagaaagagaccagctttacagggggttta

SEQ ID NO: 48965 - DNA, 80 bp, synthetic construct
  misc_feature 1..80: note = Artificially Synthesized Probe
  source 1..80: mol_type = other DNA
caatttttttagtctctactgtgcctaacttgtaagttaaatttgatcagaggtgtgttcccagaggggaaaacagtata

SEQ ID NO: 48966 - DNA, 80 bp, synthetic construct
  misc_feature 1..80: note = Artificially Synthesized Probe
  source 1..80: mol_type = other DNA
acatggccggaggaactgccatgtcggaggtgcaagcacacctgcgcatcagagtccttggtgtggagggagggaccagc

SEQ ID NO: 48967 - DNA, 80 bp, synthetic construct
  misc_feature 1..80: note = Artificially Synthesized Probe
  source 1..80: mol_type = other DNA
tcctcccagtgccacatcctcggagcctcctggagccaggcccatcagagaagagccaacacgtgggggctgccccaggg

SEQ ID NO: 48968 - DNA, 80 bp, synthetic construct
  misc_feature 1..80: note = Artificially Synthesized Probe
  source 1..80: mol_type = other DNA
gtgacatgggatgcctggggagatgagcgagcactgcgagctggggacagcctgtggcggtgctgggcagggcctcgctg

SEQ ID NO: 48969 - DNA, 80 bp, synthetic construct; identical to SEQ ID NO: 23777
  misc_feature 1..80: note = Artificially Synthesized Probe
  source 1..80: mol_type = other DNA

SEQ ID NO: 48970 - DNA, 80 bp, synthetic construct
  misc_feature 1..80: note = Artificially Synthesized Probe
  source 1..80: mol_type = other DNA
agataaaatgataccagcctgcagcttcaggctctttgctttaagcatcatgcagtatttataaatgacaccattattcc

SEQ ID NO: 48971 - DNA, 80 bp, synthetic construct
  misc_feature 1..80: note = Artificially Synthesized Probe
  source 1..80: mol_type = other DNA
taaaaacatttcaaatggaagagagaaggccactgccgcacagaagtttaagaagtctacgtccacggcacacgggtgca

SEQ ID NO: 48972 - DNA, 80 bp, synthetic construct; identical to SEQ ID NO: 23778
  misc_feature 1..80: note = Artificially Synthesized Probe
  source 1..80: mol_type = other DNA

SEQ ID NO: 48973 - DNA, 80 bp, synthetic construct
  misc_feature 1..80: note = Artificially Synthesized Probe
  source 1..80: mol_type = other DNA
aaaggaagaagggcagcctgtttactattgatcttcgtaacaatcccagacaactgccctggctctcaggatctgccctc

SEQ ID NO: 48974 - DNA, 80 bp, synthetic construct
  misc_feature 1..80: note = Artificially Synthesized Probe
  source 1..80: mol_type = other DNA
gggcatgtgctcgcgtgcctgcctgtgcgtgcgcctatggatgcgtgctttgtgtgtgcatgcccacgtatccatctgtg

SEQ ID NO: 48975 - DNA, 80 bp, synthetic construct
  misc_feature 1..80: note = Artificially Synthesized Probe
  source 1..80: mol_type = other DNA
cagagagaatgcagccggggccttggtgagagtggctctgacccctggctgtgtgtggagagaatgcggccggggccttg

SEQ ID NO: 48976 - DNA, 80 bp, synthetic construct
  misc_feature 1..80: note = Artificially Synthesized Probe
  source 1..80: mol_type = other DNA
accctgtagagccaggtagtgacagactcctcgcaactcttctgtgtgttcaaaggctttctttagggtccggtgtggtg

SEQ ID NO: 48977 - DNA, 80 bp, synthetic construct; identical to SEQ ID NO: 23779
  misc_feature 1..80: note = Artificially Synthesized Probe
  source 1..80: mol_type = other DNA

SEQ ID NO: 48978 - DNA, 80 bp, synthetic construct; identical to SEQ ID NO: 23748
  misc_feature 1..80: note = Artificially Synthesized Probe
  source 1..80: mol_type = other DNA

SEQ ID NO: 48979 - DNA, 80 bp, synthetic construct
  misc_feature 1..80: note = Artificially Synthesized Probe
  source 1..80: mol_type = other DNA
taggaggcccaaatgtcagggccacacagaaggtctcccctgcccaggtgttcatggatggtggagaaaggtgctcctcc

SEQ ID NO: 48980 - DNA, 80 bp, synthetic construct
  misc_feature 1..80: note = Artificially Synthesized Probe
  source 1..80: mol_type = other DNA
ctatattcttctacttgtgtaagcagcctgccttttaaaaaggtagcataacaatttttccttttaatgaggctgtctgg

SEQ ID NO: 48981 - DNA, 80 bp, synthetic construct; identical to SEQ ID NO: 23780
  misc_feature 1..80: note = Artificially Synthesized Probe
  source 1..80: mol_type = other DNA

SEQ ID NO: 48982 - DNA, 80 bp, synthetic construct
  misc_feature 1..80: note = Artificially Synthesized Probe
  source 1..80: mol_type = other DNA
gcttcccaggtaggtgggacaacaggcgcacactaccactcctggctactttttcattttttatatagatgaggtctcac

SEQ ID NO: 48983 - DNA, 80 bp, synthetic construct
  misc_feature 1..80: note = Artificially Synthesized Probe
  source 1..80: mol_type = other DNA
ttactgaactgcaaaggggtaaatgctttaaaaggattccagcaaggtaagatgacaacaccaataatgcaacatagggg

SEQ ID NO: 48984 - DNA, 80 bp, synthetic construct
  misc_feature 1..80: note = Artificially Synthesized Probe
  source 1..80: mol_type = other DNA
tcaagcttcacagcatccctccacatcccttaacacacacgtgcaaatttgagagagttccagctttcctcatcaattac

SEQ ID NO: 48985 - DNA, 80 bp, synthetic construct
  misc_feature 1..80: note = Artificially Synthesized Probe
  source 1..80: mol_type = other DNA
agcctcgctctttcgcccagactggagtgcagtggcgcgatctcggctcactacaacctccgcctcctgggttcaatcga

SEQ ID NO: 48986 - DNA, 80 bp, synthetic construct; identical to SEQ ID NO: 23781
  misc_feature 1..80: note = Artificially Synthesized Probe
  source 1..80: mol_type = other DNA

SEQ ID NO: 48987 - DNA, 80 bp, synthetic construct
  misc_feature 1..80: note = Artificially Synthesized Probe
  source 1..80: mol_type = other DNA
ctggtagtaaggcaccacatttccatacccaggcaggagccgccaccctccctggtagtaaggcaccacatggcacctgc

SEQ ID NO: 48988 - DNA, 80 bp, synthetic construct
  misc_feature 1..80: note = Artificially Synthesized Probe
  source 1..80: mol_type = other DNA
ttttgaaaggcaaatcgcctttttctccaaccacagagctcctcaactcacgacaaggctgtgtcctgataaacctctca

SEQ ID NO: 48989 - DNA, 80 bp, synthetic construct
  misc_feature 1..80: note = Artificially Synthesized Probe
  source 1..80: mol_type = other DNA
aaaccctctcatagctgggaatatgaggtagaaggtggattccaacccacgaagggttaaaccctctcatagctgggaat

SEQ ID NO: 48990 - DNA, 80 bp, synthetic construct
  misc_feature 1..80: note = Artificially Synthesized Probe
  source 1..80: mol_type = other DNA
tctgccccacaggaagcctggccgtgacacctgtgtggatgcaggggctggctgtgcccaggcctccagccgggcctttt

SEQ ID NO: 48991 - DNA, 80 bp, synthetic construct; identical to SEQ ID NO: 23782
  misc_feature 1..80: note = Artificially Synthesized Probe
  source 1..80: mol_type = other DNA

SEQ ID NO: 48992 - DNA, 80 bp, synthetic construct
  misc_feature 1..80: note = Artificially Synthesized Probe
  source 1..80: mol_type = other DNA
ggtggctgcaaacagtggtgcacaccccaggctccaggaggaggtgaccgaggggcagctggggaacatggcgcacaccc

SEQ ID NO: 48993 - DNA, 80 bp, synthetic construct
  misc_feature 1..80: note = Artificially Synthesized Probe
  source 1..80: mol_type = other DNA
ctctgcacaggtgtgggaggcctgtgcaggagctgagttagcatggcaggtgctggtgctgacctgtgcctcacctgggc

SEQ ID NO: 48994 - DNA, 80 bp, synthetic construct; identical to SEQ ID NO: 23783
  misc_feature 1..80: note = Artificially Synthesized Probe
  source 1..80: mol_type = other DNA

SEQ ID NO: 48995 - DNA, 80 bp, synthetic construct
  misc_feature 1..80: note = Artificially Synthesized Probe
  source 1..80: mol_type = other DNA
ggaaggggctctggcaccagatggcagggagcggtcacctggcagaggccatggatgccaatgccacttgcttcccaaaa

SEQ ID NO: 48996 - DNA, 80 bp, synthetic construct
  misc_feature 1..80: note = Artificially Synthesized Probe
  source 1..80: mol_type = other DNA
cgcggtggctcatgcctgtaatcccagcactttgggaggccaacgcaggcatatcacgaggtcaggagatcgagaccctc

SEQ ID NO: 48997 - DNA, 80 bp, synthetic construct
  misc_feature 1..80: note = Artificially Synthesized Probe
  source 1..80: mol_type = other DNA
ctccagcctgggcgacagagcgagactccgtctcaaaaaaaaaaaaaaagaaagaaaaaaagccaaaataagattaaaaa

SEQ ID NO: 48998 - DNA, 80 bp, synthetic construct
  misc_feature 1..80: note = Artificially Synthesized Probe
  source 1..80: mol_type = other DNA
gtggcaggtgcctgtagtcccagctactcgggagtctgaggcaggagaattatgtgaacccgggaggcggagcttgcagt

SEQ ID NO: 48999 - DNA, 80 bp, synthetic construct; identical to SEQ ID NO: 23784
  misc_feature 1..80: note = Artificially Synthesized Probe
  source 1..80: mol_type = other DNA

SEQ ID NO: 49000 - DNA, 80 bp, synthetic construct
  misc_feature 1..80: note = Artificially Synthesized Probe
  source 1..80: mol_type = other DNA
cgtccgcactgaccagcagcctccatgaggggcagatctggggccaagtgtcagtgagccgccttacgggtctttacggg

SEQ ID NO: 49001 - DNA, 80 bp, synthetic construct
  misc_feature 1..80: note = Artificially Synthesized Probe
  source 1..80: mol_type = other DNA
ggacctggcttgggacgccagggctggggtgggcaggaccgggaggaccctcaggacgcacgtactctgtctcggagagc

SEQ ID NO: 49002 - DNA, 80 bp, synthetic construct
  misc_feature 1..80: note = Artificially Synthesized Probe
  source 1..80: mol_type = other DNA
aacggctggaagcagcgcagggcagaagcgatatggaaaggcgggtcaggcacaggcctcacaggcccgcggtcctccgg

SEQ ID NO: 49003 - DNA, 80 bp, synthetic construct; identical to SEQ ID NO: 23785
  misc_feature 1..80: note = Artificially Synthesized Probe
  source 1..80: mol_type = other DNA

SEQ ID NO: 49004 - DNA, 80 bp, synthetic construct
  misc_feature 1..80: note = Artificially Synthesized Probe
  source 1..80: mol_type = other DNA
gcccccgagtcccgcgcagggaaaggctctgcccaagccttcagggaggcagcagcgcccggtgcacagttcctaagggc

SEQ ID NO: 49005 - DNA, 80 bp, synthetic construct
  misc_feature 1..80: note = Artificially Synthesized Probe
  source 1..80: mol_type = other DNA
ggaaaccatggcctcagccccgcgggcggccccgcaccccaggaaaccatcgcctcagccccgcgggcggccccgcaccc

SEQ ID NO: 49006 - DNA, 80 bp, synthetic construct
  misc_feature 1..80: note = Artificially Synthesized Probe
  source 1..80: mol_type = other DNA
tccgctctggctttcttcactggcacaggatcctgagatgcacccctgcctccatggttatcagcgactcatccctttta

SEQ ID NO: 49007 - DNA, 80 bp, synthetic construct
  misc_feature 1..80: note = Artificially Synthesized Probe
  source 1..80: mol_type = other DNA
acaaacctggtcaagggcgcccagaccagggctcaacccactgcccgcaggggccgactgccaaggagcggtcaccgccc

SEQ ID NO: 49008 - DNA, 80 bp, synthetic construct; identical to SEQ ID NO: 23786
  misc_feature 1..80: note = Artificially Synthesized Probe
  source 1..80: mol_type = other DNA

SEQ ID NO: 49009 - DNA, 80 bp, synthetic construct
  misc_feature 1..80: note = Artificially Synthesized Probe
  source 1..80: mol_type = other DNA
ttagcaatactgacaactggcccccattcatgcagatgctgtcacttatatactatatatataacaagggccaggcgtgg

SEQ ID NO: 49010 - DNA, 80 bp, synthetic construct
  misc_feature 1..80: note = Artificially Synthesized Probe
  source 1..80: mol_type = other DNA
ttagctgggcatggcgacaggcgcccataatcccagctactcgggaggctgagtcaggagaatctcttgaactggggagg

SEQ ID NO: 49011 - DNA, 80 bp, synthetic construct; identical to SEQ ID NO: 23787
  misc_feature 1..80: note = Artificially Synthesized Probe
  source 1..80: mol_type = other DNA

SEQ ID NO: 49012 - DNA, 80 bp, synthetic construct
  misc_feature 1..80: note = Artificially Synthesized Probe
  source 1..80: mol_type = other DNA
ctgaagcaggagaatcacttgaacctgggaggcggaggttgcagtgagcgagatcgcgccactgcactccagcctggtga

SEQ ID NO: 49013 - DNA, 80 bp, synthetic construct
  misc_feature 1..80: note = Artificially Synthesized Probe
  source 1..80: mol_type = other DNA
caatgctgctgcgcagggacggacggagcgtgaagggcccgaacaacccaccctgcgcaggctccagtttgcagggtaga

SEQ ID NO: 49014 - DNA, 80 bp, synthetic construct
  misc_feature 1..80: note = Artificially Synthesized Probe
  source 1..80: mol_type = other DNA
aatcccaacagtttgggaggccgaggcggggggatcacgaggtcaggagatggagaccatcctggctaacacggtgaaac

SEQ ID NO: 49015 - DNA, 80 bp, synthetic construct
  misc_feature 1..80: note = Artificially Synthesized Probe
  source 1..80: mol_type = other DNA
gagcgaggctccgtctcaaaaaaaaaaagattgccagcacccccatcaggtcccagaatactccacctacgtatctcgtg

SEQ ID NO: 49016 - DNA, 80 bp, synthetic construct
  misc_feature 1..80: note = Artificially Synthesized Probe
  source 1..80: mol_type = other DNA
gaatgagcaggtgatttctcggtcactcagggtggcagacacaaaagggcaagagaatgagtcaccaggcaccaggcagg

SEQ ID NO: 49017 - DNA, 80 bp, synthetic construct; identical to SEQ ID NO: 23788
  misc_feature 1..80: note = Artificially Synthesized Probe
  source 1..80: mol_type = other DNA

SEQ ID NO: 49018 - DNA, 80 bp, synthetic construct
  misc_feature 1..80: note = Artificially Synthesized Probe
  source 1..80: mol_type = other DNA
acttctttataaagtttctgagcatttcagcaaacagtgcttgggtgaggccaggcacatgatgcagaaagccctcacta

SEQ ID NO: 49019 - DNA, 80 bp, synthetic construct
  misc_feature 1..80: note = Artificially Synthesized Probe
  source 1..80: mol_type = other DNA
gtaggaggctgaggcagaatgccttaaagccaagagttcaagacccacctgagtgaaaaggccagaccttgtctctacaa

SEQ ID NO: 49020 - DNA, 80 bp, synthetic construct
  misc_feature 1..80: note = Artificially Synthesized Probe
  source 1..80: mol_type = other DNA
tagccaggtgtggtggcatgcacctgtggtcccagctactcaggaggctgaggcaggaggatcgcctgagcccaggaggc

SEQ ID NO: 49021 - DNA, 80 bp, synthetic construct; identical to SEQ ID NO: 23789
  misc_feature 1..80: note = Artificially Synthesized Probe
  source 1..80: mol_type = other DNA

SEQ ID NO: 49022 - DNA, 80 bp, synthetic construct
  misc_feature 1..80: note = Artificially Synthesized Probe
  source 1..80: mol_type = other DNA
aacaagaacagcatattcacaggaacccaaacactcatgattttgaaaggcacatggcaacgggtgctacagacaggaga

SEQ ID NO: 49023 - DNA, 80 bp, synthetic construct
  misc_feature 1..80: note = Artificially Synthesized Probe
  source 1..80: mol_type = other DNA
ctgtcctctctgcacaacccctgggtgctgccacgctgctcacaccagtaactatttaaaatgatagtgggctgggcacg

SEQ ID NO: 49024 - DNA, 80 bp, synthetic construct; identical to SEQ ID NO: 23749
  misc_feature 1..80: note = Artificially Synthesized Probe
  source 1..80: mol_type = other DNA

SEQ ID NO: 49025 - DNA, 80 bp, synthetic construct
  misc_feature 1..80: note = Artificially Synthesized Probe
  source 1..80: mol_type = other DNA
ctactcaagagctgaggcaggagaatcgcttgaacccaggaggcagaggttgcagtgagctgacatcgcgccactgcact

SEQ ID NO: 49026 - DNA, 80 bp, synthetic construct; identical to SEQ ID NO: 23790
  misc_feature 1..80: note = Artificially Synthesized Probe
  source 1..80: mol_type = other DNA

SEQ ID NO: 49027 - DNA, 80 bp, synthetic construct
  misc_feature 1..80: note = Artificially Synthesized Probe
  source 1..80: mol_type = other DNA
tcgctatgtcgcccaggctagagtgctggagtgcagtggcgcagtcttggctcactgcaagctccgcctcccaggttcac

SEQ ID NO: 49028 - DNA, 80 bp, synthetic construct
  misc_feature 1..80: note = Artificially Synthesized Probe
  source 1..80: mol_type = other DNA
agcctcccagagtgctgggataacaggcgtgagccaccgcgcctggccaatttttgtatttttagtagagacggggtttc

SEQ ID NO: 49029 - DNA, 80 bp, synthetic construct
  misc_feature 1..80: note = Artificially Synthesized Probe
  source 1..80: mol_type = other DNA
ttcacagctcactgcagcctcaacctcccggtctcaggtgacccacccatctcagcctccctagtggctggaaccacagg

SEQ ID NO: 49030 - DNA, 80 bp, synthetic construct; identical to SEQ ID NO: 23791
  misc_feature 1..80: note = Artificially Synthesized Probe
  source 1..80: mol_type = other DNA

SEQ ID NO: 49031 - DNA, 80 bp, synthetic construct
  misc_feature 1..80: note = Artificially Synthesized Probe
  source 1..80: mol_type = other DNA
tcacaaaagtctcttcagagcctggaactgcacaaatggcttcacatcacatttttaggttcacaaggatctgatgagaa

SEQ ID NO: 49032 - DNA, 80 bp, synthetic construct
  misc_feature 1..80: note = Artificially Synthesized Probe
  source 1..80: mol_type = other DNA
cacaagctcagattatctatgctgcaacaaacatttggaagtggcaattcccagcaaattgcaggcaatttagagtcatt

SEQ ID NO: 49033 - DNA, 80 bp, synthetic construct
  misc_feature 1..80: note = Artificially Synthesized Probe
  source 1..80: mol_type = other DNA
cactgggcgaccttgatggtggtttctactctgacatcctgacagggcccagcacccaacctgcctctgggccttcactc

SEQ ID NO: 49034 - DNA, 80 bp, synthetic construct
  misc_feature 1..80: note = Artificially Synthesized Probe
  source 1..80: mol_type = other DNA
agtcatggtccctgaatcctgcataaaactcacctgaaggagaccagctctcagtgctgaagctacaagacgaaaataac

SEQ ID NO: 49035 - DNA, 80 bp, synthetic construct; identical to SEQ ID NO: 23792
  misc_feature 1..80: note = Artificially Synthesized Probe
  source 1..80: mol_type = other DNA

SEQ ID NO: 49036 - DNA, 80 bp, synthetic construct
  misc_feature 1..80: note = Artificially Synthesized Probe
  source 1..80: mol_type = other DNA
ccctccaagtattgctatgaggagtggtccaggctgcctccttgggggcaggacagaagcttgtggaccacttggaggga

SEQ ID NO: 49037 - DNA, 80 bp, synthetic construct
  misc_feature 1..80: note = Artificially Synthesized Probe
  source 1..80: mol_type = other DNA
cttcttttaaaaggagtttcactttacccaaatgaaagaaacgcaaccaactcatgagaatctatcaaacactcctatca

SEQ ID NO: 49038 - DNA, 80 bp, synthetic construct
  misc_feature 1..80: note = Artificially Synthesized Probe
  source 1..80: mol_type = other DNA
ccaacataactccacactgcaccacgaagctataaattccaaagctaatggaatttccaagcaaaggtgcaagcctgaca

SEQ ID NO: 49039 - DNA, 80 bp, synthetic construct
  misc_feature 1..80: note = Artificially Synthesized Probe
  source 1..80: mol_type = other DNA
cccgaccctgactacagcagatgggaagttacttaatctcccagggcctcagtttccacatggatggcatgacactccca

SEQ ID NO: 49040 - DNA, 80 bp, synthetic construct; identical to SEQ ID NO: 23793
  misc_feature 1..80: note = Artificially Synthesized Probe
  source 1..80: mol_type = other DNA

SEQ ID NO: 49041 - DNA, 80 bp, synthetic construct
  misc_feature 1..80: note = Artificially Synthesized Probe
  source 1..80: mol_type = other DNA
cgggcgcctgtagtcccagctctagggaggctgaggcaggagaatggcgtgaacccgggaggtggaggttgcagtgagct

SEQ ID NO: 49042 - DNA, 80 bp, synthetic construct
  misc_feature 1..80: note = Artificially Synthesized Probe
  source 1..80: mol_type = other DNA
aattttttgagtgtatattcagaaagcaagggcaggaaaaaaatgtattgaaaagatatgaaaacacaacaaaaagaaat

SEQ ID NO: 49043 - DNA, 80 bp, synthetic construct; identical to SEQ ID NO: 23794
  misc_feature 1..80: note = Artificially Synthesized Probe
  source 1..80: mol_type = other DNA

SEQ ID NO: 49044 - DNA, 80 bp, synthetic construct
  misc_feature 1..80: note = Artificially Synthesized Probe
  source 1..80: mol_type = other DNA
gagtttgagaccagcctgaccaacatggagaaaccccatctctactaaaaatacaaaattagctgggtgtggtggcgcat

SEQ ID NO: 49045 - DNA, 80 bp, synthetic construct
  misc_feature 1..80: note = Artificially Synthesized Probe
  source 1..80: mol_type = other DNA
ctatagtcccagctactctggaggctgaggcaggaggatcgctcaagcctttttttccagactcgcctcagaaaaaaaaa

SEQ ID NO: 49046 - DNA, 80 bp, synthetic construct
  misc_feature 1..80: note = Artificially Synthesized Probe
  source 1..80: mol_type = other DNA
tgccatcatgtggggccacgggtaccaggggaaagcgcagacgcaacctgagagacccctgctcagcccagcaaggatgg

SEQ ID NO: 49047 - DNA, 80 bp, synthetic construct
  misc_feature 1..80: note = Artificially Synthesized Probe
  source 1..80: mol_type = other DNA
aaaacatccaaaaaatgtctggagggaagaaaaaaagcaccatccacaccgtatgaagagaatggagccaggtctttcca

SEQ ID NO: 49048 - DNA, 80 bp, synthetic construct; identical to SEQ ID NO: 23795
  misc_feature 1..80: note = Artificially Synthesized Probe
  source 1..80: mol_type = other DNA

SEQ ID NO: 49049 - DNA, 80 bp, synthetic construct
  misc_feature 1..80: note = Artificially Synthesized Probe
  source 1..80: mol_type = other DNA
ccaataacacagcacgcagtaccacagcacccagtaccatagcatgcccataacacagcacccagtaccaaggcacacca

SEQ ID NO: 49050 - DNA, 80 bp, synthetic construct
  misc_feature 1..80: note = Artificially Synthesized Probe
  source 1..80: mol_type = other DNA
agcacccagtaccacagtacaccaataacacagcacccagtaccacagcatgccaataacccagcacccagtaccatggc

SEQ ID NO: 49051 - DNA, 80 bp, synthetic construct
  misc_feature 1..80: note = Artificially Synthesized Probe
  source 1..80: mol_type = other DNA
aattacacagcacccagtaccacaacacaccaataacacagcacccagtaccacagcatgccaataacacagcacccagt

SEQ ID NO: 49052 - DNA, 80 bp, synthetic construct; identical to SEQ ID NO: 23796
  misc_feature 1..80: note = Artificially Synthesized Probe
  source 1..80: mol_type = other DNA

SEQ ID NO: 49053 - DNA, 80 bp, synthetic construct
  misc_feature 1..80: note = Artificially Synthesized Probe
  source 1..80: mol_type = other DNA
ttttctgcttcttttaaaaggagtttcactttacccaaatgaaccaaacgcaaccaactcatgagaatctacaaaacact

SEQ ID NO: 49054 - DNA, 80 bp, synthetic construct
  misc_feature 1..80: note = Artificially Synthesized Probe
  source 1..80: mol_type = other DNA
ggtatctccaacataactccacactgcaccacgaagctataaattccaaagctaatggaatttccaagcaaaggtgcaag

SEQ ID NO: 49055 - DNA, 80 bp, synthetic construct
  misc_feature 1..80: note = Artificially Synthesized Probe
  source 1..80: mol_type = other DNA
acgctaattacacagcacccagtaccacggcacactaattacacagcacccagtaccacagcacaccaataacatagcac

SEQ ID NO: 49056 - DNA, 80 bp, synthetic construct
  misc_feature 1..80: note = Artificially Synthesized Probe
  source 1..80: mol_type = other DNA
ctgcgcccagttacacagcatgccagtaccacacacaccagctccaaggcacccagtaccacaggatgcctaaagagtaa

SEQ ID NO: 49057 - DNA, 80 bp, synthetic construct; identical to SEQ ID NO: 23750
  misc_feature 1..80: note = Artificially Synthesized Probe
  source 1..80: mol_type = other DNA

SEQ ID NO: 49058 - DNA, 80 bp, synthetic construct; identical to SEQ ID NO: 23797
  misc_feature 1..80: note = Artificially Synthesized Probe
  source 1..80: mol_type = other DNA

SEQ ID NO: 49059 - DNA, 80 bp, synthetic construct
  misc_feature 1..80: note = Artificially Synthesized Probe
  source 1..80: mol_type = other DNA
ctcgggaggccgaggcagaagaatttcttgaacccaggaggcggaggttgcagtaagccaagatggtgccattgcactcc

SEQ ID NO: 49060 - DNA, 80 bp, synthetic construct
  misc_feature 1..80: note = Artificially Synthesized Probe
  source 1..80: mol_type = other DNA
agtgagcacgttactcagaaaaggcactaaggaccgaaccgtgtcgcccaattaatatgtgtcagccctgaccatcacgt

SEQ ID NO: 49061 - DNA, 80 bp, synthetic construct
  misc_feature 1..80: note = Artificially Synthesized Probe
  source 1..80: mol_type = other DNA
aggtcagtccaagaccagtctggccaatatggtggaacctcatctctactaaaaatacaaaaattagccaggtgtggtgg

SEQ ID NO: 49062 - DNA, 80 bp, synthetic construct
  misc_feature 1..80: note = Artificially Synthesized Probe
  source 1..80: mol_type = other DNA
atacaagaacttaaccaggtgtgggccaggcacagtggctcacgcctgtaatcccagcactttggaaggccgaggctggt

SEQ ID NO: 49063 - DNA, 80 bp, synthetic construct
  misc_feature 1..80: note = Artificially Synthesized Probe
  source 1..80: mol_type = other DNA
ggttgcagtgagctgagatcacaccactgcactccagcctgggtgacagagcaagaccccgtctcaaaaaaaaaaaaaaa

SEQ ID NO: 49064 - DNA, 80 bp, synthetic construct
  misc_feature 1..80: note = Artificially Synthesized Probe
  source 1..80: mol_type = other DNA
attaaaagcccacatatccaactgtatgaatgccactgggcattcaagtcatcctatttgctggaatattacaagcagca

SEQ ID NO: 49065 - DNA, 80 bp, synthetic construct
  misc_feature 1..80: note = Artificially Synthesized Probe
  source 1..80: mol_type = other DNA
gggcacaggaccaagcagcccactgcagctcacagtgaggacagcgcctgccaggacacccggacgcccagctacccggc

SEQ ID NO: 49066 - DNA, 80 bp, synthetic construct
  misc_feature 1..80: note = Artificially Synthesized Probe
  source 1..80: mol_type = other DNA
ggaatctgggccctatgggcactcagccgggcgtgcggcctctgggggccccctggacgccacagcagtatggcagagct

SEQ ID NO: 49067 - DNA, 80 bp, synthetic construct; identical to SEQ ID NO: 23799
  misc_feature 1..80: note = Artificially Synthesized Probe
  source 1..80: mol_type = other DNA

SEQ ID NO: 49068 - DNA, 80 bp, synthetic construct
  misc_feature 1..80: note = Artificially Synthesized Probe
  source 1..80: mol_type = other DNA
gctggaggcccgggaggcgggcctggaccccaggccccaggtgacccaaggtggacaggaggagctggtgacctctgaag

SEQ ID NO: 49069 - DNA, 80 bp, synthetic construct
  misc_feature 1..80: note = Artificially Synthesized Probe
  source 1..80: mol_type = other DNA
agttccaagaagggccacaggggcccgcagggacacttaccccaagccctccagaaacagctgctgcaggtcagcaccag

SEQ ID NO: 49070 - DNA, 80 bp, synthetic construct
  misc_feature 1..80: note = Artificially Synthesized Probe
  source 1..80: mol_type = other DNA
actttcgtggactctgctgaaacctgtctgagactatggagctttacgtggctaaggaagagaaaaaatatgtttggagt

SEQ ID NO: 49071 - DNA, 80 bp, synthetic construct
  misc_feature 1..80: note = Artificially Synthesized Probe
  source 1..80: mol_type = other DNA
atacataaagtagccaggagtgggggcatgcacctgtaatcccagctactcgggaggctgagactagagaatcacttgaa

SEQ ID NO: 49072 - DNA, 80 bp, synthetic construct; identical to SEQ ID NO: 23800
  misc_feature 1..80: note = Artificially Synthesized Probe
  source 1..80: mol_type = other DNA

SEQ ID NO: 49073 - DNA, 80 bp, synthetic construct
  misc_feature 1..80: note = Artificially Synthesized Probe
  source 1..80: mol_type = other DNA
tgtaatcccagcactttgggaggctgaggtaggcggatcacaaggtcaggagatcgagaccatcctggctaacaaggtga

SEQ ID NO: 49074 - DNA, 80 bp, synthetic construct
  misc_feature 1..80: note = Artificially Synthesized Probe
  source 1..80: mol_type = other DNA
ttggcgatagagcgagactccatctcaaaaaaaaaaaaaaaaaaaaaattagccaggcatggcggcaggtgcctataatc

SEQ ID NO: 49075 - DNA, 80 bp, synthetic construct
  misc_feature 1..80: note = Artificially Synthesized Probe
  source 1..80: mol_type = other DNA
aaataccccaaaggagactagaaaccccccacacccaggcaaggggagcccacgcaaggggcagtatggctcacaagcac

SEQ ID NO: 49076 - DNA, 80 bp, synthetic construct; identical to SEQ ID NO: 23801
  misc_feature 1..80: note = Artificially Synthesized Probe
  source 1..80: mol_type = other DNA

SEQ ID NO: 49077 - DNA, 80 bp, synthetic construct
  misc_feature 1..80: note = Artificially Synthesized Probe
  source 1..80: mol_type = other DNA
ctgagcagctccaggaaccagcagcccaagacaagccaccatgttgctcctgctgtggacatgtctgttgtccactctct

SEQ ID NO: 49078 - DNA, 80 bp, synthetic construct
  misc_feature 1..80: note = Artificially Synthesized Probe
  source 1..80: mol_type = other DNA
cagaaggggccagcggcgaggagactgcgggcttgaccaagcggacctggcaggggcatgcaaggccagccctgaaggcc

SEQ ID NO: 49079 - DNA, 80 bp, synthetic construct
  misc_feature 1..80: note = Artificially Synthesized Probe
  source 1..80: mol_type = other DNA
ccgctgaaatgacgaggtgaaccagccagctctgttcaaagttccactgacaatgggaacaaagacccgagggtgcagaa

SEQ ID NO: 49080 - DNA, 80 bp, synthetic construct
  misc_feature 1..80: note = Artificially Synthesized Probe
  source 1..80: mol_type = other DNA
ctggagcgaaaatgctgcccacacaaaggggagacctccctgcagcccagacagaagcctccctgccctagggagagaac

SEQ ID NO: 49081 - DNA, 80 bp, synthetic construct; identical to SEQ ID NO: 23802
  misc_feature 1..80: note = Artificially Synthesized Probe
  source 1..80: mol_type = other DNA

SEQ ID NO: 49082 - DNA, 80 bp, synthetic construct
  misc_feature 1..80: note = Artificially Synthesized Probe
  source 1..80: mol_type = other DNA
gccctcctggcacgttcctccacgcaaattccaccccggtgagaggtgacagcgtgctggcagtcctcacagccctcgct

SEQ ID NO: 49083 - DNA, 80 bp, synthetic construct
  misc_feature 1..80: note = Artificially Synthesized Probe
  source 1..80: mol_type = other DNA
ccgcggctgcatgcgcttgcaggccagctggagtcccgggtgggcgtgggcttggtgggcccggcactcagagcagccgg

SEQ ID NO: 49084 - DNA, 80 bp, synthetic construct; identical to SEQ ID NO: 23803
  misc_feature 1..80: note = Artificially Synthesized Probe
  source 1..80: mol_type = other DNA

SEQ ID NO: 49085 - DNA, 80 bp, synthetic construct
  misc_feature 1..80: note = Artificially Synthesized Probe
  source 1..80: mol_type = other DNA
aatcggcactctgtatctagcacaaggtttgtaaacacaccaatcagcactctgtgtctagctcagggtttgtgaatgca

SEQ ID NO: 49086 - DNA, 80 bp, synthetic construct
  misc_feature 1..80: note = Artificially Synthesized Probe
  source 1..80: mol_type = other DNA
actctaccaatcagcaggatgtgggtggggccagataagagaataaaagctggctgcgggagccagcagtggtaactcgc

SEQ ID NO: 49087 - DNA, 80 bp, synthetic construct
  misc_feature 1..80: note = Artificially Synthesized Probe
  source 1..80: mol_type = other DNA
agaaggaagaaactccgaacacctccgaacgtcagaaggaacaaactccggacaggccgcctttaggaactgtaacactc

SEQ ID NO: 49088 - DNA, 80 bp, synthetic construct
  misc_feature 1..80: note = Artificially Synthesized Probe
  source 1..80: mol_type = other DNA
gcctgttcagtacccactctccttttccctttgcattacccgcagccttcctttggaggactgcccccagctccccactg

SEQ ID NO: 49089 - DNA, 80 bp, synthetic construct; identical to SEQ ID NO: 23804
  misc_feature 1..80: note = Artificially Synthesized Probe
  source 1..80: mol_type = other DNA

SEQ ID NO: 49090 - DNA, 80 bp, synthetic construct
  misc_feature 1..80: note = Artificially Synthesized Probe
  source 1..80: mol_type = other DNA
gagaatggtctaaatgtgaggaacgcagcctggacttcatgccctgtctgtgctgacaagcaaccattccaacatcagag

SEQ ID NO: 49091 - DNA, 80 bp, synthetic construct
  misc_feature 1..80: note = Artificially Synthesized Probe
  source 1..80: mol_type = other DNA
ggacgacacttctacatctgcacggctttcagaaccacgtagctttccgaccgtgcagagccactcagggctcctgggac

SEQ ID NO: 49092 - DNA, 80 bp, synthetic construct
  misc_feature 1..80: note = Artificially Synthesized Probe
  source 1..80: mol_type = other DNA
gaagccaatgtatcccactaatttcatagcaaaggttccttattacaaatacagcaaaccaaggacagacagcaaagcta

SEQ ID NO: 49093 - DNA, 80 bp, synthetic construct
  misc_feature 1..80: note = Artificially Synthesized Probe
  source 1..80: mol_type = other DNA
gaatcccagcactttgggaggctgaggcgggcagatctcttgaggaaaggagttcgagaccagactggccaacgtggtaa

SEQ ID NO: 49094 - DNA, 80 bp, synthetic construct; identical to SEQ ID NO: 23805
  misc_feature 1..80: note = Artificially Synthesized Probe
  source 1..80: mol_type = other DNA

SEQ ID NO: 49095 - DNA, 80 bp, synthetic construct
  misc_feature 1..80: note = Artificially Synthesized Probe
  source 1..80: mol_type = other DNA
caaatacaaaaattagccaggcatggtagcacacacctgtaatcccagctactcgggaggcaggagaatcacttaaaccc

SEQ ID NO: 49096 - DNA, 80 bp, synthetic construct
  misc_feature 1..80: note = Artificially Synthesized Probe
  source 1..80: mol_type = other DNA
ttgtgtcctaaaatgcttgctaaataaataccacttggctaaagacaatgaacaaaagggaaaaaaggccgggcgtggtg

SEQ ID NO: 49097 - DNA, 80 bp, synthetic construct; identical to SEQ ID NO: 23806
  misc_feature 1..80: note = Artificially Synthesized Probe
  source 1..80: mol_type = other DNA

SEQ ID NO: 49098 - DNA, 80 bp, synthetic construct
  misc_feature 1..80: note = Artificially Synthesized Probe
  source 1..80: mol_type = other DNA
tgcaacctctgcctcccaggttcaagcgattctcctgcttcagcctcccgaggagctgggattacaggcatgcgccaact

SEQ ID NO: 49099 - DNA, 80 bp, synthetic construct
  misc_feature 1..80: note = Artificially Synthesized Probe
  source 1..80: mol_type = other DNA
tcgtatcacttagactacaagtttaaccttagacatgtttaatcctgtgttgatgagcgagtagccaatttctgtgtcac

SEQ ID NO: 49100 - DNA, 80 bp, synthetic construct
  misc_feature 1..80: note = Artificially Synthesized Probe
  source 1..80: mol_type = other DNA
aaagagtgggaaatgcatgcgctctgctcacaagcacagtagatgccagcccgaaagccaaataaacctccaggaaccac

SEQ ID NO: 49101 - DNA, 80 bp, synthetic construct; identical to SEQ ID NO: 23807
  misc_feature 1..80: note = Artificially Synthesized Probe
  source 1..80: mol_type = other DNA

SEQ ID NO: 49102 - DNA, 80 bp, synthetic construct
  misc_feature 1..80: note = Artificially Synthesized Probe
  source 1..80: mol_type = other DNA
ccagagcaatgagcgcggcggcctcgggtgtgtgaaagctccagccccagcctccgtccaccgcagggtggcctgccacg

SEQ ID NO: 49103 - DNA, 80 bp, synthetic construct
  misc_feature 1..80: note = Artificially Synthesized Probe
  source 1..80: mol_type = other DNA
gccaacatggagaaaccccacctctactaataatgcaaaattagccgggcgtggtggcacatgcctgtaatcccagctac

SEQ ID NO: 49104 - DNA, 80 bp, synthetic construct
  misc_feature 1..80: note = Artificially Synthesized Probe
  source 1..80: mol_type = other DNA
aaaagcaagaatccaattctccaattcttatcgatgccctgaaacgtccactcctccctttattaagcggaaaggaccat

SEQ ID NO: 49105 - DNA, 80 bp, synthetic construct
  misc_feature 1..80: note = Artificially Synthesized Probe
  source 1..80: mol_type = other DNA
caaatataaaaaagtaatgacaaatgcaaaagtatcacaaataagaacagaaccaaaattcaaccccagcggcagcagga

SEQ ID NO: 49106 - DNA, 80 bp, synthetic construct
  misc_feature 1..80: note = Artificially Synthesized Probe
  source 1..80: mol_type = other DNA
gctgtaccgtctactggaggagaccctcggggcagctgtctccaggagcagcttctgagggagtcttccggggggagcag

SEQ ID NO: 49107 - DNA, 80 bp, synthetic construct; identical to SEQ ID NO: 23808
  misc_feature 1..80: note = Artificially Synthesized Probe
  source 1..80: mol_type = other DNA

SEQ ID NO: 49108 - DNA, 80 bp, synthetic construct
  misc_feature 1..80: note = Artificially Synthesized Probe
  source 1..80: mol_type = other DNA
ccattgttatcaagaatgtactttcggtagatggctctcgccagcttcagcctcttctcctcgttcgagtcacagggctc

SEQ ID NO: 49109 - DNA, 80 bp, synthetic construct
  misc_feature 1..80: note = Artificially Synthesized Probe
  source 1..80: mol_type = other DNA
ccctcaggctcataccccaggtccagatccgagcgcctcggagtggccgtcgaagtctcacctttaatgccaacaccttt

SEQ ID NO: 49110 - DNA, 80 bp, synthetic construct; identical to SEQ ID NO: 23809
  misc_feature 1..80: note = Artificially Synthesized Probe
  source 1..80: mol_type = other DNA

SEQ ID NO: 49111 - DNA, 80 bp, synthetic construct
  misc_feature 1..80: note = Artificially Synthesized Probe
  source 1..80: mol_type = other DNA
aagatatattttggccacaagcatagttctactttaaagcaatttctggaaacttttacaactacaggaatgcctctcat

SEQ ID NO: 49112 - DNA, 80 bp, synthetic construct
  misc_feature 1..80: note = Artificially Synthesized Probe
  source 1..80: mol_type = other DNA
gactatgtgtacaaacctgagtgagggctggaccctcacaagtaagatggagacaatcgctccaccagccccagcaacac

SEQ ID NO: 49113 - DNA, 80 bp, synthetic construct
  misc_feature 1..80: note = Artificially Synthesized Probe
  source 1..80: mol_type = other DNA
ttccgacacatgagaacacactgcagggtgttcctccgactctcaacacacgcctcaaagagagataatcatgggtcacc

SEQ ID NO: 49114 - DNA, 80 bp, synthetic construct; identical to SEQ ID NO: 23751
  misc_feature 1..80: note = Artificially Synthesized Probe
  source 1..80: mol_type = other DNA

SEQ ID NO: 49115 - DNA, 80 bp, synthetic construct; identical to SEQ ID NO: 23810
  misc_feature 1..80: note = Artificially Synthesized Probe
  source 1..80: mol_type = other DNA

SEQ ID NO: 49116 - DNA, 80 bp, synthetic construct
  misc_feature 1..80: note = Artificially Synthesized Probe
  source 1..80: mol_type = other DNA
gctgctacaagcctgcaaggggtgtgcaaaagagagtagataagggctccaacagaacccctgccatggtctatggtcct

SEQ ID NO: 49117 - DNA, 80 bp, synthetic construct
  misc_feature 1..80: note = Artificially Synthesized Probe
  source 1..80: mol_type = other DNA
agggctttagagaagcatgttgggttcaaaagcctagagtgctgaacaagtcacagcaaacaaataaaaccctaaaaccc

SEQ ID NO: 49118 - DNA, 80 bp, synthetic construct
  misc_feature 1..80: note = Artificially Synthesized Probe
  source 1..80: mol_type = other DNA
cgtggtgtcacgcacctgtagtcccagctactcaggaggctgaggctggaggatcccttgagcccaagagttcaagacta

SEQ ID NO: 49119 - DNA, 80 bp, synthetic construct; identical to SEQ ID NO: 23811
  misc_feature 1..80: note = Artificially Synthesized Probe
  source 1..80: mol_type = other DNA

SEQ ID NO: 49120 - DNA, 80 bp, synthetic construct
  misc_feature 1..80: note = Artificially Synthesized Probe
  source 1..80: mol_type = other DNA
gtgggcacctgcagtcccagctactcgggagactgacgtgggagaatggcatgaacccgggaggcagagcttgcagtgag

SEQ ID NO: 49121 - DNA, 80 bp, synthetic construct
  misc_feature 1..80: note = Artificially Synthesized Probe
  source 1..80: mol_type = other DNA
cagctaaggactttttgtgaacgctgctgggtagtatgtcatcttggcctcagcaggaacacacagcttctaaaggtcaa

SEQ ID NO: 49122 - DNA, 80 bp, synthetic construct
  misc_feature 1..80: note = Artificially Synthesized Probe
  source 1..80: mol_type = other DNA
ctgaccacctgagccttaccactatagatgtactaccattcactagcttgaagaaccaagtcaccggagagtggaaagtg

SEQ ID NO: 49123 - DNA, 80 bp, synthetic construct; identical to SEQ ID NO: 23812
  misc_feature 1..80: note = Artificially Synthesized Probe
  source 1..80: mol_type = other DNA

SEQ ID NO: 49124 - DNA, 80 bp, synthetic construct
  misc_feature 1..80: note = Artificially Synthesized Probe
  source 1..80: mol_type = other DNA
agtggcggggactacaggcacgagtcatcaacgcccggctaattactgtattttgggtttcaccacgttggccaggctgg

SEQ ID NO: 49125 - DNA, 80 bp, synthetic construct
  misc_feature 1..80: note = Artificially Synthesized Probe
  source 1..80: mol_type = other DNA
gagcccagaagaaaattttcttacaatcatgtgtatttttggctgtcaactgacagaagactttttggtgtccctggaag

SEQ ID NO: 49126 - DNA, 80 bp, synthetic construct
  misc_feature 1..80: note = Artificially Synthesized Probe
  source 1..80: mol_type = other DNA
gaacaagagaacaagttgtgactgtggccgacaccctggccaggtggcctggtggggctacactcatctcacaagggcag

SEQ ID NO: 49127 - DNA, 80 bp, synthetic construct
  misc_feature 1..80: note = Artificially Synthesized Probe
  source 1..80: mol_type = other DNA
acaccaagcatttagtgtacacacaagtacacaccacacataaagcagtcacgtttactcagttcagtatcaaatgcctg

SEQ ID NO: 49128 - DNA, 80 bp, synthetic construct
  misc_feature 1..80: note = Artificially Synthesized Probe
  source 1..80: mol_type = other DNA
cgtgtgtaggtatttattttacccaaacgtaacttttgacattttgatttacatggaggaggcaagtaacacaacacgac

SEQ ID NO: 49129 - DNA, 80 bp, synthetic construct; identical to SEQ ID NO: 23813
  misc_feature 1..80: note = Artificially Synthesized Probe
  source 1..80: mol_type = other DNA

SEQ ID NO: 49130 - DNA, 80 bp, synthetic construct
  misc_feature 1..80: note = Artificially Synthesized Probe
  source 1..80: mol_type = other DNA
cctataatcccagctacttgggaaggctgaggcaggagaatcgcttgaacctgggaggcggaggatgcggtgagcggaga

SEQ ID NO: 49131 - DNA, 80 bp, synthetic construct
  misc_feature 1..80: note = Artificially Synthesized Probe
  source 1..80: mol_type = other DNA
ctgaagaagcagagaacagaagtgtgagcaaaaacaaggggctgacatgcacataagaaccctttataaattatcttaga

SEQ ID NO: 49132 - DNA, 80 bp, synthetic construct
  misc_feature 1..80: note = Artificially Synthesized Probe
  source 1..80: mol_type = other DNA
actaaaaatacaaaaattagccggatgtggtggcgcatgcctgttatcccagctactcaggcggctgaggcaggaaaact

SEQ ID NO: 49133 - DNA, 80 bp, synthetic construct; identical to SEQ ID NO: 23814
  misc_feature 1..80: note = Artificially Synthesized Probe
  source 1..80: mol_type = other DNA

SEQ ID NO: 49134 - DNA, 80 bp, synthetic construct
  misc_feature 1..80: note = Artificially Synthesized Probe
  source 1..80: mol_type = other DNA
ccaaagtgcggggcgggggtagaatctaagaaccacacccaagagaaagaccagtgtttgggcagcaaggcatcaacctg

SEQ ID NO: 49135 - DNA, 80 bp, synthetic construct
  misc_feature 1..80: note = Artificially Synthesized Probe
  source 1..80: mol_type = other DNA
gcccccgcacgcgatgcgcggcccctgcagctgctccgtgccccgagacgcgcccgaggcctcggacctccaagcggcca

SEQ ID NO: 49136 - DNA, 80 bp, synthetic construct
  misc_feature 1..80: note = Artificially Synthesized Probe
  source 1..80: mol_type = other DNA
tcacccgcgcgcggtggtggcgggaccccgggcccggctcccggagcggcgcggcgcggtccgggcccatgcgctcagcg

SEQ ID NO: 49137 - DNA, 80 bp, synthetic construct
  misc_feature 1..80: note = Artificially Synthesized Probe
  source 1..80: mol_type = other DNA
ccgggccgactccggccggctctggcggcggcagcggccacgatcgcctcccgagccagagcccgagccagagcgccgaa

SEQ ID NO: 49138 - DNA, 80 bp, synthetic construct
  misc_feature 1..80: note = Artificially Synthesized Probe
  source 1..80: mol_type = other DNA
gtcgggagttcgagatcaacctaacatggtgaaacctcatcgctactaaatatacaaaattagctgggcgcctgtcatcc

SEQ ID NO: 49139 - DNA, 80 bp, synthetic construct; identical to SEQ ID NO: 23752
  misc_feature 1..80: note = Artificially Synthesized Probe
  source 1..80: mol_type = other DNA

SEQ ID NO: 49140 - DNA, 80 bp, synthetic construct; identical to SEQ ID NO: 23745
  misc_feature 1..80: note = Artificially Synthesized Probe
  source 1..80: mol_type = other DNA

SEQ ID NO: 49141 - DNA, 80 bp, synthetic construct
  misc_feature 1..80: note = Artificially Synthesized Probe
  source 1..80: mol_type = other DNA
agtgagactccatctcaaaaaaaaaaaaaaaaaaaaaaaatggccaggcgcggtaatcccagcacgctgggaggccgagg

SEQ ID NO: 49142 - DNA, 80 bp, synthetic construct
  misc_feature 1..80: note = Artificially Synthesized Probe
  source 1..80: mol_type = other DNA
gtggaggttgcagtgcgttgacactggcctgttgcactccagcctgagccacaggagcgaaaccccatctcaaaaaaaaa

SEQ ID NO: 49143 - DNA, 80 bp, synthetic construct
  misc_feature 1..80: note = Artificially Synthesized Probe
  source 1..80: mol_type = other DNA
gtggtggcgggcgcctgcagtcccagctgctcttgaggctgaggcaggagaatggcatgaacccgggaggcgaggcttgc

SEQ ID NO: 49144 - DNA, 80 bp, synthetic construct
  misc_feature 1..80: note = Artificially Synthesized Probe
  source 1..80: mol_type = other DNA
ctcggatctcggctcactgcaatctccgcctcccaggttcaagcgactctcctgcctcagccaccgagtagctgggatta

SEQ ID NO: 49145 - DNA, 80 bp, synthetic construct; identical to SEQ ID NO: 23753
  misc_feature 1..80: note = Artificially Synthesized Probe
  source 1..80: mol_type = other DNA

SEQ ID NO: 49146 - DNA, 80 bp, synthetic construct
  misc_feature 1..80: note = Artificially Synthesized Probe
  source 1..80: mol_type = other DNA
ggaatgtattaatacttatcctaaaatatgggacatgcaatatttagtatatacagctatttaaaaaaaggattcggccg

SEQ ID NO: 49147 - DNA, 80 bp, synthetic construct
  misc_feature 1..80: note = Artificially Synthesized Probe
  source 1..80: mol_type = other DNA
taatcccagctactcgggaggctgaggcaggagaattgcttgaacccaggaggtggaggttgcagttagccaagattgca

SEQ ID NO: 49148 - DNA, 80 bp, synthetic construct; identical to SEQ ID NO: 23754
  misc_feature 1..80: note = Artificially Synthesized Probe
  source 1..80: mol_type = other DNA

SEQ ID NO: 49149 - DNA, 80 bp, synthetic construct
  misc_feature 1..80: note = Artificially Synthesized Probe
  source 1..80: mol_type = other DNA
gtggggggcagatcaggacctaagtctgaggaagctggggccatccacccaccagggccaacacttcccagctgacctgc

SEQ ID NO: 49150 - DNA, 80 bp, synthetic construct
  misc_feature 1..80: note = Artificially Synthesized Probe
  source 1..80: mol_type = other DNA
tgctccacaccacacacgaggcctctgcccttctgggaggagagaagtgctcacgctacacaagagccttccccagccct

SEQ ID NO: 49151 - DNA, 80 bp, synthetic construct
  misc_feature 1..80: note = Artificially Synthesized Probe
  source 1..80: mol_type = other DNA
acggcccccactgcatgtgcgccccctcccagggcaacagtgaacagtgcaatgaccacatgtgggtgaagtgggcagcc

SEQ ID NO: 49152 - DNA, 80 bp, synthetic construct
  misc_feature 1..80: note = Artificially Synthesized Probe
  source 1..80: mol_type = other DNA
acgtcagcttccctcctgctcggggcttcagggacagcctctctctggggacatgaggttttcctcctggagacgtgggg

SEQ ID NO: 49153 - DNA, 80 bp, synthetic construct; identical to SEQ ID NO: 23755
  misc_feature 1..80: note = Artificially Synthesized Probe
  source 1..80: mol_type = other DNA

SEQ ID NO: 49154 - DNA, 80 bp, synthetic construct
  misc_feature 1..80: note = Artificially Synthesized Probe
  source 1..80: mol_type = other DNA
cctcgtctgcgaggccccctcctggcatctgtaaggctcccgtggtgcagccgccgcccgctgtcccctgcccgcttgtc

SEQ ID NO: 49155 - DNA, 80 bp, synthetic construct
  misc_feature 1..80: note = Artificially Synthesized Probe
  source 1..80: mol_type = other DNA
gttgagattctttattctggaggtaggaagggggtcagcatgctcaggtgggaagggtccagcccagctcctccagcccc

SEQ ID NO: 49156 - DNA, 80 bp, synthetic construct
  misc_feature 1..80: note = Artificially Synthesized Probe
  source 1..80: mol_type = other DNA
tctccattcccttacccgagtgcagttggcagcccgtggctccaggtccttgggatccacaaggtggctcagaagactgc

SEQ ID NO: 49157 - DNA, 80 bp, synthetic construct
  misc_feature 1..80: note = Artificially Synthesized Probe
  source 1..80: mol_type = other DNA
gccctcgaatcgcaggccgcccaccagccccacaggccacactgagacaccacgggtccagcgcatctaacggaggtcgg

SEQ ID NO: 49158 - DNA, 80 bp, synthetic construct; identical to SEQ ID NO: 23816
  misc_feature 1..80: note = Artificially Synthesized Probe
  source 1..80: mol_type = other DNA

SEQ ID NO: 49159 - DNA, 80 bp, synthetic construct
  misc_feature 1..80: note = Artificially Synthesized Probe
  source 1..80: mol_type = other DNA
agaggaggccagaggcagccagcagccctgagaccagcggggtgggaccctcagcatcctccaccagcagccaatgcagc

SEQ ID NO: 49160 - DNA, 80 bp, synthetic construct
  misc_feature 1..80: note = Artificially Synthesized Probe
  source 1..80: mol_type = other DNA
ccaatgcctaaactccctctttcttgcctgtcaacttcatgctaacactcacctgccctgttcttctggtccatgtccat

SEQ ID NO: 49161 - DNA, 80 bp, synthetic construct; identical to SEQ ID NO: 23817
  misc_feature 1..80: note = Artificially Synthesized Probe
  source 1..80: mol_type = other DNA

SEQ ID NO: 49162 - DNA, 80 bp, synthetic construct
  misc_feature 1..80: note = Artificially Synthesized Probe
  source 1..80: mol_type = other DNA
ggggtgaagcagcaggaccatgccctgggcctggaggggcagaggggccacttctggctccaagggtcaggacttggaaa

SEQ ID NO: 49163 - DNA, 80 bp, synthetic construct
  misc_feature 1..80: note = Artificially Synthesized Probe
  source 1..80: mol_type = other DNA
ttcgagaccagcctgcccaacatggcgaagccccgtctctattaaaaatacaaaaaattacccaggcatggtggcagtca

SEQ ID NO: 49164 - DNA, 80 bp, synthetic construct
  misc_feature 1..80: note = Artificially Synthesized Probe
  source 1..80: mol_type = other DNA
aagggcacaggctttgggatcaggtagatctgggtttgaaatccagttttgtaacttattatgtgagacaatttgggaaa

SEQ ID NO: 49165 - DNA, 80 bp, synthetic construct
  misc_feature 1..80: note = Artificially Synthesized Probe
  source 1..80: mol_type = other DNA
aggagatcgagaccatcctggctaacacggtgaaaccccatctctactaaaaatataaaaaattagctgggtgtggtggc

SEQ ID NO: 49166 - DNA, 80 bp, synthetic construct; identical to SEQ ID NO: 23818
  misc_feature 1..80: note = Artificially Synthesized Probe
  source 1..80: mol_type = other DNA

SEQ ID NO: 49167 - DNA, 80 bp, synthetic construct
  misc_feature 1..80: note = Artificially Synthesized Probe
  source 1..80: mol_type = other DNA
cgagatcgtgccattgcactccagcctgggcgacagagtgagactccatctcgggaaaaaaaaaaaaaaaattagcctgg

SEQ ID NO: 49168 - DNA, 80 bp, synthetic construct
  misc_feature 1..80: note = Artificially Synthesized Probe
  source 1..80: mol_type = other DNA
ggaagaaaaaaaaaaaaggaacaaaccaggaatgtggaacgtggggcttggcctcttctgtacttctttatccttcagat

SEQ ID NO: 49169 - DNA, 80 bp, synthetic construct
  misc_feature 1..80: note = Artificially Synthesized Probe
  source 1..80: mol_type = other DNA
accaattacatttgatttaaaacaaaagcaaatgtaaatcactaaatacagtgcctgctagagagtaaacacactgtaag

SEQ ID NO: 49170 - DNA, 80 bp, synthetic construct
  misc_feature 1..80: note = Artificially Synthesized Probe
  source 1..80: mol_type = other DNA
cccacctcagcctccagagtagctgagattacaggcatgcaccatcacgcctagctaacttttttttttttttttttttt

SEQ ID NO: 49171 - DNA, 80 bp, synthetic construct; identical to SEQ ID NO: 23819
  misc_feature 1..80: note = Artificially Synthesized Probe
  source 1..80: mol_type = other DNA

SEQ ID NO: 49172 - DNA, 80 bp, synthetic construct
  misc_feature 1..80: note = Artificially Synthesized Probe
  source 1..80: mol_type = other DNA
ttctctgtccgagtatgccacaccagtacctgtgccaggagggatgcagtgagagccaggcccagctgcagccaggcctc

SEQ ID NO: 49173 - DNA, 80 bp, synthetic construct
  misc_feature 1..80: note = Artificially Synthesized Probe
  source 1..80: mol_type = other DNA
cctctcaggttcaagggattctcctgcctcagcctccccagtagctgggattataggcatgcgccaccacgcctggctaa

SEQ ID NO: 49174 - DNA, 80 bp, synthetic construct
  misc_feature 1..80: note = Artificially Synthesized Probe
  source 1..80: mol_type = other DNA
ccacaaatatttgagtataaatgtggttcatttatcctgtctttggcatgctctagtttgaggaacaactcctagcccag

SEQ ID NO: 49175 - DNA, 80 bp, synthetic construct
  misc_feature 1..80: note = Artificially Synthesized Probe
  source 1..80: mol_type = other DNA
agttccgcttgcagctgggaaatcctcagatccttctgccgtagctgctcggctgctgcccgcaggggaggaaggcagtc

SEQ ID NO: 49176 - DNA, 80 bp, synthetic construct; identical to SEQ ID NO: 23820
  misc_feature 1..80: note = Artificially Synthesized Probe
  source 1..80: mol_type = other DNA

SEQ ID NO: 49177 - DNA, 80 bp, synthetic construct
  misc_feature 1..80: note = Artificially Synthesized Probe
  source 1..80: mol_type = other DNA
aattccattgttacaattttatgttggatattgagctgattccatcttttctacctgctggtcctaattttgccttctgg

SEQ ID NO: 49178 - DNA, 80 bp, synthetic construct
  misc_feature 1..80: note = Artificially Synthesized Probe
  source 1..80: mol_type = other DNA
cagggttcgatccattcccttggctaggtgaccaaagactcattgttaaattcattgattccatcgtaggataaatattt

SEQ ID NO: 49179 - DNA, 80 bp, synthetic construct
  misc_feature 1..80: note = Artificially Synthesized Probe
  source 1..80: mol_type = other DNA
ccatgaagaaaataatcaggatagagaataaaagggaatggaattaagaatggtaactttagctatggtggtcagggaag

SEQ ID NO: 49180 - DNA, 80 bp, synthetic construct; identical to SEQ ID NO: 23821
  misc_feature 1..80: note = Artificially Synthesized Probe
  source 1..80: mol_type = other DNA

SEQ ID NO: 49181 - DNA, 80 bp, synthetic construct
  misc_feature 1..80: note = Artificially Synthesized Probe
  source 1..80: mol_type = other DNA
gcgccctcgggccagcccgccgcacccccgccccgccccgctcaccgagctgtaccagcgcgtagaggaggccggcgatc

SEQ ID NO: 49182 - DNA, 80 bp, synthetic construct
  misc_feature 1..80: note = Artificially Synthesized Probe
  source 1..80: mol_type = other DNA
gtcccgccttcctcgcactcccctaccagctcccagctggggctggcagcgccgccagggcacgcttccggtcatctgtg

SEQ ID NO: 49183 - DNA, 80 bp, synthetic construct
  misc_feature 1..80: note = Artificially Synthesized Probe
  source 1..80: mol_type = other DNA
aggaaggcggatcacgaggtcaggagattgagaccatcctggctaacaccgtgaaaccccgtcactactaaaaacacaaa

SEQ ID NO: 49184 - DNA, 80 bp, synthetic construct; identical to SEQ ID NO: 23815
  misc_feature 1..80: note = Artificially Synthesized Probe
  source 1..80: mol_type = other DNA

SEQ ID NO: 49185 - DNA, 80 bp, synthetic construct
  misc_feature 1..80: note = Artificially Synthesized Probe
  source 1..80: mol_type = other DNA
gcggggcggccacgtgaaggacgcacgttcagcggggctctcacgtgacccgggcgcgctgcggccgcccgcgcggaccc

SEQ ID NO: 49186 - DNA, 80 bp, synthetic construct
  misc_feature 1..80: note = Artificially Synthesized Probe
  source 1..80: mol_type = other DNA
gagtcatttttcccaccttcctaaatgtctgtcttgtccccttcccttgtcccccgttggcctgttgcttttcatttcag

SEQ ID NO: 49187 - DNA, 80 bp, synthetic construct
  misc_feature 1..80: note = Artificially Synthesized Probe
  source 1..80: mol_type = other DNA
tttccgagtggcagctgacatgttttctgacggcaacttcaactggggccgggttgtcgcccttttctactttgccagca

SEQ ID NO: 49188 - DNA, 80 bp, synthetic construct; identical to SEQ ID NO: 23823
  misc_feature 1..80: note = Artificially Synthesized Probe
  source 1..80: mol_type = other DNA

SEQ ID NO: 49189 - DNA, 80 bp, synthetic construct
  misc_feature 1..80: note = Artificially Synthesized Probe
  source 1..80: mol_type = other DNA
atcttggttcactgcaacctctgcctcccaggttcaagcgattctcctgcctcagcttcctgagtagctgggattatggg

SEQ ID NO: 49190 - DNA, 80 bp, synthetic construct
  misc_feature 1..80: note = Artificially Synthesized Probe
  source 1..80: mol_type = other DNA
ccgcaacaagccaggaaagacttctaagggcaggtgacatcaaagagcaggtgacattaaagccaaagctagaatgataa

SEQ ID NO: 49191 - DNA, 80 bp, synthetic construct; identical to SEQ ID NO: 23824
  misc_feature 1..80: note = Artificially Synthesized Probe
  source 1..80: mol_type = other DNA

SEQ ID NO: 49192 - DNA, 80 bp, synthetic construct
  misc_feature 1..80: note = Artificially Synthesized Probe
  source 1..80: mol_type = other DNA
ctgaggggcagaaactcccggatcgggcgctgccagcctccagtcccctccgtcctcggaggttcctggctctctgatcc

SEQ ID NO: 49193 - DNA, 80 bp, synthetic construct
  misc_feature 1..80: note = Artificially Synthesized Probe
  source 1..80: mol_type = other DNA
atgcctggctagtttttgtatttttagtagagacggagtttcgccatgttggccaggctggtctcaaactcctggcctca

SEQ ID NO: 49194 - DNA, 80 bp, synthetic construct
  misc_feature 1..80: note = Artificially Synthesized Probe
  source 1..80: mol_type = other DNA
attctagcaagtatagatgccccttgacttgcaatggtgttacatcctagtaatcccatcataaattgaaaataacataa

SEQ ID NO: 49195 - DNA, 80 bp, synthetic construct
  misc_feature 1..80: note = Artificially Synthesized Probe
  source 1..80: mol_type = other DNA
ttcattatgaagattctcataagaaaatgtggtgggggtggtggtgaaatgctcctggctgttgttggccaaaagagatc

SEQ ID NO: 49196 - DNA, 80 bp, synthetic construct; identical to SEQ ID NO: 23825
  misc_feature 1..80: note = Artificially Synthesized Probe
  source 1..80: mol_type = other DNA

SEQ ID NO: 49197 - DNA, 80 bp, synthetic construct
  misc_feature 1..80: note = Artificially Synthesized Probe
  source 1..80: mol_type = other DNA
tgttaccaaggctggaatgcagtggcatgaccttggctcactgcagtctccacctcctgggttcaagcaattctacctca

SEQ ID NO: 49198 - DNA, 80 bp, synthetic construct
  misc_feature 1..80: note = Artificially Synthesized Probe
  source 1..80: mol_type = other DNA
acctcctgggtttaagcgattctcttgcctcagtctcccgagtagcttgggattacaggcgtccgccaccacacccagct

SEQ ID NO: 49199 - DNA, 80 bp, synthetic construct
  misc_feature 1..80: note = Artificially Synthesized Probe
  source 1..80: mol_type = other DNA
tcaagattgagctgatggggcctgaacgtccgagatgaggggaatagcagtgcaggtgatggtggcaccacctacagagc

SEQ ID NO: 49200 - DNA, 80 bp, synthetic construct; identical to SEQ ID NO: 23826
  misc_feature 1..80: note = Artificially Synthesized Probe
  source 1..80: mol_type = other DNA

SEQ ID NO: 49201 - DNA, 80 bp, synthetic construct
  misc_feature 1..80: note = Artificially Synthesized Probe
  source 1..80: mol_type = other DNA
aaaaaaaaaaaagaaaagtcctctctggggaagtgacatttgccctgagagctgaagggtaagaatttgcttcgtcgagg

SEQ ID NO: 49202 - DNA, 80 bp, synthetic construct
  misc_feature 1..80: note = Artificially Synthesized Probe
  source 1..80: mol_type = other DNA
aggccaggagtttgagaccagcctgaccaacatggtgaaaccttgtctgcactaaaaattcaaaaaaaaaaaaaaaaata

SEQ ID NO: 49203 - DNA, 80 bp, synthetic construct
  misc_feature 1..80: note = Artificially Synthesized Probe
  source 1..80: mol_type = other DNA
gggtctggatgcatatagcgttcccctagcctctttccccggggagaatgtaggatacaggcccagcctcctggcctttc

SEQ ID NO: 49204 - DNA, 80 bp, synthetic construct
  misc_feature 1..80: note = Artificially Synthesized Probe
  source 1..80: mol_type = other DNA
aaaattagccaggcatgttggcaggcacctgtaatcccaaccctttgggaggctggggcaggagaattgcttgaacccag

SEQ ID NO: 49205 - DNA, 80 bp, synthetic construct; identical to SEQ ID NO: 23827
  misc_feature 1..80: note = Artificially Synthesized Probe
  source 1..80: mol_type = other DNA

SEQ ID NO: 49206 - DNA, 80 bp, synthetic construct
  misc_feature 1..80: note = Artificially Synthesized Probe
  source 1..80: mol_type = other DNA
aggagctgggattacaggtgcctgccaccacacccagctaatttttgtatttatttattttgagatggagttttgctctt

SEQ ID NO: 49207 - DNA, 80 bp, synthetic construct
  misc_feature 1..80: note = Artificially Synthesized Probe
  source 1..80: mol_type = other DNA
tccgtattggtcaggctggtcttgaactcccgacctcaagtgatccgcctgccttggcctcccaaagtgctgggattaca

SEQ ID NO: 49208 - DNA, 80 bp, synthetic construct
  misc_feature 1..80: note = Artificially Synthesized Probe
  source 1..80: mol_type = other DNA
ctccccacaggccctgtgcaccaaggtgccggaactgatcagaaccatcatgggctggacattggacttcctccgggagc

SEQ ID NO: 49209 - DNA, 80 bp, synthetic construct; identical to SEQ ID NO: 23828
  misc_feature 1..80: note = Artificially Synthesized Probe
  source 1..80: mol_type = other DNA

SEQ ID NO: 49210 - DNA, 80 bp, synthetic construct
  misc_feature 1..80: note = Artificially Synthesized Probe
  source 1..80: mol_type = other DNA
tgctcaagttcattgatgaccctctgaccctagctctttcctttttttttttttccccactgagaaggggtctcgctatg

SEQ ID NO: 49211 - DNA, 80 bp, synthetic construct
  misc_feature 1..80: note = Artificially Synthesized Probe
  source 1..80: mol_type = other DNA
tgatcccgcctctgcctgcccaggggctgcccctggccgagtcactgaagcgactgatgtccctgtctccaggacggcct

SEQ ID NO: 49212 - DNA, 80 bp, synthetic construct
  misc_feature 1..80: note = Artificially Synthesized Probe
  source 1..80: mol_type = other DNA
ggacgtgggcatttttcttacttttgtaattattggggggtgtggggaagagtggtcttgagggggtaataaacctcctt

SEQ ID NO: 49213 - DNA, 80 bp, synthetic construct; identical to SEQ ID NO: 23822
  misc_feature 1..80: note = Artificially Synthesized Probe
  source 1..80: mol_type = other DNA

SEQ ID NO: 49214 - DNA, 80 bp, synthetic construct
  misc_feature 1..80: note = Artificially Synthesized Probe
  source 1..80: mol_type = other DNA
agaagctgagcgagtgtctcaagcgcatcggggacgaactggacagtaacatggagctgcagaggtgtgggcccctgagg

SEQ ID NO: 49215 - DNA, 80 bp, synthetic construct
  misc_feature 1..80: note = Artificially Synthesized Probe
  source 1..80: mol_type = other DNA
gcaccacagaggcagaaggggtgatgagtgagaggcgagtggtagtggacttgcccaccagtgccagctccagcatgccc

SEQ ID NO: 49216 - DNA, 80 bp, synthetic construct
  misc_feature 1..80: note = Artificially Synthesized Probe
  source 1..80: mol_type = other DNA
aaagattttataggagacaaatctataccaaggcttattgcagtttccaagcctacggtaccacctataacagatgaaaa

SEQ ID NO: 49217 - DNA, 80 bp, synthetic construct
  misc_feature 1..80: note = Artificially Synthesized Probe
  source 1..80: mol_type = other DNA
ggccagagacatgactgtgactcacatagcagtagtgggagcagaagaccagagaaaaatgtcagcatggatcacagcac

SEQ ID NO: 49218 - DNA, 80 bp, synthetic construct
  misc_feature 1..80: note = Artificially Synthesized Probe
  source 1..80: mol_type = other DNA
cttttccaagtgggcagcactcaaatcagtctttcccaccttcgttgatgtcaaagttcagttcaatgttacagaaacct

SEQ ID NO: 49219 - DNA, 80 bp, synthetic construct
  misc_feature 1..80: note = Artificially Synthesized Probe
  source 1..80: mol_type = other DNA
ctttctaaccgctggacctaagtcacacattcagagcttttaatattgtgactatgtgaagcaattgaacatgaaattct

SEQ ID NO: 49220 - DNA, 80 bp, synthetic construct; identical to SEQ ID NO: 23840
  misc_feature 1..80: note = Artificially Synthesized Probe
  source 1..80: mol_type = other DNA

SEQ ID NO: 49221 - DNA, 80 bp, synthetic construct
  misc_feature 1..80: note = Artificially Synthesized Probe
  source 1..80: mol_type = other DNA
ccactgaggaaccaactcatttttaaaactggtaaataatgagagaaaataaagcattttcctgcctttcttataagacc

SEQ ID NO: 49222 - DNA, 80 bp, synthetic construct
  misc_feature 1..80: note = Artificially Synthesized Probe
  source 1..80: mol_type = other DNA
tggctctaggcaataacaataatcaaatggctatgaccttcacaaaatgcgaccagcagccgttctgcatctcctggtgg

SEQ ID NO: 49223 - DNA, 80 bp, synthetic construct
  misc_feature 1..80: note = Artificially Synthesized Probe
  source 1..80: mol_type = other DNA
aaaggcagcacttgaagccaatagagggaagggtggactttttaataagtgatatttagacaactagacagtcataagga

SEQ ID NO: 49224 - DNA, 80 bp, synthetic construct
  misc_feature 1..80: note = Artificially Synthesized Probe
  source 1..80: mol_type = other DNA
agcccatcaaaatgggctttatttggatcactatccaaacaattaaaaaatatattagacacgagaaaagataaacacta

SEQ ID NO: 49225 - DNA, 80 bp, synthetic construct
  misc_feature 1..80: note = Artificially Synthesized Probe
  source 1..80: mol_type = other DNA
attcaagtagagctttctgcgtgatggaaatattaatatcttatatctgcactgtccaatctggcagccactagccatat

SEQ ID NO: 49226 - DNA, 80 bp, synthetic construct; identical to SEQ ID NO: 23841
  misc_feature 1..80: note = Artificially Synthesized Probe
  source 1..80: mol_type = other DNA

SEQ ID NO: 49227 - DNA, 80 bp, synthetic construct
  misc_feature 1..80: note = Artificially Synthesized Probe
  source 1..80: mol_type = other DNA
aattgaataaacttgaagacatacattaagtgagcagtaacacaaacagctgcttacatgagcgcgttgatcaaccgaca

SEQ ID NO: 49228 - DNA, 80 bp, synthetic construct
  misc_feature 1..80: note = Artificially Synthesized Probe
  source 1..80: mol_type = other DNA
ctcagggcagtctgggtgccgggcaggcctcctaccaagcgccagctctgccggggccactgctctgtctccctccctct

SEQ ID NO: 49229 - DNA, 80 bp, synthetic construct
  misc_feature 1..80: note = Artificially Synthesized Probe
  source 1..80: mol_type = other DNA
aggaagcggctgcaatgtctgacacagagaaacaacgcagcagaatcctctgccgctgtgagaagagaaccaggatgctg

SEQ ID NO: 49230 - DNA, 80 bp, synthetic construct; identical to SEQ ID NO: 23842
  misc_feature 1..80: note = Artificially Synthesized Probe
  source 1..80: mol_type = other DNA

SEQ ID NO: 49231 - DNA, 80 bp, synthetic construct
  misc_feature 1..80: note = Artificially Synthesized Probe
  source 1..80: mol_type = other DNA
tcaaaacaaacccagccaaattaaacaagcgtacagaagagcaataggaaagatgttctaaagggctacactctccagaa

SEQ ID NO: 49232 - DNA, 80 bp, synthetic construct
  misc_feature 1..80: note = Artificially Synthesized Probe
  source 1..80: mol_type = other DNA
aggactcaatttaggcaaataaaacctagtttattgtcgtctggctggggaaaagcacataaagactcattgatctggtt

SEQ ID NO: 49233 - DNA, 80 bp, synthetic construct; identical to SEQ ID NO: 23843
  misc_feature 1..80: note = Artificially Synthesized Probe
  source 1..80: mol_type = other DNA

SEQ ID NO: 49234 - DNA, 80 bp, synthetic construct
  misc_feature 1..80: note = Artificially Synthesized Probe
  source 1..80: mol_type = other DNA
tcacccctgccctctcccctccacaaacccctctactccccccatcctctcccctctactcaccccgtcctctcacctta

SEQ ID NO: 49235 - DNA, 80 bp, synthetic construct
  misc_feature 1..80: note = Artificially Synthesized Probe
  source 1..80: mol_type = other DNA
cccctactcacccctctactcacccctgctctctcccctccacaaacccctctactcacccgtcctctcccctctactta

SEQ ID NO: 49236 - DNA, 80 bp, synthetic construct
  misc_feature 1..80: note = Artificially Synthesized Probe
  source 1..80: mol_type = other DNA
tcagccctgcttttcccactctccagggtgatttctgcggagtctggagcacatccatcatgtctggcctgcagcctgta

SEQ ID NO: 49237 - DNA, 80 bp, synthetic construct
  misc_feature 1..80: note = Artificially Synthesized Probe
  source 1..80: mol_type = other DNA
tcacccctctactcacccctgccctctcccctctcctctctactcagccctgtcctctcccctctacttatacctgccat

SEQ ID NO: 49238 - DNA, 80 bp, synthetic construct
  misc_feature 1..80: note = Artificially Synthesized Probe
  source 1..80: mol_type = other DNA
ctgccaccccccccccgcttacccctctactcactcctaccacgtctgctctattcacccctgccctcttccatctactc

SEQ ID NO: 49239 - DNA, 80 bp, synthetic construct; identical to SEQ ID NO: 23844
  misc_feature 1..80: note = Artificially Synthesized Probe
  source 1..80: mol_type = other DNA

SEQ ID NO: 49240 - DNA, 80 bp, synthetic construct
  misc_feature 1..80: note = Artificially Synthesized Probe
  source 1..80: mol_type = other DNA
ctctgctctactcacccctctactcacccttgccctctcccctctactcgcccctgtcctttcccctctactcacccgtg

SEQ ID NO: 49241 - DNA, 80 bp, synthetic construct
  misc_feature 1..80: note = Artificially Synthesized Probe
  source 1..80: mol_type = other DNA
ctccctattcaccccgtcctctcccctctactcagccatgttctctcccctctactcacccctgccccctccgctctact

SEQ ID NO: 49242 - DNA, 80 bp, synthetic construct; identical to SEQ ID NO: 23845
  misc_feature 1..80: note = Artificially Synthesized Probe
  source 1..80: mol_type = other DNA

SEQ ID NO: 49243 - DNA, 80 bp, synthetic construct
  misc_feature 1..80: note = Artificially Synthesized Probe
  source 1..80: mol_type = other DNA
cctctactcacccctgtcctctcctctctactcatccctctacacaccctgccatcttccctctactcacccctgctatg

SEQ ID NO: 49244 - DNA, 80 bp, synthetic construct
  misc_feature 1..80: note = Artificially Synthesized Probe
  source 1..80: mol_type = other DNA
tctcctctactcacccctgtcctctgccctctactcaactctgtcctctcccctctactcacccgtcctctcccttctcc

SEQ ID NO: 49245 - DNA, 80 bp, synthetic construct
  misc_feature 1..80: note = Artificially Synthesized Probe
  source 1..80: mol_type = other DNA
tctgccctctactgacccctgttctctcccctctactcatccctctatacaccctgccatctcccctctactaacccctt

SEQ ID NO: 49246 - DNA, 80 bp, synthetic construct; identical to SEQ ID NO: 23846
  misc_feature 1..80: note = Artificially Synthesized Probe
  source 1..80: mol_type = other DNA

SEQ ID NO: 49247 - DNA, 80 bp, synthetic construct; identical to SEQ ID NO: 23830
  misc_feature 1..80: note = Artificially Synthesized Probe
  source 1..80: mol_type = other DNA

SEQ ID NO: 49248 - DNA, 80 bp, synthetic construct
  misc_feature 1..80: note = Artificially Synthesized Probe
  source 1..80: mol_type = other DNA
gctgtctcccctctactcacctctgccctctctcctctactcacccctctactccttcctgccatctcccctcaactcat

SEQ ID NO: 49249 - DNA, 80 bp, synthetic construct
  misc_feature 1..80: note = Artificially Synthesized Probe
  source 1..80: mol_type = other DNA
cttacccgtgtcctctcccctctacttacccgtgtcctctcccctctactcacccttgccctctcccttctgctcacccc

SEQ ID NO: 49250 - DNA, 80 bp, synthetic construct
  misc_feature 1..80: note = Artificially Synthesized Probe
  source 1..80: mol_type = other DNA
acccctaccctctcccctctactcacccctgccctctcccctctactcatcccttccctcgctcccatctcccctctact

SEQ ID NO: 49251 - DNA, 80 bp, synthetic construct; identical to SEQ ID NO: 23847
  misc_feature 1..80: note = Artificially Synthesized Probe
  source 1..80: mol_type = other DNA

SEQ ID NO: 49252 - DNA, 80 bp, synthetic construct
  misc_feature 1..80: note = Artificially Synthesized Probe
  source 1..80: mol_type = other DNA
ctctcccctctactcacctctgtcatctcccctctattcacccctctactagaccctatcctctccattctactcacccc

SEQ ID NO: 49253 - DNA, 80 bp, synthetic construct
  misc_feature 1..80: note = Artificially Synthesized Probe
  source 1..80: mol_type = other DNA
cagctcctactgctagccctactgcccagagtacttccaggtaccattcccagctttcaactttacttcattttcatcat

SEQ ID NO: 49254 - DNA, 80 bp, synthetic construct
  misc_feature 1..80: note = Artificially Synthesized Probe
  source 1..80: mol_type = other DNA
gacaaggaggagaagccccgggaggtcacgggagttcactgggtgtgggtacccagcgtccctgaggagattgcctggga

SEQ ID NO: 49255 - DNA, 80 bp, synthetic construct
  misc_feature 1..80: note = Artificially Synthesized Probe
  source 1..80: mol_type = other DNA
gaggcatgtccctgctcaatcccaccagccaaagaccactgagaacatacctatgtttttcctaacaaaatcatgttcct

SEQ ID NO: 49256 - DNA, 80 bp, synthetic construct; identical to SEQ ID NO: 23848
  misc_feature 1..80: note = Artificially Synthesized Probe
  source 1..80: mol_type = other DNA

SEQ ID NO: 49257 - DNA, 80 bp, synthetic construct
  misc_feature 1..80: note = Artificially Synthesized Probe
  source 1..80: mol_type = other DNA
cccgtgtcctcacacaggcttccctctgtacatctgtgtccaaacttcctcttctcagaagggcaccaggcatcttggag

SEQ ID NO: 49258 - DNA, 80 bp, synthetic construct
  misc_feature 1..80: note = Artificially Synthesized Probe
  source 1..80: mol_type = other DNA
atccatctgggctgcaagggagagccatcttagaacagtccagggccttaacgcctgtcaaatctaagaggcagccattc

SEQ ID NO: 49259 - DNA, 80 bp, synthetic construct
  misc_feature 1..80: note = Artificially Synthesized Probe
  source 1..80: mol_type = other DNA
agaaactgaggccacagttagtgttccagccaggatcaattcagtgttgtttctacccctaaaatactgtttaaaaactt

SEQ ID NO: 49260 - DNA, 80 bp, synthetic construct; identical to SEQ ID NO: 23849
  misc_feature 1..80: note = Artificially Synthesized Probe
  source 1..80: mol_type = other DNA

SEQ ID NO: 49261 - DNA, 80 bp, synthetic construct
  misc_feature 1..80: note = Artificially Synthesized Probe
  source 1..80: mol_type = other DNA
gatttctcattgtctttttcagtgattttaatactcagaaaaatgtgctgagcagtcagcactcaaggcagaatgacttt

SEQ ID NO: 49262 - DNA, 80 bp, synthetic construct
  misc_feature 1..80: note = Artificially Synthesized Probe
  source 1..80: mol_type = other DNA
accaccacctagcccagtggtaggggccaagatgccagtctccacggagtgaggcacggctctgttaaatcccaccagcc

SEQ ID NO: 49263 - DNA, 80 bp, synthetic construct
  misc_feature 1..80: note = Artificially Synthesized Probe
  source 1..80: mol_type = other DNA
agaaaggcttgttctgcatttgatgctgtcaggaagtaggggcagtttgatgattggggatcttaataatctttacacaa

SEQ ID NO: 49264 - DNA, 80 bp, synthetic construct; identical to SEQ ID NO: 23850
  misc_feature 1..80: note = Artificially Synthesized Probe
  source 1..80: mol_type = other DNA

SEQ ID NO: 49265 - DNA, 80 bp, synthetic construct
  misc_feature 1..80: note = Artificially Synthesized Probe
  source 1..80: mol_type = other DNA
ctgggggctgagaggtaattgtttgggctgtgctgtgactttaggagcagggcccactctgtgcctctcacgtgctgagc

SEQ ID NO: 49266 - DNA, 80 bp, synthetic construct
  misc_feature 1..80: note = Artificially Synthesized Probe
  source 1..80: mol_type = other DNA
aagagtccatttccttatctacacattaagggagaataatccctgtttcataggattgctgtggggatgctggctggaga

SEQ ID NO: 49267 - DNA, 80 bp, synthetic construct
  misc_feature 1..80: note = Artificially Synthesized Probe
  source 1..80: mol_type = other DNA
aaatcaacaaatggaagtgccccacaaagtaatcagttaataagaggcagctatgttggtttcccagggctaccataaca

SEQ ID NO: 49268 - DNA, 80 bp, synthetic construct; identical to SEQ ID NO: 23851
  misc_feature 1..80: note = Artificially Synthesized Probe
  source 1..80: mol_type = other DNA

SEQ ID NO: 49269 - DNA, 80 bp, synthetic construct
  misc_feature 1..80: note = Artificially Synthesized Probe
  source 1..80: mol_type = other DNA
tccataacactggctattgttcttttcacattatagtcctgattcccaacattttgtcctgttttgtcaactgtcattta

SEQ ID NO: 49270 - DNA, 80 bp, synthetic construct
  misc_feature 1..80: note = Artificially Synthesized Probe
  source 1..80: mol_type = other DNA
ttaaaaagtagggccacaaaacttagtttatactcaatagatactgacttgttctggctccagatagctacaagagcctt

SEQ ID NO: 49271 - DNA, 80 bp, synthetic construct
  misc_feature 1..80: note = Artificially Synthesized Probe
  source 1..80: mol_type = other DNA
gatcaagaccatcctggcctacgtggtgaaaacccgcctctactaaaaatacaaaaattagctgggtgtggtggtgcgca

SEQ ID NO: 49272 - DNA, 80 bp, synthetic construct
  misc_feature 1..80: note = Artificially Synthesized Probe
  source 1..80: mol_type = other DNA
tcaaactacttgggctattggggtccagaaaggaaagctgtacagagagtccaagagaatgctgttcatatagtagaaac

SEQ ID NO: 49273 - DNA, 80 bp, synthetic construct
  misc_feature 1..80: note = Artificially Synthesized Probe
  source 1..80: mol_type = other DNA
tagatgagatggatcgtttccctggacatgcagaaacctggtgccactgactcctacctctctcttcacttctgtgtacc

SEQ ID NO: 49274 - DNA, 80 bp, synthetic construct; identical to SEQ ID NO: 23852
  misc_feature 1..80: note = Artificially Synthesized Probe
  source 1..80: mol_type = other DNA

SEQ ID NO: 49275 - DNA, 80 bp, synthetic construct
  misc_feature 1..80: note = Artificially Synthesized Probe
  source 1..80: mol_type = other DNA
ccaagttcacaaaagcccagattaaaccaatgaacagctggaatttctaacttggacagccccaggattgtgcctgccta

SEQ ID NO: 49276 - DNA, 80 bp, synthetic construct
  misc_feature 1..80: note = Artificially Synthesized Probe
  source 1..80: mol_type = other DNA
gccaggcacaaagaaagaagagaaggaagtcaggaaggcaataaggaaagtaggaaggatggaagaggaaggaagaaagg

SEQ ID NO: 49277 - DNA, 80 bp, synthetic construct; identical to SEQ ID NO: 23853
  misc_feature 1..80: note = Artificially Synthesized Probe
  source 1..80: mol_type = other DNA

SEQ ID NO: 49278 - DNA, 80 bp, synthetic construct
  misc_feature 1..80: note = Artificially Synthesized Probe
  source 1..80: mol_type = other DNA
aatgagcatttgcacaacgttacacagggatggtcccgctgactcaggagcattccactttgtggcagcgatctcagagt

SEQ ID NO: 49279 - DNA, 80 bp, synthetic construct
  misc_feature 1..80: note = Artificially Synthesized Probe
  source 1..80: mol_type = other DNA
ttacatacctagtcactcagcggcaaaatgttctttgtgtcaagccctggactcctataatcacctcctgactgccaaag

SEQ ID NO: 49280 - DNA, 80 bp, synthetic construct
  misc_feature 1..80: note = Artificially Synthesized Probe
  source 1..80: mol_type = other DNA
cattttcccctgagactttgcatatatcgaccagctagtctgtttctattctcttctgctttttttttttgcgggggcgg

SEQ ID NO: 49281 - DNA, 80 bp, synthetic construct
  misc_feature 1..80: note = Artificially Synthesized Probe
  source 1..80: mol_type = other DNA
gccacacaccaagacatgcgacctctgtagttgagggtcaggatcccacatgggctcactttcctcttaagtgactataa

SEQ ID NO: 49282 - DNA, 80 bp, synthetic construct
  misc_feature 1..80: note = Artificially Synthesized Probe
  source 1..80: mol_type = other DNA
tgacccgccgggccctcggcatcagcagtgtcttccttcagggcctgcggagctcaggcctggccaccgtgccggctcca

SEQ ID NO: 49283 - DNA, 80 bp, synthetic construct
  misc_feature 1..80: note = Artificially Synthesized Probe
  source 1..80: mol_type = other DNA
tttttttttttttttttttttgtatttttagtagagatggagtttcgccttcttggtcagtctggtctcgaactcctgac

SEQ ID NO: 49284 - DNA, 80 bp, synthetic construct; identical to SEQ ID NO: 23854
  misc_feature 1..80: note = Artificially Synthesized Probe
  source 1..80: mol_type = other DNA

SEQ ID NO: 49285 - DNA, 80 bp, synthetic construct
  misc_feature 1..80: note = Artificially Synthesized Probe
  source 1..80: mol_type = other DNA
tctcggctcagttcaacctctgcctcctggattcaagcaattctcatgcctcagcctctcaagtagcagggattacaggt

SEQ ID NO: 49286 - DNA, 80 bp, synthetic construct
  misc_feature 1..80: note = Artificially Synthesized Probe
  source 1..80: mol_type = other DNA
gatccctttgaaatttaaaggagaatgaaatcagtgggaaaaggctttgttagtgtcacagataaggctacaactcctta

SEQ ID NO: 49287 - DNA, 80 bp, synthetic construct; identical to SEQ ID NO: 23855
  misc_feature 1..80: note = Artificially Synthesized Probe
  source 1..80: mol_type = other DNA

SEQ ID NO: 49288 - DNA, 80 bp, synthetic construct
  misc_feature 1..80: note = Artificially Synthesized Probe
  source 1..80: mol_type = other DNA
gcacgtgatggatgtcaaccgtaggtcaaacaggaaggactcacgaagtacagttacaaatgcagctttggtttgatagg

SEQ ID NO: 49289 - DNA, 80 bp, synthetic construct
  misc_feature 1..80: note = Artificially Synthesized Probe
  source 1..80: mol_type = other DNA
atagaatgtccagttgatatattattcaacatatcaaccctcactttctcccctgcccaggtagggccaagcacctagca

SEQ ID NO: 49290 - DNA, 80 bp, synthetic construct
  misc_feature 1..80: note = Artificially Synthesized Probe
  source 1..80: mol_type = other DNA
ataaagaagggaagggaaataaagaagggaaaggaagggaagggaagggaaataaagaagggaagggaaggcaagggaaa

SEQ ID NO: 49291 - DNA, 80 bp, synthetic construct; identical to SEQ ID NO: 23856
  misc_feature 1..80: note = Artificially Synthesized Probe
  source 1..80: mol_type = other DNA

SEQ ID NO: 49292 - DNA, 80 bp, synthetic construct
  misc_feature 1..80: note = Artificially Synthesized Probe
  source 1..80: mol_type = other DNA
ccctcgcaggctgccctcccaaatgccccctgctgacgtgcctgtcaagggctccacacctcccaaagatggaagcacct

SEQ ID NO: 49293 - DNA, 80 bp, synthetic construct
  misc_feature 1..80: note = Artificially Synthesized Probe
  source 1..80: mol_type = other DNA
tcccttttctacaaatagacttttagagaattacacaatcactaagtgacaaagatgaggtttgagccctgtctctccaa

SEQ ID NO: 49294 - DNA, 80 bp, synthetic construct
  misc_feature 1..80: note = Artificially Synthesized Probe
  source 1..80: mol_type = other DNA
tgcgatctcaactcactgtaacctccacctcccgggttcaagcaattctcctgcctcagcgtcctgagtagctgggatta

SEQ ID NO: 49295 - DNA, 80 bp, synthetic construct
  misc_feature 1..80: note = Artificially Synthesized Probe
  source 1..80: mol_type = other DNA
ccaagagctcttcacattctaaaactctataataaaatttctgagttgaggaagcctagaagcacatggcagagaattct

SEQ ID NO: 49296 - DNA, 80 bp, synthetic construct
  misc_feature 1..80: note = Artificially Synthesized Probe
  source 1..80: mol_type = other DNA
atgacatagcttcatgtccagtactgagtgggagatggaaagcatgcatttgcttcctttccagacaggctggctcattt

SEQ ID NO: 49297 - DNA, 80 bp, synthetic construct; identical to SEQ ID NO: 23857
  misc_feature 1..80: note = Artificially Synthesized Probe
  source 1..80: mol_type = other DNA

SEQ ID NO: 49298 - DNA, 80 bp, synthetic construct
  misc_feature 1..80: note = Artificially Synthesized Probe
  source 1..80: mol_type = other DNA
aaagaaactgaagctcagcagtgataaatacgatgtctggtgaaaagcagagccaggacttgaaccttggtttcccaatc

SEQ ID NO: 49299 - DNA, 80 bp, synthetic construct
  misc_feature 1..80: note = Artificially Synthesized Probe
  source 1..80: mol_type = other DNA
gtaaggttgaggattctttcatgattcttccagtaggacatcagacacatccatcctggcaacaacacactaaactgtcc

SEQ ID NO: 49300 - DNA, 80 bp, synthetic construct
  misc_feature 1..80: note = Artificially Synthesized Probe
  source 1..80: mol_type = other DNA
attgagcacatactatatgccagaatttgttctgagggttttgcacatcttaaatcatttaacctcacaaaaaccctatg

SEQ ID NO: 49301 - DNA, 80 bp, synthetic construct; identical to SEQ ID NO: 23858
  misc_feature 1..80: note = Artificially Synthesized Probe
  source 1..80: mol_type = other DNA

SEQ ID NO: 49302 - DNA, 80 bp, synthetic construct
  misc_feature 1..80: note = Artificially Synthesized Probe
  source 1..80: mol_type = other DNA
tgggctttcatgcccccagctgtcagacagagccagtaagtcaagctctggggccctagggcactgctccacaaatgagc

SEQ ID NO: 49303 - DNA, 80 bp, synthetic construct
  misc_feature 1..80: note = Artificially Synthesized Probe
  source 1..80: mol_type = other DNA
acaggtcccacgcgaatttctgaggaacttagattcctctgatgttggcaagtgcccaggaaatatcttgtcagaggaaa

SEQ ID NO: 49304 - DNA, 80 bp, synthetic construct
  misc_feature 1..80: note = Artificially Synthesized Probe
  source 1..80: mol_type = other DNA
cctaaggccacacttccataccgcctgccctcgctctgacctgccttctccatcaaacttgtcccagccagtctctccct

SEQ ID NO: 49305 - DNA, 80 bp, synthetic construct; identical to SEQ ID NO: 23831
  misc_feature 1..80: note = Artificially Synthesized Probe
  source 1..80: mol_type = other DNA

SEQ ID NO: 49306 - DNA, 80 bp, synthetic construct; identical to SEQ ID NO: 23859
  misc_feature 1..80: note = Artificially Synthesized Probe
  source 1..80: mol_type = other DNA

SEQ ID NO: 49307 - DNA, 80 bp, synthetic construct
  misc_feature 1..80: note = Artificially Synthesized Probe
  source 1..80: mol_type = other DNA
ataaaacctttcctaggactattttgcattattttaaactttatgttaaattgtgttatactgtgtattagtcagggttc

SEQ ID NO: 49308 - DNA, 80 bp, synthetic construct
  misc_feature 1..80: note = Artificially Synthesized Probe
  source 1..80: mol_type = other DNA
ggtggaatcctattttctcaggggacctcagtctttgctctgttaaatcccgcaactgattggatgagaatacccacatt

SEQ ID NO: 49309 - DNA, 80 bp, synthetic construct; identical to SEQ ID NO: 23860
  misc_feature 1..80: note = Artificially Synthesized Probe
  source 1..80: mol_type = other DNA

SEQ ID NO: 49310 - DNA, 80 bp, synthetic construct
  misc_feature 1..80: note = Artificially Synthesized Probe
  source 1..80: mol_type = other DNA
cgtcatttagcattaggtatatctcctaatgctatccctccccactacccccaccccacaacagtccccggtgcgtgatg

SEQ ID NO: 49311 - DNA, 80 bp, synthetic construct
  misc_feature 1..80: note = Artificially Synthesized Probe
  source 1..80: mol_type = other DNA
ctgcatagtattccatagtgtatatgtgccacattttcttaatccagtctatcattgttggacatttgggttggttccaa

SEQ ID NO: 49312 - DNA, 80 bp, synthetic construct
  misc_feature 1..80: note = Artificially Synthesized Probe
  source 1..80: mol_type = other DNA
acaacggttgaactagtttacagtcccaccaacagtgtaaaagtgttcctatttctccacatcctctccagcacctgttg

SEQ ID NO: 49313 - DNA, 80 bp, synthetic construct
  misc_feature 1..80: note = Artificially Synthesized Probe
  source 1..80: mol_type = other DNA
ccaccctacaagatctaaataattcttgtcataaaatgggcaaatggtctgaggtgcctgacgtccaggcattcttttac

SEQ ID NO: 49314 - DNA, 80 bp, synthetic construct; identical to SEQ ID NO: 23861
  misc_feature 1..80: note = Artificially Synthesized Probe
  source 1..80: mol_type = other DNA

SEQ ID NO: 49315 - DNA, 80 bp, synthetic construct
  misc_feature 1..80: note = Artificially Synthesized Probe
  source 1..80: mol_type = other DNA
cagtccttccacaacacgctgccttcatctcacttggggtcagaggcagccactctgcggtcctgggccccagaaatcca

SEQ ID NO: 49316 - DNA, 80 bp, synthetic construct
  misc_feature 1..80: note = Artificially Synthesized Probe
  source 1..80: mol_type = other DNA
aacccagcccagttcatggttcgttcggcagcaaccctgagacgctttacagccctagaccctaaaaggtcaaaaggccg

SEQ ID NO: 49317 - DNA, 80 bp, synthetic construct
  misc_feature 1..80: note = Artificially Synthesized Probe
  source 1..80: mol_type = other DNA
tgagacaaatcccagccacatctccagcacacaagaacttccaaacacctgaaccgcagcagccaggcgttcctccagaa

SEQ ID NO: 49318 - DNA, 80 bp, synthetic construct; identical to SEQ ID NO: 23862
  misc_feature 1..80: note = Artificially Synthesized Probe
  source 1..80: mol_type = other DNA

SEQ ID NO: 49319 - DNA, 80 bp, synthetic construct
  misc_feature 1..80: note = Artificially Synthesized Probe
  source 1..80: mol_type = other DNA
cttctaaacctcttaaaactccccaactctggtgccaacttagacaatacccttttaagcactcctttttagttatcccc

SEQ ID NO: 49320 - DNA, 80 bp, synthetic construct
  misc_feature 1..80: note = Artificially Synthesized Probe
  source 1..80: mol_type = other DNA
catctctactccttccctggcaaccgatcacatgcccatcaccatcccattaaaacctaatcacccttacccctctcaac

SEQ ID NO: 49321 - DNA, 80 bp, synthetic construct
  misc_feature 1..80: note = Artificially Synthesized Probe
  source 1..80: mol_type = other DNA
ccttatcaaccaaattgttttgcctatccgccctgtggtgcccaaccggtacaccctttcgtcctcaataccttcctcca

SEQ ID NO: 49322 - DNA, 80 bp, synthetic construct
  misc_feature 1..80: note = Artificially Synthesized Probe
  source 1..80: mol_type = other DNA
tcattacttcagccaagctctttctcatgatttactttctttccacccctctgcttctcaccttattcaatatattgatg

SEQ ID NO: 49323 - DNA, 80 bp, synthetic construct; identical to SEQ ID NO: 23863
  misc_feature 1..80: note = Artificially Synthesized Probe
  source 1..80: mol_type = other DNA

SEQ ID NO: 49324 - DNA, 80 bp, synthetic construct
  misc_feature 1..80: note = Artificially Synthesized Probe
  source 1..80: mol_type = other DNA
ctatgctcaactcactctctacatttctcataacttccaaaatcgattttcttcctcatacctgacacatatactttctg

SEQ ID NO: 49325 - DNA, 80 bp, synthetic construct
  misc_feature 1..80: note = Artificially Synthesized Probe
  source 1..80: mol_type = other DNA
atatttgcttctttcctgttcctcaccctgatcacacttagttttttgatggcagttccaccaggcctaatcgccacaca

SEQ ID NO: 49326 - DNA, 80 bp, synthetic construct
  misc_feature 1..80: note = Artificially Synthesized Probe
  source 1..80: mol_type = other DNA
ctcctggtcctgcagctcagttccatggcaaccctctgtgactcctcagggcccatgcagggcctgaggcctcagagcaa

SEQ ID NO: 49327 - DNA, 80 bp, synthetic construct
  misc_feature 1..80: note = Artificially Synthesized Probe
  source 1..80: mol_type = other DNA
tcctacacatcaagctcgaggatttgcccccacccaggactggcaaattagctttactcaaagccccgagtcagataact

SEQ ID NO: 49328 - DNA, 80 bp, synthetic construct; identical to SEQ ID NO: 23864
  misc_feature 1..80: note = Artificially Synthesized Probe
  source 1..80: mol_type = other DNA

SEQ ID NO: 49329 - DNA, 80 bp, synthetic construct
  misc_feature 1..80: note = Artificially Synthesized Probe
  source 1..80: mol_type = other DNA
ccaacttagactgtgccccaaaaaacttgtcatccctatcttctgtctaatcatactcctattcaccgttctcaactact

SEQ ID NO: 49330 - DNA, 80 bp, synthetic construct
  misc_feature 1..80: note = Artificially Synthesized Probe
  source 1..80: mol_type = other DNA
actaatcagatgtcctaggtcctgccaattcttagaccttttatacctgtttttctccttctcttattccatttagtttt

SEQ ID NO: 49331 - DNA, 80 bp, synthetic construct; identical to SEQ ID NO: 23865
  misc_feature 1..80: note = Artificially Synthesized Probe
  source 1..80: mol_type = other DNA

SEQ ID NO: 49332 - DNA, 80 bp, synthetic construct
  misc_feature 1..80: note = Artificially Synthesized Probe
  source 1..80: mol_type = other DNA
tattccaccacaaaacaagtgtaaatggccggtccttgccttaagtgatgacattaccttgtgaaagtccttttcctggc

SEQ ID NO: 49333 - DNA, 80 bp, synthetic construct
  misc_feature 1..80: note = Artificially Synthesized Probe
  source 1..80: mol_type = other DNA
ccacctgcacccaggtgaaataaacagctccatcaagttcaagacacttttgtaagcaatgatagcagccatttagttca

SEQ ID NO: 49334 - DNA, 80 bp, synthetic construct
  misc_feature 1..80: note = Artificially Synthesized Probe
  source 1..80: mol_type = other DNA
gattttctactgaaactcttgcaaaattgccattattcaataagaggaatgggcagaagcatttgtcatgatggaggact

SEQ ID NO: 49335 - DNA, 80 bp, synthetic construct
  misc_feature 1..80: note = Artificially Synthesized Probe
  source 1..80: mol_type = other DNA
tgagcatcacaaactgttgccatgacctttgctcttgacctgtctctctttgctatgaccggaccccttccatcatttgc

SEQ ID NO: 49336 - DNA, 80 bp, synthetic construct; identical to SEQ ID NO: 23866
  misc_feature 1..80: note = Artificially Synthesized Probe
  source 1..80: mol_type = other DNA

SEQ ID NO: 49337 - DNA, 80 bp, synthetic construct; identical to SEQ ID NO: 23832
  misc_feature 1..80: note = Artificially Synthesized Probe
  source 1..80: mol_type = other DNA

SEQ ID NO: 49338 - DNA, 80 bp, synthetic construct
  misc_feature 1..80: note = Artificially Synthesized Probe
  source 1..80: mol_type = other DNA
ccttgcaaattgtctgctgctatggccttcgtcttcaacatcattttattctttcttaaatgaattatccatttgtaaac

SEQ ID NO: 49339 - DNA, 80 bp, synthetic construct
  misc_feature 1..80: note = Artificially Synthesized Probe
  source 1..80: mol_type = other DNA
cttatacttcttagtgcctcttatatctgattctgaactattctgttcagatataagaacttagtatgagtttattttgg

SEQ ID NO: 49340 - DNA, 80 bp, synthetic construct
  misc_feature 1..80: note = Artificially Synthesized Probe
  source 1..80: mol_type = other DNA
tagactgaggcacaagaataccttgaacccaggaggtggagcttgcagtgagccaagttctctttgctgcactccagcca

SEQ ID NO: 49341 - DNA, 80 bp, synthetic construct; identical to SEQ ID NO: 23867
  misc_feature 1..80: note = Artificially Synthesized Probe
  source 1..80: mol_type = other DNA

SEQ ID NO: 49342 - DNA, 80 bp, synthetic construct
  misc_feature 1..80: note = Artificially Synthesized Probe
  source 1..80: mol_type = other DNA
acccattaacttgtcatttacattaggtatatctcctaatgctatccctccccgcttcccccaccccactacaggccctg

SEQ ID NO: 49343 - DNA, 80 bp, synthetic construct
  misc_feature 1..80: note = Artificially Synthesized Probe
  source 1..80: mol_type = other DNA
ttttttatggctgcatagtattccatagtgtatatgtgccacattttcttaatccagtctatcattgttggacatttggg

SEQ ID NO: 49344 - DNA, 80 bp, synthetic construct; identical to SEQ ID NO: 23868
  misc_feature 1..80: note = Artificially Synthesized Probe
  source 1..80: mol_type = other DNA

SEQ ID NO: 49345 - DNA, 80 bp, synthetic construct
  misc_feature 1..80: note = Artificially Synthesized Probe
  source 1..80: mol_type = other DNA
gctgaggcaggagaattgcttgaacccaggaggtggaggttgcggcgagccgagatcacgccattgcactccagcctggg

SEQ ID NO: 49346 - DNA, 80 bp, synthetic construct
  misc_feature 1..80: note = Artificially Synthesized Probe
  source 1..80: mol_type = other DNA
aaagaaagaaagaaaaagaaagaaaaaggaactgagctatttaacattagaaccatgattcaaacatgggggtaatggaa

SEQ ID NO: 49347 - DNA, 80 bp, synthetic construct
  misc_feature 1..80: note = Artificially Synthesized Probe
  source 1..80: mol_type = other DNA
catcgtaattcttagcagaaaggacctatatttcacagaagcatcagcagagtagcatagtaattaaactgattttttgt

SEQ ID NO: 49348 - DNA, 80 bp, synthetic construct
  misc_feature 1..80: note = Artificially Synthesized Probe
  source 1..80: mol_type = other DNA
ccaggaagaggagccaggaggagggaaacaattgctgtcactgtgcagagagtcacatcatggaaagcaacacgaaacta

SEQ ID NO: 49349 - DNA, 80 bp, synthetic construct
  misc_feature 1..80: note = Artificially Synthesized Probe
  source 1..80: mol_type = other DNA
aacagccagtaaagggaaagggaggtggagggtgagtaagttaaatattcatttgtcagctagaagtcagtaaacgatgt

SEQ ID NO: 49350 - DNA, 80 bp, synthetic construct
  misc_feature 1..80: note = Artificially Synthesized Probe
  source 1..80: mol_type = other DNA
acatggtgaaaccccatctctactaaaaatacaaaattacaaaaattagctgggtgtggtggcacatgcctttaatccca

SEQ ID NO: 49351 - DNA, 80 bp, synthetic construct; identical to SEQ ID NO: 23869
  misc_feature 1..80: note = Artificially Synthesized Probe
  source 1..80: mol_type = other DNA

SEQ ID NO: 49352 - DNA, 80 bp, synthetic construct
  misc_feature 1..80: note = Artificially Synthesized Probe
  source 1..80: mol_type = other DNA
ttagccatgatacttcaattgctgaagtggagggatgggggggtcattattctagactctttctacctttatatatagtt

SEQ ID NO: 49353 - DNA, 80 bp, synthetic construct
  misc_feature 1..80: note = Artificially Synthesized Probe
  source 1..80: mol_type = other DNA
taaactctctgagactgagtttcctcatcacataatggaagtaactgctgttcacccacttagtgtgaccacttacttca

SEQ ID NO: 49354 - DNA, 80 bp, synthetic construct
  misc_feature 1..80: note = Artificially Synthesized Probe
  source 1..80: mol_type = other DNA
agaaggtttggctgtaaaatgtgaattctgcttctcaggcatcttatatttgttctgtacctctattttctgccttatgt

SEQ ID NO: 49355 - DNA, 80 bp, synthetic construct; identical to SEQ ID NO: 23870
  misc_feature 1..80: note = Artificially Synthesized Probe
  source 1..80: mol_type = other DNA

SEQ ID NO: 49356 - DNA, 80 bp, synthetic construct
  misc_feature 1..80: note = Artificially Synthesized Probe
  source 1..80: mol_type = other DNA
ctcagttcatggttggggagtgagggaaaaataaaactagactgaagagcaaggtccaaattgtgccccaggctacagac

SEQ ID NO: 49357 - DNA, 80 bp, synthetic construct
  misc_feature 1..80: note = Artificially Synthesized Probe
  source 1..80: mol_type = other DNA
agagaaagcaatgtcacagagggagtataagtccattttcctactgctgtgaagaaatacctgagactgggtaattcata

SEQ ID NO: 49358 - DNA, 80 bp, synthetic construct
  misc_feature 1..80: note = Artificially Synthesized Probe
  source 1..80: mol_type = other DNA
cttactatcttactatcatgagaatagcacgggaaaacctacccccatgattcaatgattcaattatctcccaccaggtc

SEQ ID NO: 49359 - DNA, 80 bp, synthetic construct; identical to SEQ ID NO: 23871
  misc_feature 1..80: note = Artificially Synthesized Probe
  source 1..80: mol_type = other DNA

SEQ ID NO: 49360 - DNA, 80 bp, synthetic construct
  misc_feature 1..80: note = Artificially Synthesized Probe
  source 1..80: mol_type = other DNA
gatgccatcagagatcactgcaacctcaagctcctggcctcaagagatcctcttgccttggcctcccaaagggcttggat

SEQ ID NO: 49361 - DNA, 80 bp, synthetic construct
  misc_feature 1..80: note = Artificially Synthesized Probe
  source 1..80: mol_type = other DNA
agggaaagaggagcctaaaacactttgtcctcagcatgacagacttctaggggccaaggtgatcctgtttgcccaacaat

SEQ ID NO: 49362 - DNA, 80 bp, synthetic construct
  misc_feature 1..80: note = Artificially Synthesized Probe
  source 1..80: mol_type = other DNA
ccttagccctcagatgtctctcattctccttggacacccagtggctgtgactgtgcttgtgagtgaactgtctcaagaga

SEQ ID NO: 49363 - DNA, 80 bp, synthetic construct
  misc_feature 1..80: note = Artificially Synthesized Probe
  source 1..80: mol_type = other DNA
gcaattctcctgcctcaacctcctgagtagctgggattacaggcacacccacgccgggctaatttttgtatttttagtag

SEQ ID NO: 49364 - DNA, 80 bp, synthetic construct; identical to SEQ ID NO: 23872
  misc_feature 1..80: note = Artificially Synthesized Probe
  source 1..80: mol_type = other DNA

SEQ ID NO: 49365 - DNA, 80 bp, synthetic construct
  misc_feature 1..80: note = Artificially Synthesized Probe
  source 1..80: mol_type = other DNA
gcttgggttctccataaagaggtagcactactgctgggctcattaattcaactaatacctgctgtaccagacactgtgct

SEQ ID NO: 49366 - DNA, 80 bp, synthetic construct
  misc_feature 1..80: note = Artificially Synthesized Probe
  source 1..80: mol_type = other DNA
agtgttttaaagaaaactaacaaagcagaaaggggcagagtaaagggaagcactgctcgcagtaaggtgaccagaatgag

SEQ ID NO: 49367 - DNA, 80 bp, synthetic construct; identical to SEQ ID NO: 23873
  misc_feature 1..80: note = Artificially Synthesized Probe
  source 1..80: mol_type = other DNA

SEQ ID NO: 49368 - DNA, 80 bp, synthetic construct
  misc_feature 1..80: note = Artificially Synthesized Probe
  source 1..80: mol_type = other DNA
gataaattctgtttttttgttttgttttgttttttggagagatagggttttgctatgttgcccaggctggtctcaaactt

SEQ ID NO: 49369 - DNA, 80 bp, synthetic construct
  misc_feature 1..80: note = Artificially Synthesized Probe
  source 1..80: mol_type = other DNA
gaatgcattggaggagggaggtacagatcagggagttggaaggatattacaatgggatattataatgggataggagagca

SEQ ID NO: 49370 - DNA, 80 bp, synthetic construct
  misc_feature 1..80: note = Artificially Synthesized Probe
  source 1..80: mol_type = other DNA
cattggggttgtttactgagatgaagaggatcaaggggtggtggggaaagggaagatttgtggggaaattatctagattt

SEQ ID NO: 49371 - DNA, 80 bp, synthetic construct
  misc_feature 1..80: note = Artificially Synthesized Probe
  source 1..80: mol_type = other DNA
tgggagccccttctgacacctgctccaagcccctgggtggcagcaactggagggagaggacaagcctcttgctcaccccc

SEQ ID NO: 49372 - DNA, 80 bp, synthetic construct
  misc_feature 1..80: note = Artificially Synthesized Probe
  source 1..80: mol_type = other DNA
ctaattttttgtatttttagtagaggcaggggtttcactatgttggccaggctggtctggaacaactgacctcaggtaat

SEQ ID NO: 49373 - DNA, 80 bp, synthetic construct; identical to SEQ ID NO: 23874
  misc_feature 1..80: note = Artificially Synthesized Probe
  source 1..80: mol_type = other DNA

SEQ ID NO: 49374 - DNA, 80 bp, synthetic construct
  misc_feature 1..80: note = Artificially Synthesized Probe
  source 1..80: mol_type = other DNA
gtcaatgaagtaggaggaagtccagagagagtggtgtcatggaagccgagacagaaaagtacatctgtgacaaatgcaac

SEQ ID NO: 49375 - DNA, 80 bp, synthetic construct
  misc_feature 1..80: note = Artificially Synthesized Probe
  source 1..80: mol_type = other DNA
agtcaaataaatgtgggaagggtttccaagggaatcttgcatcttgccactgcaccagctgagtttaatttcccaggagc

SEQ ID NO: 49376 - DNA, 80 bp, synthetic construct
  misc_feature 1..80: note = Artificially Synthesized Probe
  source 1..80: mol_type = other DNA
tctctcatccaccaccaccagctcatttattttaataactacatccgcagtgaaaacaggagtagtattatagaaagaga

SEQ ID NO: 49377 - DNA, 80 bp, synthetic construct; identical to SEQ ID NO: 23875
  misc_feature 1..80: note = Artificially Synthesized Probe
  source 1..80: mol_type = other DNA

SEQ ID NO: 49378 - DNA, 80 bp, synthetic construct
  misc_feature 1..80: note = Artificially Synthesized Probe
  source 1..80: mol_type = other DNA
cttagaattacttactctaagcaactgacccatgcttgtgaatggaggagccagtttccagaataagaaaacactgtcgt

SEQ ID NO: 49379 - DNA, 80 bp, synthetic construct
  misc_feature 1..80: note = Artificially Synthesized Probe
  source 1..80: mol_type = other DNA
ctaattgttttccctcactctccccataactactgcaccacaaagaaccgactgttctatcccccaaatgcatcttaaac

SEQ ID NO: 49380 - DNA, 80 bp, synthetic construct; identical to SEQ ID NO: 23876
  misc_feature 1..80: note = Artificially Synthesized Probe
  source 1..80: mol_type = other DNA

SEQ ID NO: 49381 - DNA, 80 bp, synthetic construct
  misc_feature 1..80: note = Artificially Synthesized Probe
  source 1..80: mol_type = other DNA
gaagaaattaaggcaagaatgaatgagtgaataaatagaaaagtttcatggggaagccgtgtttgaaatgagcattatac

SEQ ID NO: 49382 - DNA, 80 bp, synthetic construct; identical to SEQ ID NO: 23833
  misc_feature 1..80: note = Artificially Synthesized Probe
  source 1..80: mol_type = other DNA

SEQ ID NO: 49383 - DNA, 80 bp, synthetic construct
  misc_feature 1..80: note = Artificially Synthesized Probe
  source 1..80: mol_type = other DNA
caaggttgagtatgcatcataagcccctggaaagcttgctgagacacaaattgttgggacccacctgcagagattctgat

SEQ ID NO: 49384 - DNA, 80 bp, synthetic construct
  misc_feature 1..80: note = Artificially Synthesized Probe
  source 1..80: mol_type = other DNA
gatcaaaatattttttaaaaaatagatgattgcgtttatactgaacatgtgggcttttttcttgtcattattttctaaat

SEQ ID NO: 49385 - DNA, 80 bp, synthetic construct; identical to SEQ ID NO: 23877
  misc_feature 1..80: note = Artificially Synthesized Probe
  source 1..80: mol_type = other DNA

SEQ ID NO: 49386 - DNA, 80 bp, synthetic construct
  misc_feature 1..80: note = Artificially Synthesized Probe
  source 1..80: mol_type = other DNA
ctgcctgctccccagtgtgccccaggccaagctggaacagaaatgattagctttgctagtggggaattcaatgaaaatgg

SEQ ID NO: 49387 - DNA, 80 bp, synthetic construct
  misc_feature 1..80: note = Artificially Synthesized Probe
  source 1..80: mol_type = other DNA
aaatacaaaaattagctgggcgcagtggcacatgcctgtaatcccagctactcaggaggctgaggcacgagaatatcttg

SEQ ID NO: 49388 - DNA, 80 bp, synthetic construct
  misc_feature 1..80: note = Artificially Synthesized Probe
  source 1..80: mol_type = other DNA
ttcttctcccatagctgggatttggctccaccctgcaggctccccctatcagagccttcagctcaccatttatatatata

SEQ ID NO: 49389 - DNA, 80 bp, synthetic construct; identical to SEQ ID NO: 23878
  misc_feature 1..80: note = Artificially Synthesized Probe
  source 1..80: mol_type = other DNA

SEQ ID NO: 49390 - DNA, 80 bp, synthetic construct
  misc_feature 1..80: note = Artificially Synthesized Probe
  source 1..80: mol_type = other DNA
cagcactcatctagagctttcaccagccttccaaaggcatccatgaccagaaattttaagagctgctaggcaaagccagt

SEQ ID NO: 49391 - DNA, 80 bp, synthetic construct
  misc_feature 1..80: note = Artificially Synthesized Probe
  source 1..80: mol_type = other DNA
atccccccaccctgaccattgtccaaagagagggacatcttaattccacaaatatttgctgtaagaaaggttctctgagg

SEQ ID NO: 49392 - DNA, 80 bp, synthetic construct
  misc_feature 1..80: note = Artificially Synthesized Probe
  source 1..80: mol_type = other DNA
cagatgactttaaagagaggtaatgtcttacagcagaggcgacagtccctccacatccctagactcctaggcaagtgtgg

SEQ ID NO: 49393 - DNA, 80 bp, synthetic construct
  misc_feature 1..80: note = Artificially Synthesized Probe
  source 1..80: mol_type = other DNA
ttctcaaactctggaatgctcagaatcacccaggggccatatagaaaacagagattgctgcgccccaccctgttgaattt

SEQ ID NO: 49394 - DNA, 80 bp, synthetic construct
  misc_feature 1..80: note = Artificially Synthesized Probe
  source 1..80: mol_type = other DNA
caattccaaacctctctcctcccactcctcagctgtgttagaacctccaagcctcgctaagtggtgaaaacggacagaaa

SEQ ID NO: 49395 - DNA, 80 bp, synthetic construct; identical to SEQ ID NO: 23879
  misc_feature 1..80: note = Artificially Synthesized Probe
  source 1..80: mol_type = other DNA

SEQ ID NO: 49396 - DNA, 80 bp, synthetic construct
  misc_feature 1..80: note = Artificially Synthesized Probe
  source 1..80: mol_type = other DNA
tgggtgctttggagacagaaaccacatttcttattttggggtccccaccctggtgcttagcaggttgtcagtaatgtttg

SEQ ID NO: 49397 - DNA, 80 bp, synthetic construct
  misc_feature 1..80: note = Artificially Synthesized Probe
  source 1..80: mol_type = other DNA
tacgggcttcctgggccagcagctgccagcaggtaagtgtccaggctgtgccaagggctttgcagagggctgggaggggc

SEQ ID NO: 49398 - DNA, 80 bp, synthetic construct
  misc_feature 1..80: note = Artificially Synthesized Probe
  source 1..80: mol_type = other DNA
caattgccttcattttaataaatcaatgtgtgacaactgcactaacagtgccctcaaatctattgaaacagtgactttta

SEQ ID NO: 49399 - DNA, 80 bp, synthetic construct
  misc_feature 1..80: note = Artificially Synthesized Probe
  source 1..80: mol_type = other DNA
ctgtataaagtcattgatgaggctaatttgactaaaatggacctggagagtcaaatagaaagtctgaaagaagaacttgg

SEQ ID NO: 49400 - DNA, 80 bp, synthetic construct; identical to SEQ ID NO: 23880
  misc_feature 1..80: note = Artificially Synthesized Probe
  source 1..80: mol_type = other DNA

SEQ ID NO: 49401 - DNA, 80 bp, synthetic construct
  misc_feature 1..80: note = Artificially Synthesized Probe
  source 1..80: mol_type = other DNA
tggttgacatctactcattaacaaaactgggtcagattattgagtgacagaactgaagaggacctccaacagttatgggg

SEQ ID NO: 49402 - DNA, 80 bp, synthetic construct
  misc_feature 1..80: note = Artificially Synthesized Probe
  source 1..80: mol_type = other DNA
gtaagcccatttcttcttgttcttagctcagtgatttaagactactctccaacagtaaccatttagagatgccaaagtta

SEQ ID NO: 49403 - DNA, 80 bp, synthetic construct; identical to SEQ ID NO: 23881
  misc_feature 1..80: note = Artificially Synthesized Probe
  source 1..80: mol_type = other DNA

SEQ ID NO: 49404 - DNA, 80 bp, synthetic construct
  misc_feature 1..80: note = Artificially Synthesized Probe
  source 1..80: mol_type = other DNA
ggtggtgtgtgccgtgcctgtgcctgtagtctcagctactcaggagactgaggtgggaggactgtttgagcccaagagat

SEQ ID NO: 49405 - DNA, 80 bp, synthetic construct
  misc_feature 1..80: note = Artificially Synthesized Probe
  source 1..80: mol_type = other DNA
gaaaggaaggaaggaaggaaggaaggaaggaaggaaggagggagggagggggagggaaggagggaggaagaaagaaagag

SEQ ID NO: 49406 - DNA, 80 bp, synthetic construct
  misc_feature 1..80: note = Artificially Synthesized Probe
  source 1..80: mol_type = other DNA
ttggaataaggcagccttgtgcctcggagctgcagatgaaaggagagtggggtcagaggagcagccctcagagaccaggt

SEQ ID NO: 49407 - DNA, 80 bp, synthetic construct
  misc_feature 1..80: note = Artificially Synthesized Probe
  source 1..80: mol_type = other DNA
agagctggttttctgctggctagaattctatgccatttatttccccccgtaactcatctaagatgtatattgttgttttc

SEQ ID NO: 49408 - DNA, 80 bp, synthetic construct
  misc_feature 1..80: note = Artificially Synthesized Probe
  source 1..80: mol_type = other DNA
taaggtgagaggcaggaccagcatcctccactctgccctatgcagaaggaggccacgctgagctgcaaactagtcaatgt

SEQ ID NO: 49409 - DNA, 80 bp, synthetic construct; identical to SEQ ID NO: 23882
  misc_feature 1..80: note = Artificially Synthesized Probe
  source 1..80: mol_type = other DNA

SEQ ID NO: 49410 - DNA, 80 bp, synthetic construct
  misc_feature 1..80: note = Artificially Synthesized Probe
  source 1..80: mol_type = other DNA
ctctactaaaaatacaaaaaattagccggacgcattggcaggtgcctgtagtccccgctactcgggaggctgaggcagga

SEQ ID NO: 49411 - DNA, 80 bp, synthetic construct
  misc_feature 1..80: note = Artificially Synthesized Probe
  source 1..80: mol_type = other DNA
tataagagtgaaaaaaacatacacatttactagtagaagaaaatctaagccacaacctacctatgtgcagtaaaatatca

SEQ ID NO: 49412 - DNA, 80 bp, synthetic construct
  misc_feature 1..80: note = Artificially Synthesized Probe
  source 1..80: mol_type = other DNA
gggccagatggcctctgttgtaactcctcagcgctgccactgcagtgtaaaagcagctgtagccaataggtagctaatga

SEQ ID NO: 49413 - DNA, 80 bp, synthetic construct; identical to SEQ ID NO: 23883
  misc_feature 1..80: note = Artificially Synthesized Probe
  source 1..80: mol_type = other DNA

SEQ ID NO: 49414 - DNA, 80 bp, synthetic construct
  misc_feature 1..80: note = Artificially Synthesized Probe
  source 1..80: mol_type = other DNA
gacagaggatgaaaagtgacaaggaaggaaaatgtggaaaagtagagaaaataaggtagatgtctgagttaaggcaaaag

SEQ ID NO: 49415 - DNA, 80 bp, synthetic construct
  misc_feature 1..80: note = Artificially Synthesized Probe
  source 1..80: mol_type = other DNA
gcagccagatttgagaaccataagaattataaaaagctatgaaaagaaaaataggagaggcttttctgtcctttctccca

SEQ ID NO: 49416 - DNA, 80 bp, synthetic construct; identical to SEQ ID NO: 23884
  misc_feature 1..80: note = Artificially Synthesized Probe
  source 1..80: mol_type = other DNA

SEQ ID NO: 49417 - DNA, 80 bp, synthetic construct
  misc_feature 1..80: note = Artificially Synthesized Probe
  source 1..80: mol_type = other DNA
agaaaatgggaaatcaaaattgttgaaaggcaaaggattagagtttaaaatggacctgatttgactatttttcctgctgt

SEQ ID NO: 49418 - DNA, 80 bp, synthetic construct
  misc_feature 1..80: note = Artificially Synthesized Probe
  source 1..80: mol_type = other DNA
agaccatctgatcccattccctaattttaggtgtgaggaaactgagacccagagagtgcaggtgacttcccacgatcaca

SEQ ID NO: 49419 - DNA, 80 bp, synthetic construct
  misc_feature 1..80: note = Artificially Synthesized Probe
  source 1..80: mol_type = other DNA
tgtgcaccacactgtggtaactgtttctttgggaaaggacagactattataattatcagaaataaatccttcatagtatg

SEQ ID NO: 49420 - DNA, 80 bp, synthetic construct
  misc_feature 1..80: note = Artificially Synthesized Probe
  source 1..80: mol_type = other DNA
atctgaaagctacatctcagagaaaacagacagtatttgttttagcttggccaatgctgcctgggcctcttgcagaaagg

SEQ ID NO: 49421 - DNA, 80 bp, synthetic construct
  misc_feature 1..80: note = Artificially Synthesized Probe
  source 1..80: mol_type = other DNA
ggcggcatagcataaatgtgaaatggcttagcacacacagctttcaaaagcttttgtaaagaaaatgcaagcatgcattt

SEQ ID NO: 49422 - DNA, 80 bp, synthetic construct; identical to SEQ ID NO: 23885
  misc_feature 1..80: note = Artificially Synthesized Probe
  source 1..80: mol_type = other DNA

SEQ ID NO: 49423 - DNA, 80 bp, synthetic construct
  misc_feature 1..80: note = Artificially Synthesized Probe
  source 1..80: mol_type = other DNA
aggagagcactaaactgcgaaagcctaagggataaaggtggtaccatcagcatctgctagaacttatctgccaattctgt

SEQ ID NO: 49424 - DNA, 80 bp, synthetic construct
  misc_feature 1..80: note = Artificially Synthesized Probe
  source 1..80: mol_type = other DNA
gtattcatattctttccagctatggtgttacgaatgtcaggaacctcatggtccagtttttgaagcttctgaagttgtat

SEQ ID NO: 49425 - DNA, 80 bp, synthetic construct
  misc_feature 1..80: note = Artificially Synthesized Probe
  source 1..80: mol_type = other DNA
cctcagacaacatgccacaccacactctagacctcctagttagtcaagtaaaacaaaacaactttttttttaagttgggc

SEQ ID NO: 49426 - DNA, 80 bp, synthetic construct; identical to SEQ ID NO: 23886
  misc_feature 1..80: note = Artificially Synthesized Probe
  source 1..80: mol_type = other DNA

SEQ ID NO: 49427 - DNA, 80 bp, synthetic construct
  misc_feature 1..80: note = Artificially Synthesized Probe
  source 1..80: mol_type = other DNA
tctggccctcccatacttcggatgaactggctataaattaggggttcccacaacctcctctgcagagggataagtagata

SEQ ID NO: 49428 - DNA, 80 bp, synthetic construct
  misc_feature 1..80: note = Artificially Synthesized Probe
  source 1..80: mol_type = other DNA
aaggggcacagagtccccaactccaaatttttgactctattataataacacttggcttaaaatgcaaacacgtcatacag

SEQ ID NO: 49429 - DNA, 80 bp, synthetic construct
  misc_feature 1..80: note = Artificially Synthesized Probe
  source 1..80: mol_type = other DNA
agaactaatccttctccactgagaataaataaaggcaacagggtttgttgttcatgatttacaacctggtatccctggaa

SEQ ID NO: 49430 - DNA, 80 bp, synthetic construct
  misc_feature 1..80: note = Artificially Synthesized Probe
  source 1..80: mol_type = other DNA
gtcttccacctccacatcttgtcccactgaaaggtcttcaggggcagtgacatgtgtggagctttcagctcctgtaacaa

SEQ ID NO: 49431 - DNA, 80 bp, synthetic construct; identical to SEQ ID NO: 23887
  misc_feature 1..80: note = Artificially Synthesized Probe
  source 1..80: mol_type = other DNA

SEQ ID NO: 49432 - DNA, 80 bp, synthetic construct
  misc_feature 1..80: note = Artificially Synthesized Probe
  source 1..80: mol_type = other DNA
ctccttcagggccaacagaaaagcattaccattttaagcctttaatctgattaagtcaggcccactcagatactcctctt

SEQ ID NO: 49433 - DNA, 80 bp, synthetic construct
  misc_feature 1..80: note = Artificially Synthesized Probe
  source 1..80: mol_type = other DNA
catcttagaattctgcctaccaggcccctcagtgttgagcagagaactaaaactctgcccctccccaaacccccaccatc

SEQ ID NO: 49434 - DNA, 80 bp, synthetic construct; identical to SEQ ID NO: 23888
  misc_feature 1..80: note = Artificially Synthesized Probe
  source 1..80: mol_type = other DNA

SEQ ID NO: 49435 - DNA, 80 bp, synthetic construct
  misc_feature 1..80: note = Artificially Synthesized Probe
  source 1..80: mol_type = other DNA
tctgtcttaagagtccccagggtcaggaacaaatggattgctcccatgctatcttctctaacagcaggtctgcacttgcc

SEQ ID NO: 49436 - DNA, 80 bp, synthetic construct
  misc_feature 1..80: note = Artificially Synthesized Probe
  source 1..80: mol_type = other DNA
taaggccaaaagaaacattcaagatcatctaaagccgggccatctaactgaaatatcgcaatgatgggcatattctataa

SEQ ID NO: 49437 - DNA, 80 bp, synthetic construct
  misc_feature 1..80: note = Artificially Synthesized Probe
  source 1..80: mol_type = other DNA
cacaaaaatacaaaaattagccaggtgtggtgacatgtgcctgcagtcccatggaaactacttgggaagctgacatggga

SEQ ID NO: 49438 - DNA, 80 bp, synthetic construct; identical to SEQ ID NO: 23889
  misc_feature 1..80: note = Artificially Synthesized Probe
  source 1..80: mol_type = other DNA

SEQ ID NO: 49439 - DNA, 80 bp, synthetic construct
  misc_feature 1..80: note = Artificially Synthesized Probe
  source 1..80: mol_type = other DNA
taagatatatgaagctgaattaaaacaggcactgccactctgactctagactacaagatgacctcttgtgctattgccat

SEQ ID NO: 49440 - DNA, 80 bp, synthetic construct
  misc_feature 1..80: note = Artificially Synthesized Probe
  source 1..80: mol_type = other DNA
gtgaaataagccatggctgtagccagtgtgctcaaggcaaacactgaacggggatcccgaagcatcttcatatctctgaa

SEQ ID NO: 49441 - DNA, 80 bp, synthetic construct; identical to SEQ ID NO: 23834
  misc_feature 1..80: note = Artificially Synthesized Probe
  source 1..80: mol_type = other DNA

SEQ ID NO: 49442 - DNA, 80 bp, synthetic construct
  misc_feature 1..80: note = Artificially Synthesized Probe
  source 1..80: mol_type = other DNA
caaaagatataaagtgaaaagtgctatccaacccatgtcctagctaccgtttttttctatgggggtcaatcaatgttatc

SEQ ID NO: 49443 - DNA, 80 bp, synthetic construct
  misc_feature 1..80: note = Artificially Synthesized Probe
  source 1..80: mol_type = other DNA
agtagtattcagaacatactgctttatgactgtatgatattataccacagggggcagcaaactctggcccacaagccaaa

SEQ ID NO: 49444 - DNA, 80 bp, synthetic construct; identical to SEQ ID NO: 23890
  misc_feature 1..80: note = Artificially Synthesized Probe
  source 1..80: mol_type = other DNA

SEQ ID NO: 49445 - DNA, 80 bp, synthetic construct
  misc_feature 1..80: note = Artificially Synthesized Probe
  source 1..80: mol_type = other DNA
ggccccaaaagtgtgtgcactggtaattttgataaatattgccaattgctctctacaaagattataacaatttacatttc

SEQ ID NO: 49446 - DNA, 80 bp, synthetic construct
  misc_feature 1..80: note = Artificially Synthesized Probe
  source 1..80: mol_type = other DNA
agtagcatataccagttggtgcggctgcaaagagaatagggaaaatcaagaatcagagcagattttaaaaggaaaaacca

SEQ ID NO: 49447 - DNA, 80 bp, synthetic construct
  misc_feature 1..80: note = Artificially Synthesized Probe
  source 1..80: mol_type = other DNA
ctggccaacatggtgaaaccacgtctctactaaaaatacaaaaaattagccgggtgtggtggcacacacatgtaatccca

SEQ ID NO: 49448 - DNA, 80 bp, synthetic construct; identical to SEQ ID NO: 23891
  misc_feature 1..80: note = Artificially Synthesized Probe
  source 1..80: mol_type = other DNA

SEQ ID NO: 49449 - DNA, 80 bp, synthetic construct
  misc_feature 1..80: note = Artificially Synthesized Probe
  source 1..80: mol_type = other DNA
actacctgactgtgctgatctcaaagcataccttagatattttttaacagatttttcccataaaaagtgtaaggactggc

SEQ ID NO: 49450 - DNA, 80 bp, synthetic construct
  misc_feature 1..80: note = Artificially Synthesized Probe
  source 1..80: mol_type = other DNA
aaaaatgtttttaattggtcaggtgtagaagcacgcaactgtagtcctagctactcaggaggctgaggcaggagaactgc

SEQ ID NO: 49451 - DNA, 80 bp, synthetic construct
  misc_feature 1..80: note = Artificially Synthesized Probe
  source 1..80: mol_type = other DNA
aattagactcattgctgagcctcttcagctgattttatcaagaggatgagcttacttattacaagggggcagcaaggtca

SEQ ID NO: 49452 - DNA, 80 bp, synthetic construct
  misc_feature 1..80: note = Artificially Synthesized Probe
  source 1..80: mol_type = other DNA
ttcattgagtgaggcgtgcacttctttttaatccccgctgaggagagcccatgttgctagtgcagactggatggcatcca

SEQ ID NO: 49453 - DNA, 80 bp, synthetic construct
  misc_feature 1..80: note = Artificially Synthesized Probe
  source 1..80: mol_type = other DNA
gctcactgcaacctccgcctcccgggtttaagcgattctcctgcctcagcctcccaagtagctgggattacaggtgccca

SEQ ID NO: 49454 - DNA, 80 bp, synthetic construct; identical to SEQ ID NO: 23892
  misc_feature 1..80: note = Artificially Synthesized Probe
  source 1..80: mol_type = other DNA

SEQ ID NO: 49455 - DNA, 80 bp, synthetic construct
  misc_feature 1..80: note = Artificially Synthesized Probe
  source 1..80: mol_type = other DNA
ttggctggtgtacctgtgggaggcaagaaatgggtagaaaggctactcttatacaaggcaggatgaaattttccacaaaa

SEQ ID NO: 49456 - DNA, 80 bp, synthetic construct
  misc_feature 1..80: note = Artificially Synthesized Probe
  source 1..80: mol_type = other DNA
ttacacacttagaaagtggcaacactaggattcaaattacacattctgactccagaatccacactcttaactgttagttt

SEQ ID NO: 49457 - DNA, 80 bp, synthetic construct; identical to SEQ ID NO: 23893
  misc_feature 1..80: note = Artificially Synthesized Probe
  source 1..80: mol_type = other DNA

SEQ ID NO: 49458 - DNA, 80 bp, synthetic construct
  misc_feature 1..80: note = Artificially Synthesized Probe
  source 1..80: mol_type = other DNA
ccattgtttacctttctccatgaacagcacgatgagattagcatgatctcatgaaatctgaaaagtgcttaagagccaag

SEQ ID NO: 49459 - DNA, 80 bp, synthetic construct
  misc_feature 1..80: note = Artificially Synthesized Probe
  source 1..80: mol_type = other DNA
agaagacacatgaggcagacagctcatctggatacatgatctgctgagaatgcacttgcaatttcaaagaccaggaagta

SEQ ID NO: 49460 - DNA, 80 bp, synthetic construct
  misc_feature 1..80: note = Artificially Synthesized Probe
  source 1..80: mol_type = other DNA
cttttcctctttcccagtcctcatttgtatcttcaagagtcaggctctcaaatacttaattattacttacttagaacaca

SEQ ID NO: 49461 - DNA, 80 bp, synthetic construct; identical to SEQ ID NO: 23894
  misc_feature 1..80: note = Artificially Synthesized Probe
  source 1..80: mol_type = other DNA

SEQ ID NO: 49462 - DNA, 80 bp, synthetic construct
  misc_feature 1..80: note = Artificially Synthesized Probe
  source 1..80: mol_type = other DNA
atacttttaggtgaattacttttagcagtggttactttaggtgagttaaagcaattaagtgggaagtatctcttgtggtg

SEQ ID NO: 49463 - DNA, 80 bp, synthetic construct
  misc_feature 1..80: note = Artificially Synthesized Probe
  source 1..80: mol_type = other DNA
agcaggcctcaggacttagcagcttggcagtcaatggtagctggaatttaataacagtggttggttataactttattaat

SEQ ID NO: 49464 - DNA, 80 bp, synthetic construct
  misc_feature 1..80: note = Artificially Synthesized Probe
  source 1..80: mol_type = other DNA
tcactaagctgctttctaagaaaggtggtttctggaagttgaatgtgtctggaaagcaagagaactgctaaagaaaacag

SEQ ID NO: 49465 - DNA, 80 bp, synthetic construct
  misc_feature 1..80: note = Artificially Synthesized Probe
  source 1..80: mol_type = other DNA
tcctaaggtgacgctcatgcgcatttaacctatagtttccattttaaactaacctacagtttacagataactaacctaca

SEQ ID NO: 49466 - DNA, 80 bp, synthetic construct; identical to SEQ ID NO: 23895
  misc_feature 1..80: note = Artificially Synthesized Probe
  source 1..80: mol_type = other DNA

SEQ ID NO: 49467 - DNA, 80 bp, synthetic construct
  misc_feature 1..80: note = Artificially Synthesized Probe
  source 1..80: mol_type = other DNA
ttccgtatggagtgatggtaaatgtttcacaactgctttctgggtgaaatatatgtatatgtatatatgtgccaatcaca

SEQ ID NO: 49468 - DNA, 80 bp, synthetic construct
  misc_feature 1..80: note = Artificially Synthesized Probe
  source 1..80: mol_type = other DNA
gcatgacttgctatttcttggaaaattcaccaaccattttttataattctatcatcaacaatagtatcacaaaatcagac

SEQ ID NO: 49469 - DNA, 80 bp, synthetic construct
  misc_feature 1..80: note = Artificially Synthesized Probe
  source 1..80: mol_type = other DNA
agttttagaacaggagtgaaagtttatttaaaaactctagagcagagaccgggtgcggtggctcacgcctgaaatcccag

SEQ ID NO: 49470 - DNA, 80 bp, synthetic construct
  misc_feature 1..80: note = Artificially Synthesized Probe
  source 1..80: mol_type = other DNA
attgcttgaacctgggaggcagaggttgcggtgagctgagatcgcaccatcgcactccagcctgggggacaagagcaaga

SEQ ID NO: 49471 - DNA, 80 bp, synthetic construct; identical to SEQ ID NO: 23896
  misc_feature 1..80: note = Artificially Synthesized Probe
  source 1..80: mol_type = other DNA

SEQ ID NO: 49472 - DNA, 80 bp, synthetic construct
  misc_feature 1..80: note = Artificially Synthesized Probe
  source 1..80: mol_type = other DNA
ctgatcaccagtttcaggttttttctatctttagggagactgcttttccctgccagctgtgacaagttattattttagag

SEQ ID NO: 49473 - DNA, 80 bp, synthetic construct
  misc_feature 1..80: note = Artificially Synthesized Probe
  source 1..80: mol_type = other DNA
gtgtttagcagtcaacttacaacattcctgaaaatttaaaaatcagctcccgtgagctgttaggagcaagttctagctca

SEQ ID NO: 49474 - DNA, 80 bp, synthetic construct; identical to SEQ ID NO: 23835
  misc_feature 1..80: note = Artificially Synthesized Probe
  source 1..80: mol_type = other DNA

SEQ ID NO: 49475 - DNA, 80 bp, synthetic construct; identical to SEQ ID NO: 23897
  misc_feature 1..80: note = Artificially Synthesized Probe
  source 1..80: mol_type = other DNA

SEQ ID NO: 49476 - DNA, 80 bp, synthetic construct
  misc_feature 1..80: note = Artificially Synthesized Probe
  source 1..80: mol_type = other DNA
tcatagggttgtaaagattaaattagatacttgattaaaactgttaacaatgtgcttggcacagaataagtgcctaatac

SEQ ID NO: 49477 - DNA, 80 bp, synthetic construct
  misc_feature 1..80: note = Artificially Synthesized Probe
  source 1..80: mol_type = other DNA
tagtcagtgttttcatgcttttaagattctaaaggcttcagcatgcttaatctgctggaagcctcacagtgaccacagga

SEQ ID NO: 49478 - DNA, 80 bp, synthetic construct
  misc_feature 1..80: note = Artificially Synthesized Probe
  source 1..80: mol_type = other DNA
ctccaaagcctttaatggtcattctttgggctctgtaaagaccaaacagtaagaattggaggtgctactactgagctatg

SEQ ID NO: 49479 - DNA, 80 bp, synthetic construct
  misc_feature 1..80: note = Artificially Synthesized Probe
  source 1..80: mol_type = other DNA
ctacaggctcacgctaccatcacgcctggctaatttttgtatttttagtagagacgggttttcaccatattggtcagtct

SEQ ID NO: 49480 - DNA, 80 bp, synthetic construct; identical to SEQ ID NO: 23898
  misc_feature 1..80: note = Artificially Synthesized Probe
  source 1..80: mol_type = other DNA

SEQ ID NO: 49481 - DNA, 80 bp, synthetic construct
  misc_feature 1..80: note = Artificially Synthesized Probe
  source 1..80: mol_type = other DNA
gtctgggtcacagttgtgactagacacatggttttcacaaggaaacaggcactatcagattgacagagatcaagttggat

SEQ ID NO: 49482 - DNA, 80 bp, synthetic construct
  misc_feature 1..80: note = Artificially Synthesized Probe
  source 1..80: mol_type = other DNA
catgctcttgtatgaaaaataagggatcaaagctttttctttgcaccattgtttgtaatagagaaagaaagactagaaac

SEQ ID NO: 49483 - DNA, 80 bp, synthetic construct
  misc_feature 1..80: note = Artificially Synthesized Probe
  source 1..80: mol_type = other DNA
tgataaaatatctctaagaaggaaacactaggccttccacagaaattaagaatgagaaaaagatgcccgctctctctcgt

SEQ ID NO: 49484 - DNA, 80 bp, synthetic construct; identical to SEQ ID NO: 23899
  misc_feature 1..80: note = Artificially Synthesized Probe
  source 1..80: mol_type = other DNA

SEQ ID NO: 49485 - DNA, 80 bp, synthetic construct
  misc_feature 1..80: note = Artificially Synthesized Probe
  source 1..80: mol_type = other DNA
tgaattgtatttcatttgcaggcatcgtatgttcaaaataaatacatttttgtatacaagttggtgaagggacctgttta

SEQ ID NO: 49486 - DNA, 80 bp, synthetic construct
  misc_feature 1..80: note = Artificially Synthesized Probe
  source 1..80: mol_type = other DNA
gaaaccccatctctactaaaaatacaaaaaaaattagccaggcctggtggcgggtacctgtaatcccagctactcgaggc

SEQ ID NO: 49487 - DNA, 80 bp, synthetic construct
  misc_feature 1..80: note = Artificially Synthesized Probe
  source 1..80: mol_type = other DNA
tggagtggtgattagaaaggctgggaaggaaggatgggctcagatttctgatcatcaccgctcacactgagacctgactc

SEQ ID NO: 49488 - DNA, 80 bp, synthetic construct; identical to SEQ ID NO: 23900
  misc_feature 1..80: note = Artificially Synthesized Probe
  source 1..80: mol_type = other DNA

SEQ ID NO: 49489 - DNA, 80 bp, synthetic construct
  misc_feature 1..80: note = Artificially Synthesized Probe
  source 1..80: mol_type = other DNA
tttcagctgccccactgctccagagacctgcccttacccacactgaggacacctggcccagaaggttaggccctgccccc

SEQ ID NO: 49490 - DNA, 80 bp, synthetic construct
  misc_feature 1..80: note = Artificially Synthesized Probe
  source 1..80: mol_type = other DNA
ctgctttcctcactcccccttttcctgagagtactccttaatgatttgcgagttccaggatccctaactcaggctctgct

SEQ ID NO: 49491 - DNA, 80 bp, synthetic construct
  misc_feature 1..80: note = Artificially Synthesized Probe
  source 1..80: mol_type = other DNA
aagcaatccaccctctgatctctggaatggattgaagttctatttgggtattaaacatcttttcttagatgtcccctcca

SEQ ID NO: 49492 - DNA, 80 bp, synthetic construct
  misc_feature 1..80: note = Artificially Synthesized Probe
  source 1..80: mol_type = other DNA
cgtgcaagcatgtataagaaaaggatctgaggatctgaggggaggaaaatcaagagtaatagagtcagaagggctcagct

SEQ ID NO: 49493 - DNA, 80 bp, synthetic construct
  misc_feature 1..80: note = Artificially Synthesized Probe
  source 1..80: mol_type = other DNA
acgacaaaaaataagatgatttagtgaagtagcacgttataaaataacatcaaaaagcaatgctgaggctgggcatgtgg

SEQ ID NO: 49494 - DNA, 80 bp, synthetic construct; identical to SEQ ID NO: 23901
  misc_feature 1..80: note = Artificially Synthesized Probe
  source 1..80: mol_type = other DNA

SEQ ID NO: 49495 - DNA, 80 bp, synthetic construct
  misc_feature 1..80: note = Artificially Synthesized Probe
  source 1..80: mol_type = other DNA
aaagtgaggatctattttggctatcatatctagttactgtcttagtagcttaagacaacagtgaatcacttgttctctca

SEQ ID NO: 49496 - DNA, 80 bp, synthetic construct
  misc_feature 1..80: note = Artificially Synthesized Probe
  source 1..80: mol_type = other DNA
gcttagacctcctcatatcatgacagcctgacatagtcaaacttctgatatagcacctgagtgagcacagaagctaccag

SEQ ID NO: 49497 - DNA, 80 bp, synthetic construct; identical to SEQ ID NO: 23902
  misc_feature 1..80: note = Artificially Synthesized Probe
  source 1..80: mol_type = other DNA

SEQ ID NO: 49498 - DNA, 80 bp, synthetic construct
  misc_feature 1..80: note = Artificially Synthesized Probe
  source 1..80: mol_type = other DNA
acttaaacccagggtcctaaccattggggaaaaaaatggaaaaataatttacactctcaaccagaaaacttcagagtagt

SEQ ID NO: 49499 - DNA, 80 bp, synthetic construct
  misc_feature 1..80: note = Artificially Synthesized Probe
  source 1..80: mol_type = other DNA
ataggtaacaaactctcatacagttttcagatacaggaagttcatccagccattcctgttattctgtcagagcgatctgt

SEQ ID NO: 49500 - DNA, 80 bp, synthetic construct
  misc_feature 1..80: note = Artificially Synthesized Probe
  source 1..80: mol_type = other DNA
aatggaattcaaggccagaagtcacagaaggtcactattttactttctggaggattttgcaatcccagaaagtcccttca

SEQ ID NO: 49501 - DNA, 80 bp, synthetic construct; identical to SEQ ID NO: 23903
  misc_feature 1..80: note = Artificially Synthesized Probe
  source 1..80: mol_type = other DNA

SEQ ID NO: 49502 - DNA, 80 bp, synthetic construct
  misc_feature 1..80: note = Artificially Synthesized Probe
  source 1..80: mol_type = other DNA
gtgattctgtgaagcgtgttcccaaatcacagatgttacaaatccaatgtcaacaacaactagtcacaagttaagtactt

SEQ ID NO: 49503 - DNA, 80 bp, synthetic construct
  misc_feature 1..80: note = Artificially Synthesized Probe
  source 1..80: mol_type = other DNA
aagaccctgtctctaaaagaaaaataaataaataaatgctgctgggcatggtggtacaaacctgtagtcccaggtattca

SEQ ID NO: 49504 - DNA, 80 bp, synthetic construct
  misc_feature 1..80: note = Artificially Synthesized Probe
  source 1..80: mol_type = other DNA
ataaccctagaccagatactgatctagatttattttctagtgatcacgttttgcctcttataaatatgcctcagacagat

SEQ ID NO: 49505 - DNA, 80 bp, synthetic construct
  misc_feature 1..80: note = Artificially Synthesized Probe
  source 1..80: mol_type = other DNA
tcatccatagtggtcataagggtgtaaaaagtctcctcctggaggacagggtacagaaacttgttgcatcaaaatttaat

SEQ ID NO: 49506 - DNA, 80 bp, synthetic construct; identical to SEQ ID NO: 23904
  misc_feature 1..80: note = Artificially Synthesized Probe
  source 1..80: mol_type = other DNA

SEQ ID NO: 49507 - DNA, 80 bp, synthetic construct
  misc_feature 1..80: note = Artificially Synthesized Probe
  source 1..80: mol_type = other DNA
gtgcccataagcaagcttagcccactgtgataagttcaagagcatgcatgagcttggggagccatggaaatacagagggt

SEQ ID NO: 49508 - DNA, 80 bp, synthetic construct
  misc_feature 1..80: note = Artificially Synthesized Probe
  source 1..80: mol_type = other DNA
gaccaaataaactccaagactggaagtgttgatgctgctgtagggtggggataaagatggaaacatactgggccagctgt

SEQ ID NO: 49509 - DNA, 80 bp, synthetic construct
  misc_feature 1..80: note = Artificially Synthesized Probe
  source 1..80: mol_type = other DNA
ggtaccacaggtgagaggtgacaagctcccaatcccagaccatggtggctgcagaatgtgaaaacttctcaagagataca

SEQ ID NO: 49510 - DNA, 80 bp, synthetic construct; identical to SEQ ID NO: 23905
  misc_feature 1..80: note = Artificially Synthesized Probe
  source 1..80: mol_type = other DNA

SEQ ID NO: 49511 - DNA, 80 bp, synthetic construct
  misc_feature 1..80: note = Artificially Synthesized Probe
  source 1..80: mol_type = other DNA
agggacggcagaggaaaagggatgggcaaaaatgtgctactaaaacaccaaaggggaaagcgctgagtatataaaggcca

SEQ ID NO: 49512 - DNA, 80 bp, synthetic construct
  misc_feature 1..80: note = Artificially Synthesized Probe
  source 1..80: mol_type = other DNA
atcagaagaaaaagccccggagaacaagatttctttgaagaaacgcctgcaagctgcctctcatttgtctctctcaatcc

SEQ ID NO: 49513 - DNA, 80 bp, synthetic construct
  misc_feature 1..80: note = Artificially Synthesized Probe
  source 1..80: mol_type = other DNA
tgtcttctttaaacttcaaagaaatgctatgcagtggatcattcactgattgcatttttcagatgagaaactgaggcatg

SEQ ID NO: 49514 - DNA, 80 bp, synthetic construct
  misc_feature 1..80: note = Artificially Synthesized Probe
  source 1..80: mol_type = other DNA
ccacagtctgacctgagtgggattccttatttttcccacggagccactaagaataacccccatcagtctccataactggc

SEQ ID NO: 49515 - DNA, 80 bp, synthetic construct
  misc_feature 1..80: note = Artificially Synthesized Probe
  source 1..80: mol_type = other DNA
cactggcatgacatggagctccagaacctgggcgctgtggtcggccggctggaggcggagctcagggaaatccgagcgga

SEQ ID NO: 49516 - DNA, 80 bp, synthetic construct
  misc_feature 1..80: note = Artificially Synthesized Probe
  source 1..80: mol_type = other DNA
tcacctctaaacttcagaaatgtccaaagtctatattagacaacaatcaaatctatctgaaacacacaaaatagtcttga

SEQ ID NO: 49517 - DNA, 80 bp, synthetic construct; identical to SEQ ID NO: 23906
  misc_feature 1..80: note = Artificially Synthesized Probe
  source 1..80: mol_type = other DNA

SEQ ID NO: 49518 - DNA, 80 bp, synthetic construct
  misc_feature 1..80: note = Artificially Synthesized Probe
  source 1..80: mol_type = other DNA
ggaatgtttcagttgcttgtaatagaacctaattaatgaggctataaaccagtgctcctgaaactaatgtgcactcaaaa

SEQ ID NO: 49519 - DNA, 80 bp, synthetic construct
  misc_feature 1..80: note = Artificially Synthesized Probe
  source 1..80: mol_type = other DNA
ttttttaaatgcagattctgcttcagtacgtctggggtggggtctgagagtcttcctttctaacaagctcccaagtgatg

SEQ ID NO: 49520 - DNA, 80 bp, synthetic construct; identical to SEQ ID NO: 23907
  misc_feature 1..80: note = Artificially Synthesized Probe
  source 1..80: mol_type = other DNA

SEQ ID NO: 49521 - DNA, 80 bp, synthetic construct
  misc_feature 1..80: note = Artificially Synthesized Probe
  source 1..80: mol_type = other DNA
ttttcctaggcagaggaccctgcggccttccgcagtgtttgtgtccctgggtacttgagattagggagtggtgatgactc

SEQ ID NO: 49522 - DNA, 80 bp, synthetic construct
  misc_feature 1..80: note = Artificially Synthesized Probe
  source 1..80: mol_type = other DNA
agtacagaacaaaatgaaaagtcaaaaggctttttcttgaatgatcctctcctttaatcagtgaaggaaagacattttga

SEQ ID NO: 49523 - DNA, 80 bp, synthetic construct
  misc_feature 1..80: note = Artificially Synthesized Probe
  source 1..80: mol_type = other DNA
taattacacacacacacttgcactcactctttttttaatagataaggattccagaggcatatacatcagccttgggcctt

SEQ ID NO: 49524 - DNA, 80 bp, synthetic construct
  misc_feature 1..80: note = Artificially Synthesized Probe
  source 1..80: mol_type = other DNA
ttagtgattgtatcatccaacccctcctgattcaagagagaacacaaagacccagaatggaaaaagatttgcgcatgatc

SEQ ID NO: 49525 - DNA, 80 bp, synthetic construct
  misc_feature 1..80: note = Artificially Synthesized Probe
  source 1..80: mol_type = other DNA
ctttcaaatggaaaatatgtcatccagctcctctccaactgtcttttattgaattgatttttgttgattataaaagccag

SEQ ID NO: 49526 - DNA, 80 bp, synthetic construct; identical to SEQ ID NO: 23836
  misc_feature 1..80: note = Artificially Synthesized Probe
  source 1..80: mol_type = other DNA

SEQ ID NO: 49527 - DNA, 80 bp, synthetic construct; identical to SEQ ID NO: 23908
  misc_feature 1..80: note = Artificially Synthesized Probe
  source 1..80: mol_type = other DNA

SEQ ID NO: 49528 - DNA, 80 bp, synthetic construct
  misc_feature 1..80: note = Artificially Synthesized Probe
  source 1..80: mol_type = other DNA
atcctattgtgatagaatgaccgattttcctcacccattgcttctgactcctatgtgtttcctttcagctgatggagaaa

SEQ ID NO: 49529 - DNA, 80 bp, synthetic construct
  misc_feature 1..80: note = Artificially Synthesized Probe
  source 1..80: mol_type = other DNA
aaagcttcctggaagtggagaggatccttctgctttaatctgagtagtctgtagcttgagcaatctcccttgtcctcctt

SEQ ID NO: 49530 - DNA, 80 bp, synthetic construct
  misc_feature 1..80: note = Artificially Synthesized Probe
  source 1..80: mol_type = other DNA
ttgagtattgatgaaggcagcatttgaaaccaatagagggaaggatggactttttaataagtgatattcagacaactaga

SEQ ID NO: 49531 - DNA, 80 bp, synthetic construct
  misc_feature 1..80: note = Artificially Synthesized Probe
  source 1..80: mol_type = other DNA
aattcaaaatacaaaagcaacaaaggaaaatattgataaatttgattaagaaaaattttaaaatgttgcatttcaaaata

SEQ ID NO: 49532 - DNA, 80 bp, synthetic construct
  misc_feature 1..80: note = Artificially Synthesized Probe
  source 1..80: mol_type = other DNA
cagacagttgacacaaaaaatagatgaaaatggctcctaatgtctcaactgcactcataataagagaaatttttaaaatc

SEQ ID NO: 49533 - DNA, 80 bp, synthetic construct; identical to SEQ ID NO: 23837
  misc_feature 1..80: note = Artificially Synthesized Probe
  source 1..80: mol_type = other DNA

SEQ ID NO: 49534 - DNA, 80 bp, synthetic construct
  misc_feature 1..80: note = Artificially Synthesized Probe
  source 1..80: mol_type = other DNA
tgcaaaggaacaagaaatcgctctatagctactatggagtgatgatctccaggatatgttattgagctaaaaggcaagat

SEQ ID NO: 49535 - DNA, 80 bp, synthetic construct
  misc_feature 1..80: note = Artificially Synthesized Probe
  source 1..80: mol_type = other DNA
gttacttataggagggtggaggggaaaaagtagcagggaaaggtagggcactagagttcttctaatttatcttgttatgt

SEQ ID NO: 49536 - DNA, 80 bp, synthetic construct; identical to SEQ ID NO: 23838
  misc_feature 1..80: note = Artificially Synthesized Probe
  source 1..80: mol_type = other DNA

SEQ ID NO: 49537 - DNA, 80 bp, synthetic construct
  misc_feature 1..80: note = Artificially Synthesized Probe
  source 1..80: mol_type = other DNA
gtgggacagagtaagagagtaactatatttgtgttattgaaaactgagacttgaatgtgagtgaaaggagatacagttgt

SEQ ID NO: 49538 - DNA, 80 bp, synthetic construct
  misc_feature 1..80: note = Artificially Synthesized Probe
  source 1..80: mol_type = other DNA
tgaaaagatctagaagcaatggccaacttagcgacaatgaacatttttagcctcagatttgggtctctaacaaccatctt

SEQ ID NO: 49539 - DNA, 80 bp, synthetic construct; identical to SEQ ID NO: 23829
  misc_feature 1..80: note = Artificially Synthesized Probe
  source 1..80: mol_type = other DNA

SEQ ID NO: 49540 - DNA, 80 bp, synthetic construct
  misc_feature 1..80: note = Artificially Synthesized Probe
  source 1..80: mol_type = other DNA
aagctcccactaaccaaagatggttgggaatcaataagaatattatcagggcttccagtaaggtgaacaagaagacatcc

SEQ ID NO: 49541 - DNA, 80 bp, synthetic construct; identical to SEQ ID NO: 23839
  misc_feature 1..80: note = Artificially Synthesized Probe
  source 1..80: mol_type = other DNA

SEQ ID NO: 49542 - DNA, 80 bp, synthetic construct
  misc_feature 1..80: note = Artificially Synthesized Probe
  source 1..80: mol_type = other DNA
ggttaggaagcggatctcgcaagctccgagcgtcagctgccgggtacggtctttggcgttagcgcttctcccatcccatg

SEQ ID NO: 49543 - DNA, 80 bp, synthetic construct
  misc_feature 1..80: note = Artificially Synthesized Probe
  source 1..80: mol_type = other DNA
tagtagagatggggtttcaccatgttggcctggctagtctcaaactcctgacctcaggtgatcctcccgccttgggctcc

SEQ ID NO: 49544 - DNA, 80 bp, synthetic construct
  misc_feature 1..80: note = Artificially Synthesized Probe
  source 1..80: mol_type = other DNA
agcctcgtctcaaactcctgacctcaagtgatccacacaccttggcctcccaaagtgctgggattacaagtatgtgccac

SEQ ID NO: 49545 - DNA, 80 bp, synthetic construct; identical to SEQ ID NO: 23920
  misc_feature 1..80: note = Artificially Synthesized Probe
  source 1..80: mol_type = other DNA

SEQ ID NO: 49546 - DNA, 80 bp, synthetic construct
  misc_feature 1..80: note = Artificially Synthesized Probe
  source 1..80: mol_type = other DNA
tacaggcgtgagccaccacgcccggcaggtagtcttctttgggttaaatctgcttggtgttctataaccttcttacattt

SEQ ID NO: 49547 - DNA, 80 bp, synthetic construct
  misc_feature 1..80: note = Artificially Synthesized Probe
  source 1..80: mol_type = other DNA
tttatcttttgtctcctctgtgtattttcaaatagcctttcttcaagttcactaattatttctttttttttctttttcta

SEQ ID NO: 49548 - DNA, 80 bp, synthetic construct; identical to SEQ ID NO: 23921
  misc_feature 1..80: note = Artificially Synthesized Probe
  source 1..80: mol_type = other DNA

SEQ ID NO: 49549 - DNA, 80 bp, synthetic construct
  misc_feature 1..80: note = Artificially Synthesized Probe
  source 1..80: mol_type = other DNA
tggctctatcacccaggctggagtgcagtgccacagtcttggcttactgcaacctccacctcctgcgctctaaccatcct

SEQ ID NO: 49550 - DNA, 80 bp, synthetic construct
  misc_feature 1..80: note = Artificially Synthesized Probe
  source 1..80: mol_type = other DNA
tgggattacaggcgccagccactgcacccaaccccagaacagctaatcaattatctgtctgaaaggtcacgtatctctgt

SEQ ID NO: 49551 - DNA, 80 bp, synthetic construct; identical to SEQ ID NO: 23910
  misc_feature 1..80: note = Artificially Synthesized Probe
  source 1..80: mol_type = other DNA

SEQ ID NO: 49552 - DNA, 80 bp, synthetic construct
  misc_feature 1..80: note = Artificially Synthesized Probe
  source 1..80: mol_type = other DNA
cattctcctgcctcagcctcctgagtagctgggaccacaggcacccgacaccacgcccggctaattttttgtttttttag

SEQ ID NO: 49553 - DNA, 80 bp, synthetic construct
  misc_feature 1..80: note = Artificially Synthesized Probe
  source 1..80: mol_type = other DNA
ttttgctcttgttgcccaggctggagtgcaatggcacgatctcggctcaccacaacctccgcctccctggttgaagcgat

SEQ ID NO: 49554 - DNA, 80 bp, synthetic construct; identical to SEQ ID NO: 23922
  misc_feature 1..80: note = Artificially Synthesized Probe
  source 1..80: mol_type = other DNA

SEQ ID NO: 49555 - DNA, 80 bp, synthetic construct
  misc_feature 1..80: note = Artificially Synthesized Probe
  source 1..80: mol_type = other DNA
tatctgcatcagggggcaccccaagcccaggaatgccgtggcccttggagacttgtagagacactgccttggtggtcttg

SEQ ID NO: 49556 - DNA, 80 bp, synthetic construct
  misc_feature 1..80: note = Artificially Synthesized Probe
  source 1..80: mol_type = other DNA
agacgtgtagccagcccaacacggggtctcccccaaggcccgtggtcagcactgcctgggtaccacctatgtccactgaa

SEQ ID NO: 49557 - DNA, 80 bp, synthetic construct; identical to SEQ ID NO: 23923
  misc_feature 1..80: note = Artificially Synthesized Probe
  source 1..80: mol_type = other DNA

SEQ ID NO: 49558 - DNA, 80 bp, synthetic construct
  misc_feature 1..80: note = Artificially Synthesized Probe
  source 1..80: mol_type = other DNA
aaatgacatccaagagccaaggcctggaatcagggacccccaagagccaacttggtgctctactccactgtggccgagct

SEQ ID NO: 49559 - DNA, 80 bp, synthetic construct
  misc_feature 1..80: note = Artificially Synthesized Probe
  source 1..80: mol_type = other DNA
tgggtactgctgctgattattcaagggtcctttagtcagcaggtaatgaatcctgcctggactgggctatttccttcaag

SEQ ID NO: 49560 - DNA, 80 bp, synthetic construct
  misc_feature 1..80: note = Artificially Synthesized Probe
  source 1..80: mol_type = other DNA
gtgcaaaacaaagacctctttattcttcccgcttatctcctccagtgtgaggaagacatttcaagccaggcgtggtggct

SEQ ID NO: 49561 - DNA, 80 bp, synthetic construct
  misc_feature 1..80: note = Artificially Synthesized Probe
  source 1..80: mol_type = other DNA
aggctgaggcaggagaatacttgaacccaggaggcggaggttgctgtgagccgagatcactccattgcactccagcctgg

SEQ ID NO: 49562 - DNA, 80 bp, synthetic construct
  misc_feature 1..80: note = Artificially Synthesized Probe
  source 1..80: mol_type = other DNA
tcaccaattttttttttttttttttttttttggagacagggtgtttatctgtcacccaggctagagtgcagtggcgggat

SEQ ID NO: 49563 - DNA, 80 bp, synthetic construct; identical to SEQ ID NO: 23924
  misc_feature 1..80: note = Artificially Synthesized Probe
  source 1..80: mol_type = other DNA

SEQ ID NO: 49564 - DNA, 80 bp, synthetic construct
  misc_feature 1..80: note = Artificially Synthesized Probe
  source 1..80: mol_type = other DNA
acagtcgatgatgtctgtgactagtaattccaatgtctgtgcttcctcagagatggtctctgtcaaaagaactttttttt

SEQ ID NO: 49565 - DNA, 80 bp, synthetic construct
  misc_feature 1..80: note = Artificially Synthesized Probe
  source 1..80: mol_type = other DNA
agattgctgggttttgcttgtcaagggctagagccatctgtttgactttttaaaactgtttttgcaaaatgtgtattcct

SEQ ID NO: 49566 - DNA, 80 bp, synthetic construct
  misc_feature 1..80: note = Artificially Synthesized Probe
  source 1..80: mol_type = other DNA
tctcctgcctcagcctcctgagtagccgggactacaggcacccaccaccacgcccagctaatttttttgtatttttagta

SEQ ID NO: 49567 - DNA, 80 bp, synthetic construct; identical to SEQ ID NO: 23925
  misc_feature 1..80: note = Artificially Synthesized Probe
  source 1..80: mol_type = other DNA

SEQ ID NO: 49568 - DNA, 80 bp, synthetic construct
  misc_feature 1..80: note = Artificially Synthesized Probe
  source 1..80: mol_type = other DNA
gtgatccacctgcctcagcctcccaaagtgctgggattacaggcatgagccaccgcgcccagccaatttctcaggtattt

SEQ ID NO: 49569 - DNA, 80 bp, synthetic construct
  misc_feature 1..80: note = Artificially Synthesized Probe
  source 1..80: mol_type = other DNA
tgggtaagtaaagcatgctacattcatacaacagacattatagcaatgaacacgaatgaccttctgctgtacacaacatg

SEQ ID NO: 49570 - DNA, 80 bp, synthetic construct; identical to SEQ ID NO: 23926
  misc_feature 1..80: note = Artificially Synthesized Probe
  source 1..80: mol_type = other DNA

SEQ ID NO: 49571 - DNA, 80 bp, synthetic construct
  misc_feature 1..80: note = Artificially Synthesized Probe
  source 1..80: mol_type = other DNA
caagcgagtctcctgccccagcctcccggtagatgggattacaggcatgcgccagcacgtagtagagatggggtttctgc

SEQ ID NO: 49572 - DNA, 80 bp, synthetic construct
  misc_feature 1..80: note = Artificially Synthesized Probe
  source 1..80: mol_type = other DNA
tcggtttgaagaggggagaaggtctcactatgttgcccaggcttgtctcaaactcccgggctcaagcaatcctcccactg

SEQ ID NO: 49573 - DNA, 80 bp, synthetic construct
  misc_feature 1..80: note = Artificially Synthesized Probe
  source 1..80: mol_type = other DNA
tggtcatggctaactgtagcctagacctcctgggctcaggcagtcctcccacctcagccacccgagtagctgggactaca

SEQ ID NO: 49574 - DNA, 80 bp, synthetic construct
  misc_feature 1..80: note = Artificially Synthesized Probe
  source 1..80: mol_type = other DNA
aaatgtatatttaatttacatggaagcctactgttctcctccctccctccttccctccctccctccctccctccctctct

SEQ ID NO: 49575 - DNA, 80 bp, synthetic construct
  misc_feature 1..80: note = Artificially Synthesized Probe
  source 1..80: mol_type = other DNA
cacgcttggctaatttttgtgtttttagtagagacaaggtttcaccatgttggccaggctggtctcgacctcccaacttc

SEQ ID NO: 49576 - DNA, 80 bp, synthetic construct; identical to SEQ ID NO: 23927
  misc_feature 1..80: note = Artificially Synthesized Probe
  source 1..80: mol_type = other DNA

SEQ ID NO: 49577 - DNA, 80 bp, synthetic construct
  misc_feature 1..80: note = Artificially Synthesized Probe
  source 1..80: mol_type = other DNA
ttgcccaggcatggtggcacatgcctatgatcccagctacttgggtggctgaagctcgagaattgcttgagcccaggaga

SEQ ID NO: 49578 - DNA, 80 bp, synthetic construct
  misc_feature 1..80: note = Artificially Synthesized Probe
  source 1..80: mol_type = other DNA
agtgtcccacagcactgagcctgccaaggaggaggtgctaggggaatattcctgagggaatttagggagatgggagtgaa

SEQ ID NO: 49579 - DNA, 80 bp, synthetic construct
  misc_feature 1..80: note = Artificially Synthesized Probe
  source 1..80: mol_type = other DNA
gatcataaggtcaggagatcaagaccatcctggctaacacggtgaaaccctgtctctactaaaaatactaaaaatacaaa

SEQ ID NO: 49580 - DNA, 80 bp, synthetic construct; identical to SEQ ID NO: 23928
  misc_feature 1..80: note = Artificially Synthesized Probe
  source 1..80: mol_type = other DNA

SEQ ID NO: 49581 - DNA, 80 bp, synthetic construct
  misc_feature 1..80: note = Artificially Synthesized Probe
  source 1..80: mol_type = other DNA
ctgcactccagcctgggtgacacagtgagaccttatctcaaaaaaagaaaaagaagtccaggtgcggtggctcacacctg

SEQ ID NO: 49582 - DNA, 80 bp, synthetic construct
  misc_feature 1..80: note = Artificially Synthesized Probe
  source 1..80: mol_type = other DNA
aggcatgagaatcacttgaacccgggaggtggagtttgcagtaagctgagattgtgccactgcactccagcctgggcaat

SEQ ID NO: 49583 - DNA, 80 bp, synthetic construct
  misc_feature 1..80: note = Artificially Synthesized Probe
  source 1..80: mol_type = other DNA
agttggctacgcctcccatcctagctccacttccagaactgccttcaccctaggctgggtccttgttttgtttttagaga

SEQ ID NO: 49584 - DNA, 80 bp, synthetic construct
  misc_feature 1..80: note = Artificially Synthesized Probe
  source 1..80: mol_type = other DNA
cagcctggccaacatggtgaaaccccgtctccactaaaatacaaaaattagccaggcatgatggtgggtgcctgtaatcc

SEQ ID NO: 49585 - DNA, 80 bp, synthetic construct; identical to SEQ ID NO: 23929
  misc_feature 1..80: note = Artificially Synthesized Probe
  source 1..80: mol_type = other DNA

SEQ ID NO: 49586 - DNA, 80 bp, synthetic construct
  misc_feature 1..80: note = Artificially Synthesized Probe
  source 1..80: mol_type = other DNA
ctagacaggggaacaagtcagagtttgcaggaaaatctgggaagtcaggcatatccaactatcagagtcatggaaggctg

SEQ ID NO: 49587 - DNA, 80 bp, synthetic construct
  misc_feature 1..80: note = Artificially Synthesized Probe
  source 1..80: mol_type = other DNA
tctacatctgtcttttcccccatctaaatagagcaaccgtccaagaaaaatactgtgctaaacttctttcttccagtttt

SEQ ID NO: 49588 - DNA, 80 bp, synthetic construct
  misc_feature 1..80: note = Artificially Synthesized Probe
  source 1..80: mol_type = other DNA
tcaagcaattctcctgcctcagcctcccaagtagctgggattacaggcacccgccaccacgctcagctaacttttttgta

SEQ ID NO: 49589 - DNA, 80 bp, synthetic construct; identical to SEQ ID NO: 23930
  misc_feature 1..80: note = Artificially Synthesized Probe
  source 1..80: mol_type = other DNA

SEQ ID NO: 49590 - DNA, 80 bp, synthetic construct
  misc_feature 1..80: note = Artificially Synthesized Probe
  source 1..80: mol_type = other DNA
aattttttttgtatttttagtcgagacgggatttcaccatgttgcccagactggtctgtaactcctggcctcaagtgatt

SEQ ID NO: 49591 - DNA, 80 bp, synthetic construct
  misc_feature 1..80: note = Artificially Synthesized Probe
  source 1..80: mol_type = other DNA
tttgggttaaatctgcctagtgttctataaccttctcgtatttgaatattgatatctttttctaggtttggaaagttctc

SEQ ID NO: 49592 - DNA, 80 bp, synthetic construct
  misc_feature 1..80: note = Artificially Synthesized Probe
  source 1..80: mol_type = other DNA
ctctgtctccaggctggagcacagtggcacgatcttggctcactgcaacctccgcctcccgggttcaagcaattcccctg

SEQ ID NO: 49593 - DNA, 80 bp, synthetic construct; identical to SEQ ID NO: 23931
  misc_feature 1..80: note = Artificially Synthesized Probe
  source 1..80: mol_type = other DNA

SEQ ID NO: 49594 - DNA, 80 bp, synthetic construct
  misc_feature 1..80: note = Artificially Synthesized Probe
  source 1..80: mol_type = other DNA
aatcttggctcactacaacctccacttcctgcgttcaatcaattctggagcctcagcctcctgagtagctgggattacag

SEQ ID NO: 49595 - DNA, 80 bp, synthetic construct
  misc_feature 1..80: note = Artificially Synthesized Probe
  source 1..80: mol_type = other DNA
tagagatgaggtttcaccttgttggccaggctggtctcgaactcctggcctcaggtgatccacccgcctcacctcctaaa

SEQ ID NO: 49596 - DNA, 80 bp, synthetic construct
  misc_feature 1..80: note = Artificially Synthesized Probe
  source 1..80: mol_type = other DNA
ctgcatattttcaaatagcctgtctttgagctcaccaattcttcaggttgatcaattctactgttcagagactgatgcat

SEQ ID NO: 49597 - DNA, 80 bp, synthetic construct
  misc_feature 1..80: note = Artificially Synthesized Probe
  source 1..80: mol_type = other DNA
gtagctgggactacaggcgcctaccaccacgcctggctaatttttttgtatttttagtagagatggggtttcaccgtgtt

SEQ ID NO: 49598 - DNA, 80 bp, synthetic construct
  misc_feature 1..80: note = Artificially Synthesized Probe
  source 1..80: mol_type = other DNA
cccttctctgtgttatcttgaatttcattgagcttcctcaaaacagctgttttgaattctccgtctgaaaggtcacatag

SEQ ID NO: 49599 - DNA, 80 bp, synthetic construct; identical to SEQ ID NO: 23932
  misc_feature 1..80: note = Artificially Synthesized Probe
  source 1..80: mol_type = other DNA

SEQ ID NO: 49600 - DNA, 80 bp, synthetic construct
  misc_feature 1..80: note = Artificially Synthesized Probe
  source 1..80: mol_type = other DNA
ctgtctctaccaaaaaatacaaaaatttgccaggcgtaggggtgggcgcctgtagtcccagctacttgggaggctgaggc

SEQ ID NO: 49601 - DNA, 80 bp, synthetic construct
  misc_feature 1..80: note = Artificially Synthesized Probe
  source 1..80: mol_type = other DNA
tccctaaattaccaggcagaaactcttctcttcccttactttctccaaacaaacgcagtctctctatctctgtacggagc

SEQ ID NO: 49602 - DNA, 80 bp, synthetic construct; identical to SEQ ID NO: 23933
  misc_feature 1..80: note = Artificially Synthesized Probe
  source 1..80: mol_type = other DNA

SEQ ID NO: 49603 - DNA, 80 bp, synthetic construct
  misc_feature 1..80: note = Artificially Synthesized Probe
  source 1..80: mol_type = other DNA
ttgtagctcccataattcccctatgttatagggggtacccagtgggagataagtgagtcatgggggcagtttcccccata

SEQ ID NO: 49604 - DNA, 80 bp, synthetic construct
  misc_feature 1..80: note = Artificially Synthesized Probe
  source 1..80: mol_type = other DNA
cgaggcgggtggatcatgaggtcaggagatcgagaccatcctggctaacatggtgaaaccccgtctctactaaaaactac

SEQ ID NO: 49605 - DNA, 80 bp, synthetic construct
  misc_feature 1..80: note = Artificially Synthesized Probe
  source 1..80: mol_type = other DNA
aaaaaaaaagacgtgcctttcagcttctgccatgattgtgaggcctccccagccacgtggaactgggagttcattaagcc

SEQ ID NO: 49606 - DNA, 80 bp, synthetic construct; identical to SEQ ID NO: 23911
  misc_feature 1..80: note = Artificially Synthesized Probe
  source 1..80: mol_type = other DNA

SEQ ID NO: 49607 - DNA, 80 bp, synthetic construct; identical to SEQ ID NO: 23934
  misc_feature 1..80: note = Artificially Synthesized Probe
  source 1..80: mol_type = other DNA

SEQ ID NO: 49608 - DNA, 80 bp, synthetic construct
  misc_feature 1..80: note = Artificially Synthesized Probe
  source 1..80: mol_type = other DNA
gcaggagtctttccccagggccaccacagctgggaatgcgctgggtcacacctgaaatcagcacggcactgggtctcacc

SEQ ID NO: 49609 - DNA, 80 bp, synthetic construct; identical to SEQ ID NO: 23909
  misc_feature 1..80: note = Artificially Synthesized Probe
  source 1..80: mol_type = other DNA

SEQ ID NO: 49610 - DNA, 80 bp, synthetic construct
  misc_feature 1..80: note = Artificially Synthesized Probe
  source 1..80: mol_type = other DNA
gttagggcctggaatgggggcctcaggactccgcctggtgccctatcctcctatggctgagctggtatccaagttgcaaa

SEQ ID NO: 49611 - DNA, 80 bp, synthetic construct
  misc_feature 1..80: note = Artificially Synthesized Probe
  source 1..80: mol_type = other DNA
acttgttctgagcccagcaaggcaccaggacttgcccagaaattgcagtccttgtggcctgactgcctttcaagtttatt

SEQ ID NO: 49612 - DNA, 80 bp, synthetic construct
  misc_feature 1..80: note = Artificially Synthesized Probe
  source 1..80: mol_type = other DNA
attcccagctaatttttgtatttttagtagagacggggtttcaccatgttggtgaggctggtctcgaactcctgacctcg

SEQ ID NO: 49613 - DNA, 80 bp, synthetic construct; identical to SEQ ID NO: 23935
  misc_feature 1..80: note = Artificially Synthesized Probe
  source 1..80: mol_type = other DNA

SEQ ID NO: 49614 - DNA, 80 bp, synthetic construct
  misc_feature 1..80: note = Artificially Synthesized Probe
  source 1..80: mol_type = other DNA
cccatcccaaaatctcaaaccaccccaaaagctcattggcttaaaatagcagtcaaatatgacatctcatggttcagtag

SEQ ID NO: 49615 - DNA, 80 bp, synthetic construct
  misc_feature 1..80: note = Artificially Synthesized Probe
  source 1..80: mol_type = other DNA
atcttcctcccaactccctggaccaaggtggcatttcctgcacacccctccaggccaagatgatgctcgctctcaactct

SEQ ID NO: 49616 - DNA, 80 bp, synthetic construct
  misc_feature 1..80: note = Artificially Synthesized Probe
  source 1..80: mol_type = other DNA
ggtgctggctaccacacccggctgatttttgttttgcctttttttttttttttttctgagatggagttttgctcttgttg

SEQ ID NO: 49617 - DNA, 80 bp, synthetic construct
  misc_feature 1..80: note = Artificially Synthesized Probe
  source 1..80: mol_type = other DNA
cccagctaatttttttgtattttcagtagagacagggtttcaccaagttggctaggctggtcttgaacccctgacctcag

SEQ ID NO: 49618 - DNA, 80 bp, synthetic construct; identical to SEQ ID NO: 23936
  misc_feature 1..80: note = Artificially Synthesized Probe
  source 1..80: mol_type = other DNA

SEQ ID NO: 49619 - DNA, 80 bp, synthetic construct
  misc_feature 1..80: note = Artificially Synthesized Probe
  source 1..80: mol_type = other DNA
tcaagtgattctcgtgcctcagcctcctgagtagctgggattacaggcatgcaccaccatgcctggttaatttttttgta

SEQ ID NO: 49620 - DNA, 80 bp, synthetic construct
  misc_feature 1..80: note = Artificially Synthesized Probe
  source 1..80: mol_type = other DNA
ttgcattgactctaaattatgtaaacatccaattataagacagagatttcagactaaatgaaaaagcatgacccaactct

SEQ ID NO: 49621 - DNA, 80 bp, synthetic construct
  misc_feature 1..80: note = Artificially Synthesized Probe
  source 1..80: mol_type = other DNA
gtgcccaccaccacacccggctaattttttgtatttttagtagagatgaggtttcactatgttggccaggctggtctcaa

SEQ ID NO: 49622 - DNA, 80 bp, synthetic construct; identical to SEQ ID NO: 23937
  misc_feature 1..80: note = Artificially Synthesized Probe
  source 1..80: mol_type = other DNA

SEQ ID NO: 49623 - DNA, 80 bp, synthetic construct
  misc_feature 1..80: note = Artificially Synthesized Probe
  source 1..80: mol_type = other DNA
aacaactagtatccagatattttaagaacccttaaaagtcaatagctagaaaacaaacaacccaattatttaaaaagggc

SEQ ID NO: 49624 - DNA, 80 bp, synthetic construct
  misc_feature 1..80: note = Artificially Synthesized Probe
  source 1..80: mol_type = other DNA
gattgcttgaggccaggagtttgagaccaacttgggcaacatactgagataccgtctctacaaacataaaaattaggggc

SEQ ID NO: 49625 - DNA, 80 bp, synthetic construct
  misc_feature 1..80: note = Artificially Synthesized Probe
  source 1..80: mol_type = other DNA
taagaacgatatgatgtgtggatttcactacatttggctcctggatgctataaaaggacttggatttctgacttggctca

SEQ ID NO: 49626 - DNA, 80 bp, synthetic construct
  misc_feature 1..80: note = Artificially Synthesized Probe
  source 1..80: mol_type = other DNA
tgcctgtaattccagctatttgggaggctgaggcaggagaattgcttgaaccccggaggtggaggttgcagtgagttgaa

SEQ ID NO: 49627 - DNA, 80 bp, synthetic construct; identical to SEQ ID NO: 23938
  misc_feature 1..80: note = Artificially Synthesized Probe
  source 1..80: mol_type = other DNA

SEQ ID NO: 49628 - DNA, 80 bp, synthetic construct
  misc_feature 1..80: note = Artificially Synthesized Probe
  source 1..80: mol_type = other DNA
ccttggcctcccaaagggctaggattataggcatgagccactatgactggctggattaatcaagtaatttttttatgatt

SEQ ID NO: 49629 - DNA, 80 bp, synthetic construct
  misc_feature 1..80: note = Artificially Synthesized Probe
  source 1..80: mol_type = other DNA
tgcctcactcagcctccagagtagctgggattataggcgcctgccaccatgcccagctaatttgttttaatagagatagg

SEQ ID NO: 49630 - DNA, 80 bp, synthetic construct
  misc_feature 1..80: note = Artificially Synthesized Probe
  source 1..80: mol_type = other DNA
gtggcacgatatcggcttagtgcaatctctgcctcccgggttcaagtgattttcctgcctcagcctcctgagtagctggg

SEQ ID NO: 49631 - DNA, 80 bp, synthetic construct; identical to SEQ ID NO: 23939
  misc_feature 1..80: note = Artificially Synthesized Probe
  source 1..80: mol_type = other DNA

SEQ ID NO: 49632 - DNA, 80 bp, synthetic construct
  misc_feature 1..80: note = Artificially Synthesized Probe
  source 1..80: mol_type = other DNA
cgggaggctgagtcacgagaattgcttgaacccaggaggtggaggttgcagagagctgagatcacaccactgcaccccag

SEQ ID NO: 49633 - DNA, 80 bp, synthetic construct
  misc_feature 1..80: note = Artificially Synthesized Probe
  source 1..80: mol_type = other DNA
cacataggagtgagtaaaaccagtgaaattggaagattaaggtcttagaattgaactaatgtcaatgtcctgttttgatg

SEQ ID NO: 49634 - DNA, 80 bp, synthetic construct
  misc_feature 1..80: note = Artificially Synthesized Probe
  source 1..80: mol_type = other DNA
ggttcaagcgattcttctgcctcagccttccaagtagctgggattataggcacctgccaccacgcccagctaagttttgt

SEQ ID NO: 49635 - DNA, 80 bp, synthetic construct; identical to SEQ ID NO: 23940
  misc_feature 1..80: note = Artificially Synthesized Probe
  source 1..80: mol_type = other DNA

SEQ ID NO: 49636 - DNA, 80 bp, synthetic construct
  misc_feature 1..80: note = Artificially Synthesized Probe
  source 1..80: mol_type = other DNA
agaatggggaggagctttttatggcggactgattaaaactcttaagcatttacccttatggttagttccttttgtttccc

SEQ ID NO: 49637 - DNA, 80 bp, synthetic construct
  misc_feature 1..80: note = Artificially Synthesized Probe
  source 1..80: mol_type = other DNA
tttgaggcccaggtgggcagatcacctgatgaggtcaggagttcgagaccagcctgaccaacagggtgaaacaccatctc

SEQ ID NO: 49638 - DNA, 80 bp, synthetic construct
  misc_feature 1..80: note = Artificially Synthesized Probe
  source 1..80: mol_type = other DNA
tgtgccattgcactccagcctgggcaacaagagtgaaactatctcagaaagaaaaaaaaaaaagcccacaagtatttgga

SEQ ID NO: 49639 - DNA, 80 bp, synthetic construct; identical to SEQ ID NO: 23941
  misc_feature 1..80: note = Artificially Synthesized Probe
  source 1..80: mol_type = other DNA

SEQ ID NO: 49640 - DNA, 80 bp, synthetic construct
  misc_feature 1..80: note = Artificially Synthesized Probe
  source 1..80: mol_type = other DNA
caggcgagcaccaccatgcccggctaatttttatatttttagtagagatggggtttcaccatgttggccaggctggtctt

SEQ ID NO: 49641 - DNA, 80 bp, synthetic construct
  misc_feature 1..80: note = Artificially Synthesized Probe
  source 1..80: mol_type = other DNA
tgtttttttctgagacagtgtcttgctctgtcgcccaggttggagtgcagtaatgcaatctcggctcactgcaagctccg

SEQ ID NO: 49642 - DNA, 80 bp, synthetic construct
  misc_feature 1..80: note = Artificially Synthesized Probe
  source 1..80: mol_type = other DNA
cctcggcctcccaaagtgctgggattacaggcgtgagccaccatgcccggcctattttattttttttgaggcggagtttc

SEQ ID NO: 49643 - DNA, 80 bp, synthetic construct
  misc_feature 1..80: note = Artificially Synthesized Probe
  source 1..80: mol_type = other DNA
tttagtaaagatggggtttcactgtgttagccaggatggtctccatctcctgacctcgtgatccgcccacctcagccacc

SEQ ID NO: 49644 - DNA, 80 bp, synthetic construct; identical to SEQ ID NO: 23942
  misc_feature 1..80: note = Artificially Synthesized Probe
  source 1..80: mol_type = other DNA

SEQ ID NO: 49645 - DNA, 80 bp, synthetic construct
  misc_feature 1..80: note = Artificially Synthesized Probe
  source 1..80: mol_type = other DNA
gagtgcaggggcacgatctcggctcacttcaacctctgcctcctgggctcaagtgattctcttgcctgagcctcctggag

SEQ ID NO: 49646 - DNA, 80 bp, synthetic construct; identical to SEQ ID NO: 23912
  misc_feature 1..80: note = Artificially Synthesized Probe
  source 1..80: mol_type = other DNA

SEQ ID NO: 49647 - DNA, 80 bp, synthetic construct
  misc_feature 1..80: note = Artificially Synthesized Probe
  source 1..80: mol_type = other DNA
tcggcctcccaaagcgctgggattacaggtgtgagccacctcacccggccacttttttttttttcttttttaatgagaca

SEQ ID NO: 49648 - DNA, 80 bp, synthetic construct; identical to SEQ ID NO: 23943
  misc_feature 1..80: note = Artificially Synthesized Probe
  source 1..80: mol_type = other DNA

SEQ ID NO: 49649 - DNA, 80 bp, synthetic construct
  misc_feature 1..80: note = Artificially Synthesized Probe
  source 1..80: mol_type = other DNA
aaacaaataaaatattagctgggtgtgctggcacgagcctgtagtcccagctactcagaaggctgaggtgggaggatcac

SEQ ID NO: 49650 - DNA, 80 bp, synthetic construct
  misc_feature 1..80: note = Artificially Synthesized Probe
  source 1..80: mol_type = other DNA
attgttgattcctcaactcctctcttgctcttttgcatattggcaacataaaaagtgtcattttcgggctgggcacagtg

SEQ ID NO: 49651 - DNA, 80 bp, synthetic construct
  misc_feature 1..80: note = Artificially Synthesized Probe
  source 1..80: mol_type = other DNA
cccagctactcaggagcctgaggcaggagaataaattgcttgaacctgggaggtggaggttgcagtgagctgagatcgcg

SEQ ID NO: 49652 - DNA, 80 bp, synthetic construct; identical to SEQ ID NO: 23944
  misc_feature 1..80: note = Artificially Synthesized Probe
  source 1..80: mol_type = other DNA

SEQ ID NO: 49653 - DNA, 80 bp, synthetic construct
  misc_feature 1..80: note = Artificially Synthesized Probe
  source 1..80: mol_type = other DNA
gcccaggccggaggggcaggagtcagcagggaggtgacctcaaggtctccgtggggactaggatccggcggggctggggg

SEQ ID NO: 49654 - DNA, 80 bp, synthetic construct
  misc_feature 1..80: note = Artificially Synthesized Probe
  source 1..80: mol_type = other DNA
accaggaatggacaggcactttgagattgaccagacgagggaccctggctcagagtggcgaaggcctggcctcagagcca

SEQ ID NO: 49655 - DNA, 80 bp, synthetic construct
  misc_feature 1..80: note = Artificially Synthesized Probe
  source 1..80: mol_type = other DNA
cactcaggactcagcccttccttgtgttaaatagaaacctctttattctaagtatcgaacgttccttaatacattggatt

SEQ ID NO: 49656 - DNA, 80 bp, synthetic construct
  misc_feature 1..80: note = Artificially Synthesized Probe
  source 1..80: mol_type = other DNA
ctggccaacatggtgaaaccctgtagttattaaaaatacaaaaattttgggcgatgtatcacgcctgtaatcctagcact

SEQ ID NO: 49657 - DNA, 80 bp, synthetic construct; identical to SEQ ID NO: 23945
  misc_feature 1..80: note = Artificially Synthesized Probe
  source 1..80: mol_type = other DNA

SEQ ID NO: 49658 - DNA, 80 bp, synthetic construct
  misc_feature 1..80: note = Artificially Synthesized Probe
  source 1..80: mol_type = other DNA
ggctcaagcaatcctccggcctcagcctcccaaagtgttgggattacaggcatgagccaccgtgcctggcgtttgtttcc

SEQ ID NO: 49659 - DNA, 80 bp, synthetic construct
  misc_feature 1..80: note = Artificially Synthesized Probe
  source 1..80: mol_type = other DNA
tcagcgctgggcccgaggtcgcgctagagacggaggccggggccgaggcagacaggccaaactgggcctggccagccggg

SEQ ID NO: 49660 - DNA, 80 bp, synthetic construct
  misc_feature 1..80: note = Artificially Synthesized Probe
  source 1..80: mol_type = other DNA
tgtgttgcgcaggccacggatgtcgaggagggctgccacgtgcttctgcctgtggggagaggaacagacaggtgcatgca

SEQ ID NO: 49661 - DNA, 80 bp, synthetic construct; identical to SEQ ID NO: 23946
  misc_feature 1..80: note = Artificially Synthesized Probe
  source 1..80: mol_type = other DNA

SEQ ID NO: 49662 - DNA, 80 bp, synthetic construct
  misc_feature 1..80: note = Artificially Synthesized Probe
  source 1..80: mol_type = other DNA
acattaaaaaaaaaaaaaagctgggtgtggtggcaggcgcttgtaatcctagctactcaggagtctgaggcaagagaatc

SEQ ID NO: 49663 - DNA, 80 bp, synthetic construct
  misc_feature 1..80: note = Artificially Synthesized Probe
  source 1..80: mol_type = other DNA
gctcaaccccctaaacccaacccagctagcaaactcttaaacttagctacagattcaagttctgactcatgatccaatat

SEQ ID NO: 49664 - DNA, 80 bp, synthetic construct
  misc_feature 1..80: note = Artificially Synthesized Probe
  source 1..80: mol_type = other DNA
acttagctacagattcaagttctgactcatgatccaatattcaagttcagaaactccacatcagcaagaatactgggact

SEQ ID NO: 49665 - DNA, 80 bp, synthetic construct
  misc_feature 1..80: note = Artificially Synthesized Probe
  source 1..80: mol_type = other DNA
tgtttctctgagtatgtctgagaatgtgtctgcccaaatagcactgcaaggactggcgttgctccggcagccaccaccac

SEQ ID NO: 49666 - DNA, 80 bp, synthetic construct
  misc_feature 1..80: note = Artificially Synthesized Probe
  source 1..80: mol_type = other DNA
cgagcgacagagcaggactctgtctcaaaaataaataggccaggcgcagttacgcatgtctttaatcccagcactttggg

SEQ ID NO: 49667 - DNA, 80 bp, synthetic construct; identical to SEQ ID NO: 23947
  misc_feature 1..80: note = Artificially Synthesized Probe
  source 1..80: mol_type = other DNA

SEQ ID NO: 49668 - DNA, 80 bp, synthetic construct
  misc_feature 1..80: note = Artificially Synthesized Probe
  source 1..80: mol_type = other DNA
cagtctactgcctgggttcaagttccacctttgccacttgctaggcgtgatatttcaatagctttaattataccccttac

SEQ ID NO: 49669 - DNA, 80 bp, synthetic construct
  misc_feature 1..80: note = Artificially Synthesized Probe
  source 1..80: mol_type = other DNA
ctactaaaaatacaaaaattagccgggcgtggtggcacatgcctatacttgggaggctgaggcacaataatctcttgaac

SEQ ID NO: 49670 - DNA, 80 bp, synthetic construct
  misc_feature 1..80: note = Artificially Synthesized Probe
  source 1..80: mol_type = other DNA
gggaagccgaggcaggcagatcacttgagcccagaagttcgagaccagcctgggcaacatggtgaaacccatctctgcaa

SEQ ID NO: 49671 - DNA, 80 bp, synthetic construct; identical to SEQ ID NO: 23948
  misc_feature 1..80: note = Artificially Synthesized Probe
  source 1..80: mol_type = other DNA

SEQ ID NO: 49672 - DNA, 80 bp, synthetic construct
  misc_feature 1..80: note = Artificially Synthesized Probe
  source 1..80: mol_type = other DNA
gtcacctacaaaggaagtgacctggcaggagttgaatgccgcctgcgcctgccgctgtcccagtgcgtgtgcgcccgtgt

SEQ ID NO: 49673 - DNA, 80 bp, synthetic construct
  misc_feature 1..80: note = Artificially Synthesized Probe
  source 1..80: mol_type = other DNA
gagggaaatcttattaataatgccctggttccagcaggaaacggccgtcagacacgctcaccggctccctccctcaggag

SEQ ID NO: 49674 - DNA, 80 bp, synthetic construct
  misc_feature 1..80: note = Artificially Synthesized Probe
  source 1..80: mol_type = other DNA
cagccaaatggggcaccacggcatccagccacgaggcctgggactcctgcaggggagggagggtgcggggtcacaccctc

SEQ ID NO: 49675 - DNA, 80 bp, synthetic construct
  misc_feature 1..80: note = Artificially Synthesized Probe
  source 1..80: mol_type = other DNA
gccagtatggtgaaaccccatctctactaaaaatacaaaaattagccaggcgtggtggtgcacacctgtaatcccaacta

SEQ ID NO: 49676 - DNA, 80 bp, synthetic construct; identical to SEQ ID NO: 23949
  misc_feature 1..80: note = Artificially Synthesized Probe
  source 1..80: mol_type = other DNA

SEQ ID NO: 49677 - DNA, 80 bp, synthetic construct
  misc_feature 1..80: note = Artificially Synthesized Probe
  source 1..80: mol_type = other DNA
aggaggtggaggttacagtgagctgagatcatgccactgcactccatcctgggtgagagtgagactccatctcaaaaata

SEQ ID NO: 49678 - DNA, 80 bp, synthetic construct
  misc_feature 1..80: note = Artificially Synthesized Probe
  source 1..80: mol_type = other DNA
aaattttccaaagaaaacattccaaggactccgggcttggaactccaagaagagcgactgaatgaggcccttccagccca

SEQ ID NO: 49679 - DNA, 80 bp, synthetic construct; identical to SEQ ID NO: 23913
  misc_feature 1..80: note = Artificially Synthesized Probe
  source 1..80: mol_type = other DNA

SEQ ID NO: 49680 - DNA, 80 bp, synthetic construct
  misc_feature 1..80: note = Artificially Synthesized Probe
  source 1..80: mol_type = other DNA
aacagaagaagatgatttctgctctccacctagaatggagaagtgtggggtggttgtggggcaggggggtgctgagtgca

SEQ ID NO: 49681 - DNA, 80 bp, synthetic construct
  misc_feature 1..80: note = Artificially Synthesized Probe
  source 1..80: mol_type = other DNA
gtctctactgaaaatataaaaattaggcatggtggcacatgcctgtaatcccagctactcaggaggctgaggcaggagaa

SEQ ID NO: 49682 - DNA, 80 bp, synthetic construct; identical to SEQ ID NO: 23914
  misc_feature 1..80: note = Artificially Synthesized Probe
  source 1..80: mol_type = other DNA

SEQ ID NO: 49683 - DNA, 80 bp, synthetic construct
  misc_feature 1..80: note = Artificially Synthesized Probe
  source 1..80: mol_type = other DNA
cttcgctcttctcccctagttcggtgccatggcgtcccagggtcgtcggcggaggcccctgcggaggccggagacggtgg

SEQ ID NO: 49684 - DNA, 80 bp, synthetic construct
  misc_feature 1..80: note = Artificially Synthesized Probe
  source 1..80: mol_type = other DNA
gctagtttttctatttttttttctttttagtagagatgaggtttcaccatattggccaggctggtctcaaactcctgacc

SEQ ID NO: 49685 - DNA, 80 bp, synthetic construct
  misc_feature 1..80: note = Artificially Synthesized Probe
  source 1..80: mol_type = other DNA
ccctggagcacagagcttccctcactccttaaactccagctcactagccaggcctggctttcagcccctttctttctttt

SEQ ID NO: 49686 - DNA, 80 bp, synthetic construct
  misc_feature 1..80: note = Artificially Synthesized Probe
  source 1..80: mol_type = other DNA
accatcctctttgcaatgttgagtgaaggggtgggatggtaagaaatggggaagtggcagtgcatggtggcttacacctg

SEQ ID NO: 49687 - DNA, 80 bp, synthetic construct; identical to SEQ ID NO: 23915
  misc_feature 1..80: note = Artificially Synthesized Probe
  source 1..80: mol_type = other DNA

SEQ ID NO: 49688 - DNA, 80 bp, synthetic construct
  misc_feature 1..80: note = Artificially Synthesized Probe
  source 1..80: mol_type = other DNA
aattagctgggcacggtggcgggcacttgtggtccaagctactcgggaggctgaggcaggagaatggcgtgaacccggga

SEQ ID NO: 49689 - DNA, 80 bp, synthetic construct
  misc_feature 1..80: note = Artificially Synthesized Probe
  source 1..80: mol_type = other DNA
atgggaggggtcatggcatgtttgtatgctgctgggagtatttcagaagagggagaagtcgtgatacaggggaaaggtgg

SEQ ID NO: 49690 - DNA, 80 bp, synthetic construct
  misc_feature 1..80: note = Artificially Synthesized Probe
  source 1..80: mol_type = other DNA
tcacccccactggactgttggccccatgaggacggggctgaggctgtcttggccagggccagctaacccagggaaaccac

SEQ ID NO: 49691 - DNA, 80 bp, synthetic construct; identical to SEQ ID NO: 23916
  misc_feature 1..80: note = Artificially Synthesized Probe
  source 1..80: mol_type = other DNA

SEQ ID NO: 49692 - DNA, 80 bp, synthetic construct
  misc_feature 1..80: note = Artificially Synthesized Probe
  source 1..80: mol_type = other DNA
ggccacacagggccagaatgaggagcagggctttgtcccaagggccctggggagccaaggcaagttccaagcaggagaga

SEQ ID NO: 49693 - DNA, 80 bp, synthetic construct
  misc_feature 1..80: note = Artificially Synthesized Probe
  source 1..80: mol_type = other DNA
tgacaatacaaaaatcattctgggcgtggtggtgtgcacctgtaattccagctactcaggaggctgaggcgggagaatca

SEQ ID NO: 49694 - DNA, 80 bp, synthetic construct
  misc_feature 1..80: note = Artificially Synthesized Probe
  source 1..80: mol_type = other DNA
ggaaccgacggccgcgccgagggacctgcctccactcgtggtgcagcgggaatcggcggaggaggcctggggcacggagg

SEQ ID NO: 49695 - DNA, 80 bp, synthetic construct
  misc_feature 1..80: note = Artificially Synthesized Probe
  source 1..80: mol_type = other DNA
actctgtgtccccagcaccactagcaaagagcaggtgcacagtaaacacattttgaatgaagatatgaatgaaggaagtg

SEQ ID NO: 49696 - DNA, 80 bp, synthetic construct
  misc_feature 1..80: note = Artificially Synthesized Probe
  source 1..80: mol_type = other DNA
agccaccatgcccagcctgtaatcccagtactttgggaggctgaggcaggcagatcacctgaggtcagtagttcgaaacc

SEQ ID NO: 49697 - DNA, 80 bp, synthetic construct; identical to SEQ ID NO: 23917
  misc_feature 1..80: note = Artificially Synthesized Probe
  source 1..80: mol_type = other DNA

SEQ ID NO: 49698 - DNA, 80 bp, synthetic construct
  misc_feature 1..80: note = Artificially Synthesized Probe
  source 1..80: mol_type = other DNA
ttttgtttttctctggcactcagctctgtatgggcagtgcctatagcaacattgtataacaggcagtcagcaggcagtca

SEQ ID NO: 49699 - DNA, 80 bp, synthetic construct
  misc_feature 1..80: note = Artificially Synthesized Probe
  source 1..80: mol_type = other DNA
caggggtcagggtcagggtcaggggctggagctgatgtccagccaagagcagaatctagaatggaactgggacagggatg

SEQ ID NO: 49700 - DNA, 80 bp, synthetic construct
  misc_feature 1..80: note = Artificially Synthesized Probe
  source 1..80: mol_type = other DNA
ccacaggagtcattgtggccaacttcgctggaggcttggagatctttggggccattaaggcagagctgcagggcctagag

SEQ ID NO: 49701 - DNA, 80 bp, synthetic construct; identical to SEQ ID NO: 23918
  misc_feature 1..80: note = Artificially Synthesized Probe
  source 1..80: mol_type = other DNA

SEQ ID NO: 49702 - DNA, 80 bp, synthetic construct
  misc_feature 1..80: note = Artificially Synthesized Probe
  source 1..80: mol_type = other DNA
actgatgccccagaccctaatacaaaatggcctagtatgtgcacataacctatgcataccctcccgtgcactttattttt

SEQ ID NO: 49703 - DNA, 80 bp, synthetic construct
  misc_feature 1..80: note = Artificially Synthesized Probe
  source 1..80: mol_type = other DNA
acatttttttttgagagagagcctcactctgtcgcccaggctggagtgcagcagcgtgatctcagctcactgcaacctct

SEQ ID NO: 49704 - DNA, 80 bp, synthetic construct; identical to SEQ ID NO: 23919
  misc_feature 1..80: note = Artificially Synthesized Probe
  source 1..80: mol_type = other DNA

SEQ ID NO: 49705 - DNA, 80 bp, synthetic construct
  misc_feature 1..80: note = Artificially Synthesized Probe
  source 1..80: mol_type = other DNA
ggcggggctggcggcggcccacagcgtgcgcctggcgcgcggggacctttgtgcgctggccgagcgtctggacatcgtgg

SEQ ID NO: 49706 - DNA, 80 bp, synthetic construct
  misc_feature 1..80: note = Artificially Synthesized Probe
  source 1..80: mol_type = other DNA
cggatgtgctgtcaaatagtagatcttattcattctttctaattattattattattattattattattattattattatt

SEQ ID NO: 49707 - DNA, 80 bp, synthetic construct
  misc_feature 1..80: note = Artificially Synthesized Probe
  source 1..80: mol_type = other DNA
tttagtagagacggggtttcaccacgttggtcagactggtctcgaactcctgacctcaggtgatccacccaccttggcct

SEQ ID NO: 49708 - DNA, 80 bp, synthetic construct
  misc_feature 1..80: note = Artificially Synthesized Probe
  source 1..80: mol_type = other DNA
acttctccatgcagtcaatctttattatagcagtattcgcatattcacatcaagtacatagaactttttttgccttttat

SEQ ID NO: 49709 - DNA, 80 bp, synthetic construct; identical to SEQ ID NO: 24057
  misc_feature 1..80: note = Artificially Synthesized Probe
  source 1..80: mol_type = other DNA

SEQ ID NO: 49710 - DNA, 80 bp, synthetic construct
  misc_feature 1..80: note = Artificially Synthesized Probe
  source 1..80: mol_type = other DNA
agaataggcaaatctatagagatagggagcaaatgggtggttacatagggatgggaggaatgggaagtgactgctaacgg

SEQ ID NO: 49711 - DNA, 80 bp, synthetic construct
  misc_feature 1..80: note = Artificially Synthesized Probe
  source 1..80: mol_type = other DNA
aattttcttttgacttataagcctaaacaggcttagaacacaagccatcttttggggtaatcaggtgagtctaatatttt

SEQ ID NO: 49712 - DNA, 80 bp, synthetic construct
  misc_feature 1..80: note = Artificially Synthesized Probe
  source 1..80: mol_type = other DNA
acattccatgttggccaggatcttgtgggaaaaggaagtttcatacacttgttgagaatcaaaatcttttctgatattaa

SEQ ID NO: 49713 - DNA, 80 bp, synthetic construct; identical to SEQ ID NO: 24058
  misc_feature 1..80: note = Artificially Synthesized Probe
  source 1..80: mol_type = other DNA

SEQ ID NO: 49714 - DNA, 80 bp, synthetic construct
  misc_feature 1..80: note = Artificially Synthesized Probe
  source 1..80: mol_type = other DNA
cactatgggaggccacagagggaggattgcttgagcccaagagtttgagaccagcctgggcaacatagcaaggccctacc

SEQ ID NO: 49715 - DNA, 80 bp, synthetic construct
  misc_feature 1..80: note = Artificially Synthesized Probe
  source 1..80: mol_type = other DNA
aaaattaaaaataaaaatctcaaggaacatatatgcttattctttttagttattgcacatactccaggatctagaaagtc

SEQ ID NO: 49716 - DNA, 80 bp, synthetic construct
  misc_feature 1..80: note = Artificially Synthesized Probe
  source 1..80: mol_type = other DNA
aaaattagggccaggtgcagtggctcaagcctgtaatcccagcactttgggaggctgaggtgagcagatcacctgagctc

SEQ ID NO: 49717 - DNA, 80 bp, synthetic construct
  misc_feature 1..80: note = Artificially Synthesized Probe
  source 1..80: mol_type = other DNA
cagggtctggttacattgcccaggctggtcttgaactcctgggctcaagcaatccttctgccttggcctcccaaagtgtt

SEQ ID NO: 49718 - DNA, 80 bp, synthetic construct; identical to SEQ ID NO: 24059
  misc_feature 1..80: note = Artificially Synthesized Probe
  source 1..80: mol_type = other DNA

SEQ ID NO: 49719 - DNA, 80 bp, synthetic construct
  misc_feature 1..80: note = Artificially Synthesized Probe
  source 1..80: mol_type = other DNA
ggcactgtggaaagcagtttggaaatttctcaaagaacttaaaatagaactaccattcgacccagcagtctcattgctcg

SEQ ID NO: 49720 - DNA, 80 bp, synthetic construct
  misc_feature 1..80: note = Artificially Synthesized Probe
  source 1..80: mol_type = other DNA
gccattatcctaagcaaattaacacaggaagagaaaaccaaatatcaaatgttctcatttctaagtaggagctaaacttt

SEQ ID NO: 49721 - DNA, 80 bp, synthetic construct
  misc_feature 1..80: note = Artificially Synthesized Probe
  source 1..80: mol_type = other DNA
gctgtgcatgtacctcctgaatctaaaataaaagttgaaaaaaaaattttaataataattctttctcccaaagtctattt

SEQ ID NO: 49722 - DNA, 80 bp, synthetic construct; identical to SEQ ID NO: 24060
  misc_feature 1..80: note = Artificially Synthesized Probe
  source 1..80: mol_type = other DNA

SEQ ID NO: 49723 - DNA, 80 bp, synthetic construct
  misc_feature 1..80: note = Artificially Synthesized Probe
  source 1..80: mol_type = other DNA
gttcattcctttctactgagtagtattcccttttatagatacaccacaatccaaccattcacctgtttatggacatttgg

SEQ ID NO: 49724 - DNA, 80 bp, synthetic construct
  misc_feature 1..80: note = Artificially Synthesized Probe
  source 1..80: mol_type = other DNA
tcttgctctttcacccaggctggagtgcaatggtgcacatagcacaatgtagcttttaactcctgggcacaagtgatcct

SEQ ID NO: 49725 - DNA, 80 bp, synthetic construct
  misc_feature 1..80: note = Artificially Synthesized Probe
  source 1..80: mol_type = other DNA
gagattacaggtgtgagccaccgtgtccagcctaacgttttacataactaccatactattatttcacaaaattatggtaa

SEQ ID NO: 49726 - DNA, 80 bp, synthetic construct
  misc_feature 1..80: note = Artificially Synthesized Probe
  source 1..80: mol_type = other DNA
cccagcccctggcaagcaccattctactctgtgtctctgtgagtctgaacactctaggtacttcaataagtggaatcata

SEQ ID NO: 49727 - DNA, 80 bp, synthetic construct
  misc_feature 1..80: note = Artificially Synthesized Probe
  source 1..80: mol_type = other DNA
cacaccactgcactccagcctgggcaacagaatgagactctgtctcaaaaacaaaaaaattaccagggtgtggtggtact

SEQ ID NO: 49728 - DNA, 80 bp, synthetic construct; identical to SEQ ID NO: 24061
  misc_feature 1..80: note = Artificially Synthesized Probe
  source 1..80: mol_type = other DNA

SEQ ID NO: 49729 - DNA, 80 bp, synthetic construct
  misc_feature 1..80: note = Artificially Synthesized Probe
  source 1..80: mol_type = other DNA
ctatactgttttccatagcagttgctccattttacatttccaccaacagtgcaacaggggtccaatttctccacaccctt

SEQ ID NO: 49730 - DNA, 80 bp, synthetic construct
  misc_feature 1..80: note = Artificially Synthesized Probe
  source 1..80: mol_type = other DNA
atatgctcgtggccatctggatatcttcattaaagaaatgtctgttcaagtcctctgcccattttttaacaaggttgtat

SEQ ID NO: 49731 - DNA, 80 bp, synthetic construct
  misc_feature 1..80: note = Artificially Synthesized Probe
  source 1..80: mol_type = other DNA
aagttttaaattctgataatagtacaatttttccattttttcttgtgttccctgggcttttggcatcacggccaagaaat

SEQ ID NO: 49732 - DNA, 80 bp, synthetic construct; identical to SEQ ID NO: 24062
  misc_feature 1..80: note = Artificially Synthesized Probe
  source 1..80: mol_type = other DNA

SEQ ID NO: 49733 - DNA, 80 bp, synthetic construct
  misc_feature 1..80: note = Artificially Synthesized Probe
  source 1..80: mol_type = other DNA
gatacggtatgaattttaggacggactttctatttctgaggaaaaaaaaaaaaagcccgttgggattttgaaaaggtttc

SEQ ID NO: 49734 - DNA, 80 bp, synthetic construct
  misc_feature 1..80: note = Artificially Synthesized Probe
  source 1..80: mol_type = other DNA
tatttaatttgcattttcctaatgactaatgttgagcgtcttctcatgcgtttattaccatccatatatctttgatgaaa

SEQ ID NO: 49735 - DNA, 80 bp, synthetic construct
  misc_feature 1..80: note = Artificially Synthesized Probe
  source 1..80: mol_type = other DNA
cccgagcagctggggttacaggcgcctgccaccacgcccagctaatttttgcatttttagtaaagatggggtttcaccat

SEQ ID NO: 49736 - DNA, 80 bp, synthetic construct; identical to SEQ ID NO: 24063
  misc_feature 1..80: note = Artificially Synthesized Probe
  source 1..80: mol_type = other DNA

SEQ ID NO: 49737 - DNA, 80 bp, synthetic construct
  misc_feature 1..80: note = Artificially Synthesized Probe
  source 1..80: mol_type = other DNA
acactatcactctatcaaaagtctagtgcttctaacagaatgcagtcctttttatagtcatacttggtgttgaggggaaa

SEQ ID NO: 49738 - DNA, 80 bp, synthetic construct
  misc_feature 1..80: note = Artificially Synthesized Probe
  source 1..80: mol_type = other DNA
tttcctttatacagtaaaccttcttggacaattccttcaagtagaacctatgaaaagtgaactccttctctggaaaggac

SEQ ID NO: 49739 - DNA, 80 bp, synthetic construct
  misc_feature 1..80: note = Artificially Synthesized Probe
  source 1..80: mol_type = other DNA
tatataattttttccctgagtgcttttaaaacaatattctttggttttattatgtctatcctggattcaaattgtttgtc

SEQ ID NO: 49740 - DNA, 80 bp, synthetic construct
  misc_feature 1..80: note = Artificially Synthesized Probe
  source 1..80: mol_type = other DNA
ctcttttatattttctataactctctttcttcactttccagagttcactaattcattctttggctgggtttaatctagct

SEQ ID NO: 49741 - DNA, 80 bp, synthetic construct; identical to SEQ ID NO: 24064
  misc_feature 1..80: note = Artificially Synthesized Probe
  source 1..80: mol_type = other DNA

SEQ ID NO: 49742 - DNA, 80 bp, synthetic construct
  misc_feature 1..80: note = Artificially Synthesized Probe
  source 1..80: mol_type = other DNA
tttgaagttaagtttccaagtaactgacagagatagaaatgaaatagtggttatttttagtgaattgggaggggcacagg

SEQ ID NO: 49743 - DNA, 80 bp, synthetic construct
  misc_feature 1..80: note = Artificially Synthesized Probe
  source 1..80: mol_type = other DNA
aaaaaagcgtgggtttgcgggggaagttgcagtcatcctaacactttactcctaaatacttatacatgtaattcctaaga

SEQ ID NO: 49744 - DNA, 80 bp, synthetic construct
  misc_feature 1..80: note = Artificially Synthesized Probe
  source 1..80: mol_type = other DNA
cttggtcttgtacagtgtggaataatccccaacctttttattgtccaagacattaacttatcaaggagtctagggctatt

SEQ ID NO: 49745 - DNA, 80 bp, synthetic construct; identical to SEQ ID NO: 24065
  misc_feature 1..80: note = Artificially Synthesized Probe
  source 1..80: mol_type = other DNA

SEQ ID NO: 49746 - DNA, 80 bp, synthetic construct
  misc_feature 1..80: note = Artificially Synthesized Probe
  source 1..80: mol_type = other DNA
ctggacaatgcaggcagtataaatttgaatcccacacaatgatgagaataggtccatagttaaaaaatcacaggggaaac

SEQ ID NO: 49747 - DNA, 80 bp, synthetic construct
  misc_feature 1..80: note = Artificially Synthesized Probe
  source 1..80: mol_type = other DNA
tgggttccaactacctttgtgacacaggctgaaggcccagtgttgtattcccacacattgatattcacatcctttgttcc

SEQ ID NO: 49748 - DNA, 80 bp, synthetic construct
  misc_feature 1..80: note = Artificially Synthesized Probe
  source 1..80: mol_type = other DNA
tctactattctacttcctacccgtcttctatttgaagagccaactctgcttgtgtgaagttatttgaagtgaaataccta

SEQ ID NO: 49749 - DNA, 80 bp, synthetic construct; identical to SEQ ID NO: 24066
  misc_feature 1..80: note = Artificially Synthesized Probe
  source 1..80: mol_type = other DNA

SEQ ID NO: 49750 - DNA, 80 bp, synthetic construct
  misc_feature 1..80: note = Artificially Synthesized Probe
  source 1..80: mol_type = other DNA
cacccggccaattttgtatttatagtagagatgtgggtttcaccatgttggccaggctggtctagaactcctgacctcag

SEQ ID NO: 49751 - DNA, 80 bp, synthetic construct
  misc_feature 1..80: note = Artificially Synthesized Probe
  source 1..80: mol_type = other DNA
aggccatacaaaaatagatggtgggttagatttgttgagggttatagttcagcgataccttaacatatcagctcctatgc

SEQ ID NO: 49752 - DNA, 80 bp, synthetic construct
  misc_feature 1..80: note = Artificially Synthesized Probe
  source 1..80: mol_type = other DNA
aagtaagtaatatcagagtttccaacagctttccttttctcaattataatacctctcagaaaaaccttcaagtacaagtc

SEQ ID NO: 49753 - DNA, 80 bp, synthetic construct
  misc_feature 1..80: note = Artificially Synthesized Probe
  source 1..80: mol_type = other DNA
aaatattggtgcttttatgtgctaaattcccaatagatggagtactggcttggaagatacagttcttgtaaattttgaca

SEQ ID NO: 49754 - DNA, 80 bp, synthetic construct; identical to SEQ ID NO: 24067
  misc_feature 1..80: note = Artificially Synthesized Probe
  source 1..80: mol_type = other DNA

SEQ ID NO: 49755 - DNA, 80 bp, synthetic construct
  misc_feature 1..80: note = Artificially Synthesized Probe
  source 1..80: mol_type = other DNA
attgactctgttaaggttttttttttgtgggggggggcatacataatttcaaaattgtatttaatccatctgtctcctac

SEQ ID NO: 49756 - DNA, 80 bp, synthetic construct
  misc_feature 1..80: note = Artificially Synthesized Probe
  source 1..80: mol_type = other DNA
gtgggcccaattttattttcttctacatatgccagcaccaaaaattaaataattcaccttcttcttactgattgaaccat

SEQ ID NO: 49757 - DNA, 80 bp, synthetic construct; identical to SEQ ID NO: 24068
  misc_feature 1..80: note = Artificially Synthesized Probe
  source 1..80: mol_type = other DNA

SEQ ID NO: 49758 - DNA, 80 bp, synthetic construct
  misc_feature 1..80: note = Artificially Synthesized Probe
  source 1..80: mol_type = other DNA
tttttgtttgcttctttattaaacagaagttggaacttttgctctctccatgtctcttatcttttttctcatatttgccc

SEQ ID NO: 49759 - DNA, 80 bp, synthetic construct
  misc_feature 1..80: note = Artificially Synthesized Probe
  source 1..80: mol_type = other DNA
ttgcacaaactctgtggtcctctgaatgactcaatttttatatcaaactgatttggcttcaagaatgaagtacatcctga

SEQ ID NO: 49760 - DNA, 80 bp, synthetic construct
  misc_feature 1..80: note = Artificially Synthesized Probe
  source 1..80: mol_type = other DNA
ggctggagtgcagtggtgcagtcttggctcactgcaacctctgcctcccgggttcaagcaattcttgtgcctcagcctcc

SEQ ID NO: 49761 - DNA, 80 bp, synthetic construct
  misc_feature 1..80: note = Artificially Synthesized Probe
  source 1..80: mol_type = other DNA
gttgacaaactctgatattgtggtttataataatatatattttggtcttcaaccctttggcctccaaccccagttctagg

SEQ ID NO: 49762 - DNA, 80 bp, synthetic construct
  misc_feature 1..80: note = Artificially Synthesized Probe
  source 1..80: mol_type = other DNA
cctaggtggtaggagcatcttttgttccaacaaggtgagttttggtgggttcctgaatggaaggtggtcaaaagaaagac

SEQ ID NO: 49763 - DNA, 80 bp, synthetic construct; identical to SEQ ID NO: 24069
  misc_feature 1..80: note = Artificially Synthesized Probe
  source 1..80: mol_type = other DNA

SEQ ID NO: 49764 - DNA, 80 bp, synthetic construct
  misc_feature 1..80: note = Artificially Synthesized Probe
  source 1..80: mol_type = other DNA
agctattctagcaaatgatcaaagattagaagatgtgggaatccttgatttatagccagctggtcagaagtgtaagtcac

SEQ ID NO: 49765 - DNA, 80 bp, synthetic construct
  misc_feature 1..80: note = Artificially Synthesized Probe
  source 1..80: mol_type = other DNA
ttgattatctacagagaactggagattgcttggtggggaaaaacacccccacacatctagtcacaaaaatttgttgtgtt

SEQ ID NO: 49766 - DNA, 80 bp, synthetic construct; identical to SEQ ID NO: 24070
  misc_feature 1..80: note = Artificially Synthesized Probe
  source 1..80: mol_type = other DNA

SEQ ID NO: 49767 - DNA, 80 bp, synthetic construct
  misc_feature 1..80: note = Artificially Synthesized Probe
  source 1..80: mol_type = other DNA
actcagcaacccattatcagatgtctaaaaatatcaggccatgacctttaaaaaattttttttgaattcagaatttcaat

SEQ ID NO: 49768 - DNA, 80 bp, synthetic construct
  misc_feature 1..80: note = Artificially Synthesized Probe
  source 1..80: mol_type = other DNA
gaggcaaatccacttctttgtaatctgctgactatgctatctgcttcatcaggattttgctaagaatggctcccttcatg

SEQ ID NO: 49769 - DNA, 80 bp, synthetic construct
  misc_feature 1..80: note = Artificially Synthesized Probe
  source 1..80: mol_type = other DNA
tcaatgaaatttctggaaaggaacaaagatataaaggcaagtgtttagcgtgctatcttggactacaaatctaagtccac

SEQ ID NO: 49770 - DNA, 80 bp, synthetic construct; identical to SEQ ID NO: 24071
  misc_feature 1..80: note = Artificially Synthesized Probe
  source 1..80: mol_type = other DNA

SEQ ID NO: 49771 - DNA, 80 bp, synthetic construct; identical to SEQ ID NO: 23961
  misc_feature 1..80: note = Artificially Synthesized Probe
  source 1..80: mol_type = other DNA

SEQ ID NO: 49772 - DNA, 80 bp, synthetic construct
  misc_feature 1..80: note = Artificially Synthesized Probe
  source 1..80: mol_type = other DNA
gatatacagtttttctgagtattgaatacgaattgttaaactgggagtatgacggacaagaacaagttacttatttaatc

SEQ ID NO: 49773 - DNA, 80 bp, synthetic construct
  misc_feature 1..80: note = Artificially Synthesized Probe
  source 1..80: mol_type = other DNA
gctttagtgatacctgtaaatttctcttggcctctctcataaatatgaggaggctagttaaacctttttttttttttttt

SEQ ID NO: 49774 - DNA, 80 bp, synthetic construct
  misc_feature 1..80: note = Artificially Synthesized Probe
  source 1..80: mol_type = other DNA
tacaggcacccaccaccacgccccgctaatctttttgtatttttagtagagccaaggtttcaccgtgtgttagccaggac

SEQ ID NO: 49775 - DNA, 80 bp, synthetic construct; identical to SEQ ID NO: 24072
  misc_feature 1..80: note = Artificially Synthesized Probe
  source 1..80: mol_type = other DNA

SEQ ID NO: 49776 - DNA, 80 bp, synthetic construct
  misc_feature 1..80: note = Artificially Synthesized Probe
  source 1..80: mol_type = other DNA
ggggcatccctggaaagatatgcttagtaattccccatcttaatgtgggaaaaataattttaattttattctacccaaca

SEQ ID NO: 49777 - DNA, 80 bp, synthetic construct
  misc_feature 1..80: note = Artificially Synthesized Probe
  source 1..80: mol_type = other DNA
caataaatgatgcctttagaaagccatatttcctaagataaaaacttacaggctggtaactcgtaactccattagttttc

SEQ ID NO: 49778 - DNA, 80 bp, synthetic construct
  misc_feature 1..80: note = Artificially Synthesized Probe
  source 1..80: mol_type = other DNA
ttgtatttggaatttttattgtcaaaagtaaccacagacatttaaaaagtagtgatgtatacagatgggttacttattaa

SEQ ID NO: 49779 - DNA, 80 bp, synthetic construct; identical to SEQ ID NO: 24073
  misc_feature 1..80: note = Artificially Synthesized Probe
  source 1..80: mol_type = other DNA

SEQ ID NO: 49780 - DNA, 80 bp, synthetic construct
  misc_feature 1..80: note = Artificially Synthesized Probe
  source 1..80: mol_type = other DNA
gccaccaaataattacatatttttcattcctgtatgacatggatgcctctatttgcatgacctctgagtatgaagtaata

SEQ ID NO: 49781 - DNA, 80 bp, synthetic construct
  misc_feature 1..80: note = Artificially Synthesized Probe
  source 1..80: mol_type = other DNA
gattttgaaaaactgaaagagatgaaggtagcactgaaaggctagaagaggaagaagatgtaacggtatccattgatgca

SEQ ID NO: 49782 - DNA, 80 bp, synthetic construct
  misc_feature 1..80: note = Artificially Synthesized Probe
  source 1..80: mol_type = other DNA
tatattcaatccggactttgtcctgacattaacaaaagagaatataaaattttagcctttgattataatcttttcaccag

SEQ ID NO: 49783 - DNA, 80 bp, synthetic construct
  misc_feature 1..80: note = Artificially Synthesized Probe
  source 1..80: mol_type = other DNA
tatgaaaagtaacagtttacttcttatccaaatcaatcactacttgacatttaaggagaaagtcaactgcagccagaata

SEQ ID NO: 49784 - DNA, 80 bp, synthetic construct
  misc_feature 1..80: note = Artificially Synthesized Probe
  source 1..80: mol_type = other DNA
ataataaaaaagcacagtatttccaattttctggtccacttatatttaccttccaaatcatgtctaacgtaagataaaac

SEQ ID NO: 49785 - DNA, 80 bp, synthetic construct
  misc_feature 1..80: note = Artificially Synthesized Probe
  source 1..80: mol_type = other DNA
tttaatcagctatggaacatacacaaatgtattaggaaggaatgattcttaaaaaaaccgttcacagcttagaataaaaa

SEQ ID NO: 49786 - DNA, 80 bp, synthetic construct; identical to SEQ ID NO: 24074
  misc_feature 1..80: note = Artificially Synthesized Probe
  source 1..80: mol_type = other DNA

SEQ ID NO: 49787 - DNA, 80 bp, synthetic construct
  misc_feature 1..80: note = Artificially Synthesized Probe
  source 1..80: mol_type = other DNA
cttataccctacagccaagaaattatggggctactatccatcagagtatcttcctagaagtttcatttgatgaaggctat

SEQ ID NO: 49788 - DNA, 80 bp, synthetic construct
  misc_feature 1..80: note = Artificially Synthesized Probe
  source 1..80: mol_type = other DNA
caaacatttatgaaagagagaagcaaatattttaaaatggcctttcccgtctctcaaggagtttactgttgggcagtgga

SEQ ID NO: 49789 - DNA, 80 bp, synthetic construct
  misc_feature 1..80: note = Artificially Synthesized Probe
  source 1..80: mol_type = other DNA
ctgtaacaaagagtttgttttttctgtaacaaaggcgagaaagtttaagacacatgaaaaactatagataggtatagctc

SEQ ID NO: 49790 - DNA, 80 bp, synthetic construct; identical to SEQ ID NO: 24075
  misc_feature 1..80: note = Artificially Synthesized Probe
  source 1..80: mol_type = other DNA

SEQ ID NO: 49791 - DNA, 80 bp, synthetic construct
  misc_feature 1..80: note = Artificially Synthesized Probe
  source 1..80: mol_type = other DNA
tgccctacccagaccctgtttcatagtagatgagggcattataaacagatagattccaaattttctgagctacaatttgg

SEQ ID NO: 49792 - DNA, 80 bp, synthetic construct
  misc_feature 1..80: note = Artificially Synthesized Probe
  source 1..80: mol_type = other DNA
ctttgaagatcacataaatgcagtctggaacacaaaggttcctcctgcatggataaaatattcttatttactgtcacctg

SEQ ID NO: 49793 - DNA, 80 bp, synthetic construct
  misc_feature 1..80: note = Artificially Synthesized Probe
  source 1..80: mol_type = other DNA
gcttttccttttgttaagtacaaaacatctacttattccatctgtccctatcctcaaagctgcaatctaccaaggcccct

SEQ ID NO: 49794 - DNA, 80 bp, synthetic construct; identical to SEQ ID NO: 24076
  misc_feature 1..80: note = Artificially Synthesized Probe
  source 1..80: mol_type = other DNA

SEQ ID NO: 49795 - DNA, 80 bp, synthetic construct
  misc_feature 1..80: note = Artificially Synthesized Probe
  source 1..80: mol_type = other DNA
cagcctcccgagtggctggggctacagttgtgcaccactatgcttggctaatttttaaatttttctgtagagacaccgtt

SEQ ID NO: 49796 - DNA, 80 bp, synthetic construct
  misc_feature 1..80: note = Artificially Synthesized Probe
  source 1..80: mol_type = other DNA
gcttgccagatacaaattttgggtaagtctgaccattcaattgttctattttttcctgtcaggttaccacacactgttgg

SEQ ID NO: 49797 - DNA, 80 bp, synthetic construct
  misc_feature 1..80: note = Artificially Synthesized Probe
  source 1..80: mol_type = other DNA
cttcatccttcaacttttaattcactctgaaaataacattaccttcaaatccactctgaagatcaaagtcatcaaatgaa

SEQ ID NO: 49798 - DNA, 80 bp, synthetic construct; identical to SEQ ID NO: 24077
  misc_feature 1..80: note = Artificially Synthesized Probe
  source 1..80: mol_type = other DNA

SEQ ID NO: 49799 - DNA, 80 bp, synthetic construct
  misc_feature 1..80: note = Artificially Synthesized Probe
  source 1..80: mol_type = other DNA
attttatcatactcttctttatatggcaaatttttctcaacttcaaaataattttgtgaggattaaatgagataacacaa

SEQ ID NO: 49800 - DNA, 80 bp, synthetic construct
  misc_feature 1..80: note = Artificially Synthesized Probe
  source 1..80: mol_type = other DNA
aaaagaatctaagaagacttaatatcattaaaatgacaacgcttcccaagttgatctacagattcaatgcaatccttctc

SEQ ID NO: 49801 - DNA, 80 bp, synthetic construct
  misc_feature 1..80: note = Artificially Synthesized Probe
  source 1..80: mol_type = other DNA
caagacagcgcaataattttggaataagaacacacatatagaacagaatagaacaaggtacaactagtaaatccataaag

SEQ ID NO: 49802 - DNA, 80 bp, synthetic construct
  misc_feature 1..80: note = Artificially Synthesized Probe
  source 1..80: mol_type = other DNA
tgtaaatacactaagaaccactgaattacacactttaaaaaagtgaataatatagtatgtgaattatttctcaatagaac

SEQ ID NO: 49803 - DNA, 80 bp, synthetic construct; identical to SEQ ID NO: 24078
  misc_feature 1..80: note = Artificially Synthesized Probe
  source 1..80: mol_type = other DNA

SEQ ID NO: 49804 - DNA, 80 bp, synthetic construct
  misc_feature 1..80: note = Artificially Synthesized Probe
  source 1..80: mol_type = other DNA
gatgagaaacattctggcatagacacatcgagtcttttaaattctttgagaaaacagtcacaggaaagatgaaatattta

SEQ ID NO: 49805 - DNA, 80 bp, synthetic construct
  misc_feature 1..80: note = Artificially Synthesized Probe
  source 1..80: mol_type = other DNA
taagaaaaagtttaattatttttttctttcctcctcctccccacttcctacttagctctttagaaatgcaattatatgcc

SEQ ID NO: 49806 - DNA, 80 bp, synthetic construct
  misc_feature 1..80: note = Artificially Synthesized Probe
  source 1..80: mol_type = other DNA
cccagcaacccaggaggctgaagcgggaggatcgcctgagcccaggaggtagaggctgcaatgagccgagatcatgccac

SEQ ID NO: 49807 - DNA, 80 bp, synthetic construct; identical to SEQ ID NO: 24079
  misc_feature 1..80: note = Artificially Synthesized Probe
  source 1..80: mol_type = other DNA

SEQ ID NO: 49808 - DNA, 80 bp, synthetic construct
  misc_feature 1..80: note = Artificially Synthesized Probe
  source 1..80: mol_type = other DNA
caggaagcctgtacgtcttcttcctttaagctaactttggaataaaaaagtcactttatactagactttgctcttactaa

SEQ ID NO: 49809 - DNA, 80 bp, synthetic construct
  misc_feature 1..80: note = Artificially Synthesized Probe
  source 1..80: mol_type = other DNA
gataaattggaattccatccacatttaaactttaaaatagataaattggaattccatccacatttaaacttttgtacttc

SEQ ID NO: 49810 - DNA, 80 bp, synthetic construct
  misc_feature 1..80: note = Artificially Synthesized Probe
  source 1..80: mol_type = other DNA
cttgagtccaggtgttcgagaccagcctgggcaacatggcaaatccccatctctacaaaaaatacaaaaattatccaggc

SEQ ID NO: 49811 - DNA, 80 bp, synthetic construct; identical to SEQ ID NO: 24080
  misc_feature 1..80: note = Artificially Synthesized Probe
  source 1..80: mol_type = other DNA

SEQ ID NO: 49812 - DNA, 80 bp, synthetic construct
  misc_feature 1..80: note = Artificially Synthesized Probe
  source 1..80: mol_type = other DNA
ccagtttttttaagtgggcaaaggatttgaatagacatttctccaaagaagatatacaaatggctaacaagaacatgaaa

SEQ ID NO: 49813 - DNA, 80 bp, synthetic construct
  misc_feature 1..80: note = Artificially Synthesized Probe
  source 1..80: mol_type = other DNA
aatacaaaatagtgcagcaactttgaaaaactgtctggcagttagttcctcaaagtgtaaaacagagttaccacaagacc

SEQ ID NO: 49814 - DNA, 80 bp, synthetic construct; identical to SEQ ID NO: 23962
  misc_feature 1..80: note = Artificially Synthesized Probe
  source 1..80: mol_type = other DNA

SEQ ID NO: 49815 - DNA, 80 bp, synthetic construct
  misc_feature 1..80: note = Artificially Synthesized Probe
  source 1..80: mol_type = other DNA
tgtgtatgatgaaatattcagccataacaagaaatgaagtactgatacatactactacataaacaaactttggaaacatt

SEQ ID NO: 49816 - DNA, 80 bp, synthetic construct
  misc_feature 1..80: note = Artificially Synthesized Probe
  source 1..80: mol_type = other DNA
gataaaaatgttttggaataagatagtggtgaatatagtaaaaaccactgaattacacagttttaaaaagttaatcgtat

SEQ ID NO: 49817 - DNA, 80 bp, synthetic construct; identical to SEQ ID NO: 24081
  misc_feature 1..80: note = Artificially Synthesized Probe
  source 1..80: mol_type = other DNA

SEQ ID NO: 49818 - DNA, 80 bp, synthetic construct
  misc_feature 1..80: note = Artificially Synthesized Probe
  source 1..80: mol_type = other DNA
gaatgtctgggattcaaaccttggctaccaattacaagttgtgtaaccttggccatattattaaatccctctgtgcctga

SEQ ID NO: 49819 - DNA, 80 bp, synthetic construct
  misc_feature 1..80: note = Artificially Synthesized Probe
  source 1..80: mol_type = other DNA
aggagctgttactgtcttcatcagtctacaggggactgtaggattcaaccataaattctgaagtagttaggactcagctg

SEQ ID NO: 49820 - DNA, 80 bp, synthetic construct; identical to SEQ ID NO: 24082
  misc_feature 1..80: note = Artificially Synthesized Probe
  source 1..80: mol_type = other DNA

SEQ ID NO: 49821 - DNA, 80 bp, synthetic construct
  misc_feature 1..80: note = Artificially Synthesized Probe
  source 1..80: mol_type = other DNA
gaaaaagaaaatcaagaggatttctgatggtggtgtaaccaatttctctgttttgctacaatgaagagaagaagcaagaa

SEQ ID NO: 49822 - DNA, 80 bp, synthetic construct
  misc_feature 1..80: note = Artificially Synthesized Probe
  source 1..80: mol_type = other DNA
tcaggaaatgtaagcatagtcactagtataggggtgatatgtgacctcattctagtcaatgagatataaaaggaagagtt

SEQ ID NO: 49823 - DNA, 80 bp, synthetic construct
  misc_feature 1..80: note = Artificially Synthesized Probe
  source 1..80: mol_type = other DNA
taaataaactggaagcatctgattacatcctgtgatcctgaaactatttaaaatcaagaagacaaatctttttcctcatc

SEQ ID NO: 49824 - DNA, 80 bp, synthetic construct
  misc_feature 1..80: note = Artificially Synthesized Probe
  source 1..80: mol_type = other DNA
ccaagtatctgacaactgacctgtgtagaactagtcttacaataatttacctctacgcttcttgctatgtgaaaggaaat

SEQ ID NO: 49825 - DNA, 80 bp, synthetic construct
  misc_feature 1..80: note = Artificially Synthesized Probe
  source 1..80: mol_type = other DNA
ttatcttccaatatttatttttcaacatttatttatatatatacaacacatacatatatacacatgtacatacctatatg

SEQ ID NO: 49826 - DNA, 80 bp, synthetic construct; identical to SEQ ID NO: 24083
  misc_feature 1..80: note = Artificially Synthesized Probe
  source 1..80: mol_type = other DNA

SEQ ID NO: 49827 - DNA, 80 bp, synthetic construct
  misc_feature 1..80: note = Artificially Synthesized Probe
  source 1..80: mol_type = other DNA
aacaggggaatgacacagcagcaagagccacatgcatatgggataagaaccccttcccctcccttgtccaagtgtgcgct

SEQ ID NO: 49828 - DNA, 80 bp, synthetic construct
  misc_feature 1..80: note = Artificially Synthesized Probe
  source 1..80: mol_type = other DNA
ctttagtattgctacaaagcaagacaggactaatagatcttatctctgatgctaattatagttatttttaagttttattc

SEQ ID NO: 49829 - DNA, 80 bp, synthetic construct
  misc_feature 1..80: note = Artificially Synthesized Probe
  source 1..80: mol_type = other DNA
aatccaatccctatcaaaatcctgatgacctacttgtagaaagagaaacatcctttataaaattcacatggaggctgagc

SEQ ID NO: 49830 - DNA, 80 bp, synthetic construct
  misc_feature 1..80: note = Artificially Synthesized Probe
  source 1..80: mol_type = other DNA
ctcaggaggctgaggcacgagaatcacttgaacctgggaggtgggctgcagtgagccaagatcacaccactgcactccag

SEQ ID NO: 49831 - DNA, 80 bp, synthetic construct; identical to SEQ ID NO: 24084
  misc_feature 1..80: note = Artificially Synthesized Probe
  source 1..80: mol_type = other DNA

SEQ ID NO: 49832 - DNA, 80 bp, synthetic construct
  misc_feature 1..80: note = Artificially Synthesized Probe
  source 1..80: mol_type = other DNA
gtcatggcattggatttggtgatgatttcttggatatgatatcaaaggcaagagcaacaaaaagaaaaatagataatttg

SEQ ID NO: 49833 - DNA, 80 bp, synthetic construct
  misc_feature 1..80: note = Artificially Synthesized Probe
  source 1..80: mol_type = other DNA
taaatcagacatttctcaaaaaagatatacaaatggccaataagcacataataaaaggctcaacattgttagtcatcagg

SEQ ID NO: 49834 - DNA, 80 bp, synthetic construct
  misc_feature 1..80: note = Artificially Synthesized Probe
  source 1..80: mol_type = other DNA
ccatcccggctaaaacggtgaaaccccgtctctactaaaaatacaaaaaattagccgggcgtagtggcgggcgcctgtag

SEQ ID NO: 49835 - DNA, 80 bp, synthetic construct
  misc_feature 1..80: note = Artificially Synthesized Probe
  source 1..80: mol_type = other DNA
gattcaagcgattctcctgcctcagcctcctgaattgctgggattacaggtgcgcaccactacacacacctgaaattttt

SEQ ID NO: 49836 - DNA, 80 bp, synthetic construct; identical to SEQ ID NO: 24085
  misc_feature 1..80: note = Artificially Synthesized Probe
  source 1..80: mol_type = other DNA

SEQ ID NO: 49837 - DNA, 80 bp, synthetic construct
  misc_feature 1..80: note = Artificially Synthesized Probe
  source 1..80: mol_type = other DNA
gtccactgatggatgaatggataatcaaaatatggtaaatacatacaatgaatggattattattcagccttaaaaaggaa

SEQ ID NO: 49838 - DNA, 80 bp, synthetic construct
  misc_feature 1..80: note = Artificially Synthesized Probe
  source 1..80: mol_type = other DNA
tagaatggtggttgctacgaactagagaaagaaggaaatagagatttagtgtttaaaggctagagagtttcagttttgga

SEQ ID NO: 49839 - DNA, 80 bp, synthetic construct
  misc_feature 1..80: note = Artificially Synthesized Probe
  source 1..80: mol_type = other DNA
agatgagaaacctgcagaacggtgggtctcagtgagtaatcagtagatctagctcttcactgatgggcctttaaatatca

SEQ ID NO: 49840 - DNA, 80 bp, synthetic construct; identical to SEQ ID NO: 24086
  misc_feature 1..80: note = Artificially Synthesized Probe
  source 1..80: mol_type = other DNA

SEQ ID NO: 49841 - DNA, 80 bp, synthetic construct
  misc_feature 1..80: note = Artificially Synthesized Probe
  source 1..80: mol_type = other DNA
gttcattgtctatatatccatcccctcattaaaatataagcttaaaaaggcggagattgttggccattttttaaaaaatt

SEQ ID NO: 49842 - DNA, 80 bp, synthetic construct
  misc_feature 1..80: note = Artificially Synthesized Probe
  source 1..80: mol_type = other DNA
gcatgcctgtaatcccagctacttgggaggctgaggtaggaaaattgcttgaacctgggaggtggaggttgcagtgagcc

SEQ ID NO: 49843 - DNA, 80 bp, synthetic construct
  misc_feature 1..80: note = Artificially Synthesized Probe
  source 1..80: mol_type = other DNA
tcataattataaactcaattaatccttaacttacccaagatgtgatattatttccactttactaatgaggtggggtataa

SEQ ID NO: 49844 - DNA, 80 bp, synthetic construct; identical to SEQ ID NO: 24087
  misc_feature 1..80: note = Artificially Synthesized Probe
  source 1..80: mol_type = other DNA

SEQ ID NO: 49845 - DNA, 80 bp, synthetic construct
  misc_feature 1..80: note = Artificially Synthesized Probe
  source 1..80: mol_type = other DNA
gttactaagaatggctgaagggaatagaaatatttagcccaaataagaaaagctgtctggggggtgagggtggggaaaga

SEQ ID NO: 49846 - DNA, 80 bp, synthetic construct; identical to SEQ ID NO: 23963
  misc_feature 1..80: note = Artificially Synthesized Probe
  source 1..80: mol_type = other DNA

SEQ ID NO: 49847 - DNA, 80 bp, synthetic construct
  misc_feature 1..80: note = Artificially Synthesized Probe
  source 1..80: mol_type = other DNA
agtacctagtatcttgctcaaagtaactataagaaatgagttaagcaataaaatacatttaacacagtactgggcacaga

SEQ ID NO: 49848 - DNA, 80 bp, synthetic construct
  misc_feature 1..80: note = Artificially Synthesized Probe
  source 1..80: mol_type = other DNA
tgaattacatctcagcatgggttcaaagtctccaagacatagaaatggttggaagaaaaactgctggttatattgtctaa

SEQ ID NO: 49849 - DNA, 80 bp, synthetic construct; identical to SEQ ID NO: 24088
  misc_feature 1..80: note = Artificially Synthesized Probe
  source 1..80: mol_type = other DNA

SEQ ID NO: 49850 - DNA, 80 bp, synthetic construct
  misc_feature 1..80: note = Artificially Synthesized Probe
  source 1..80: mol_type = other DNA
gtgcttaaaaatctctggtatttggagccaaatggcaacctgatcatttctaatttagagttctccatctccttgcctca

SEQ ID NO: 49851 - DNA, 80 bp, synthetic construct
  misc_feature 1..80: note = Artificially Synthesized Probe
  source 1..80: mol_type = other DNA
ccacctagattctgtaacaccttgttggctgtggagtctgactgactacttaagaaaactaatgctaagaaagctcatct

SEQ ID NO: 49852 - DNA, 80 bp, synthetic construct; identical to SEQ ID NO: 24089
  misc_feature 1..80: note = Artificially Synthesized Probe
  source 1..80: mol_type = other DNA

SEQ ID NO: 49853 - DNA, 80 bp, synthetic construct
  misc_feature 1..80: note = Artificially Synthesized Probe
  source 1..80: mol_type = other DNA
accagcctggccaatatggtgaaaccccatctctactaaaaatagaaaaaattaggtggacgtggtaatgtgcgcctgta

SEQ ID NO: 49854 - DNA, 80 bp, synthetic construct
  misc_feature 1..80: note = Artificially Synthesized Probe
  source 1..80: mol_type = other DNA
tttaattcagagtaataccttgaaatttatatcacttcccccttagttctgatgttttctaaattataaaatacatgttt

SEQ ID NO: 49855 - DNA, 80 bp, synthetic construct
  misc_feature 1..80: note = Artificially Synthesized Probe
  source 1..80: mol_type = other DNA
atgatactcaaaagcttacctccagatatattgatggtggattatgctccccaccaaatttgtccaatagggcctctata

SEQ ID NO: 49856 - DNA, 80 bp, synthetic construct; identical to SEQ ID NO: 24090
  misc_feature 1..80: note = Artificially Synthesized Probe
  source 1..80: mol_type = other DNA

SEQ ID NO: 49857 - DNA, 80 bp, synthetic construct
  misc_feature 1..80: note = Artificially Synthesized Probe
  source 1..80: mol_type = other DNA
agcagccttccatgtctcccttttactcatggaaaaaacattaagacatacatatatgaaatgtacacatataattaaat

SEQ ID NO: 49858 - DNA, 80 bp, synthetic construct
  misc_feature 1..80: note = Artificially Synthesized Probe
  source 1..80: mol_type = other DNA
tctccagatccatgttagctaaacatgtcacctgtcacatttttaatgtcctttcactaacatttccggtggacctaatt

SEQ ID NO: 49859 - DNA, 80 bp, synthetic construct
  misc_feature 1..80: note = Artificially Synthesized Probe
  source 1..80: mol_type = other DNA
tccaggggttaggtgggcatagacaattttaagagaatttccagatcctcaagttttatctgtatgctccctgattgatc

SEQ ID NO: 49860 - DNA, 80 bp, synthetic construct
  misc_feature 1..80: note = Artificially Synthesized Probe
  source 1..80: mol_type = other DNA
gggaaattccttgagagaaaagggggaaaaattaagagcaggaccatattttatcaatgaaacaaatttgtggcaaggct

SEQ ID NO: 49861 - DNA, 80 bp, synthetic construct; identical to SEQ ID NO: 24091
  misc_feature 1..80: note = Artificially Synthesized Probe
  source 1..80: mol_type = other DNA

SEQ ID NO: 49862 - DNA, 80 bp, synthetic construct
  misc_feature 1..80: note = Artificially Synthesized Probe
  source 1..80: mol_type = other DNA
gacatttagattattccatttcctcaacatcaaacaatactccaacaaatagttctgaactgcttttcagagtaaaagtg

SEQ ID NO: 49863 - DNA, 80 bp, synthetic construct
  misc_feature 1..80: note = Artificially Synthesized Probe
  source 1..80: mol_type = other DNA
caacacccagcacaatcacacttctaaacttttgccagtctgaaagggaaaaggcaatcatgttttaatttgtatttctt

SEQ ID NO: 49864 - DNA, 80 bp, synthetic construct
  misc_feature 1..80: note = Artificially Synthesized Probe
  source 1..80: mol_type = other DNA
ggtctttcaattgtttttcatgactcttgtcatataaagtcttgctactcaaagtgtgggtccacagaccagaagcagca

SEQ ID NO: 49865 - DNA, 80 bp, synthetic construct
  misc_feature 1..80: note = Artificially Synthesized Probe
  source 1..80: mol_type = other DNA
tacaaaaattagccgggcatggtggtgcatgcctgtagtcccaggtactcagaaggctgatgtgggaggattacctgagc

SEQ ID NO: 49866 - DNA, 80 bp, synthetic construct; identical to SEQ ID NO: 24092
  misc_feature 1..80: note = Artificially Synthesized Probe
  source 1..80: mol_type = other DNA

SEQ ID NO: 49867 - DNA, 80 bp, synthetic construct
  misc_feature 1..80: note = Artificially Synthesized Probe
  source 1..80: mol_type = other DNA
tagtaaagaaagaaaggaaaggtgtcagatgcagatgatgggagcctaggcaggatggcattgagaagaaaaagagagtg

SEQ ID NO: 49868 - DNA, 80 bp, synthetic construct
  misc_feature 1..80: note = Artificially Synthesized Probe
  source 1..80: mol_type = other DNA
aagcccaaaatttaaaatccaactctaccttttcctctcaacaccagattcctaactgcctgctgaatatgtctactagt

SEQ ID NO: 49869 - DNA, 80 bp, synthetic construct
  misc_feature 1..80: note = Artificially Synthesized Probe
  source 1..80: mol_type = other DNA
cacatctgacaatccatttcaatccatctccaaatcaaaatatatgtagatattagtcaccttctctaactttaccaccc

SEQ ID NO: 49870 - DNA, 80 bp, synthetic construct
  misc_feature 1..80: note = Artificially Synthesized Probe
  source 1..80: mol_type = other DNA
gctgagacgggaggatcgcaacatagtaggaccctgtatctacaaaaaaaaaagaaaaaaaaaaaatagccagacgtggt

SEQ ID NO: 49871 - DNA, 80 bp, synthetic construct; identical to SEQ ID NO: 24093
  misc_feature 1..80: note = Artificially Synthesized Probe
  source 1..80: mol_type = other DNA

SEQ ID NO: 49872 - DNA, 80 bp, synthetic construct
  misc_feature 1..80: note = Artificially Synthesized Probe
  source 1..80: mol_type = other DNA
cctaagatttctataaagtttgctgtcttaccaagttcattcatctctttatcccaatgtcaccttatcaatgaagcatt

SEQ ID NO: 49873 - DNA, 80 bp, synthetic construct
  misc_feature 1..80: note = Artificially Synthesized Probe
  source 1..80: mol_type = other DNA
actccccaacagaatgaagtccaggagggcataggtttttgtcttattttttctgatttatccccagagcctagaacagt

SEQ ID NO: 49874 - DNA, 80 bp, synthetic construct
  misc_feature 1..80: note = Artificially Synthesized Probe
  source 1..80: mol_type = other DNA
cccaagtagttgggactacaggcacgcagcagcacacctggctaatttttgtatttttagtagagatggggttttgccac

SEQ ID NO: 49875 - DNA, 80 bp, synthetic construct; identical to SEQ ID NO: 24094
  misc_feature 1..80: note = Artificially Synthesized Probe
  source 1..80: mol_type = other DNA

SEQ ID NO: 49876 - DNA, 80 bp, synthetic construct
  misc_feature 1..80: note = Artificially Synthesized Probe
  source 1..80: mol_type = other DNA
agcataaagaactatttctctcaaaggatgggagagagaaagtgggggaaaataatcagagatgagaaatgaagagaatg

SEQ ID NO: 49877 - DNA, 80 bp, synthetic construct
  misc_feature 1..80: note = Artificially Synthesized Probe
  source 1..80: mol_type = other DNA
aagtcaattttgtaaaaactttgttagttacatgcttgctagtcttctatttgtgaatgaataaaaccctatctaacaat

SEQ ID NO: 49878 - DNA, 80 bp, synthetic construct
  misc_feature 1..80: note = Artificially Synthesized Probe
  source 1..80: mol_type = other DNA
ggtcaggagttcgagaccagctggccaacacggtgaaaccccgtctctactaaaaatacaaaaattagccgggcgtggtg

SEQ ID NO: 49879 - DNA, 80 bp, synthetic construct; identical to SEQ ID NO: 24095
  misc_feature 1..80: note = Artificially Synthesized Probe
  source 1..80: mol_type = other DNA

SEQ ID NO: 49880 - DNA, 80 bp, synthetic construct
  misc_feature 1..80: note = Artificially Synthesized Probe
  source 1..80: mol_type = other DNA
gctaacggtaggtacatagttaaaacatcttcttggaaaaaaaagaaaaacctgttaccacaatcctaaaagggagatga

SEQ ID NO: 49881 - DNA, 80 bp, synthetic construct
  misc_feature 1..80: note = Artificially Synthesized Probe
  source 1..80: mol_type = other DNA
aaaagatctcctctcctgttttaatctcttcagtagaccacagctattacagccaagcaagcttagtaaataactgatca

SEQ ID NO: 49882 - DNA, 80 bp, synthetic construct
  misc_feature 1..80: note = Artificially Synthesized Probe
  source 1..80: mol_type = other DNA
gacatgaaggggagctatggcacaaaaaaaaaactacagccattggctcccctcatcccttaaagaaaatgtaattaaaa

SEQ ID NO: 49883 - DNA, 80 bp, synthetic construct; identical to SEQ ID NO: 24096
  misc_feature 1..80: note = Artificially Synthesized Probe
  source 1..80: mol_type = other DNA

SEQ ID NO: 49884 - DNA, 80 bp, synthetic construct
  misc_feature 1..80: note = Artificially Synthesized Probe
  source 1..80: mol_type = other DNA
tctctaaacaaacaaacaaacaaaacataaaataatccaaactgtgaagaaaggcatcaaactcttaaattaatatatat

SEQ ID NO: 49885 - DNA, 80 bp, synthetic construct
  misc_feature 1..80: note = Artificially Synthesized Probe
  source 1..80: mol_type = other DNA
gggttgggggaggaacagagggagggaagggagagacagaagtggtcttaaaatttcaagaaaatggttgaaagaatcac

SEQ ID NO: 49886 - DNA, 80 bp, synthetic construct
  misc_feature 1..80: note = Artificially Synthesized Probe
  source 1..80: mol_type = other DNA
ggaagaacagcaagcctaaagacaacacatataaagaagaagcatgaggaaactataaagacatgagttttgaatcatac

SEQ ID NO: 49887 - DNA, 80 bp, synthetic construct; identical to SEQ ID NO: 24097
  misc_feature 1..80: note = Artificially Synthesized Probe
  source 1..80: mol_type = other DNA

SEQ ID NO: 49888 - DNA, 80 bp, synthetic construct
  misc_feature 1..80: note = Artificially Synthesized Probe
  source 1..80: mol_type = other DNA
aaaaaggaaactgaatcaagaagtaatatcaaagaaagagtggcatgagagggctgaatagtggccccccaccaagataa

SEQ ID NO: 49889 - DNA, 80 bp, synthetic construct
  misc_feature 1..80: note = Artificially Synthesized Probe
  source 1..80: mol_type = other DNA
ataatggcattacttatcttaagctacccaaatgaggggttaaagatttgccgtaattattattgagtgattttcctgga

SEQ ID NO: 49890 - DNA, 80 bp, synthetic construct
  misc_feature 1..80: note = Artificially Synthesized Probe
  source 1..80: mol_type = other DNA
aagggaattttactatagatgattaggtgatataaaaactcagcagagaaagatctgaagatgctacactgctgaccttg

SEQ ID NO: 49891 - DNA, 80 bp, synthetic construct
  misc_feature 1..80: note = Artificially Synthesized Probe
  source 1..80: mol_type = other DNA
gacctccagaaatgtaagagagtacaccacatttgtggtgttgtaagtgaccaagtttgttgttatttattattgcagcc

SEQ ID NO: 49892 - DNA, 80 bp, synthetic construct; identical to SEQ ID NO: 24098
  misc_feature 1..80: note = Artificially Synthesized Probe
  source 1..80: mol_type = other DNA

SEQ ID NO: 49893 - DNA, 80 bp, synthetic construct
  misc_feature 1..80: note = Artificially Synthesized Probe
  source 1..80: mol_type = other DNA
ttaaaagggtgggagagcagttgctcacactgtaggggattattacacccttagaaaactgaactttaaatgaaaaaaat

SEQ ID NO: 49894 - DNA, 80 bp, synthetic construct
  misc_feature 1..80: note = Artificially Synthesized Probe
  source 1..80: mol_type = other DNA
tacttacatagtgccaaagtatttcgccacagattaaagatgaaggggaaaacataccttcaagtggcttagaatcatta

SEQ ID NO: 49895 - DNA, 80 bp, synthetic construct
  misc_feature 1..80: note = Artificially Synthesized Probe
  source 1..80: mol_type = other DNA
tacactgaaataatcaaatatagattgtggaacattctctaagacatttttcttctctttgaaagtcaaagccttggcaa

SEQ ID NO: 49896 - DNA, 80 bp, synthetic construct; identical to SEQ ID NO: 24099
  misc_feature 1..80: note = Artificially Synthesized Probe
  source 1..80: mol_type = other DNA

SEQ ID NO: 49897 - DNA, 80 bp, synthetic construct
  misc_feature 1..80: note = Artificially Synthesized Probe
  source 1..80: mol_type = other DNA
cataagaattagaattatagagacaaaaaacttatttgtaggaaacatgctatctacagaaaaacccaagagaatctaca

SEQ ID NO: 49898 - DNA, 80 bp, synthetic construct
  misc_feature 1..80: note = Artificially Synthesized Probe
  source 1..80: mol_type = other DNA
atctagaagaaaagtctaacaaaagattcccaaaacttttgtgacggaaacaacaaaataatgtgcaggtgcacaaaagg

SEQ ID NO: 49899 - DNA, 80 bp, synthetic construct
  misc_feature 1..80: note = Artificially Synthesized Probe
  source 1..80: mol_type = other DNA
cacagagtactgatggctttccctagtaagaccatttcaccaacctcaaagctccaattattacacaggagccctttcca

SEQ ID NO: 49900 - DNA, 80 bp, synthetic construct; identical to SEQ ID NO: 23964
  misc_feature 1..80: note = Artificially Synthesized Probe
  source 1..80: mol_type = other DNA

SEQ ID NO: 49901 - DNA, 80 bp, synthetic construct
  misc_feature 1..80: note = Artificially Synthesized Probe
  source 1..80: mol_type = other DNA
gtttgcagtgacttccaactcatactccaccaaaacacacgtgggttcaaaaacttaacacaaaaatgcaacgcagtaat

SEQ ID NO: 49902 - DNA, 80 bp, synthetic construct; identical to SEQ ID NO: 24100
  misc_feature 1..80: note = Artificially Synthesized Probe
  source 1..80: mol_type = other DNA

SEQ ID NO: 49903 - DNA, 80 bp, synthetic construct
  misc_feature 1..80: note = Artificially Synthesized Probe
  source 1..80: mol_type = other DNA
ggctcgagtgcagtagcatgatctcggctcactgcaacctccgcctcctgggttcaagtgattctcctgcctcagcctcc

SEQ ID NO: 49904 - DNA, 80 bp, synthetic construct
  misc_feature 1..80: note = Artificially Synthesized Probe
  source 1..80: mol_type = other DNA
ccactgcgcccagcctgattctaaaatttttatggaagcactgtataatagtagcctttggctattttgaataataagga

SEQ ID NO: 49905 - DNA, 80 bp, synthetic construct
  misc_feature 1..80: note = Artificially Synthesized Probe
  source 1..80: mol_type = other DNA
acagaacggactatataataaatatttccagggtaagtggccatccttttggaaaaggtcaactaatccaaaagaaaatg

SEQ ID NO: 49906 - DNA, 80 bp, synthetic construct
  misc_feature 1..80: note = Artificially Synthesized Probe
  source 1..80: mol_type = other DNA
gaccccatctctagaaaaaaaaaaaaaaaagaaaaaaaagaaaattagttggatgcggtaccacatacttgtactcccag

SEQ ID NO: 49907 - DNA, 80 bp, synthetic construct; identical to SEQ ID NO: 24101
  misc_feature 1..80: note = Artificially Synthesized Probe
  source 1..80: mol_type = other DNA

SEQ ID NO: 49908 - DNA, 80 bp, synthetic construct
  misc_feature 1..80: note = Artificially Synthesized Probe
  source 1..80: mol_type = other DNA
taatagcaaaaaactagaaccaactcaaatgttccctaagagagaaaaaatggcaaactggtacatctgtataacaaaat

SEQ ID NO: 49909 - DNA, 80 bp, synthetic construct
  misc_feature 1..80: note = Artificially Synthesized Probe
  source 1..80: mol_type = other DNA
gctttattccagcaaacagtttgcaaaccgtggagatgtaccttggtagaaaataaaggcgccttctgagagaacaaaga

SEQ ID NO: 49910 - DNA, 80 bp, synthetic construct
  misc_feature 1..80: note = Artificially Synthesized Probe
  source 1..80: mol_type = other DNA
taggtacaaaaggccaaatggtattttctggtagctgttaattcaggtggcataaataggaacagacagctatgaaagtc

SEQ ID NO: 49911 - DNA, 80 bp, synthetic construct
  misc_feature 1..80: note = Artificially Synthesized Probe
  source 1..80: mol_type = other DNA
atcaacgttctagattgtttgtggatctacacccacagcaaaagtatctgaaatgtgcatgggcatgataaacagtaaat

SEQ ID NO: 49912 - DNA, 80 bp, synthetic construct
  misc_feature 1..80: note = Artificially Synthesized Probe
  source 1..80: mol_type = other DNA
aaggagaagagcattcattcatcataagtagaatcttgctgggcaaagaatataaggaggacagaacatgagacacaatg

SEQ ID NO: 49913 - DNA, 80 bp, synthetic construct; identical to SEQ ID NO: 24102
  misc_feature 1..80: note = Artificially Synthesized Probe
  source 1..80: mol_type = other DNA

SEQ ID NO: 49914 - DNA, 80 bp, synthetic construct
  misc_feature 1..80: note = Artificially Synthesized Probe
  source 1..80: mol_type = other DNA
ggaaagccagtcaatgaatacatgacacttgtagtcatttcccatttagaaaagaatcctagacctatgtaactgcaaag

SEQ ID NO: 49915 - DNA, 80 bp, synthetic construct
  misc_feature 1..80: note = Artificially Synthesized Probe
  source 1..80: mol_type = other DNA
taacagaagtagtattgataaagatcatagtagtgatatgtaacacaaagaaatgtcccagaaggtagagaggttaaaaa

SEQ ID NO: 49916 - DNA, 80 bp, synthetic construct; identical to SEQ ID NO: 24103
  misc_feature 1..80: note = Artificially Synthesized Probe
  source 1..80: mol_type = other DNA

SEQ ID NO: 49917 - DNA, 80 bp, synthetic construct
  misc_feature 1..80: note = Artificially Synthesized Probe
  source 1..80: mol_type = other DNA
gagaatgactgctaataaatccaggggtttcatttttgagtgataaaaatattctacaatgtactgcggtgatggctata

SEQ ID NO: 49918 - DNA, 80 bp, synthetic construct
  misc_feature 1..80: note = Artificially Synthesized Probe
  source 1..80: mol_type = other DNA
aatgactgtgaatctggaattttacatccaggcaaactaccagtcaagcatgagggcaaatgaaaacctttttggacatg

SEQ ID NO: 49919 - DNA, 80 bp, synthetic construct
  misc_feature 1..80: note = Artificially Synthesized Probe
  source 1..80: mol_type = other DNA
gtaggcctctcgtcccagcatttataaagataaaacaaatgattcaccaggttaaaaaaaaaaactgattttttaaggca

SEQ ID NO: 49920 - DNA, 80 bp, synthetic construct; identical to SEQ ID NO: 24104
  misc_feature 1..80: note = Artificially Synthesized Probe
  source 1..80: mol_type = other DNA

SEQ ID NO: 49921 - DNA, 80 bp, synthetic construct
  misc_feature 1..80: note = Artificially Synthesized Probe
  source 1..80: mol_type = other DNA
tcatgtcaaattgtaatccccaatgttggaggtggggcctggttggaggtgactagatcatgggggtggatctttcatga

SEQ ID NO: 49922 - DNA, 80 bp, synthetic construct
  misc_feature 1..80: note = Artificially Synthesized Probe
  source 1..80: mol_type = other DNA
aggcctccccagaaggtgagcagatgccagtatcatgctttctgtagagcctgcagaaccgtgagccaattaaacctctt

SEQ ID NO: 49923 - DNA, 80 bp, synthetic construct
  misc_feature 1..80: note = Artificially Synthesized Probe
  source 1..80: mol_type = other DNA
agtatatattatagtacctctaattatcactctagtgaagaatggattacggtgcgccaagaatgaatgcagggaggaag

SEQ ID NO: 49924 - DNA, 80 bp, synthetic construct
  misc_feature 1..80: note = Artificially Synthesized Probe
  source 1..80: mol_type = other DNA
ttgggtgtgaagggagcaatgcgtttgcaacaaaatttgacttctacatgagcgagacatccttaatgtattttaaaaaa

SEQ ID NO: 49925 - DNA, 80 bp, synthetic construct
  misc_feature 1..80: note = Artificially Synthesized Probe
  source 1..80: mol_type = other DNA
tggattagacatggaggaagagtgagaaaaaactaagaattaaggctgattctgaaattctgatgtgtgcaacgggtgga

SEQ ID NO: 49926 - DNA, 80 bp, synthetic construct; identical to SEQ ID NO: 24105
  misc_feature 1..80: note = Artificially Synthesized Probe
  source 1..80: mol_type = other DNA

SEQ ID NO: 49927 - DNA, 80 bp, synthetic construct
  misc_feature 1..80: note = Artificially Synthesized Probe
  source 1..80: mol_type = other DNA
atatttggtcattcctatttacatacatttgcagatgtattggggctgggagataatagagcatgtttgtggctaaaggg

SEQ ID NO: 49928 - DNA, 80 bp, synthetic construct
  misc_feature 1..80: note = Artificially Synthesized Probe
  source 1..80: mol_type = other DNA
tggtgaaaagatgacaagagctgcatttaatttctcagtaaagtttgaagtgaattccacagataggagtgggagctgtg

SEQ ID NO: 49929 - DNA, 80 bp, synthetic construct
  misc_feature 1..80: note = Artificially Synthesized Probe
  source 1..80: mol_type = other DNA
tgagattacaggcacacgccaccacacccagctaatttttgtatttttagtagaaacggggtttcaccatgttggccagc

SEQ ID NO: 49930 - DNA, 80 bp, synthetic construct; identical to SEQ ID NO: 24106
  misc_feature 1..80: note = Artificially Synthesized Probe
  source 1..80: mol_type = other DNA

SEQ ID NO: 49931 - DNA, 80 bp, synthetic construct
  misc_feature 1..80: note = Artificially Synthesized Probe
  source 1..80: mol_type = other DNA
agaacccttttaagtcttttaaggaaaaggctgatgatttaggagtttgatgatcatagttccacaattcctttggcctg

SEQ ID NO: 49932 - DNA, 80 bp, synthetic construct
  misc_feature 1..80: note = Artificially Synthesized Probe
  source 1..80: mol_type = other DNA
caaacatttttttctggctaattaaaagcagattaagccctaaagtttcagggatggcaggggaaaggaggggaaacagt

SEQ ID NO: 49933 - DNA, 80 bp, synthetic construct
  misc_feature 1..80: note = Artificially Synthesized Probe
  source 1..80: mol_type = other DNA
gctgtatttggagcaggatttaaattgaaggaaaatatgtgaaacaatagatgtagtgtaggttcaggacttttaattgt

SEQ ID NO: 49934 - DNA, 80 bp, synthetic construct; identical to SEQ ID NO: 24107
  misc_feature 1..80: note = Artificially Synthesized Probe
  source 1..80: mol_type = other DNA

SEQ ID NO: 49935 - DNA, 80 bp, synthetic construct
  misc_feature 1..80: note = Artificially Synthesized Probe
  source 1..80: mol_type = other DNA
aagacatccacattttccaaattgttataaaaagaaatagttatagaaaaattattaagaataataatagaattattaaa

SEQ ID NO: 49936 - DNA, 80 bp, synthetic construct
  misc_feature 1..80: note = Artificially Synthesized Probe
  source 1..80: mol_type = other DNA
aagcttagaggagactgatgaaatcacattcaagaaggctcacctgaggctagagaaataatagttaagatcagagaagc

SEQ ID NO: 49937 - DNA, 80 bp, synthetic construct
  misc_feature 1..80: note = Artificially Synthesized Probe
  source 1..80: mol_type = other DNA
atgcatctaggatggtacttataagactctcagagagttaagatgtatgctcactagttttatgtactttttcgtaaacc

SEQ ID NO: 49938 - DNA, 80 bp, synthetic construct
  misc_feature 1..80: note = Artificially Synthesized Probe
  source 1..80: mol_type = other DNA
ccctttgaaaaaatagttttcaaagattttgcaacttctccataatataagattgctccagctttcaattccattttccc

SEQ ID NO: 49939 - DNA, 80 bp, synthetic construct; identical to SEQ ID NO: 24108
  misc_feature 1..80: note = Artificially Synthesized Probe
  source 1..80: mol_type = other DNA

SEQ ID NO: 49940 - DNA, 80 bp, synthetic construct
  misc_feature 1..80: note = Artificially Synthesized Probe
  source 1..80: mol_type = other DNA
gcaatgaagacagtgtaattaaactaaagtccctgacctcatagagcatacattctagttaagggaagataaacgctaaa

SEQ ID NO: 49941 - DNA, 80 bp, synthetic construct
  misc_feature 1..80: note = Artificially Synthesized Probe
  source 1..80: mol_type = other DNA
aagttcagcatgcaggtatgtaagagaaaactagttcaaacagaagggaaacaaatgcaaaaagcattaaggtagaagca

SEQ ID NO: 49942 - DNA, 80 bp, synthetic construct
  misc_feature 1..80: note = Artificially Synthesized Probe
  source 1..80: mol_type = other DNA
ccaaagagaagcttaaaatgcaaatatgcaagtcttgtcctcttgtacaattgaacttgctcactctctcacctgtgcct

SEQ ID NO: 49943 - DNA, 80 bp, synthetic construct; identical to SEQ ID NO: 24109
  misc_feature 1..80: note = Artificially Synthesized Probe
  source 1..80: mol_type = other DNA

SEQ ID NO: 49944 - DNA, 80 bp, synthetic construct
  misc_feature 1..80: note = Artificially Synthesized Probe
  source 1..80: mol_type = other DNA
cattcagtggaattttacttggtaataaaaagaaacaaaatgctgatacattctataacatgaccaaaccttggaaacat

SEQ ID NO: 49945 - DNA, 80 bp, synthetic construct
  misc_feature 1..80: note = Artificially Synthesized Probe
  source 1..80: mol_type = other DNA
atataaggattgggggagaatggctaagggtgtggggtttcttttagggctaatgaaaacattctaaaattaaatttggt

SEQ ID NO: 49946 - DNA, 80 bp, synthetic construct; identical to SEQ ID NO: 24110
  misc_feature 1..80: note = Artificially Synthesized Probe
  source 1..80: mol_type = other DNA

SEQ ID NO: 49947 - DNA, 80 bp, synthetic construct; identical to SEQ ID NO: 23965
  misc_feature 1..80: note = Artificially Synthesized Probe
  source 1..80: mol_type = other DNA

SEQ ID NO: 49948 - DNA, 80 bp, synthetic construct
  misc_feature 1..80: note = Artificially Synthesized Probe
  source 1..80: mol_type = other DNA
gtttataacctaagtcaaaggatgtaagagccaaaaatcaaaaagaatgaagaaggaacactgaggttgggaggacaagg

SEQ ID NO: 49949 - DNA, 80 bp, synthetic construct
  misc_feature 1..80: note = Artificially Synthesized Probe
  source 1..80: mol_type = other DNA
acatgttctaagagacacctttcccccatccccttcttaacatctttgaattcagattctaccatacaattgatgacatc

SEQ ID NO: 49950 - DNA, 80 bp, synthetic construct
  misc_feature 1..80: note = Artificially Synthesized Probe
  source 1..80: mol_type = other DNA
gcatggtggcggacacccgtaattccagctactcaggaggctgaggcatgagaatcacttgaacctgggagacagaggtt

SEQ ID NO: 49951 - DNA, 80 bp, synthetic construct
  misc_feature 1..80: note = Artificially Synthesized Probe
  source 1..80: mol_type = other DNA
tcatgctgttgtcattcaactcagttatctgcattgttggtattacaaatgttggaattaactgccactttaaaatacct

SEQ ID NO: 49952 - DNA, 80 bp, synthetic construct; identical to SEQ ID NO: 24111
  misc_feature 1..80: note = Artificially Synthesized Probe
  source 1..80: mol_type = other DNA

SEQ ID NO: 49953 - DNA, 80 bp, synthetic construct
  misc_feature 1..80: note = Artificially Synthesized Probe
  source 1..80: mol_type = other DNA
aacgtatgacagtgatggagaacttcagctatcctgacatctgttgaaagtcttactctgattatttttatgaaaaaatg

SEQ ID NO: 49954 - DNA, 80 bp, synthetic construct
  misc_feature 1..80: note = Artificially Synthesized Probe
  source 1..80: mol_type = other DNA
tattattagtttagactatttacaatagatcttatctcttcataacagtaaaatgccctatctgcagagtaacacagggc

SEQ ID NO: 49955 - DNA, 80 bp, synthetic construct; identical to SEQ ID NO: 24112
  misc_feature 1..80: note = Artificially Synthesized Probe
  source 1..80: mol_type = other DNA

SEQ ID NO: 49956 - DNA, 80 bp, synthetic construct
  misc_feature 1..80: note = Artificially Synthesized Probe
  source 1..80: mol_type = other DNA
gagtaactcagtctggctgggcgcggtggctcacgcccgtaatcccagcactttgggaggctgaggcgggcagaccacaa

SEQ ID NO: 49957 - DNA, 80 bp, synthetic construct
  misc_feature 1..80: note = Artificially Synthesized Probe
  source 1..80: mol_type = other DNA
gcggagcttgcagtgagccgagatcgcgccactactccagcctgggggacagagcaagactccgtctcaaaaaaaaaaaa

SEQ ID NO: 49958 - DNA, 80 bp, synthetic construct
  misc_feature 1..80: note = Artificially Synthesized Probe
  source 1..80: mol_type = other DNA
agcaaacatatgttcatttattttccttttgttgctactctcctgaactctctcactcatttgtttcagtggacaggaaa

SEQ ID NO: 49959 - DNA, 80 bp, synthetic construct
  misc_feature 1..80: note = Artificially Synthesized Probe
  source 1..80: mol_type = other DNA
catacacatattgagaagaagtacccatattctctaaagcaaggactgcctagctcacttagtagaactagaaattaatg

SEQ ID NO: 49960 - DNA, 80 bp, synthetic construct
  misc_feature 1..80: note = Artificially Synthesized Probe
  source 1..80: mol_type = other DNA
taaggcatcagaattattttgaagccaaaaagtataaggattcttaaattgtagagctgtgctgtccaatctagtaatca

SEQ ID NO: 49961 - DNA, 80 bp, synthetic construct; identical to SEQ ID NO: 24113
  misc_feature 1..80: note = Artificially Synthesized Probe
  source 1..80: mol_type = other DNA

SEQ ID NO: 49962 - DNA, 80 bp, synthetic construct
  misc_feature 1..80: note = Artificially Synthesized Probe
  source 1..80: mol_type = other DNA
ttgaatctggaaggtggaggctgcagtgagccgagatcgcaccattgcactccagcctgggcaacaagagtgaaactcca

SEQ ID NO: 49963 - DNA, 80 bp, synthetic construct
  misc_feature 1..80: note = Artificially Synthesized Probe
  source 1..80: mol_type = other DNA
aaatgaaagcttaaattatgagagtaaagttaatatcccagaatacagattaaattatcctacatacatctaagagaaat

SEQ ID NO: 49964 - DNA, 80 bp, synthetic construct; identical to SEQ ID NO: 24114
  misc_feature 1..80: note = Artificially Synthesized Probe
  source 1..80: mol_type = other DNA

SEQ ID NO: 49965 - DNA, 80 bp, synthetic construct
  misc_feature 1..80: note = Artificially Synthesized Probe
  source 1..80: mol_type = other DNA
atacaaaattaaacaaatcctgctaagttaaactcaaaaggaaataagaaagtaccaataaaattctaaggaataaaaaa

SEQ ID NO: 49966 - DNA, 80 bp, synthetic construct
  misc_feature 1..80: note = Artificially Synthesized Probe
  source 1..80: mol_type = other DNA
cgtcaaaacaaccatttcagtgctctggacttcagctaaaggctgaacctgagtaagaacatcacagtctgtggcttttt

SEQ ID NO: 49967 - DNA, 80 bp, synthetic construct
  misc_feature 1..80: note = Artificially Synthesized Probe
  source 1..80: mol_type = other DNA
agctatttttgtatctttagtacagacagggtttcaccatgttggccaggctggtcttgaactccagacctcaggtgatc

SEQ ID NO: 49968 - DNA, 80 bp, synthetic construct
  misc_feature 1..80: note = Artificially Synthesized Probe
  source 1..80: mol_type = other DNA
tggcaatgagcgggccagcagctcaatagaggcgagaatctacaaaaaaaaaaagaaaaaaaaaagaaaaaaaaagaaaa

SEQ ID NO: 49969 - DNA, 80 bp, synthetic construct; identical to SEQ ID NO: 24115
  misc_feature 1..80: note = Artificially Synthesized Probe
  source 1..80: mol_type = other DNA

SEQ ID NO: 49970 - DNA, 80 bp, synthetic construct
  misc_feature 1..80: note = Artificially Synthesized Probe
  source 1..80: mol_type = other DNA
gtggcctgaagtttgaatatactccctgatacacagatagacacacaaagaaagaatagaaaccttactggccttgaaat

SEQ ID NO: 49971 - DNA, 80 bp, synthetic construct
  misc_feature 1..80: note = Artificially Synthesized Probe
  source 1..80: mol_type = other DNA
acacttcaaagatttagtccaactataaaacttggacagaacacatagagcagctaatcgacaacactggaagtaaatag

SEQ ID NO: 49972 - DNA, 80 bp, synthetic construct
  misc_feature 1..80: note = Artificially Synthesized Probe
  source 1..80: mol_type = other DNA
ccctgattcaagcaattctcctgcctcagcctcccgggtagctgggattacaggcacgcgccaccatgtccagctaattt

SEQ ID NO: 49973 - DNA, 80 bp, synthetic construct; identical to SEQ ID NO: 24116
  misc_feature 1..80: note = Artificially Synthesized Probe
  source 1..80: mol_type = other DNA

SEQ ID NO: 49974 - DNA, 80 bp, synthetic construct
  misc_feature 1..80: note = Artificially Synthesized Probe
  source 1..80: mol_type = other DNA
tgttcaaatgtaatccccaatgttggaggtggggcctgatgggagaaaattggatcatggaagcggtttcccatggctta

SEQ ID NO: 49975 - DNA, 80 bp, synthetic construct
  misc_feature 1..80: note = Artificially Synthesized Probe
  source 1..80: mol_type = other DNA
ggcctccccagaagcagaatctgctatgtttcccgtacagtccgcagaaccatgagccaactgaatctctgttctttata

SEQ ID NO: 49976 - DNA, 80 bp, synthetic construct
  misc_feature 1..80: note = Artificially Synthesized Probe
  source 1..80: mol_type = other DNA
ccttcccaaatctgacaaatgacataaaactacagattcaaaaaggtcggtgaatccaaaaatggataaatacgtagaat

SEQ ID NO: 49977 - DNA, 80 bp, synthetic construct
  misc_feature 1..80: note = Artificially Synthesized Probe
  source 1..80: mol_type = other DNA
cagccttcctagaagctgggattataggtgcccgcgaacacgcctggctaagttttttgtacttttagtacagacagggt

SEQ ID NO: 49978 - DNA, 80 bp, synthetic construct; identical to SEQ ID NO: 24117
  misc_feature 1..80: note = Artificially Synthesized Probe
  source 1..80: mol_type = other DNA

SEQ ID NO: 49979 - DNA, 80 bp, synthetic construct
  misc_feature 1..80: note = Artificially Synthesized Probe
  source 1..80: mol_type = other DNA
aattggtattttttcttaagaagaaactctctctgtaaattaaatggggagagtaattcttagtcagcttttatttatat

SEQ ID NO: 49980 - DNA, 80 bp, synthetic construct
  misc_feature 1..80: note = Artificially Synthesized Probe
  source 1..80: mol_type = other DNA
aaagaattgctaaaagaaattcctcacacagaagggaaataataccggaaggaaacctggaagagtaggttgaggagtaa

SEQ ID NO: 49981 - DNA, 80 bp, synthetic construct
  misc_feature 1..80: note = Artificially Synthesized Probe
  source 1..80: mol_type = other DNA
aacgtaacatacagccaacaataagagaaaaggtggagagaagataaagagacctacgtagttttaacatttctttaagt

SEQ ID NO: 49982 - DNA, 80 bp, synthetic construct; identical to SEQ ID NO: 24118
  misc_feature 1..80: note = Artificially Synthesized Probe
  source 1..80: mol_type = other DNA

SEQ ID NO: 49983 - DNA, 80 bp, synthetic construct
  misc_feature 1..80: note = Artificially Synthesized Probe
  source 1..80: mol_type = other DNA
ctaatatatatgcacctaataatggagcttcaaagaacatgaagtaaaaacttacagaacattacaaataggaaaacaaa

SEQ ID NO: 49984 - DNA, 80 bp, synthetic construct
  misc_feature 1..80: note = Artificially Synthesized Probe
  source 1..80: mol_type = other DNA
atgcacatggaacactcaccaaaacagaccatattctgagtcataagacaaactttcacaagcttaaaaaaaaaccacaa

SEQ ID NO: 49985 - DNA, 80 bp, synthetic construct
  misc_feature 1..80: note = Artificially Synthesized Probe
  source 1..80: mol_type = other DNA
attagcatacagaatccagcaattgtaaaaggcataataaacatgacaataaggttaatcccaggaccacaaggctagtt

SEQ ID NO: 49986 - DNA, 80 bp, synthetic construct
  misc_feature 1..80: note = Artificially Synthesized Probe
  source 1..80: mol_type = other DNA
ttcaaactcctaggctcaagtgatgctaccacctcagcctcccaaatagctggaattacaggcatgtgccaccaagccct

SEQ ID NO: 49987 - DNA, 80 bp, synthetic construct; identical to SEQ ID NO: 24119
  misc_feature 1..80: note = Artificially Synthesized Probe
  source 1..80: mol_type = other DNA

SEQ ID NO: 49988 - DNA, 80 bp, synthetic construct
  misc_feature 1..80: note = Artificially Synthesized Probe
  source 1..80: mol_type = other DNA
aaaccaaagaaaaacaaaactctcacaggataaaagatatctgaagatatcttttatattcacaagataaaacagataat

SEQ ID NO: 49989 - DNA, 80 bp, synthetic construct
  misc_feature 1..80: note = Artificially Synthesized Probe
  source 1..80: mol_type = other DNA
ataccttccatgaaacagaaaaggagtaagtaatttccaactcactttatgattccagcatcacctttacactaatacaa

SEQ ID NO: 49990 - DNA, 80 bp, synthetic construct; identical to SEQ ID NO: 23966
  misc_feature 1..80: note = Artificially Synthesized Probe
  source 1..80: mol_type = other DNA

SEQ ID NO: 49991 - DNA, 80 bp, synthetic construct; identical to SEQ ID NO: 24120
  misc_feature 1..80: note = Artificially Synthesized Probe
  source 1..80: mol_type = other DNA

SEQ ID NO: 49992 - DNA, 80 bp, synthetic construct
  misc_feature 1..80: note = Artificially Synthesized Probe
  source 1..80: mol_type = other DNA
aaatcattcttcaacaaaattaaaaccttttgtgcaatgaatattctcaagaaagtgaaaaaaacctacagaatgcaaga

SEQ ID NO: 49993 - DNA, 80 bp, synthetic construct
  misc_feature 1..80: note = Artificially Synthesized Probe
  source 1..80: mol_type = other DNA
ataaagggaagttggttaatggatacaaacatacaactggacagaaacagtaagttctagtatttcacagtatagtaggg

SEQ ID NO: 49994 - DNA, 80 bp, synthetic construct
  misc_feature 1..80: note = Artificially Synthesized Probe
  source 1..80: mol_type = other DNA
aaatatatataatcattatgtatccatttttttttcctttgagacggagtcttgctctgtcacccaggctggagtgcagt

SEQ ID NO: 49995 - DNA, 80 bp, synthetic construct; identical to SEQ ID NO: 24121
  misc_feature 1..80: note = Artificially Synthesized Probe
  source 1..80: mol_type = other DNA

SEQ ID NO: 49996 - DNA, 80 bp, synthetic construct
  misc_feature 1..80: note = Artificially Synthesized Probe
  source 1..80: mol_type = other DNA
ccaccacgcccagctaatttttgtattcttagtagagatggggtttcaccatgttggccaggatggtttcgatctcttga

SEQ ID NO: 49997 - DNA, 80 bp, synthetic construct
  misc_feature 1..80: note = Artificially Synthesized Probe
  source 1..80: mol_type = other DNA
cacatatcttaattttaaaatagtgttaaaaaccactaacaattacctgggccttcaaggagtcatcatttttgtgttgg

SEQ ID NO: 49998 - DNA, 80 bp, synthetic construct
  misc_feature 1..80: note = Artificially Synthesized Probe
  source 1..80: mol_type = other DNA
acctctgcctcctgggttcaagcaattctcctgcctcagcctcccaagtagctgggattacaggtgcgtgccaccacgac

SEQ ID NO: 49999 - DNA, 80 bp, synthetic construct; identical to SEQ ID NO: 24122
  misc_feature 1..80: note = Artificially Synthesized Probe
  source 1..80: mol_type = other DNA

SEQ ID NO: 50000 - DNA, 80 bp, synthetic construct
  misc_feature 1..80: note = Artificially Synthesized Probe
  source 1..80: mol_type = other DNA
atccttgaaggcatacagcatgataatgcatgttcataatcatgaaacatgtttaaagggcttggcataatgcctggcct

SEQ ID NO: 50001 - DNA, 80 bp, synthetic construct
  misc_feature 1..80: note = Artificially Synthesized Probe
  source 1..80: mol_type = other DNA
tctttgctcatctataagaagcaacttctcatttcttcaagttttaccatgacattgtagcaattcggtcacatcttcag

SEQ ID NO: 50002 - DNA, 80 bp, synthetic construct
  misc_feature 1..80: note = Artificially Synthesized Probe
  source 1..80: mol_type = other DNA
acattcttaatggcatctagaaaggtgaataatttgcagaaggttttcaattaatgttgcccagatccatcataggaata

SEQ ID NO: 50003 - DNA, 80 bp, synthetic construct
  misc_feature 1..80: note = Artificially Synthesized Probe
  source 1..80: mol_type = other DNA
actagcctgggaaacatagaccctgtctctattaaaaaaaaaaaaaaaattagctgggcatggtggtgcatgcctgtagt

SEQ ID NO: 50004 - DNA, 80 bp, synthetic construct; identical to SEQ ID NO: 24123
  misc_feature 1..80: note = Artificially Synthesized Probe
  source 1..80: mol_type = other DNA

SEQ ID NO: 50005 - DNA, 80 bp, synthetic construct
  misc_feature 1..80: note = Artificially Synthesized Probe
  source 1..80: mol_type = other DNA
tgacttcaacttaaagtcaccagctgcattagcctctagtaagagtcagcctgtcctttgaagctttaaagcctgtcatt

SEQ ID NO: 50006 - DNA, 80 bp, synthetic construct
  misc_feature 1..80: note = Artificially Synthesized Probe
  source 1..80: mol_type = other DNA
tgatcctcccaccttggcctcttaaaagtgctgggattacaggcatgagcctgttttgctttcttatcattcgtgtattc

SEQ ID NO: 50007 - DNA, 80 bp, synthetic construct
  misc_feature 1..80: note = Artificially Synthesized Probe
  source 1..80: mol_type = other DNA
cttttgatttcaagagacatgtgactcttggtttcacttgaatacttagaggccattgtagagttattaattggcctaac

SEQ ID NO: 50008 - DNA, 80 bp, synthetic construct; identical to SEQ ID NO: 24124
  misc_feature 1..80: note = Artificially Synthesized Probe
  source 1..80: mol_type = other DNA

SEQ ID NO: 50009 - DNA, 80 bp, synthetic construct
  misc_feature 1..80: note = Artificially Synthesized Probe
  source 1..80: mol_type = other DNA
aacaaagtaagcctataattccacatataattcctgcaatgctttacagttgtcaaataaaaaaatgtctacaatccttt

SEQ ID NO: 50010 - DNA, 80 bp, synthetic construct
  misc_feature 1..80: note = Artificially Synthesized Probe
  source 1..80: mol_type = other DNA
ttttttttttttttttttttgtgagatggagtcttgctctgtcacccaggttggagggcagaggcacgatctcggctcac

SEQ ID NO: 50011 - DNA, 80 bp, synthetic construct
  misc_feature 1..80: note = Artificially Synthesized Probe
  source 1..80: mol_type = other DNA
gttcaagcgattctcctgcctcagcctcctgagtagctgggattacaggagcgcaccaccatgcccagctaaatttttgt

SEQ ID NO: 50012 - DNA, 80 bp, synthetic construct
  misc_feature 1..80: note = Artificially Synthesized Probe
  source 1..80: mol_type = other DNA
aggtgatctacctgcctcggcctcccaaagtgctgggattacaggcatgagccacagcacccagccctaagtatctgtct

SEQ ID NO: 50013 - DNA, 80 bp, synthetic construct
  misc_feature 1..80: note = Artificially Synthesized Probe
  source 1..80: mol_type = other DNA
ggcatggtggtgcatgcctgcaatcccagctactcaggaggctgaggcagaagaattgcttgaacctgggaggcggaggc

SEQ ID NO: 50014 - DNA, 80 bp, synthetic construct; identical to SEQ ID NO: 24125
  misc_feature 1..80: note = Artificially Synthesized Probe
  source 1..80: mol_type = other DNA

SEQ ID NO: 50015 - DNA, 80 bp, synthetic construct
  misc_feature 1..80: note = Artificially Synthesized Probe
  source 1..80: mol_type = other DNA
ctatggtacctttatttatttttccagttagccatgtaagctttctcaggcttggcctttaatctgtcgtatataacttt

SEQ ID NO: 50016 - DNA, 80 bp, synthetic construct; identical to SEQ ID NO: 23951
  misc_feature 1..80: note = Artificially Synthesized Probe
  source 1..80: mol_type = other DNA

SEQ ID NO: 50017 - DNA, 80 bp, synthetic construct
  misc_feature 1..80: note = Artificially Synthesized Probe
  source 1..80: mol_type = other DNA
ctaagcccacactttctgttcctttttctaaagatgaataaccatacacaatagatcattctggctttctgccttctgat

SEQ ID NO: 50018 - DNA, 80 bp, synthetic construct
  misc_feature 1..80: note = Artificially Synthesized Probe
  source 1..80: mol_type = other DNA
aaaaagaattaccattttatggattgtctctgttctggtcacttatgaatcaggtcacatacattagttcattaaatcat

SEQ ID NO: 50019 - DNA, 80 bp, synthetic construct; identical to SEQ ID NO: 24126
  misc_feature 1..80: note = Artificially Synthesized Probe
  source 1..80: mol_type = other DNA

SEQ ID NO: 50020 - DNA, 80 bp, synthetic construct
  misc_feature 1..80: note = Artificially Synthesized Probe
  source 1..80: mol_type = other DNA
aagacttgcagtttttggaaatacggagaaaaccacactcctaatttctagaagaacataagtgtttaacagagacataa

SEQ ID NO: 50021 - DNA, 80 bp, synthetic construct
  misc_feature 1..80: note = Artificially Synthesized Probe
  source 1..80: mol_type = other DNA
tgtgtgtgtgtgtgtgtgtgtgtgtataaaaatataatttttttttttgagatagggtctcactctgtagcccaggcagg

SEQ ID NO: 50022 - DNA, 80 bp, synthetic construct
  misc_feature 1..80: note = Artificially Synthesized Probe
  source 1..80: mol_type = other DNA
aaatttttttgtagagatagggtcttgctatgttggatcttcctgcattggcctcccaaagtgttgggattacaggtgtt

SEQ ID NO: 50023 - DNA, 80 bp, synthetic construct
  misc_feature 1..80: note = Artificially Synthesized Probe
  source 1..80: mol_type = other DNA
agtgatctattttttaatgaaaaaaataaccacattttccaaaacaacaaaaaacaatgagagggcaaagtgtcttattc

SEQ ID NO: 50024 - DNA, 80 bp, synthetic construct
  misc_feature 1..80: note = Artificially Synthesized Probe
  source 1..80: mol_type = other DNA
aagtaatctttatgatgattagtataagacaaagaagtaagcagttgcaaaaaattgtaaattccaagtataacatgcaa

SEQ ID NO: 50025 - DNA, 80 bp, synthetic construct; identical to SEQ ID NO: 24127
  misc_feature 1..80: note = Artificially Synthesized Probe
  source 1..80: mol_type = other DNA

SEQ ID NO: 50026 - DNA, 80 bp, synthetic construct
  misc_feature 1..80: note = Artificially Synthesized Probe
  source 1..80: mol_type = other DNA
tctggattctcccaccttctgtattcaatttgttggaatatcatacatcctataactactacatactcacaagaacgaga

SEQ ID NO: 50027 - DNA, 80 bp, synthetic construct
  misc_feature 1..80: note = Artificially Synthesized Probe
  source 1..80: mol_type = other DNA
agtttccacaaatgcggcaactgtgtctatttttgtatgtggatatatccataatgtctacacatagtacctggcacata

SEQ ID NO: 50028 - DNA, 80 bp, synthetic construct; identical to SEQ ID NO: 24128
  misc_feature 1..80: note = Artificially Synthesized Probe
  source 1..80: mol_type = other DNA

SEQ ID NO: 50029 - DNA, 80 bp, synthetic construct
  misc_feature 1..80: note = Artificially Synthesized Probe
  source 1..80: mol_type = other DNA
caccaccctttattagatgggcttggaataagtttattctaaatcttattctgctcatacttccttcacagggtaatggt

SEQ ID NO: 50030 - DNA, 80 bp, synthetic construct
  misc_feature 1..80: note = Artificially Synthesized Probe
  source 1..80: mol_type = other DNA
tagtcagagtagaatctgcaaaacacataactgattcacaacactccccttccttaaaccctttaatggctccccagtaa

SEQ ID NO: 50031 - DNA, 80 bp, synthetic construct
  misc_feature 1..80: note = Artificially Synthesized Probe
  source 1..80: mol_type = other DNA
cttcttcctggaacactctttgcctagcacttttctaaactaagcacagcttcttcagatagtttaaatctcactttctc

SEQ ID NO: 50032 - DNA, 80 bp, synthetic construct
  misc_feature 1..80: note = Artificially Synthesized Probe
  source 1..80: mol_type = other DNA
attgcagagaccacatctaagcccaggacataagtaattttttaatgtagtttttattgttataaatggcttttgatctg

SEQ ID NO: 50033 - DNA, 80 bp, synthetic construct; identical to SEQ ID NO: 24129
  misc_feature 1..80: note = Artificially Synthesized Probe
  source 1..80: mol_type = other DNA

SEQ ID NO: 50034 - DNA, 80 bp, synthetic construct
  misc_feature 1..80: note = Artificially Synthesized Probe
  source 1..80: mol_type = other DNA
aacacaattccaacactggtgtggcacaaaagaagcccctatagtcaatgtaattatgtctagtggctagttaactgaaa

SEQ ID NO: 50035 - DNA, 80 bp, synthetic construct
  misc_feature 1..80: note = Artificially Synthesized Probe
  source 1..80: mol_type = other DNA
gcgatctcagctcactgcaacctccgcctcccaggttcaagcgattctcctgcctcagcctcccgagtagctgggatcac

SEQ ID NO: 50036 - DNA, 80 bp, synthetic construct
  misc_feature 1..80: note = Artificially Synthesized Probe
  source 1..80: mol_type = other DNA
gaaatggagaacatcagttaacctgatgagttggttaggtggaggtcagttcagagagctaaaattacttttcccttttg

SEQ ID NO: 50037 - DNA, 80 bp, synthetic construct; identical to SEQ ID NO: 24130
  misc_feature 1..80: note = Artificially Synthesized Probe
  source 1..80: mol_type = other DNA

SEQ ID NO: 50038 - DNA, 80 bp, synthetic construct
  misc_feature 1..80: note = Artificially Synthesized Probe
  source 1..80: mol_type = other DNA
gcagtggcatgatttcagctcactgcaacctcctgggttcaagtgattctcctgcctcagcctcccaagtagctgggact

SEQ ID NO: 50039 - DNA, 80 bp, synthetic construct
  misc_feature 1..80: note = Artificially Synthesized Probe
  source 1..80: mol_type = other DNA
ctcagcatttaatatttacacaggcaccctaacttagggttagtatcagagatgtgacacatatagtcaagaggtctgct

SEQ ID NO: 50040 - DNA, 80 bp, synthetic construct
  misc_feature 1..80: note = Artificially Synthesized Probe
  source 1..80: mol_type = other DNA
aattaattcctacaaacagatctcaaacttcatactgaagaaaacattattgctgctagaggggaaaaaatcaaagttaa

SEQ ID NO: 50041 - DNA, 80 bp, synthetic construct
  misc_feature 1..80: note = Artificially Synthesized Probe
  source 1..80: mol_type = other DNA
gatcacctgaggttgggagttcgagaccagcctgaccaacgtggagaaaccctgtctctactaaaagtacaaaattagaa

SEQ ID NO: 50042 - DNA, 80 bp, synthetic construct; identical to SEQ ID NO: 24131
  misc_feature 1..80: note = Artificially Synthesized Probe
  source 1..80: mol_type = other DNA

SEQ ID NO: 50043 - DNA, 80 bp, synthetic construct
  misc_feature 1..80: note = Artificially Synthesized Probe
  source 1..80: mol_type = other DNA
ccctacaagcaagaattacatccatttcaaaacatcaacagcgccaatgttgagaaaccctaatctaataatctctgaca

SEQ ID NO: 50044 - DNA, 80 bp, synthetic construct
  misc_feature 1..80: note = Artificially Synthesized Probe
  source 1..80: mol_type = other DNA
ccttggcctaatggtatgttgtaacttgaaacattagctaaacttgaaacatcagcaaaaacccttcataattttaaact

SEQ ID NO: 50045 - DNA, 80 bp, synthetic construct
  misc_feature 1..80: note = Artificially Synthesized Probe
  source 1..80: mol_type = other DNA
ttaagtctggagactaccgacttaaaataacagaagctaacagatatcagtgtattaatgcaagcaagtttattaaaatt

SEQ ID NO: 50046 - DNA, 80 bp, synthetic construct; identical to SEQ ID NO: 24132
  misc_feature 1..80: note = Artificially Synthesized Probe
  source 1..80: mol_type = other DNA

SEQ ID NO: 50047 - DNA, 80 bp, synthetic construct; identical to SEQ ID NO: 23967
  misc_feature 1..80: note = Artificially Synthesized Probe
  source 1..80: mol_type = other DNA

SEQ ID NO: 50048 - DNA, 80 bp, synthetic construct
  misc_feature 1..80: note = Artificially Synthesized Probe
  source 1..80: mol_type = other DNA
aaatcttccactcaagcaatgtgcccttaggcaagctgcataacctttctaaaccatatctaactcttagggttgtggtg

SEQ ID NO: 50049 - DNA, 80 bp, synthetic construct
  misc_feature 1..80: note = Artificially Synthesized Probe
  source 1..80: mol_type = other DNA
ccctattatttgaatgatacaaacttcatagatttgaccagagaatcaaatggaatcctcagtgactggcacaaagtaaa

SEQ ID NO: 50050 - DNA, 80 bp, synthetic construct; identical to SEQ ID NO: 24133
  misc_feature 1..80: note = Artificially Synthesized Probe
  source 1..80: mol_type = other DNA

SEQ ID NO: 50051 - DNA, 80 bp, synthetic construct
  misc_feature 1..80: note = Artificially Synthesized Probe
  source 1..80: mol_type = other DNA
cttttcaatcttaacttcagattaaaaatcaccttggaagcttttaaaaatccagataccaaggcctcaccctcaaaaac

SEQ ID NO: 50052 - DNA, 80 bp, synthetic construct
  misc_feature 1..80: note = Artificially Synthesized Probe
  source 1..80: mol_type = other DNA
taaaatgagattattttccacaattgcacaagattattaatgcagtctaagcaacagtttaagagtcataccacaattct

SEQ ID NO: 50053 - DNA, 80 bp, synthetic construct
  misc_feature 1..80: note = Artificially Synthesized Probe
  source 1..80: mol_type = other DNA
tacaaagtggttacttcaaataatcaagatgtgcctaaaatactctgagagtaccacgcagagaaaatgagagggtgtgg

SEQ ID NO: 50054 - DNA, 80 bp, synthetic construct; identical to SEQ ID NO: 24134
  misc_feature 1..80: note = Artificially Synthesized Probe
  source 1..80: mol_type = other DNA

SEQ ID NO: 50055 - DNA, 80 bp, synthetic construct
  misc_feature 1..80: note = Artificially Synthesized Probe
  source 1..80: mol_type = other DNA
gcagatatggagggccactgtagaagtggcattttgggtggggcaattctttgctgtgtaggacttttagtgcattgtgt

SEQ ID NO: 50056 - DNA, 80 bp, synthetic construct
  misc_feature 1..80: note = Artificially Synthesized Probe
  source 1..80: mol_type = other DNA
catgtgccaccacgcctggctaattttgtattcttagtagagtcagagtttctccatgttggtcaggctggtttcgaact

SEQ ID NO: 50057 - DNA, 80 bp, synthetic construct
  misc_feature 1..80: note = Artificially Synthesized Probe
  source 1..80: mol_type = other DNA
aagggccagaaacaacaggaaacaaccctgaaaaaatgcaaggatttgattggtattaaacagcatttccctaaaatgtt

SEQ ID NO: 50058 - DNA, 80 bp, synthetic construct
  misc_feature 1..80: note = Artificially Synthesized Probe
  source 1..80: mol_type = other DNA
tcaagaccagcctggccaacatggtgaaaccccatctctactaaaaatatttaaaaacaattagccaggtgtggtggcac

SEQ ID NO: 50059 - DNA, 80 bp, synthetic construct
  misc_feature 1..80: note = Artificially Synthesized Probe
  source 1..80: mol_type = other DNA
tactacagttcttctcaaccattactatgctaatatccaattatgaaatcccaaaaggggagctatataatatagtacag

SEQ ID NO: 50060 - DNA, 80 bp, synthetic construct; identical to SEQ ID NO: 24135
  misc_feature 1..80: note = Artificially Synthesized Probe
  source 1..80: mol_type = other DNA

SEQ ID NO: 50061 - DNA, 80 bp, synthetic construct
  misc_feature 1..80: note = Artificially Synthesized Probe
  source 1..80: mol_type = other DNA
tagattttgtttttaaagtgaaacacagacctccctgtctttacttccccacccctaaatgatccagggaacaaaacaat

SEQ ID NO: 50062 - DNA, 80 bp, synthetic construct
  misc_feature 1..80: note = Artificially Synthesized Probe
  source 1..80: mol_type = other DNA
acaaattaaaaatcaaatcatcgaacaggaatctatttgatgtccaacttcactatcagcctcacccatctcctgcctgg

SEQ ID NO: 50063 - DNA, 80 bp, synthetic construct; identical to SEQ ID NO: 24136
  misc_feature 1..80: note = Artificially Synthesized Probe
  source 1..80: mol_type = other DNA

SEQ ID NO: 50064 - DNA, 80 bp, synthetic construct
  misc_feature 1..80: note = Artificially Synthesized Probe
  source 1..80: mol_type = other DNA
cctgagtagctagggctacaggcgcccgccaccatgcctggctaattttttgtattttcagtggagacggggtttcacca

SEQ ID NO: 50065 - DNA, 80 bp, synthetic construct
  misc_feature 1..80: note = Artificially Synthesized Probe
  source 1..80: mol_type = other DNA
agcaggctcaaatagaagtactctactcaaagacaacaaggatgagtaataaaaagaaacaatccagcaaagggtctatg

SEQ ID NO: 50066 - DNA, 80 bp, synthetic construct
  misc_feature 1..80: note = Artificially Synthesized Probe
  source 1..80: mol_type = other DNA
tttaggggaaaaaaatgactgaaaaaacaaaattgaagaacagatgaaatgggagatgaggcaggaggcagtggctcact

SEQ ID NO: 50067 - DNA, 80 bp, synthetic construct
  misc_feature 1..80: note = Artificially Synthesized Probe
  source 1..80: mol_type = other DNA
tagtcccagctaattgagaggccgagatgggaggatggcttgagcccaggaggcagaggttgcagtgagccaagatcaca

SEQ ID NO: 50068 - DNA, 80 bp, synthetic construct
  misc_feature 1..80: note = Artificially Synthesized Probe
  source 1..80: mol_type = other DNA
ggatcgcttgaggccaggagttcaagaccagccagggcaacatagtgagaatctatctctacaaccaccaccaccaccac

SEQ ID NO: 50069 - DNA, 80 bp, synthetic construct; identical to SEQ ID NO: 24137
  misc_feature 1..80: note = Artificially Synthesized Probe
  source 1..80: mol_type = other DNA

SEQ ID NO: 50070 - DNA, 80 bp, synthetic construct
  misc_feature 1..80: note = Artificially Synthesized Probe
  source 1..80: mol_type = other DNA
acaaggtttatatctcatatgaagagatggaaaaaaatttttttaatggtagctggggaaagggaggtataagtgtactg

SEQ ID NO: 50071 - DNA, 80 bp, synthetic construct
  misc_feature 1..80: note = Artificially Synthesized Probe
  source 1..80: mol_type = other DNA
aagagacaaagcccccaaagaaaaatataattaataatgtggaagaactgccttatcaacaaaatataaatgagataagc

SEQ ID NO: 50072 - DNA, 80 bp, synthetic construct; identical to SEQ ID NO: 24138
  misc_feature 1..80: note = Artificially Synthesized Probe
  source 1..80: mol_type = other DNA

SEQ ID NO: 50073 - DNA, 80 bp, synthetic construct
  misc_feature 1..80: note = Artificially Synthesized Probe
  source 1..80: mol_type = other DNA
aatgtatccagtgacacaagagttgcttactcaaaactaggaagtctaccaatacaattacttacctaaatagatcaatg

SEQ ID NO: 50074 - DNA, 80 bp, synthetic construct
  misc_feature 1..80: note = Artificially Synthesized Probe
  source 1..80: mol_type = other DNA
taaacttcatatagggtatctataaaaagtctgtaagtcaccaagcataacagaagcattctcactaaagacaggagaaa

SEQ ID NO: 50075 - DNA, 80 bp, synthetic construct
  misc_feature 1..80: note = Artificially Synthesized Probe
  source 1..80: mol_type = other DNA
ctagctgtaattttgtatccatgaataaatctccccagagcttccactctacccctactattcccagcccgagtatcctc

SEQ ID NO: 50076 - DNA, 80 bp, synthetic construct
  misc_feature 1..80: note = Artificially Synthesized Probe
  source 1..80: mol_type = other DNA
gctgaatagcattccatcggatgctatacaaccacattgtctttacccaatcttctgttgttgaactgattccatatctt

SEQ ID NO: 50077 - DNA, 80 bp, synthetic construct; identical to SEQ ID NO: 24139
  misc_feature 1..80: note = Artificially Synthesized Probe
  source 1..80: mol_type = other DNA

SEQ ID NO: 50078 - DNA, 80 bp, synthetic construct
  misc_feature 1..80: note = Artificially Synthesized Probe
  source 1..80: mol_type = other DNA
cccaagtcttctacagttttatagcagccatcctacctggggccagatgataccacactgtggtttcaccttgtagtttt

SEQ ID NO: 50079 - DNA, 80 bp, synthetic construct
  misc_feature 1..80: note = Artificially Synthesized Probe
  source 1..80: mol_type = other DNA
ataccaatcctccacatccaaaaggatgaaaacattatgtagaaaactataaaccttttaaggaaaaaaaaacagagctg

SEQ ID NO: 50080 - DNA, 80 bp, synthetic construct
  misc_feature 1..80: note = Artificially Synthesized Probe
  source 1..80: mol_type = other DNA
aaaaaaaaaatgaggtatcatactacattttgttttctgtcttgttttctttttctctcaccaatatccatgtcatcaat

SEQ ID NO: 50081 - DNA, 80 bp, synthetic construct
  misc_feature 1..80: note = Artificially Synthesized Probe
  source 1..80: mol_type = other DNA
tcccagcactttgggaggccgaggcaggtggatcacctgaggtcaggagttcgagaccagcctgaccaatatggtgaaac

SEQ ID NO: 50082 - DNA, 80 bp, synthetic construct; identical to SEQ ID NO: 24140
  misc_feature 1..80: note = Artificially Synthesized Probe
  source 1..80: mol_type = other DNA

SEQ ID NO: 50083 - DNA, 80 bp, synthetic construct
  misc_feature 1..80: note = Artificially Synthesized Probe
  source 1..80: mol_type = other DNA
tagaggacattgacaatctaattcttctaatggtcacgtggaagagtgaatgagcatatgtttgccgcaaataaacaaag

SEQ ID NO: 50084 - DNA, 80 bp, synthetic construct
  misc_feature 1..80: note = Artificially Synthesized Probe
  source 1..80: mol_type = other DNA
aggttgctttacaaataagtgagaaaaagactgtgcacatatgtacaaatggtgttgggaaaataacatcccccaagaca

SEQ ID NO: 50085 - DNA, 80 bp, synthetic construct
  misc_feature 1..80: note = Artificially Synthesized Probe
  source 1..80: mol_type = other DNA
tgtcgccaggctggagtgcagtggcacaatctcagctcatgcaacctctgcctcccgggttcaagcaattctcctgcctc

SEQ ID NO: 50086 - DNA, 80 bp, synthetic construct; identical to SEQ ID NO: 24141
  misc_feature 1..80: note = Artificially Synthesized Probe
  source 1..80: mol_type = other DNA

SEQ ID NO: 50087 - DNA, 80 bp, synthetic construct
  misc_feature 1..80: note = Artificially Synthesized Probe
  source 1..80: mol_type = other DNA
aacacagcaagactccatctctacaaattttttctttttcaaattagttgggcacagtggtgtgcatttgtcccagttac

SEQ ID NO: 50088 - DNA, 80 bp, synthetic construct
  misc_feature 1..80: note = Artificially Synthesized Probe
  source 1..80: mol_type = other DNA
acatgatggataaagaagactatccatagcctaggcctcaatagagtgggaggcctgcctcttaaaaaagaaataaaaat

SEQ ID NO: 50089 - DNA, 80 bp, synthetic construct
  misc_feature 1..80: note = Artificially Synthesized Probe
  source 1..80: mol_type = other DNA
atggcatgtctataaacaatttaagaaaaaacccaaaggctaacatatgaaaacatactcaacctcactagtaatcagag

SEQ ID NO: 50090 - DNA, 80 bp, synthetic construct; identical to SEQ ID NO: 24142
  misc_feature 1..80: note = Artificially Synthesized Probe
  source 1..80: mol_type = other DNA

SEQ ID NO: 50091 - DNA, 80 bp, synthetic construct
  misc_feature 1..80: note = Artificially Synthesized Probe
  source 1..80: mol_type = other DNA
atattgatgcaggcaggagctgtttgtagtgtggtttttttccttagctatttgaactagttttttgttccataagtaaa

SEQ ID NO: 50092 - DNA, 80 bp, synthetic construct; identical to SEQ ID NO: 23968
  misc_feature 1..80: note = Artificially Synthesized Probe
  source 1..80: mol_type = other DNA

SEQ ID NO: 50093 - DNA, 80 bp, synthetic construct
  misc_feature 1..80: note = Artificially Synthesized Probe
  source 1..80: mol_type = other DNA
atgattcctggacaagcagcaccaacatcccacccccccacccctcagcccactcccggcaggaacttgttaaaaatgca

SEQ ID NO: 50094 - DNA, 80 bp, synthetic construct; identical to SEQ ID NO: 24143
  misc_feature 1..80: note = Artificially Synthesized Probe
  source 1..80: mol_type = other DNA

SEQ ID NO: 50095 - DNA, 80 bp, synthetic construct
  misc_feature 1..80: note = Artificially Synthesized Probe
  source 1..80: mol_type = other DNA
atgcctgctcaggattttttgccctttttccaatttggtgttctgtctttgtcttagaaatctataggaattttttatgt

SEQ ID NO: 50096 - DNA, 80 bp, synthetic construct
  misc_feature 1..80: note = Artificially Synthesized Probe
  source 1..80: mol_type = other DNA
atggggtgccacttccaagactaaaatactgtggtttccatcttgggtgttttctcttactcccttctagaaagccagct

SEQ ID NO: 50097 - DNA, 80 bp, synthetic construct
  misc_feature 1..80: note = Artificially Synthesized Probe
  source 1..80: mol_type = other DNA
agtttcctgacccacagaactgtgagagaaatgttatttcaaactgctaagtcttcggtaattacacaacaatagataac

SEQ ID NO: 50098 - DNA, 80 bp, synthetic construct; identical to SEQ ID NO: 24144
  misc_feature 1..80: note = Artificially Synthesized Probe
  source 1..80: mol_type = other DNA

SEQ ID NO: 50099 - DNA, 80 bp, synthetic construct
  misc_feature 1..80: note = Artificially Synthesized Probe
  source 1..80: mol_type = other DNA
agaatataaaattcatccatattatttagtattacctgccattttgttattcatctcctctttctgttgttttctgtttg

SEQ ID NO: 50100 - DNA, 80 bp, synthetic construct
  misc_feature 1..80: note = Artificially Synthesized Probe
  source 1..80: mol_type = other DNA
agctaattttggtatttttagtagagacggggtttcaccatgttggccaggctggtctcgaactcctggcctcaagtgat

SEQ ID NO: 50101 - DNA, 80 bp, synthetic construct
  misc_feature 1..80: note = Artificially Synthesized Probe
  source 1..80: mol_type = other DNA
taactgctctttggacagcactcagcagtagattctcctctccttttctaacaaagccatagtccaactgacataatatt

SEQ ID NO: 50102 - DNA, 80 bp, synthetic construct; identical to SEQ ID NO: 24145
  misc_feature 1..80: note = Artificially Synthesized Probe
  source 1..80: mol_type = other DNA

SEQ ID NO: 50103 - DNA, 80 bp, synthetic construct
  misc_feature 1..80: note = Artificially Synthesized Probe
  source 1..80: mol_type = other DNA
ggagtcctttgtatattataaacatttactttttgttatatatgctacaattattctttttatctttcaatgttattttt

SEQ ID NO: 50104 - DNA, 80 bp, synthetic construct
  misc_feature 1..80: note = Artificially Synthesized Probe
  source 1..80: mol_type = other DNA
ccaggatgagcagtgcctaccatagagcattaaaaatttgccgagtggaaaaaggaattaaagaagtcttcctaccttat

SEQ ID NO: 50105 - DNA, 80 bp, synthetic construct
  misc_feature 1..80: note = Artificially Synthesized Probe
  source 1..80: mol_type = other DNA
cagtcttccaatccacactcagtacagggtatgtaccatttatttaggtggtctgtctctaaataaggtttaattactct

SEQ ID NO: 50106 - DNA, 80 bp, synthetic construct
  misc_feature 1..80: note = Artificially Synthesized Probe
  source 1..80: mol_type = other DNA
ttctgcatctggggcacactttcatcacagtacactgtccttaattctttatttatctacttctaccacttaactgtaag

SEQ ID NO: 50107 - DNA, 80 bp, synthetic construct
  misc_feature 1..80: note = Artificially Synthesized Probe
  source 1..80: mol_type = other DNA
gtgaagtataaactgtacaggcatgcttcatcatattgtgctttgctttactgctcttagcggataatggtttttgtttg

SEQ ID NO: 50108 - DNA, 80 bp, synthetic construct; identical to SEQ ID NO: 24146
  misc_feature 1..80: note = Artificially Synthesized Probe
  source 1..80: mol_type = other DNA

SEQ ID NO: 50109 - DNA, 80 bp, synthetic construct
  misc_feature 1..80: note = Artificially Synthesized Probe
  source 1..80: mol_type = other DNA
gaaatcaaaagctagaaatgattaagcttagtgaagaaggcatgttgaaaggcaggcctcttgtaccaaacagccagatt

SEQ ID NO: 50110 - DNA, 80 bp, synthetic construct
  misc_feature 1..80: note = Artificially Synthesized Probe
  source 1..80: mol_type = other DNA
agaccagcctagccaacacagtgagaccctctaagaattaaaagaaaaatagtttaagaaaagcaagcaagcaaaacaac

SEQ ID NO: 50111 - DNA, 80 bp, synthetic construct
  misc_feature 1..80: note = Artificially Synthesized Probe
  source 1..80: mol_type = other DNA
tggagtacaatggcatgatctcggctcaccgcaacctctgcctcccgggttcaagcgattctcctgcctcagcctcctga

SEQ ID NO: 50112 - DNA, 80 bp, synthetic construct
  misc_feature 1..80: note = Artificially Synthesized Probe
  source 1..80: mol_type = other DNA
caccacgcctggcctaggacacgatgactcttattagaggctaatgcagctggtgactttaagttgaagccaatgctcat

SEQ ID NO: 50113 - DNA, 80 bp, synthetic construct; identical to SEQ ID NO: 24147
  misc_feature 1..80: note = Artificially Synthesized Probe
  source 1..80: mol_type = other DNA

SEQ ID NO: 50114 - DNA, 80 bp, synthetic construct
  misc_feature 1..80: note = Artificially Synthesized Probe
  source 1..80: mol_type = other DNA
tctgcaaagaattcacctttctcgatgccataaagaacatttgtaattcatgggaggaggtaaaactggcaacattaaca

SEQ ID NO: 50115 - DNA, 80 bp, synthetic construct
  misc_feature 1..80: note = Artificially Synthesized Probe
  source 1..80: mol_type = other DNA
ataacagtatggtgtgaaaagatatcctgtaacaaaaatttcaaaataacactttaaagggatagcctccaataatctgg

SEQ ID NO: 50116 - DNA, 80 bp, synthetic construct
  misc_feature 1..80: note = Artificially Synthesized Probe
  source 1..80: mol_type = other DNA
gaacaaatgggaagttacttcttatggatgagtaaaaaaagtggtttcttgacatgaactctactcttgctgaagatgct

SEQ ID NO: 50117 - DNA, 80 bp, synthetic construct
  misc_feature 1..80: note = Artificially Synthesized Probe
  source 1..80: mol_type = other DNA
tttgtgaaaagaagtcaactgatgtcgcaaacctcactgttgtcttaagaaactggcatagccatcctatccttcagtaa

SEQ ID NO: 50118 - DNA, 80 bp, synthetic construct; identical to SEQ ID NO: 24148
  misc_feature 1..80: note = Artificially Synthesized Probe
  source 1..80: mol_type = other DNA

SEQ ID NO: 50119 - DNA, 80 bp, synthetic construct
  misc_feature 1..80: note = Artificially Synthesized Probe
  source 1..80: mol_type = other DNA
agactggagtgcaatggcacgatctcggctcactgcaacctctgcctcctgggttcaagcaattcttctgtctcagcctc

SEQ ID NO: 50120 - DNA, 80 bp, synthetic construct
  misc_feature 1..80: note = Artificially Synthesized Probe
  source 1..80: mol_type = other DNA
ccactgcgcctgaccagattatttccaagtattaatagttgctcaatttctaacatgaagctttaaaaattaccctattg

SEQ ID NO: 50121 - DNA, 80 bp, synthetic construct
  misc_feature 1..80: note = Artificially Synthesized Probe
  source 1..80: mol_type = other DNA
atgggttctatacacccactgggttaaacttgttcattgtgttatacaaatattttatatcctaactaacctgtctgctt

SEQ ID NO: 50122 - DNA, 80 bp, synthetic construct; identical to SEQ ID NO: 24149
  misc_feature 1..80: note = Artificially Synthesized Probe
  source 1..80: mol_type = other DNA

SEQ ID NO: 50123 - DNA, 80 bp, synthetic construct
  misc_feature 1..80: note = Artificially Synthesized Probe
  source 1..80: mol_type = other DNA
attttgtatttaatgtagctggtgatatgtttagatttaaatctacccatctttgtgctacttgtcctactggttctttc

SEQ ID NO: 50124 - DNA, 80 bp, synthetic construct
  misc_feature 1..80: note = Artificially Synthesized Probe
  source 1..80: mol_type = other DNA
tactttgcattattaatgtcaataaacattctaagtaagaacccgagcaccatgacgtgaaaagagaacatgggacaggg

SEQ ID NO: 50125 - DNA, 80 bp, synthetic construct
  misc_feature 1..80: note = Artificially Synthesized Probe
  source 1..80: mol_type = other DNA
gccgaggcgggcggatcacgaggtcaggagatcgagaccatcccggctaaaacggtgaaaccccgtctctactaaaaata

SEQ ID NO: 50126 - DNA, 80 bp, synthetic construct
  misc_feature 1..80: note = Artificially Synthesized Probe
  source 1..80: mol_type = other DNA
aaaaaaaaaaaaaaaaagaaattaaaacatataatttatcaaggtcaagtcaattaatactttctacctttctctctgac

SEQ ID NO: 50127 - DNA, 80 bp, synthetic construct; identical to SEQ ID NO: 24150
  misc_feature 1..80: note = Artificially Synthesized Probe
  source 1..80: mol_type = other DNA

SEQ ID NO: 50128 - DNA, 80 bp, synthetic construct
  misc_feature 1..80: note = Artificially Synthesized Probe
  source 1..80: mol_type = other DNA
ttcttttaatacatccacatatttgccactctctttgctctttattccattttgcacctcagacttttatctagaatctt

SEQ ID NO: 50129 - DNA, 80 bp, synthetic construct; identical to SEQ ID NO: 24151
  misc_feature 1..80: note = Artificially Synthesized Probe
  source 1..80: mol_type = other DNA

SEQ ID NO: 50130 - DNA, 80 bp, synthetic construct
  misc_feature 1..80: note = Artificially Synthesized Probe
  source 1..80: mol_type = other DNA
cattctttctcctctctttccagagctctgattaaagaaattagatcttattctgtcttccatgtctctttacctctctt

SEQ ID NO: 50131 - DNA, 80 bp, synthetic construct
  misc_feature 1..80: note = Artificially Synthesized Probe
  source 1..80: mol_type = other DNA
gctaggcataatctcttaggtatatttggtaaagtgttcacttctggaatttctatttggttttttgcaaatctattaag

SEQ ID NO: 50132 - DNA, 80 bp, synthetic construct
  misc_feature 1..80: note = Artificially Synthesized Probe
  source 1..80: mol_type = other DNA
aataaaacttaacagttgaagttgtggatgttaaataaaagtactttagtcactcattgagttgccgactaattgcccca

SEQ ID NO: 50133 - DNA, 80 bp, synthetic construct
  misc_feature 1..80: note = Artificially Synthesized Probe
  source 1..80: mol_type = other DNA
ccaccatgcccagctaattttttgtacttttagtagaggtggggtttcactgtgttagccaggatggtctcaatctcctg

SEQ ID NO: 50134 - DNA, 80 bp, synthetic construct; identical to SEQ ID NO: 24152
  misc_feature 1..80: note = Artificially Synthesized Probe
  source 1..80: mol_type = other DNA

SEQ ID NO: 50135 - DNA, 80 bp, synthetic construct
  misc_feature 1..80: note = Artificially Synthesized Probe
  source 1..80: mol_type = other DNA
acctcaccacacgtggctaatctttgtatttttagtagagacaaagtttcaccatgttggccaggctggtcttgaactcc

SEQ ID NO: 50136 - DNA, 80 bp, synthetic construct
  misc_feature 1..80: note = Artificially Synthesized Probe
  source 1..80: mol_type = other DNA
tttgcaacatttgaagattttatagatctgtttctgctctcttcttattcacagtgccaattggatgcatgcttggttat

SEQ ID NO: 50137 - DNA, 80 bp, synthetic construct; identical to SEQ ID NO: 23969
  misc_feature 1..80: note = Artificially Synthesized Probe
  source 1..80: mol_type = other DNA

SEQ ID NO: 50138 - DNA, 80 bp, synthetic construct
  misc_feature 1..80: note = Artificially Synthesized Probe
  source 1..80: mol_type = other DNA
acttgtgacaatgtactgttcattgtccttgaaaaattactggaagcaattccctagaatgaaaggcctttctccacacg

SEQ ID NO: 50139 - DNA, 80 bp, synthetic construct; identical to SEQ ID NO: 24153
  misc_feature 1..80: note = Artificially Synthesized Probe
  source 1..80: mol_type = other DNA

SEQ ID NO: 50140 - DNA, 80 bp, synthetic construct
  misc_feature 1..80: note = Artificially Synthesized Probe
  source 1..80: mol_type = other DNA
caacttgtacagattggcaactgcctttagggcaaaagctacttcatccacttatttatttggattcttgtttattccta

SEQ ID NO: 50141 - DNA, 80 bp, synthetic construct
  misc_feature 1..80: note = Artificially Synthesized Probe
  source 1..80: mol_type = other DNA
cagtcttccaatactgaaaacagaaatcaatttctcctttttacaacaactattttgtacattctctatactacccttaa

SEQ ID NO: 50142 - DNA, 80 bp, synthetic construct
  misc_feature 1..80: note = Artificially Synthesized Probe
  source 1..80: mol_type = other DNA
gcacatgcctgtaatcccagctacttgggaggctgaggcaggagaatcgcttgaacccgggaggcgaaggttttggtgag

SEQ ID NO: 50143 - DNA, 80 bp, synthetic construct; identical to SEQ ID NO: 24154
  misc_feature 1..80: note = Artificially Synthesized Probe
  source 1..80: mol_type = other DNA

SEQ ID NO: 50144 - DNA, 80 bp, synthetic construct
  misc_feature 1..80: note = Artificially Synthesized Probe
  source 1..80: mol_type = other DNA
atttcagcctgggcaacaagagcgaaactccgtctcaaaacaacaacaacaacaacaacaacaacaacaacaacaaaaaa

SEQ ID NO: 50145 - DNA, 80 bp, synthetic construct
  misc_feature 1..80: note = Artificially Synthesized Probe
  source 1..80: mol_type = other DNA
ctgacttccctgatcctttctcattaaatgctaatagtgtcctcttcctccatctttgtaacaaccaaaatacctccgag

SEQ ID NO: 50146 - DNA, 80 bp, synthetic construct
  misc_feature 1..80: note = Artificially Synthesized Probe
  source 1..80: mol_type = other DNA
ctaagagttcatacatgaacactccagtaattatggtagcagggttactatgggaaatagcacttcccacttgaaactgt

SEQ ID NO: 50147 - DNA, 80 bp, synthetic construct
  misc_feature 1..80: note = Artificially Synthesized Probe
  source 1..80: mol_type = other DNA
caactccaattctttgcaaattctattcccactgcctattacatccttttgtcttccttctacctacctaaattaaacct

SEQ ID NO: 50148 - DNA, 80 bp, synthetic construct; identical to SEQ ID NO: 24155
  misc_feature 1..80: note = Artificially Synthesized Probe
  source 1..80: mol_type = other DNA

SEQ ID NO: 50149 - DNA, 80 bp, synthetic construct
  misc_feature 1..80: note = Artificially Synthesized Probe
  source 1..80: mol_type = other DNA
tggtgtgatcatagctcactgcagccgtgaactgggttcaagcaatcctcccgccctcagcctcccaagtagctgggact

SEQ ID NO: 50150 - DNA, 80 bp, synthetic construct
  misc_feature 1..80: note = Artificially Synthesized Probe
  source 1..80: mol_type = other DNA
taacttcgcaggactgaagaactcagtgctgtgtaaatcaacataatcttgaaaacaaactgaaaagccatggttaaaga

SEQ ID NO: 50151 - DNA, 80 bp, synthetic construct
  misc_feature 1..80: note = Artificially Synthesized Probe
  source 1..80: mol_type = other DNA
aataagtatgaatcccacacactcttgactttgaaggggtctagaactgcactgattaaagcagccactagccatcaggc

SEQ ID NO: 50152 - DNA, 80 bp, synthetic construct
  misc_feature 1..80: note = Artificially Synthesized Probe
  source 1..80: mol_type = other DNA
gaacatttccatcatcacagaaagtatgactgaacagtgcaggtctagaggaaaaagaaatacctattaacaaaaaaacc

SEQ ID NO: 50153 - DNA, 80 bp, synthetic construct; identical to SEQ ID NO: 24156
  misc_feature 1..80: note = Artificially Synthesized Probe
  source 1..80: mol_type = other DNA

SEQ ID NO: 50154 - DNA, 80 bp, synthetic construct
  misc_feature 1..80: note = Artificially Synthesized Probe
  source 1..80: mol_type = other DNA
gcagttaccagaccactccaaatttagcctacattcatggcaggatagtggcaggtacttcattaaggagtaataaattc

SEQ ID NO: 50155 - DNA, 80 bp, synthetic construct
  misc_feature 1..80: note = Artificially Synthesized Probe
  source 1..80: mol_type = other DNA
ggagactcataatgctgtctagacaactcataaaataacttaatattgccattagcctatagtcctggctactcgggaag

SEQ ID NO: 50156 - DNA, 80 bp, synthetic construct; identical to SEQ ID NO: 24157
  misc_feature 1..80: note = Artificially Synthesized Probe
  source 1..80: mol_type = other DNA

SEQ ID NO: 50157 - DNA, 80 bp, synthetic construct
  misc_feature 1..80: note = Artificially Synthesized Probe
  source 1..80: mol_type = other DNA
atagaaagccaatccttcctatttatacactaaatccctttccctcttacctcttctaagacagtgcttcagcaattctt

SEQ ID NO: 50158 - DNA, 80 bp, synthetic construct
  misc_feature 1..80: note = Artificially Synthesized Probe
  source 1..80: mol_type = other DNA
tgttgccctggctggaatgcagtggtgtcatctcagctcattacaatctccacctcctgggttcaagcgattctcatgtc

SEQ ID NO: 50159 - DNA, 80 bp, synthetic construct
  misc_feature 1..80: note = Artificially Synthesized Probe
  source 1..80: mol_type = other DNA
ctctgttcccctttacaggataattcctcaccatctttacttcccctcctcttctctcttaaaatcacttcaatcaaaac

SEQ ID NO: 50160 - DNA, 80 bp, synthetic construct
  misc_feature 1..80: note = Artificially Synthesized Probe
  source 1..80: mol_type = other DNA
ctactttcaaaacatccaaaatctgactacttctcagtatttctgctatcaccaatatggcctagataactgaaagagat

SEQ ID NO: 50161 - DNA, 80 bp, synthetic construct; identical to SEQ ID NO: 24158
  misc_feature 1..80: note = Artificially Synthesized Probe
  source 1..80: mol_type = other DNA

SEQ ID NO: 50162 - DNA, 80 bp, synthetic construct
  misc_feature 1..80: note = Artificially Synthesized Probe
  source 1..80: mol_type = other DNA
gtagagacctttgttttgttttcaagtgtactactaagcacctagatcactacctggcatatagtaggcactcaaatatt

SEQ ID NO: 50163 - DNA, 80 bp, synthetic construct
  misc_feature 1..80: note = Artificially Synthesized Probe
  source 1..80: mol_type = other DNA
gagtgcagtggcgcgatcttggctcactgcaacctccgactccctgattgaagcgattctcttgcctcagcctccagagt

SEQ ID NO: 50164 - DNA, 80 bp, synthetic construct
  misc_feature 1..80: note = Artificially Synthesized Probe
  source 1..80: mol_type = other DNA
gcgcccggccaaccacagcttttaaataccaaaacacaagtcataattaccagttttcctataaatggaacagtctttct

SEQ ID NO: 50165 - DNA, 80 bp, synthetic construct; identical to SEQ ID NO: 24159
  misc_feature 1..80: note = Artificially Synthesized Probe
  source 1..80: mol_type = other DNA

SEQ ID NO: 50166 - DNA, 80 bp, synthetic construct
  misc_feature 1..80: note = Artificially Synthesized Probe
  source 1..80: mol_type = other DNA
tagcactcctatgatctacttaacacatatggcctactagaagttcagtgcataccataaggagggggaggaggatcaag

SEQ ID NO: 50167 - DNA, 80 bp, synthetic construct
  misc_feature 1..80: note = Artificially Synthesized Probe
  source 1..80: mol_type = other DNA
gaacattttctgtggctctagaataggaatataaagaccactctgaatcataatctcttccctatttgatgttctctgac

SEQ ID NO: 50168 - DNA, 80 bp, synthetic construct
  misc_feature 1..80: note = Artificially Synthesized Probe
  source 1..80: mol_type = other DNA
ggaattaagtcacctccataaaacattaccagaaattacgctaacaagagctctataaaaataatcagccaggcacggtg

SEQ ID NO: 50169 - DNA, 80 bp, synthetic construct
  misc_feature 1..80: note = Artificially Synthesized Probe
  source 1..80: mol_type = other DNA
ctggaggctgaggcaggagaatcacttgaacccgggggggggggggggcggaggttgcaatgagccgagatcacaccact

SEQ ID NO: 50170 - DNA, 80 bp, synthetic construct
  misc_feature 1..80: note = Artificially Synthesized Probe
  source 1..80: mol_type = other DNA
taagccacgacacctggccttagttacagttctttttgaaatttgttaacttaaggctttatccttccaatatggaaaaa

SEQ ID NO: 50171 - DNA, 80 bp, synthetic construct; identical to SEQ ID NO: 24160
  misc_feature 1..80: note = Artificially Synthesized Probe
  source 1..80: mol_type = other DNA

SEQ ID NO: 50172 - DNA, 80 bp, synthetic construct
  misc_feature 1..80: note = Artificially Synthesized Probe
  source 1..80: mol_type = other DNA
tttagtgcaagaaaaaatataaaacaaaagtattccccaacttaaatataattaaagtatctttttttttttttttgaca

SEQ ID NO: 50173 - DNA, 80 bp, synthetic construct
  misc_feature 1..80: note = Artificially Synthesized Probe
  source 1..80: mol_type = other DNA
ttacagacatgcgccaccatgcccggctaattttttgcatttttagtagagacggagtgtctccatgttggtcaggttgg

SEQ ID NO: 50174 - DNA, 80 bp, synthetic construct; identical to SEQ ID NO: 24161
  misc_feature 1..80: note = Artificially Synthesized Probe
  source 1..80: mol_type = other DNA

SEQ ID NO: 50175 - DNA, 80 bp, synthetic construct
  misc_feature 1..80: note = Artificially Synthesized Probe
  source 1..80: mol_type = other DNA
gattttttttaaaaactctgcaaggtgacccaacaaaactggaacgatactccttgcaacatggtcaaaacttagtcagt

SEQ ID NO: 50176 - DNA, 80 bp, synthetic construct
  misc_feature 1..80: note = Artificially Synthesized Probe
  source 1..80: mol_type = other DNA
agtaaaaagctatcagtgcagtttaaaacaaagtaaaggggccctataggccccactgaaaaaggtagaaatatgaccaa

SEQ ID NO: 50177 - DNA, 80 bp, synthetic construct
  misc_feature 1..80: note = Artificially Synthesized Probe
  source 1..80: mol_type = other DNA
ttctaatgaagatggagaataacacattgtaaactagtatctttcacaacctaattgacactttcggtgactttttttgg

SEQ ID NO: 50178 - DNA, 80 bp, synthetic construct; identical to SEQ ID NO: 24162
  misc_feature 1..80: note = Artificially Synthesized Probe
  source 1..80: mol_type = other DNA

SEQ ID NO: 50179 - DNA, 80 bp, synthetic construct
  misc_feature 1..80: note = Artificially Synthesized Probe
  source 1..80: mol_type = other DNA
tagcctaagaaaacacacacagatcaataaaacagtagaatccaaaactcacaaacataagcaattgatttcaataaaag

SEQ ID NO: 50180 - DNA, 80 bp, synthetic construct; identical to SEQ ID NO: 23970
  misc_feature 1..80: note = Artificially Synthesized Probe
  source 1..80: mol_type = other DNA

SEQ ID NO: 50181 - DNA, 80 bp, synthetic construct
  misc_feature 1..80: note = Artificially Synthesized Probe
  source 1..80: mol_type = other DNA
tgcctcagcctcccaggtagctgggattgcaggtgcccaccaccatgctcggctaatttttgtatttttagtagagaggg

SEQ ID NO: 50182 - DNA, 80 bp, synthetic construct
  misc_feature 1..80: note = Artificially Synthesized Probe
  source 1..80: mol_type = other DNA
cacagagatcagaccagtgtttgccaggggctgagggtagaagatgaaactgagtgcaaagaggaactaggagctgggct

SEQ ID NO: 50183 - DNA, 80 bp, synthetic construct; identical to SEQ ID NO: 24163
  misc_feature 1..80: note = Artificially Synthesized Probe
  source 1..80: mol_type = other DNA

SEQ ID NO: 50184 - DNA, 80 bp, synthetic construct
  misc_feature 1..80: note = Artificially Synthesized Probe
  source 1..80: mol_type = other DNA
acagagtcaaactcatttgtttaaatattgtctattagctacttctgagctactacagtattgttgaggaattgtgagag

SEQ ID NO: 50185 - DNA, 80 bp, synthetic construct
  misc_feature 1..80: note = Artificially Synthesized Probe
  source 1..80: mol_type = other DNA
ccagcacaaacctctcttccatacatagtagctctaaaatttttacagccataaaacccttttttcaaggaaactaacat

SEQ ID NO: 50186 - DNA, 80 bp, synthetic construct
  misc_feature 1..80: note = Artificially Synthesized Probe
  source 1..80: mol_type = other DNA
agattctcacaagaagcacacaatctagatccctcacatgcacagtttctgatagggttcacgctcctgccgctgatctg

SEQ ID NO: 50187 - DNA, 80 bp, synthetic construct; identical to SEQ ID NO: 24164
  misc_feature 1..80: note = Artificially Synthesized Probe
  source 1..80: mol_type = other DNA

SEQ ID NO: 50188 - DNA, 80 bp, synthetic construct
  misc_feature 1..80: note = Artificially Synthesized Probe
  source 1..80: mol_type = other DNA
tactattatagatgaagattttaaaactacaaaacagacaaaaacagtttcacatatgcattagtgcaatttggaatttt

SEQ ID NO: 50189 - DNA, 80 bp, synthetic construct
  misc_feature 1..80: note = Artificially Synthesized Probe
  source 1..80: mol_type = other DNA
tgtgagtgcaaaagcggagaatccagctgtcttctttttgcaaagggatttgcaaaaaaagtaaaacaatacaactcctc

SEQ ID NO: 50190 - DNA, 80 bp, synthetic construct
  misc_feature 1..80: note = Artificially Synthesized Probe
  source 1..80: mol_type = other DNA
gcctgtagtcccagctactggggaggctgaggcaggagaaaggcagaaaggcgtgaacccgggaggcagagcttgcagtg

SEQ ID NO: 50191 - DNA, 80 bp, synthetic construct
  misc_feature 1..80: note = Artificially Synthesized Probe
  source 1..80: mol_type = other DNA
gtcccaaacgtgctgtcaggaactgcagctacattacaagaatgaaaacgacgctttatccgatgttacagagcttccag

SEQ ID NO: 50192 - DNA, 80 bp, synthetic construct; identical to SEQ ID NO: 24165
  misc_feature 1..80: note = Artificially Synthesized Probe
  source 1..80: mol_type = other DNA

SEQ ID NO: 50193 - DNA, 80 bp, synthetic construct
  misc_feature 1..80: note = Artificially Synthesized Probe
  source 1..80: mol_type = other DNA
ttacatgagaaaaactccaaagtacaaatgaagggacctgagcaggaaagagaaccaaagtatcaggaagtgggtatggg

SEQ ID NO: 50194 - DNA, 80 bp, synthetic construct
  misc_feature 1..80: note = Artificially Synthesized Probe
  source 1..80: mol_type = other DNA
atgattttaaaaagcagtacttgacaccttaaaaacagaaaagctcccaaataggcccacctattttgaattcagaagtt

SEQ ID NO: 50195 - DNA, 80 bp, synthetic construct
  misc_feature 1..80: note = Artificially Synthesized Probe
  source 1..80: mol_type = other DNA
agctgggactacaggtgtgagccaccacgaccagccctactgccacatctgactttacagaataaccaatgtaagttaaa

SEQ ID NO: 50196 - DNA, 80 bp, synthetic construct
  misc_feature 1..80: note = Artificially Synthesized Probe
  source 1..80: mol_type = other DNA
acaaaatgttcactaggtattcagctaaattaacaacatcaaagtgtcaaagaaacaaaatgcacttctgcagttctgaa

SEQ ID NO: 50197 - DNA, 80 bp, synthetic construct; identical to SEQ ID NO: 24166
  misc_feature 1..80: note = Artificially Synthesized Probe
  source 1..80: mol_type = other DNA

SEQ ID NO: 50198 - DNA, 80 bp, synthetic construct
  misc_feature 1..80: note = Artificially Synthesized Probe
  source 1..80: mol_type = other DNA
caacatataaaatgactgacagataatattctaaacagaaaaaggagtgagtggatgcctaaagaagggagttcagtaaa

SEQ ID NO: 50199 - DNA, 80 bp, synthetic construct
  misc_feature 1..80: note = Artificially Synthesized Probe
  source 1..80: mol_type = other DNA
ttttcagggttatgatgcaatccaacctggtgtggcttgcaaagatgtattttaatacagtggacctcattataaaggag

SEQ ID NO: 50200 - DNA, 80 bp, synthetic construct
  misc_feature 1..80: note = Artificially Synthesized Probe
  source 1..80: mol_type = other DNA
aaaacttatataaacaaaagctctttgtgggggggggggtcttcgataatttttaaatgtgtaaaagagttcaaagactg

SEQ ID NO: 50201 - DNA, 80 bp, synthetic construct
  misc_feature 1..80: note = Artificially Synthesized Probe
  source 1..80: mol_type = other DNA
aatatcactctggtatcacacttaaaaaaatgtatttattataccatatggttaatttataccatacactatttcatacc

SEQ ID NO: 50202 - DNA, 80 bp, synthetic construct; identical to SEQ ID NO: 24167
  misc_feature 1..80: note = Artificially Synthesized Probe
  source 1..80: mol_type = other DNA

SEQ ID NO: 50203 - DNA, 80 bp, synthetic construct
  misc_feature 1..80: note = Artificially Synthesized Probe
  source 1..80: mol_type = other DNA
tgtctatagtaataatatcttagtggcaaaattactgatgattttttactttttgtacttatagttttctaatttttgat

SEQ ID NO: 50204 - DNA, 80 bp, synthetic construct
  misc_feature 1..80: note = Artificially Synthesized Probe
  source 1..80: mol_type = other DNA
ccatgtaatttgcagtaaaagatccctttaagtgaatgtaaggaagacttcaaataaaagaccacagcacatttcagttt

SEQ ID NO: 50205 - DNA, 80 bp, synthetic construct
  misc_feature 1..80: note = Artificially Synthesized Probe
  source 1..80: mol_type = other DNA
actactgttcaccactaaacattaaaacctgggtaaagaggacagtaggaaacacttgttttttaaccaagtaaaatgag

SEQ ID NO: 50206 - DNA, 80 bp, synthetic construct
  misc_feature 1..80: note = Artificially Synthesized Probe
  source 1..80: mol_type = other DNA
atcagactcttcagggggtacagttccaaacaatctggccctttcaaataaaatagaagggtagagattttacttcacaa

SEQ ID NO: 50207 - DNA, 80 bp, synthetic construct; identical to SEQ ID NO: 24168
  misc_feature 1..80: note = Artificially Synthesized Probe
  source 1..80: mol_type = other DNA

SEQ ID NO: 50208 - DNA, 80 bp, synthetic construct
  misc_feature 1..80: note = Artificially Synthesized Probe
  source 1..80: mol_type = other DNA
tgtggagaagaaaagaggaagcttcagaaagttaagtaccaaaagccaggaaacaaggcaaaatgaatggtaactggaaa

SEQ ID NO: 50209 - DNA, 80 bp, synthetic construct; identical to SEQ ID NO: 23971
  misc_feature 1..80: note = Artificially Synthesized Probe
  source 1..80: mol_type = other DNA

SEQ ID NO: 50210 - DNA, 80 bp, synthetic construct
  misc_feature 1..80: note = Artificially Synthesized Probe
  source 1..80: mol_type = other DNA
ttagaacagatcaaatgatggtacagaacacattttgggcatgtaacaaagatgatataaagagtagaaaacaaacatta

SEQ ID NO: 50211 - DNA, 80 bp, synthetic construct
  misc_feature 1..80: note = Artificially Synthesized Probe
  source 1..80: mol_type = other DNA
tagtaagtagcaaagagaacttcgagcaaagtcaacagagtaagtcacattacctaatcaataactgtaaaccacaatta

SEQ ID NO: 50212 - DNA, 80 bp, synthetic construct; identical to SEQ ID NO: 24169
  misc_feature 1..80: note = Artificially Synthesized Probe
  source 1..80: mol_type = other DNA

SEQ ID NO: 50213 - DNA, 80 bp, synthetic construct
  misc_feature 1..80: note = Artificially Synthesized Probe
  source 1..80: mol_type = other DNA
gtagctccaaagtgtccaggaggatttgtgaagataacaacagacaacaatgttagggagtggtgagatcaagtacagag

SEQ ID NO: 50214 - DNA, 80 bp, synthetic construct
  misc_feature 1..80: note = Artificially Synthesized Probe
  source 1..80: mol_type = other DNA
gaggaccagagaccagaaaaggcatcggaaactgcgatttaggattgaaaaagtaaagactaaatcaaaataatttgctg

SEQ ID NO: 50215 - DNA, 80 bp, synthetic construct; identical to SEQ ID NO: 24170
  misc_feature 1..80: note = Artificially Synthesized Probe
  source 1..80: mol_type = other DNA

SEQ ID NO: 50216 - DNA, 80 bp, synthetic construct
  misc_feature 1..80: note = Artificially Synthesized Probe
  source 1..80: mol_type = other DNA
ccacatctggggtgggggccagggaaaccccccgggccattgtgtgtgtttacgtaggaaggcgctgcatgacggagagg

SEQ ID NO: 50217 - DNA, 80 bp, synthetic construct
  misc_feature 1..80: note = Artificially Synthesized Probe
  source 1..80: mol_type = other DNA
cggaatggcagggtccgcagccgaagaggccgcggcgccggcgccggcgccggcctcgggctccatgtccccgttgaaca

SEQ ID NO: 50218 - DNA, 80 bp, synthetic construct
  misc_feature 1..80: note = Artificially Synthesized Probe
  source 1..80: mol_type = other DNA
gcgcggggggcgcggggaggagcggcccgggcggcgccgcgggcggagggcgcctgggccacctcaggtaccggcccgcg

SEQ ID NO: 50219 - DNA, 80 bp, synthetic construct
  misc_feature 1..80: note = Artificially Synthesized Probe
  source 1..80: mol_type = other DNA
tccgtaccttactgagatctggagacaggtatcctcgtcccaccataaaaattatctggagagagaaaaaaaagggaaat

SEQ ID NO: 50220 - DNA, 80 bp, synthetic construct
  misc_feature 1..80: note = Artificially Synthesized Probe
  source 1..80: mol_type = other DNA
aagctcaaatcttcatgatccttggactgtggcaaaggttctctaattgctcccctgcttttggtctctctttatccagt

SEQ ID NO: 50221 - DNA, 80 bp, synthetic construct
  misc_feature 1..80: note = Artificially Synthesized Probe
  source 1..80: mol_type = other DNA
agtcgttttggcatctgcatcttaagcccttttattgtggaaacgctaatgggccacttggttatacaaaccagagcctc

SEQ ID NO: 50222 - DNA, 80 bp, synthetic construct
  misc_feature 1..80: note = Artificially Synthesized Probe
  source 1..80: mol_type = other DNA
aacaaaagtgaaaataggttatttgaaaacaacaaaacagagcttactgtctagtgtactaataaaacaaacatcttacc

SEQ ID NO: 50223 - DNA, 80 bp, synthetic construct
  misc_feature 1..80: note = Artificially Synthesized Probe
  source 1..80: mol_type = other DNA
cttgggactcagggaggacagcctgagagaagggcttttggtcttagagggaataggtgcaacagggggagagtagaggc

SEQ ID NO: 50224 - DNA, 80 bp, synthetic construct; identical to SEQ ID NO: 23972
  misc_feature 1..80: note = Artificially Synthesized Probe
  source 1..80: mol_type = other DNA

SEQ ID NO: 50225 - DNA, 80 bp, synthetic construct
  misc_feature 1..80: note = Artificially Synthesized Probe
  source 1..80: mol_type = other DNA
gatctggagttcctatagtcatatattatggacagcaattcaggtattcttacttggctatcagtggaaaaggtggccct

SEQ ID NO: 50226 - DNA, 80 bp, synthetic construct
  misc_feature 1..80: note = Artificially Synthesized Probe
  source 1..80: mol_type = other DNA
ggatttgtagagaagactatcccaatacaaagctacttttaacttttttattgccgctgctcctactctgcttataatgc

SEQ ID NO: 50227 - DNA, 80 bp, synthetic construct; identical to SEQ ID NO: 23973
  misc_feature 1..80: note = Artificially Synthesized Probe
  source 1..80: mol_type = other DNA

SEQ ID NO: 50228 - DNA, 80 bp, synthetic construct
  misc_feature 1..80: note = Artificially Synthesized Probe
  source 1..80: mol_type = other DNA
gctgggtgtggcggtatgtgcctgtagtcccagctacgtgggaggctgaggcaaggaattgattgaacccaggaggcaga

SEQ ID NO: 50229 - DNA, 80 bp, synthetic construct
  misc_feature 1..80: note = Artificially Synthesized Probe
  source 1..80: mol_type = other DNA
aactgttcattaaggtgagtgataactttttgctagttgatcagccatgtcataggtctatagtctttaaattagagtca

SEQ ID NO: 50230 - DNA, 80 bp, synthetic construct
  misc_feature 1..80: note = Artificially Synthesized Probe
  source 1..80: mol_type = other DNA
agagattctactgcctcagcctcccaagtagctgggattacaggtgcacaccaccatgcctggctaatgtttccattttt

SEQ ID NO: 50231 - DNA, 80 bp, synthetic construct; identical to SEQ ID NO: 23974
  misc_feature 1..80: note = Artificially Synthesized Probe
  source 1..80: mol_type = other DNA

SEQ ID NO: 50232 - DNA, 80 bp, synthetic construct
  misc_feature 1..80: note = Artificially Synthesized Probe
  source 1..80: mol_type = other DNA
agagtgaacaggcaacctacaaaatgggagaaaatttttgcaacctactcatctgacaaagggctaatatccagaatcta

SEQ ID NO: 50233 - DNA, 80 bp, synthetic construct
  misc_feature 1..80: note = Artificially Synthesized Probe
  source 1..80: mol_type = other DNA
acatttcaaggatgtgctggagacaatacatggactttctctttcaatggtgaggaatgaaacaagatacaagaaccaca

SEQ ID NO: 50234 - DNA, 80 bp, synthetic construct
  misc_feature 1..80: note = Artificially Synthesized Probe
  source 1..80: mol_type = other DNA
accataacgacatatcatctcacaccagttagaatcacaatcattaaaaagtcaggaaacaacaggtgctggagaggatg

SEQ ID NO: 50235 - DNA, 80 bp, synthetic construct
  misc_feature 1..80: note = Artificially Synthesized Probe
  source 1..80: mol_type = other DNA
tgctataaagacacatgcacacgtatgtttatagcggcactattcacaatagcaaagacttggaaccaacccaaatgtcc

SEQ ID NO: 50236 - DNA, 80 bp, synthetic construct
  misc_feature 1..80: note = Artificially Synthesized Probe
  source 1..80: mol_type = other DNA
atattctcactcataggtgggaattgaacaatgagaacacgtggacacaggaaggggaacatcacactctggggactgtt

SEQ ID NO: 50237 - DNA, 80 bp, synthetic construct; identical to SEQ ID NO: 23975
  misc_feature 1..80: note = Artificially Synthesized Probe
  source 1..80: mol_type = other DNA

SEQ ID NO: 50238 - DNA, 80 bp, synthetic construct
  misc_feature 1..80: note = Artificially Synthesized Probe
  source 1..80: mol_type = other DNA
agctcagatgattgagtgatatatagtatgtggtaaagaattaaccttgcccaaagagagagctagcctttgctcttggc

SEQ ID NO: 50239 - DNA, 80 bp, synthetic construct
  misc_feature 1..80: note = Artificially Synthesized Probe
  source 1..80: mol_type = other DNA
ctaaggtcagccccgcaggtggttaatcatatgactgaaccccaataaaaactctagactccaaggctcaggtgagcttc

SEQ ID NO: 50240 - DNA, 80 bp, synthetic construct; identical to SEQ ID NO: 23976
  misc_feature 1..80: note = Artificially Synthesized Probe
  source 1..80: mol_type = other DNA

SEQ ID NO: 50241 - DNA, 80 bp, synthetic construct
  misc_feature 1..80: note = Artificially Synthesized Probe
  source 1..80: mol_type = other DNA
gtcctaacaaaaaagttgtatttatccacagatacatacattaattgaagggaaaagaaaagccccatgtcattcattaa

SEQ ID NO: 50242 - DNA, 80 bp, synthetic construct
  misc_feature 1..80: note = Artificially Synthesized Probe
  source 1..80: mol_type = other DNA
atcagagcttgaagtcacaattttgtaaaattctaaatttaaatttatatacatacttttattgcagagatgtaacttag

SEQ ID NO: 50243 - DNA, 80 bp, synthetic construct; identical to SEQ ID NO: 23952
  misc_feature 1..80: note = Artificially Synthesized Probe
  source 1..80: mol_type = other DNA

SEQ ID NO: 50244 - DNA, 80 bp, synthetic construct
  misc_feature 1..80: note = Artificially Synthesized Probe
  source 1..80: mol_type = other DNA
tgaagagcttcagtattttttaataggcataaaatcggtatggtttttagattttgatgtatatatttcaaaaagaggga

SEQ ID NO: 50245 - DNA, 80 bp, synthetic construct
  misc_feature 1..80: note = Artificially Synthesized Probe
  source 1..80: mol_type = other DNA
aatgtgagaaaaaaaatcaaagacaactctcatgtttttatacatcccacagaatttagttagtgcagagcagaaagcag

SEQ ID NO: 50246 - DNA, 80 bp, synthetic construct; identical to SEQ ID NO: 23977
  misc_feature 1..80: note = Artificially Synthesized Probe
  source 1..80: mol_type = other DNA

SEQ ID NO: 50247 - DNA, 80 bp, synthetic construct
  misc_feature 1..80: note = Artificially Synthesized Probe
  source 1..80: mol_type = other DNA
tttgcctactgataagagactagtacttacttcctgtttcttcagatcttgtgcttagaacctagcaaccacgctgtgag

SEQ ID NO: 50248 - DNA, 80 bp, synthetic construct
  misc_feature 1..80: note = Artificially Synthesized Probe
  source 1..80: mol_type = other DNA
ctagtcaatacggtgtgaaacaggtaagaatcttcctcacagagaaaagcccaacctacagattcatattttaagctact

SEQ ID NO: 50249 - DNA, 80 bp, synthetic construct
  misc_feature 1..80: note = Artificially Synthesized Probe
  source 1..80: mol_type = other DNA
tcccaatttacaagagaaaatgcactgaaggagggaagaacagggtgattagagagaaaaatgttagaatgataaagaga

SEQ ID NO: 50250 - DNA, 80 bp, synthetic construct; identical to SEQ ID NO: 23978
  misc_feature 1..80: note = Artificially Synthesized Probe
  source 1..80: mol_type = other DNA

SEQ ID NO: 50251 - DNA, 80 bp, synthetic construct
  misc_feature 1..80: note = Artificially Synthesized Probe
  source 1..80: mol_type = other DNA
tgaggcagaagaatcgctaacatgggaggcagaggttgcagtgagctgagatcaggccactgcattccagcctgggcgac

SEQ ID NO: 50252 - DNA, 80 bp, synthetic construct
  misc_feature 1..80: note = Artificially Synthesized Probe
  source 1..80: mol_type = other DNA
aaagttccatgctttgaagagcctatgggagtagaaaaagtttctctagaaatgtcactgaactatatttgcaacctagt

SEQ ID NO: 50253 - DNA, 80 bp, synthetic construct
  misc_feature 1..80: note = Artificially Synthesized Probe
  source 1..80: mol_type = other DNA
cctcagactatgggtatgagagtctaggggaatggtattcacattgcatagtaaagaatattcctggattcttaaacaga

SEQ ID NO: 50254 - DNA, 80 bp, synthetic construct; identical to SEQ ID NO: 23979
  misc_feature 1..80: note = Artificially Synthesized Probe
  source 1..80: mol_type = other DNA

SEQ ID NO: 50255 - DNA, 80 bp, synthetic construct
  misc_feature 1..80: note = Artificially Synthesized Probe
  source 1..80: mol_type = other DNA
aatgccaagaagtggatgagagaagaactctgggatgcttttatctgtattttggagataatacttgtttctatattata

SEQ ID NO: 50256 - DNA, 80 bp, synthetic construct
  misc_feature 1..80: note = Artificially Synthesized Probe
  source 1..80: mol_type = other DNA
gtgaacatggtacaggctgttatgctgtatgattgaataaataagactgtaaaagacagaggacatgaagcttgtaaatt

SEQ ID NO: 50257 - DNA, 80 bp, synthetic construct
  misc_feature 1..80: note = Artificially Synthesized Probe
  source 1..80: mol_type = other DNA
caaagtcatgttgttacacactcaaagctaagactcaacattctaaagctatgaagtagttagaaaggccaacaccaact

SEQ ID NO: 50258 - DNA, 80 bp, synthetic construct
  misc_feature 1..80: note = Artificially Synthesized Probe
  source 1..80: mol_type = other DNA
ggtgaagtgagaaagctactcagagctagcaccaaaaagatagagctgagctcttgacaaaacagacaaatcacttaaat

SEQ ID NO: 50259 - DNA, 80 bp, synthetic construct; identical to SEQ ID NO: 23980
  misc_feature 1..80: note = Artificially Synthesized Probe
  source 1..80: mol_type = other DNA

SEQ ID NO: 50260 - DNA, 80 bp, synthetic construct
  misc_feature 1..80: note = Artificially Synthesized Probe
  source 1..80: mol_type = other DNA
ttttcttggccaattttaaaagtctaagcgagcctactgaggcagagatagaaaaggctaagagctccatgaggctatgt

SEQ ID NO: 50261 - DNA, 80 bp, synthetic construct
  misc_feature 1..80: note = Artificially Synthesized Probe
  source 1..80: mol_type = other DNA
ttttaaaagaatttaatataaagatctcatagctgagtacctgttctgacagcacaatctgtgatacagtgaaaagtata

SEQ ID NO: 50262 - DNA, 80 bp, synthetic construct; identical to SEQ ID NO: 23981
  misc_feature 1..80: note = Artificially Synthesized Probe
  source 1..80: mol_type = other DNA

SEQ ID NO: 50263 - DNA, 80 bp, synthetic construct
  misc_feature 1..80: note = Artificially Synthesized Probe
  source 1..80: mol_type = other DNA
ccctgttgttgatgtttgaataaggtaactgtccagtcatcaattcatacagaacaattccaaatgcatatacatctgac

SEQ ID NO: 50264 - DNA, 80 bp, synthetic construct
  misc_feature 1..80: note = Artificially Synthesized Probe
  source 1..80: mol_type = other DNA
aaaaattattaacacagctgagttaaaccagagtggctgctctcttcacaaatcactgatttctgctaaaatgttagctt

SEQ ID NO: 50265 - DNA, 80 bp, synthetic construct
  misc_feature 1..80: note = Artificially Synthesized Probe
  source 1..80: mol_type = other DNA
gtaatcaattctcttaatagtcaaagaaataaaactgattaagctgaagaaaaaaacctctacatactcagaaagagaca

SEQ ID NO: 50266 - DNA, 80 bp, synthetic construct
  misc_feature 1..80: note = Artificially Synthesized Probe
  source 1..80: mol_type = other DNA
agaatcagttcccacttcccattcctgattcagcaaagaaatactagacttgtggttataagatgcttaggagcagcaca

SEQ ID NO: 50267 - DNA, 80 bp, synthetic construct; identical to SEQ ID NO: 23982
  misc_feature 1..80: note = Artificially Synthesized Probe
  source 1..80: mol_type = other DNA

SEQ ID NO: 50268 - DNA, 80 bp, synthetic construct
  misc_feature 1..80: note = Artificially Synthesized Probe
  source 1..80: mol_type = other DNA
ggaatcgaaatggcagtatattaatgaaaagtttgtgacaatgtcaatttgacagcaaaagtggtactaactctgcaaaa

SEQ ID NO: 50269 - DNA, 80 bp, synthetic construct
  misc_feature 1..80: note = Artificially Synthesized Probe
  source 1..80: mol_type = other DNA
acaacgtaacagagtctgggggtgggacccaaacattaattagtctttaaagctccacagatgattctagtgtccaacca

SEQ ID NO: 50270 - DNA, 80 bp, synthetic construct
  misc_feature 1..80: note = Artificially Synthesized Probe
  source 1..80: mol_type = other DNA
ataagcaagccagaatactgagaggctggtatggcaaaggtataatgttcaaagcctgaccaatttttgtgagagatgga

SEQ ID NO: 50271 - DNA, 80 bp, synthetic construct
  misc_feature 1..80: note = Artificially Synthesized Probe
  source 1..80: mol_type = other DNA
ctctcctaagatacaaataaaacaaagttgagaagaacattgtatataattcaaaggaccacacagccttagttatgacc

SEQ ID NO: 50272 - DNA, 80 bp, synthetic construct; identical to SEQ ID NO: 23983
  misc_feature 1..80: note = Artificially Synthesized Probe
  source 1..80: mol_type = other DNA

SEQ ID NO: 50273 - DNA, 80 bp, synthetic construct
  misc_feature 1..80: note = Artificially Synthesized Probe
  source 1..80: mol_type = other DNA
tgtttataattttaggttttgcaatttcagcacttaaaatctgttttccctcatctttttaggatacactgccatctttt

SEQ ID NO: 50274 - DNA, 80 bp, synthetic construct
  misc_feature 1..80: note = Artificially Synthesized Probe
  source 1..80: mol_type = other DNA
aaatctactagtccaactcaacatttcagatgtagacttagaggaggttaagaaacttgcaggttaatggccaaataggg

SEQ ID NO: 50275 - DNA, 80 bp, synthetic construct
  misc_feature 1..80: note = Artificially Synthesized Probe
  source 1..80: mol_type = other DNA
ggttggaatctgctcgtctcaaggtgctggtattcctagcactaacaatgccaacttggacaaagaagagaatcttgcaa

SEQ ID NO: 50276 - DNA, 80 bp, synthetic construct; identical to SEQ ID NO: 23984
  misc_feature 1..80: note = Artificially Synthesized Probe
  source 1..80: mol_type = other DNA

SEQ ID NO: 50277 - DNA, 80 bp, synthetic construct
  misc_feature 1..80: note = Artificially Synthesized Probe
  source 1..80: mol_type = other DNA
taccattaaaatttaatggagaaattaaactagtaattcatttaactactaaaataataacaagtagatgttaacacaga

SEQ ID NO: 50278 - DNA, 80 bp, synthetic construct
  misc_feature 1..80: note = Artificially Synthesized Probe
  source 1..80: mol_type = other DNA
aggtagctggaactatggactccagccaccatgagtggcctgtgattctcctcaatgtctggcttaacagcagccagctg

SEQ ID NO: 50279 - DNA, 80 bp, synthetic construct
  misc_feature 1..80: note = Artificially Synthesized Probe
  source 1..80: mol_type = other DNA
ctgagctttccacagcttgctgcaatgcacacaagtttttgttcccttcttttagaacttctctttcttcttttccacaa

SEQ ID NO: 50280 - DNA, 80 bp, synthetic construct; identical to SEQ ID NO: 23985
  misc_feature 1..80: note = Artificially Synthesized Probe
  source 1..80: mol_type = other DNA

SEQ ID NO: 50281 - DNA, 80 bp, synthetic construct
  misc_feature 1..80: note = Artificially Synthesized Probe
  source 1..80: mol_type = other DNA
ttatttaagaataaaatatgaaacactgtttataagacatatatttttgtttgaaatacactgaaactggtttcaaaata

SEQ ID NO: 50282 - DNA, 80 bp, synthetic construct
  misc_feature 1..80: note = Artificially Synthesized Probe
  source 1..80: mol_type = other DNA
ggaaaaatagcctcaattcttaccatccacaaaatggatccagacaactgttcaaactgatgggacccactccatcgaga

SEQ ID NO: 50283 - DNA, 80 bp, synthetic construct
  misc_feature 1..80: note = Artificially Synthesized Probe
  source 1..80: mol_type = other DNA
gtaatataatattctttaaaacatagtacttcatctttcctcttagagtcaataagtatgtctaaaacaatgattagttc

SEQ ID NO: 50284 - DNA, 80 bp, synthetic construct
  misc_feature 1..80: note = Artificially Synthesized Probe
  source 1..80: mol_type = other DNA
aaggctcttcattggaatgaagatgctgcagatagtatcttagtctgcacttagggaagagaaatattatgtttttctca

SEQ ID NO: 50285 - DNA, 80 bp, synthetic construct; identical to SEQ ID NO: 23986
  misc_feature 1..80: note = Artificially Synthesized Probe
  source 1..80: mol_type = other DNA

SEQ ID NO: 50286 - DNA, 80 bp, synthetic construct
  misc_feature 1..80: note = Artificially Synthesized Probe
  source 1..80: mol_type = other DNA
aatttcatgcaattgactcaaggttaagattctgaaacgtacccctaaaccggttctggcaccactttcaacaacattca

SEQ ID NO: 50287 - DNA, 80 bp, synthetic construct
  misc_feature 1..80: note = Artificially Synthesized Probe
  source 1..80: mol_type = other DNA
gattgacttggcgtgtaagtaactgaaaaacaaaacatcattttaacctgagtagggctaaaggactctggcctcgaaat

SEQ ID NO: 50288 - DNA, 80 bp, synthetic construct
  misc_feature 1..80: note = Artificially Synthesized Probe
  source 1..80: mol_type = other DNA
tctattaaaagactttgctttatcttttactagttaccaatacaaacctttcactccagtcaagcctatttatccatgtc

SEQ ID NO: 50289 - DNA, 80 bp, synthetic construct; identical to SEQ ID NO: 23987
  misc_feature 1..80: note = Artificially Synthesized Probe
  source 1..80: mol_type = other DNA

SEQ ID NO: 50290 - DNA, 80 bp, synthetic construct
  misc_feature 1..80: note = Artificially Synthesized Probe
  source 1..80: mol_type = other DNA
gagaaaactttctctaaaatggccatagtaggtctattttaaagtcaacgataactttaaaatcatctatgttaccccta

SEQ ID NO: 50291 - DNA, 80 bp, synthetic construct
  misc_feature 1..80: note = Artificially Synthesized Probe
  source 1..80: mol_type = other DNA
aaagggctgtgtcttgtttatttctttgtatacccagtgccgagaacagtgcttggtatgtgtggtaagtattcaataca

SEQ ID NO: 50292 - DNA, 80 bp, synthetic construct
  misc_feature 1..80: note = Artificially Synthesized Probe
  source 1..80: mol_type = other DNA
taatcaaaatcatgcaataaacactgttaaaagtggaagatttgcaaataaccaagattattcatgctgtctcatcttca

SEQ ID NO: 50293 - DNA, 80 bp, synthetic construct
  misc_feature 1..80: note = Artificially Synthesized Probe
  source 1..80: mol_type = other DNA
ttgtcatgactttaggctcagtgttctacatcatattgtcactctttcactgaaagaaaatgttatttcggttataggtc

SEQ ID NO: 50294 - DNA, 80 bp, synthetic construct; identical to SEQ ID NO: 23988
  misc_feature 1..80: note = Artificially Synthesized Probe
  source 1..80: mol_type = other DNA

SEQ ID NO: 50295 - DNA, 80 bp, synthetic construct
  misc_feature 1..80: note = Artificially Synthesized Probe
  source 1..80: mol_type = other DNA
tagcaagaatagagtagacagaaatgtaactggggagagtggggagagaaattttctgaccaggaaagcactagataatt

SEQ ID NO: 50296 - DNA, 80 bp, synthetic construct
  misc_feature 1..80: note = Artificially Synthesized Probe
  source 1..80: mol_type = other DNA
tctcattgaataattctctttctgtaatccttctgtaacaaaagcagcaaagagtagaagtccaggtctgtagaatgaaa

SEQ ID NO: 50297 - DNA, 80 bp, synthetic construct
  misc_feature 1..80: note = Artificially Synthesized Probe
  source 1..80: mol_type = other DNA
ggaaaatgccaaaaaaaaaacccaaacaaaaataacagaaaacaaataactcacataactgtttgggagtagggaaggga

SEQ ID NO: 50298 - DNA, 80 bp, synthetic construct; identical to SEQ ID NO: 23953
  misc_feature 1..80: note = Artificially Synthesized Probe
  source 1..80: mol_type = other DNA

SEQ ID NO: 50299 - DNA, 80 bp, synthetic construct; identical to SEQ ID NO: 23989
  misc_feature 1..80: note = Artificially Synthesized Probe
  source 1..80: mol_type = other DNA

SEQ ID NO: 50300 - DNA, 80 bp, synthetic construct
  misc_feature 1..80: note = Artificially Synthesized Probe
  source 1..80: mol_type = other DNA
ttcttacagagcataatgtggtgccccaaattaaaagcaatacttcagatcggatctaaccaacacaaactatggtgaga

SEQ ID NO: 50301 - DNA, 80 bp, synthetic construct
  misc_feature 1..80: note = Artificially Synthesized Probe
  source 1..80: mol_type = other DNA
cctgctgctgggtcaaaatttatgacaataaatagaatttttaaaaaagggcacaaaaaggattatattcaattacaatc

SEQ ID NO: 50302 - DNA, 80 bp, synthetic construct
  misc_feature 1..80: note = Artificially Synthesized Probe
  source 1..80: mol_type = other DNA
cagcctggagtgcggtggtgcgatatcggctcactgcaacctccacctcctaggttcaagtgattctcctgcctcagcct

SEQ ID NO: 50303 - DNA, 80 bp, synthetic construct; identical to SEQ ID NO: 23990
  misc_feature 1..80: note = Artificially Synthesized Probe
  source 1..80: mol_type = other DNA

SEQ ID NO: 50304 - DNA, 80 bp, synthetic construct
  misc_feature 1..80: note = Artificially Synthesized Probe
  source 1..80: mol_type = other DNA
atattcaagagaggactgaggataggaatctcattatagtttgctgtcttcaggtatgatcattcatccagtatgaaccc

SEQ ID NO: 50305 - DNA, 80 bp, synthetic construct
  misc_feature 1..80: note = Artificially Synthesized Probe
  source 1..80: mol_type = other DNA
gctgccattttcaagtattttaaactcttggtaaaacacagaactgacctacttagacatttgcatgtcagccctctttc

SEQ ID NO: 50306 - DNA, 80 bp, synthetic construct; identical to SEQ ID NO: 23991
  misc_feature 1..80: note = Artificially Synthesized Probe
  source 1..80: mol_type = other DNA

SEQ ID NO: 50307 - DNA, 80 bp, synthetic construct
  misc_feature 1..80: note = Artificially Synthesized Probe
  source 1..80: mol_type = other DNA
ttgcccaggctggagtacagtggcatgatcacagctcactgcagcctcaacctcctgggctcaagagatccacccaactc

SEQ ID NO: 50308 - DNA, 80 bp, synthetic construct
  misc_feature 1..80: note = Artificially Synthesized Probe
  source 1..80: mol_type = other DNA
aagtgctgtcaccgcaccaaaccagaagctaggaaatatttacaaagtttcaggttgacagtgctgcagtcttgaattat

SEQ ID NO: 50309 - DNA, 80 bp, synthetic construct
  misc_feature 1..80: note = Artificially Synthesized Probe
  source 1..80: mol_type = other DNA
ggtgtaagccatcaggtatttttcacttttaaaaactgaaatttactgaggtacagtttacacacaagatgcacccattt

SEQ ID NO: 50310 - DNA, 80 bp, synthetic construct
  misc_feature 1..80: note = Artificially Synthesized Probe
  source 1..80: mol_type = other DNA
caccccagaaagtttcttcatacatttttgcgattagtaacaccccctttaggcttgggaaaccattgataatgacttct

SEQ ID NO: 50311 - DNA, 80 bp, synthetic construct; identical to SEQ ID NO: 23992
  misc_feature 1..80: note = Artificially Synthesized Probe
  source 1..80: mol_type = other DNA

SEQ ID NO: 50312 - DNA, 80 bp, synthetic construct
  misc_feature 1..80: note = Artificially Synthesized Probe
  source 1..80: mol_type = other DNA
gagttccagttgttctttatccttgataatactttgtattgctggttctgattataggttatttatttatttaagatgga

SEQ ID NO: 50313 - DNA, 80 bp, synthetic construct
  misc_feature 1..80: note = Artificially Synthesized Probe
  source 1..80: mol_type = other DNA
aagtaccaccacgtccagctaattttgtatttttagtagagatggggtttcaccattttggtcaagctggtcttgaactc

SEQ ID NO: 50314 - DNA, 80 bp, synthetic construct
  misc_feature 1..80: note = Artificially Synthesized Probe
  source 1..80: mol_type = other DNA
agaagggtaatcaggagaatatgcctgaaagcagtgtttctcacactttaatatggacacgaatcatttggggatcttgt

SEQ ID NO: 50315 - DNA, 80 bp, synthetic construct; identical to SEQ ID NO: 23993
  misc_feature 1..80: note = Artificially Synthesized Probe
  source 1..80: mol_type = other DNA

SEQ ID NO: 50316 - DNA, 80 bp, synthetic construct
  misc_feature 1..80: note = Artificially Synthesized Probe
  source 1..80: mol_type = other DNA
aacatacaaaaattagctgggtgtggtggtgtgcacctgtaatcccagctacttgggagactaaggcaggagaatcactt

SEQ ID NO: 50317 - DNA, 80 bp, synthetic construct
  misc_feature 1..80: note = Artificially Synthesized Probe
  source 1..80: mol_type = other DNA
taaaaaggaaggagagcaactggacagtgaataccaacaagtcttttgagaagttttactgtcgaaggaagaagaggaat

SEQ ID NO: 50318 - DNA, 80 bp, synthetic construct
  misc_feature 1..80: note = Artificially Synthesized Probe
  source 1..80: mol_type = other DNA
ggtgagatattcgggaaccagaatttgacagctagacagaatcttcttttaaggtgcacattaacaacaaatgatcacac

SEQ ID NO: 50319 - DNA, 80 bp, synthetic construct
  misc_feature 1..80: note = Artificially Synthesized Probe
  source 1..80: mol_type = other DNA
tgtgaagaatgcagaagcctcaggagccgatgcgatcaactggaagaaagggtatcagtgatggaagatgaaatgaatga

SEQ ID NO: 50320 - DNA, 80 bp, synthetic construct
  misc_feature 1..80: note = Artificially Synthesized Probe
  source 1..80: mol_type = other DNA
attatccaggagaacttccccaatctagcaaggcaggccaatgttcagattcacgaaatacagagaacgccacaaagata

SEQ ID NO: 50321 - DNA, 80 bp, synthetic construct; identical to SEQ ID NO: 23994
  misc_feature 1..80: note = Artificially Synthesized Probe
  source 1..80: mol_type = other DNA

SEQ ID NO: 50322 - DNA, 80 bp, synthetic construct
  misc_feature 1..80: note = Artificially Synthesized Probe
  source 1..80: mol_type = other DNA
catcgagactaggaagaaactgcatcaactaacgagcaaaataaccagctaatatcataatgacaggatcaaattcacac

SEQ ID NO: 50323 - DNA, 80 bp, synthetic construct
  misc_feature 1..80: note = Artificially Synthesized Probe
  source 1..80: mol_type = other DNA
agatctaccaagcaagtggaaaacaaaaaaaggcaggggttgcaatcctagtctctgataaaacagactttaaaccaaca

SEQ ID NO: 50324 - DNA, 80 bp, synthetic construct; identical to SEQ ID NO: 23995
  misc_feature 1..80: note = Artificially Synthesized Probe
  source 1..80: mol_type = other DNA

SEQ ID NO: 50325 - DNA, 80 bp, synthetic construct
  misc_feature 1..80: note = Artificially Synthesized Probe
  source 1..80: mol_type = other DNA
aaattataacaaactgtgtctcagaccacagtgcaatctaactagaactcaggattaagaaactcactcaaaaccactca

SEQ ID NO: 50326 - DNA, 80 bp, synthetic construct
  misc_feature 1..80: note = Artificially Synthesized Probe
  source 1..80: mol_type = other DNA
cactaaatgcccacaagagaaagcaggaaagatccaaaattgccaccctaacatcacaattaaaagaactagaaaagcaa

SEQ ID NO: 50327 - DNA, 80 bp, synthetic construct; identical to SEQ ID NO: 23954
  misc_feature 1..80: note = Artificially Synthesized Probe
  source 1..80: mol_type = other DNA

SEQ ID NO: 50328 - DNA, 80 bp, synthetic construct
  misc_feature 1..80: note = Artificially Synthesized Probe
  source 1..80: mol_type = other DNA
cagaggggtatttggcagggtcataggacaatagtggagggaaggtcagcagataaacaagtgaacaaaggtctctggtt

SEQ ID NO: 50329 - DNA, 80 bp, synthetic construct; identical to SEQ ID NO: 23996
  misc_feature 1..80: note = Artificially Synthesized Probe
  source 1..80: mol_type = other DNA

SEQ ID NO: 50330 - DNA, 80 bp, synthetic construct
  misc_feature 1..80: note = Artificially Synthesized Probe
  source 1..80: mol_type = other DNA
cagacggggtggtggccgggcagaggggctcctcacttcccagtaggggcggccggggagaggcgcccctcacctcccgg

SEQ ID NO: 50331 - DNA, 80 bp, synthetic construct
  misc_feature 1..80: note = Artificially Synthesized Probe
  source 1..80: mol_type = other DNA
gctgggcagaggggctcctcacttcccagtaggggcggccgggcagaggcgcccctcacctcccggacgaggcagctggc

SEQ ID NO: 50332 - DNA, 80 bp, synthetic construct
  misc_feature 1..80: note = Artificially Synthesized Probe
  source 1..80: mol_type = other DNA
gagaggtctgtggacaattaaaaagtccccatcttttcactgggcacgccccagactccacgagaaccttttcaatgctt

SEQ ID NO: 50333 - DNA, 80 bp, synthetic construct
  misc_feature 1..80: note = Artificially Synthesized Probe
  source 1..80: mol_type = other DNA
gatatcaccaccaatcccacagaaatacaaactaccatcagagaatactacaaacacctctatgcaaataaactagaaaa

SEQ ID NO: 50334 - DNA, 80 bp, synthetic construct; identical to SEQ ID NO: 23997
  misc_feature 1..80: note = Artificially Synthesized Probe
  source 1..80: mol_type = other DNA

SEQ ID NO: 50335 - DNA, 80 bp, synthetic construct
  misc_feature 1..80: note = Artificially Synthesized Probe
  source 1..80: mol_type = other DNA
attcaccatgatcaagtgggcttcatccctgggatgcaaggctggttcaacatacgcaaatcaataaatgtaatccagca

SEQ ID NO: 50336 - DNA, 80 bp, synthetic construct
  misc_feature 1..80: note = Artificially Synthesized Probe
  source 1..80: mol_type = other DNA
gccaatatcatactgaatgggcaaaaactggaagcattccctttgaaaactggcacaagacagggatgccctctctcacc

SEQ ID NO: 50337 - DNA, 80 bp, synthetic construct
  misc_feature 1..80: note = Artificially Synthesized Probe
  source 1..80: mol_type = other DNA
cttaagctgataagcaacttcagcaaagtcttgggatacaaaatcaatgtacaaaaaccacaagcattcttatacaccaa

SEQ ID NO: 50338 - DNA, 80 bp, synthetic construct; identical to SEQ ID NO: 23998
  misc_feature 1..80: note = Artificially Synthesized Probe
  source 1..80: mol_type = other DNA

SEQ ID NO: 50339 - DNA, 80 bp, synthetic construct
  misc_feature 1..80: note = Artificially Synthesized Probe
  source 1..80: mol_type = other DNA
agcatcaaaaaataaagcagataaaacacaaataaaacctattttcatgtcatttgtaaactagagaaaaaacctatttc

SEQ ID NO: 50340 - DNA, 80 bp, synthetic construct
  misc_feature 1..80: note = Artificially Synthesized Probe
  source 1..80: mol_type = other DNA
tacaaggctacagtaaccaaaacagcatggtactggtaccaaaacagagatatagatcaatggaacagaacagagccctc

SEQ ID NO: 50341 - DNA, 80 bp, synthetic construct
  misc_feature 1..80: note = Artificially Synthesized Probe
  source 1..80: mol_type = other DNA
attaattcaagatggattaaagacttaaacgttagacctaaaaccataaaaaccctagaagaaaacctaggcattaccat

SEQ ID NO: 50342 - DNA, 80 bp, synthetic construct
  misc_feature 1..80: note = Artificially Synthesized Probe
  source 1..80: mol_type = other DNA
attttcgcaacctactcatctgacaaagggctaatatccagaatctacaaagaactcaaacaaatttacaagaaaaaaac

SEQ ID NO: 50343 - DNA, 80 bp, synthetic construct
  misc_feature 1..80: note = Artificially Synthesized Probe
  source 1..80: mol_type = other DNA
atggcaatcattaaaaagtcaggaaacaacaggtgctggagaggatatggagaaataggaacacttttacactgttggtg

SEQ ID NO: 50344 - DNA, 80 bp, synthetic construct
  misc_feature 1..80: note = Artificially Synthesized Probe
  source 1..80: mol_type = other DNA
gcggcactattcacaatagcaaagacttggaaccaacccaaatgtccaacaatgatagactggattaagaaaatgtggca

SEQ ID NO: 50345 - DNA, 80 bp, synthetic construct
  misc_feature 1..80: note = Artificially Synthesized Probe
  source 1..80: mol_type = other DNA
gacacaggaaggggaacatcacactctggggactattgtggggtggggcaggggggagggatagcattagaagatatacc

SEQ ID NO: 50346 - DNA, 80 bp, synthetic construct
  misc_feature 1..80: note = Artificially Synthesized Probe
  source 1..80: mol_type = other DNA
gaaagaatacccacacaccttccacatagattccacaaatgtcaacattctgccaaatgtgcataagaaagatgtttcat

SEQ ID NO: 50347 - DNA, 80 bp, synthetic construct
  misc_feature 1..80: note = Artificially Synthesized Probe
  source 1..80: mol_type = other DNA
gtagagacgggttttgccatgttgcctagggtggtctcaaactcctgggctcaagtgatccaccagcctcagcctcctaa

SEQ ID NO: 50348 - DNA, 80 bp, synthetic construct; identical to SEQ ID NO: 24000
  misc_feature 1..80: note = Artificially Synthesized Probe
  source 1..80: mol_type = other DNA

SEQ ID NO: 50349 - DNA, 80 bp, synthetic construct
  misc_feature 1..80: note = Artificially Synthesized Probe
  source 1..80: mol_type = other DNA
cagtctgatcttgaactcctgagctcaagcaatccacccgcctcagcttcccgaagtgttgggattacaggcatgaacca

SEQ ID NO: 50350 - DNA, 80 bp, synthetic construct
  misc_feature 1..80: note = Artificially Synthesized Probe
  source 1..80: mol_type = other DNA
gaaaaagtgtatcaccctgaatattgtttaagaaactgaaatgctaagcttcctccctaatggtaccgcccctgcccctg

SEQ ID NO: 50351 - DNA, 80 bp, synthetic construct
  misc_feature 1..80: note = Artificially Synthesized Probe
  source 1..80: mol_type = other DNA
taaggcagaagaacctggtatgaatgcaggcaggtgggtagatgtcataatggttacttccaactgtcttaaagagatgg

SEQ ID NO: 50352 - DNA, 80 bp, synthetic construct
  misc_feature 1..80: note = Artificially Synthesized Probe
  source 1..80: mol_type = other DNA
aagggactgaataagttggggaagcaacatgctttaatggttaaaggaatacaccctggagctgaagtacctggggcaag

SEQ ID NO: 50353 - DNA, 80 bp, synthetic construct; identical to SEQ ID NO: 24001
  misc_feature 1..80: note = Artificially Synthesized Probe
  source 1..80: mol_type = other DNA

SEQ ID NO: 50354 - DNA, 80 bp, synthetic construct
  misc_feature 1..80: note = Artificially Synthesized Probe
  source 1..80: mol_type = other DNA
ttgatggtggattactggtgctttttatttatgtttacattttctgaatttcctataatgattacatatttcctcgtaac

SEQ ID NO: 50355 - DNA, 80 bp, synthetic construct
  misc_feature 1..80: note = Artificially Synthesized Probe
  source 1..80: mol_type = other DNA
atggtgttgagagttggtgggacctttaagaggcatttgggtctgggtcatgaggaatgccctcatgaaagcaggagtca

SEQ ID NO: 50356 - DNA, 80 bp, synthetic construct
  misc_feature 1..80: note = Artificially Synthesized Probe
  source 1..80: mol_type = other DNA
cttggctaattaaaaaaaatttttttgtagagatgaggtcttactatgttgtccaggctggtctcaaactcctgggctca

SEQ ID NO: 50357 - DNA, 80 bp, synthetic construct; identical to SEQ ID NO: 24002
  misc_feature 1..80: note = Artificially Synthesized Probe
  source 1..80: mol_type = other DNA

SEQ ID NO: 50358 - DNA, 80 bp, synthetic construct
  misc_feature 1..80: note = Artificially Synthesized Probe
  source 1..80: mol_type = other DNA
agtggtgccatcttggctcactgcaacctccgtctcctgggttcaagcgattctgttgcctcagcctcccaagtaattgg

SEQ ID NO: 50359 - DNA, 80 bp, synthetic construct
  misc_feature 1..80: note = Artificially Synthesized Probe
  source 1..80: mol_type = other DNA
ttggccacctccagtcttttttcaaagtttgtacttgattcctggagataatcactatgttacttgatctttgctttcta

SEQ ID NO: 50360 - DNA, 80 bp, synthetic construct
  misc_feature 1..80: note = Artificially Synthesized Probe
  source 1..80: mol_type = other DNA
tccacttttaactactatatacgattctactgtatgtaagtgccaatatgttatttatcaagtcttctcctgatgaacat

SEQ ID NO: 50361 - DNA, 80 bp, synthetic construct
  misc_feature 1..80: note = Artificially Synthesized Probe
  source 1..80: mol_type = other DNA
tatttaaaaagaaaaaacagccaatgcttttcaagagaggcagtattattgcacagaagatgttcttcaaatcagcgtga

SEQ ID NO: 50362 - DNA, 80 bp, synthetic construct; identical to SEQ ID NO: 24003
  misc_feature 1..80: note = Artificially Synthesized Probe
  source 1..80: mol_type = other DNA

SEQ ID NO: 50363 - DNA, 80 bp, synthetic construct
  misc_feature 1..80: note = Artificially Synthesized Probe
  source 1..80: mol_type = other DNA
atcctatgaacatttgatcttatcagaactcaggcattttgccaattccagtgggtggaaagtggtacctttttgtttta

SEQ ID NO: 50364 - DNA, 80 bp, synthetic construct
  misc_feature 1..80: note = Artificially Synthesized Probe
  source 1..80: mol_type = other DNA
cttcaactgggttcacttatgagtaaaagaggcatgctcatcattgtttaaaacaaagtaaattgtaaggatttatctcc

SEQ ID NO: 50365 - DNA, 80 bp, synthetic construct
  misc_feature 1..80: note = Artificially Synthesized Probe
  source 1..80: mol_type = other DNA
aaaaaaaaaaaaaaaggcacaatgtactgaccattcctggaatttctttagtaacagtattcttaagatatctgggtcct

SEQ ID NO: 50366 - DNA, 80 bp, synthetic construct
  misc_feature 1..80: note = Artificially Synthesized Probe
  source 1..80: mol_type = other DNA
aaaaatacaaaattagccaggtgtggtggtgggtgcctgtaatcccagttactcaggaggctgaggcaggagaatcgctt

SEQ ID NO: 50367 - DNA, 80 bp, synthetic construct; identical to SEQ ID NO: 24004
  misc_feature 1..80: note = Artificially Synthesized Probe
  source 1..80: mol_type = other DNA

SEQ ID NO: 50368 - DNA, 80 bp, synthetic construct
  misc_feature 1..80: note = Artificially Synthesized Probe
  source 1..80: mol_type = other DNA
gtggcacgatcatggctcactgcagcctcgacttcctgggctcaagtgatcctcccacctcagcctcccaagtaggtgag

SEQ ID NO: 50369 - DNA, 80 bp, synthetic construct
  misc_feature 1..80: note = Artificially Synthesized Probe
  source 1..80: mol_type = other DNA
actaacttttctaattattaaaggttttatcttatgagttaactgcaaccttagcactttataaaatgaatccgtttgtt

SEQ ID NO: 50370 - DNA, 80 bp, synthetic construct
  misc_feature 1..80: note = Artificially Synthesized Probe
  source 1..80: mol_type = other DNA
gctatttaaataccctatagccttattgtctagctatagactatatctggcttggtcagtcctttgtgagatgatgctgg

SEQ ID NO: 50371 - DNA, 80 bp, synthetic construct; identical to SEQ ID NO: 24005
  misc_feature 1..80: note = Artificially Synthesized Probe
  source 1..80: mol_type = other DNA

SEQ ID NO: 50372 - DNA, 80 bp, synthetic construct; identical to SEQ ID NO: 23955
  misc_feature 1..80: note = Artificially Synthesized Probe
  source 1..80: mol_type = other DNA

SEQ ID NO: 50373 - DNA, 80 bp, synthetic construct
  misc_feature 1..80: note = Artificially Synthesized Probe
  source 1..80: mol_type = other DNA
tcagcagcaacagttaggatttgaagaaccagttcatgacccctaggaccatcctgtttgttctaacatctgtcagcctg

SEQ ID NO: 50374 - DNA, 80 bp, synthetic construct
  misc_feature 1..80: note = Artificially Synthesized Probe
  source 1..80: mol_type = other DNA
aggagtttgagaccagcctgggtgacatggcgaaactctgtctctacaaaaaatacaaaaacatgagccaggtgtgatgg

SEQ ID NO: 50375 - DNA, 80 bp, synthetic construct; identical to SEQ ID NO: 24006
  misc_feature 1..80: note = Artificially Synthesized Probe
  source 1..80: mol_type = other DNA

SEQ ID NO: 50376 - DNA, 80 bp, synthetic construct
  misc_feature 1..80: note = Artificially Synthesized Probe
  source 1..80: mol_type = other DNA
attctgagaaactacgttaactccttttaaattaacatttaaaagttacatttaaataattgcaaaggacataatttcca

SEQ ID NO: 50377 - DNA, 80 bp, synthetic construct
  misc_feature 1..80: note = Artificially Synthesized Probe
  source 1..80: mol_type = other DNA
tcttgcattgtatgtgtttctcccaatgcctatttttctctatgtgttttacagtctctcttatttgcataagacttccc

SEQ ID NO: 50378 - DNA, 80 bp, synthetic construct
  misc_feature 1..80: note = Artificially Synthesized Probe
  source 1..80: mol_type = other DNA
agctggtaaaattcacccaagactcttcgaatcttctgcatttcggaagagtagggtttggctgctagcatgtcaggaat

SEQ ID NO: 50379 - DNA, 80 bp, synthetic construct; identical to SEQ ID NO: 24007
  misc_feature 1..80: note = Artificially Synthesized Probe
  source 1..80: mol_type = other DNA

SEQ ID NO: 50380 - DNA, 80 bp, synthetic construct
  misc_feature 1..80: note = Artificially Synthesized Probe
  source 1..80: mol_type = other DNA
ctctccagctttcaaaatgttgctgatattgtctcattcctctctgttatccccatccttatgtgtccatgctttaaaaa

SEQ ID NO: 50381 - DNA, 80 bp, synthetic construct
  misc_feature 1..80: note = Artificially Synthesized Probe
  source 1..80: mol_type = other DNA
cttacaagacaaaacaaaaagagaaaagaaactatatcctccttggttaattttaaactggtactaaaaagtatactctg

SEQ ID NO: 50382 - DNA, 80 bp, synthetic construct
  misc_feature 1..80: note = Artificially Synthesized Probe
  source 1..80: mol_type = other DNA
ttctgagtctagattcctgataagggaggttttccattaatttgccattaatacatccgctttctttgctatgactgtga

SEQ ID NO: 50383 - DNA, 80 bp, synthetic construct
  misc_feature 1..80: note = Artificially Synthesized Probe
  source 1..80: mol_type = other DNA
taaagtttacactgataatcccaaactgtaaagtgatattttgaaaatatatcacctcttcactgactgttcttcagact

SEQ ID NO: 50384 - DNA, 80 bp, synthetic construct
  misc_feature 1..80: note = Artificially Synthesized Probe
  source 1..80: mol_type = other DNA
agtggcacaatcacgactccttgcatcctcacactcctgggctcaagtgatcctcccaactcagcctagtgagtagctag

SEQ ID NO: 50385 - DNA, 80 bp, synthetic construct; identical to SEQ ID NO: 24008
  misc_feature 1..80: note = Artificially Synthesized Probe
  source 1..80: mol_type = other DNA

SEQ ID NO: 50386 - DNA, 80 bp, synthetic construct
  misc_feature 1..80: note = Artificially Synthesized Probe
  source 1..80: mol_type = other DNA
taaagaaaatcaagcctatgggtatagagagtgacagagtgacgtggggacatgttagttatataaggtgagcaaggatt

SEQ ID NO: 50387 - DNA, 80 bp, synthetic construct
  misc_feature 1..80: note = Artificially Synthesized Probe
  source 1..80: mol_type = other DNA
tgcaaagagaccagtggtgtgggaagagaataagcctttgtttctcactgaatgttcacaatctttgccatggtttactc

SEQ ID NO: 50388 - DNA, 80 bp, synthetic construct
  misc_feature 1..80: note = Artificially Synthesized Probe
  source 1..80: mol_type = other DNA
cttgtgcctggctcattttgtatttttagtagagacggggtttctccatgttggtcaggctagtcttgaactcccgacct

SEQ ID NO: 50389 - DNA, 80 bp, synthetic construct; identical to SEQ ID NO: 24009
  misc_feature 1..80: note = Artificially Synthesized Probe
  source 1..80: mol_type = other DNA

SEQ ID NO: 50390 - DNA, 80 bp, synthetic construct
  misc_feature 1..80: note = Artificially Synthesized Probe
  source 1..80: mol_type = other DNA
ctaattttgtaatgtaaaagtagcatagtggttatggggaaagaatactggattgggagtcagaaatcctgagttaaaca

SEQ ID NO: 50391 - DNA, 80 bp, synthetic construct
  misc_feature 1..80: note = Artificially Synthesized Probe
  source 1..80: mol_type = other DNA
agatcatatctatttttaaacttctcacagagctttcaaattcatattttactgagtttataattttcacctaagtgctt

SEQ ID NO: 50392 - DNA, 80 bp, synthetic construct
  misc_feature 1..80: note = Artificially Synthesized Probe
  source 1..80: mol_type = other DNA
ataactccttaaattgcatagcaaaattcaacagataggaactcactctgaaatcctcaaaaagggtcagaatgcagatt

SEQ ID NO: 50393 - DNA, 80 bp, synthetic construct
  misc_feature 1..80: note = Artificially Synthesized Probe
  source 1..80: mol_type = other DNA
aattgctctattctctgtctgggaattcagctgccaaattgcccaaccttttgaagaccaggcttgggaaaaaaggaaga

SEQ ID NO: 50394 - DNA, 80 bp, synthetic construct; identical to SEQ ID NO: 24010
  misc_feature 1..80: note = Artificially Synthesized Probe
  source 1..80: mol_type = other DNA

SEQ ID NO: 50395 - DNA, 80 bp, synthetic construct
  misc_feature 1..80: note = Artificially Synthesized Probe
  source 1..80: mol_type = other DNA
taaaacatcctcaatggtcttcaaaaataatttacaagacatttaacgaatggaacttactccatgccctgtgcagtctg

SEQ ID NO: 50396 - DNA, 80 bp, synthetic construct
  misc_feature 1..80: note = Artificially Synthesized Probe
  source 1..80: mol_type = other DNA
gcccatgaagagtaggatattcacatgtcgtgttttcctgtacaaagaaatgtgacagtaaacattaaatgtcgacaaac

SEQ ID NO: 50397 - DNA, 80 bp, synthetic construct; identical to SEQ ID NO: 24011
  misc_feature 1..80: note = Artificially Synthesized Probe
  source 1..80: mol_type = other DNA

SEQ ID NO: 50398 - DNA, 80 bp, synthetic construct
  misc_feature 1..80: note = Artificially Synthesized Probe
  source 1..80: mol_type = other DNA
ccttctgtgaactaaatatcctcagttctgttgattattttcccccgttacacctctagaatcttccctatttaggtggt

SEQ ID NO: 50399 - DNA, 80 bp, synthetic construct
  misc_feature 1..80: note = Artificially Synthesized Probe
  source 1..80: mol_type = other DNA
ttcagtctaggactaagtattctatcagccataccatataacattgcatactacttaaaagaatgtggttaaagacaaaa

SEQ ID NO: 50400 - DNA, 80 bp, synthetic construct
  misc_feature 1..80: note = Artificially Synthesized Probe
  source 1..80: mol_type = other DNA
ttgaaggcttgtaactgctgaggtgtaggtgctgtcacattcaacattttcactgccacatcacctaaaaggcaattgtt

SEQ ID NO: 50401 - DNA, 80 bp, synthetic construct; identical to SEQ ID NO: 24012
  misc_feature 1..80: note = Artificially Synthesized Probe
  source 1..80: mol_type = other DNA

SEQ ID NO: 50402 - DNA, 80 bp, synthetic construct
  misc_feature 1..80: note = Artificially Synthesized Probe
  source 1..80: mol_type = other DNA
aacttttttatcagagtagttaacatttttttcaaatttatggattacttatgatactttcaattaggaaaatgactaaa

SEQ ID NO: 50403 - DNA, 80 bp, synthetic construct
  misc_feature 1..80: note = Artificially Synthesized Probe
  source 1..80: mol_type = other DNA
atcatcaaaaaaaaaaaactttatgtgaaacagctgtaacgtcaacactgccagtaggtgtttaaattggtacaactact

SEQ ID NO: 50404 - DNA, 80 bp, synthetic construct
  misc_feature 1..80: note = Artificially Synthesized Probe
  source 1..80: mol_type = other DNA
aaatgtttacagcaccagcatcaatcaaagccccaaactggaaacgatccaattgcaacagatgaaagaagaaatcatgt

SEQ ID NO: 50405 - DNA, 80 bp, synthetic construct
  misc_feature 1..80: note = Artificially Synthesized Probe
  source 1..80: mol_type = other DNA
aaaaattataaatatttgtcattatgctaagactcctcatatttaggtagagaaaaggataatgatctttcttaaaagtt

SEQ ID NO: 50406 - DNA, 80 bp, synthetic construct; identical to SEQ ID NO: 24013
  misc_feature 1..80: note = Artificially Synthesized Probe
  source 1..80: mol_type = other DNA

SEQ ID NO: 50407 - DNA, 80 bp, synthetic construct
  misc_feature 1..80: note = Artificially Synthesized Probe
  source 1..80: mol_type = other DNA
cacttttatacacaggctgagtatcccttatccaaaatgcctgggaccagaagtgtctcaaatttcaaattttttctgat

SEQ ID NO: 50408 - DNA, 80 bp, synthetic construct
  misc_feature 1..80: note = Artificially Synthesized Probe
  source 1..80: mol_type = other DNA
gccaggtgtgctgcctcacacctgtaatcccagcactttggaaggccaaggtgggtggctcacctgaggtcaggagtttg

SEQ ID NO: 50409 - DNA, 80 bp, synthetic construct
  misc_feature 1..80: note = Artificially Synthesized Probe
  source 1..80: mol_type = other DNA
actgcactccagcctgggcgacagagcgagaccttgtctcaaaacaaaacaaaacaaacaaaaataaataaataaagata

SEQ ID NO: 50410 - DNA, 80 bp, synthetic construct; identical to SEQ ID NO: 24014
  misc_feature 1..80: note = Artificially Synthesized Probe
  source 1..80: mol_type = other DNA

SEQ ID NO: 50411 - DNA, 80 bp, synthetic construct
  misc_feature 1..80: note = Artificially Synthesized Probe
  source 1..80: mol_type = other DNA
ctgagattacaggcgcccaccaccaagcctggctaattttttgtatttttagtagagatgaggtttcactatgttggcca

SEQ ID NO: 50412 - DNA, 80 bp, synthetic construct
  misc_feature 1..80: note = Artificially Synthesized Probe
  source 1..80: mol_type = other DNA
ctgctttgaaaaatttcatataccaaagacacctttctacatcaataaatgtacctctaccatgccattttaactcctat

SEQ ID NO: 50413 - DNA, 80 bp, synthetic construct
  misc_feature 1..80: note = Artificially Synthesized Probe
  source 1..80: mol_type = other DNA
atgtctattttttgaatttgcaattctttgataactagtaaggctgaacattttgtatatgtttactggccacttatatt

SEQ ID NO: 50414 - DNA, 80 bp, synthetic construct
  misc_feature 1..80: note = Artificially Synthesized Probe
  source 1..80: mol_type = other DNA
ccagctaatttttgtatttttagtagagatggggtttcaccatgttggccagtatggtcttgatctcctgacctcgtgat

SEQ ID NO: 50415 - DNA, 80 bp, synthetic construct; identical to SEQ ID NO: 24015
  misc_feature 1..80: note = Artificially Synthesized Probe
  source 1..80: mol_type = other DNA

SEQ ID NO: 50416 - DNA, 80 bp, synthetic construct; identical to SEQ ID NO: 23956
  misc_feature 1..80: note = Artificially Synthesized Probe
  source 1..80: mol_type = other DNA

SEQ ID NO: 50417 - DNA, 80 bp, synthetic construct
  misc_feature 1..80: note = Artificially Synthesized Probe
  source 1..80: mol_type = other DNA
atcctattatgacttgtcacaatgtcaccacattacatacttaccatgccactttcccttgtagactgttccaaatgatc

SEQ ID NO: 50418 - DNA, 80 bp, synthetic construct
  misc_feature 1..80: note = Artificially Synthesized Probe
  source 1..80: mol_type = other DNA
ttatgcctgagagggatacaggaagagatccccttaagaaaaattctctggaagaatagtagttaaaagtatgactctta

SEQ ID NO: 50419 - DNA, 80 bp, synthetic construct
  misc_feature 1..80: note = Artificially Synthesized Probe
  source 1..80: mol_type = other DNA
aacttgtcatttacattaggtatttctcttaatgctgtccctctcccctccccctaccccatgacaggtcccagtgtgtg

SEQ ID NO: 50420 - DNA, 80 bp, synthetic construct; identical to SEQ ID NO: 24016
  misc_feature 1..80: note = Artificially Synthesized Probe
  source 1..80: mol_type = other DNA

SEQ ID NO: 50421 - DNA, 80 bp, synthetic construct
  misc_feature 1..80: note = Artificially Synthesized Probe
  source 1..80: mol_type = other DNA
attactttggtagggtaaaagatcctcttattcaacaattagtagcaatactacggctaaacagtattcgttttttattt

SEQ ID NO: 50422 - DNA, 80 bp, synthetic construct
  misc_feature 1..80: note = Artificially Synthesized Probe
  source 1..80: mol_type = other DNA
cagccttttcgtgccttctaatattagctttctctctttttccttactttagaacagaatactgttactcttccaaaact

SEQ ID NO: 50423 - DNA, 80 bp, synthetic construct
  misc_feature 1..80: note = Artificially Synthesized Probe
  source 1..80: mol_type = other DNA
cttctaagaagaaagaattcagagaaaaaaagatatcatatactcttaccattcgattcctgtcttctgaggatgaagat

SEQ ID NO: 50424 - DNA, 80 bp, synthetic construct; identical to SEQ ID NO: 24017
  misc_feature 1..80: note = Artificially Synthesized Probe
  source 1..80: mol_type = other DNA

SEQ ID NO: 50425 - DNA, 80 bp, synthetic construct
  misc_feature 1..80: note = Artificially Synthesized Probe
  source 1..80: mol_type = other DNA
atatctgatgatagacatagacacatactttatttactggtgcaaaatctaggagaaaaacaatctctctaaaacaagac

SEQ ID NO: 50426 - DNA, 80 bp, synthetic construct
  misc_feature 1..80: note = Artificially Synthesized Probe
  source 1..80: mol_type = other DNA
cagccaatcaatattaaaaaaaaggaaatccccagatggaaacattttctaataatggccataatgttgaaaatatctga

SEQ ID NO: 50427 - DNA, 80 bp, synthetic construct
  misc_feature 1..80: note = Artificially Synthesized Probe
  source 1..80: mol_type = other DNA
atctagcctgcttggttagacagacccctcagtgagcaaggaaacaaaaggccagagaccccggaggtcaggaagaagat

SEQ ID NO: 50428 - DNA, 80 bp, synthetic construct
  misc_feature 1..80: note = Artificially Synthesized Probe
  source 1..80: mol_type = other DNA
atttctcaagactttctgaaaaatctctgcctttgtaagtgagagctttgttaagtaagcgctatggcctctcagccaag

SEQ ID NO: 50429 - DNA, 80 bp, synthetic construct; identical to SEQ ID NO: 24018
  misc_feature 1..80: note = Artificially Synthesized Probe
  source 1..80: mol_type = other DNA

SEQ ID NO: 50430 - DNA, 80 bp, synthetic construct
  misc_feature 1..80: note = Artificially Synthesized Probe
  source 1..80: mol_type = other DNA
tctcatatgcaattttctaaaataaaatggtatccacaatgtctattaagtagagcacaatccattttctaccttccatt

SEQ ID NO: 50431 - DNA, 80 bp, synthetic construct
  misc_feature 1..80: note = Artificially Synthesized Probe
  source 1..80: mol_type = other DNA
cccattctatggattttctgagaaacagcagggctgagagagcaaaaatctaaagcaccattactacattcagaatatat

SEQ ID NO: 50432 - DNA, 80 bp, synthetic construct
  misc_feature 1..80: note = Artificially Synthesized Probe
  source 1..80: mol_type = other DNA
cctcctgggttcaagcgattctccagcctcagcctcccaagtagctgggattacaggcatccgccatcatgcctagctaa

SEQ ID NO: 50433 - DNA, 80 bp, synthetic construct; identical to SEQ ID NO: 24019
  misc_feature 1..80: note = Artificially Synthesized Probe
  source 1..80: mol_type = other DNA

SEQ ID NO: 50434 - DNA, 80 bp, synthetic construct
  misc_feature 1..80: note = Artificially Synthesized Probe
  source 1..80: mol_type = other DNA
gctccctacctttgacaaaaatatacacatcccatattgggggaaagaaaaacccaaaaaacactgctagtattacagaa

SEQ ID NO: 50435 - DNA, 80 bp, synthetic construct
  misc_feature 1..80: note = Artificially Synthesized Probe
  source 1..80: mol_type = other DNA
cattaaaatcaaaggaatccagtaagctcttccccacccaccttatttattcccacccactaagtttaagaaattatcaa

SEQ ID NO: 50436 - DNA, 80 bp, synthetic construct
  misc_feature 1..80: note = Artificially Synthesized Probe
  source 1..80: mol_type = other DNA
tagtactgaaaactttcacacttacaaacacacgctgtgagggtgaggcacaaacagcatctgtagttttatatttagtt

SEQ ID NO: 50437 - DNA, 80 bp, synthetic construct; identical to SEQ ID NO: 24020
  misc_feature 1..80: note = Artificially Synthesized Probe
  source 1..80: mol_type = other DNA

SEQ ID NO: 50438 - DNA, 80 bp, synthetic construct
  misc_feature 1..80: note = Artificially Synthesized Probe
  source 1..80: mol_type = other DNA
taggtactaagcaggctgtgtttatgactaagttaattttgtgatgctaacatgatggcaacatttaaatgctggatgta

SEQ ID NO: 50439 - DNA, 80 bp, synthetic construct
  misc_feature 1..80: note = Artificially Synthesized Probe
  source 1..80: mol_type = other DNA
tggtcactaggggaaagagctccaaaacaaaattccagaacaggaaagagaacgatgcttggtgattgaaactgccccat

SEQ ID NO: 50440 - DNA, 80 bp, synthetic construct
  misc_feature 1..80: note = Artificially Synthesized Probe
  source 1..80: mol_type = other DNA
ctaacatcaataccaagtccagagtatagaatgcaggcttattattattttggttgcttcatgggtatacagaaacataa

SEQ ID NO: 50441 - DNA, 80 bp, synthetic construct
  misc_feature 1..80: note = Artificially Synthesized Probe
  source 1..80: mol_type = other DNA
taagtgtaaaggacctcctggaagaacacttcaagacagtctcaaatatcacctcttataaaacattatatagggtaatg

SEQ ID NO: 50442 - DNA, 80 bp, synthetic construct; identical to SEQ ID NO: 24021
  misc_feature 1..80: note = Artificially Synthesized Probe
  source 1..80: mol_type = other DNA

SEQ ID NO: 50443 - DNA, 80 bp, synthetic construct
  misc_feature 1..80: note = Artificially Synthesized Probe
  source 1..80: mol_type = other DNA
cggccataccatcctgaacgtgtccgatcttgtctgatcctggaagaaattttaaaactgtagataatacattttaagac

SEQ ID NO: 50444 - DNA, 80 bp, synthetic construct
  misc_feature 1..80: note = Artificially Synthesized Probe
  source 1..80: mol_type = other DNA
gcgcctgtagtcccagctactcgggaggctgaggcaggagaatggcgtgaacccgggaggcggagcttgcagtgagccga

SEQ ID NO: 50445 - DNA, 80 bp, synthetic construct; identical to SEQ ID NO: 23950
  misc_feature 1..80: note = Artificially Synthesized Probe
  source 1..80: mol_type = other DNA

SEQ ID NO: 50446 - DNA, 80 bp, synthetic construct
  misc_feature 1..80: note = Artificially Synthesized Probe
  source 1..80: mol_type = other DNA
aaacaaaaaaattttgggtttctctacacatttttctctgtgtctgttacttgaaagaggcaagtataaaggaaataagc

SEQ ID NO: 50447 - DNA, 80 bp, synthetic construct; identical to SEQ ID NO: 24022
  misc_feature 1..80: note = Artificially Synthesized Probe
  source 1..80: mol_type = other DNA

SEQ ID NO: 50448 - DNA, 80 bp, synthetic construct
  misc_feature 1..80: note = Artificially Synthesized Probe
  source 1..80: mol_type = other DNA
tcaaatgttgatgtccatttcaggccattcaaaaccaatggcttccattatcctcaacaatctaatgcaggagcagaaaa

SEQ ID NO: 50449 - DNA, 80 bp, synthetic construct
  misc_feature 1..80: note = Artificially Synthesized Probe
  source 1..80: mol_type = other DNA
gtaatgggataatctgtgtggcaaaccgctgtggcacatgttgacctacgtaacaaccctgcacatcctgcacatgtacc

SEQ ID NO: 50450 - DNA, 80 bp, synthetic construct
  misc_feature 1..80: note = Artificially Synthesized Probe
  source 1..80: mol_type = other DNA
gtgatatgcacaaagatgtttagtgcaacattatccatcatactaaaaagttataaataattatttctctattataggca

SEQ ID NO: 50451 - DNA, 80 bp, synthetic construct; identical to SEQ ID NO: 24023
  misc_feature 1..80: note = Artificially Synthesized Probe
  source 1..80: mol_type = other DNA

SEQ ID NO: 50452 - DNA, 80 bp, synthetic construct
  misc_feature 1..80: note = Artificially Synthesized Probe
  source 1..80: mol_type = other DNA
ggcagacttgtatgctcgtggtatttttgttgaagaaacactggcagcagagaattctggttcctaaaacattctttcct

SEQ ID NO: 50453 - DNA, 80 bp, synthetic construct
  misc_feature 1..80: note = Artificially Synthesized Probe
  source 1..80: mol_type = other DNA
agagacggggtttcaccatgttggccaggctggtcttgaactcctgacctcaggtgatccgtccacctcagcctcccaaa

SEQ ID NO: 50454 - DNA, 80 bp, synthetic construct
  misc_feature 1..80: note = Artificially Synthesized Probe
  source 1..80: mol_type = other DNA
cagcctggtcaacatggtgaaacaccatctctactaaaaatacaaaaattagacaggcatggtggcacgcgactgtaatc

SEQ ID NO: 50455 - DNA, 80 bp, synthetic construct; identical to SEQ ID NO: 24024
  misc_feature 1..80: note = Artificially Synthesized Probe
  source 1..80: mol_type = other DNA

SEQ ID NO: 50456 - DNA, 80 bp, synthetic construct
  misc_feature 1..80: note = Artificially Synthesized Probe
  source 1..80: mol_type = other DNA
ctacagaaaaatcaaatacgtacctgaaaagaaggtgacaggagttatatggctactaacaaatataaaaatcctagtga

SEQ ID NO: 50457 - DNA, 80 bp, synthetic construct
  misc_feature 1..80: note = Artificially Synthesized Probe
  source 1..80: mol_type = other DNA
gccaaagtttgctgctcaattgattgccaactaagtgatacaggtgataagattttgagatgaagtcttgctcttgtcac

SEQ ID NO: 50458 - DNA, 80 bp, synthetic construct
  misc_feature 1..80: note = Artificially Synthesized Probe
  source 1..80: mol_type = other DNA
gttggccaggctggtcttgaactcctgacctcaggcgatccgcctgccttggcctcccaaagtgctgggattacaggtgt

SEQ ID NO: 50459 - DNA, 80 bp, synthetic construct; identical to SEQ ID NO: 24025
  misc_feature 1..80: note = Artificially Synthesized Probe
  source 1..80: mol_type = other DNA

SEQ ID NO: 50460 - DNA, 80 bp, synthetic construct
  misc_feature 1..80: note = Artificially Synthesized Probe
  source 1..80: mol_type = other DNA
ttccttctcttacttacatcccttcccttcatcataatagagaaaacaaaagccatcaaacaacttttctgctctaatat

SEQ ID NO: 50461 - DNA, 80 bp, synthetic construct
  misc_feature 1..80: note = Artificially Synthesized Probe
  source 1..80: mol_type = other DNA
gctatgtccatctttaattcttcacagtctctgagagacataatttccaagctcaaggaattttactacatcaatcattt

SEQ ID NO: 50462 - DNA, 80 bp, synthetic construct
  misc_feature 1..80: note = Artificially Synthesized Probe
  source 1..80: mol_type = other DNA
aggtcaggagttcaggaccagcttggccaacatggcaaaaccctactaaaaatacaaaaattagctgggcatgatggcgg

SEQ ID NO: 50463 - DNA, 80 bp, synthetic construct; identical to SEQ ID NO: 23957
  misc_feature 1..80: note = Artificially Synthesized Probe
  source 1..80: mol_type = other DNA

SEQ ID NO: 50464 - DNA, 80 bp, synthetic construct
  misc_feature 1..80: note = Artificially Synthesized Probe
  source 1..80: mol_type = other DNA
aaaaaccaaaaaaaattgtccctcaaccctgaatcaagctatcctcttttgtcattccttcacagccaagcttctcaaaa

SEQ ID NO: 50465 - DNA, 80 bp, synthetic construct; identical to SEQ ID NO: 24026
  misc_feature 1..80: note = Artificially Synthesized Probe
  source 1..80: mol_type = other DNA

SEQ ID NO: 50466 - DNA, 80 bp, synthetic construct
  misc_feature 1..80: note = Artificially Synthesized Probe
  source 1..80: mol_type = other DNA
ctctactcaaggtccttatatccaactgctactggatttctaaacctgaaagtcccacaggcatcttaaagtcaatatat

SEQ ID NO: 50467 - DNA, 80 bp, synthetic construct
  misc_feature 1..80: note = Artificially Synthesized Probe
  source 1..80: mol_type = other DNA
actacaaaacagtatagtggttaagtgtaagagagaaaggccaggtttgaacccacttcagtaatttatcagcagtgtaa

SEQ ID NO: 50468 - DNA, 80 bp, synthetic construct; identical to SEQ ID NO: 24027
  misc_feature 1..80: note = Artificially Synthesized Probe
  source 1..80: mol_type = other DNA

SEQ ID NO: 50469 - DNA, 80 bp, synthetic construct
  misc_feature 1..80: note = Artificially Synthesized Probe
  source 1..80: mol_type = other DNA
tcaaagatttttctaaaatatagagctgatgacttcctctcccaatcaaaattcttcagattccctagcactgctttaga

SEQ ID NO: 50470 - DNA, 80 bp, synthetic construct
  misc_feature 1..80: note = Artificially Synthesized Probe
  source 1..80: mol_type = other DNA
tgtaaaggcacttctatgcctttcatttccttaacaaatgactttcctaacccccttatgtagtgtactcctacttattc

SEQ ID NO: 50471 - DNA, 80 bp, synthetic construct
  misc_feature 1..80: note = Artificially Synthesized Probe
  source 1..80: mol_type = other DNA
gtttgattcacctattagactgtgacttccttgagggcaaaggccatgtgctaattcataaataattcccaattgcctaa

SEQ ID NO: 50472 - DNA, 80 bp, synthetic construct
  misc_feature 1..80: note = Artificially Synthesized Probe
  source 1..80: mol_type = other DNA
gttttggaacaagagaacagatgatgctagaagtgtaaaaaaattctgacagttgcagaaggaatggaaatagatagaga

SEQ ID NO: 50473 - DNA, 80 bp, synthetic construct; identical to SEQ ID NO: 24028
  misc_feature 1..80: note = Artificially Synthesized Probe
  source 1..80: mol_type = other DNA

SEQ ID NO: 50474 - DNA, 80 bp, synthetic construct
  misc_feature 1..80: note = Artificially Synthesized Probe
  source 1..80: mol_type = other DNA
tttgtttttaggtcttgctagatagaggtgaaccttgctagttaaggaaaactagtactagaaaaaagtcacttaaaatg

SEQ ID NO: 50475 - DNA, 80 bp, synthetic construct
  misc_feature 1..80: note = Artificially Synthesized Probe
  source 1..80: mol_type = other DNA
gcaagtctgcagaattttccagttgggttttatgtatcatggttctgatcaagctgaaaacagttccaatgaacaaaatt

SEQ ID NO: 50476 - DNA, 80 bp, synthetic construct
  misc_feature 1..80: note = Artificially Synthesized Probe
  source 1..80: mol_type = other DNA
acagaaaaaatcaagtttttgttggtcataatgccaagcttatgatagcacaaattgaaattcttttcttttgagacagg

SEQ ID NO: 50477 - DNA, 80 bp, synthetic construct
  misc_feature 1..80: note = Artificially Synthesized Probe
  source 1..80: mol_type = other DNA
agatggggtctcactatgttgcctaggctggtctctaacttctgggtcaagcgttccacccatcttggcctcccaaagtg

SEQ ID NO: 50478 - DNA, 80 bp, synthetic construct; identical to SEQ ID NO: 24029
  misc_feature 1..80: note = Artificially Synthesized Probe
  source 1..80: mol_type = other DNA

SEQ ID NO: 50479 - DNA, 80 bp, synthetic construct
  misc_feature 1..80: note = Artificially Synthesized Probe
  source 1..80: mol_type = other DNA
aatgctggatacttacatcaatattgacaggttctattgtgtttatatgcacattgggagctgatgaggatcggtctcgt

SEQ ID NO: 50480 - DNA, 80 bp, synthetic construct
  misc_feature 1..80: note = Artificially Synthesized Probe
  source 1..80: mol_type = other DNA
aaaggaagataaaaggattttcttgtttttatattctcaaaatcattaaagcattaaaaacctagcagtaatgactttta

SEQ ID NO: 50481 - DNA, 80 bp, synthetic construct
  misc_feature 1..80: note = Artificially Synthesized Probe
  source 1..80: mol_type = other DNA
cctttgaagttatataaaaatgctctgagaatgactgaatataatttgccatttttttctaacattgtcttgacatctga

SEQ ID NO: 50482 - DNA, 80 bp, synthetic construct; identical to SEQ ID NO: 24030
  misc_feature 1..80: note = Artificially Synthesized Probe
  source 1..80: mol_type = other DNA

SEQ ID NO: 50483 - DNA, 80 bp, synthetic construct
  misc_feature 1..80: note = Artificially Synthesized Probe
  source 1..80: mol_type = other DNA
gcactcacagagaacactaaagttttgagactagattgtaaacacttggaaggatgtagcccctcagaaagggtatccta

SEQ ID NO: 50484 - DNA, 80 bp, synthetic construct
  misc_feature 1..80: note = Artificially Synthesized Probe
  source 1..80: mol_type = other DNA
gctagaaagacaatgttgagggaataaaaagacacttttgtgagacgtgaggaatgggaaaaaaatatagtaggaaagga

SEQ ID NO: 50485 - DNA, 80 bp, synthetic construct
  misc_feature 1..80: note = Artificially Synthesized Probe
  source 1..80: mol_type = other DNA
gaaatgaatccacttagaattgatatgcaaataataaaatattatgtactaaaaaaaaattggtatcggctcaatgagaa

SEQ ID NO: 50486 - DNA, 80 bp, synthetic construct
  misc_feature 1..80: note = Artificially Synthesized Probe
  source 1..80: mol_type = other DNA
ctgatttgttcacaccacacgtttgacagagaaagaaaatccagactgcctattttctagttaatttcaccttcaatcta

SEQ ID NO: 50487 - DNA, 80 bp, synthetic construct; identical to SEQ ID NO: 24031
  misc_feature 1..80: note = Artificially Synthesized Probe
  source 1..80: mol_type = other DNA

SEQ ID NO: 50488 - DNA, 80 bp, synthetic construct
  misc_feature 1..80: note = Artificially Synthesized Probe
  source 1..80: mol_type = other DNA
aaaaccctgtctctactaaaaatacaaaaattagctgggtgtggtgttaagggcctgtaatcccagctactcagggggct

SEQ ID NO: 50489 - DNA, 80 bp, synthetic construct
  misc_feature 1..80: note = Artificially Synthesized Probe
  source 1..80: mol_type = other DNA
tctactgtaataattgatctgggataggcagagatggcagtaagtcacttctgaaactcaccaagttaggaatatgacag

SEQ ID NO: 50490 - DNA, 80 bp, synthetic construct; identical to SEQ ID NO: 24032
  misc_feature 1..80: note = Artificially Synthesized Probe
  source 1..80: mol_type = other DNA

SEQ ID NO: 50491 - DNA, 80 bp, synthetic construct
  misc_feature 1..80: note = Artificially Synthesized Probe
  source 1..80: mol_type = other DNA
agagtgagtggtggcgcacacaacacaagaagtctaatttacataacaggtatatttttcactgaaaaatattacctggt

SEQ ID NO: 50492 - DNA, 80 bp, synthetic construct
  misc_feature 1..80: note = Artificially Synthesized Probe
  source 1..80: mol_type = other DNA
ctggctttctcccaatgatacctgtacctatcttgcagtaaacctctttaaagcagtaccaaattaaagacaaaaggaat

SEQ ID NO: 50493 - DNA, 80 bp, synthetic construct
  misc_feature 1..80: note = Artificially Synthesized Probe
  source 1..80: mol_type = other DNA
cacaaatttatacattctacagcatttttaaaaagtagaaaaggaggtatctctcactttgtattcaaaactgggcaatg

SEQ ID NO: 50494 - DNA, 80 bp, synthetic construct
  misc_feature 1..80: note = Artificially Synthesized Probe
  source 1..80: mol_type = other DNA
tctatctttacagagacaaccatatggagttatgtcataaaaacatcaggaaaatgacttacagacaagtttgaacatct

SEQ ID NO: 50495 - DNA, 80 bp, synthetic construct; identical to SEQ ID NO: 24033
  misc_feature 1..80: note = Artificially Synthesized Probe
  source 1..80: mol_type = other DNA

SEQ ID NO: 50496 - DNA, 80 bp, synthetic construct
  misc_feature 1..80: note = Artificially Synthesized Probe
  source 1..80: mol_type = other DNA
tccactagaagagataactgctacaacctgacaagagaacacaacggctgcattttccagtgttccaaataggtaagtat

SEQ ID NO: 50497 - DNA, 80 bp, synthetic construct
  misc_feature 1..80: note = Artificially Synthesized Probe
  source 1..80: mol_type = other DNA
tctctaggtagaaatctgaagaaatggcattacactgtgaagagtgggaggaagtagggttaaaactgacaataaatatt

SEQ ID NO: 50498 - DNA, 80 bp, synthetic construct
  misc_feature 1..80: note = Artificially Synthesized Probe
  source 1..80: mol_type = other DNA
ttgcttttgttgcccaggctggagtgcaatggtgcaatctcggttcactgcaacctctacctcctgggttcaagtgattc

SEQ ID NO: 50499 - DNA, 80 bp, synthetic construct
  misc_feature 1..80: note = Artificially Synthesized Probe
  source 1..80: mol_type = other DNA
cctgactcctgagtagctgggactacaggcacccgccaccacgcccggctaattttgtttttgtatttttagtagagacg

SEQ ID NO: 50500 - DNA, 80 bp, synthetic construct; identical to SEQ ID NO: 24034
  misc_feature 1..80: note = Artificially Synthesized Probe
  source 1..80: mol_type = other DNA

SEQ ID NO: 50501 - DNA, 80 bp, synthetic construct
  misc_feature 1..80: note = Artificially Synthesized Probe
  source 1..80: mol_type = other DNA
actgatacccacttaactcatctttattgtgtcttcctttttatttcctactatgaagcttaaatgacgcctttgcatta

SEQ ID NO: 50502 - DNA, 80 bp, synthetic construct
  misc_feature 1..80: note = Artificially Synthesized Probe
  source 1..80: mol_type = other DNA
agtagctgggattacaggtgtgtgccatcatgcccagctaatttttttttttttgtatctttagtagagacagggtttca

SEQ ID NO: 50503 - DNA, 80 bp, synthetic construct
  misc_feature 1..80: note = Artificially Synthesized Probe
  source 1..80: mol_type = other DNA
ttcatttttttcttttacgctttatgaatatctatcccttttccatacttctagcacttgaacttgtcttcactgcctct

SEQ ID NO: 50504 - DNA, 80 bp, synthetic construct; identical to SEQ ID NO: 24035
  misc_feature 1..80: note = Artificially Synthesized Probe
  source 1..80: mol_type = other DNA

SEQ ID NO: 50505 - DNA, 80 bp, synthetic construct
  misc_feature 1..80: note = Artificially Synthesized Probe
  source 1..80: mol_type = other DNA
cctaggcccgttcagattgtagtaattctttaaagtctagttcaaataccaccttcttcattaagttttcctgagcactc

SEQ ID NO: 50506 - DNA, 80 bp, synthetic construct
  misc_feature 1..80: note = Artificially Synthesized Probe
  source 1..80: mol_type = other DNA
ccattgtctcacatatcaatgcttcttcataagtggaagtcatatacttctatacctaataaaagatgaactcaaggtgt

SEQ ID NO: 50507 - DNA, 80 bp, synthetic construct; identical to SEQ ID NO: 24036
  misc_feature 1..80: note = Artificially Synthesized Probe
  source 1..80: mol_type = other DNA

SEQ ID NO: 50508 - DNA, 80 bp, synthetic construct
  misc_feature 1..80: note = Artificially Synthesized Probe
  source 1..80: mol_type = other DNA
aattaaccaggagatccaaaagaaagcggttcaagtagcatgtcgcccaagagcagaagtcaaaccatacccaatagagt

SEQ ID NO: 50509 - DNA, 80 bp, synthetic construct
  misc_feature 1..80: note = Artificially Synthesized Probe
  source 1..80: mol_type = other DNA
aaacaaaacaaacctaacttgtgcaaaacccagaagcttcatataccaaaatacatagttaaccaaaaaaactgagatca

SEQ ID NO: 50510 - DNA, 80 bp, synthetic construct; identical to SEQ ID NO: 23958
  misc_feature 1..80: note = Artificially Synthesized Probe
  source 1..80: mol_type = other DNA

SEQ ID NO: 50511 - DNA, 80 bp, synthetic construct
  misc_feature 1..80: note = Artificially Synthesized Probe
  source 1..80: mol_type = other DNA
gctttatggttaaagaatgagaataaaaagtatctactgtaaattaggtgacattataatttacttaaagtacagagtta

SEQ ID NO: 50512 - DNA, 80 bp, synthetic construct; identical to SEQ ID NO: 24037
  misc_feature 1..80: note = Artificially Synthesized Probe
  source 1..80: mol_type = other DNA

SEQ ID NO: 50513 - DNA, 80 bp, synthetic construct
  misc_feature 1..80: note = Artificially Synthesized Probe
  source 1..80: mol_type = other DNA
tatagctgaaccagcattacaatttgggagagaaatactgtccattccacatattattctctaactacacttaaaaaaaa

SEQ ID NO: 50514 - DNA, 80 bp, synthetic construct
  misc_feature 1..80: note = Artificially Synthesized Probe
  source 1..80: mol_type = other DNA
tactacaacgctggtgaaatttataaccacatgtttgacagcggaaaccctggaaaagcagctttcgacaaaagtcacaa

SEQ ID NO: 50515 - DNA, 80 bp, synthetic construct
  misc_feature 1..80: note = Artificially Synthesized Probe
  source 1..80: mol_type = other DNA
ctattataaaatgaaaaccgggggttcaagataatagatggactacacatatttatttcccaccccactatctaacttaa

SEQ ID NO: 50516 - DNA, 80 bp, synthetic construct; identical to SEQ ID NO: 24038
  misc_feature 1..80: note = Artificially Synthesized Probe
  source 1..80: mol_type = other DNA

SEQ ID NO: 50517 - DNA, 80 bp, synthetic construct
  misc_feature 1..80: note = Artificially Synthesized Probe
  source 1..80: mol_type = other DNA
atggacttcataccacagtggtcccataagattataaaggagttgaataattcctattgcctagtgataccttgaagatc

SEQ ID NO: 50518 - DNA, 80 bp, synthetic construct
  misc_feature 1..80: note = Artificially Synthesized Probe
  source 1..80: mol_type = other DNA
tcagcctcccgagcagctgggaccacaggcacatgccactaggcctggctaattttcctattttttattagaggaagggt

SEQ ID NO: 50519 - DNA, 80 bp, synthetic construct
  misc_feature 1..80: note = Artificially Synthesized Probe
  source 1..80: mol_type = other DNA
tttttaaaatagaagtttatagaataagcacataaaatatttttgtatagctatataatgtttttaaacttttgaaactg

SEQ ID NO: 50520 - DNA, 80 bp, synthetic construct; identical to SEQ ID NO: 24039
  misc_feature 1..80: note = Artificially Synthesized Probe
  source 1..80: mol_type = other DNA

SEQ ID NO: 50521 - DNA, 80 bp, synthetic construct
  misc_feature 1..80: note = Artificially Synthesized Probe
  source 1..80: mol_type = other DNA
ctcactgcaagccctgcctcctgggctcatgccattctcctgcctcatcctccccagcagctgggactacaggcacatga

SEQ ID NO: 50522 - DNA, 80 bp, synthetic construct
  misc_feature 1..80: note = Artificially Synthesized Probe
  source 1..80: mol_type = other DNA
agttgtatagttaggctataccatgtaggcttgtgtaagcacataacaaaatcaccattgatgcatttctcagaacatat

SEQ ID NO: 50523 - DNA, 80 bp, synthetic construct
  misc_feature 1..80: note = Artificially Synthesized Probe
  source 1..80: mol_type = other DNA
acaaaaacaaaaacaaaatagctgacagaatcagaacccctgatctatggtccaaaaacataatggttaactttggataa

SEQ ID NO: 50524 - DNA, 80 bp, synthetic construct
  misc_feature 1..80: note = Artificially Synthesized Probe
  source 1..80: mol_type = other DNA
tgtttgggccacataaacttatttgtgaacacttctctaggtgaaacttagaaggcaacatgttaagaattccatgtcaa

SEQ ID NO: 50525 - DNA, 80 bp, synthetic construct; identical to SEQ ID NO: 24040
  misc_feature 1..80: note = Artificially Synthesized Probe
  source 1..80: mol_type = other DNA

SEQ ID NO: 50526 - DNA, 80 bp, synthetic construct
  misc_feature 1..80: note = Artificially Synthesized Probe
  source 1..80: mol_type = other DNA
gtagctggggactacaggcatgcaccaccatgcctagctaacgtttgtattttttggtggagatggagtttcaccatgtt

SEQ ID NO: 50527 - DNA, 80 bp, synthetic construct
  misc_feature 1..80: note = Artificially Synthesized Probe
  source 1..80: mol_type = other DNA
agattttttttttgagacagagtctcactgtcacccaggccggagtgcagtggcacgatctcggctcactacaacctcca

SEQ ID NO: 50528 - DNA, 80 bp, synthetic construct
  misc_feature 1..80: note = Artificially Synthesized Probe
  source 1..80: mol_type = other DNA
atttccactcttcaatattttgtataaaaccagttacaactcacaagattttcaaatgagacaggattttaccaggctgg

SEQ ID NO: 50529 - DNA, 80 bp, synthetic construct
  misc_feature 1..80: note = Artificially Synthesized Probe
  source 1..80: mol_type = other DNA
actacttaccctgactatatacaacatgaattagaacttcctaatctattctgctacatgtaaatttttttatgatacat

SEQ ID NO: 50530 - DNA, 80 bp, synthetic construct; identical to SEQ ID NO: 24041
  misc_feature 1..80: note = Artificially Synthesized Probe
  source 1..80: mol_type = other DNA

SEQ ID NO: 50531 - DNA, 80 bp, synthetic construct
  misc_feature 1..80: note = Artificially Synthesized Probe
  source 1..80: mol_type = other DNA
aagaaaattacatcctgatatataatacattctggctttttgaggacatttagttttaaaagtgactcttattttcttca

SEQ ID NO: 50532 - DNA, 80 bp, synthetic construct
  misc_feature 1..80: note = Artificially Synthesized Probe
  source 1..80: mol_type = other DNA
tatttttcaatagcagcttctgatgaggatccaagcaatcacttatatgaatatactgtttaatccaggaataacctatc

SEQ ID NO: 50533 - DNA, 80 bp, synthetic construct
  misc_feature 1..80: note = Artificially Synthesized Probe
  source 1..80: mol_type = other DNA
tatgtggccattattcaccaaaccaagtaggtaggtgaccaaaacagctgaaggaaagaaaacatgtggatatgcatttg

SEQ ID NO: 50534 - DNA, 80 bp, synthetic construct; identical to SEQ ID NO: 24042
  misc_feature 1..80: note = Artificially Synthesized Probe
  source 1..80: mol_type = other DNA

SEQ ID NO: 50535 - DNA, 80 bp, synthetic construct
  misc_feature 1..80: note = Artificially Synthesized Probe
  source 1..80: mol_type = other DNA
cacttttcctttctaagcagaacataggtttttgatcttgcctctatatggcactcagagcaatcattctaacacacaaa

SEQ ID NO: 50536 - DNA, 80 bp, synthetic construct
  misc_feature 1..80: note = Artificially Synthesized Probe
  source 1..80: mol_type = other DNA
cttcaaccttgtatcatccattctgaacttctttcaaaactttgaaaggtaacatgctttcttgctcttccctctgttta

SEQ ID NO: 50537 - DNA, 80 bp, synthetic construct
  misc_feature 1..80: note = Artificially Synthesized Probe
  source 1..80: mol_type = other DNA
tttattaaatcttctctctactctatggcagtgacactgtcttattcatttgtcatatccctaggtaagatatggtattg

SEQ ID NO: 50538 - DNA, 80 bp, synthetic construct
  misc_feature 1..80: note = Artificially Synthesized Probe
  source 1..80: mol_type = other DNA
ctgaggcatcattttaatactattttctcacacttagcaacttaggtctttcttttatctcctcatattcaatttctagc

SEQ ID NO: 50539 - DNA, 80 bp, synthetic construct; identical to SEQ ID NO: 24043
  misc_feature 1..80: note = Artificially Synthesized Probe
  source 1..80: mol_type = other DNA

SEQ ID NO: 50540 - DNA, 80 bp, synthetic construct
  misc_feature 1..80: note = Artificially Synthesized Probe
  source 1..80: mol_type = other DNA
gtaagaaatgtattcctgattcagagacaacttttggcttctgcctgccattttaggggataagttctcaagttctatgt

SEQ ID NO: 50541 - DNA, 80 bp, synthetic construct
  misc_feature 1..80: note = Artificially Synthesized Probe
  source 1..80: mol_type = other DNA
tttaatatccagccattctatttccattaacctatccttcagaaacacaagggtgtgtacaagtgtgtcaagatatatgc

SEQ ID NO: 50542 - DNA, 80 bp, synthetic construct; identical to SEQ ID NO: 24044
  misc_feature 1..80: note = Artificially Synthesized Probe
  source 1..80: mol_type = other DNA

SEQ ID NO: 50543 - DNA, 80 bp, synthetic construct
  misc_feature 1..80: note = Artificially Synthesized Probe
  source 1..80: mol_type = other DNA
actttttttacttgacatacttctgcactattcaaaattatcttttaacaatgcatacattttacttttttaaattaaaa

SEQ ID NO: 50544 - DNA, 80 bp, synthetic construct
  misc_feature 1..80: note = Artificially Synthesized Probe
  source 1..80: mol_type = other DNA
atctgcatccaattctcatgataaccctatgaggcagatgctatcatctatattatatagatgaggaagccagggtttag

SEQ ID NO: 50545 - DNA, 80 bp, synthetic construct
  misc_feature 1..80: note = Artificially Synthesized Probe
  source 1..80: mol_type = other DNA
tttcaaaaaaaaatgtaaagatacatacaaagttgtgtgttgtaagtggaacattctccaacacttccacatgcaattct

SEQ ID NO: 50546 - DNA, 80 bp, synthetic construct
  misc_feature 1..80: note = Artificially Synthesized Probe
  source 1..80: mol_type = other DNA
atatgaaaattggttatcgaggggctagtaacagtgagggaggtttggctccctaatattccatcgttagaaatttaaat

SEQ ID NO: 50547 - DNA, 80 bp, synthetic construct; identical to SEQ ID NO: 24045
  misc_feature 1..80: note = Artificially Synthesized Probe
  source 1..80: mol_type = other DNA

SEQ ID NO: 50548 - DNA, 80 bp, synthetic construct
  misc_feature 1..80: note = Artificially Synthesized Probe
  source 1..80: mol_type = other DNA
atccaaataaatcacactctgaatggttcaaaaattgtaagaatctcaaattccaaataaaatcatttgatcaaagtaac

SEQ ID NO: 50549 - DNA, 80 bp, synthetic construct
  misc_feature 1..80: note = Artificially Synthesized Probe
  source 1..80: mol_type = other DNA
ttctttttaaacaaaatttcacgtcacatacaaaccatacccatcctgaattctgtaaacagcacagcactctgggatta

SEQ ID NO: 50550 - DNA, 80 bp, synthetic construct
  misc_feature 1..80: note = Artificially Synthesized Probe
  source 1..80: mol_type = other DNA
aatgggttactaggtcagatacaacaccatttctacagctaacttaatactaaagggaaattataacccaaatatttgtt

SEQ ID NO: 50551 - DNA, 80 bp, synthetic construct
  misc_feature 1..80: note = Artificially Synthesized Probe
  source 1..80: mol_type = other DNA
gcaaaatcaattttgatccaatactgttcaaagctgaaaactgtataacccttcaatcacactgactgtccttaagagac

SEQ ID NO: 50552 - DNA, 80 bp, synthetic construct; identical to SEQ ID NO: 24046
  misc_feature 1..80: note = Artificially Synthesized Probe
  source 1..80: mol_type = other DNA

SEQ ID NO: 50553 - DNA, 80 bp, synthetic construct
  misc_feature 1..80: note = Artificially Synthesized Probe
  source 1..80: mol_type = other DNA
ttgcagaagatacaaatctggagccctcaatggccatattctccaccacactgagaaaatctgttatagaatgaagctaa

SEQ ID NO: 50554 - DNA, 80 bp, synthetic construct; identical to SEQ ID NO: 23959
  misc_feature 1..80: note = Artificially Synthesized Probe
  source 1..80: mol_type = other DNA

SEQ ID NO: 50555 - DNA, 80 bp, synthetic construct
  misc_feature 1..80: note = Artificially Synthesized Probe
  source 1..80: mol_type = other DNA
ggtgtagactacagtgaggcagtgtgaatacagaggacacagtttttattgggaggtgtaagaagaaggggaaatgttag

SEQ ID NO: 50556 - DNA, 80 bp, synthetic construct; identical to SEQ ID NO: 24047
  misc_feature 1..80: note = Artificially Synthesized Probe
  source 1..80: mol_type = other DNA

SEQ ID NO: 50557 - DNA, 80 bp, synthetic construct
  misc_feature 1..80: note = Artificially Synthesized Probe
  source 1..80: mol_type = other DNA
cagcttagccaacatggtgaaaccccatctctactaaaaaacacaaaaagtagccgggcagagcggcgggcgcctataat

SEQ ID NO: 50558 - DNA, 80 bp, synthetic construct
  misc_feature 1..80: note = Artificially Synthesized Probe
  source 1..80: mol_type = other DNA
acaaacaaagaaaaaccctgaacttttacctacccagcaaggtaaaagtttgtcatgagagactgggctcatcactggaa

SEQ ID NO: 50559 - DNA, 80 bp, synthetic construct
  misc_feature 1..80: note = Artificially Synthesized Probe
  source 1..80: mol_type = other DNA
atgcacctctccaactgaggttgaacagtgaagctttctcttgccttcttgtttcaattttcatactataaacaagtatc

SEQ ID NO: 50560 - DNA, 80 bp, synthetic construct; identical to SEQ ID NO: 24048
  misc_feature 1..80: note = Artificially Synthesized Probe
  source 1..80: mol_type = other DNA

SEQ ID NO: 50561 - DNA, 80 bp, synthetic construct
  misc_feature 1..80: note = Artificially Synthesized Probe
  source 1..80: mol_type = other DNA
tatgaccacgaggtggcagtagcatgcatagctttattgggtgacattgacagatctgcaggcagaggatgtccttaaag

SEQ ID NO: 50562 - DNA, 80 bp, synthetic construct
  misc_feature 1..80: note = Artificially Synthesized Probe
  source 1..80: mol_type = other DNA
cctcaaaaatcaggcgatatcatgaaggccaaactgagtctatatatgtggcatggccaaaggaaacacggaggacccat

SEQ ID NO: 50563 - DNA, 80 bp, synthetic construct
  misc_feature 1..80: note = Artificially Synthesized Probe
  source 1..80: mol_type = other DNA
acccagcagggagtctatgtatcaaagagctccaaagggcaacagcagcttggaatctttatagccttgggatttgatct

SEQ ID NO: 50564 - DNA, 80 bp, synthetic construct
  misc_feature 1..80: note = Artificially Synthesized Probe
  source 1..80: mol_type = other DNA
ctcaacctgttgtaatggaagaaacaacctagaggccaatatacagaggggttttttggctcatttaaataataataatc

SEQ ID NO: 50565 - DNA, 80 bp, synthetic construct
  misc_feature 1..80: note = Artificially Synthesized Probe
  source 1..80: mol_type = other DNA
tactaatgccaaaatttcctgactggtgaccgatctttagttttaaaccacatccaatgtatcctatcctatgttaccat

SEQ ID NO: 50566 - DNA, 80 bp, synthetic construct
  misc_feature 1..80: note = Artificially Synthesized Probe
  source 1..80: mol_type = other DNA
cataggaggctattatggtaacacactccagaaatatacaaacattcttactattgttgcttacagtttgagtacttata

SEQ ID NO: 50567 - DNA, 80 bp, synthetic construct; identical to SEQ ID NO: 24049
  misc_feature 1..80: note = Artificially Synthesized Probe
  source 1..80: mol_type = other DNA

SEQ ID NO: 50568 - DNA, 80 bp, synthetic construct
  misc_feature 1..80: note = Artificially Synthesized Probe
  source 1..80: mol_type = other DNA
tcagcctctttggtaatttcccttaggcactccagtaatgcacttcaaatatggctatgctccctcatgcttctctacat

SEQ ID NO: 50569 - DNA, 80 bp, synthetic construct
  misc_feature 1..80: note = Artificially Synthesized Probe
  source 1..80: mol_type = other DNA
gaagaaatcaatggaacaaaacagaaagaccaaaatagaccctaacacataaagaaagtgcgaataagataaaggcaaca

SEQ ID NO: 50570 - DNA, 80 bp, synthetic construct; identical to SEQ ID NO: 24050
  misc_feature 1..80: note = Artificially Synthesized Probe
  source 1..80: mol_type = other DNA

SEQ ID NO: 50571 - DNA, 80 bp, synthetic construct
  misc_feature 1..80: note = Artificially Synthesized Probe
  source 1..80: mol_type = other DNA
aatatatttgcaactcatttagcagatgtgttagcttcctgatacacaaagagctcctgaaaaattgagatgaagaccaa

SEQ ID NO: 50572 - DNA, 80 bp, synthetic construct
  misc_feature 1..80: note = Artificially Synthesized Probe
  source 1..80: mol_type = other DNA
aaaaaaattgataacatattctactggtatgaagctataaacagacatctcataattaagcaagatccatgaagcgaaat

SEQ ID NO: 50573 - DNA, 80 bp, synthetic construct
  misc_feature 1..80: note = Artificially Synthesized Probe
  source 1..80: mol_type = other DNA
ctacagtactgactgtatatcaaaagtctagaaagaacctgaatgaccatacacacatcactggttaaatacactatagt

SEQ ID NO: 50574 - DNA, 80 bp, synthetic construct; identical to SEQ ID NO: 24051
  misc_feature 1..80: note = Artificially Synthesized Probe
  source 1..80: mol_type = other DNA

SEQ ID NO: 50575 - DNA, 80 bp, synthetic construct
  misc_feature 1..80: note = Artificially Synthesized Probe
  source 1..80: mol_type = other DNA
aagtataacctgtgtaaagggagggaggttgtctcctactttaaggctaggaaaactaaaaagaggtatttttgtaataa

SEQ ID NO: 50576 - DNA, 80 bp, synthetic construct
  misc_feature 1..80: note = Artificially Synthesized Probe
  source 1..80: mol_type = other DNA
gatttatagaaaagaaatctttatgaaaatgcctagaattaatctattaaataaaaaaatcagaaaatgctaatatctaa

SEQ ID NO: 50577 - DNA, 80 bp, synthetic construct
  misc_feature 1..80: note = Artificially Synthesized Probe
  source 1..80: mol_type = other DNA
aatggaaccatgtgaatatttgccaaggaaactttagaccaaaacaaaatgtatgagtccaaactttcacacgtcaattt

SEQ ID NO: 50578 - DNA, 80 bp, synthetic construct
  misc_feature 1..80: note = Artificially Synthesized Probe
  source 1..80: mol_type = other DNA
gtctggagttcaagaccagcctggccaacatggtgaaaccccatctctattaaaaacacaaaaattagccaggcatggtg

SEQ ID NO: 50579 - DNA, 80 bp, synthetic construct
  misc_feature 1..80: note = Artificially Synthesized Probe
  source 1..80: mol_type = other DNA
taatttatactttatatataatgtatataatttatatataacataatttatatacaatatataacatatatattatatat

SEQ ID NO: 50580 - DNA, 80 bp, synthetic construct; identical to SEQ ID NO: 24052
  misc_feature 1..80: note = Artificially Synthesized Probe
  source 1..80: mol_type = other DNA

SEQ ID NO: 50581 - DNA, 80 bp, synthetic construct
  misc_feature 1..80: note = Artificially Synthesized Probe
  source 1..80: mol_type = other DNA
ctgtcgcccaggctgcagtgcagtggcgtgatctcagctcactgcaagctccacctcccgggctcacgccattctcctgc

SEQ ID NO: 50582 - DNA, 80 bp, synthetic construct
  misc_feature 1..80: note = Artificially Synthesized Probe
  source 1..80: mol_type = other DNA
taggattacaggtgtgagccatttttttttttttttttttttgagacagggtcttgctctgccacccaggcttgtgcaat

SEQ ID NO: 50583 - DNA, 80 bp, synthetic construct
  misc_feature 1..80: note = Artificially Synthesized Probe
  source 1..80: mol_type = other DNA
tctcgaactccttacctcaagtgacccgcctgcctcagcctcccaaagtgctgggattacaggtgtgagccactgcaact

SEQ ID NO: 50584 - DNA, 80 bp, synthetic construct; identical to SEQ ID NO: 24053
  misc_feature 1..80: note = Artificially Synthesized Probe
  source 1..80: mol_type = other DNA

SEQ ID NO: 50585 - DNA, 80 bp, synthetic construct
  misc_feature 1..80: note = Artificially Synthesized Probe
  source 1..80: mol_type = other DNA
tttacgtaccaacctgagctaatactgcttcctatagtattctacctcatcaagttgctatgaagattaaatgagtaagt

SEQ ID NO: 50586 - DNA, 80 bp, synthetic construct
  misc_feature 1..80: note = Artificially Synthesized Probe
  source 1..80: mol_type = other DNA
tgctaaaaataaaaggagagggaaggtctagcatttactctagtgatgtccctttactttcgacctattccattgaaact

SEQ ID NO: 50587 - DNA, 80 bp, synthetic construct
  misc_feature 1..80: note = Artificially Synthesized Probe
  source 1..80: mol_type = other DNA
gctgtctctccaaaaaaaaaaaaaaaaaaaaatcagttggatgtggtggcacatgcatgtagtcctagctacctagagga

SEQ ID NO: 50588 - DNA, 80 bp, synthetic construct
  misc_feature 1..80: note = Artificially Synthesized Probe
  source 1..80: mol_type = other DNA
tttccctttgccattcctgtaccttggataccatcaggattaatgccaatcaacagatatttgtttacaaaccccagggt

SEQ ID NO: 50589 - DNA, 80 bp, synthetic construct; identical to SEQ ID NO: 24054
  misc_feature 1..80: note = Artificially Synthesized Probe
  source 1..80: mol_type = other DNA

SEQ ID NO: 50590 - DNA, 80 bp, synthetic construct
  misc_feature 1..80: note = Artificially Synthesized Probe
  source 1..80: mol_type = other DNA
caaattatccttgtttgtggataatatgatcttatatttggaaaaacctaaagactccaccaaaaaaacaattataactg

SEQ ID NO: 50591 - DNA, 80 bp, synthetic construct
  misc_feature 1..80: note = Artificially Synthesized Probe
  source 1..80: mol_type = other DNA
gaaagatttctacaatgaaaactataaaacactgatgcaagaaactggagagaacacatgaaaaaatggaaagaccggcc

SEQ ID NO: 50592 - DNA, 80 bp, synthetic construct
  misc_feature 1..80: note = Artificially Synthesized Probe
  source 1..80: mol_type = other DNA
atcctaaaatttatatggaactaccaaaggcccagaatagccaaagcaaaaagaacaaaactggaagaatcacattacct

SEQ ID NO: 50593 - DNA, 80 bp, synthetic construct; identical to SEQ ID NO: 24055
  misc_feature 1..80: note = Artificially Synthesized Probe
  source 1..80: mol_type = other DNA

SEQ ID NO: 50594 - DNA, 80 bp, synthetic construct
  misc_feature 1..80: note = Artificially Synthesized Probe
  source 1..80: mol_type = other DNA
tgttaacatataaatacatacaccttgaaatcataattttgaataaaaaggacaagatgctgaccattacatacatatag

SEQ ID NO: 50595 - DNA, 80 bp, synthetic construct
  misc_feature 1..80: note = Artificially Synthesized Probe
  source 1..80: mol_type = other DNA
tttggggacaagatgggacgatgggtgtccagcagaggaatgggactggtagtggaacctaaatttgtacttctatgtat

SEQ ID NO: 50596 - DNA, 80 bp, synthetic construct
  misc_feature 1..80: note = Artificially Synthesized Probe
  source 1..80: mol_type = other DNA
gcacgatattggctcactgcaacctctgcctcccaggttcaagcaattctcccgcctcagcctcccgagtagctgggatt

SEQ ID NO: 50597 - DNA, 80 bp, synthetic construct; identical to SEQ ID NO: 23960
  misc_feature 1..80: note = Artificially Synthesized Probe
  source 1..80: mol_type = other DNA

SEQ ID NO: 50598 - DNA, 80 bp, synthetic construct
  misc_feature 1..80: note = Artificially Synthesized Probe
  source 1..80: mol_type = other DNA
ccggccaagtgttttaaattttctaaataaaaagttaaaaaaccttatgaacaatattttctaaatgctaaaccaaagtc

SEQ ID NO: 50599 - DNA, 80 bp, synthetic construct; identical to SEQ ID NO: 24056
  misc_feature 1..80: note = Artificially Synthesized Probe
  source 1..80: mol_type = other DNA

SEQ ID NO: 50600 - DNA, 80 bp, synthetic construct
  misc_feature 1..80: note = Artificially Synthesized Probe
  source 1..80: mol_type = other DNA
catagatccttggagaacttgtacattttcccatctctagaggaaataatcttggctactttctcttttctgtccgattt

SEQ ID NO: 50601 - DNA, 80 bp, synthetic construct
  misc_feature 1..80: note = Artificially Synthesized Probe
  source 1..80: mol_type = other DNA
actagtcataagggaaatgcaaataaaacccaaaatgagataccatttcatacccattaggatggctataataaaaaaga

SEQ ID NO: 50602 - DNA, 80 bp, synthetic construct
  misc_feature 1..80: note = Artificially Synthesized Probe
  source 1..80: mol_type = other DNA
cagtgtagccacattcctgcccctttccagttagcccttcgcgttcggcttagtctgcggtcctcttgcattgcgactcc

SEQ ID NO: 50603 - DNA, 80 bp, synthetic construct
  misc_feature 1..80: note = Artificially Synthesized Probe
  source 1..80: mol_type = other DNA
ccttcctgggcatcgtggctgaggtgctggtgctggtcaccatcatcttcatctacgagaagcgccggaagcccgaggac

SEQ ID NO: 50604 - DNA, 80 bp, synthetic construct
  misc_feature 1..80: note = Artificially Synthesized Probe
  source 1..80: mol_type = other DNA
agaaagtgtgggatggagggtctagccccgggcagctgcggctcagtgggcagcgggaccccgggaggaggaggcggcac

SEQ ID NO: 50605 - DNA, 80 bp, synthetic construct
  misc_feature 1..80: note = Artificially Synthesized Probe
  source 1..80: mol_type = other DNA
tcctcgcggagcccttctgccccttgggctgcgtgtgccggggcgaggcctgtgtggggcctgtgatggcagctcctgga

SEQ ID NO: 50606 - DNA, 80 bp, synthetic construct
  misc_feature 1..80: note = Artificially Synthesized Probe
  source 1..80: mol_type = other DNA
gggtcactgagggcagggctggcagcacagatgcccctgctcggggcctgagtggggccagtgctgacaggctgtcctct

SEQ ID NO: 50607 - DNA, 80 bp, synthetic construct
  misc_feature 1..80: note = Artificially Synthesized Probe
  source 1..80: mol_type = other DNA
attcgggggtcctgggggccggggtgggcaggggtgacttggagagagtgacttgcgggggacaccctctcacccggccc

SEQ ID NO: 50608 - DNA, 80 bp, synthetic construct; identical to SEQ ID NO: 24182
  misc_feature 1..80: note = Artificially Synthesized Probe
  source 1..80: mol_type = other DNA

SEQ ID NO: 50609 - DNA, 80 bp, synthetic construct
  misc_feature 1..80: note = Artificially Synthesized Probe
  source 1..80: mol_type = other DNA
tttaaaaaagttgggttttctccattcaggattctgttccttaggtttttttccttctgaagtgtttcacgagagcccgg

SEQ ID NO: 50610 - DNA, 80 bp, synthetic construct
  misc_feature 1..80: note = Artificially Synthesized Probe
  source 1..80: mol_type = other DNA
tgaagccaatgctgtctggttgcgccatttttgtgcttttatgtttaattttatgagggccacgggtctgtgttcgactc

SEQ ID NO: 50611 - DNA, 80 bp, synthetic construct
  misc_feature 1..80: note = Artificially Synthesized Probe
  source 1..80: mol_type = other DNA
gcgcgtgcgcaggcggggcgaccggcgtccccggcgctcgccccgcccccgagatgacgccgtgcgtgcgcgcgcccggt

SEQ ID NO: 50612 - DNA, 80 bp, synthetic construct; identical to SEQ ID NO: 24183
  misc_feature 1..80: note = Artificially Synthesized Probe
  source 1..80: mol_type = other DNA

SEQ ID NO: 50613 - DNA, 80 bp, synthetic construct
  misc_feature 1..80: note = Artificially Synthesized Probe
  source 1..80: mol_type = other DNA
gtgaggagcgggtagggggcgggggtgcggtcctgcaggggccgggaatggaggccgcggtgccgacccgaagccgacgg

SEQ ID NO: 50614 - DNA, 80 bp, synthetic construct
  misc_feature 1..80: note = Artificially Synthesized Probe
  source 1..80: mol_type = other DNA
gctccggcctcgagcccggcctctgtgtgtgggcgtgaagctccctgcttggaggcgggagccagggggtcctggccagg

SEQ ID NO: 50615 - DNA, 80 bp, synthetic construct; identical to SEQ ID NO: 24172
  misc_feature 1..80: note = Artificially Synthesized Probe
  source 1..80: mol_type = other DNA

SEQ ID NO: 50616 - DNA, 80 bp, synthetic construct
  misc_feature 1..80: note = Artificially Synthesized Probe
  source 1..80: mol_type = other DNA
tctggaaaaggggcttttgtcctccaagagcacatggaggctctgagtgggtcagccctccggatcgggaagggattacc

SEQ ID NO: 50617 - DNA, 80 bp, synthetic construct
  misc_feature 1..80: note = Artificially Synthesized Probe
  source 1..80: mol_type = other DNA
cacccagaatgaggtggtctctgaacgcccctcctcctttacaggcgaggaaacagccctgtgggaagtcgaggttccaa

SEQ ID NO: 50618 - DNA, 80 bp, synthetic construct
  misc_feature 1..80: note = Artificially Synthesized Probe
  source 1..80: mol_type = other DNA
gatcctccgctcctgaggcccccacaatgaagcagtcggacgcgtctccccaagaaaggtaaccgccagcctctcctgaa

SEQ ID NO: 50619 - DNA, 80 bp, synthetic construct; identical to SEQ ID NO: 24173
  misc_feature 1..80: note = Artificially Synthesized Probe
  source 1..80: mol_type = other DNA

SEQ ID NO: 50620 - DNA, 80 bp, synthetic construct
  misc_feature 1..80: note = Artificially Synthesized Probe
  source 1..80: mol_type = other DNA
taaaaatacaaaaattagctgggcgtgttggcgcacgcctgtaatcccagccactcaggaagctgaggcaagagaatcgc

SEQ ID NO: 50621 - DNA, 80 bp, synthetic construct
  misc_feature 1..80: note = Artificially Synthesized Probe
  source 1..80: mol_type = other DNA
tcacgaggtcaagagatcaagaccatcgtggctaacacggtgaaaccccgtctctactaaaaatacaaaaaattagcctg

SEQ ID NO: 50622 - DNA, 80 bp, synthetic construct
  misc_feature 1..80: note = Artificially Synthesized Probe
  source 1..80: mol_type = other DNA
caaaaaaaaaatttattgtgaccgatgtgttgggaacaaggtgcagagctggagggtctggcctcctgaagggtcaagag

SEQ ID NO: 50623 - DNA, 80 bp, synthetic construct
  misc_feature 1..80: note = Artificially Synthesized Probe
  source 1..80: mol_type = other DNA
tcgaatgtctcctgggcaagggcctggccccagcactgcggccagctctctggggagacacagataggagcccatgggtg

SEQ ID NO: 50624 - DNA, 80 bp, synthetic construct; identical to SEQ ID NO: 24174
  misc_feature 1..80: note = Artificially Synthesized Probe
  source 1..80: mol_type = other DNA

SEQ ID NO: 50625 - DNA, 80 bp, synthetic construct
  misc_feature 1..80: note = Artificially Synthesized Probe
  source 1..80: mol_type = other DNA
caaggtctgggcaacacagccttggcccgtgtggggtggacactgctgtttgctctgtgaattcgtgactgtgtttgcct

SEQ ID NO: 50626 - DNA, 80 bp, synthetic construct
  misc_feature 1..80: note = Artificially Synthesized Probe
  source 1..80: mol_type = other DNA
cacccccgagcctcagatgagaggagtgggagtgcctggctgcggccggtgggggtgggtgggggaggtgcccgaggctg

SEQ ID NO: 50627 - DNA, 80 bp, synthetic construct; identical to SEQ ID NO: 24175
  misc_feature 1..80: note = Artificially Synthesized Probe
  source 1..80: mol_type = other DNA

SEQ ID NO: 50628 - DNA, 80 bp, synthetic construct
  misc_feature 1..80: note = Artificially Synthesized Probe
  source 1..80: mol_type = other DNA
cgcccccccacccccagtgacacgtcaatacacagacaccagcatcatcagcatccggagggacacagggttgttccatc

SEQ ID NO: 50629 - DNA, 80 bp, synthetic construct
  misc_feature 1..80: note = Artificially Synthesized Probe
  source 1..80: mol_type = other DNA
cttctgttcctctgtcctttccctgttggctggggttggacgcccacaatctaagctgatcccggttggctaaaacttaa

SEQ ID NO: 50630 - DNA, 80 bp, synthetic construct
  misc_feature 1..80: note = Artificially Synthesized Probe
  source 1..80: mol_type = other DNA
cctcctcactttcctgtgtgccctgccctgcctggaggtggggtgaggtgagtcaggggccagccctctcctagcacccc

SEQ ID NO: 50631 - DNA, 80 bp, synthetic construct
  misc_feature 1..80: note = Artificially Synthesized Probe
  source 1..80: mol_type = other DNA
tgttgcagtctgggaaatcttaactcccaagaaatgtaggttaccaggaggagatccctttgtgaaaatggcactgccag

SEQ ID NO: 50632 - DNA, 80 bp, synthetic construct
  misc_feature 1..80: note = Artificially Synthesized Probe
  source 1..80: mol_type = other DNA
tcccagctacttgggaggctgaggcaggagaattgcttgaacccgggaggcagaggttgcggtgagctgagattacacca

SEQ ID NO: 50633 - DNA, 80 bp, synthetic construct; identical to SEQ ID NO: 24176
  misc_feature 1..80: note = Artificially Synthesized Probe
  source 1..80: mol_type = other DNA

SEQ ID NO: 50634 - DNA, 80 bp, synthetic construct
  misc_feature 1..80: note = Artificially Synthesized Probe
  source 1..80: mol_type = other DNA
aggcacagtgtgaggttctgtgtggattctgctgtgctccttggcagctctgggggccttcccttgcatttcgaaggaag

SEQ ID NO: 50635 - DNA, 80 bp, synthetic construct
  misc_feature 1..80: note = Artificially Synthesized Probe
  source 1..80: mol_type = other DNA
cttctggacagaggccgcctgcccctttgggctttggggtttgtttttctcagcagctcacccgggtctctggggtcagg

SEQ ID NO: 50636 - DNA, 80 bp, synthetic construct; identical to SEQ ID NO: 24177
  misc_feature 1..80: note = Artificially Synthesized Probe
  source 1..80: mol_type = other DNA

SEQ ID NO: 50637 - DNA, 80 bp, synthetic construct
  misc_feature 1..80: note = Artificially Synthesized Probe
  source 1..80: mol_type = other DNA
gcagaggtgggtggggggcagtgtggagctgcactgcgaggccgtgggcagcccggtgcccgagatccagtggtggtttg

SEQ ID NO: 50638 - DNA, 80 bp, synthetic construct
  misc_feature 1..80: note = Artificially Synthesized Probe
  source 1..80: mol_type = other DNA
gggccagcaacgacccggatcgcaaccacctgacccgggcgcccagggtcaagtgggtccgcgcccaggcagtcgtgcta

SEQ ID NO: 50639 - DNA, 80 bp, synthetic construct
  misc_feature 1..80: note = Artificially Synthesized Probe
  source 1..80: mol_type = other DNA
aggggcccggacctgaagggggtgggctcgccgcctgaccaccagcgctgggcggcctggctcggggcaggcagggctct

SEQ ID NO: 50640 - DNA, 80 bp, synthetic construct; identical to SEQ ID NO: 24171
  misc_feature 1..80: note = Artificially Synthesized Probe
  source 1..80: mol_type = other DNA

SEQ ID NO: 50641 - DNA, 80 bp, synthetic construct; identical to SEQ ID NO: 24178
  misc_feature 1..80: note = Artificially Synthesized Probe
  source 1..80: mol_type = other DNA

SEQ ID NO: 50642 - DNA, 80 bp, synthetic construct
  misc_feature 1..80: note = Artificially Synthesized Probe
  source 1..80: mol_type = other DNA
ggtgctgtggctattttttttttttttcctggagatggagtcttgctgttcccaggtggagtgtggtggcacaatctcgg

SEQ ID NO: 50643 - DNA, 80 bp, synthetic construct
  misc_feature 1..80: note = Artificially Synthesized Probe
  source 1..80: mol_type = other DNA
gatctcccgacctcgagatccacccgccttggcctcccaaagtgctgggattacaggcgtgagcctccgcgcccggccac

SEQ ID NO: 50644 - DNA, 80 bp, synthetic construct
  misc_feature 1..80: note = Artificially Synthesized Probe
  source 1..80: mol_type = other DNA
gcaggaacatcgccaggcggggcctctgggttcccagcgccttagcccagggcccgccagctgccagcgaagggtgcctt

SEQ ID NO: 50645 - DNA, 80 bp, synthetic construct
  misc_feature 1..80: note = Artificially Synthesized Probe
  source 1..80: mol_type = other DNA
gggaggagccgcaggttcctgggggtcaggcaggcagcgcgggccgtgctcctccactctgctgaccgcgtctcgccggg

SEQ ID NO: 50646 - DNA, 80 bp, synthetic construct; identical to SEQ ID NO: 24179
  misc_feature 1..80: note = Artificially Synthesized Probe
  source 1..80: mol_type = other DNA

SEQ ID NO: 50647 - DNA, 80 bp, synthetic construct
  misc_feature 1..80: note = Artificially Synthesized Probe
  source 1..80: mol_type = other DNA
tccccattgcttgctcctcactaggtcccgggcacgaaagggcgccacactgccaggtcccgggcacgtgtgcgggcctc

SEQ ID NO: 50648 - DNA, 80 bp, synthetic construct
  misc_feature 1..80: note = Artificially Synthesized Probe
  source 1..80: mol_type = other DNA
ggtgtggggtgcagagcagggaccagaggtgtggggttcatcagtcggggagaagggggtctgttggttctctcacctgt

SEQ ID NO: 50649 - DNA, 80 bp, synthetic construct; identical to SEQ ID NO: 24180
  misc_feature 1..80: note = Artificially Synthesized Probe
  source 1..80: mol_type = other DNA

SEQ ID NO: 50650 - DNA, 80 bp, synthetic construct
  misc_feature 1..80: note = Artificially Synthesized Probe
  source 1..80: mol_type = other DNA
gcgggaggccggggatgggggcgggcctgcggttccaggctcctctctctcaccctcctgtcagggcctcccagagtgaa

SEQ ID NO: 50651 - DNA, 80 bp, synthetic construct
  misc_feature 1..80: note = Artificially Synthesized Probe
  source 1..80: mol_type = other DNA
gacccagccctcaggactgggtgagaggcctagactgggggtcccggacccagccctcaggactgggtgaggggcctaga

SEQ ID NO: 50652 - DNA, 80 bp, synthetic construct
  misc_feature 1..80: note = Artificially Synthesized Probe
  source 1..80: mol_type = other DNA
gtttaactcagataaaatctgggtaacacactttcaacgcttcaaccccctcgggcgcaccgctctgcgctcattgcaac

SEQ ID NO: 50653 - DNA, 80 bp, synthetic construct
  misc_feature 1..80: note = Artificially Synthesized Probe
  source 1..80: mol_type = other DNA
gacccagccctctggactgcagccctccagactgggtgaggggcctagactgggggtcccggacccagccctcaggactg

SEQ ID NO: 50654 - DNA, 80 bp, synthetic construct; identical to SEQ ID NO: 24181
  misc_feature 1..80: note = Artificially Synthesized Probe
  source 1..80: mol_type = other DNA

SEQ ID NO: 50655 - DNA, 80 bp, synthetic construct
  misc_feature 1..80: note = Artificially Synthesized Probe
  source 1..80: mol_type = other DNA
tccttggcccctcagcctgcgcctgagaggtaagagagggcggggggaaggaagaggaggcgggatccgggcgctgcgtt

SEQ ID NO: 50656 - DNA, 80 bp, synthetic construct
  misc_feature 1..80: note = Artificially Synthesized Probe
  source 1..80: mol_type = other DNA
acttacgtaatgtgttagtgggtagagggagctacaaagacttttcccagtaatctttcaatcttactggttagtcgaaa

SEQ ID NO: 50657 - DNA, 80 bp, synthetic construct
  misc_feature 1..80: note = Artificially Synthesized Probe
  source 1..80: mol_type = other DNA
tgagataatcttgtgtttataattgttgagtgaactagactggagttaagaatccttccaggccagactctgtggctcat

SEQ ID NO: 50658 - DNA, 80 bp, synthetic construct
  misc_feature 1..80: note = Artificially Synthesized Probe
  source 1..80: mol_type = other DNA
agcctgaggcaggaggattacttgagcccaggagttggaggttacaaggagctatgatcatgtcattacactccagcctg

SEQ ID NO: 50659 - DNA, 80 bp, synthetic construct
  misc_feature 1..80: note = Artificially Synthesized Probe
  source 1..80: mol_type = other DNA
ttgtgggaaataacttggtgtaatatagtagggaattctggatggtcctgaaaaccaggcctagaacttcatatttgatt

SEQ ID NO: 50660 - DNA, 80 bp, synthetic construct
  misc_feature 1..80: note = Artificially Synthesized Probe
  source 1..80: mol_type = other DNA
atggcatgattacaccccaaactcctgggcttaagcgatcctcccgccttagcctcctgagtagctaggacgacaagcat

SEQ ID NO: 50661 - DNA, 80 bp, synthetic construct; identical to SEQ ID NO: 24292
  misc_feature 1..80: note = Artificially Synthesized Probe
  source 1..80: mol_type = other DNA

SEQ ID NO: 50662 - DNA, 80 bp, synthetic construct
  misc_feature 1..80: note = Artificially Synthesized Probe
  source 1..80: mol_type = other DNA
gagaaggtatcattttagctgactcttgaatcaggatttttagtagataaagagattgggaaagaagcctgttacatgtt

SEQ ID NO: 50663 - DNA, 80 bp, synthetic construct
  misc_feature 1..80: note = Artificially Synthesized Probe
  source 1..80: mol_type = other DNA
tttttcattttggttgctgaataatacctgttgattggatactcctagaatcataatgtaatacagcagatttcttctct

SEQ ID NO: 50664 - DNA, 80 bp, synthetic construct
  misc_feature 1..80: note = Artificially Synthesized Probe
  source 1..80: mol_type = other DNA
gccaaaaagctataaaaggcttttgaacaggaaagtaacctttttagaatgatgattctaatggccgggcatggtggctt

SEQ ID NO: 50665 - DNA, 80 bp, synthetic construct
  misc_feature 1..80: note = Artificially Synthesized Probe
  source 1..80: mol_type = other DNA
gcgcatgcctgtaatcccagctactcgggaggctgaggcaggagaatcacttgaacccaggaggcagaagttgtaatgag

SEQ ID NO: 50666 - DNA, 80 bp, synthetic construct; identical to SEQ ID NO: 24293
  misc_feature 1..80: note = Artificially Synthesized Probe
  source 1..80: mol_type = other DNA

SEQ ID NO: 50667 - DNA, 80 bp, synthetic construct
  misc_feature 1..80: note = Artificially Synthesized Probe
  source 1..80: mol_type = other DNA
ctgacctagaaatgagtggagatggtaaaagagtgctttaaatttagatgtgttgattttgagacagtttaagcttatca

SEQ ID NO: 50668 - DNA, 80 bp, synthetic construct
  misc_feature 1..80: note = Artificially Synthesized Probe
  source 1..80: mol_type = other DNA
ggtgttacagcccaaatgcatctagtttggagttaaattcaaagttgacagggagactttcattctgccctttcaattct

SEQ ID NO: 50669 - DNA, 80 bp, synthetic construct; identical to SEQ ID NO: 24294
  misc_feature 1..80: note = Artificially Synthesized Probe
  source 1..80: mol_type = other DNA

SEQ ID NO: 50670 - DNA, 80 bp, synthetic construct
  misc_feature 1..80: note = Artificially Synthesized Probe
  source 1..80: mol_type = other DNA
tgatgtgagacagtaaaatgtctatgtgatgagatgaagtgaggtaaatgacctaggcattgtgacacagcattaggtta

SEQ ID NO: 50671 - DNA, 80 bp, synthetic construct
  misc_feature 1..80: note = Artificially Synthesized Probe
  source 1..80: mol_type = other DNA
ctgggcaggacagagctaccagaaaggtgcacaattgaaaactatttctaaaaatttccattcaatattttaggacctca

SEQ ID NO: 50672 - DNA, 80 bp, synthetic construct
  misc_feature 1..80: note = Artificially Synthesized Probe
  source 1..80: mol_type = other DNA
taatgaaactttccatctgagtattgggaatctgttgttctgagcagtcaagtttgcttagggttggtttaaagttaagc

SEQ ID NO: 50673 - DNA, 80 bp, synthetic construct
  misc_feature 1..80: note = Artificially Synthesized Probe
  source 1..80: mol_type = other DNA
caaagaatctccttacaccctttcacatagatttacctaatgttaacatgttaccatatttgtattatatctgcttataa

SEQ ID NO: 50674 - DNA, 80 bp, synthetic construct
  misc_feature 1..80: note = Artificially Synthesized Probe
  source 1..80: mol_type = other DNA
taacagagtttacatcaaggtcatacataataacccaacaactcctttgttaacagttttaacagctttccatctcttcg

SEQ ID NO: 50675 - DNA, 80 bp, synthetic construct; identical to SEQ ID NO: 24295
  misc_feature 1..80: note = Artificially Synthesized Probe
  source 1..80: mol_type = other DNA

SEQ ID NO: 50676 - DNA, 80 bp, synthetic construct
  misc_feature 1..80: note = Artificially Synthesized Probe
  source 1..80: mol_type = other DNA
ttattgagccaacaaatcagtgattttcagtggggagagggttgactattaaggagaatttcaagagaattttgggagtg

SEQ ID NO: 50677 - DNA, 80 bp, synthetic construct
  misc_feature 1..80: note = Artificially Synthesized Probe
  source 1..80: mol_type = other DNA
tacagaacttactaaaaagtttccaattgcctcaacagtgtgtgctatacctctttagtttcctttaatctgaaacaatt

SEQ ID NO: 50678 - DNA, 80 bp, synthetic construct
  misc_feature 1..80: note = Artificially Synthesized Probe
  source 1..80: mol_type = other DNA
ttgacaaggatacctcacaagtgatgtgctgttttcagtacatcatattaaaaggcacataatcttaaggtggcatctgc

SEQ ID NO: 50679 - DNA, 80 bp, synthetic construct; identical to SEQ ID NO: 24296
  misc_feature 1..80: note = Artificially Synthesized Probe
  source 1..80: mol_type = other DNA

SEQ ID NO: 50680 - DNA, 80 bp, synthetic construct
  misc_feature 1..80: note = Artificially Synthesized Probe
  source 1..80: mol_type = other DNA
aaaattatgcacatagcttattgggaatcctcatagataaagatgcaaggaataactgtgttgctgagctttcctgggtg

SEQ ID NO: 50681 - DNA, 80 bp, synthetic construct
  misc_feature 1..80: note = Artificially Synthesized Probe
  source 1..80: mol_type = other DNA
tactctttagtattaggagggttcctaatccttgttcctgatatcatgactgtttaatgtccctacctctatttttttgt

SEQ ID NO: 50682 - DNA, 80 bp, synthetic construct; identical to SEQ ID NO: 24297
  misc_feature 1..80: note = Artificially Synthesized Probe
  source 1..80: mol_type = other DNA

SEQ ID NO: 50683 - DNA, 80 bp, synthetic construct
  misc_feature 1..80: note = Artificially Synthesized Probe
  source 1..80: mol_type = other DNA
tactcaggctgttaaggttgagatgactatttttcactttataattcagtatagaggagtttgccagcaattgtgtatca

SEQ ID NO: 50684 - DNA, 80 bp, synthetic construct
  misc_feature 1..80: note = Artificially Synthesized Probe
  source 1..80: mol_type = other DNA
tctgatctttttatttatttatttaaaggaggaatttcatgacctgaaagagagttacttgcaaattctaagtttataat

SEQ ID NO: 50685 - DNA, 80 bp, synthetic construct
  misc_feature 1..80: note = Artificially Synthesized Probe
  source 1..80: mol_type = other DNA
ttgacctttccctttctttgtttgatactcttacatagcatgtattgccagtcgcctcatttgtcaagctttgtagtcat

SEQ ID NO: 50686 - DNA, 80 bp, synthetic construct
  misc_feature 1..80: note = Artificially Synthesized Probe
  source 1..80: mol_type = other DNA
gaagtactacaccaaactgttaatgtggttatttgtgagttgctgaattatgggtaatatttcaaaatatttaatggtat

SEQ ID NO: 50687 - DNA, 80 bp, synthetic construct; identical to SEQ ID NO: 24298
  misc_feature 1..80: note = Artificially Synthesized Probe
  source 1..80: mol_type = other DNA

SEQ ID NO: 50688 - DNA, 80 bp, synthetic construct
  misc_feature 1..80: note = Artificially Synthesized Probe
  source 1..80: mol_type = other DNA
aaaagtgaaatttacatgtaggtttagaacacagtaatgattgtatattaataatttcatgcttgtatgaaaattttcag

SEQ ID NO: 50689 - DNA, 80 bp, synthetic construct
  misc_feature 1..80: note = Artificially Synthesized Probe
  source 1..80: mol_type = other DNA
agtggtgtgatctcggctcactgcaacctcggcctcctgggttcaggcgattctcctgcctcagactctcgagtagctgg

SEQ ID NO: 50690 - DNA, 80 bp, synthetic construct
  misc_feature 1..80: note = Artificially Synthesized Probe
  source 1..80: mol_type = other DNA
agcacaactgcagggttttaaatattaatgttattaatgttactaatgttgttgctgaaaatggaactcaaataatatgt

SEQ ID NO: 50691 - DNA, 80 bp, synthetic construct
  misc_feature 1..80: note = Artificially Synthesized Probe
  source 1..80: mol_type = other DNA
ttgaggtgacagtgccaaggaatggactctaatcctaaactactgagtaaatgtttttttaagtcctatgctacttttat

SEQ ID NO: 50692 - DNA, 80 bp, synthetic construct; identical to SEQ ID NO: 24299
  misc_feature 1..80: note = Artificially Synthesized Probe
  source 1..80: mol_type = other DNA

SEQ ID NO: 50693 - DNA, 80 bp, synthetic construct
  misc_feature 1..80: note = Artificially Synthesized Probe
  source 1..80: mol_type = other DNA
ttactcccaaaggataagattgaagataatgagaactgaattaaagcttactttctttcacagaattcctcagagagaga

SEQ ID NO: 50694 - DNA, 80 bp, synthetic construct
  misc_feature 1..80: note = Artificially Synthesized Probe
  source 1..80: mol_type = other DNA
tattaagagtactcggacgttggcctggccatagccatcactttcaatcaggtgacatggttttcccagttatttaaaaa

SEQ ID NO: 50695 - DNA, 80 bp, synthetic construct; identical to SEQ ID NO: 24300
  misc_feature 1..80: note = Artificially Synthesized Probe
  source 1..80: mol_type = other DNA

SEQ ID NO: 50696 - DNA, 80 bp, synthetic construct
  misc_feature 1..80: note = Artificially Synthesized Probe
  source 1..80: mol_type = other DNA
cattgcactccagcctgggcaacaagagcaaaactccgtctcaaaaaaaaaaaaaaaaaatagctcaccactgtgcccca

SEQ ID NO: 50697 - DNA, 80 bp, synthetic construct
  misc_feature 1..80: note = Artificially Synthesized Probe
  source 1..80: mol_type = other DNA
catctccctgctccaaaaatctatttaatatattgtcctcagatagaggacatatcagatactaaactgatgagaacaga

SEQ ID NO: 50698 - DNA, 80 bp, synthetic construct
  misc_feature 1..80: note = Artificially Synthesized Probe
  source 1..80: mol_type = other DNA
ttatttttgagacaaagcctcactctgtcgcccaggctggagtgcagtggcgtgatctcggctcactgcaacctctgcct

SEQ ID NO: 50699 - DNA, 80 bp, synthetic construct
  misc_feature 1..80: note = Artificially Synthesized Probe
  source 1..80: mol_type = other DNA
tcaccacaacctccacctccagggttcaagcgactcttctgcctcagcctcctgcgtaactgggactacaggtgcccact

SEQ ID NO: 50700 - DNA, 80 bp, synthetic construct
  misc_feature 1..80: note = Artificially Synthesized Probe
  source 1..80: mol_type = other DNA
ttagtagagacagggtttcaccatgttggccaggctgttctcagacccctgacctcaggtgatctgcccagcttggcctc

SEQ ID NO: 50701 - DNA, 80 bp, synthetic construct; identical to SEQ ID NO: 24301
  misc_feature 1..80: note = Artificially Synthesized Probe
  source 1..80: mol_type = other DNA

SEQ ID NO: 50702 - DNA, 80 bp, synthetic construct
  misc_feature 1..80: note = Artificially Synthesized Probe
  source 1..80: mol_type = other DNA
gacacattcattttttaatttactatatgttaaatgttttttggatgaacacttcttttttttataaaaataattgttta

SEQ ID NO: 50703 - DNA, 80 bp, synthetic construct
  misc_feature 1..80: note = Artificially Synthesized Probe
  source 1..80: mol_type = other DNA
aattgggaagtaggaacactctgcccactatacagaaacaactgtcggaaaacaatgacacaacaaaagttttggcaact

SEQ ID NO: 50704 - DNA, 80 bp, synthetic construct
  misc_feature 1..80: note = Artificially Synthesized Probe
  source 1..80: mol_type = other DNA
tgcctattaagtccagcacatacagatggaccagcaggtcacacatgggactaatctgattcattttaaaaataaatgca

SEQ ID NO: 50705 - DNA, 80 bp, synthetic construct; identical to SEQ ID NO: 24302
  misc_feature 1..80: note = Artificially Synthesized Probe
  source 1..80: mol_type = other DNA

SEQ ID NO: 50706 - DNA, 80 bp, synthetic construct
  misc_feature 1..80: note = Artificially Synthesized Probe
  source 1..80: mol_type = other DNA
agagtcttttagcttctgggtgttttagcagccccatgaatgcagatttgtaaatttattgcagtgccatctggtttttt

SEQ ID NO: 50707 - DNA, 80 bp, synthetic construct
  misc_feature 1..80: note = Artificially Synthesized Probe
  source 1..80: mol_type = other DNA
gggcagctgtccaggactgccctgaacttgattaccccattgctgattttttttaaggtaggacatagtatataagctgt

SEQ ID NO: 50708 - DNA, 80 bp, synthetic construct; identical to SEQ ID NO: 24303
  misc_feature 1..80: note = Artificially Synthesized Probe
  source 1..80: mol_type = other DNA

SEQ ID NO: 50709 - DNA, 80 bp, synthetic construct
  misc_feature 1..80: note = Artificially Synthesized Probe
  source 1..80: mol_type = other DNA
ccacctcccgggttcaagtgattctcctgccttagcttcctgagtagctgggattacaggcatgcaccaccacacccagc

SEQ ID NO: 50710 - DNA, 80 bp, synthetic construct
  misc_feature 1..80: note = Artificially Synthesized Probe
  source 1..80: mol_type = other DNA
ttgataggacataactactgcatgttaatttggagagctatttaaatattggaggagcaaacaactttataccaaaaatt

SEQ ID NO: 50711 - DNA, 80 bp, synthetic construct
  misc_feature 1..80: note = Artificially Synthesized Probe
  source 1..80: mol_type = other DNA
aatgatacgaattttatgccagaccctttcacagaatagagaaggaaagaacactccttgacttaaaaatccaccataac

SEQ ID NO: 50712 - DNA, 80 bp, synthetic construct
  misc_feature 1..80: note = Artificially Synthesized Probe
  source 1..80: mol_type = other DNA
ggaagtagagcagtgtatccttgtaaagaaagttaattttcttagtttcagaataatctcatttcttggcattaaatatg

SEQ ID NO: 50713 - DNA, 80 bp, synthetic construct
  misc_feature 1..80: note = Artificially Synthesized Probe
  source 1..80: mol_type = other DNA
atcattttctgggaaaggaaaggccgtggagatgagagttgcaaagacccataagaagtgatgagatcagttgagaaatt

SEQ ID NO: 50714 - DNA, 80 bp, synthetic construct; identical to SEQ ID NO: 24304
  misc_feature 1..80: note = Artificially Synthesized Probe
  source 1..80: mol_type = other DNA

SEQ ID NO: 50715 - DNA, 80 bp, synthetic construct
  misc_feature 1..80: note = Artificially Synthesized Probe
  source 1..80: mol_type = other DNA
tatttctttaagtgtttaggtttttctgtattctttctcttgtgtagctggaaccctggggatgcaaagccatgagagag

SEQ ID NO: 50716 - DNA, 80 bp, synthetic construct
  misc_feature 1..80: note = Artificially Synthesized Probe
  source 1..80: mol_type = other DNA
agggagcagtaattcaagcttccatcctcttcaaggatactttgcagtctttaaaggtgctgacccactgagttagactg

SEQ ID NO: 50717 - DNA, 80 bp, synthetic construct
  misc_feature 1..80: note = Artificially Synthesized Probe
  source 1..80: mol_type = other DNA
taagtcttttagaaggaataagtagctgttttccttttctaccatattcccctcccctgaaaaaattcctgcgttctaaa

SEQ ID NO: 50718 - DNA, 80 bp, synthetic construct; identical to SEQ ID NO: 24305
  misc_feature 1..80: note = Artificially Synthesized Probe
  source 1..80: mol_type = other DNA

SEQ ID NO: 50719 - DNA, 80 bp, synthetic construct
  misc_feature 1..80: note = Artificially Synthesized Probe
  source 1..80: mol_type = other DNA
gattgatgagggaaaaaggtttaatgaagtccctgatatcaggcaggcagggttttttttttttttttctctctatttgt

SEQ ID NO: 50720 - DNA, 80 bp, synthetic construct
  misc_feature 1..80: note = Artificially Synthesized Probe
  source 1..80: mol_type = other DNA
cagtaggcaaggtgtaattgcaatatgacaaactatgcttaagggactgtcttgtaaatactttcgtttggggtttgcat

SEQ ID NO: 50721 - DNA, 80 bp, synthetic construct; identical to SEQ ID NO: 24195
  misc_feature 1..80: note = Artificially Synthesized Probe
  source 1..80: mol_type = other DNA

SEQ ID NO: 50722 - DNA, 80 bp, synthetic construct
  misc_feature 1..80: note = Artificially Synthesized Probe
  source 1..80: mol_type = other DNA
ttttgcagcttgacttaattttagtcatctgttttaattacctatttataaaaatgcctttgcatttgtagacattattt

SEQ ID NO: 50723 - DNA, 80 bp, synthetic construct
  misc_feature 1..80: note = Artificially Synthesized Probe
  source 1..80: mol_type = other DNA
cacttctgttgaatcctttagagtctaataacttttttaagaaaacacggtttggcaatttgtgcctagctacaaaaacc

SEQ ID NO: 50724 - DNA, 80 bp, synthetic construct; identical to SEQ ID NO: 24306
  misc_feature 1..80: note = Artificially Synthesized Probe
  source 1..80: mol_type = other DNA

SEQ ID NO: 50725 - DNA, 80 bp, synthetic construct
  misc_feature 1..80: note = Artificially Synthesized Probe
  source 1..80: mol_type = other DNA
atgatagcagatgcagctttgcatctattgaacaagattcagtagcatctgtgtggcatttttaaaacccacttccagct

SEQ ID NO: 50726 - DNA, 80 bp, synthetic construct
  misc_feature 1..80: note = Artificially Synthesized Probe
  source 1..80: mol_type = other DNA
ctgaacagatttctaagcagctttttgcaaggttaaaacaatgcagcccagtaacaagtttgtgtaattttaaatatata

SEQ ID NO: 50727 - DNA, 80 bp, synthetic construct; identical to SEQ ID NO: 24307
  misc_feature 1..80: note = Artificially Synthesized Probe
  source 1..80: mol_type = other DNA

SEQ ID NO: 50728 - DNA, 80 bp, synthetic construct
  misc_feature 1..80: note = Artificially Synthesized Probe
  source 1..80: mol_type = other DNA
atttcaaactggagagagtcttacaggaaaatattgaatggaaaatattgaatgttttagccttttaattgcagagtggt

SEQ ID NO: 50729 - DNA, 80 bp, synthetic construct
  misc_feature 1..80: note = Artificially Synthesized Probe
  source 1..80: mol_type = other DNA
ctatctaatggtcccctaaatatgttattacatattcattcatgaagggaaaagagggtaattttgaaggaaaataaatt

SEQ ID NO: 50730 - DNA, 80 bp, synthetic construct
  misc_feature 1..80: note = Artificially Synthesized Probe
  source 1..80: mol_type = other DNA
tctaaccacctgtgtaaccaccaccctaattaaactatagaatattttcataacctaggaatgtctcttgttctcctttc

SEQ ID NO: 50731 - DNA, 80 bp, synthetic construct; identical to SEQ ID NO: 24308
  misc_feature 1..80: note = Artificially Synthesized Probe
  source 1..80: mol_type = other DNA

SEQ ID NO: 50732 - DNA, 80 bp, synthetic construct
  misc_feature 1..80: note = Artificially Synthesized Probe
  source 1..80: mol_type = other DNA
gctaatttttgtgatttttattagagacagggtttcaccatgttggccaggctggtcttatactcctgaacttaagtgat

SEQ ID NO: 50733 - DNA, 80 bp, synthetic construct
  misc_feature 1..80: note = Artificially Synthesized Probe
  source 1..80: mol_type = other DNA
cctttttattattgagttgtagactcaactgtattgaattctggataccattcatttgtcagatatatgtactctgatta

SEQ ID NO: 50734 - DNA, 80 bp, synthetic construct
  misc_feature 1..80: note = Artificially Synthesized Probe
  source 1..80: mol_type = other DNA
tctcggctcactgcaacctctgcctcccaggttcaagcaattcttgtgcctcagcctcctgagtagatgggattacaggc

SEQ ID NO: 50735 - DNA, 80 bp, synthetic construct
  misc_feature 1..80: note = Artificially Synthesized Probe
  source 1..80: mol_type = other DNA
cttttagaagggatacttcctttggtcctacctaagaaatctttgtctaccccatgattgtgaagatattcttctaagtt

SEQ ID NO: 50736 - DNA, 80 bp, synthetic construct; identical to SEQ ID NO: 24309
  misc_feature 1..80: note = Artificially Synthesized Probe
  source 1..80: mol_type = other DNA

SEQ ID NO: 50737 - DNA, 80 bp, synthetic construct
  misc_feature 1..80: note = Artificially Synthesized Probe
  source 1..80: mol_type = other DNA
gaaatcaggtagtgtgagttctctagatttgttgttttattttttgttattccagatagttcacatttctatataaattt

SEQ ID NO: 50738 - DNA, 80 bp, synthetic construct
  misc_feature 1..80: note = Artificially Synthesized Probe
  source 1..80: mol_type = other DNA
cagcctgggcaacagaaagagaaactatctccaaaaatagacagacagatagataactactttttttttcatctgagata

SEQ ID NO: 50739 - DNA, 80 bp, synthetic construct
  misc_feature 1..80: note = Artificially Synthesized Probe
  source 1..80: mol_type = other DNA
ttgggaaatcttcctcccatcctcctctgttttctaaaagcacttgtgtataatcctggtggtgtttcttccttcagatt

SEQ ID NO: 50740 - DNA, 80 bp, synthetic construct
  misc_feature 1..80: note = Artificially Synthesized Probe
  source 1..80: mol_type = other DNA
gagctgttcagattttctgtttcatgtgtcaattttggtaatttgtgtttttgaagaaatgtttcctgtttattcaacag

SEQ ID NO: 50741 - DNA, 80 bp, synthetic construct; identical to SEQ ID NO: 24310
  misc_feature 1..80: note = Artificially Synthesized Probe
  source 1..80: mol_type = other DNA

SEQ ID NO: 50742 - DNA, 80 bp, synthetic construct
  misc_feature 1..80: note = Artificially Synthesized Probe
  source 1..80: mol_type = other DNA
actccaattctaattcaaccccacagggtttgttctagatttctttctttccatatttcatttttctcccttccttcctt

SEQ ID NO: 50743 - DNA, 80 bp, synthetic construct
  misc_feature 1..80: note = Artificially Synthesized Probe
  source 1..80: mol_type = other DNA
gggtctctccctatgttgtccaggctggtcttgaattccagagctcaagcaatcctcctgcattggcttcccaaaatgtt

SEQ ID NO: 50744 - DNA, 80 bp, synthetic construct
  misc_feature 1..80: note = Artificially Synthesized Probe
  source 1..80: mol_type = other DNA
aaaatgatcatggactacattgtagcaagtgtactggccagtgggctgacagtggctgcttaaacgactccttactctga

SEQ ID NO: 50745 - DNA, 80 bp, synthetic construct
  misc_feature 1..80: note = Artificially Synthesized Probe
  source 1..80: mol_type = other DNA
tgaggtcaggagttcgagaccagcctggccaatatggtgaaaccctgtctctactaaaaatacaaaaattatctgggcat

SEQ ID NO: 50746 - DNA, 80 bp, synthetic construct; identical to SEQ ID NO: 24311
  misc_feature 1..80: note = Artificially Synthesized Probe
  source 1..80: mol_type = other DNA

SEQ ID NO: 50747 - DNA, 80 bp, synthetic construct
  misc_feature 1..80: note = Artificially Synthesized Probe
  source 1..80: mol_type = other DNA
agccacgcatatattctagataatccagaattgtcccacacagtgactaagaccgatcttttttttttcttttcttaatc

SEQ ID NO: 50748 - DNA, 80 bp, synthetic construct
  misc_feature 1..80: note = Artificially Synthesized Probe
  source 1..80: mol_type = other DNA
tctgttgctcaggctgaagtgcagtggcatgaacatggctcactgcagccttgaccttctgggctcaagcaaccgcccac

SEQ ID NO: 50749 - DNA, 80 bp, synthetic construct; identical to SEQ ID NO: 24312
  misc_feature 1..80: note = Artificially Synthesized Probe
  source 1..80: mol_type = other DNA

SEQ ID NO: 50750 - DNA, 80 bp, synthetic construct
  misc_feature 1..80: note = Artificially Synthesized Probe
  source 1..80: mol_type = other DNA
acgttgcccaggctggtcctgaactcctgagctcaagctatcctcctgcctcggcttcccaaagtgctgggattacaggc

SEQ ID NO: 50751 - DNA, 80 bp, synthetic construct
  misc_feature 1..80: note = Artificially Synthesized Probe
  source 1..80: mol_type = other DNA
catatctattatagcttctttagagctataatatgtgctaatttctacaactaggtcttctcagggttggtttttggttc

SEQ ID NO: 50752 - DNA, 80 bp, synthetic construct
  misc_feature 1..80: note = Artificially Synthesized Probe
  source 1..80: mol_type = other DNA
cttggttttgtatttgttaaggtcaggtgtattttggttttgcccttagtcctaagacatactcttgaatctaaactcat

SEQ ID NO: 50753 - DNA, 80 bp, synthetic construct
  misc_feature 1..80: note = Artificially Synthesized Probe
  source 1..80: mol_type = other DNA
caatttacaccataaaacccctttatgtatccaaggttttcataggaaatttaggactgtatgatcctaaattgtgctgg

SEQ ID NO: 50754 - DNA, 80 bp, synthetic construct
  misc_feature 1..80: note = Artificially Synthesized Probe
  source 1..80: mol_type = other DNA
aatctccccttcatgtacgtagtttgggtgttagccatagatttgaggggaatttatatgtaattttttagtcttcctcc

SEQ ID NO: 50755 - DNA, 80 bp, synthetic construct; identical to SEQ ID NO: 24313
  misc_feature 1..80: note = Artificially Synthesized Probe
  source 1..80: mol_type = other DNA

SEQ ID NO: 50756 - DNA, 80 bp, synthetic construct
  misc_feature 1..80: note = Artificially Synthesized Probe
  source 1..80: mol_type = other DNA
aaatgtttttcctatctgcaagagggtttatctgatacaaacatttctgccattactggaagcggaactctttgagtcaa

SEQ ID NO: 50757 - DNA, 80 bp, synthetic construct
  misc_feature 1..80: note = Artificially Synthesized Probe
  source 1..80: mol_type = other DNA
acaacgcaaaagaaataacaaatctagagcccagaatttacatgcaccaatatttaaatctgtacactaatttctaatgc

SEQ ID NO: 50758 - DNA, 80 bp, synthetic construct
  misc_feature 1..80: note = Artificially Synthesized Probe
  source 1..80: mol_type = other DNA
tcaattaaggtcaggagttcaagaccagcctggccaacatggtaaaaccctgtctctactaaaaatacaaaaattagccg

SEQ ID NO: 50759 - DNA, 80 bp, synthetic construct; identical to SEQ ID NO: 24314
  misc_feature 1..80: note = Artificially Synthesized Probe
  source 1..80: mol_type = other DNA

SEQ ID NO: 50760 - DNA, 80 bp, synthetic construct
  misc_feature 1..80: note = Artificially Synthesized Probe
  source 1..80: mol_type = other DNA
aattcactattagaatacacagtaaaaattaccataggcatgattagcacccaatggatgctaaaattagcaagctgaga

SEQ ID NO: 50761 - DNA, 80 bp, synthetic construct
  misc_feature 1..80: note = Artificially Synthesized Probe
  source 1..80: mol_type = other DNA
ttggcagacatgtccttagctgtataatcaaggctaacatcaccagaaataccagcataccttctgatttgatgcagtga

SEQ ID NO: 50762 - DNA, 80 bp, synthetic construct; identical to SEQ ID NO: 24315
  misc_feature 1..80: note = Artificially Synthesized Probe
  source 1..80: mol_type = other DNA

SEQ ID NO: 50763 - DNA, 80 bp, synthetic construct
  misc_feature 1..80: note = Artificially Synthesized Probe
  source 1..80: mol_type = other DNA
tctttttttaaagagatgatgtcttgatttgttgcccaggctggagtgcaatggcataatcatagctccctgcagtcttc

SEQ ID NO: 50764 - DNA, 80 bp, synthetic construct
  misc_feature 1..80: note = Artificially Synthesized Probe
  source 1..80: mol_type = other DNA
aagtagccctcctgcctctacctcccaaagtgctgggattataggcatgagccactgtgcttgaactttactatttttgt

SEQ ID NO: 50765 - DNA, 80 bp, synthetic construct; identical to SEQ ID NO: 24196
  misc_feature 1..80: note = Artificially Synthesized Probe
  source 1..80: mol_type = other DNA

SEQ ID NO: 50766 - DNA, 80 bp, synthetic construct
  misc_feature 1..80: note = Artificially Synthesized Probe
  source 1..80: mol_type = other DNA
actggggccttgttaaaaatgcaaatgttcagaagctctggggatggaaacctagcaatctgtgtttgttttgttttgag

SEQ ID NO: 50767 - DNA, 80 bp, synthetic construct
  misc_feature 1..80: note = Artificially Synthesized Probe
  source 1..80: mol_type = other DNA
aggcatgcaccaccacgcctggctaaatttttttatttttttattttctttttttgtatttttagtagagacggggtttc

SEQ ID NO: 50768 - DNA, 80 bp, synthetic construct; identical to SEQ ID NO: 24316
  misc_feature 1..80: note = Artificially Synthesized Probe
  source 1..80: mol_type = other DNA

SEQ ID NO: 50769 - DNA, 80 bp, synthetic construct
  misc_feature 1..80: note = Artificially Synthesized Probe
  source 1..80: mol_type = other DNA
cctgcctcggcctcccaaagtgctgggatcacaggcatgagccactgtgcccagctatcaccagtttttaaaatccattt

SEQ ID NO: 50770 - DNA, 80 bp, synthetic construct
  misc_feature 1..80: note = Artificially Synthesized Probe
  source 1..80: mol_type = other DNA
tcgtccctcagcctcctgagtagctggaactacaggcacccaccaccatgcctggctaatattttgtattttagtagaga

SEQ ID NO: 50771 - DNA, 80 bp, synthetic construct; identical to SEQ ID NO: 24317
  misc_feature 1..80: note = Artificially Synthesized Probe
  source 1..80: mol_type = other DNA

SEQ ID NO: 50772 - DNA, 80 bp, synthetic construct
  misc_feature 1..80: note = Artificially Synthesized Probe
  source 1..80: mol_type = other DNA
gactcaggtgggagaatcacttgaacctgggaggcggaggttgtagtgagccgagattgtgccactgcactccagcctgg

SEQ ID NO: 50773 - DNA, 80 bp, synthetic construct
  misc_feature 1..80: note = Artificially Synthesized Probe
  source 1..80: mol_type = other DNA
ttttaaaataattttttttttctggatggtttaaaattttttcatttattgttctgaataagaaacatgtcagctgagca

SEQ ID NO: 50774 - DNA, 80 bp, synthetic construct
  misc_feature 1..80: note = Artificially Synthesized Probe
  source 1..80: mol_type = other DNA
cacctactctggaggatcacttgagtcccagaggcatagattgcagagagccaagatctcaccactgtacttccagctgg

SEQ ID NO: 50775 - DNA, 80 bp, synthetic construct
  misc_feature 1..80: note = Artificially Synthesized Probe
  source 1..80: mol_type = other DNA
gacagagcaagactccatctggggaaaaaaaaaaaaaaaaaagaaacatgccctctaactaccttcagatcttgatggtt

SEQ ID NO: 50776 - DNA, 80 bp, synthetic construct; identical to SEQ ID NO: 24318
  misc_feature 1..80: note = Artificially Synthesized Probe
  source 1..80: mol_type = other DNA

SEQ ID NO: 50777 - DNA, 80 bp, synthetic construct
  misc_feature 1..80: note = Artificially Synthesized Probe
  source 1..80: mol_type = other DNA
ttgtattggaccttgaagagtagatagattttgacagacttgtgtctgaggtgggcaattccaagaataggaagtaactt

SEQ ID NO: 50778 - DNA, 80 bp, synthetic construct
  misc_feature 1..80: note = Artificially Synthesized Probe
  source 1..80: mol_type = other DNA
aaccaagaaacagtatgtttagcaagcactgctatgaagactgagaattgtgtggccaaagtaagtaatattgctcatca

SEQ ID NO: 50779 - DNA, 80 bp, synthetic construct
  misc_feature 1..80: note = Artificially Synthesized Probe
  source 1..80: mol_type = other DNA
aacagaatgttttgcttatgaattctggtcactctttagactgattcacatttgtttcttgacactagttgtagattatc

SEQ ID NO: 50780 - DNA, 80 bp, synthetic construct; identical to SEQ ID NO: 24319
  misc_feature 1..80: note = Artificially Synthesized Probe
  source 1..80: mol_type = other DNA

SEQ ID NO: 50781 - DNA, 80 bp, synthetic construct
  misc_feature 1..80: note = Artificially Synthesized Probe
  source 1..80: mol_type = other DNA
ttttgactaaaattcaagtgtcagacattttaggaataagtactattaagtatgggctttgtttcttttacttgaattat

SEQ ID NO: 50782 - DNA, 80 bp, synthetic construct
  misc_feature 1..80: note = Artificially Synthesized Probe
  source 1..80: mol_type = other DNA
attattagagcttaggactggtgtcatgtcattgctatctttgctacaaaaatctaatgacagttgtcttagtccatgtg

SEQ ID NO: 50783 - DNA, 80 bp, synthetic construct
  misc_feature 1..80: note = Artificially Synthesized Probe
  source 1..80: mol_type = other DNA
acatgatagaagagactagctagatatccgaggtctcttttttttaagggcactaatcccacttacaaggggtctgcctt

SEQ ID NO: 50784 - DNA, 80 bp, synthetic construct
  misc_feature 1..80: note = Artificially Synthesized Probe
  source 1..80: mol_type = other DNA
tttatttaaaattacagtttaaaaaggtagagttcatcagttaaatgtctcaaatccaaatatgttaatattttgctata

SEQ ID NO: 50785 - DNA, 80 bp, synthetic construct; identical to SEQ ID NO: 24320
  misc_feature 1..80: note = Artificially Synthesized Probe
  source 1..80: mol_type = other DNA

SEQ ID NO: 50786 - DNA, 80 bp, synthetic construct
  misc_feature 1..80: note = Artificially Synthesized Probe
  source 1..80: mol_type = other DNA
ccagcccaagtctactttatatcctgcttttgtgcatggaaacagggatacacagttatttgggcctttaaaaatattct

SEQ ID NO: 50787 - DNA, 80 bp, synthetic construct
  misc_feature 1..80: note = Artificially Synthesized Probe
  source 1..80: mol_type = other DNA
atctgttccttttgttttctccatactttgtaagccaggatctctaatctaaataggttggtgtgtgtctatatgatgtg

SEQ ID NO: 50788 - DNA, 80 bp, synthetic construct
  misc_feature 1..80: note = Artificially Synthesized Probe
  source 1..80: mol_type = other DNA
ttatatatatatttatatatattaatatatatttatatatatttatgtatattaatatatatttatatattaatatatat

SEQ ID NO: 50789 - DNA, 80 bp, synthetic construct
  misc_feature 1..80: note = Artificially Synthesized Probe
  source 1..80: mol_type = other DNA
cttgctcccaggtggtgaccttctcattgcattgttgcttattttaacattattctgacacctatatcctttcgtcatcc

SEQ ID NO: 50790 - DNA, 80 bp, synthetic construct; identical to SEQ ID NO: 24321
  misc_feature 1..80: note = Artificially Synthesized Probe
  source 1..80: mol_type = other DNA

SEQ ID NO: 50791 - DNA, 80 bp, synthetic construct
  misc_feature 1..80: note = Artificially Synthesized Probe
  source 1..80: mol_type = other DNA
ttaagtagagacagggtttcgccatgttggccaggctggtctcgagcttctgacctcaggtgatctctctgcctcagcct

SEQ ID NO: 50792 - DNA, 80 bp, synthetic construct
  misc_feature 1..80: note = Artificially Synthesized Probe
  source 1..80: mol_type = other DNA
caggttggagtgcagtggcatgatctcggctcactgcaagctccgcctcccggtttcacgccattttcctgcctcagcct

SEQ ID NO: 50793 - DNA, 80 bp, synthetic construct
  misc_feature 1..80: note = Artificially Synthesized Probe
  source 1..80: mol_type = other DNA
agctgccgcatccggccaactgtttctattggcctctattgcttgacctttgaatggaatgacttgtcattatttttgtt

SEQ ID NO: 50794 - DNA, 80 bp, synthetic construct; identical to SEQ ID NO: 24322
  misc_feature 1..80: note = Artificially Synthesized Probe
  source 1..80: mol_type = other DNA

SEQ ID NO: 50795 - DNA, 80 bp, synthetic construct
  misc_feature 1..80: note = Artificially Synthesized Probe
  source 1..80: mol_type = other DNA
cttatgatagctctatacgaagggtaccaattagtcctctgtagaatacaagaaacaaagctgtaaaacaaattacaacc

SEQ ID NO: 50796 - DNA, 80 bp, synthetic construct
  misc_feature 1..80: note = Artificially Synthesized Probe
  source 1..80: mol_type = other DNA
gcccaaccaacatggtgaaaccctgtctatactaaaagtataaaaattagctgggcgtggtggcacatgcctataatccc

SEQ ID NO: 50797 - DNA, 80 bp, synthetic construct
  misc_feature 1..80: note = Artificially Synthesized Probe
  source 1..80: mol_type = other DNA
cttaatccaagtaatatttggaggcattgagatacctttttgttttttttcagaattctttctcctggttatggccctgt

SEQ ID NO: 50798 - DNA, 80 bp, synthetic construct
  misc_feature 1..80: note = Artificially Synthesized Probe
  source 1..80: mol_type = other DNA
tcactggaaggctgaaaagcattacttttttatgttatcttgctattggctttattaaactattactgcaaattttggtc

SEQ ID NO: 50799 - DNA, 80 bp, synthetic construct; identical to SEQ ID NO: 24197
  misc_feature 1..80: note = Artificially Synthesized Probe
  source 1..80: mol_type = other DNA

SEQ ID NO: 50800 - DNA, 80 bp, synthetic construct; identical to SEQ ID NO: 24323
  misc_feature 1..80: note = Artificially Synthesized Probe
  source 1..80: mol_type = other DNA

SEQ ID NO: 50801 - DNA, 80 bp, synthetic construct
  misc_feature 1..80: note = Artificially Synthesized Probe
  source 1..80: mol_type = other DNA
tatccgcaggaaacaagctgtttaaattcagattatgctgaagcaaaatggtcctggtatgagaagcaacgtgctgtttt

SEQ ID NO: 50802 - DNA, 80 bp, synthetic construct
  misc_feature 1..80: note = Artificially Synthesized Probe
  source 1..80: mol_type = other DNA
cattgtcggtaattaagatctacaattcacaatgcagacgtttgcacttcctctgggtctgtgctatttataaggcattt

SEQ ID NO: 50803 - DNA, 80 bp, synthetic construct
  misc_feature 1..80: note = Artificially Synthesized Probe
  source 1..80: mol_type = other DNA
tcattgaggctgatgtggttggaaaaactgtggagtataatgtgttacacattgggcttattgctctttcaaaaagatag

SEQ ID NO: 50804 - DNA, 80 bp, synthetic construct; identical to SEQ ID NO: 24324
  misc_feature 1..80: note = Artificially Synthesized Probe
  source 1..80: mol_type = other DNA

SEQ ID NO: 50805 - DNA, 80 bp, synthetic construct
  misc_feature 1..80: note = Artificially Synthesized Probe
  source 1..80: mol_type = other DNA
aaaaaagtccagaccccagcccagaatctttatgaattatgccctaaaataagagtaattgcttgtgcagtcttcttgct

SEQ ID NO: 50806 - DNA, 80 bp, synthetic construct
  misc_feature 1..80: note = Artificially Synthesized Probe
  source 1..80: mol_type = other DNA
agcagagcagatctgcagagaaaggcaggacccaggttttagtgctgattctggatggcccttgaatatagacagaatat

SEQ ID NO: 50807 - DNA, 80 bp, synthetic construct; identical to SEQ ID NO: 24325
  misc_feature 1..80: note = Artificially Synthesized Probe
  source 1..80: mol_type = other DNA

SEQ ID NO: 50808 - DNA, 80 bp, synthetic construct
  misc_feature 1..80: note = Artificially Synthesized Probe
  source 1..80: mol_type = other DNA
ggatcacccgcacagagagatcacatggcttctccaaaagtcaaacgatcaattcgcctcgttttggctctgtacttaat

SEQ ID NO: 50809 - DNA, 80 bp, synthetic construct
  misc_feature 1..80: note = Artificially Synthesized Probe
  source 1..80: mol_type = other DNA
gtgcttaaaccccttggaacatatttctttaactttgtatcacgcttttctttttgctgtgcttatctttggcaaactcg

SEQ ID NO: 50810 - DNA, 80 bp, synthetic construct
  misc_feature 1..80: note = Artificially Synthesized Probe
  source 1..80: mol_type = other DNA
gtcctacttgcctaatcttaccggtgggagcaagcggctgttgtaatccaattatagcagcataagcaatttgttagaca

SEQ ID NO: 50811 - DNA, 80 bp, synthetic construct
  misc_feature 1..80: note = Artificially Synthesized Probe
  source 1..80: mol_type = other DNA
ttagtgcaggaattttaaggagaaaagcgtggcacatttctcagggaaaaaaaaaaaagtggccattaaaaggggaacag

SEQ ID NO: 50812 - DNA, 80 bp, synthetic construct
  misc_feature 1..80: note = Artificially Synthesized Probe
  source 1..80: mol_type = other DNA
caggatggtctctatctcttgaccttgtgatctgcctgcctcggcctcccaaagtgctgggattacaggcgtgagccact

SEQ ID NO: 50813 - DNA, 80 bp, synthetic construct; identical to SEQ ID NO: 24326
  misc_feature 1..80: note = Artificially Synthesized Probe
  source 1..80: mol_type = other DNA

SEQ ID NO: 50814 - DNA, 80 bp, synthetic construct
  misc_feature 1..80: note = Artificially Synthesized Probe
  source 1..80: mol_type = other DNA
aaactgtcacttactgaagggtttaaatctcagcttgtttgcttagctgcactgcttcttttctcattctgaaacatatt

SEQ ID NO: 50815 - DNA, 80 bp, synthetic construct
  misc_feature 1..80: note = Artificially Synthesized Probe
  source 1..80: mol_type = other DNA
gggacaaaataaaatcacccttattaattgattagcatttgtagtcacagaatagggtttcttgttatataaggtatagg

SEQ ID NO: 50816 - DNA, 80 bp, synthetic construct
  misc_feature 1..80: note = Artificially Synthesized Probe
  source 1..80: mol_type = other DNA
ctgtgggtattaccacaataaatacttacttgcagacttaaacatttccttttgctgaaacaaatgcagccttctttgac

SEQ ID NO: 50817 - DNA, 80 bp, synthetic construct
  misc_feature 1..80: note = Artificially Synthesized Probe
  source 1..80: mol_type = other DNA
taaaaataatgagagcaaattagaacaatcagtttacacagatagctcctgattggaggcgatgggcaatatggcagcag

SEQ ID NO: 50818 - DNA, 80 bp, synthetic construct; identical to SEQ ID NO: 24327
  misc_feature 1..80: note = Artificially Synthesized Probe
  source 1..80: mol_type = other DNA

SEQ ID NO: 50819 - DNA, 80 bp, synthetic construct
  misc_feature 1..80: note = Artificially Synthesized Probe
  source 1..80: mol_type = other DNA
atactttctttggcattgtactctgggttttaagcttgatttttctaaaaatcaggtaaccagaggaattacatttttta

SEQ ID NO: 50820 - DNA, 80 bp, synthetic construct
  misc_feature 1..80: note = Artificially Synthesized Probe
  source 1..80: mol_type = other DNA
ttcctttcctgattctgtttattagaaatttgctgttttgtttttctattacctgtgctattgacttctcagtgttgggc

SEQ ID NO: 50821 - DNA, 80 bp, synthetic construct
  misc_feature 1..80: note = Artificially Synthesized Probe
  source 1..80: mol_type = other DNA
attaggctatagaagacataaatgagcaaaattttctgagccaaatcagcttctgtttcctagaccttttttggaaggct

SEQ ID NO: 50822 - DNA, 80 bp, synthetic construct; identical to SEQ ID NO: 24328
  misc_feature 1..80: note = Artificially Synthesized Probe
  source 1..80: mol_type = other DNA

SEQ ID NO: 50823 - DNA, 80 bp, synthetic construct
  misc_feature 1..80: note = Artificially Synthesized Probe
  source 1..80: mol_type = other DNA
gtgaacacatcttcgtaaccattatctagatcaggaatagaactttgccagcactccacaagttgccttcatgctccctt

SEQ ID NO: 50824 - DNA, 80 bp, synthetic construct
  misc_feature 1..80: note = Artificially Synthesized Probe
  source 1..80: mol_type = other DNA
taagtctctaatattatgcctctacttaaaactcattgtacaaaagtacctcacttccccctagtaccatctccctaccc

SEQ ID NO: 50825 - DNA, 80 bp, synthetic construct
  misc_feature 1..80: note = Artificially Synthesized Probe
  source 1..80: mol_type = other DNA
ccccccagacaactctttttttttctttcccagaatcaagaataaaagcaacccagacaactctttaatagtctgatgct

SEQ ID NO: 50826 - DNA, 80 bp, synthetic construct; identical to SEQ ID NO: 24329
  misc_feature 1..80: note = Artificially Synthesized Probe
  source 1..80: mol_type = other DNA

SEQ ID NO: 50827 - DNA, 80 bp, synthetic construct
  misc_feature 1..80: note = Artificially Synthesized Probe
  source 1..80: mol_type = other DNA
ttcagcttatgagggaaatgagctatgaatttaaatgactcttctactctataccaagtttctatgaaaataaaattgta

SEQ ID NO: 50828 - DNA, 80 bp, synthetic construct
  misc_feature 1..80: note = Artificially Synthesized Probe
  source 1..80: mol_type = other DNA
aactggctgaatggccaagaaactcccttgtaatttcctaatagagctaaagttaacaagtcaccttaaagtctactaat

SEQ ID NO: 50829 - DNA, 80 bp, synthetic construct
  misc_feature 1..80: note = Artificially Synthesized Probe
  source 1..80: mol_type = other DNA
gtgtgtttccatataaagatcgaaaaagtccattttcttttcatgtatcttcaagatggaagatcttttccttcccttcc

SEQ ID NO: 50830 - DNA, 80 bp, synthetic construct; identical to SEQ ID NO: 24330
  misc_feature 1..80: note = Artificially Synthesized Probe
  source 1..80: mol_type = other DNA

SEQ ID NO: 50831 - DNA, 80 bp, synthetic construct
  misc_feature 1..80: note = Artificially Synthesized Probe
  source 1..80: mol_type = other DNA
gatacttcccccatcgcattgtgtagcttttctccatttcatttctatagcactttgacatctagcaaatgttattttct

SEQ ID NO: 50832 - DNA, 80 bp, synthetic construct
  misc_feature 1..80: note = Artificially Synthesized Probe
  source 1..80: mol_type = other DNA
cacttgaggtcaggagttcaaggccagcctggccaacaggatgaaactttgtctctactaaaaatacaaaaattaggtgg

SEQ ID NO: 50833 - DNA, 80 bp, synthetic construct
  misc_feature 1..80: note = Artificially Synthesized Probe
  source 1..80: mol_type = other DNA
gactggtatcttttgtcccacattgttcgtaagatgattcattcaggttgttgtgggaggtgtggtgtgtttattcttgt

SEQ ID NO: 50834 - DNA, 80 bp, synthetic construct
  misc_feature 1..80: note = Artificially Synthesized Probe
  source 1..80: mol_type = other DNA
cttttctgggttacctagtcagtaattccatgtaacttaaatagtcacctgccttattaacatagtatacagatctttca

SEQ ID NO: 50835 - DNA, 80 bp, synthetic construct; identical to SEQ ID NO: 24331
  misc_feature 1..80: note = Artificially Synthesized Probe
  source 1..80: mol_type = other DNA

SEQ ID NO: 50836 - DNA, 80 bp, synthetic construct
  misc_feature 1..80: note = Artificially Synthesized Probe
  source 1..80: mol_type = other DNA
gtggtggcaggcgcctataagcccagctgctcaggaggctgaggcaggagaattgcttgaacccaggaggcggaggttgc

SEQ ID NO: 50837 - DNA, 80 bp, synthetic construct
  misc_feature 1..80: note = Artificially Synthesized Probe
  source 1..80: mol_type = other DNA
aagacatgatgaggtcatgagaatgtagctggaccttgaaatcctctgtctcggagaaaaggcttgggacagggatgagt

SEQ ID NO: 50838 - DNA, 80 bp, synthetic construct
  misc_feature 1..80: note = Artificially Synthesized Probe
  source 1..80: mol_type = other DNA
taaatttttcacacagactcataaagtatgtaagaaacacttgctcaacatggagcactaagaccatgacaaacaggaac

SEQ ID NO: 50839 - DNA, 80 bp, synthetic construct; identical to SEQ ID NO: 24332
  misc_feature 1..80: note = Artificially Synthesized Probe
  source 1..80: mol_type = other DNA

SEQ ID NO: 50840 - DNA, 80 bp, synthetic construct
  misc_feature 1..80: note = Artificially Synthesized Probe
  source 1..80: mol_type = other DNA
acaaatctgacattttaattacggaactttctactgattttttaaaaaatctgtttccatgaatcttgctccatatttat

SEQ ID NO: 50841 - DNA, 80 bp, synthetic construct
  misc_feature 1..80: note = Artificially Synthesized Probe
  source 1..80: mol_type = other DNA
ggagtatagataccacgagtgtccagattatagcagattccatttgcagtgatagttttgtggatatggtatgcttttca

SEQ ID NO: 50842 - DNA, 80 bp, synthetic construct; identical to SEQ ID NO: 24198
  misc_feature 1..80: note = Artificially Synthesized Probe
  source 1..80: mol_type = other DNA

SEQ ID NO: 50843 - DNA, 80 bp, synthetic construct
  misc_feature 1..80: note = Artificially Synthesized Probe
  source 1..80: mol_type = other DNA
attgcaaattactagtattatttagtgcccttgaaacttctgaagttggaggtttcaattgttagttactccctgctttc

SEQ ID NO: 50844 - DNA, 80 bp, synthetic construct
  misc_feature 1..80: note = Artificially Synthesized Probe
  source 1..80: mol_type = other DNA
aaaatttttaaaaagtactaaaatccaaagattttgtcatcaaatttgacagcctttttgcaccattacaggtatttatt

SEQ ID NO: 50845 - DNA, 80 bp, synthetic construct; identical to SEQ ID NO: 24333
  misc_feature 1..80: note = Artificially Synthesized Probe
  source 1..80: mol_type = other DNA

SEQ ID NO: 50846 - DNA, 80 bp, synthetic construct
  misc_feature 1..80: note = Artificially Synthesized Probe
  source 1..80: mol_type = other DNA
tttctagcattccatatgagatgataaaaattaaaaacgcctcaattagcagccacaaaaaagtaaaactgttaattgaa

SEQ ID NO: 50847 - DNA, 80 bp, synthetic construct
  misc_feature 1..80: note = Artificially Synthesized Probe
  source 1..80: mol_type = other DNA
atgttaatttagccctgtcggtcttgttctagttcatgatgtacagctcccaccagatactcacttggtgaattgaaaga

SEQ ID NO: 50848 - DNA, 80 bp, synthetic construct; identical to SEQ ID NO: 24334
  misc_feature 1..80: note = Artificially Synthesized Probe
  source 1..80: mol_type = other DNA

SEQ ID NO: 50849 - DNA, 80 bp, synthetic construct
  misc_feature 1..80: note = Artificially Synthesized Probe
  source 1..80: mol_type = other DNA
tgctaaagctgactttatagacatactttttgagggatccatatgctttaaataagttgataggaaatgtttgctatatc

SEQ ID NO: 50850 - DNA, 80 bp, synthetic construct
  misc_feature 1..80: note = Artificially Synthesized Probe
  source 1..80: mol_type = other DNA
gttttatacacgtattgattttaacaagaatatggaaaagccatgtttctttcaggatgagaaagatttgaaatccaacc

SEQ ID NO: 50851 - DNA, 80 bp, synthetic construct
  misc_feature 1..80: note = Artificially Synthesized Probe
  source 1..80: mol_type = other DNA
agacattgttgtgtggaggcagtgacatcatcataattttcaatgttttaaagtgtcagtggtaaagggagtttacaagc

SEQ ID NO: 50852 - DNA, 80 bp, synthetic construct
  misc_feature 1..80: note = Artificially Synthesized Probe
  source 1..80: mol_type = other DNA
tttctattttcctctaccaaagagcagggttctcctaatactgacctactttgctcttagacaatactacaggtacagtg

SEQ ID NO: 50853 - DNA, 80 bp, synthetic construct
  misc_feature 1..80: note = Artificially Synthesized Probe
  source 1..80: mol_type = other DNA
gttctcgctccattagttcctgccagagttggtagtttaagagtctggcacctcccttttctctcttttggtttctctct

SEQ ID NO: 50854 - DNA, 80 bp, synthetic construct; identical to SEQ ID NO: 24335
  misc_feature 1..80: note = Artificially Synthesized Probe
  source 1..80: mol_type = other DNA

SEQ ID NO: 50855 - DNA, 80 bp, synthetic construct
  misc_feature 1..80: note = Artificially Synthesized Probe
  source 1..80: mol_type = other DNA
atatgggaacaattgtctgtatgtggccataggtttgcaagtgaagatatagtctcaggctcttctgtggcaaaaattta

SEQ ID NO: 50856 - DNA, 80 bp, synthetic construct
  misc_feature 1..80: note = Artificially Synthesized Probe
  source 1..80: mol_type = other DNA
tgtgttcatccttattgccctttctgtgaatacaatcatagtgaattttcacgaagtgaacatacctgtgtgattaccat

SEQ ID NO: 50857 - DNA, 80 bp, synthetic construct; identical to SEQ ID NO: 24336
  misc_feature 1..80: note = Artificially Synthesized Probe
  source 1..80: mol_type = other DNA

SEQ ID NO: 50858 - DNA, 80 bp, synthetic construct
  misc_feature 1..80: note = Artificially Synthesized Probe
  source 1..80: mol_type = other DNA
atatgccataatttatccattttactataagtgaacattgggtttctttcagattttcataactacaaaaaattatttta

SEQ ID NO: 50859 - DNA, 80 bp, synthetic construct
  misc_feature 1..80: note = Artificially Synthesized Probe
  source 1..80: mol_type = other DNA
tttcattgtagcattctggtgatacgtagtagtattatgtatgacattttggattttgttttaagtttttattttagagg

SEQ ID NO: 50860 - DNA, 80 bp, synthetic construct
  misc_feature 1..80: note = Artificially Synthesized Probe
  source 1..80: mol_type = other DNA
taaaatttaccatcttactatttttaagtatacagtttattagctttaagtgtattcacattgttgtcacattgtttttc

SEQ ID NO: 50861 - DNA, 80 bp, synthetic construct
  misc_feature 1..80: note = Artificially Synthesized Probe
  source 1..80: mol_type = other DNA
ggttatttgtctgatgtatgtattgcatatatttctcctaaactgtgacttgccttttcactttttaaatgatgtctgtg

SEQ ID NO: 50862 - DNA, 80 bp, synthetic construct; identical to SEQ ID NO: 24337
  misc_feature 1..80: note = Artificially Synthesized Probe
  source 1..80: mol_type = other DNA

SEQ ID NO: 50863 - DNA, 80 bp, synthetic construct
  misc_feature 1..80: note = Artificially Synthesized Probe
  source 1..80: mol_type = other DNA
gaatcgccaatatttaccagctgtgtgatccacgccttgtgtactacagcacttgaacgtggaacagtcttcatatattt

SEQ ID NO: 50864 - DNA, 80 bp, synthetic construct
  misc_feature 1..80: note = Artificially Synthesized Probe
  source 1..80: mol_type = other DNA
tatccaggcatggtggtgcgcacctgtagtcccagctattcaggaggctgaggtgagaagatcacttgagcttgggaggt

SEQ ID NO: 50865 - DNA, 80 bp, synthetic construct
  misc_feature 1..80: note = Artificially Synthesized Probe
  source 1..80: mol_type = other DNA
caggtattccattatagcaacgtaaatggactaagacactttagtagaacctatgcaactgtttttcttttttttttttt

SEQ ID NO: 50866 - DNA, 80 bp, synthetic construct
  misc_feature 1..80: note = Artificially Synthesized Probe
  source 1..80: mol_type = other DNA
tgtcacaaggtcaagagatcaagaacatcttggccaacatggtgaaaccccatctctacgaaaaacacaaaaattaactg

SEQ ID NO: 50867 - DNA, 80 bp, synthetic construct; identical to SEQ ID NO: 24338
  misc_feature 1..80: note = Artificially Synthesized Probe
  source 1..80: mol_type = other DNA

SEQ ID NO: 50868 - DNA, 80 bp, synthetic construct
  misc_feature 1..80: note = Artificially Synthesized Probe
  source 1..80: mol_type = other DNA
ctgcttcctggattcaagcaattcccctgcctcagcctccctagtagctgggaccacagacatgtgccaccacgcacagc

SEQ ID NO: 50869 - DNA, 80 bp, synthetic construct
  misc_feature 1..80: note = Artificially Synthesized Probe
  source 1..80: mol_type = other DNA
agccaccacacccggcctccgaagctgctgttacgatctaaatcacatcataactcttttttcttttcttcacaattcta

SEQ ID NO: 50870 - DNA, 80 bp, synthetic construct; identical to SEQ ID NO: 24339
  misc_feature 1..80: note = Artificially Synthesized Probe
  source 1..80: mol_type = other DNA

SEQ ID NO: 50871 - DNA, 80 bp, synthetic construct
  misc_feature 1..80: note = Artificially Synthesized Probe
  source 1..80: mol_type = other DNA
agctactcaggaggctgaggcaggagaatcacttaaacccaggaggcggaggttgcagtgagctgagatcatgccattgc

SEQ ID NO: 50872 - DNA, 80 bp, synthetic construct
  misc_feature 1..80: note = Artificially Synthesized Probe
  source 1..80: mol_type = other DNA
ggtattagttttgtttacagggggaaaaagtgaagcttaaagaaggcaactaacttgttcaggtctatatagcttgtaca

SEQ ID NO: 50873 - DNA, 80 bp, synthetic construct
  misc_feature 1..80: note = Artificially Synthesized Probe
  source 1..80: mol_type = other DNA
cctccgccttctgggctcaagcaattctcgtgagtagccgggattataggcatgcaccaccatgcccagctaaatttttt

SEQ ID NO: 50874 - DNA, 80 bp, synthetic construct; identical to SEQ ID NO: 24340
  misc_feature 1..80: note = Artificially Synthesized Probe
  source 1..80: mol_type = other DNA

SEQ ID NO: 50875 - DNA, 80 bp, synthetic construct
  misc_feature 1..80: note = Artificially Synthesized Probe
  source 1..80: mol_type = other DNA
atccttactatgtaggcctacgagattgctcactatcaaaaaatgctatcaccacagaaagatgaggttacaaattctgc

SEQ ID NO: 50876 - DNA, 80 bp, synthetic construct
  misc_feature 1..80: note = Artificially Synthesized Probe
  source 1..80: mol_type = other DNA
ctttcgaatctgaaagaaaaagctctctgcaatacagcaggctatggactataatgctgaaaatacaactggcaaagaac

SEQ ID NO: 50877 - DNA, 80 bp, synthetic construct
  misc_feature 1..80: note = Artificially Synthesized Probe
  source 1..80: mol_type = other DNA
gtcagccaatgtttttcattttatactttctttagcagtgtatgggagtcccagttgctgaacattcttgcagtgctcac

SEQ ID NO: 50878 - DNA, 80 bp, synthetic construct
  misc_feature 1..80: note = Artificially Synthesized Probe
  source 1..80: mol_type = other DNA
gcaaacattatagagtgtacttccgcaaatctaaatggtacagcctcctatacacctaggctatatggtatacctattac

SEQ ID NO: 50879 - DNA, 80 bp, synthetic construct
  misc_feature 1..80: note = Artificially Synthesized Probe
  source 1..80: mol_type = other DNA
actaaaatatcatcacatggtgcatgactgtactttgatttggccctaatggagaccagttggtgtatataactttttgc

SEQ ID NO: 50880 - DNA, 80 bp, synthetic construct; identical to SEQ ID NO: 24341
  misc_feature 1..80: note = Artificially Synthesized Probe
  source 1..80: mol_type = other DNA

SEQ ID NO: 50881 - DNA, 80 bp, synthetic construct
  misc_feature 1..80: note = Artificially Synthesized Probe
  source 1..80: mol_type = other DNA
tgacctattcttggggttatagaatatcttgcttgcccaaataatattgtgaaaaatgttttttaaaattcgagggccag

SEQ ID NO: 50882 - DNA, 80 bp, synthetic construct
  misc_feature 1..80: note = Artificially Synthesized Probe
  source 1..80: mol_type = other DNA
cccagctactcaggaggctgaggcagaattgcctgaacctgcggggcagaggttgcagtgagtggagtacactgcactcc

SEQ ID NO: 50883 - DNA, 80 bp, synthetic construct; identical to SEQ ID NO: 24342
  misc_feature 1..80: note = Artificially Synthesized Probe
  source 1..80: mol_type = other DNA

SEQ ID NO: 50884 - DNA, 80 bp, synthetic construct
  misc_feature 1..80: note = Artificially Synthesized Probe
  source 1..80: mol_type = other DNA
agttcagtatgtattccttaaatggaaaatagaaataaactacagtgtttgatacatagaaaaattccatgggaaagagt

SEQ ID NO: 50885 - DNA, 80 bp, synthetic construct
  misc_feature 1..80: note = Artificially Synthesized Probe
  source 1..80: mol_type = other DNA
aattttaaatcagatgcataaattttatggaggtgactgtcttcctgattttcattttcttattacaacccctcttccca

SEQ ID NO: 50886 - DNA, 80 bp, synthetic construct
  misc_feature 1..80: note = Artificially Synthesized Probe
  source 1..80: mol_type = other DNA
caatctctggtctatgaaaccccattaaaaatggtgcccatgtaggggacatataaataacctccaaagttacagggtag

SEQ ID NO: 50887 - DNA, 80 bp, synthetic construct; identical to SEQ ID NO: 24343
  misc_feature 1..80: note = Artificially Synthesized Probe
  source 1..80: mol_type = other DNA

SEQ ID NO: 50888 - DNA, 80 bp, synthetic construct
  misc_feature 1..80: note = Artificially Synthesized Probe
  source 1..80: mol_type = other DNA
agatctttgagggcttccttttgctcttttctgtcttcaattattaagtttcatgaaacattaacctactgttagtcttc

SEQ ID NO: 50889 - DNA, 80 bp, synthetic construct
  misc_feature 1..80: note = Artificially Synthesized Probe
  source 1..80: mol_type = other DNA
atgtggtggcgggcacctgtaatcccagctactcaggaggctgacgcacgagaatcgcttgaacctgggaggcggaggtt

SEQ ID NO: 50890 - DNA, 80 bp, synthetic construct
  misc_feature 1..80: note = Artificially Synthesized Probe
  source 1..80: mol_type = other DNA
caccacaagacattttaccactgtactcacaaaaagcaatacccacctcctcgttcatttagattaacagttcagtttat

SEQ ID NO: 50891 - DNA, 80 bp, synthetic construct
  misc_feature 1..80: note = Artificially Synthesized Probe
  source 1..80: mol_type = other DNA
acaatcctttttagttaaaactcatcacaacttatgcccttactatgtgccaggtactctttctgaatacctttatatgt

SEQ ID NO: 50892 - DNA, 80 bp, synthetic construct; identical to SEQ ID NO: 24344
  misc_feature 1..80: note = Artificially Synthesized Probe
  source 1..80: mol_type = other DNA

SEQ ID NO: 50893 - DNA, 80 bp, synthetic construct
  misc_feature 1..80: note = Artificially Synthesized Probe
  source 1..80: mol_type = other DNA
ataactgcattttgaaatctgaactttactaacttgtgtgaatctgagcaagttattttgatcacctgtgctgaaaaaac

SEQ ID NO: 50894 - DNA, 80 bp, synthetic construct
  misc_feature 1..80: note = Artificially Synthesized Probe
  source 1..80: mol_type = other DNA
ttcactgcagctaagagaagcttgtgctgctgcctcatagaattatttcttgctgcatttaacatgcattaacaagcatt

SEQ ID NO: 50895 - DNA, 80 bp, synthetic construct
  misc_feature 1..80: note = Artificially Synthesized Probe
  source 1..80: mol_type = other DNA
gaaattgaaggattagagcacaaagaagagcagggtagttttttccttctttatttaaacccgactgtatttttcccata

SEQ ID NO: 50896 - DNA, 80 bp, synthetic construct
  misc_feature 1..80: note = Artificially Synthesized Probe
  source 1..80: mol_type = other DNA
aaattttattctggtaatcttaacataatttgacatctaggtgaacaacctccacctgaggaagttacacagaaagaaca

SEQ ID NO: 50897 - DNA, 80 bp, synthetic construct; identical to SEQ ID NO: 24345
  misc_feature 1..80: note = Artificially Synthesized Probe
  source 1..80: mol_type = other DNA

SEQ ID NO: 50898 - DNA, 80 bp, synthetic construct
  misc_feature 1..80: note = Artificially Synthesized Probe
  source 1..80: mol_type = other DNA
cttcctcttctaccctcttctctagccctagcccttcctctccttgcgttcctccttctgctttcccattttcccccttc

SEQ ID NO: 50899 - DNA, 80 bp, synthetic construct
  misc_feature 1..80: note = Artificially Synthesized Probe
  source 1..80: mol_type = other DNA
ttgctctgatcaatttgatattatgaacaaagaattctctagatggcacagatacactccccctcccccatattcttcaa

SEQ ID NO: 50900 - DNA, 80 bp, synthetic construct; identical to SEQ ID NO: 24199
  misc_feature 1..80: note = Artificially Synthesized Probe
  source 1..80: mol_type = other DNA

SEQ ID NO: 50901 - DNA, 80 bp, synthetic construct; identical to SEQ ID NO: 24346
  misc_feature 1..80: note = Artificially Synthesized Probe
  source 1..80: mol_type = other DNA

SEQ ID NO: 50902 - DNA, 80 bp, synthetic construct
  misc_feature 1..80: note = Artificially Synthesized Probe
  source 1..80: mol_type = other DNA
ttttaaataaacagaaagatggccgggcgcggtggcttacgcctgtaatcccagcactctgggaggccgaggcgggcgga

SEQ ID NO: 50903 - DNA, 80 bp, synthetic construct
  misc_feature 1..80: note = Artificially Synthesized Probe
  source 1..80: mol_type = other DNA
tgcagtgagcagagattgtgccactgcactccaacctgggcgacagagcgagactccgtctcaaaaaaataaaaaaaaaa

SEQ ID NO: 50904 - DNA, 80 bp, synthetic construct
  misc_feature 1..80: note = Artificially Synthesized Probe
  source 1..80: mol_type = other DNA
acattctttgcttgaccccccccatagatctttatttaatcaaagtgaaaacaaaatgactcagatttgatcctttttga

SEQ ID NO: 50905 - DNA, 80 bp, synthetic construct
  misc_feature 1..80: note = Artificially Synthesized Probe
  source 1..80: mol_type = other DNA
ccattagctgggactaccggtgccggccaccatgcactgctaatttttctatttttagtagagacggggtttcaccatgt

SEQ ID NO: 50906 - DNA, 80 bp, synthetic construct; identical to SEQ ID NO: 24185
  misc_feature 1..80: note = Artificially Synthesized Probe
  source 1..80: mol_type = other DNA

SEQ ID NO: 50907 - DNA, 80 bp, synthetic construct; identical to SEQ ID NO: 24347
  misc_feature 1..80: note = Artificially Synthesized Probe
  source 1..80: mol_type = other DNA

SEQ ID NO: 50908 - DNA, 80 bp, synthetic construct
  misc_feature 1..80: note = Artificially Synthesized Probe
  source 1..80: mol_type = other DNA
tcagccctgttatcagtcttgggggtggggaggacaggcattgatgagcagcagttctattatataccttgtttattgtc

SEQ ID NO: 50909 - DNA, 80 bp, synthetic construct
  misc_feature 1..80: note = Artificially Synthesized Probe
  source 1..80: mol_type = other DNA
tttcagcagactatttcaatctcagttgactaaccctaggtatgcaaggtggatggcaaggctagatgaagtgctctaaa

SEQ ID NO: 50910 - DNA, 80 bp, synthetic construct; identical to SEQ ID NO: 24348
  misc_feature 1..80: note = Artificially Synthesized Probe
  source 1..80: mol_type = other DNA

SEQ ID NO: 50911 - DNA, 80 bp, synthetic construct
  misc_feature 1..80: note = Artificially Synthesized Probe
  source 1..80: mol_type = other DNA
ttctcttacttccccaagtctgtatcactggggcttttttcccattttttcccatcttgtgagcaaagttttaacagtac

SEQ ID NO: 50912 - DNA, 80 bp, synthetic construct
  misc_feature 1..80: note = Artificially Synthesized Probe
  source 1..80: mol_type = other DNA
catgagcctcattattttttgtgtgccaggactccttatttattttgatgcttgaattgttccctatttggccagtggga

SEQ ID NO: 50913 - DNA, 80 bp, synthetic construct
  misc_feature 1..80: note = Artificially Synthesized Probe
  source 1..80: mol_type = other DNA
tttgccagggggtgaagttattaagttttagcagcagccatcgatcaagttcacaagttaacacgataaaggctctgtgc

SEQ ID NO: 50914 - DNA, 80 bp, synthetic construct
  misc_feature 1..80: note = Artificially Synthesized Probe
  source 1..80: mol_type = other DNA
agaagcagttttctgcaattccctaagctgctgctctgtcatattttacataagcactgggaaaatgtcttgtaattagt

SEQ ID NO: 50915 - DNA, 80 bp, synthetic construct; identical to SEQ ID NO: 24349
  misc_feature 1..80: note = Artificially Synthesized Probe
  source 1..80: mol_type = other DNA

SEQ ID NO: 50916 - DNA, 80 bp, synthetic construct
  misc_feature 1..80: note = Artificially Synthesized Probe
  source 1..80: mol_type = other DNA
acctatcaccctggaagctataaagttgcatgagggggccaataaagaagcttgagtttcagttttgaaacctaaaaatg

SEQ ID NO: 50917 - DNA, 80 bp, synthetic construct
  misc_feature 1..80: note = Artificially Synthesized Probe
  source 1..80: mol_type = other DNA
tgggcaatgtcagttcatttcctactgggctttatttaaaggaattggaatgactgcaagctttttcttgttggttatta

SEQ ID NO: 50918 - DNA, 80 bp, synthetic construct
  misc_feature 1..80: note = Artificially Synthesized Probe
  source 1..80: mol_type = other DNA
gagaaatatgatgtttacttctgttgaaatgtgtgccccattctatatgtaccattttcttttcatttgcactcccactt

SEQ ID NO: 50919 - DNA, 80 bp, synthetic construct
  misc_feature 1..80: note = Artificially Synthesized Probe
  source 1..80: mol_type = other DNA
ccctggctaacacggtgataccccgtctctactaaaaatacaaaaaaatagccaggtgtggtggcaggcgcctgtagtcc

SEQ ID NO: 50920 - DNA, 80 bp, synthetic construct; identical to SEQ ID NO: 24350
  misc_feature 1..80: note = Artificially Synthesized Probe
  source 1..80: mol_type = other DNA

SEQ ID NO: 50921 - DNA, 80 bp, synthetic construct
  misc_feature 1..80: note = Artificially Synthesized Probe
  source 1..80: mol_type = other DNA
gtgtgcttacttatctctttccattctaatcaaagtgtaaacaatcctatttcctctcaattcaagcatgacagtggcaa

SEQ ID NO: 50922 - DNA, 80 bp, synthetic construct
  misc_feature 1..80: note = Artificially Synthesized Probe
  source 1..80: mol_type = other DNA
gcgcccgccactacgcccggctaattttttgtatttttagtagagacggggtttcaccgttttagccgggatggtctcga

SEQ ID NO: 50923 - DNA, 80 bp, synthetic construct; identical to SEQ ID NO: 24351
  misc_feature 1..80: note = Artificially Synthesized Probe
  source 1..80: mol_type = other DNA

SEQ ID NO: 50924 - DNA, 80 bp, synthetic construct
  misc_feature 1..80: note = Artificially Synthesized Probe
  source 1..80: mol_type = other DNA
atgtagaagtccagatctgggtgttaagcgtgctcattgctattggggtgtcactgctcacaagccatcatactggacac

SEQ ID NO: 50925 - DNA, 80 bp, synthetic construct
  misc_feature 1..80: note = Artificially Synthesized Probe
  source 1..80: mol_type = other DNA
atgcttttggccgggtgcgatggctcatgcctgtaatccaagcactttgggaggccaagacaggtggatcacgagatcag

SEQ ID NO: 50926 - DNA, 80 bp, synthetic construct
  misc_feature 1..80: note = Artificially Synthesized Probe
  source 1..80: mol_type = other DNA
gcaagactctgtctcaaaaaaagaaaaaaagaaaagaaaaagaaagatgcttttacaaagaaatcaaaggaaaataatcg

SEQ ID NO: 50927 - DNA, 80 bp, synthetic construct
  misc_feature 1..80: note = Artificially Synthesized Probe
  source 1..80: mol_type = other DNA
aatttagccgagcgtggtggtgggtgcctgtagtcccagctactccggaggctgaggcaggagaatggcgtgaacccagg

SEQ ID NO: 50928 - DNA, 80 bp, synthetic construct; identical to SEQ ID NO: 24352
  misc_feature 1..80: note = Artificially Synthesized Probe
  source 1..80: mol_type = other DNA

SEQ ID NO: 50929 - DNA, 80 bp, synthetic construct
  misc_feature 1..80: note = Artificially Synthesized Probe
  source 1..80: mol_type = other DNA
gatttctcctcctttggtttctcctccttcatcctctgtcatgagagttaaaatacctttcttttaaacatttcctaatc

SEQ ID NO: 50930 - DNA, 80 bp, synthetic construct
  misc_feature 1..80: note = Artificially Synthesized Probe
  source 1..80: mol_type = other DNA
tgtaaggcacaaatcagacaatgccatatgtgactatttcaaaacctccaggggctctcctttacacttcagatgaaatc

SEQ ID NO: 50931 - DNA, 80 bp, synthetic construct
  misc_feature 1..80: note = Artificially Synthesized Probe
  source 1..80: mol_type = other DNA
ttctatctagaaggatcttccccaagatcttcacaagactgacatgtcattcaaatctcagctcaggtgtcacttccttt

SEQ ID NO: 50932 - DNA, 80 bp, synthetic construct; identical to SEQ ID NO: 24353
  misc_feature 1..80: note = Artificially Synthesized Probe
  source 1..80: mol_type = other DNA

SEQ ID NO: 50933 - DNA, 80 bp, synthetic construct
  misc_feature 1..80: note = Artificially Synthesized Probe
  source 1..80: mol_type = other DNA
ctcaagtgatccacccaccttggccttccaaagtgctgggattacaggcgtgagccaccgtgctggctgtattaatagag

SEQ ID NO: 50934 - DNA, 80 bp, synthetic construct
  misc_feature 1..80: note = Artificially Synthesized Probe
  source 1..80: mol_type = other DNA
tggtttgtgaaattaacatatttatatatgttctttctccactcctcttcagagaaggcaaagacactttgtatgcctgt

SEQ ID NO: 50935 - DNA, 80 bp, synthetic construct; identical to SEQ ID NO: 24200
  misc_feature 1..80: note = Artificially Synthesized Probe
  source 1..80: mol_type = other DNA

SEQ ID NO: 50936 - DNA, 80 bp, synthetic construct
  misc_feature 1..80: note = Artificially Synthesized Probe
  source 1..80: mol_type = other DNA
attttattcttaaattaattcagcatttaatcattatatcccctttccccccatagttctcaatgccagagcctttcctt

SEQ ID NO: 50937 - DNA, 80 bp, synthetic construct
  misc_feature 1..80: note = Artificially Synthesized Probe
  source 1..80: mol_type = other DNA
taaagcagatttggatgcaaactagaaatacttgtcatttcaccataaagttcagtcagtccactatgtatttcccaacc

SEQ ID NO: 50938 - DNA, 80 bp, synthetic construct; identical to SEQ ID NO: 24354
  misc_feature 1..80: note = Artificially Synthesized Probe
  source 1..80: mol_type = other DNA

SEQ ID NO: 50939 - DNA, 80 bp, synthetic construct
  misc_feature 1..80: note = Artificially Synthesized Probe
  source 1..80: mol_type = other DNA
gtcatcaggcttttgttgggaaagccaaatcaattctactgcaaccagtaaccattatatctctcatacactctaatata

SEQ ID NO: 50940 - DNA, 80 bp, synthetic construct
  misc_feature 1..80: note = Artificially Synthesized Probe
  source 1..80: mol_type = other DNA
atttctctacaaacataataccttagttacaaataaaattcatattacagtggatttatcagtaggaatactgtactctt

SEQ ID NO: 50941 - DNA, 80 bp, synthetic construct; identical to SEQ ID NO: 24355
  misc_feature 1..80: note = Artificially Synthesized Probe
  source 1..80: mol_type = other DNA

SEQ ID NO: 50942 - DNA, 80 bp, synthetic construct
  misc_feature 1..80: note = Artificially Synthesized Probe
  source 1..80: mol_type = other DNA
tttgatggacatttggattattaccattttggatttttattaatatggaagcaaaaaacattaaagtaccagtctttgtg

SEQ ID NO: 50943 - DNA, 80 bp, synthetic construct
  misc_feature 1..80: note = Artificially Synthesized Probe
  source 1..80: mol_type = other DNA
taaacgtgactgccaacaatgtgtgagagacccagttgttcctcattcttgtccacacttagtattgtcagtcttttaaa

SEQ ID NO: 50944 - DNA, 80 bp, synthetic construct
  misc_feature 1..80: note = Artificially Synthesized Probe
  source 1..80: mol_type = other DNA
acatcacatttggacttcaacactctgtgcagggctgccatgttacctgccatatttctgtatggacatatcccttatcc

SEQ ID NO: 50945 - DNA, 80 bp, synthetic construct
  misc_feature 1..80: note = Artificially Synthesized Probe
  source 1..80: mol_type = other DNA
gattttttaaaaattattattgagttctaagagttctttatagatgctggatacaagtcctttgtgaaatacatttattg

SEQ ID NO: 50946 - DNA, 80 bp, synthetic construct; identical to SEQ ID NO: 24356
  misc_feature 1..80: note = Artificially Synthesized Probe
  source 1..80: mol_type = other DNA

SEQ ID NO: 50947 - DNA, 80 bp, synthetic construct
  misc_feature 1..80: note = Artificially Synthesized Probe
  source 1..80: mol_type = other DNA
gtgtgccatgatgtccagctaatttttgtatttttagtagagatggggtttcaccatgttggccaggctggtctcgattt

SEQ ID NO: 50948 - DNA, 80 bp, synthetic construct
  misc_feature 1..80: note = Artificially Synthesized Probe
  source 1..80: mol_type = other DNA
cacttgtgtccttacaccaaagccacactatcttgattactattacatatcttgaaatttactagtctgagtcttccatc

SEQ ID NO: 50949 - DNA, 80 bp, synthetic construct
  misc_feature 1..80: note = Artificially Synthesized Probe
  source 1..80: mol_type = other DNA
tcagggtagctgggattacaggcatgcaccaccacacccggcaaatttttgtatttttagtagagacagggttttaccct

SEQ ID NO: 50950 - DNA, 80 bp, synthetic construct; identical to SEQ ID NO: 24357
  misc_feature 1..80: note = Artificially Synthesized Probe
  source 1..80: mol_type = other DNA

SEQ ID NO: 50951 - DNA, 80 bp, synthetic construct
  misc_feature 1..80: note = Artificially Synthesized Probe
  source 1..80: mol_type = other DNA
ctagagtgcagtggcgtgatctcagctcactgcaatctccacctcccgggttcaagtgattctcctgcctcagcctccag

SEQ ID NO: 50952 - DNA, 80 bp, synthetic construct
  misc_feature 1..80: note = Artificially Synthesized Probe
  source 1..80: mol_type = other DNA
actgctcccaggctaaactttatcaaatttatttctgagaattttatgtttttatggtactacaaattgtataggtggat

SEQ ID NO: 50953 - DNA, 80 bp, synthetic construct
  misc_feature 1..80: note = Artificially Synthesized Probe
  source 1..80: mol_type = other DNA
ggtgttggttatgtgagtatgttcaccttgtgaaaattagttgagtacatttaagattaagcatttctatttatgttata

SEQ ID NO: 50954 - DNA, 80 bp, synthetic construct
  misc_feature 1..80: note = Artificially Synthesized Probe
  source 1..80: mol_type = other DNA
acacttgactgtatgctaggtggtgtgctaagcatgcttttcatgagggttttttaatttgttccttacaaaaacccaat

SEQ ID NO: 50955 - DNA, 80 bp, synthetic construct; identical to SEQ ID NO: 24358
  misc_feature 1..80: note = Artificially Synthesized Probe
  source 1..80: mol_type = other DNA

SEQ ID NO: 50956 - DNA, 80 bp, synthetic construct
  misc_feature 1..80: note = Artificially Synthesized Probe
  source 1..80: mol_type = other DNA
cgcctggctaattttttgtagagatggggtttccccatgttgccctggctggtctcaaactcctggactcaagtgatcct

SEQ ID NO: 50957 - DNA, 80 bp, synthetic construct
  misc_feature 1..80: note = Artificially Synthesized Probe
  source 1..80: mol_type = other DNA
gacttgatcattgaaagtatcacaaagtcttatctttagcttctgcagtaggatacccagactttttaaatccttaggca

SEQ ID NO: 50958 - DNA, 80 bp, synthetic construct
  misc_feature 1..80: note = Artificially Synthesized Probe
  source 1..80: mol_type = other DNA
gttactggcattctggtctttatccagaaaacagtactccagtagcacccaactcatgtccatttccaccttttaaaaga

SEQ ID NO: 50959 - DNA, 80 bp, synthetic construct; identical to SEQ ID NO: 24359
  misc_feature 1..80: note = Artificially Synthesized Probe
  source 1..80: mol_type = other DNA

SEQ ID NO: 50960 - DNA, 80 bp, synthetic construct
  misc_feature 1..80: note = Artificially Synthesized Probe
  source 1..80: mol_type = other DNA
ttcagctgtgtatctttactttgtaaagagccctgtgtataggatttaacatctagaaaataagcaagcctcaagagttc

SEQ ID NO: 50961 - DNA, 80 bp, synthetic construct
  misc_feature 1..80: note = Artificially Synthesized Probe
  source 1..80: mol_type = other DNA
cattgagtatgtctgagcagggatgaactctatggtaacatgggtctttctgccacatttgggttgccttaagtaaatat

SEQ ID NO: 50962 - DNA, 80 bp, synthetic construct
  misc_feature 1..80: note = Artificially Synthesized Probe
  source 1..80: mol_type = other DNA
tttttctcatactcatatccagtcgatcagcaaattcagtaggatctgtcttcagaatatacactgaatcccaattattt

SEQ ID NO: 50963 - DNA, 80 bp, synthetic construct
  misc_feature 1..80: note = Artificially Synthesized Probe
  source 1..80: mol_type = other DNA
cgcctcccgggttcacgccattctcctgcctcagcctcccaagtagctgggactacaggcgcccgccactacgcccggct

SEQ ID NO: 50964 - DNA, 80 bp, synthetic construct; identical to SEQ ID NO: 24360
  misc_feature 1..80: note = Artificially Synthesized Probe
  source 1..80: mol_type = other DNA

SEQ ID NO: 50965 - DNA, 80 bp, synthetic construct
  misc_feature 1..80: note = Artificially Synthesized Probe
  source 1..80: mol_type = other DNA
tccccattctcttagtcaaagcccagattcacagaataggacataatctccgccttttgatgggaggagtagcattcatg

SEQ ID NO: 50966 - DNA, 80 bp, synthetic construct
  misc_feature 1..80: note = Artificially Synthesized Probe
  source 1..80: mol_type = other DNA
gccgactgccacccaggacctagggtctcaaaatttccattgcctagaccattcttcctcgctgtctagtcctcatttcc

SEQ ID NO: 50967 - DNA, 80 bp, synthetic construct
  misc_feature 1..80: note = Artificially Synthesized Probe
  source 1..80: mol_type = other DNA
tgtagtcaaaatgtagtcaagattttcaatttttaaatttatggttagcactttttctctttgcttatcccaagatcata

SEQ ID NO: 50968 - DNA, 80 bp, synthetic construct; identical to SEQ ID NO: 24361
  misc_feature 1..80: note = Artificially Synthesized Probe
  source 1..80: mol_type = other DNA

SEQ ID NO: 50969 - DNA, 80 bp, synthetic construct
  misc_feature 1..80: note = Artificially Synthesized Probe
  source 1..80: mol_type = other DNA
aatctccacctcctgggttcaagtgattctcctgcctcagcctcccaagtagctgggattacaggcacccgccaccacac

SEQ ID NO: 50970 - DNA, 80 bp, synthetic construct
  misc_feature 1..80: note = Artificially Synthesized Probe
  source 1..80: mol_type = other DNA
taggcagaattcagttccttgctgttgtaggactgaggcccccattttcttactggctgtcagctgggggctcctttcag

SEQ ID NO: 50971 - DNA, 80 bp, synthetic construct
  misc_feature 1..80: note = Artificially Synthesized Probe
  source 1..80: mol_type = other DNA
acagcaatacctacattactgtttgaataactcagagaaggtatgtgtacaccaggggccaagagtcttggggaccagcc

SEQ ID NO: 50972 - DNA, 80 bp, synthetic construct
  misc_feature 1..80: note = Artificially Synthesized Probe
  source 1..80: mol_type = other DNA
ccagctactcaggaggctgaagcaggagaatcacttgaacccgggaggcagaggttgcagtgagccgagatcacgctatt

SEQ ID NO: 50973 - DNA, 80 bp, synthetic construct; identical to SEQ ID NO: 24362
  misc_feature 1..80: note = Artificially Synthesized Probe
  source 1..80: mol_type = other DNA

SEQ ID NO: 50974 - DNA, 80 bp, synthetic construct
  misc_feature 1..80: note = Artificially Synthesized Probe
  source 1..80: mol_type = other DNA
tgtttttaatgtgcctttcacactaagagtatatgttagtgatgttagagactgtcatttttgttcactgttatattcct

SEQ ID NO: 50975 - DNA, 80 bp, synthetic construct
  misc_feature 1..80: note = Artificially Synthesized Probe
  source 1..80: mol_type = other DNA
gtaccacagagtctcagaatattcattggtttcttttcatgaggaacttcttatttgacaattaaaaaccaagttgttgg

SEQ ID NO: 50976 - DNA, 80 bp, synthetic construct
  misc_feature 1..80: note = Artificially Synthesized Probe
  source 1..80: mol_type = other DNA
aaatataaaacttagccaggcgtggtggtgggcacctgtagtcccaatacttgggaggctgaggcaggagaatcgcttga

SEQ ID NO: 50977 - DNA, 80 bp, synthetic construct; identical to SEQ ID NO: 24363
  misc_feature 1..80: note = Artificially Synthesized Probe
  source 1..80: mol_type = other DNA

SEQ ID NO: 50978 - DNA, 80 bp, synthetic construct; identical to SEQ ID NO: 24201
  misc_feature 1..80: note = Artificially Synthesized Probe
  source 1..80: mol_type = other DNA

SEQ ID NO: 50979 - DNA, 80 bp, synthetic construct
  misc_feature 1..80: note = Artificially Synthesized Probe
  source 1..80: mol_type = other DNA
aaaagttgtgagcaagtaattgtataaatgtccaacaactgttgtatacaagaaaaagcaaattagatttttggcttgct

SEQ ID NO: 50980 - DNA, 80 bp, synthetic construct
  misc_feature 1..80: note = Artificially Synthesized Probe
  source 1..80: mol_type = other DNA
agaataacagagtgggctcaatcatgtagacataatatagcatgccataccagaaaatcatatatatttccctcattttc

SEQ ID NO: 50981 - DNA, 80 bp, synthetic construct; identical to SEQ ID NO: 24364
  misc_feature 1..80: note = Artificially Synthesized Probe
  source 1..80: mol_type = other DNA

SEQ ID NO: 50982 - DNA, 80 bp, synthetic construct
  misc_feature 1..80: note = Artificially Synthesized Probe
  source 1..80: mol_type = other DNA
cctttttgatataaagcttttttttttttttttttttttttttttttttttttgagatggagtcttgccctgtcgcccag

SEQ ID NO: 50983 - DNA, 80 bp, synthetic construct
  misc_feature 1..80: note = Artificially Synthesized Probe
  source 1..80: mol_type = other DNA
caccatgttagccaggatggtctggatctcctgacctcgtggtccacctgcctcggcctcccaaagtgctgggattacag

SEQ ID NO: 50984 - DNA, 80 bp, synthetic construct
  misc_feature 1..80: note = Artificially Synthesized Probe
  source 1..80: mol_type = other DNA
tggcgcgatctcggctcattgcaacctctgcctcccagattcaagcaattctcctgcctcagcctcccgagtagctggga

SEQ ID NO: 50985 - DNA, 80 bp, synthetic construct; identical to SEQ ID NO: 24365
  misc_feature 1..80: note = Artificially Synthesized Probe
  source 1..80: mol_type = other DNA

SEQ ID NO: 50986 - DNA, 80 bp, synthetic construct
  misc_feature 1..80: note = Artificially Synthesized Probe
  source 1..80: mol_type = other DNA
cactttgggaggccgaagtggatggatcacgaggtcaagagttcgagaccagcatgaccaacatagtgaaaccctgtctc

SEQ ID NO: 50987 - DNA, 80 bp, synthetic construct
  misc_feature 1..80: note = Artificially Synthesized Probe
  source 1..80: mol_type = other DNA
cacacccctgcattccagactgggcgacagggcgagactccatctcagaaaataaataaataaataaatagataaataaa

SEQ ID NO: 50988 - DNA, 80 bp, synthetic construct
  misc_feature 1..80: note = Artificially Synthesized Probe
  source 1..80: mol_type = other DNA
tgccaaggtgtcagtatttggggggaatgctatttcaggaaaataggagtcttgtgtattcaaagtttattttaagagaa

SEQ ID NO: 50989 - DNA, 80 bp, synthetic construct; identical to SEQ ID NO: 24366
  misc_feature 1..80: note = Artificially Synthesized Probe
  source 1..80: mol_type = other DNA

SEQ ID NO: 50990 - DNA, 80 bp, synthetic construct
  misc_feature 1..80: note = Artificially Synthesized Probe
  source 1..80: mol_type = other DNA
ttaccattttaactatttaaaatgtatagttaagtagtgttaagtatattcacactgttttgcatatataatctttagaa

SEQ ID NO: 50991 - DNA, 80 bp, synthetic construct
  misc_feature 1..80: note = Artificially Synthesized Probe
  source 1..80: mol_type = other DNA
atattataaaccatatgatgatgaatttttatacattaatcttgtaggaatcctaggggaaaaaatacagacatagaatc

SEQ ID NO: 50992 - DNA, 80 bp, synthetic construct
  misc_feature 1..80: note = Artificially Synthesized Probe
  source 1..80: mol_type = other DNA
ggaatttaagttgctgtttaaaacaaaagaagtacctatttatatcttaggaataaccactataaaaactgaattttacc

SEQ ID NO: 50993 - DNA, 80 bp, synthetic construct
  misc_feature 1..80: note = Artificially Synthesized Probe
  source 1..80: mol_type = other DNA
ccactaagaattgaacaggagttgattagacctgtgtatcctttacctaatattgatccctggtttgtatccactgacca

SEQ ID NO: 50994 - DNA, 80 bp, synthetic construct
  misc_feature 1..80: note = Artificially Synthesized Probe
  source 1..80: mol_type = other DNA
caaagacttatttataggtacatggtgaaatgatcaggaacaatttgatggcacccattaaaaacacaggactgcatttt

SEQ ID NO: 50995 - DNA, 80 bp, synthetic construct; identical to SEQ ID NO: 24367
  misc_feature 1..80: note = Artificially Synthesized Probe
  source 1..80: mol_type = other DNA

SEQ ID NO: 50996 - DNA, 80 bp, synthetic construct
  misc_feature 1..80: note = Artificially Synthesized Probe
  source 1..80: mol_type = other DNA
cgggagtgagagtatgaaggaatccttctgaactatttaagtctgtagaaaacctctgatatgtactttgtaaacagaaa

SEQ ID NO: 50997 - DNA, 80 bp, synthetic construct
  misc_feature 1..80: note = Artificially Synthesized Probe
  source 1..80: mol_type = other DNA
ccccaagatctgttctccactgttttcctctgcacctcctacaaaatattctctgaaatgctaaccaagttatcttttgg

SEQ ID NO: 50998 - DNA, 80 bp, synthetic construct; identical to SEQ ID NO: 24368
  misc_feature 1..80: note = Artificially Synthesized Probe
  source 1..80: mol_type = other DNA

SEQ ID NO: 50999 - DNA, 80 bp, synthetic construct
  misc_feature 1..80: note = Artificially Synthesized Probe
  source 1..80: mol_type = other DNA
gaacatcccctagtgctgaaatccatatagatagatgtgaattgttttctggaatcctttttatttttaatgtcttgggg

SEQ ID NO: 51000 - DNA, 80 bp, synthetic construct
  misc_feature 1..80: note = Artificially Synthesized Probe
  source 1..80: mol_type = other DNA
cagaacaaatgctgttctgttttaaaggaccttttgtaaaaaatcattcgccaccttctgtgttctttttctttgcctcc

SEQ ID NO: 51001 - DNA, 80 bp, synthetic construct
  misc_feature 1..80: note = Artificially Synthesized Probe
  source 1..80: mol_type = other DNA
gcaatgaatggcaccatcttggctcactgcagactccgccaagcaattctcctgcctcagcctcctgagtagctgggact

SEQ ID NO: 51002 - DNA, 80 bp, synthetic construct
  misc_feature 1..80: note = Artificially Synthesized Probe
  source 1..80: mol_type = other DNA
gacagattctctgtggagaggcctggcagaacgaagaggatggtgagcctttaacttttcttactcttatacggcttcag

SEQ ID NO: 51003 - DNA, 80 bp, synthetic construct; identical to SEQ ID NO: 24369
  misc_feature 1..80: note = Artificially Synthesized Probe
  source 1..80: mol_type = other DNA

SEQ ID NO: 51004 - DNA, 80 bp, synthetic construct
  misc_feature 1..80: note = Artificially Synthesized Probe
  source 1..80: mol_type = other DNA
agtatggtggcgtgcacctgtaatcccagctactgtagaggctgaggcaggagaatcgcatgaaccctaggtttctttca

SEQ ID NO: 51005 - DNA, 80 bp, synthetic construct
  misc_feature 1..80: note = Artificially Synthesized Probe
  source 1..80: mol_type = other DNA
gattttctgacttaattccgaattccccaaagcatcatatagttagcagtctaagagacttcactaatttttttgttgtt

SEQ ID NO: 51006 - DNA, 80 bp, synthetic construct
  misc_feature 1..80: note = Artificially Synthesized Probe
  source 1..80: mol_type = other DNA
taataggcatgtgtgtgcttagtgatgtccttccaaattaattttatcagttgtttatcttggatcataaagaggaaaac

SEQ ID NO: 51007 - DNA, 80 bp, synthetic construct; identical to SEQ ID NO: 24370
  misc_feature 1..80: note = Artificially Synthesized Probe
  source 1..80: mol_type = other DNA

SEQ ID NO: 51008 - DNA, 80 bp, synthetic construct
  misc_feature 1..80: note = Artificially Synthesized Probe
  source 1..80: mol_type = other DNA
caaaaaattagctgggcctggtggcgcatgcctgtaatcccagccactcaggaggctaaggtgggaggatggcttgagtc

SEQ ID NO: 51009 - DNA, 80 bp, synthetic construct
  misc_feature 1..80: note = Artificially Synthesized Probe
  source 1..80: mol_type = other DNA
cttctcaaatatgttttttaattcttatttcgctacatagaaaaatagaaatctttcataacctacttcatactttggaa

SEQ ID NO: 51010 - DNA, 80 bp, synthetic construct
  misc_feature 1..80: note = Artificially Synthesized Probe
  source 1..80: mol_type = other DNA
gagaaaattttagggcagctgagaagatttctgtatccctcagaaaaaaagaatctcgtctccaaataactcctgaaatt

SEQ ID NO: 51011 - DNA, 80 bp, synthetic construct
  misc_feature 1..80: note = Artificially Synthesized Probe
  source 1..80: mol_type = other DNA
tccttttttgaaggcagaaagatcaagaagtaagtgggcagttcttggcagatggatgtgaaaatgccaaaggtaaaagg

SEQ ID NO: 51012 - DNA, 80 bp, synthetic construct
  misc_feature 1..80: note = Artificially Synthesized Probe
  source 1..80: mol_type = other DNA
tctattttttttcctatgaatttgattcctctagatacctcatttaagtagaatcatacagtgtttgcctttttgtgact

SEQ ID NO: 51013 - DNA, 80 bp, synthetic construct; identical to SEQ ID NO: 24371
  misc_feature 1..80: note = Artificially Synthesized Probe
  source 1..80: mol_type = other DNA

SEQ ID NO: 51014 - DNA, 80 bp, synthetic construct
  misc_feature 1..80: note = Artificially Synthesized Probe
  source 1..80: mol_type = other DNA
ccatcagtttctcattttcttctttcaagttgtcttaccaagcctaatacgtcaataaagtctttctgtgttatactttt

SEQ ID NO: 51015 - DNA, 80 bp, synthetic construct
  misc_feature 1..80: note = Artificially Synthesized Probe
  source 1..80: mol_type = other DNA
atatctagatggatttgacagtcttcccctgggacatgaactctgtagttttctctcttgaataatactgaatatgctgt

SEQ ID NO: 51016 - DNA, 80 bp, synthetic construct
  misc_feature 1..80: note = Artificially Synthesized Probe
  source 1..80: mol_type = other DNA
tgtactcacattcttgtaggtactaggcatttcacatagaagtagtccctgttttcaaagatcttccatcataaaaggtt

SEQ ID NO: 51017 - DNA, 80 bp, synthetic construct; identical to SEQ ID NO: 24372
  misc_feature 1..80: note = Artificially Synthesized Probe
  source 1..80: mol_type = other DNA

SEQ ID NO: 51018 - DNA, 80 bp, synthetic construct
  misc_feature 1..80: note = Artificially Synthesized Probe
  source 1..80: mol_type = other DNA
aatgtaccattaatctggaattctttcataacgcatcttgtttccccttttgtttatgctggtgtatcatgtttcattaa

SEQ ID NO: 51019 - DNA, 80 bp, synthetic construct
  misc_feature 1..80: note = Artificially Synthesized Probe
  source 1..80: mol_type = other DNA
caccaaacaattaattatattgtaatggagctatagagggaggagtggatgactggcccagagaaaacatgatttctctg

SEQ ID NO: 51020 - DNA, 80 bp, synthetic construct
  misc_feature 1..80: note = Artificially Synthesized Probe
  source 1..80: mol_type = other DNA
agcaggaagtgattgccatttactgattttttttttgtagcaaagatctagcttgggatacgagtattccagagatgtgc

SEQ ID NO: 51021 - DNA, 80 bp, synthetic construct
  misc_feature 1..80: note = Artificially Synthesized Probe
  source 1..80: mol_type = other DNA
cattagtgttttcgaaaacacctaattaaaattcaggggtatcattaacaaaatttcattgagcctgaagaaggttcttg

SEQ ID NO: 51022 - DNA, 80 bp, synthetic construct; identical to SEQ ID NO: 24373
  misc_feature 1..80: note = Artificially Synthesized Probe
  source 1..80: mol_type = other DNA

SEQ ID NO: 51023 - DNA, 80 bp, synthetic construct
  misc_feature 1..80: note = Artificially Synthesized Probe
  source 1..80: mol_type = other DNA
gcatgtgctagttcaaaggtaatagttaccattactaacaaaatttccaaaagatgaggccagtgaatctaagcagtagt

SEQ ID NO: 51024 - DNA, 80 bp, synthetic construct
  misc_feature 1..80: note = Artificially Synthesized Probe
  source 1..80: mol_type = other DNA
gttactctttgacatgggactcctgaaatcaggcttacctttgctcctccgcagacagctatggagagtatatggaatgg

SEQ ID NO: 51025 - DNA, 80 bp, synthetic construct; identical to SEQ ID NO: 24202
  misc_feature 1..80: note = Artificially Synthesized Probe
  source 1..80: mol_type = other DNA

SEQ ID NO: 51026 - DNA, 80 bp, synthetic construct; identical to SEQ ID NO: 24374
  misc_feature 1..80: note = Artificially Synthesized Probe
  source 1..80: mol_type = other DNA

SEQ ID NO: 51027 - DNA, 80 bp, synthetic construct
  misc_feature 1..80: note = Artificially Synthesized Probe
  source 1..80: mol_type = other DNA
ggacagtatttattcaaaaacaaacctcctgacgggaatgctcctcccaactctttttatagagcactttatcctaaaat

SEQ ID NO: 51028 - DNA, 80 bp, synthetic construct
  misc_feature 1..80: note = Artificially Synthesized Probe
  source 1..80: mol_type = other DNA
ctgtaatcccagcatttttggaggctgaggtcaggagtttgagaccagcctggctaacatggtgagacccctgtctctac

SEQ ID NO: 51029 - DNA, 80 bp, synthetic construct
  misc_feature 1..80: note = Artificially Synthesized Probe
  source 1..80: mol_type = other DNA
caaaaaaaaagaaaaggaaaagaaaatcaatctctttacaggcgagtagggtaggtaaaataaattgctaggcaaaattt

SEQ ID NO: 51030 - DNA, 80 bp, synthetic construct; identical to SEQ ID NO: 24375
  misc_feature 1..80: note = Artificially Synthesized Probe
  source 1..80: mol_type = other DNA

SEQ ID NO: 51031 - DNA, 80 bp, synthetic construct
  misc_feature 1..80: note = Artificially Synthesized Probe
  source 1..80: mol_type = other DNA
gagtaaagcattgagccattgattgtcattaaagcctaaaaagagtttgattctaggtgtttcctaacactgcctctttc

SEQ ID NO: 51032 - DNA, 80 bp, synthetic construct
  misc_feature 1..80: note = Artificially Synthesized Probe
  source 1..80: mol_type = other DNA
gtctattcagttgtagaaaggtagcagagggagcaagagtgaccacattcatagcgcagtctaaagcataaactctaagc

SEQ ID NO: 51033 - DNA, 80 bp, synthetic construct
  misc_feature 1..80: note = Artificially Synthesized Probe
  source 1..80: mol_type = other DNA
tctcttcttgaaatgcactgaatgggctgttactcttttggccatcacataattatagactaccctgttccttaatgaaa

SEQ ID NO: 51034 - DNA, 80 bp, synthetic construct
  misc_feature 1..80: note = Artificially Synthesized Probe
  source 1..80: mol_type = other DNA
aacccaatcgtcatgcttacaaactacaaaaggatcagaattctttttttccttttctttctatagccagcttattcagc

SEQ ID NO: 51035 - DNA, 80 bp, synthetic construct; identical to SEQ ID NO: 24376
  misc_feature 1..80: note = Artificially Synthesized Probe
  source 1..80: mol_type = other DNA

SEQ ID NO: 51036 - DNA, 80 bp, synthetic construct
  misc_feature 1..80: note = Artificially Synthesized Probe
  source 1..80: mol_type = other DNA
tctgttctttgtcatagatagtaattttgtatatatcggcacagttctgaaactaaagaagaataaaccaccaggtcccc

SEQ ID NO: 51037 - DNA, 80 bp, synthetic construct
  misc_feature 1..80: note = Artificially Synthesized Probe
  source 1..80: mol_type = other DNA
aaaaaccacctcacgggggaatgatatgaatgcaatgaagccttcctttcaggtagtggtaactgtagtgcaggtctgta

SEQ ID NO: 51038 - DNA, 80 bp, synthetic construct
  misc_feature 1..80: note = Artificially Synthesized Probe
  source 1..80: mol_type = other DNA
aggatagcttgagttctgggtaccagcagcactgctgggaacctctgttaggaattttgccgtaagctaaaggatttagc

SEQ ID NO: 51039 - DNA, 80 bp, synthetic construct; identical to SEQ ID NO: 24377
  misc_feature 1..80: note = Artificially Synthesized Probe
  source 1..80: mol_type = other DNA

SEQ ID NO: 51040 - DNA, 80 bp, synthetic construct
  misc_feature 1..80: note = Artificially Synthesized Probe
  source 1..80: mol_type = other DNA
caaaaatagaataatcaaaatatataatcacacaaaattctcaagctatccaagggccccacactctgctgtgaagccca

SEQ ID NO: 51041 - DNA, 80 bp, synthetic construct
  misc_feature 1..80: note = Artificially Synthesized Probe
  source 1..80: mol_type = other DNA
ggtaatcaaactcaaattcacattactaagtatgtgacagaagcatcttggcctatttcatttctggctcctgagggcta

SEQ ID NO: 51042 - DNA, 80 bp, synthetic construct
  misc_feature 1..80: note = Artificially Synthesized Probe
  source 1..80: mol_type = other DNA
ttaggtgacagtggctgccacttcatccttgccctccacaacttgcccatatttcaagcagtatgtcttaaggacacact

SEQ ID NO: 51043 - DNA, 80 bp, synthetic construct; identical to SEQ ID NO: 24378
  misc_feature 1..80: note = Artificially Synthesized Probe
  source 1..80: mol_type = other DNA

SEQ ID NO: 51044 - DNA, 80 bp, synthetic construct
  misc_feature 1..80: note = Artificially Synthesized Probe
  source 1..80: mol_type = other DNA
attgtttctgcatctggggatagaactataaaggtaataaggcatttttcagtaagtttccaacttagaatgggggaatt

SEQ ID NO: 51045 - DNA, 80 bp, synthetic construct
  misc_feature 1..80: note = Artificially Synthesized Probe
  source 1..80: mol_type = other DNA
gtgagaagagactaaccctagaagagtaaatcaatctgaggaattctcatgtggtaacagccaactgcaaattagcctct

SEQ ID NO: 51046 - DNA, 80 bp, synthetic construct
  misc_feature 1..80: note = Artificially Synthesized Probe
  source 1..80: mol_type = other DNA
aataacatttcttgatatctgatagtatatgcccctcagcttccccttcccccaagattgcattggctatcttggccttt

SEQ ID NO: 51047 - DNA, 80 bp, synthetic construct
  misc_feature 1..80: note = Artificially Synthesized Probe
  source 1..80: mol_type = other DNA
accaaatcaactgctcaatgccattttctttttcaggtatggaacacaagtacttgtgaatttgtaaggaccttaaatgg

SEQ ID NO: 51048 - DNA, 80 bp, synthetic construct; identical to SEQ ID NO: 24379
  misc_feature 1..80: note = Artificially Synthesized Probe
  source 1..80: mol_type = other DNA

SEQ ID NO: 51049 - DNA, 80 bp, synthetic construct
  misc_feature 1..80: note = Artificially Synthesized Probe
  source 1..80: mol_type = other DNA
cataattggccagagagttacctgtctttgaaattatgaagatttcacagttggaagtcctttttggggttttcccttca

SEQ ID NO: 51050 - DNA, 80 bp, synthetic construct
  misc_feature 1..80: note = Artificially Synthesized Probe
  source 1..80: mol_type = other DNA
tacagtttttataattagtacacaaaagttcttgagaactgactttgcatttctattctctgagaagagctgtcctggac

SEQ ID NO: 51051 - DNA, 80 bp, synthetic construct
  misc_feature 1..80: note = Artificially Synthesized Probe
  source 1..80: mol_type = other DNA
catttccttctcaggcaactgcgtgcattgaattcgtttttatgcctggaagaacctgtttacagaattatgtaaagccc

SEQ ID NO: 51052 - DNA, 80 bp, synthetic construct; identical to SEQ ID NO: 24380
  misc_feature 1..80: note = Artificially Synthesized Probe
  source 1..80: mol_type = other DNA

SEQ ID NO: 51053 - DNA, 80 bp, synthetic construct
  misc_feature 1..80: note = Artificially Synthesized Probe
  source 1..80: mol_type = other DNA
aaagagaaaatctacgtcttaatccttccttatgtttatggtgttaaacataaccattccttgtttctaaaagcttatag

SEQ ID NO: 51054 - DNA, 80 bp, synthetic construct
  misc_feature 1..80: note = Artificially Synthesized Probe
  source 1..80: mol_type = other DNA
ccctgtaaagcaaagaacaagaaaaacccagtgttaacaggctacccatgtaaaagggtaacctgttaacaaaacagaaa

SEQ ID NO: 51055 - DNA, 80 bp, synthetic construct
  misc_feature 1..80: note = Artificially Synthesized Probe
  source 1..80: mol_type = other DNA
aatttctagtggttatggaatccattaattttgtgaatggaccccatgtccaccaatcctaaacacagagtaaattcaaa

SEQ ID NO: 51056 - DNA, 80 bp, synthetic construct
  misc_feature 1..80: note = Artificially Synthesized Probe
  source 1..80: mol_type = other DNA
ggcgcctgtaatcccagctacttaggaggctgaggcaggagaattgcttgaaccagggaggcagaggttgcagtgagcca

SEQ ID NO: 51057 - DNA, 80 bp, synthetic construct; identical to SEQ ID NO: 24381
  misc_feature 1..80: note = Artificially Synthesized Probe
  source 1..80: mol_type = other DNA

SEQ ID NO: 51058 - DNA, 80 bp, synthetic construct
  misc_feature 1..80: note = Artificially Synthesized Probe
  source 1..80: mol_type = other DNA
gcacacaccaccacgcccggctaatttttgtatttttagtagagacggggtttcaccatgttggtcaggctggtctcgaa

SEQ ID NO: 51059 - DNA, 80 bp, synthetic construct
  misc_feature 1..80: note = Artificially Synthesized Probe
  source 1..80: mol_type = other DNA
ttttcttattgtcctggctttgatctgtacccacctgtcttggaatttgtctgctatgtaccttgaggaaacatggccta

SEQ ID NO: 51060 - DNA, 80 bp, synthetic construct
  misc_feature 1..80: note = Artificially Synthesized Probe
  source 1..80: mol_type = other DNA
ctcttagaagtgcccaggaagaggatgcttcacagttgtagatttctaggtctgtgtaatatcattaaaaggtctaatgt

SEQ ID NO: 51061 - DNA, 80 bp, synthetic construct
  misc_feature 1..80: note = Artificially Synthesized Probe
  source 1..80: mol_type = other DNA
catccatatttattgccatgaatttctgctattcttccctgccttctcttacatttgcttttaactaacatttttgtccc

SEQ ID NO: 51062 - DNA, 80 bp, synthetic construct; identical to SEQ ID NO: 24382
  misc_feature 1..80: note = Artificially Synthesized Probe
  source 1..80: mol_type = other DNA

SEQ ID NO: 51063 - DNA, 80 bp, synthetic construct
  misc_feature 1..80: note = Artificially Synthesized Probe
  source 1..80: mol_type = other DNA
tgaataagaattctgtatccaccagaaacagcagggggtactaagggagagagaatataattattcaaattggaacctgt

SEQ ID NO: 51064 - DNA, 80 bp, synthetic construct
  misc_feature 1..80: note = Artificially Synthesized Probe
  source 1..80: mol_type = other DNA
tctctgctaaaaataaaaaaaaaattagccaagcatggtggcaggtgcctgtaatcctagctactcaggaggctgaggca

SEQ ID NO: 51065 - DNA, 80 bp, synthetic construct
  misc_feature 1..80: note = Artificially Synthesized Probe
  source 1..80: mol_type = other DNA
tattcatgaggtagtgcctccagcaacttgagcccatcttttttgttccccatatacccccttttgacatttggggaaaa

SEQ ID NO: 51066 - DNA, 80 bp, synthetic construct; identical to SEQ ID NO: 24383
  misc_feature 1..80: note = Artificially Synthesized Probe
  source 1..80: mol_type = other DNA

SEQ ID NO: 51067 - DNA, 80 bp, synthetic construct
  misc_feature 1..80: note = Artificially Synthesized Probe
  source 1..80: mol_type = other DNA
tttttggctattaacaaagtttctataaacatttatgtagaagtcttgggatgaatgtatgctttttgcttttatttctc

SEQ ID NO: 51068 - DNA, 80 bp, synthetic construct
  misc_feature 1..80: note = Artificially Synthesized Probe
  source 1..80: mol_type = other DNA
gagcacagtctgtaatttagtcattctcattgtggtttaattcgtgtatctctaatgattaataatgtcaagcatctatt

SEQ ID NO: 51069 - DNA, 80 bp, synthetic construct
  misc_feature 1..80: note = Artificially Synthesized Probe
  source 1..80: mol_type = other DNA
gcggatcacctgaggtcaggagttggagaacagcctgaccaacatggtgaaatcccgtctctactaaaaatacaaaaatt

SEQ ID NO: 51070 - DNA, 80 bp, synthetic construct
  misc_feature 1..80: note = Artificially Synthesized Probe
  source 1..80: mol_type = other DNA
tttctttgttttcttaaaagtgtctttcaaaaagcggttcttaattttaagtctactgcattgactttttctattatggc

SEQ ID NO: 51071 - DNA, 80 bp, synthetic construct; identical to SEQ ID NO: 24384
  misc_feature 1..80: note = Artificially Synthesized Probe
  source 1..80: mol_type = other DNA

SEQ ID NO: 51072 - DNA, 80 bp, synthetic construct
  misc_feature 1..80: note = Artificially Synthesized Probe
  source 1..80: mol_type = other DNA
agctttgtctttttcaaagttttttggggcctttgatttttcatgttaattttaaaatcagtttgccaagttcaaccaaa

SEQ ID NO: 51073 - DNA, 80 bp, synthetic construct
  misc_feature 1..80: note = Artificially Synthesized Probe
  source 1..80: mol_type = other DNA
gttttttgttggacttgtgttgactgtagatcagtttggagaatattgacttctgaacaatattgagtctttatctctcc

SEQ ID NO: 51074 - DNA, 80 bp, synthetic construct
  misc_feature 1..80: note = Artificially Synthesized Probe
  source 1..80: mol_type = other DNA
atccctaaatattttgtatttttaatgctattggaaaaggtatttttaaaccttggtttctgattgttcattgcaaatac

SEQ ID NO: 51075 - DNA, 80 bp, synthetic construct; identical to SEQ ID NO: 24385
  misc_feature 1..80: note = Artificially Synthesized Probe
  source 1..80: mol_type = other DNA

SEQ ID NO: 51076 - DNA, 80 bp, synthetic construct
  misc_feature 1..80: note = Artificially Synthesized Probe
  source 1..80: mol_type = other DNA
tacaggcacgtgccaccatgcccggctgattttttgtattttttagtagagacggggtttcatcatgttagccaggatgg

SEQ ID NO: 51077 - DNA, 80 bp, synthetic construct
  misc_feature 1..80: note = Artificially Synthesized Probe
  source 1..80: mol_type = other DNA
ggaacacatgttggattttgtgaaatgctttatctacatccattgagataatcatatggtttttcacttttattctgtta

SEQ ID NO: 51078 - DNA, 80 bp, synthetic construct; identical to SEQ ID NO: 24386
  misc_feature 1..80: note = Artificially Synthesized Probe
  source 1..80: mol_type = other DNA

SEQ ID NO: 51079 - DNA, 80 bp, synthetic construct
  misc_feature 1..80: note = Artificially Synthesized Probe
  source 1..80: mol_type = other DNA
atatttcttttgaagtccactttaatacttttgtcttccaagcagtttggccgttttatctaaattatgaaatttattga

SEQ ID NO: 51080 - DNA, 80 bp, synthetic construct
  misc_feature 1..80: note = Artificially Synthesized Probe
  source 1..80: mol_type = other DNA
tgaagctataaatgttattagaagtaattctaatcactactttagccacatcccaaaaaatgtcaattaagtcaagttgg

SEQ ID NO: 51081 - DNA, 80 bp, synthetic construct; identical to SEQ ID NO: 24203
  misc_feature 1..80: note = Artificially Synthesized Probe
  source 1..80: mol_type = other DNA

SEQ ID NO: 51082 - DNA, 80 bp, synthetic construct
  misc_feature 1..80: note = Artificially Synthesized Probe
  source 1..80: mol_type = other DNA
gtatcactatgccgcccaggctggaatgcagtggcacacccatgactcactgcagcctcaacctcccaggctctgtcaat

SEQ ID NO: 51083 - DNA, 80 bp, synthetic construct; identical to SEQ ID NO: 24387
  misc_feature 1..80: note = Artificially Synthesized Probe
  source 1..80: mol_type = other DNA

SEQ ID NO: 51084 - DNA, 80 bp, synthetic construct
  misc_feature 1..80: note = Artificially Synthesized Probe
  source 1..80: mol_type = other DNA
atgttgggcaggctggtctcgaactcctgacctcaggtgatccacacacctcggcctcccaaagtgttgggattacaggc

SEQ ID NO: 51085 - DNA, 80 bp, synthetic construct
  misc_feature 1..80: note = Artificially Synthesized Probe
  source 1..80: mol_type = other DNA
gatattatatgtaaacattctgcttttttatgattagtgtctgtgtggtgtatcttactatattcttttacttttaatat

SEQ ID NO: 51086 - DNA, 80 bp, synthetic construct
  misc_feature 1..80: note = Artificially Synthesized Probe
  source 1..80: mol_type = other DNA
atgttgctatttattttccattttttgcttttgtttgttacctcctgttttcatgctcttttttttttcttttttatctc

SEQ ID NO: 51087 - DNA, 80 bp, synthetic construct; identical to SEQ ID NO: 24388
  misc_feature 1..80: note = Artificially Synthesized Probe
  source 1..80: mol_type = other DNA

SEQ ID NO: 51088 - DNA, 80 bp, synthetic construct
  misc_feature 1..80: note = Artificially Synthesized Probe
  source 1..80: mol_type = other DNA
tagctgggactacaggcgcccgccaccacacccagctaattttttgtagttttaatagagatgggatttcaccatgttag

SEQ ID NO: 51089 - DNA, 80 bp, synthetic construct
  misc_feature 1..80: note = Artificially Synthesized Probe
  source 1..80: mol_type = other DNA
tcccattcctttgtataaattctatttccatctgatacattttccttttgcttaaagaacttactttaacatttcatgta

SEQ ID NO: 51090 - DNA, 80 bp, synthetic construct
  misc_feature 1..80: note = Artificially Synthesized Probe
  source 1..80: mol_type = other DNA
tcctgacagcttcccacatagctgactacaggcttgtgccaccatatctggctaattttctttatttttttagagatagg

SEQ ID NO: 51091 - DNA, 80 bp, synthetic construct
  misc_feature 1..80: note = Artificially Synthesized Probe
  source 1..80: mol_type = other DNA
ggctaaataattctatataggccaggcatggtgtctcacacctgtaatcccagcactttgggagtctgaggcggtggatt

SEQ ID NO: 51092 - DNA, 80 bp, synthetic construct
  misc_feature 1..80: note = Artificially Synthesized Probe
  source 1..80: mol_type = other DNA
tttgttgctgatagtgcagaggctttaaatctgtggtctgtggcccctgtacaagctataaacatgtgaatactttttcc

SEQ ID NO: 51093 - DNA, 80 bp, synthetic construct; identical to SEQ ID NO: 24389
  misc_feature 1..80: note = Artificially Synthesized Probe
  source 1..80: mol_type = other DNA

SEQ ID NO: 51094 - DNA, 80 bp, synthetic construct
  misc_feature 1..80: note = Artificially Synthesized Probe
  source 1..80: mol_type = other DNA
tgtgtcttggtgtggttttgtttgtatttttcctacttcacattaaaaaaatagaaattgtcagagcaatttgaagaaga

SEQ ID NO: 51095 - DNA, 80 bp, synthetic construct
  misc_feature 1..80: note = Artificially Synthesized Probe
  source 1..80: mol_type = other DNA
ctgtatttggagttataggagctttcaagaggtaaataaggttaaatgaagtcattggagtaggccctaatccaatatga

SEQ ID NO: 51096 - DNA, 80 bp, synthetic construct; identical to SEQ ID NO: 24390
  misc_feature 1..80: note = Artificially Synthesized Probe
  source 1..80: mol_type = other DNA

SEQ ID NO: 51097 - DNA, 80 bp, synthetic construct
  misc_feature 1..80: note = Artificially Synthesized Probe
  source 1..80: mol_type = other DNA
catcaaaacatatgaggcaaaaaaccatagaactgcaaggaaaaaatagatgcatccactgttatagttggagacttcag

SEQ ID NO: 51098 - DNA, 80 bp, synthetic construct
  misc_feature 1..80: note = Artificially Synthesized Probe
  source 1..80: mol_type = other DNA
tacaccaaggcagaccacagtcagggccataaaaggtaccttaaaaaatttacaagagtagaaatcatacagcatatgct

SEQ ID NO: 51099 - DNA, 80 bp, synthetic construct
  misc_feature 1..80: note = Artificially Synthesized Probe
  source 1..80: mol_type = other DNA
aatgtatttttttttaatttttacttttcatttttgtgggtacatagtaggtttatatatttatggggaacatgtgatgt

SEQ ID NO: 51100 - DNA, 80 bp, synthetic construct
  misc_feature 1..80: note = Artificially Synthesized Probe
  source 1..80: mol_type = other DNA
taaaatcaatagtctaagcttctactagagccaactaagaaaagagcaaattaaattcaaagtaagtagaagaaaagaaa

SEQ ID NO: 51101 - DNA, 80 bp, synthetic construct; identical to SEQ ID NO: 24391
  misc_feature 1..80: note = Artificially Synthesized Probe
  source 1..80: mol_type = other DNA

SEQ ID NO: 51102 - DNA, 80 bp, synthetic construct
  misc_feature 1..80: note = Artificially Synthesized Probe
  source 1..80: mol_type = other DNA
aggccatttaaagtatgtaatagtctacgcaagagactgggcttgagctagggcagtaggtatggaaaaggaggaaagac

SEQ ID NO: 51103 - DNA, 80 bp, synthetic construct
  misc_feature 1..80: note = Artificially Synthesized Probe
  source 1..80: mol_type = other DNA
aatggctaagctatgaagttcaataggttaggcagatcaaatgcattttcagcttaggatagtttcatttacaacaggtt

SEQ ID NO: 51104 - DNA, 80 bp, synthetic construct
  misc_feature 1..80: note = Artificially Synthesized Probe
  source 1..80: mol_type = other DNA
tatggtttttcttttttttttttttttttttttttttgagacggagtctcactcttgttacccaggctggagtagtgcaa

SEQ ID NO: 51105 - DNA, 80 bp, synthetic construct
  misc_feature 1..80: note = Artificially Synthesized Probe
  source 1..80: mol_type = other DNA
ctcaaactccggacctcatgatccacctgcctcaacctcccaaagatctgggattataggcgtgagccactgcacccggc

SEQ ID NO: 51106 - DNA, 80 bp, synthetic construct; identical to SEQ ID NO: 24392
  misc_feature 1..80: note = Artificially Synthesized Probe
  source 1..80: mol_type = other DNA

SEQ ID NO: 51107 - DNA, 80 bp, synthetic construct
  misc_feature 1..80: note = Artificially Synthesized Probe
  source 1..80: mol_type = other DNA
tagtaaaatactactacaaacctaccaaaataaatgtaaaagattggtaatatcaatttttggtgaagatgtggagtaac

SEQ ID NO: 51108 - DNA, 80 bp, synthetic construct
  misc_feature 1..80: note = Artificially Synthesized Probe
  source 1..80: mol_type = other DNA
tgttcctagcagctttgttttataatagccataaactataatcagcccctatgtccaccaacaagagaatagatggattg

SEQ ID NO: 51109 - DNA, 80 bp, synthetic construct; identical to SEQ ID NO: 24393
  misc_feature 1..80: note = Artificially Synthesized Probe
  source 1..80: mol_type = other DNA

SEQ ID NO: 51110 - DNA, 80 bp, synthetic construct
  misc_feature 1..80: note = Artificially Synthesized Probe
  source 1..80: mol_type = other DNA
agaaaaaccaggcatggctgggcacagtagctaaggcctgtaatcccaacactttgggaggccgaggtgggcagatcacg

SEQ ID NO: 51111 - DNA, 80 bp, synthetic construct; identical to SEQ ID NO: 24204
  misc_feature 1..80: note = Artificially Synthesized Probe
  source 1..80: mol_type = other DNA

SEQ ID NO: 51112 - DNA, 80 bp, synthetic construct
  misc_feature 1..80: note = Artificially Synthesized Probe
  source 1..80: mol_type = other DNA
agccaagatcgcgccactgcactccaccctgggcgacagagcgagactctgtctcaaaaaaaaaaaagccagacacaaaa

SEQ ID NO: 51113 - DNA, 80 bp, synthetic construct
  misc_feature 1..80: note = Artificially Synthesized Probe
  source 1..80: mol_type = other DNA
gcctgggcaacaaaaagacctaatctctacaaaaaaaaaaaaaaaaagccaggtgtggtggcatgagtctatagtcctca

SEQ ID NO: 51114 - DNA, 80 bp, synthetic construct
  misc_feature 1..80: note = Artificially Synthesized Probe
  source 1..80: mol_type = other DNA
gccgaggcgggtggatcacgaggtcaggagatcaagaccatcctggctaacacgatgaaaccccgtctctactaaaaata

SEQ ID NO: 51115 - DNA, 80 bp, synthetic construct; identical to SEQ ID NO: 24394
  misc_feature 1..80: note = Artificially Synthesized Probe
  source 1..80: mol_type = other DNA

SEQ ID NO: 51116 - DNA, 80 bp, synthetic construct
  misc_feature 1..80: note = Artificially Synthesized Probe
  source 1..80: mol_type = other DNA
ggttgactatgactagcttataattggccatgataggagtttttaatgccgtggaaatctaccgatggttttacaaagta

SEQ ID NO: 51117 - DNA, 80 bp, synthetic construct
  misc_feature 1..80: note = Artificially Synthesized Probe
  source 1..80: mol_type = other DNA
ttaatagcatgctatttagcatgtcttggccaaagagtattgctttgtttacagctgcctagtatttgacttttccatgc

SEQ ID NO: 51118 - DNA, 80 bp, synthetic construct
  misc_feature 1..80: note = Artificially Synthesized Probe
  source 1..80: mol_type = other DNA
cctcagcctcccaagtagctgggactataggcacatgccaccagcccggctaactttttgtatttttatagagatggggt

SEQ ID NO: 51119 - DNA, 80 bp, synthetic construct; identical to SEQ ID NO: 24395
  misc_feature 1..80: note = Artificially Synthesized Probe
  source 1..80: mol_type = other DNA

SEQ ID NO: 51120 - DNA, 80 bp, synthetic construct
  misc_feature 1..80: note = Artificially Synthesized Probe
  source 1..80: mol_type = other DNA
catacacctacatctccagataaataaccatacactgacctcatacttgcccaggtatcgaaatcgattatgtacataac

SEQ ID NO: 51121 - DNA, 80 bp, synthetic construct
  misc_feature 1..80: note = Artificially Synthesized Probe
  source 1..80: mol_type = other DNA
ccatcctggctaacatgatgaaactcagtctttactaaaaaatacaaaaaattagccaggcatggtggtgggcgcctgta

SEQ ID NO: 51122 - DNA, 80 bp, synthetic construct
  misc_feature 1..80: note = Artificially Synthesized Probe
  source 1..80: mol_type = other DNA
cagcctcagttctagatgattctagggtcctacttgtgtggtaagcctagtcattcctgccctagttatctagtagtact

SEQ ID NO: 51123 - DNA, 80 bp, synthetic construct
  misc_feature 1..80: note = Artificially Synthesized Probe
  source 1..80: mol_type = other DNA
agtaaacagtctgatgtctaatgtgtgaatggaaacatctcttggtgaaagttcacactgacatataaataaaagggcag

SEQ ID NO: 51124 - DNA, 80 bp, synthetic construct; identical to SEQ ID NO: 24396
  misc_feature 1..80: note = Artificially Synthesized Probe
  source 1..80: mol_type = other DNA

SEQ ID NO: 51125 - DNA, 80 bp, synthetic construct
  misc_feature 1..80: note = Artificially Synthesized Probe
  source 1..80: mol_type = other DNA
tctttctctcacagaggacacggttcgtcgttcctcagccaggtcgcacaggctgtgtgcccttagacaagtaacttccc

SEQ ID NO: 51126 - DNA, 80 bp, synthetic construct
  misc_feature 1..80: note = Artificially Synthesized Probe
  source 1..80: mol_type = other DNA
gcaatctccatatacctaccccctcctttgcccaaaattttctcttccttagacttccgtgttactttgccatttttaat

SEQ ID NO: 51127 - DNA, 80 bp, synthetic construct
  misc_feature 1..80: note = Artificially Synthesized Probe
  source 1..80: mol_type = other DNA
gagtgcagtggcacaatgtcagctcattgcaacctccacctcctgggctcaagtgattctcctgcctcagcctcctgagt

SEQ ID NO: 51128 - DNA, 80 bp, synthetic construct; identical to SEQ ID NO: 24397
  misc_feature 1..80: note = Artificially Synthesized Probe
  source 1..80: mol_type = other DNA

SEQ ID NO: 51129 - DNA, 80 bp, synthetic construct
  misc_feature 1..80: note = Artificially Synthesized Probe
  source 1..80: mol_type = other DNA
tacactgctggtaccctgcagccacacagccaggccagctttccttgattcccccacttctgttactggcaccgccatgc

SEQ ID NO: 51130 - DNA, 80 bp, synthetic construct
  misc_feature 1..80: note = Artificially Synthesized Probe
  source 1..80: mol_type = other DNA
tgcctttagtataacttcccccatcaggccaggtcacctttgacagaagctcctgcatggcataggcagagagcaggcat

SEQ ID NO: 51131 - DNA, 80 bp, synthetic construct; identical to SEQ ID NO: 24398
  misc_feature 1..80: note = Artificially Synthesized Probe
  source 1..80: mol_type = other DNA

SEQ ID NO: 51132 - DNA, 80 bp, synthetic construct
  misc_feature 1..80: note = Artificially Synthesized Probe
  source 1..80: mol_type = other DNA
gtcaaagtgatagaatatatgagacttggaaggtggaaagctgggtgatgattagatggagattatatattattctgtac

SEQ ID NO: 51133 - DNA, 80 bp, synthetic construct
  misc_feature 1..80: note = Artificially Synthesized Probe
  source 1..80: mol_type = other DNA
ctcctctcctcctttcacctctgcacctagttttttcccattggttccagacaaaggtgacttataaatatatttagtgt

SEQ ID NO: 51134 - DNA, 80 bp, synthetic construct
  misc_feature 1..80: note = Artificially Synthesized Probe
  source 1..80: mol_type = other DNA
cagcccagccccaatatgcttaggaggagacagagttccctctgtatagcctctgggacaagaaaaagaaaacacaagaa

SEQ ID NO: 51135 - DNA, 80 bp, synthetic construct
  misc_feature 1..80: note = Artificially Synthesized Probe
  source 1..80: mol_type = other DNA
gccagaaaatgcaacacttggaagagttaaatgctgttcagtgaagatttcagccccaggcctttgctgcaagtgaccct

SEQ ID NO: 51136 - DNA, 80 bp, synthetic construct
  misc_feature 1..80: note = Artificially Synthesized Probe
  source 1..80: mol_type = other DNA
agatggagtcttgctttgtcgcccaggctggagtgcagtggtgcagcctccgcctcctgggttcaagcgattctcctgcc

SEQ ID NO: 51137 - DNA, 80 bp, synthetic construct; identical to SEQ ID NO: 24399
  misc_feature 1..80: note = Artificially Synthesized Probe
  source 1..80: mol_type = other DNA

SEQ ID NO: 51138 - DNA, 80 bp, synthetic construct
  misc_feature 1..80: note = Artificially Synthesized Probe
  source 1..80: mol_type = other DNA
catcagggcctgtgaatacccaggtgcctgtatctttgccaagaccgtgatcaaggtagcttaagagagatggtcaggag

SEQ ID NO: 51139 - DNA, 80 bp, synthetic construct
  misc_feature 1..80: note = Artificially Synthesized Probe
  source 1..80: mol_type = other DNA
aggatcagggtgaagtttggcacacagggtttattaatggggcaaaaactgccttttcttcctcctcctgaccttatttt

SEQ ID NO: 51140 - DNA, 80 bp, synthetic construct
  misc_feature 1..80: note = Artificially Synthesized Probe
  source 1..80: mol_type = other DNA
aacctgggagcacacagaatactattaatgtgcacccagctggtctccccaggcaagaaggtatcctcttcccaaggtgt

SEQ ID NO: 51141 - DNA, 80 bp, synthetic construct
  misc_feature 1..80: note = Artificially Synthesized Probe
  source 1..80: mol_type = other DNA
gtaattcccttcccagctacccaaatgctacagagaaatgttttctacttggccactatcagggttcgtcatctattgtg

SEQ ID NO: 51142 - DNA, 80 bp, synthetic construct; identical to SEQ ID NO: 24400
  misc_feature 1..80: note = Artificially Synthesized Probe
  source 1..80: mol_type = other DNA

SEQ ID NO: 51143 - DNA, 80 bp, synthetic construct
  misc_feature 1..80: note = Artificially Synthesized Probe
  source 1..80: mol_type = other DNA
aaaaacttgaatcgttcacatttctcagctctgggggtcatttaccagtttgttgtagaagaaataatcaggtaagttaa

SEQ ID NO: 51144 - DNA, 80 bp, synthetic construct
  misc_feature 1..80: note = Artificially Synthesized Probe
  source 1..80: mol_type = other DNA
atttctccacatcctctccagcacttgttgtttcctgactttttaatgattgccattctgactggtgtgagatggtatct

SEQ ID NO: 51145 - DNA, 80 bp, synthetic construct
  misc_feature 1..80: note = Artificially Synthesized Probe
  source 1..80: mol_type = other DNA
gaaacagagctgaaggtgtccccattgtagattagtctcttctcactaaaatttactttccaacgtagggcctaaaggaa

SEQ ID NO: 51146 - DNA, 80 bp, synthetic construct; identical to SEQ ID NO: 24401
  misc_feature 1..80: note = Artificially Synthesized Probe
  source 1..80: mol_type = other DNA

SEQ ID NO: 51147 - DNA, 80 bp, synthetic construct
  misc_feature 1..80: note = Artificially Synthesized Probe
  source 1..80: mol_type = other DNA
taagaacaatccttttttatttttcttctgtacagtctaaagctacagagaaaaaaaaatgcactcttcccttgccggct

SEQ ID NO: 51148 - DNA, 80 bp, synthetic construct
  misc_feature 1..80: note = Artificially Synthesized Probe
  source 1..80: mol_type = other DNA
tttcccataattggactagataccttggtactgttgaccttctcagcatctcccttttgccttagatggcaacaccctcc

SEQ ID NO: 51149 - DNA, 80 bp, synthetic construct
  misc_feature 1..80: note = Artificially Synthesized Probe
  source 1..80: mol_type = other DNA
aaacagtttcgcttctttagctcatctgtggtgtcagaatccttggagctgaagagagaaatcaaaagagcatgatgatg

SEQ ID NO: 51150 - DNA, 80 bp, synthetic construct; identical to SEQ ID NO: 24402
  misc_feature 1..80: note = Artificially Synthesized Probe
  source 1..80: mol_type = other DNA

SEQ ID NO: 51151 - DNA, 80 bp, synthetic construct
  misc_feature 1..80: note = Artificially Synthesized Probe
  source 1..80: mol_type = other DNA
agctttcagctggttcacctctttgttctctagactcttaagtactgactgctttgacttttgtgattatgttatggtga

SEQ ID NO: 51152 - DNA, 80 bp, synthetic construct
  misc_feature 1..80: note = Artificially Synthesized Probe
  source 1..80: mol_type = other DNA
tgtgtagtcagtgtaccaatatgttcacaacctaggatcatgataatggagtgtgttttgggttttttttaactgttcag

SEQ ID NO: 51153 - DNA, 80 bp, synthetic construct
  misc_feature 1..80: note = Artificially Synthesized Probe
  source 1..80: mol_type = other DNA
aatactatgcagccataaaaaatgatgagttcatgtcctttgtagggacatggatgaaattggaaatcatcattctcagt

SEQ ID NO: 51154 - DNA, 80 bp, synthetic construct; identical to SEQ ID NO: 24205
  misc_feature 1..80: note = Artificially Synthesized Probe
  source 1..80: mol_type = other DNA

SEQ ID NO: 51155 - DNA, 80 bp, synthetic construct
  misc_feature 1..80: note = Artificially Synthesized Probe
  source 1..80: mol_type = other DNA
tgagagaaatatcaggatttggttttgagtaatttcataaccgctgtctattgggaacacagttttatcaagatctgcca

SEQ ID NO: 51156 - DNA, 80 bp, synthetic construct
  misc_feature 1..80: note = Artificially Synthesized Probe
  source 1..80: mol_type = other DNA
tctcatgtctaattataatccccagtgttggaggtggggcctggtaggaggtgtttggatcatgggggcggatttccgcc

SEQ ID NO: 51157 - DNA, 80 bp, synthetic construct
  misc_feature 1..80: note = Artificially Synthesized Probe
  source 1..80: mol_type = other DNA
ctgaggcctccccagaagcagaaaccatcagaagcagaattcactacgcttcttgtacagcctgcagaaccgtgagccaa

SEQ ID NO: 51158 - DNA, 80 bp, synthetic construct
  misc_feature 1..80: note = Artificially Synthesized Probe
  source 1..80: mol_type = other DNA
actagaaacaggtagcaaagcgttgcttcaagcttgaactcaaaagtggaactgggaaacctagcaaggaactaaataat

SEQ ID NO: 51159 - DNA, 80 bp, synthetic construct; identical to SEQ ID NO: 24206
  misc_feature 1..80: note = Artificially Synthesized Probe
  source 1..80: mol_type = other DNA

SEQ ID NO: 51160 - DNA, 80 bp, synthetic construct
  misc_feature 1..80: note = Artificially Synthesized Probe
  source 1..80: mol_type = other DNA
cacttcgggaggctgaggcaggcggatcacctgaggtcaggagtttgagaccagtctggccaatgtggtgaaaccccgtc

SEQ ID NO: 51161 - DNA, 80 bp, synthetic construct
  misc_feature 1..80: note = Artificially Synthesized Probe
  source 1..80: mol_type = other DNA
ccatctcaacaacaacaacaacaagtgatggcagaatgagacaaatctcatggccaaggcttggactctctgaattccaa

SEQ ID NO: 51162 - DNA, 80 bp, synthetic construct
  misc_feature 1..80: note = Artificially Synthesized Probe
  source 1..80: mol_type = other DNA
tgtgagccacagcgcccagcagagggttgactcttaatcctaatcctgacatttgtgtcagatttatggaataatgtgat

SEQ ID NO: 51163 - DNA, 80 bp, synthetic construct
  misc_feature 1..80: note = Artificially Synthesized Probe
  source 1..80: mol_type = other DNA
tctagtggaaggacaatagcaacatcccagaatgtggccactgaggtactacattaaaatcacatcacaataaaactggt

SEQ ID NO: 51164 - DNA, 80 bp, synthetic construct; identical to SEQ ID NO: 24207
  misc_feature 1..80: note = Artificially Synthesized Probe
  source 1..80: mol_type = other DNA

SEQ ID NO: 51165 - DNA, 80 bp, synthetic construct
  misc_feature 1..80: note = Artificially Synthesized Probe
  source 1..80: mol_type = other DNA
atgtgtagtagattcatgtaaaccacaatcaggataagaacaattgtatcactcccccgcaaaaaactcttatactcttc

SEQ ID NO: 51166 - DNA, 80 bp, synthetic construct
  misc_feature 1..80: note = Artificially Synthesized Probe
  source 1..80: mol_type = other DNA
cgtcttactattgttgattagtattttattgtgtagtgtaccagactgtttattcactcctgaaggacatttgggttgtt

SEQ ID NO: 51167 - DNA, 80 bp, synthetic construct; identical to SEQ ID NO: 24208
  misc_feature 1..80: note = Artificially Synthesized Probe
  source 1..80: mol_type = other DNA

SEQ ID NO: 51168 - DNA, 80 bp, synthetic construct
  misc_feature 1..80: note = Artificially Synthesized Probe
  source 1..80: mol_type = other DNA
ttgatgcttttattgatggaggatccaacacaaaagataatgcatggtcatgagaacaaaatatttgatatgcctaactt

SEQ ID NO: 51169 - DNA, 80 bp, synthetic construct
  misc_feature 1..80: note = Artificially Synthesized Probe
  source 1..80: mol_type = other DNA
tttttttttctggtgacctttggtgtgtagaacacttgtggcctttaataaactgaggagataggatgaccaaaattttt

SEQ ID NO: 51170 - DNA, 80 bp, synthetic construct
  misc_feature 1..80: note = Artificially Synthesized Probe
  source 1..80: mol_type = other DNA
gcgtcgctggcctgggccgcccgcccactgcgggaccgggcagcgggaccctgggccgaggctggcggcggagcggctgg

SEQ ID NO: 51171 - DNA, 80 bp, synthetic construct
  misc_feature 1..80: note = Artificially Synthesized Probe
  source 1..80: mol_type = other DNA
aatttagatggaggcaaggaaggctttcccttgagtaatatattaatttggccccatctatctcttctcctttgtagatc

SEQ ID NO: 51172 - DNA, 80 bp, synthetic construct; identical to SEQ ID NO: 24209
  misc_feature 1..80: note = Artificially Synthesized Probe
  source 1..80: mol_type = other DNA

SEQ ID NO: 51173 - DNA, 80 bp, synthetic construct
  misc_feature 1..80: note = Artificially Synthesized Probe
  source 1..80: mol_type = other DNA
tctgtcacccaggctggagtgcagtggcgcgatcttggtgcactgcaacccctacctcccatgttcaagcgattctcctg

SEQ ID NO: 51174 - DNA, 80 bp, synthetic construct
  misc_feature 1..80: note = Artificially Synthesized Probe
  source 1..80: mol_type = other DNA
tgaaccactgtgcccagccccagttataacttgtttccatgggaaaacatccgctttgaagcagtattcagtaatatatt

SEQ ID NO: 51175 - DNA, 80 bp, synthetic construct
  misc_feature 1..80: note = Artificially Synthesized Probe
  source 1..80: mol_type = other DNA
atagtagttgcagcttttagagcaccacacattattaaatcttgaatcagttttcatagggagaagccaattttttcttt

SEQ ID NO: 51176 - DNA, 80 bp, synthetic construct
  misc_feature 1..80: note = Artificially Synthesized Probe
  source 1..80: mol_type = other DNA
cattgatgtatctgtttttaaattgcacctaattataatgacaacttacaagatctctttccttccttctctcttggaat

SEQ ID NO: 51177 - DNA, 80 bp, synthetic construct; identical to SEQ ID NO: 24210
  misc_feature 1..80: note = Artificially Synthesized Probe
  source 1..80: mol_type = other DNA

SEQ ID NO: 51178 - DNA, 80 bp, synthetic construct
  misc_feature 1..80: note = Artificially Synthesized Probe
  source 1..80: mol_type = other DNA
ttagacctgttctttttcaatgtgtctttaaaatgtaggtacagtatataagaattcatactaaaggatcaactgagact

SEQ ID NO: 51179 - DNA, 80 bp, synthetic construct
  misc_feature 1..80: note = Artificially Synthesized Probe
  source 1..80: mol_type = other DNA
cgtttttttatggcctgttacagtctctgtaacaatcatttcttaagtctgaacgttttatttccaggaatccatttata

SEQ ID NO: 51180 - DNA, 80 bp, synthetic construct
  misc_feature 1..80: note = Artificially Synthesized Probe
  source 1..80: mol_type = other DNA
agttcatattttttgatccttgttttcaaaggtatttaagaaaaatatcaaagctttgcaaagtgacatctgtttgctga

SEQ ID NO: 51181 - DNA, 80 bp, synthetic construct; identical to SEQ ID NO: 24211
  misc_feature 1..80: note = Artificially Synthesized Probe
  source 1..80: mol_type = other DNA

SEQ ID NO: 51182 - DNA, 80 bp, synthetic construct
  misc_feature 1..80: note = Artificially Synthesized Probe
  source 1..80: mol_type = other DNA
taaactttaatgtcaaaaatgcaaacttggggagggcagaaagatcacacacaaggctgtgccttcacacttggagggtt

SEQ ID NO: 51183 - DNA, 80 bp, synthetic construct
  misc_feature 1..80: note = Artificially Synthesized Probe
  source 1..80: mol_type = other DNA
catcctttttgaaatgacacttatttttccatttccttgtctaagtataagtgattgaaaccactattggcatagtggaa

SEQ ID NO: 51184 - DNA, 80 bp, synthetic construct
  misc_feature 1..80: note = Artificially Synthesized Probe
  source 1..80: mol_type = other DNA
ataccttactatacacaaatgccatgtgatataacctgttgcttgtgcagtttgttactgtacactgaatcctgtaagcc

SEQ ID NO: 51185 - DNA, 80 bp, synthetic construct
  misc_feature 1..80: note = Artificially Synthesized Probe
  source 1..80: mol_type = other DNA
gggtggtgataataataacaataataatggcagccaacacttgtagctcagtatataccgtgcaggattctagacactat

SEQ ID NO: 51186 - DNA, 80 bp, synthetic construct; identical to SEQ ID NO: 24186
  misc_feature 1..80: note = Artificially Synthesized Probe
  source 1..80: mol_type = other DNA

SEQ ID NO: 51187 - DNA, 80 bp, synthetic construct; identical to SEQ ID NO: 24212
  misc_feature 1..80: note = Artificially Synthesized Probe
  source 1..80: mol_type = other DNA

SEQ ID NO: 51188 - DNA, 80 bp, synthetic construct
  misc_feature 1..80: note = Artificially Synthesized Probe
  source 1..80: mol_type = other DNA
gtaggtattttatagttttttggtgggtgagggatgttatcttttgacttatttttgagaaatataattttgaagagagg

SEQ ID NO: 51189 - DNA, 80 bp, synthetic construct
  misc_feature 1..80: note = Artificially Synthesized Probe
  source 1..80: mol_type = other DNA
gacatgatattttaccttctgcatgtattttctaagaacaagagcatccttattcctaacctcaatacaagatcccactc

SEQ ID NO: 51190 - DNA, 80 bp, synthetic construct
  misc_feature 1..80: note = Artificially Synthesized Probe
  source 1..80: mol_type = other DNA
agtggcgtgatctcagctcactgcaaccttcgcctcccaggttcaagtgattcttctgcctcagcttcctgagtagctgt

SEQ ID NO: 51191 - DNA, 80 bp, synthetic construct; identical to SEQ ID NO: 24213
  misc_feature 1..80: note = Artificially Synthesized Probe
  source 1..80: mol_type = other DNA

SEQ ID NO: 51192 - DNA, 80 bp, synthetic construct
  misc_feature 1..80: note = Artificially Synthesized Probe
  source 1..80: mol_type = other DNA
tagatcagggtaaaaaatttggcaggagtataatatatgctgtgttttttttttcttagtgcactactacatcagaaggc

SEQ ID NO: 51193 - DNA, 80 bp, synthetic construct
  misc_feature 1..80: note = Artificially Synthesized Probe
  source 1..80: mol_type = other DNA
tagttttaccatccattggtgattcttctgtggtagttgtaaaatcaacctatttatttttaggtagttctaaataattt

SEQ ID NO: 51194 - DNA, 80 bp, synthetic construct; identical to SEQ ID NO: 24214
  misc_feature 1..80: note = Artificially Synthesized Probe
  source 1..80: mol_type = other DNA

SEQ ID NO: 51195 - DNA, 80 bp, synthetic construct
  misc_feature 1..80: note = Artificially Synthesized Probe
  source 1..80: mol_type = other DNA
ggactacaggcgtgcaccaccacgcccagctaatttttttatttttcacagagatagggttttgcccatgctgagtttgc

SEQ ID NO: 51196 - DNA, 80 bp, synthetic construct
  misc_feature 1..80: note = Artificially Synthesized Probe
  source 1..80: mol_type = other DNA
gttgtgaacacctgcacttgccattcgagcagatattttgctcatgattatttggaccgttttcttcctttcttcttttc

SEQ ID NO: 51197 - DNA, 80 bp, synthetic construct
  misc_feature 1..80: note = Artificially Synthesized Probe
  source 1..80: mol_type = other DNA
gtgcgcctgtagtcccagctactcgggaggctgaggcaggagaatggcgtgaacccgggaggtggagcttgcagtgagcc

SEQ ID NO: 51198 - DNA, 80 bp, synthetic construct
  misc_feature 1..80: note = Artificially Synthesized Probe
  source 1..80: mol_type = other DNA
tacttgtttgctttctttaatagatatgagaataatatggatatagtatagcagagtaaattgaagtttgtattagggga

SEQ ID NO: 51199 - DNA, 80 bp, synthetic construct
  misc_feature 1..80: note = Artificially Synthesized Probe
  source 1..80: mol_type = other DNA
tttatttatttattttttagagatggagtcttgctatgttgcccaggctggactcaaactcctgggctcaaaagtgattc

SEQ ID NO: 51200 - DNA, 80 bp, synthetic construct; identical to SEQ ID NO: 24215
  misc_feature 1..80: note = Artificially Synthesized Probe
  source 1..80: mol_type = other DNA

SEQ ID NO: 51201 - DNA, 80 bp, synthetic construct
  misc_feature 1..80: note = Artificially Synthesized Probe
  source 1..80: mol_type = other DNA
ttgcttcccaggctaaatcacagccttgaagcagctatttctttccgaataaaaagtttaatttcacgccctgattagtg

SEQ ID NO: 51202 - DNA, 80 bp, synthetic construct
  misc_feature 1..80: note = Artificially Synthesized Probe
  source 1..80: mol_type = other DNA
agatacgagtaggaatcagtcactaaattttggccagactagcagttgactaacagcttttttcaaaggctcaggtttgg

SEQ ID NO: 51203 - DNA, 80 bp, synthetic construct; identical to SEQ ID NO: 24216
  misc_feature 1..80: note = Artificially Synthesized Probe
  source 1..80: mol_type = other DNA

SEQ ID NO: 51204 - DNA, 80 bp, synthetic construct
  misc_feature 1..80: note = Artificially Synthesized Probe
  source 1..80: mol_type = other DNA
cttagcaagacccatgtctctacaaacagaacaaaacagaacaaaattagcgtggcatggtggtgcacacctgtagtccc

SEQ ID NO: 51205 - DNA, 80 bp, synthetic construct
  misc_feature 1..80: note = Artificially Synthesized Probe
  source 1..80: mol_type = other DNA
aatggcgtgaacccgggaggtggagcttgcagtgagccgaaatcgcgccactgcactccagcctaggtgacagaacgaga

SEQ ID NO: 51206 - DNA, 80 bp, synthetic construct
  misc_feature 1..80: note = Artificially Synthesized Probe
  source 1..80: mol_type = other DNA
tggagtcataggatttaagagtctagaaggaccatctaattcaaggcttttttttttaatttagtttttctattttcttt

SEQ ID NO: 51207 - DNA, 80 bp, synthetic construct
  misc_feature 1..80: note = Artificially Synthesized Probe
  source 1..80: mol_type = other DNA
aaaatttcaggaggttcagagatccctgaatcctatctatggaccctgggttaagaaccctgatctagcttgtttttttt

SEQ ID NO: 51208 - DNA, 80 bp, synthetic construct; identical to SEQ ID NO: 24217
  misc_feature 1..80: note = Artificially Synthesized Probe
  source 1..80: mol_type = other DNA

SEQ ID NO: 51209 - DNA, 80 bp, synthetic construct
  misc_feature 1..80: note = Artificially Synthesized Probe
  source 1..80: mol_type = other DNA
tgagaccatcctggccaacatggtgaaaccctgtctctactaaaaatacaaaaattagccaggcctggtggcgcgcacct

SEQ ID NO: 51210 - DNA, 80 bp, synthetic construct
  misc_feature 1..80: note = Artificially Synthesized Probe
  source 1..80: mol_type = other DNA
ggtataaccaagcaaatgcccagcaaggtcagtttactctagtaagtacactctgcatctagaagcatgtggaataaact

SEQ ID NO: 51211 - DNA, 80 bp, synthetic construct
  misc_feature 1..80: note = Artificially Synthesized Probe
  source 1..80: mol_type = other DNA
aaagacttttttgtgataattttagatcagcagtacactttggccagaaaacctggtttggattttatcttatgttatcc

SEQ ID NO: 51212 - DNA, 80 bp, synthetic construct
  misc_feature 1..80: note = Artificially Synthesized Probe
  source 1..80: mol_type = other DNA
ccaagtctagttggtgcttttccgagtctttgttttgtttgtggtttagcttgtgtttcttctactgataggtgaattgg

SEQ ID NO: 51213 - DNA, 80 bp, synthetic construct; identical to SEQ ID NO: 24218
  misc_feature 1..80: note = Artificially Synthesized Probe
  source 1..80: mol_type = other DNA

SEQ ID NO: 51214 - DNA, 80 bp, synthetic construct
  misc_feature 1..80: note = Artificially Synthesized Probe
  source 1..80: mol_type = other DNA
aattcatattaaaaatttaacataataagtgtacatatttatggggtatatactgatattgtgatacatatagtgatcag

SEQ ID NO: 51215 - DNA, 80 bp, synthetic construct
  misc_feature 1..80: note = Artificially Synthesized Probe
  source 1..80: mol_type = other DNA
ctgctttataatacaccttttttatggtagttaaggtctcataccttattttcttcttggctatttgtggctttttatac

SEQ ID NO: 51216 - DNA, 80 bp, synthetic construct; identical to SEQ ID NO: 24219
  misc_feature 1..80: note = Artificially Synthesized Probe
  source 1..80: mol_type = other DNA

SEQ ID NO: 51217 - DNA, 80 bp, synthetic construct
  misc_feature 1..80: note = Artificially Synthesized Probe
  source 1..80: mol_type = other DNA
cggggctttgccatgttggtcaggctggtcttgaactcctgacctcaggtgatctgcctgcctcggcctcccaaagtgct

SEQ ID NO: 51218 - DNA, 80 bp, synthetic construct
  misc_feature 1..80: note = Artificially Synthesized Probe
  source 1..80: mol_type = other DNA
aaattaaaaactaaaatttgagaacttttagctaggaaagatggctttcttttgttttgtttagaggagaatcttgctct

SEQ ID NO: 51219 - DNA, 80 bp, synthetic construct
  misc_feature 1..80: note = Artificially Synthesized Probe
  source 1..80: mol_type = other DNA
ttatttatttatttttgtagagacagggtctctctctgttgcccagctgttctcgaactcttggcctgaaacaatcttcc

SEQ ID NO: 51220 - DNA, 80 bp, synthetic construct; identical to SEQ ID NO: 24187
  misc_feature 1..80: note = Artificially Synthesized Probe
  source 1..80: mol_type = other DNA

SEQ ID NO: 51221 - DNA, 80 bp, synthetic construct
  misc_feature 1..80: note = Artificially Synthesized Probe
  source 1..80: mol_type = other DNA
tcccacctcagcttcccaagtagctgggactacgggtgcccaccaccacgcttggctaatttttttgcatttttgtagag

SEQ ID NO: 51222 - DNA, 80 bp, synthetic construct; identical to SEQ ID NO: 24220
  misc_feature 1..80: note = Artificially Synthesized Probe
  source 1..80: mol_type = other DNA

SEQ ID NO: 51223 - DNA, 80 bp, synthetic construct
  misc_feature 1..80: note = Artificially Synthesized Probe
  source 1..80: mol_type = other DNA
gtgggctgatgatttctaatgggctaatagtctctaacccatccttttactgtgacttctacctttatgtattcaactga

SEQ ID NO: 51224 - DNA, 80 bp, synthetic construct
  misc_feature 1..80: note = Artificially Synthesized Probe
  source 1..80: mol_type = other DNA
cttatgccgatatgcaattcacaagattttatctgttctacttccaaaatacatctcaaattcgtctacccctctctgcc

SEQ ID NO: 51225 - DNA, 80 bp, synthetic construct; identical to SEQ ID NO: 24221
  misc_feature 1..80: note = Artificially Synthesized Probe
  source 1..80: mol_type = other DNA

SEQ ID NO: 51226 - DNA, 80 bp, synthetic construct
  misc_feature 1..80: note = Artificially Synthesized Probe
  source 1..80: mol_type = other DNA
gggctcaagtgatccttctgcctcagcctctggagtatctgagaccacaggtgcacgccaccatgcctggctaattttta

SEQ ID NO: 51227 - DNA, 80 bp, synthetic construct
  misc_feature 1..80: note = Artificially Synthesized Probe
  source 1..80: mol_type = other DNA
ctgttttctccaactctgactttttggttgagtccttcgtttatcctttatatctcagttctaatcacctacttagagcc

SEQ ID NO: 51228 - DNA, 80 bp, synthetic construct
  misc_feature 1..80: note = Artificially Synthesized Probe
  source 1..80: mol_type = other DNA
ttttttttcattttgtaaaatagaagctgatgataaactgcccatcctgcttcctggagtcattgtagggaataaatcaa

SEQ ID NO: 51229 - DNA, 80 bp, synthetic construct
  misc_feature 1..80: note = Artificially Synthesized Probe
  source 1..80: mol_type = other DNA
cgccattctcctgcctcagtctcctgagtagctgggattacaggtgcccgccaccacgcctaattttttgtattttagta

SEQ ID NO: 51230 - DNA, 80 bp, synthetic construct; identical to SEQ ID NO: 24222
  misc_feature 1..80: note = Artificially Synthesized Probe
  source 1..80: mol_type = other DNA

SEQ ID NO: 51231 - DNA, 80 bp, synthetic construct
  misc_feature 1..80: note = Artificially Synthesized Probe
  source 1..80: mol_type = other DNA
gataaagaattttacaataaaatcctgttaataagactgctgattcagagatgaccataattcacacgtgatcgagactt

SEQ ID NO: 51232 - DNA, 80 bp, synthetic construct
  misc_feature 1..80: note = Artificially Synthesized Probe
  source 1..80: mol_type = other DNA
gtgcatcagttaagatagattaattttatactttttaagacttgtagggaattcatttatgtattttgaaacttgcgtgg

SEQ ID NO: 51233 - DNA, 80 bp, synthetic construct
  misc_feature 1..80: note = Artificially Synthesized Probe
  source 1..80: mol_type = other DNA
aacttgtacaggttactatttatcctgtgtggtaactaccgctcctgctgtgattcaaatatttcagcccttaagcagtt

SEQ ID NO: 51234 - DNA, 80 bp, synthetic construct
  misc_feature 1..80: note = Artificially Synthesized Probe
  source 1..80: mol_type = other DNA
taatttaccagcaaatggagtttataatactaaaatatagtattgtttgcaaataaaattctttgtttttgtgtcttagg

SEQ ID NO: 51235 - DNA, 80 bp, synthetic construct; identical to SEQ ID NO: 24223
  misc_feature 1..80: note = Artificially Synthesized Probe
  source 1..80: mol_type = other DNA

SEQ ID NO: 51236 - DNA, 80 bp, synthetic construct
  misc_feature 1..80: note = Artificially Synthesized Probe
  source 1..80: mol_type = other DNA
gtccagatagttgtaatgataatgtctttggtttattcacatatggttagttcaatattatttttaccttgtaaagtgac

SEQ ID NO: 51237 - DNA, 80 bp, synthetic construct
  misc_feature 1..80: note = Artificially Synthesized Probe
  source 1..80: mol_type = other DNA
caagtgtttctcttgcctaagcctcccatgtagctgggattactggcgtgcgccaccacgcccagctaatttttgtattt

SEQ ID NO: 51238 - DNA, 80 bp, synthetic construct
  misc_feature 1..80: note = Artificially Synthesized Probe
  source 1..80: mol_type = other DNA
atatgcccaaagagaatgaatgagggaagaaaccattggcaacccctttgtgttgtggaattcccaatcttcagtaagtg

SEQ ID NO: 51239 - DNA, 80 bp, synthetic construct
  misc_feature 1..80: note = Artificially Synthesized Probe
  source 1..80: mol_type = other DNA
ggcatggtcttggctcactgcaacctccgcctcccaggttcaagcgattctcttacctcagcctcccaaatagttgggat

SEQ ID NO: 51240 - DNA, 80 bp, synthetic construct; identical to SEQ ID NO: 24224
  misc_feature 1..80: note = Artificially Synthesized Probe
  source 1..80: mol_type = other DNA

SEQ ID NO: 51241 - DNA, 80 bp, synthetic construct
  misc_feature 1..80: note = Artificially Synthesized Probe
  source 1..80: mol_type = other DNA
tttagcaggtcctcaaggacctttcttaatacttttttggttaacaaaagtataaatggaaacttgaagagaacctaaga

SEQ ID NO: 51242 - DNA, 80 bp, synthetic construct
  misc_feature 1..80: note = Artificially Synthesized Probe
  source 1..80: mol_type = other DNA
ttctgattgtggatcttaagaccctccactgagagggtcccacctcataccctcgtgggaggaaggaatgcttccataaa

SEQ ID NO: 51243 - DNA, 80 bp, synthetic construct
  misc_feature 1..80: note = Artificially Synthesized Probe
  source 1..80: mol_type = other DNA
aaaccagcagatataagtaagtgtttccctcagttctgtgagccacttcagcaaattaattgaacccacagaggggatca

SEQ ID NO: 51244 - DNA, 80 bp, synthetic construct; identical to SEQ ID NO: 24225
  misc_feature 1..80: note = Artificially Synthesized Probe
  source 1..80: mol_type = other DNA

SEQ ID NO: 51245 - DNA, 80 bp, synthetic construct
  misc_feature 1..80: note = Artificially Synthesized Probe
  source 1..80: mol_type = other DNA
gttgatgattattgtagtatgagagtagtggaaaaacacgaggttggaaagagtctttccctacacactcccccaccctg

SEQ ID NO: 51246 - DNA, 80 bp, synthetic construct
  misc_feature 1..80: note = Artificially Synthesized Probe
  source 1..80: mol_type = other DNA
aaactaatctttcaaacaagcatagccagtgtaatgcagacttcgtagactgtagagcatgtccctctaaaactgagtgt

SEQ ID NO: 51247 - DNA, 80 bp, synthetic construct
  misc_feature 1..80: note = Artificially Synthesized Probe
  source 1..80: mol_type = other DNA
ttatggagctagaggtggagatctatgactaagggcatgttgaatttttttatgaaagaaggggactctggtaattaatt

SEQ ID NO: 51248 - DNA, 80 bp, synthetic construct; identical to SEQ ID NO: 24226
  misc_feature 1..80: note = Artificially Synthesized Probe
  source 1..80: mol_type = other DNA

SEQ ID NO: 51249 - DNA, 80 bp, synthetic construct
  misc_feature 1..80: note = Artificially Synthesized Probe
  source 1..80: mol_type = other DNA
aaaagcaaactgcctcttaatctaggaacagagaagaaataaagaagtccctatttcagagagagtaagggttaaaattc

SEQ ID NO: 51250 - DNA, 80 bp, synthetic construct
  misc_feature 1..80: note = Artificially Synthesized Probe
  source 1..80: mol_type = other DNA
tttgaccagtgagttccagcaggtgtagcagcaaaagcacagatttcttacacatacatgtaatgcatgtctgcttatag

SEQ ID NO: 51251 - DNA, 80 bp, synthetic construct
  misc_feature 1..80: note = Artificially Synthesized Probe
  source 1..80: mol_type = other DNA
agtctcacatgattccaacagcagtagcgcctaaattcacgttattgcactgtaacaaaattgtatcatcttgtgtatag

SEQ ID NO: 51252 - DNA, 80 bp, synthetic construct; identical to SEQ ID NO: 24227
  misc_feature 1..80: note = Artificially Synthesized Probe
  source 1..80: mol_type = other DNA

SEQ ID NO: 51253 - DNA, 80 bp, synthetic construct
  misc_feature 1..80: note = Artificially Synthesized Probe
  source 1..80: mol_type = other DNA
agagtgcagtcatagcttgctgcagcctcaaactcccaggctcacatgatcctcctgcctcggcgtctcaagtggctaca

SEQ ID NO: 51254 - DNA, 80 bp, synthetic construct
  misc_feature 1..80: note = Artificially Synthesized Probe
  source 1..80: mol_type = other DNA
aagaaaagaccttgatccagtaattaattttgctcttaacatttacagacccttcctctccttaataaaaatggctaaaa

SEQ ID NO: 51255 - DNA, 80 bp, synthetic construct
  misc_feature 1..80: note = Artificially Synthesized Probe
  source 1..80: mol_type = other DNA
aatttattaaattatctcagctgtgattaaaattaaaatgtatcttgttacattagtatgtgaaaattagttctatcctg

SEQ ID NO: 51256 - DNA, 80 bp, synthetic construct
  misc_feature 1..80: note = Artificially Synthesized Probe
  source 1..80: mol_type = other DNA
tatgatgggagaaggttttgtatttttgttttttgcctcagcttttcccagctctagggagaggtttttaatatatcttt

SEQ ID NO: 51257 - DNA, 80 bp, synthetic construct; identical to SEQ ID NO: 24228
  misc_feature 1..80: note = Artificially Synthesized Probe
  source 1..80: mol_type = other DNA

SEQ ID NO: 51258 - DNA, 80 bp, synthetic construct
  misc_feature 1..80: note = Artificially Synthesized Probe
  source 1..80: mol_type = other DNA
atgctcattttatactgtaaaagtagttgaactttatgaatttctgcaagattctgccactatgcgaaaacttgaatggg

SEQ ID NO: 51259 - DNA, 80 bp, synthetic construct
  misc_feature 1..80: note = Artificially Synthesized Probe
  source 1..80: mol_type = other DNA
gattttaaatggagttcagctagtattaagcccactactcacttgttctgtggtactcttaacaaataatgttggattac

SEQ ID NO: 51260 - DNA, 80 bp, synthetic construct
  misc_feature 1..80: note = Artificially Synthesized Probe
  source 1..80: mol_type = other DNA
agatttcagcagatattcgtcagggtttgttgatgtttgtttttacatgatgaaagtccctatcaaagtaattctatctc

SEQ ID NO: 51261 - DNA, 80 bp, synthetic construct
  misc_feature 1..80: note = Artificially Synthesized Probe
  source 1..80: mol_type = other DNA
tcgcctggctaatttttggtatttttagtagagacgaggtttcaccatgttggccaggttggtctcaaagtcctgaccac

SEQ ID NO: 51262 - DNA, 80 bp, synthetic construct; identical to SEQ ID NO: 24229
  misc_feature 1..80: note = Artificially Synthesized Probe
  source 1..80: mol_type = other DNA

SEQ ID NO: 51263 - DNA, 80 bp, synthetic construct
  misc_feature 1..80: note = Artificially Synthesized Probe
  source 1..80: mol_type = other DNA
ttaaatccctctggtgccacaagttgctagtaccaccatgtgtagacagatctctgtcctttctaattgtgtttcaactc

SEQ ID NO: 51264 - DNA, 80 bp, synthetic construct
  misc_feature 1..80: note = Artificially Synthesized Probe
  source 1..80: mol_type = other DNA
aagccacgtttatttttaaaaacaggataaatatattcttgtccagccaatcccagaatcaagtacagtagcttgaaata

SEQ ID NO: 51265 - DNA, 80 bp, synthetic construct
  misc_feature 1..80: note = Artificially Synthesized Probe
  source 1..80: mol_type = other DNA
ctctttcccccatttctcacccagtgcttaattttcatttttttcataccctgttactgtatcattttagtcttaagtgt

SEQ ID NO: 51266 - DNA, 80 bp, synthetic construct
  misc_feature 1..80: note = Artificially Synthesized Probe
  source 1..80: mol_type = other DNA
aaagcttcttaagtgtttttaaaaatgccattatttccttcccaaattccacttgctcatcacagcaagatatttcatcc

SEQ ID NO: 51267 - DNA, 80 bp, synthetic construct; identical to SEQ ID NO: 24230
  misc_feature 1..80: note = Artificially Synthesized Probe
  source 1..80: mol_type = other DNA

SEQ ID NO: 51268 - DNA, 80 bp, synthetic construct
  misc_feature 1..80: note = Artificially Synthesized Probe
  source 1..80: mol_type = other DNA
gttcacaccattctcctgcctcagcctcccgagtagctgggactacaggtgcccgacactgtgcccagataatgttttgt

SEQ ID NO: 51269 - DNA, 80 bp, synthetic construct
  misc_feature 1..80: note = Artificially Synthesized Probe
  source 1..80: mol_type = other DNA
atagttgaacattatctgagtgtgagttgcgtacactaataccatcatcctttgccctttagtggaggattttatatttg

SEQ ID NO: 51270 - DNA, 80 bp, synthetic construct; identical to SEQ ID NO: 24231
  misc_feature 1..80: note = Artificially Synthesized Probe
  source 1..80: mol_type = other DNA

SEQ ID NO: 51271 - DNA, 80 bp, synthetic construct
  misc_feature 1..80: note = Artificially Synthesized Probe
  source 1..80: mol_type = other DNA
aatttttttgtatttttagtagagatggggtttcaccatgttggccaagctggtcttgaattcctgacctcaaatgatcc

SEQ ID NO: 51272 - DNA, 80 bp, synthetic construct
  misc_feature 1..80: note = Artificially Synthesized Probe
  source 1..80: mol_type = other DNA
agctcattcccttttgctgttatttaatggtagcaggtcatgtatgactcatgacttaggtcatacaacttaggatatta

SEQ ID NO: 51273 - DNA, 80 bp, synthetic construct
  misc_feature 1..80: note = Artificially Synthesized Probe
  source 1..80: mol_type = other DNA
gccccactggaatgtcacaatgcaaggatgtgaatctccctttctcctaacagaagtttttaaagctaacagattttaat

SEQ ID NO: 51274 - DNA, 80 bp, synthetic construct; identical to SEQ ID NO: 24188
  misc_feature 1..80: note = Artificially Synthesized Probe
  source 1..80: mol_type = other DNA

SEQ ID NO: 51275 - DNA, 80 bp, synthetic construct
  misc_feature 1..80: note = Artificially Synthesized Probe
  source 1..80: mol_type = other DNA
catttgagatttaccagtttacatcttggcttatgataaattggattggaagatcaggtactttattttcctggaagaaa

SEQ ID NO: 51276 - DNA, 80 bp, synthetic construct; identical to SEQ ID NO: 24232
  misc_feature 1..80: note = Artificially Synthesized Probe
  source 1..80: mol_type = other DNA

SEQ ID NO: 51277 - DNA, 80 bp, synthetic construct
  misc_feature 1..80: note = Artificially Synthesized Probe
  source 1..80: mol_type = other DNA
gctgatctgtgatgtgcgggaaatcagatgtaatatggttgcatttatttatgtaggcatctattctctttcttaatgag

SEQ ID NO: 51278 - DNA, 80 bp, synthetic construct
  misc_feature 1..80: note = Artificially Synthesized Probe
  source 1..80: mol_type = other DNA
ccttttgaactcattgttagagcaaacacatctgtagaggaagatgatccataagtctaatgctaaggatttgcctcctc

SEQ ID NO: 51279 - DNA, 80 bp, synthetic construct
  misc_feature 1..80: note = Artificially Synthesized Probe
  source 1..80: mol_type = other DNA
ctgttgagtcatagcaactgctatgaacaaacatgtaaatccatctaggggaagaaaagagtgttgcaaatgcctttcat

SEQ ID NO: 51280 - DNA, 80 bp, synthetic construct; identical to SEQ ID NO: 24233
  misc_feature 1..80: note = Artificially Synthesized Probe
  source 1..80: mol_type = other DNA

SEQ ID NO: 51281 - DNA, 80 bp, synthetic construct
  misc_feature 1..80: note = Artificially Synthesized Probe
  source 1..80: mol_type = other DNA
atttaagtacaggtataggtgattgagtttgtaaaacctaatcagaggtaaattgcagttttactcttatcacgtgaatg

SEQ ID NO: 51282 - DNA, 80 bp, synthetic construct
  misc_feature 1..80: note = Artificially Synthesized Probe
  source 1..80: mol_type = other DNA
atttcttttaggtgggtattaaaagtggcttttttggtatagaaaacatgtagcatcaaagcagtgttgtgatgccctgc

SEQ ID NO: 51283 - DNA, 80 bp, synthetic construct
  misc_feature 1..80: note = Artificially Synthesized Probe
  source 1..80: mol_type = other DNA
tggaagtccaagaatgtcactgtgggtcaaagccagtcaaggccaactacagagggaggagaaataatgtctacctattg

SEQ ID NO: 51284 - DNA, 80 bp, synthetic construct; identical to SEQ ID NO: 24234
  misc_feature 1..80: note = Artificially Synthesized Probe
  source 1..80: mol_type = other DNA

SEQ ID NO: 51285 - DNA, 80 bp, synthetic construct
  misc_feature 1..80: note = Artificially Synthesized Probe
  source 1..80: mol_type = other DNA
aaaacagaatgttgatgttagaaaaatttggttattgtcttatgctctggagttcttacctcaagccagtgacttttaag

SEQ ID NO: 51286 - DNA, 80 bp, synthetic construct
  misc_feature 1..80: note = Artificially Synthesized Probe
  source 1..80: mol_type = other DNA
gggcgtggggactgttactgaaaagcggaggaagctctctggagaaacgccgtgaggccgctggcggggccttcctggtg

SEQ ID NO: 51287 - DNA, 80 bp, synthetic construct
  misc_feature 1..80: note = Artificially Synthesized Probe
  source 1..80: mol_type = other DNA
aaggcctttttaaggctgtatgctagtctcacaggtacacagctacttcatatctgataaatctaaattcatatgtgagg

SEQ ID NO: 51288 - DNA, 80 bp, synthetic construct
  misc_feature 1..80: note = Artificially Synthesized Probe
  source 1..80: mol_type = other DNA
tggaatggctcctttggaagttgggtgactctcttatgtaattatatacttagtaaccctgctctacaaagcagtagaaa

SEQ ID NO: 51289 - DNA, 80 bp, synthetic construct; identical to SEQ ID NO: 24235
  misc_feature 1..80: note = Artificially Synthesized Probe
  source 1..80: mol_type = other DNA

SEQ ID NO: 51290 - DNA, 80 bp, synthetic construct
  misc_feature 1..80: note = Artificially Synthesized Probe
  source 1..80: mol_type = other DNA
tcaaagtcatacaattggtttgaggacaagtctgttccacaacctgatatgtcatgccttctcagttgtcatgataattc

SEQ ID NO: 51291 - DNA, 80 bp, synthetic construct
  misc_feature 1..80: note = Artificially Synthesized Probe
  source 1..80: mol_type = other DNA
tctaatgtttataaatgttaatgtgtggtggctaaacctttaaatctctttttctctactagattataacctctttaaaa

SEQ ID NO: 51292 - DNA, 80 bp, synthetic construct
  misc_feature 1..80: note = Artificially Synthesized Probe
  source 1..80: mol_type = other DNA
caagtactttccatttcaagtaacagattgcttcattccccctttaagcaagaagggagagtattttaagggtacagaga

SEQ ID NO: 51293 - DNA, 80 bp, synthetic construct; identical to SEQ ID NO: 24236
  misc_feature 1..80: note = Artificially Synthesized Probe
  source 1..80: mol_type = other DNA

SEQ ID NO: 51294 - DNA, 80 bp, synthetic construct
  misc_feature 1..80: note = Artificially Synthesized Probe
  source 1..80: mol_type = other DNA
cagagtgcagtagcatgatcatggctcactgcagcctcgacctctcaggctcaagagatcttcccacctcagcccctcaa

SEQ ID NO: 51295 - DNA, 80 bp, synthetic construct
  misc_feature 1..80: note = Artificially Synthesized Probe
  source 1..80: mol_type = other DNA
agctactgcacctggcccatttagttctttatatctgttgtttctttgctggtactctctttctttcaagagtgttttta

SEQ ID NO: 51296 - DNA, 80 bp, synthetic construct
  misc_feature 1..80: note = Artificially Synthesized Probe
  source 1..80: mol_type = other DNA
atctctttttttgaggttaacttcggaaggcactaacatgatctcctgcgtgacttcccttaatgatgtcactgttgaca

SEQ ID NO: 51297 - DNA, 80 bp, synthetic construct
  misc_feature 1..80: note = Artificially Synthesized Probe
  source 1..80: mol_type = other DNA
cctaccgggttcacgccattctcctgcctcagcctctcgagtagctgggactacaggtgcccgccatcatgcctgactaa

SEQ ID NO: 51298 - DNA, 80 bp, synthetic construct
  misc_feature 1..80: note = Artificially Synthesized Probe
  source 1..80: mol_type = other DNA
ttaaagttaatttcaccgtctgtgccatcttggtattggcatctgttgataccagttgaagttttcccctttttagtata

SEQ ID NO: 51299 - DNA, 80 bp, synthetic construct; identical to SEQ ID NO: 24237
  misc_feature 1..80: note = Artificially Synthesized Probe
  source 1..80: mol_type = other DNA

SEQ ID NO: 51300 - DNA, 80 bp, synthetic construct
  misc_feature 1..80: note = Artificially Synthesized Probe
  source 1..80: mol_type = other DNA
aatacaaaaaattagccgggcgtggtggcgggtgcctgtagtcccagctactcaggaggctgaggcaggagaatgggatg

SEQ ID NO: 51301 - DNA, 80 bp, synthetic construct
  misc_feature 1..80: note = Artificially Synthesized Probe
  source 1..80: mol_type = other DNA
gagttcattaaccactttatggggccattttcttgagttcctccctctgtacaatctccccagtactatctggttccctg

SEQ ID NO: 51302 - DNA, 80 bp, synthetic construct; identical to SEQ ID NO: 24238
  misc_feature 1..80: note = Artificially Synthesized Probe
  source 1..80: mol_type = other DNA

SEQ ID NO: 51303 - DNA, 80 bp, synthetic construct
  misc_feature 1..80: note = Artificially Synthesized Probe
  source 1..80: mol_type = other DNA
gctggtggatactggaggaataataaaaagataaattcattattggttcagtgttatgtaaaagtcttctccaattacct

SEQ ID NO: 51304 - DNA, 80 bp, synthetic construct
  misc_feature 1..80: note = Artificially Synthesized Probe
  source 1..80: mol_type = other DNA
tgctagtcaacaacatacactgcaagttcagtcctttgaacttccttcatggcccatcttaaggtctgttttggtaaagt

SEQ ID NO: 51305 - DNA, 80 bp, synthetic construct
  misc_feature 1..80: note = Artificially Synthesized Probe
  source 1..80: mol_type = other DNA
tatcaatagctgagagagttatgttaggctctcaaactatgtagatttgtgtattttccctttagttctgagttttttgc

SEQ ID NO: 51306 - DNA, 80 bp, synthetic construct; identical to SEQ ID NO: 24189
  misc_feature 1..80: note = Artificially Synthesized Probe
  source 1..80: mol_type = other DNA

SEQ ID NO: 51307 - DNA, 80 bp, synthetic construct
  misc_feature 1..80: note = Artificially Synthesized Probe
  source 1..80: mol_type = other DNA
gctatctcagctcactgcaagctccgcctcccgggttcatgccattctcctgcctcagcctcccgagtagctgggactac

SEQ ID NO: 51308 - DNA, 80 bp, synthetic construct; identical to SEQ ID NO: 24239
  misc_feature 1..80: note = Artificially Synthesized Probe
  source 1..80: mol_type = other DNA

SEQ ID NO: 51309 - DNA, 80 bp, synthetic construct
  misc_feature 1..80: note = Artificially Synthesized Probe
  source 1..80: mol_type = other DNA
tagacagggttttgccatgttggccaggctggtcttgaactcctgacctcaggtgatccacccacctcagcctcgcaaag

SEQ ID NO: 51310 - DNA, 80 bp, synthetic construct
  misc_feature 1..80: note = Artificially Synthesized Probe
  source 1..80: mol_type = other DNA
ctgatcatctgtccttctttgtttatacttgcactgtccaatagaaacatttaccacagatgccaaccaagtatatactt

SEQ ID NO: 51311 - DNA, 80 bp, synthetic construct; identical to SEQ ID NO: 24240
  misc_feature 1..80: note = Artificially Synthesized Probe
  source 1..80: mol_type = other DNA

SEQ ID NO: 51312 - DNA, 80 bp, synthetic construct
  misc_feature 1..80: note = Artificially Synthesized Probe
  source 1..80: mol_type = other DNA
cagtctcgctttgttgcccaggctggagtgaagtggcgtgatcttggctcactgcaaactccgcctctggcttcaagtga

SEQ ID NO: 51313 - DNA, 80 bp, synthetic construct
  misc_feature 1..80: note = Artificially Synthesized Probe
  source 1..80: mol_type = other DNA
ctgtgcccagcctaacacagtgtagtttaaacattaatttttttctttttctttttttttttttgtgagacagtctcgtt

SEQ ID NO: 51314 - DNA, 80 bp, synthetic construct
  misc_feature 1..80: note = Artificially Synthesized Probe
  source 1..80: mol_type = other DNA
tttaccatgttggccaggatggcctcgatctcttgacctcatgatctgcccacctcggcctcccaaagtgctgggattac

SEQ ID NO: 51315 - DNA, 80 bp, synthetic construct; identical to SEQ ID NO: 24241
  misc_feature 1..80: note = Artificially Synthesized Probe
  source 1..80: mol_type = other DNA

SEQ ID NO: 51316 - DNA, 80 bp, synthetic construct
  misc_feature 1..80: note = Artificially Synthesized Probe
  source 1..80: mol_type = other DNA
ccagcctcaagtgatcctctcatctcagcctcctgagtagctgggactataggcatgcaccactatgcctggctaatttt

SEQ ID NO: 51317 - DNA, 80 bp, synthetic construct
  misc_feature 1..80: note = Artificially Synthesized Probe
  source 1..80: mol_type = other DNA
agtgcagtggcacaatttcggttcactgcaacctccgcctcctgggttcaaatgattctcctgcctcagcctcctaagta

SEQ ID NO: 51318 - DNA, 80 bp, synthetic construct
  misc_feature 1..80: note = Artificially Synthesized Probe
  source 1..80: mol_type = other DNA
gcctggccctttttgcctttaaaaaaattttcctgctttcttttggatttattttttgttactatttaagtattccattt

SEQ ID NO: 51319 - DNA, 80 bp, synthetic construct
  misc_feature 1..80: note = Artificially Synthesized Probe
  source 1..80: mol_type = other DNA
agcatttgggaggctgaggcaggtggatcatctgaggtcaggagttcaagaccagcctagccaacacggtgaaaccctga

SEQ ID NO: 51320 - DNA, 80 bp, synthetic construct
  misc_feature 1..80: note = Artificially Synthesized Probe
  source 1..80: mol_type = other DNA
aagattgtgccactgcactccagcctgggcgacaagagcaaaactccatctcaaaacaaaaacaaaaaacaaaaaaagcc

SEQ ID NO: 51321 - DNA, 80 bp, synthetic construct; identical to SEQ ID NO: 24242
  misc_feature 1..80: note = Artificially Synthesized Probe
  source 1..80: mol_type = other DNA

SEQ ID NO: 51322 - DNA, 80 bp, synthetic construct
  misc_feature 1..80: note = Artificially Synthesized Probe
  source 1..80: mol_type = other DNA
acatacagtcatgtgtcacttgatggggatacattctgagaaatgtgccattaggtgagttcaacattgtgtgaacgtca

SEQ ID NO: 51323 - DNA, 80 bp, synthetic construct
  misc_feature 1..80: note = Artificially Synthesized Probe
  source 1..80: mol_type = other DNA
agacatagaaaagatgtagttaaaatgttggtattatcatctgtgggaccaccatggtatatgcagttcattgttgacta

SEQ ID NO: 51324 - DNA, 80 bp, synthetic construct
  misc_feature 1..80: note = Artificially Synthesized Probe
  source 1..80: mol_type = other DNA
atatacctagaagtaggtatataccaaaattgctatggtagttctgtgttttattttttgagacactgccaaattgtttc

SEQ ID NO: 51325 - DNA, 80 bp, synthetic construct; identical to SEQ ID NO: 24243
  misc_feature 1..80: note = Artificially Synthesized Probe
  source 1..80: mol_type = other DNA

SEQ ID NO: 51326 - DNA, 80 bp, synthetic construct
  misc_feature 1..80: note = Artificially Synthesized Probe
  source 1..80: mol_type = other DNA
tgtaattccagcacttttggaggccaaggtgggcggatcatgaggtcaggagttggagaccagcctggccaacatggtga

SEQ ID NO: 51327 - DNA, 80 bp, synthetic construct
  misc_feature 1..80: note = Artificially Synthesized Probe
  source 1..80: mol_type = other DNA
agcaagactctgtcttggacaaaaaaaaggaagagtacccttttaatgtgctgttgagagtaatatcttttcagttattt

SEQ ID NO: 51328 - DNA, 80 bp, synthetic construct; identical to SEQ ID NO: 24244
  misc_feature 1..80: note = Artificially Synthesized Probe
  source 1..80: mol_type = other DNA

SEQ ID NO: 51329 - DNA, 80 bp, synthetic construct
  misc_feature 1..80: note = Artificially Synthesized Probe
  source 1..80: mol_type = other DNA
agcctcccctgtagctgggattacaggcatgcaccaccacacccagctaattttgtatttttggtagagacagggctttt

SEQ ID NO: 51330 - DNA, 80 bp, synthetic construct
  misc_feature 1..80: note = Artificially Synthesized Probe
  source 1..80: mol_type = other DNA
caggctaaagtgcactggggcaatctcagctcactgcaacctctgcctcctgggttcaagcagttctcctgcttcagcct

SEQ ID NO: 51331 - DNA, 80 bp, synthetic construct
  misc_feature 1..80: note = Artificially Synthesized Probe
  source 1..80: mol_type = other DNA
gccactgcacctggccatttctggcactttttatagttttgtatgggttggtctattatcattcttcagatatatttgga

SEQ ID NO: 51332 - DNA, 80 bp, synthetic construct
  misc_feature 1..80: note = Artificially Synthesized Probe
  source 1..80: mol_type = other DNA
tgttcagtttgtttccttagtcttttttctcttagtgctttatttttgcttcctcgggttcactgatcttctacagagtt

SEQ ID NO: 51333 - DNA, 80 bp, synthetic construct
  misc_feature 1..80: note = Artificially Synthesized Probe
  source 1..80: mol_type = other DNA
ttttctgggtctgcttccattgactgatagtcctcctagttatgaatcatattttgtgcctcttgtcttgtaattttaga

SEQ ID NO: 51334 - DNA, 80 bp, synthetic construct; identical to SEQ ID NO: 24245
  misc_feature 1..80: note = Artificially Synthesized Probe
  source 1..80: mol_type = other DNA

SEQ ID NO: 51335 - DNA, 80 bp, synthetic construct
  misc_feature 1..80: note = Artificially Synthesized Probe
  source 1..80: mol_type = other DNA
tatacaggacttagtattcaggaactgagtcaggggtgtcctattcaggtatttggaacctttttctacataattcattc

SEQ ID NO: 51336 - DNA, 80 bp, synthetic construct
  misc_feature 1..80: note = Artificially Synthesized Probe
  source 1..80: mol_type = other DNA
cgggtagaagactaggataattttaagggtcaccttatttgtttcccgtcattcagggattacattctggcattgtttgt

SEQ ID NO: 51337 - DNA, 80 bp, synthetic construct
  misc_feature 1..80: note = Artificially Synthesized Probe
  source 1..80: mol_type = other DNA
cctcatattacatatttctaatgtgcataaatttcagttagcacaatttagttaagtgacactagtcacccaataccatg

SEQ ID NO: 51338 - DNA, 80 bp, synthetic construct; identical to SEQ ID NO: 24246
  misc_feature 1..80: note = Artificially Synthesized Probe
  source 1..80: mol_type = other DNA

SEQ ID NO: 51339 - DNA, 80 bp, synthetic construct
  misc_feature 1..80: note = Artificially Synthesized Probe
  source 1..80: mol_type = other DNA
gaagaaatagttgaccataggaaaattgacactgtcaccatttgatagactctagatatgcagccagaggaacttattga

SEQ ID NO: 51340 - DNA, 80 bp, synthetic construct
  misc_feature 1..80: note = Artificially Synthesized Probe
  source 1..80: mol_type = other DNA
cactgcaacctctgcctctcactgcaacctctgcctcctgtgttcaggcaattctcctgcctcagcctcctgagtagctg

SEQ ID NO: 51341 - DNA, 80 bp, synthetic construct
  misc_feature 1..80: note = Artificially Synthesized Probe
  source 1..80: mol_type = other DNA
tgaattattagatgtggagtaaaaattcaactttgagtagttttagaaattatttattgctaaattagaaaataaacttt

SEQ ID NO: 51342 - DNA, 80 bp, synthetic construct
  misc_feature 1..80: note = Artificially Synthesized Probe
  source 1..80: mol_type = other DNA
ccgcctccagggtttacaccattctcctggctcagcctcccgagtagctgggactacaggcacctgccaccacgcctggc

SEQ ID NO: 51343 - DNA, 80 bp, synthetic construct; identical to SEQ ID NO: 24247
  misc_feature 1..80: note = Artificially Synthesized Probe
  source 1..80: mol_type = other DNA

SEQ ID NO: 51344 - DNA, 80 bp, synthetic construct
  misc_feature 1..80: note = Artificially Synthesized Probe
  source 1..80: mol_type = other DNA
catgttatatattttaaattttagattccaattttctggtgtaactttttaatctgttttgttgaatatcttaaatatgg

SEQ ID NO: 51345 - DNA, 80 bp, synthetic construct
  misc_feature 1..80: note = Artificially Synthesized Probe
  source 1..80: mol_type = other DNA
ttcctcttgcaaaactgaaattctatactcattaaataacaactccccattacccatcacctctcagctcctggcaacca

SEQ ID NO: 51346 - DNA, 80 bp, synthetic construct; identical to SEQ ID NO: 24248
  misc_feature 1..80: note = Artificially Synthesized Probe
  source 1..80: mol_type = other DNA

SEQ ID NO: 51347 - DNA, 80 bp, synthetic construct
  misc_feature 1..80: note = Artificially Synthesized Probe
  source 1..80: mol_type = other DNA
gtaaaacagcgttaggcaggtccttcaggaggtattccagaaaaaggcattgatgtcataggagatgacaggtccataga

SEQ ID NO: 51348 - DNA, 80 bp, synthetic construct
  misc_feature 1..80: note = Artificially Synthesized Probe
  source 1..80: mol_type = other DNA
ttttaaataggaaacaacttataaagatgtaaggaaaaatatttttgtactgctgtacaatatgtttgtgttttgagcta

SEQ ID NO: 51349 - DNA, 80 bp, synthetic construct
  misc_feature 1..80: note = Artificially Synthesized Probe
  source 1..80: mol_type = other DNA
ataaagtctatagtagtgtacaataatgtcctagaccttcacgtttattgaccactcattcagtaactcacccagagcaa

SEQ ID NO: 51350 - DNA, 80 bp, synthetic construct; identical to SEQ ID NO: 24249
  misc_feature 1..80: note = Artificially Synthesized Probe
  source 1..80: mol_type = other DNA

SEQ ID NO: 51351 - DNA, 80 bp, synthetic construct
  misc_feature 1..80: note = Artificially Synthesized Probe
  source 1..80: mol_type = other DNA
tatgttatgttatgttatgttatgttatgttatgttattttgagacagagtttcactcttgttgcccatgctggagtgca

SEQ ID NO: 51352 - DNA, 80 bp, synthetic construct; identical to SEQ ID NO: 24190
  misc_feature 1..80: note = Artificially Synthesized Probe
  source 1..80: mol_type = other DNA

SEQ ID NO: 51353 - DNA, 80 bp, synthetic construct
  misc_feature 1..80: note = Artificially Synthesized Probe
  source 1..80: mol_type = other DNA
ctgggactcctgacctcaggcgatctgcccgcctcagcctcccaaagtgctgggattacaggcatgagccactgcgcctg

SEQ ID NO: 51354 - DNA, 80 bp, synthetic construct
  misc_feature 1..80: note = Artificially Synthesized Probe
  source 1..80: mol_type = other DNA
tggtagtaccttctagatttgtgtaagtacactgtgatcacacagccgagaaatcacctagtgatgcatttctcagaatg

SEQ ID NO: 51355 - DNA, 80 bp, synthetic construct
  misc_feature 1..80: note = Artificially Synthesized Probe
  source 1..80: mol_type = other DNA
tttagttatctacccatctgttgatggccatttgaatctgtctactttattgtttgccttttcccctggtttttgtttgt

SEQ ID NO: 51356 - DNA, 80 bp, synthetic construct; identical to SEQ ID NO: 24250
  misc_feature 1..80: note = Artificially Synthesized Probe
  source 1..80: mol_type = other DNA

SEQ ID NO: 51357 - DNA, 80 bp, synthetic construct
  misc_feature 1..80: note = Artificially Synthesized Probe
  source 1..80: mol_type = other DNA
atcttactctctgcgtgtaaaatttaggagtcaggaaatgccgtaggggaaaaattatacccagaatatcaggttaaccg

SEQ ID NO: 51358 - DNA, 80 bp, synthetic construct
  misc_feature 1..80: note = Artificially Synthesized Probe
  source 1..80: mol_type = other DNA
atttagtctgataataattactacattatgaccaaaagcaaaatcccagtatgtatttttattaatttatattccatgtt

SEQ ID NO: 51359 - DNA, 80 bp, synthetic construct
  misc_feature 1..80: note = Artificially Synthesized Probe
  source 1..80: mol_type = other DNA
tgtatttcctgcaaaccagaacattctcccatataacccaataacaaccatcagaattaaggaaattattattggcatat

SEQ ID NO: 51360 - DNA, 80 bp, synthetic construct; identical to SEQ ID NO: 24251
  misc_feature 1..80: note = Artificially Synthesized Probe
  source 1..80: mol_type = other DNA

SEQ ID NO: 51361 - DNA, 80 bp, synthetic construct
  misc_feature 1..80: note = Artificially Synthesized Probe
  source 1..80: mol_type = other DNA
tttcccactatagaattaactttatatttttccaattaaaacgaagtagtattttgtggggaggtattttgagactattt

SEQ ID NO: 51362 - DNA, 80 bp, synthetic construct
  misc_feature 1..80: note = Artificially Synthesized Probe
  source 1..80: mol_type = other DNA
aagtagctggaactacagatgcgtgtcaccatggcttctttttttcctgttaattctttttgtagaggcaggatctcaaa

SEQ ID NO: 51363 - DNA, 80 bp, synthetic construct; identical to SEQ ID NO: 24252
  misc_feature 1..80: note = Artificially Synthesized Probe
  source 1..80: mol_type = other DNA

SEQ ID NO: 51364 - DNA, 80 bp, synthetic construct
  misc_feature 1..80: note = Artificially Synthesized Probe
  source 1..80: mol_type = other DNA
atctcaactcactgcaacctccgcttcccaggttcaggcaattctcctgtctcagcctcctaagtagctgggattacagg

SEQ ID NO: 51365 - DNA, 80 bp, synthetic construct
  misc_feature 1..80: note = Artificially Synthesized Probe
  source 1..80: mol_type = other DNA
gaatcgcttgaacctgagaggcggaggttgcagtgagccaatattgtgccactgcactccagcctgggtgacagagcaag

SEQ ID NO: 51366 - DNA, 80 bp, synthetic construct
  misc_feature 1..80: note = Artificially Synthesized Probe
  source 1..80: mol_type = other DNA
aaatttttatgagctccagtatttcagagtgccacctcccaaaatgacagcatgatataccttggcaatagtttagacct

SEQ ID NO: 51367 - DNA, 80 bp, synthetic construct
  misc_feature 1..80: note = Artificially Synthesized Probe
  source 1..80: mol_type = other DNA
tattctggggtacatgtgcaggatgtgcaggtttggtacgtaggtaaacatgccatggtgttttgttgcacctatcaacc

SEQ ID NO: 51368 - DNA, 80 bp, synthetic construct; identical to SEQ ID NO: 24253
  misc_feature 1..80: note = Artificially Synthesized Probe
  source 1..80: mol_type = other DNA

SEQ ID NO: 51369 - DNA, 80 bp, synthetic construct
  misc_feature 1..80: note = Artificially Synthesized Probe
  source 1..80: mol_type = other DNA
acaccaccatgcctggctaatttttatatttttagtagagacagggtttcaccatgttgaccaggctggtctcgaactcc

SEQ ID NO: 51370 - DNA, 80 bp, synthetic construct
  misc_feature 1..80: note = Artificially Synthesized Probe
  source 1..80: mol_type = other DNA
aaggtggtgtctagggctgaggtctcatttgaaggttttatttcgagaaaaagccacttccaagcttattgttgttggtg

SEQ ID NO: 51371 - DNA, 80 bp, synthetic construct
  misc_feature 1..80: note = Artificially Synthesized Probe
  source 1..80: mol_type = other DNA
caaagcgtgcaaaccaagaaggcaatagagtctgttagcaagatggaagttgcagtcttaacctaattaggaaaatggca

SEQ ID NO: 51372 - DNA, 80 bp, synthetic construct; identical to SEQ ID NO: 24254
  misc_feature 1..80: note = Artificially Synthesized Probe
  source 1..80: mol_type = other DNA

SEQ ID NO: 51373 - DNA, 80 bp, synthetic construct
  misc_feature 1..80: note = Artificially Synthesized Probe
  source 1..80: mol_type = other DNA
tgaatatattatttacctaggaatttctcggtgtaatacattgtaagatttcagcttacaacaacatcctcaattctagt

SEQ ID NO: 51374 - DNA, 80 bp, synthetic construct
  misc_feature 1..80: note = Artificially Synthesized Probe
  source 1..80: mol_type = other DNA
atcttcctgtataatccatctcctgttgctgacatatctctcgctccatttctcaccccatacttcatatgcatgcctcc

SEQ ID NO: 51375 - DNA, 80 bp, synthetic construct
  misc_feature 1..80: note = Artificially Synthesized Probe
  source 1..80: mol_type = other DNA
atgggatcttgcttgctctgttgccaggttggccttgaactcaggctagggttaagtgatctttgtgcctcggcctctcc

SEQ ID NO: 51376 - DNA, 80 bp, synthetic construct
  misc_feature 1..80: note = Artificially Synthesized Probe
  source 1..80: mol_type = other DNA
cactgccctgtgtggatgtggacatcctcatcattctgctcactgctgttacagttcctacgtggtagccttccttgttc

SEQ ID NO: 51377 - DNA, 80 bp, synthetic construct
  misc_feature 1..80: note = Artificially Synthesized Probe
  source 1..80: mol_type = other DNA
aactctctgccacttagcttgatgcctcctttgcctgtactcacctattgaactgttcaggtaggaaaggagaagaggga

SEQ ID NO: 51378 - DNA, 80 bp, synthetic construct; identical to SEQ ID NO: 24255
  misc_feature 1..80: note = Artificially Synthesized Probe
  source 1..80: mol_type = other DNA

SEQ ID NO: 51379 - DNA, 80 bp, synthetic construct
  misc_feature 1..80: note = Artificially Synthesized Probe
  source 1..80: mol_type = other DNA
aacctcttgggtgcgatttctttatttagtttgtgtagtcattcctgtgcccctaaaccattttggcttcccatttctta

SEQ ID NO: 51380 - DNA, 80 bp, synthetic construct
  misc_feature 1..80: note = Artificially Synthesized Probe
  source 1..80: mol_type = other DNA
ttgactcccatctttgttgcttactaactactcatcaacgtgtaatttatttaacctccctgggtctgtttatttttatt

SEQ ID NO: 51381 - DNA, 80 bp, synthetic construct; identical to SEQ ID NO: 24256
  misc_feature 1..80: note = Artificially Synthesized Probe
  source 1..80: mol_type = other DNA

SEQ ID NO: 51382 - DNA, 80 bp, synthetic construct
  misc_feature 1..80: note = Artificially Synthesized Probe
  source 1..80: mol_type = other DNA
acatttgggttggttccaagtctttgctattgtgaatagtgccacagtaaacatacgtgtgcatgtgtctttagagcagc

SEQ ID NO: 51383 - DNA, 80 bp, synthetic construct
  misc_feature 1..80: note = Artificially Synthesized Probe
  source 1..80: mol_type = other DNA
cctctccagcacctgttgtttcctgactttttaatgatcaccattctaactggcgtgagatggtatctcattgtggtttt

SEQ ID NO: 51384 - DNA, 80 bp, synthetic construct
  misc_feature 1..80: note = Artificially Synthesized Probe
  source 1..80: mol_type = other DNA
attctggatattagccctttgtcagaggagtagattgcaaaaattttcttccattctgtaggttgcctgttcactctgat

SEQ ID NO: 51385 - DNA, 80 bp, synthetic construct; identical to SEQ ID NO: 24257
  misc_feature 1..80: note = Artificially Synthesized Probe
  source 1..80: mol_type = other DNA

SEQ ID NO: 51386 - DNA, 80 bp, synthetic construct
  misc_feature 1..80: note = Artificially Synthesized Probe
  source 1..80: mol_type = other DNA
tggtaccagtaccatgccgttttggttactgttgccttgtagtatagtttgaagtcaggtagcatgatgcctccagcttt

SEQ ID NO: 51387 - DNA, 80 bp, synthetic construct
  misc_feature 1..80: note = Artificially Synthesized Probe
  source 1..80: mol_type = other DNA
gcctcagcctcctgagtagctgggactacaggtttgtgccaccacacctggctatatttttatttttttgtagagatggg

SEQ ID NO: 51388 - DNA, 80 bp, synthetic construct
  misc_feature 1..80: note = Artificially Synthesized Probe
  source 1..80: mol_type = other DNA
tccagtttttcataaaaatagagatggggtctagttatgttgaccaggctggtcttgaactcctggtctcaagcagtcct

SEQ ID NO: 51389 - DNA, 80 bp, synthetic construct
  misc_feature 1..80: note = Artificially Synthesized Probe
  source 1..80: mol_type = other DNA
aagctaactaacaaagcttgttagtttgttatacagagaatgttatacagatgcagcttgttagtttgttatacatatag

SEQ ID NO: 51390 - DNA, 80 bp, synthetic construct
  misc_feature 1..80: note = Artificially Synthesized Probe
  source 1..80: mol_type = other DNA
gtgtaaactacttgagtctgtggatttgtggagacaaacacatttgagtattatttctgccattgtcatttaggcactat

SEQ ID NO: 51391 - DNA, 80 bp, synthetic construct; identical to SEQ ID NO: 24258
  misc_feature 1..80: note = Artificially Synthesized Probe
  source 1..80: mol_type = other DNA

SEQ ID NO: 51392 - DNA, 80 bp, synthetic construct
  misc_feature 1..80: note = Artificially Synthesized Probe
  source 1..80: mol_type = other DNA
tggctaacatggagaaaccctgcctgtctctaccaaaaatacaaaaattagtcaggcgtggtggtgcatgccggcagtcc

SEQ ID NO: 51393 - DNA, 80 bp, synthetic construct
  misc_feature 1..80: note = Artificially Synthesized Probe
  source 1..80: mol_type = other DNA
gtgcaataaggctgggcagatatgattatcctatctgacaggtgggagttttgtttttggagtgaactaaattgggattc

SEQ ID NO: 51394 - DNA, 80 bp, synthetic construct
  misc_feature 1..80: note = Artificially Synthesized Probe
  source 1..80: mol_type = other DNA
attgttgattattatagcttctgttactcctagaagttgaccaacagggaccttaatttaggagattttgtcattcagct

SEQ ID NO: 51395 - DNA, 80 bp, synthetic construct; identical to SEQ ID NO: 24259
  misc_feature 1..80: note = Artificially Synthesized Probe
  source 1..80: mol_type = other DNA

SEQ ID NO: 51396 - DNA, 80 bp, synthetic construct
  misc_feature 1..80: note = Artificially Synthesized Probe
  source 1..80: mol_type = other DNA
gtacccataggtagttttttcaagctttaccccctttgtcctcccaccttttgtattcctcagtgtctgttcccttcttt

SEQ ID NO: 51397 - DNA, 80 bp, synthetic construct
  misc_feature 1..80: note = Artificially Synthesized Probe
  source 1..80: mol_type = other DNA
ccatggtatatgtgtactgcattttctttatccagtcttccgttgatgggtacctgggttgattctgtgtctttactatc

SEQ ID NO: 51398 - DNA, 80 bp, synthetic construct
  misc_feature 1..80: note = Artificially Synthesized Probe
  source 1..80: mol_type = other DNA
gtgcagtggtgcgatctcagctcactgcaacctcagcttcctgggttcaaacagttctcctgcctcagcctcccaaatag

SEQ ID NO: 51399 - DNA, 80 bp, synthetic construct; identical to SEQ ID NO: 24260
  misc_feature 1..80: note = Artificially Synthesized Probe
  source 1..80: mol_type = other DNA

SEQ ID NO: 51400 - DNA, 80 bp, synthetic construct
  misc_feature 1..80: note = Artificially Synthesized Probe
  source 1..80: mol_type = other DNA
tttttaattaaaaaaaatgttttttagccaggcgtggtggtgcacgcctgtagtcccagctactgggcaggctgaggcag

SEQ ID NO: 51401 - DNA, 80 bp, synthetic construct
  misc_feature 1..80: note = Artificially Synthesized Probe
  source 1..80: mol_type = other DNA
gcaaggaaaaacaacaaaaacagtccaaactttaagtagaaaactatgtgcttttcaggtattttaaaggtaaattttaa

SEQ ID NO: 51402 - DNA, 80 bp, synthetic construct
  misc_feature 1..80: note = Artificially Synthesized Probe
  source 1..80: mol_type = other DNA
cttatagttttgtagaatgaggagggaggatagcctttgccttgagggtggaatcccagcttggccaaactactgttgac

SEQ ID NO: 51403 - DNA, 80 bp, synthetic construct
  misc_feature 1..80: note = Artificially Synthesized Probe
  source 1..80: mol_type = other DNA
ctccttcttttacgaaatgcttctaaatgtgaagatagaagggaaacaggtagagtaaaagttatagcccactccattta

SEQ ID NO: 51404 - DNA, 80 bp, synthetic construct
  misc_feature 1..80: note = Artificially Synthesized Probe
  source 1..80: mol_type = other DNA
ttatggtaatgtgcagatctgactatattcaagtatagttttcatacccataccaattgtcttgtaataatcgggaatgc

SEQ ID NO: 51405 - DNA, 80 bp, synthetic construct; identical to SEQ ID NO: 24261
  misc_feature 1..80: note = Artificially Synthesized Probe
  source 1..80: mol_type = other DNA

SEQ ID NO: 51406 - DNA, 80 bp, synthetic construct
  misc_feature 1..80: note = Artificially Synthesized Probe
  source 1..80: mol_type = other DNA
caaggagcattcacaaaaataaatatgtatattttaattttaaaaagagccccaagtctgtgaatgaaagggttctggtt

SEQ ID NO: 51407 - DNA, 80 bp, synthetic construct
  misc_feature 1..80: note = Artificially Synthesized Probe
  source 1..80: mol_type = other DNA
cctcgattttcttccactatttcctttgtccttttcctgtgttttcatgctctatttatttacacccacttctgacttct

SEQ ID NO: 51408 - DNA, 80 bp, synthetic construct
  misc_feature 1..80: note = Artificially Synthesized Probe
  source 1..80: mol_type = other DNA
gccaggctggagtgcagtggcacaatctcagctcactgcaacctccgccttccgggttcaagcgattctcctgcctcagc

SEQ ID NO: 51409 - DNA, 80 bp, synthetic construct; identical to SEQ ID NO: 24262
  misc_feature 1..80: note = Artificially Synthesized Probe
  source 1..80: mol_type = other DNA

SEQ ID NO: 51410 - DNA, 80 bp, synthetic construct
  misc_feature 1..80: note = Artificially Synthesized Probe
  source 1..80: mol_type = other DNA
gctcattgctgccctgatatccctggctcaagcagtcctcccatctcagcctccccaagtagctaggaccacaggcatgt

SEQ ID NO: 51411 - DNA, 80 bp, synthetic construct; identical to SEQ ID NO: 24191
  misc_feature 1..80: note = Artificially Synthesized Probe
  source 1..80: mol_type = other DNA

SEQ ID NO: 51412 - DNA, 80 bp, synthetic construct
  misc_feature 1..80: note = Artificially Synthesized Probe
  source 1..80: mol_type = other DNA
gattataggattgagccaccacatctggctccaggacagtgtctactaccagaacagcatttaataagtatttattgaat

SEQ ID NO: 51413 - DNA, 80 bp, synthetic construct
  misc_feature 1..80: note = Artificially Synthesized Probe
  source 1..80: mol_type = other DNA
cttctccttccaatgtgagaatctctgctattaagaaccgctggcagagactgaaattagtatacataattctaaggaga

SEQ ID NO: 51414 - DNA, 80 bp, synthetic construct; identical to SEQ ID NO: 24263
  misc_feature 1..80: note = Artificially Synthesized Probe
  source 1..80: mol_type = other DNA

SEQ ID NO: 51415 - DNA, 80 bp, synthetic construct
  misc_feature 1..80: note = Artificially Synthesized Probe
  source 1..80: mol_type = other DNA
aattcaaagcagtttagctgttttgcttggtatgttatctggtgatgcctttagcagatacccttcttttgaagcccagt

SEQ ID NO: 51416 - DNA, 80 bp, synthetic construct
  misc_feature 1..80: note = Artificially Synthesized Probe
  source 1..80: mol_type = other DNA
gaggataatgtattaagcgtagtcctatgggtggtaaataaaatgaggataataatctaaaatcaggggatatacataga

SEQ ID NO: 51417 - DNA, 80 bp, synthetic construct; identical to SEQ ID NO: 24264
  misc_feature 1..80: note = Artificially Synthesized Probe
  source 1..80: mol_type = other DNA

SEQ ID NO: 51418 - DNA, 80 bp, synthetic construct
  misc_feature 1..80: note = Artificially Synthesized Probe
  source 1..80: mol_type = other DNA
ttattagactgtaatagcactcaagttgatggataaaatttcatcctgggatacttttagagaaacatgaagaatataaa

SEQ ID NO: 51419 - DNA, 80 bp, synthetic construct
  misc_feature 1..80: note = Artificially Synthesized Probe
  source 1..80: mol_type = other DNA
tgtttgtttagaaggttttaataccaacagctttctaggtgtcgtcttcttcctcttcctctcccctccccccctcccct

SEQ ID NO: 51420 - DNA, 80 bp, synthetic construct
  misc_feature 1..80: note = Artificially Synthesized Probe
  source 1..80: mol_type = other DNA
gtccactggatcttaacagtttcaactagtgttccacaatatttctgctgtacttggggagaatttctggataattagaa

SEQ ID NO: 51421 - DNA, 80 bp, synthetic construct
  misc_feature 1..80: note = Artificially Synthesized Probe
  source 1..80: mol_type = other DNA
ccctcgccttataccccccaccccccacagaccccaatccatctggaaagatgaagaggcagctgctatggtaactgtgc

SEQ ID NO: 51422 - DNA, 80 bp, synthetic construct
  misc_feature 1..80: note = Artificially Synthesized Probe
  source 1..80: mol_type = other DNA
ttcctaatattgtaatgtttctgtgaactcctcctctttctgcttagtctgcacagtattacaccctgtggtgagtttat

SEQ ID NO: 51423 - DNA, 80 bp, synthetic construct; identical to SEQ ID NO: 24265
  misc_feature 1..80: note = Artificially Synthesized Probe
  source 1..80: mol_type = other DNA

SEQ ID NO: 51424 - DNA, 80 bp, synthetic construct
  misc_feature 1..80: note = Artificially Synthesized Probe
  source 1..80: mol_type = other DNA
aaaattcctgtaatctgtgccatcctgtctcatactgtcccatctcatagttgtcctctctctgcagtgctctatgccca

SEQ ID NO: 51425 - DNA, 80 bp, synthetic construct
  misc_feature 1..80: note = Artificially Synthesized Probe
  source 1..80: mol_type = other DNA
gcctcctcctttcccatactttacttatattcatcttttctccttcatattgcctgtatctcacatcactcagtactcct

SEQ ID NO: 51426 - DNA, 80 bp, synthetic construct
  misc_feature 1..80: note = Artificially Synthesized Probe
  source 1..80: mol_type = other DNA
caatacgtaatatttgctctggacctacataaagccaattagtataatcaatcaattaattacaatcagtttcctgaaca

SEQ ID NO: 51427 - DNA, 80 bp, synthetic construct; identical to SEQ ID NO: 24266
  misc_feature 1..80: note = Artificially Synthesized Probe
  source 1..80: mol_type = other DNA

SEQ ID NO: 51428 - DNA, 80 bp, synthetic construct
  misc_feature 1..80: note = Artificially Synthesized Probe
  source 1..80: mol_type = other DNA
ggctaatttttgtatttttagtagagactgggtttcaccatgttggccaggctggtctcgaactcctgacctcaggtaat

SEQ ID NO: 51429 - DNA, 80 bp, synthetic construct
  misc_feature 1..80: note = Artificially Synthesized Probe
  source 1..80: mol_type = other DNA
ttggtgctcattgcttacagattagggtaccatacatgattgttttcttgactgagtcttatctgcgtacctcaggtatt

SEQ ID NO: 51430 - DNA, 80 bp, synthetic construct
  misc_feature 1..80: note = Artificially Synthesized Probe
  source 1..80: mol_type = other DNA
tgttgaactaagaatatgattgttctctgaggcactacctgctagttcctggattacctttatatgtggccaaggtgggg

SEQ ID NO: 51431 - DNA, 80 bp, synthetic construct
  misc_feature 1..80: note = Artificially Synthesized Probe
  source 1..80: mol_type = other DNA
aacttaggttttccacattcctaacctatgctaagagttgttaatttttaatgatactatttagtgatcataaagctgga

SEQ ID NO: 51432 - DNA, 80 bp, synthetic construct; identical to SEQ ID NO: 24267
  misc_feature 1..80: note = Artificially Synthesized Probe
  source 1..80: mol_type = other DNA

SEQ ID NO: 51433 - DNA, 80 bp, synthetic construct
  misc_feature 1..80: note = Artificially Synthesized Probe
  source 1..80: mol_type = other DNA
actcacagcaacctctgcctactgggctctagttgccctcctacctcaaacttccgggtagctgagactacaggcacacg

SEQ ID NO: 51434 - DNA, 80 bp, synthetic construct
  misc_feature 1..80: note = Artificially Synthesized Probe
  source 1..80: mol_type = other DNA
tttttaactacatatcatactgacaaggttctgccattgaagaatccatagtctagtttgttggtttttttgttttgttt

SEQ ID NO: 51435 - DNA, 80 bp, synthetic construct
  misc_feature 1..80: note = Artificially Synthesized Probe
  source 1..80: mol_type = other DNA
aattcactgaaaacaattatactcacagtttattacaggaaaaggacacaggttaaaattagccaaaagaagagacacat

SEQ ID NO: 51436 - DNA, 80 bp, synthetic construct; identical to SEQ ID NO: 24268
  misc_feature 1..80: note = Artificially Synthesized Probe
  source 1..80: mol_type = other DNA

SEQ ID NO: 51437 - DNA, 80 bp, synthetic construct
  misc_feature 1..80: note = Artificially Synthesized Probe
  source 1..80: mol_type = other DNA
aaaggccattcctttctttggtgaagagtaattcttcactacacaggggtcatggatctctttgggaatctgatgagaac

SEQ ID NO: 51438 - DNA, 80 bp, synthetic construct
  misc_feature 1..80: note = Artificially Synthesized Probe
  source 1..80: mol_type = other DNA
taatctcccaagctgataaattctaggaagggaatgttcaaggagctgtaagaatatataaaagggggacccaatctaac

SEQ ID NO: 51439 - DNA, 80 bp, synthetic construct; identical to SEQ ID NO: 24269
  misc_feature 1..80: note = Artificially Synthesized Probe
  source 1..80: mol_type = other DNA

SEQ ID NO: 51440 - DNA, 80 bp, synthetic construct
  misc_feature 1..80: note = Artificially Synthesized Probe
  source 1..80: mol_type = other DNA
ctggctataagaagatgcatttagatatgttactctggctataaaaaggataatttcagtagttgaagagagagatgatg

SEQ ID NO: 51441 - DNA, 80 bp, synthetic construct
  misc_feature 1..80: note = Artificially Synthesized Probe
  source 1..80: mol_type = other DNA
aataaacctgtggcatataatgcaaataacatttttatgaaaaatatatttttcaaaaaaaattaagactagtgtattac

SEQ ID NO: 51442 - DNA, 80 bp, synthetic construct
  misc_feature 1..80: note = Artificially Synthesized Probe
  source 1..80: mol_type = other DNA
gcaacccccgactccctggttcaaatgattttcctgcctcagcctcccgagtagctgggattacaggcacgtaccaccac

SEQ ID NO: 51443 - DNA, 80 bp, synthetic construct
  misc_feature 1..80: note = Artificially Synthesized Probe
  source 1..80: mol_type = other DNA
taccattttcaggtagttgcagtttcttgaagattagttgcagtatggtatctgaagccttatcaatgaacttcctctgt

SEQ ID NO: 51444 - DNA, 80 bp, synthetic construct; identical to SEQ ID NO: 24270
  misc_feature 1..80: note = Artificially Synthesized Probe
  source 1..80: mol_type = other DNA

SEQ ID NO: 51445 - DNA, 80 bp, synthetic construct
  misc_feature 1..80: note = Artificially Synthesized Probe
  source 1..80: mol_type = other DNA
cagctactcaggaagctgaggcgggaggattgcttaagcccaggagttcagggctatagtgcctgtgaaaaaccactgct

SEQ ID NO: 51446 - DNA, 80 bp, synthetic construct
  misc_feature 1..80: note = Artificially Synthesized Probe
  source 1..80: mol_type = other DNA
agccactgcacctggcctcaacaagattattattatgtcttatgtagcaaaaatgggcttatgtactggttttaccctat

SEQ ID NO: 51447 - DNA, 80 bp, synthetic construct
  misc_feature 1..80: note = Artificially Synthesized Probe
  source 1..80: mol_type = other DNA
atttgaatctagtatcttctctgcccacctactggaattacagcagtcttagtgcatttgcatccttctggtttaggttt

SEQ ID NO: 51448 - DNA, 80 bp, synthetic construct; identical to SEQ ID NO: 24271
  misc_feature 1..80: note = Artificially Synthesized Probe
  source 1..80: mol_type = other DNA

SEQ ID NO: 51449 - DNA, 80 bp, synthetic construct
  misc_feature 1..80: note = Artificially Synthesized Probe
  source 1..80: mol_type = other DNA
gtatatcagtagttctcttttattgttaaatatatttcattatattagtacaccacaatttgtttatccattcatttatt

SEQ ID NO: 51450 - DNA, 80 bp, synthetic construct
  misc_feature 1..80: note = Artificially Synthesized Probe
  source 1..80: mol_type = other DNA
ggaatttgttgggtcatagagtaagtgtatttttaactttaaaagagacagtgaagcaattcttcaaagtggttgtcaca

SEQ ID NO: 51451 - DNA, 80 bp, synthetic construct
  misc_feature 1..80: note = Artificially Synthesized Probe
  source 1..80: mol_type = other DNA
agtcaaaattcttatggcaataaagaaggagaagctatggagtcattgctgaatttgttggattattcccagtagctcaa

SEQ ID NO: 51452 - DNA, 80 bp, synthetic construct
  misc_feature 1..80: note = Artificially Synthesized Probe
  source 1..80: mol_type = other DNA
ccattgatttatcctggaaagtgtatgagtgattagaagatttctgttgattaccagtagatatatttgatggaatcatt

SEQ ID NO: 51453 - DNA, 80 bp, synthetic construct; identical to SEQ ID NO: 24272
  misc_feature 1..80: note = Artificially Synthesized Probe
  source 1..80: mol_type = other DNA

SEQ ID NO: 51454 - DNA, 80 bp, synthetic construct; identical to SEQ ID NO: 24192
  misc_feature 1..80: note = Artificially Synthesized Probe
  source 1..80: mol_type = other DNA

SEQ ID NO: 51455 - DNA, 80 bp, synthetic construct
  misc_feature 1..80: note = Artificially Synthesized Probe
  source 1..80: mol_type = other DNA
tgagccatgattgcgacactgcattctagcctgggtgacagagtgagaccctgtttcaattaaaaaaaatagatagatag

SEQ ID NO: 51456 - DNA, 80 bp, synthetic construct
  misc_feature 1..80: note = Artificially Synthesized Probe
  source 1..80: mol_type = other DNA
attcaggagagatgttgtattttattccttaagaatgcttacaagtctactgaattttaccatgtacaaagtgaaatgtt

SEQ ID NO: 51457 - DNA, 80 bp, synthetic construct; identical to SEQ ID NO: 24273
  misc_feature 1..80: note = Artificially Synthesized Probe
  source 1..80: mol_type = other DNA

SEQ ID NO: 51458 - DNA, 80 bp, synthetic construct
  misc_feature 1..80: note = Artificially Synthesized Probe
  source 1..80: mol_type = other DNA
atggaatatgtacattatttggtaaatatataaacaagagtatcacccatatgccttccactttaagataattattgcta

SEQ ID NO: 51459 - DNA, 80 bp, synthetic construct
  misc_feature 1..80: note = Artificially Synthesized Probe
  source 1..80: mol_type = other DNA
tagaaaatagaagtagaaagaaggaaggattttaaatgtcctcccagagattaccgtttcagtgatactagtaatttctg

SEQ ID NO: 51460 - DNA, 80 bp, synthetic construct
  misc_feature 1..80: note = Artificially Synthesized Probe
  source 1..80: mol_type = other DNA
tagtcatttcaaattttgcagttccccaaaggtgcagtgtgttcttttatatatctgtgtctttgcatataccgttctgc

SEQ ID NO: 51461 - DNA, 80 bp, synthetic construct; identical to SEQ ID NO: 24274
  misc_feature 1..80: note = Artificially Synthesized Probe
  source 1..80: mol_type = other DNA

SEQ ID NO: 51462 - DNA, 80 bp, synthetic construct
  misc_feature 1..80: note = Artificially Synthesized Probe
  source 1..80: mol_type = other DNA
aatgcggtgaaaccccgtctttactaaaaatacaaaaattagccgggcgtggtggtgggcgcctgtagtcccagctcctc

SEQ ID NO: 51463 - DNA, 80 bp, synthetic construct
  misc_feature 1..80: note = Artificially Synthesized Probe
  source 1..80: mol_type = other DNA
taattttatgtttttatgtctcacacatacacatacatatatactacattgtgtcaaattagtaagtacaaaacttttgt

SEQ ID NO: 51464 - DNA, 80 bp, synthetic construct
  misc_feature 1..80: note = Artificially Synthesized Probe
  source 1..80: mol_type = other DNA
aatattagtatatttcccctagatttttaaaaagcaggtcattatttttttaagcacttcaactgcagcacagtgcaatc

SEQ ID NO: 51465 - DNA, 80 bp, synthetic construct
  misc_feature 1..80: note = Artificially Synthesized Probe
  source 1..80: mol_type = other DNA
cccgagtagctgggattacaggcatgcggcaccacacccagctaattttgtatttttagtagagacggagtttttccatg

SEQ ID NO: 51466 - DNA, 80 bp, synthetic construct
  misc_feature 1..80: note = Artificially Synthesized Probe
  source 1..80: mol_type = other DNA
cctggaaatgtgcctatggactatttacagtgagattataaaactgaatcatgattttggtgaatagaagccagagcatg

SEQ ID NO: 51467 - DNA, 80 bp, synthetic construct; identical to SEQ ID NO: 24275
  misc_feature 1..80: note = Artificially Synthesized Probe
  source 1..80: mol_type = other DNA

SEQ ID NO: 51468 - DNA, 80 bp, synthetic construct
  misc_feature 1..80: note = Artificially Synthesized Probe
  source 1..80: mol_type = other DNA
cgttgaacatctccactctgattgctgttccctttggcattacaatgagagaaagagagactgacatactatgaagaaaa

SEQ ID NO: 51469 - DNA, 80 bp, synthetic construct
  misc_feature 1..80: note = Artificially Synthesized Probe
  source 1..80: mol_type = other DNA
agtagttgccttaaatgcatgaaaagggacagtgttaaagagaagtggtgctgatggagccaaacaaacttaacactaga

SEQ ID NO: 51470 - DNA, 80 bp, synthetic construct; identical to SEQ ID NO: 24276
  misc_feature 1..80: note = Artificially Synthesized Probe
  source 1..80: mol_type = other DNA

SEQ ID NO: 51471 - DNA, 80 bp, synthetic construct
  misc_feature 1..80: note = Artificially Synthesized Probe
  source 1..80: mol_type = other DNA
ttaggtaatatggaagaaacattatgcttatattagtccagcttatgccaaatgaatagaaaatcttccttataaaacca

SEQ ID NO: 51472 - DNA, 80 bp, synthetic construct
  misc_feature 1..80: note = Artificially Synthesized Probe
  source 1..80: mol_type = other DNA
tgctttcattttcatcccttttggggcattgaatttacaagtaaagttttaactgagaatgaatggccttttgcagttct

SEQ ID NO: 51473 - DNA, 80 bp, synthetic construct
  misc_feature 1..80: note = Artificially Synthesized Probe
  source 1..80: mol_type = other DNA
caaaaatacaaaaaattagccagtcatggtggtgccagtctgtggtcccagctactcgggaggctgaggtgggaggatcg

SEQ ID NO: 51474 - DNA, 80 bp, synthetic construct; identical to SEQ ID NO: 24277
  misc_feature 1..80: note = Artificially Synthesized Probe
  source 1..80: mol_type = other DNA

SEQ ID NO: 51475 - DNA, 80 bp, synthetic construct
  misc_feature 1..80: note = Artificially Synthesized Probe
  source 1..80: mol_type = other DNA
gcatttaagctatgagaacccactgtcttgactcagtgggggagttttcaaaaatcattcttgtagaaattgatttctca

SEQ ID NO: 51476 - DNA, 80 bp, synthetic construct
  misc_feature 1..80: note = Artificially Synthesized Probe
  source 1..80: mol_type = other DNA
ggtacaaagaaactacaaaatttcttcttatgtattatgcatcaatacagtgaaaatgcctcacagcttatgggcttttt

SEQ ID NO: 51477 - DNA, 80 bp, synthetic construct
  misc_feature 1..80: note = Artificially Synthesized Probe
  source 1..80: mol_type = other DNA
tccctcatatttgtgggttccatatctgctaattcaaccattgattgaaaatattcagaaaaagagaccacaataaaaaa

SEQ ID NO: 51478 - DNA, 80 bp, synthetic construct
  misc_feature 1..80: note = Artificially Synthesized Probe
  source 1..80: mol_type = other DNA
atgaaatgtgtttggaagggagtcatctaatctctccctgatcactaccattattggtgaatcaaacttcttgaagcatc

SEQ ID NO: 51479 - DNA, 80 bp, synthetic construct; identical to SEQ ID NO: 24278
  misc_feature 1..80: note = Artificially Synthesized Probe
  source 1..80: mol_type = other DNA

SEQ ID NO: 51480 - DNA, 80 bp, synthetic construct
  misc_feature 1..80: note = Artificially Synthesized Probe
  source 1..80: mol_type = other DNA
tgtaatttaattactgcctaagattgcatatacttctttgatttgaatgatggaaaaatttctaggaacttagcctgggt

SEQ ID NO: 51481 - DNA, 80 bp, synthetic construct
  misc_feature 1..80: note = Artificially Synthesized Probe
  source 1..80: mol_type = other DNA
agctccacaatgcactaattgaattactcttttctggagttgcgactgcactaattgaattagaatctctctctctctct

SEQ ID NO: 51482 - DNA, 80 bp, synthetic construct
  misc_feature 1..80: note = Artificially Synthesized Probe
  source 1..80: mol_type = other DNA
aatacagcgtgacctcagtctaaccccatccagtttagttcagaaggtcccaggatgtaattttgtaattctaaattgaa

SEQ ID NO: 51483 - DNA, 80 bp, synthetic construct; identical to SEQ ID NO: 24279
  misc_feature 1..80: note = Artificially Synthesized Probe
  source 1..80: mol_type = other DNA

SEQ ID NO: 51484 - DNA, 80 bp, synthetic construct
  misc_feature 1..80: note = Artificially Synthesized Probe
  source 1..80: mol_type = other DNA
tctcacttgctcttttttttttttttttttttgagacggagtctcgctctgtcacccagggtggtgccatctcggctcac

SEQ ID NO: 51485 - DNA, 80 bp, synthetic construct
  misc_feature 1..80: note = Artificially Synthesized Probe
  source 1..80: mol_type = other DNA
ttcaccatgttagccaggatggtctggatctcctgacctcgtgatccgcctgcctcggcctcccaaagtgctgggattac

SEQ ID NO: 51486 - DNA, 80 bp, synthetic construct
  misc_feature 1..80: note = Artificially Synthesized Probe
  source 1..80: mol_type = other DNA
taaaacatgcaaatgtagtcctgcgcaacattaaaagcaaataaatacactgaggacaactcaacatgaaatatattttg

SEQ ID NO: 51487 - DNA, 80 bp, synthetic construct
  misc_feature 1..80: note = Artificially Synthesized Probe
  source 1..80: mol_type = other DNA
tccatttgatcatattaaagatatagaaacaagtatatagcatagaaaagttttaatttcttctatgtaatcttcattat

SEQ ID NO: 51488 - DNA, 80 bp, synthetic construct
  misc_feature 1..80: note = Artificially Synthesized Probe
  source 1..80: mol_type = other DNA
gagtatctgtggattttggtatccgatgggaggatcctggaaccagttccctgcagctatggaggtttgactataattat

SEQ ID NO: 51489 - DNA, 80 bp, synthetic construct; identical to SEQ ID NO: 24280
  misc_feature 1..80: note = Artificially Synthesized Probe
  source 1..80: mol_type = other DNA

SEQ ID NO: 51490 - DNA, 80 bp, synthetic construct
  misc_feature 1..80: note = Artificially Synthesized Probe
  source 1..80: mol_type = other DNA
ttttttctgatttattgagctagaggtctggcttagtagcagtcctaaggaaatggtatacttatgttcatatcagatat

SEQ ID NO: 51491 - DNA, 80 bp, synthetic construct
  misc_feature 1..80: note = Artificially Synthesized Probe
  source 1..80: mol_type = other DNA
actggttgatcatagattttcaatccttgttgtcttcagaactggtagttcccactggtgatttgatagtttggggcttc

SEQ ID NO: 51492 - DNA, 80 bp, synthetic construct
  misc_feature 1..80: note = Artificially Synthesized Probe
  source 1..80: mol_type = other DNA
gctgtagtgttaaaattcacattggccaggttgttctgtaaattaaacactgacagctaccctcaggggaacagccaatg

SEQ ID NO: 51493 - DNA, 80 bp, synthetic construct; identical to SEQ ID NO: 24281
  misc_feature 1..80: note = Artificially Synthesized Probe
  source 1..80: mol_type = other DNA

SEQ ID NO: 51494 - DNA, 80 bp, synthetic construct
  misc_feature 1..80: note = Artificially Synthesized Probe
  source 1..80: mol_type = other DNA
atggggcaggagggtaactaaattgtggttacaaatttctggtagaaactcgatatgttagggtttagttatcgacattt

SEQ ID NO: 51495 - DNA, 80 bp, synthetic construct
  misc_feature 1..80: note = Artificially Synthesized Probe
  source 1..80: mol_type = other DNA
attgtatatttgtaggagtatcagctctcaaatatgtcccttttcattcctgcatcttactggtcacatgcatacaggta

SEQ ID NO: 51496 - DNA, 80 bp, synthetic construct
  misc_feature 1..80: note = Artificially Synthesized Probe
  source 1..80: mol_type = other DNA
caactgtaaggtatagcgcagggacatagtgattggagacagttcacttcacccgcctgaaactaagaatcaactcttca

SEQ ID NO: 51497 - DNA, 80 bp, synthetic construct
  misc_feature 1..80: note = Artificially Synthesized Probe
  source 1..80: mol_type = other DNA
aataattgataaaccagataagatttaaactgattatagccccagcagaattccccagaggccttggactctcttaattt

SEQ ID NO: 51498 - DNA, 80 bp, synthetic construct; identical to SEQ ID NO: 24282
  misc_feature 1..80: note = Artificially Synthesized Probe
  source 1..80: mol_type = other DNA

SEQ ID NO: 51499 - DNA, 80 bp, synthetic construct; identical to SEQ ID NO: 24193
  misc_feature 1..80: note = Artificially Synthesized Probe
  source 1..80: mol_type = other DNA

SEQ ID NO: 51500 - DNA, 80 bp, synthetic construct; identical to SEQ ID NO: 24184
  misc_feature 1..80: note = Artificially Synthesized Probe
  source 1..80: mol_type = other DNA

SEQ ID NO: 51501 - DNA, 80 bp, synthetic construct
  misc_feature 1..80: note = Artificially Synthesized Probe
  source 1..80: mol_type = other DNA
tctaggtttattaagccatccatgtactagtaagagatcaggatagccagtagcctcaagctacataatttcctgtggaa

SEQ ID NO: 51502 - DNA, 80 bp, synthetic construct
  misc_feature 1..80: note = Artificially Synthesized Probe
  source 1..80: mol_type = other DNA
gcagaccttttcctcccaaagaagcaaattatccagtacattttttgctatttgatatacctggcttctatttggttgta

SEQ ID NO: 51503 - DNA, 80 bp, synthetic construct; identical to SEQ ID NO: 24283
  misc_feature 1..80: note = Artificially Synthesized Probe
  source 1..80: mol_type = other DNA

SEQ ID NO: 51504 - DNA, 80 bp, synthetic construct
  misc_feature 1..80: note = Artificially Synthesized Probe
  source 1..80: mol_type = other DNA
ttttttctttgctttagtcatttgtattccagagagcacaatagggagaaggatacaagattgatttttttatgtgtgtc

SEQ ID NO: 51505 - DNA, 80 bp, synthetic construct
  misc_feature 1..80: note = Artificially Synthesized Probe
  source 1..80: mol_type = other DNA
gaccaaatatagagcagctatttcaggaatcatgtaggtcatttaattatccattatgattgagtggctaatgctctttt

SEQ ID NO: 51506 - DNA, 80 bp, synthetic construct
  misc_feature 1..80: note = Artificially Synthesized Probe
  source 1..80: mol_type = other DNA
acccagaatgtcctttgtacagcagtgataggcaactggttttgaagtcaactattccttcattgtatataggagcaaaa

SEQ ID NO: 51507 - DNA, 80 bp, synthetic construct; identical to SEQ ID NO: 24284
  misc_feature 1..80: note = Artificially Synthesized Probe
  source 1..80: mol_type = other DNA

SEQ ID NO: 51508 - DNA, 80 bp, synthetic construct
  misc_feature 1..80: note = Artificially Synthesized Probe
  source 1..80: mol_type = other DNA
tctggtcaaagacagaataagttggaaacatcttgattgtttatcactttttttctttaatcaaccaagtattattaata

SEQ ID NO: 51509 - DNA, 80 bp, synthetic construct
  misc_feature 1..80: note = Artificially Synthesized Probe
  source 1..80: mol_type = other DNA
gtaggatttgtcagaaatgcacaaaattctgcatagttagcaaagtggtagattagaggtatacagccattctctagcat

SEQ ID NO: 51510 - DNA, 80 bp, synthetic construct
  misc_feature 1..80: note = Artificially Synthesized Probe
  source 1..80: mol_type = other DNA
caacaacaacaaaaactcaacaaggttgtttatccctggagcagtaaaattagccatccttcccaataaatttattaaat

SEQ ID NO: 51511 - DNA, 80 bp, synthetic construct
  misc_feature 1..80: note = Artificially Synthesized Probe
  source 1..80: mol_type = other DNA
agatggagtcttactctgtcacccaggctggagtgcagtagcgcaatctcagctcactgccacctccacctcccgggttc

SEQ ID NO: 51512 - DNA, 80 bp, synthetic construct; identical to SEQ ID NO: 24285
  misc_feature 1..80: note = Artificially Synthesized Probe
  source 1..80: mol_type = other DNA

SEQ ID NO: 51513 - DNA, 80 bp, synthetic construct
  misc_feature 1..80: note = Artificially Synthesized Probe
  source 1..80: mol_type = other DNA
aatgtatggtgtataattttttttttctccctatatattacttttctttaaggcatacccttcaatatctatgctgagac

SEQ ID NO: 51514 - DNA, 80 bp, synthetic construct
  misc_feature 1..80: note = Artificially Synthesized Probe
  source 1..80: mol_type = other DNA
ataatgattaaacaagaccagtccatattagagacatacacctaaacacagatcttaatctagcccagtctagctttcag

SEQ ID NO: 51515 - DNA, 80 bp, synthetic construct
  misc_feature 1..80: note = Artificially Synthesized Probe
  source 1..80: mol_type = other DNA
agcaaggaagatatccaaggggatgaaagtcatttagcaaaaagaaacaaaaaaccaggaaacaaggatgacagaaaaaa

SEQ ID NO: 51516 - DNA, 80 bp, synthetic construct
  misc_feature 1..80: note = Artificially Synthesized Probe
  source 1..80: mol_type = other DNA
tacacaaaactatatgcagaggatctctggatgaaatatttttgtaaatatggcagcaaagaaaatcatggcacaaaaaa

SEQ ID NO: 51517 - DNA, 80 bp, synthetic construct; identical to SEQ ID NO: 24286
  misc_feature 1..80: note = Artificially Synthesized Probe
  source 1..80: mol_type = other DNA

SEQ ID NO: 51518 - DNA, 80 bp, synthetic construct
  misc_feature 1..80: note = Artificially Synthesized Probe
  source 1..80: mol_type = other DNA
ttttgtaattgcattcgtacattaagcaggataaaaatgtaaaaaaaaaaaactacttgaaagggtaaggtaggaagtgt

SEQ ID NO: 51519 - DNA, 80 bp, synthetic construct
  misc_feature 1..80: note = Artificially Synthesized Probe
  source 1..80: mol_type = other DNA
tcatagtcattgctaagttgatgttcaaacctttgattaagaagtcacaaagctgactgtgttcagacagctgtgtaata

SEQ ID NO: 51520 - DNA, 80 bp, synthetic construct; identical to SEQ ID NO: 24287
  misc_feature 1..80: note = Artificially Synthesized Probe
  source 1..80: mol_type = other DNA

SEQ ID NO: 51521 - DNA, 80 bp, synthetic construct
  misc_feature 1..80: note = Artificially Synthesized Probe
  source 1..80: mol_type = other DNA
taacaggcaccaatgctgtttgacttgaaaaacatttgatctcttacattaacagcccatgtcactgtaataggtagtac

SEQ ID NO: 51522 - DNA, 80 bp, synthetic construct
  misc_feature 1..80: note = Artificially Synthesized Probe
  source 1..80: mol_type = other DNA
ttagataataactgatcctatctaaagatgttttctgtctgatccctgatagtgggtgctgcatgacgttgtgtaaattc

SEQ ID NO: 51523 - DNA, 80 bp, synthetic construct
  misc_feature 1..80: note = Artificially Synthesized Probe
  source 1..80: mol_type = other DNA
ttgtagaagaaagcttcatattagatcttgatgaatagatagattttgacagatatctctctgaggtaggcagtcaagcg

SEQ ID NO: 51524 - DNA, 80 bp, synthetic construct
  misc_feature 1..80: note = Artificially Synthesized Probe
  source 1..80: mol_type = other DNA
ttaatgtcaaagatcctgcacaatttgcctaagtatagcagtttgcacagcagtttttgaaaatgggcaagcaagaattt

SEQ ID NO: 51525 - DNA, 80 bp, synthetic construct
  misc_feature 1..80: note = Artificially Synthesized Probe
  source 1..80: mol_type = other DNA
ctttaagagcacttctccttttaatagtggtagaatggcagcaaataattttaatccttcctttcttccttcctctattt

SEQ ID NO: 51526 - DNA, 80 bp, synthetic construct; identical to SEQ ID NO: 24288
  misc_feature 1..80: note = Artificially Synthesized Probe
  source 1..80: mol_type = other DNA

SEQ ID NO: 51527 - DNA, 80 bp, synthetic construct
  misc_feature 1..80: note = Artificially Synthesized Probe
  source 1..80: mol_type = other DNA
cgtatggcagagggtcagtaatcagtgtcatcgtgcctttaaatcgtgttgaaaatttgcttaaagcctgggccaattaa

SEQ ID NO: 51528 - DNA, 80 bp, synthetic construct
  misc_feature 1..80: note = Artificially Synthesized Probe
  source 1..80: mol_type = other DNA
aaatatatacacattggagttgtcacgagttcataaatcaaaggagtttgtcaaaggcattcagattaacgaggcagcag

SEQ ID NO: 51529 - DNA, 80 bp, synthetic construct
  misc_feature 1..80: note = Artificially Synthesized Probe
  source 1..80: mol_type = other DNA
ctactccagaagtagaaatctgaggtgtagaagaccagtgcactatgacaattaatcagtttctgcatactagcataaat

SEQ ID NO: 51530 - DNA, 80 bp, synthetic construct; identical to SEQ ID NO: 24289
  misc_feature 1..80: note = Artificially Synthesized Probe
  source 1..80: mol_type = other DNA

SEQ ID NO: 51531 - DNA, 80 bp, synthetic construct
  misc_feature 1..80: note = Artificially Synthesized Probe
  source 1..80: mol_type = other DNA
gttttttgacttctgtcacagggagtaaggcagtgctaatggaagtcctctttggttgtcccagagaatgttgtccattc

SEQ ID NO: 51532 - DNA, 80 bp, synthetic construct
  misc_feature 1..80: note = Artificially Synthesized Probe
  source 1..80: mol_type = other DNA
gtttaatagagtatgtcaaatgataaacatgctggagaagcaatgtgcatgaaaacatgccagagaatatcttaggagga

SEQ ID NO: 51533 - DNA, 80 bp, synthetic construct
  misc_feature 1..80: note = Artificially Synthesized Probe
  source 1..80: mol_type = other DNA
cacacacagtgtttttttttaatgtcacctttcatacaagagtttgagtgattttgtccatgtagctaaaatatctgtta

SEQ ID NO: 51534 - DNA, 80 bp, synthetic construct; identical to SEQ ID NO: 24290
  misc_feature 1..80: note = Artificially Synthesized Probe
  source 1..80: mol_type = other DNA

SEQ ID NO: 51535 - DNA, 80 bp, synthetic construct; identical to SEQ ID NO: 24194
  misc_feature 1..80: note = Artificially Synthesized Probe
  source 1..80: mol_type = other DNA

SEQ ID NO: 51536 - DNA, 80 bp, synthetic construct
  misc_feature 1..80: note = Artificially Synthesized Probe
  source 1..80: mol_type = other DNA
ataacagatgtctcttcaaacaggttcaggctctgttgcaccatccaaccttgagcaagatgcttactcaaagattattg

SEQ ID NO: 51537 - DNA, 80 bp, synthetic construct
  misc_feature 1..80: note = Artificially Synthesized Probe
  source 1..80: mol_type = other DNA
tattgccccagctatgaacctgctgtgtgctgccatcaaaacatctttacttcttgaattggacagtcaaaaatacaaac

SEQ ID NO: 51538 - DNA, 80 bp, synthetic construct; identical to SEQ ID NO: 24291
  misc_feature 1..80: note = Artificially Synthesized Probe
  source 1..80: mol_type = other DNA

SEQ ID NO: 51539 - DNA, 80 bp, synthetic construct
  misc_feature 1..80: note = Artificially Synthesized Probe
  source 1..80: mol_type = other DNA
tggcatttctcataaaactttatttggaaaaagttatattcaatgacccaatggtatcaaagtggaagaggaaagtgaca

SEQ ID NO: 51540 - DNA, 80 bp, synthetic construct
  misc_feature 1..80: note = Artificially Synthesized Probe
  source 1..80: mol_type = other DNA
agctgctgcaaacttccccatgtgactttcagctgttccctgagtctcccactgactcactctttgcgtgttgtcctgga

SEQ ID NO: 51541 - DNA, 80 bp, synthetic construct
  misc_feature 1..80: note = Artificially Synthesized Probe
  source 1..80: mol_type = other DNA
tccgctttattttctgtcttcagattccacctcagcctaatcaaaccattcacacctcgagtgcctcctgatgccctcgg

SEQ ID NO: 51542 - DNA, 80 bp, synthetic construct; identical to SEQ ID NO: 24413
  misc_feature 1..80: note = Artificially Synthesized Probe
  source 1..80: mol_type = other DNA

SEQ ID NO: 51543 - DNA, 80 bp, synthetic construct
  misc_feature 1..80: note = Artificially Synthesized Probe
  source 1..80: mol_type = other DNA
tcatgtccctgtgttcctgttgaagcaggcagccatgtcaatcatttccttggagacagggaagctgaggcacagtggtt

SEQ ID NO: 51544 - DNA, 80 bp, synthetic construct
  misc_feature 1..80: note = Artificially Synthesized Probe
  source 1..80: mol_type = other DNA
gggcatccccgggctctcagagaggccgttggccatcagctcttgtggggctgggctgtgtctgggggtgtgcatgccat

SEQ ID NO: 51545 - DNA, 80 bp, synthetic construct; identical to SEQ ID NO: 24414
  misc_feature 1..80: note = Artificially Synthesized Probe
  source 1..80: mol_type = other DNA

SEQ ID NO: 51546 - DNA, 80 bp, synthetic construct
  misc_feature 1..80: note = Artificially Synthesized Probe
  source 1..80: mol_type = other DNA
ataccactgggcattctcctctctgcccaccctgaacctcacagacatgttctcagcaggggtgcgtgggtggggaggat

SEQ ID NO: 51547 - DNA, 80 bp, synthetic construct
  misc_feature 1..80: note = Artificially Synthesized Probe
  source 1..80: mol_type = other DNA
gttaatggagggtgagggtttccacccgtgggtctctgaaagggctcccacaggttcagcaagagcgtctgggagaaacc

SEQ ID NO: 51548 - DNA, 80 bp, synthetic construct; identical to SEQ ID NO: 24404
  misc_feature 1..80: note = Artificially Synthesized Probe
  source 1..80: mol_type = other DNA

SEQ ID NO: 51549 - DNA, 80 bp, synthetic construct
  misc_feature 1..80: note = Artificially Synthesized Probe
  source 1..80: mol_type = other DNA
gatggggcgtgtgttgtgtgtgtccacgcgtgtgcacagtggaactgatgaggtgtgtgaagagagaagggtgttcctgt

SEQ ID NO: 51550 - DNA, 80 bp, synthetic construct; identical to SEQ ID NO: 24415
  misc_feature 1..80: note = Artificially Synthesized Probe
  source 1..80: mol_type = other DNA

SEQ ID NO: 51551 - DNA, 80 bp, synthetic construct
  misc_feature 1..80: note = Artificially Synthesized Probe
  source 1..80: mol_type = other DNA
tgtgccaccatgcttggctaatttttctctttttagcagaggctgggtttcgccatgttggccaggctggtctcgaactc

SEQ ID NO: 51552 - DNA, 80 bp, synthetic construct
  misc_feature 1..80: note = Artificially Synthesized Probe
  source 1..80: mol_type = other DNA
tgccccttgttcttgtttatttcttcctagggggtctcccattgtttttattccctgatttcccatctgcttagtgaaaa

SEQ ID NO: 51553 - DNA, 80 bp, synthetic construct
  misc_feature 1..80: note = Artificially Synthesized Probe
  source 1..80: mol_type = other DNA
ggtttccactcacctggcaagcaccgaggaatcttctctcccttctgttcattcttccaaatgccctgtgctgtgcaggt

SEQ ID NO: 51554 - DNA, 80 bp, synthetic construct; identical to SEQ ID NO: 24405
  misc_feature 1..80: note = Artificially Synthesized Probe
  source 1..80: mol_type = other DNA

SEQ ID NO: 51555 - DNA, 80 bp, synthetic construct
  misc_feature 1..80: note = Artificially Synthesized Probe
  source 1..80: mol_type = other DNA
gtagctgggactacaggtgcccgccaccatgcccggctaattttttgtatttttagtagagacagggtttcaccgtgtta

SEQ ID NO: 51556 - DNA, 80 bp, synthetic construct
  misc_feature 1..80: note = Artificially Synthesized Probe
  source 1..80: mol_type = other DNA
ctgtgatccctgcttgtgaaagtagacataaaaaccagaaggaatatatcaaaatcttatcagtgattgcatcttggtcg

SEQ ID NO: 51557 - DNA, 80 bp, synthetic construct; identical to SEQ ID NO: 24403
  misc_feature 1..80: note = Artificially Synthesized Probe
  source 1..80: mol_type = other DNA

SEQ ID NO: 51558 - DNA, 80 bp, synthetic construct
  misc_feature 1..80: note = Artificially Synthesized Probe
  source 1..80: mol_type = other DNA
actgagtttaaataatttgcacagggtcacataacttctaagtgccagaaccaaggtgcaagaggttttctgactccaaa

SEQ ID NO: 51559 - DNA, 80 bp, synthetic construct
  misc_feature 1..80: note = Artificially Synthesized Probe
  source 1..80: mol_type = other DNA
ctaagtgcaaaaatcacaactaggttgagggggagaatggagaggggagtttcactgagttagctgtagtggtcatgatg

SEQ ID NO: 51560 - DNA, 80 bp, synthetic construct; identical to SEQ ID NO: 24406
  misc_feature 1..80: note = Artificially Synthesized Probe
  source 1..80: mol_type = other DNA

SEQ ID NO: 51561 - DNA, 80 bp, synthetic construct
  misc_feature 1..80: note = Artificially Synthesized Probe
  source 1..80: mol_type = other DNA
ggtgatagtggtgatggtgttactgttggtggtgatgatgacgatgatagtggtcatagtggggatgatggtgttggtgg

SEQ ID NO: 51562 - DNA, 80 bp, synthetic construct
  misc_feature 1..80: note = Artificially Synthesized Probe
  source 1..80: mol_type = other DNA
caatgacccaatggtatcaaagtggaagaggaaagtgacaactagagattgataactatatcctctgcaatcctcagaag

SEQ ID NO: 51563 - DNA, 80 bp, synthetic construct
  misc_feature 1..80: note = Artificially Synthesized Probe
  source 1..80: mol_type = other DNA
gatggtgttggtaatggtgatagtggtgatggtggtgatggaggttttagtgtggtggtgacgatggtgttggtggtggt

SEQ ID NO: 51564 - DNA, 80 bp, synthetic construct
  misc_feature 1..80: note = Artificially Synthesized Probe
  source 1..80: mol_type = other DNA
tcatggtagtggtgacagtggtgttggtaacagtatagtgatgatggaagtggtgttagtgtggtggtgatgatgatgtt

SEQ ID NO: 51565 - DNA, 80 bp, synthetic construct; identical to SEQ ID NO: 24407
  misc_feature 1..80: note = Artificially Synthesized Probe
  source 1..80: mol_type = other DNA

SEQ ID NO: 51566 - DNA, 80 bp, synthetic construct
  misc_feature 1..80: note = Artificially Synthesized Probe
  source 1..80: mol_type = other DNA
ctgctttagagatgggtgtccagcacagaacatgttttgagagaacacatccatcctattctttccccggagccagttct

SEQ ID NO: 51567 - DNA, 80 bp, synthetic construct
  misc_feature 1..80: note = Artificially Synthesized Probe
  source 1..80: mol_type = other DNA
tggtgatgatggtgttggtggtggtgatggtggcatcggtgttagtaatggtggtggtgatagtggtgttggtaatggtg

SEQ ID NO: 51568 - DNA, 80 bp, synthetic construct
  misc_feature 1..80: note = Artificially Synthesized Probe
  source 1..80: mol_type = other DNA
tgtggtggaggcaatggtggtagtggggatgatgtggtgacagtgagctgtttatgcgatttgaatcttttctttgcatc

SEQ ID NO: 51569 - DNA, 80 bp, synthetic construct
  misc_feature 1..80: note = Artificially Synthesized Probe
  source 1..80: mol_type = other DNA
gggaggaaatttccattcgcattggtccctaccttgctcagactccctgctgccagctctggtctgcatcttgtaatatg

SEQ ID NO: 51570 - DNA, 80 bp, synthetic construct; identical to SEQ ID NO: 24408
  misc_feature 1..80: note = Artificially Synthesized Probe
  source 1..80: mol_type = other DNA

SEQ ID NO: 51571 - DNA, 80 bp, synthetic construct
  misc_feature 1..80: note = Artificially Synthesized Probe
  source 1..80: mol_type = other DNA
ttagtctggacccctctttctttcttggcccaggtcctcaaggcaggaggtgggaggtccccagggtcatatccctgaat

SEQ ID NO: 51572 - DNA, 80 bp, synthetic construct
  misc_feature 1..80: note = Artificially Synthesized Probe
  source 1..80: mol_type = other DNA
cctttccacacaggagtgggaggcaataccaagacatctcttggctcccccatggatgtggctcccccatggatgtggct

SEQ ID NO: 51573 - DNA, 80 bp, synthetic construct
  misc_feature 1..80: note = Artificially Synthesized Probe
  source 1..80: mol_type = other DNA
atcccacaatttgtaatttgaaaaaatcacaagccacgtttgagtgttttctgtatcaaaacaaaagcctgtgctccagg

SEQ ID NO: 51574 - DNA, 80 bp, synthetic construct; identical to SEQ ID NO: 24409
  misc_feature 1..80: note = Artificially Synthesized Probe
  source 1..80: mol_type = other DNA

SEQ ID NO: 51575 - DNA, 80 bp, synthetic construct
  misc_feature 1..80: note = Artificially Synthesized Probe
  source 1..80: mol_type = other DNA
acaaaaattagctgggcatggtggcgcacgcctgtaattccagcaactcgggtggctgaggcacttgaatagcttgaatc

SEQ ID NO: 51576 - DNA, 80 bp, synthetic construct
  misc_feature 1..80: note = Artificially Synthesized Probe
  source 1..80: mol_type = other DNA
gacccagggtgacactattttccagctccagcagggcgatgtccccctcaaaattgtaggactcatcctgacggtagtcc

SEQ ID NO: 51577 - DNA, 80 bp, synthetic construct
  misc_feature 1..80: note = Artificially Synthesized Probe
  source 1..80: mol_type = other DNA
gttgtaagagaatgtgtatgagaactagaacgtctgagtaaaatgtaggtaatgtgagaaaccgtgtgacttgctttaaa

SEQ ID NO: 51578 - DNA, 80 bp, synthetic construct
  misc_feature 1..80: note = Artificially Synthesized Probe
  source 1..80: mol_type = other DNA
gagtaaagaacaatgcatcaggtgaactcgacttgatgcaacattcaaatgtgagctccacaaaggctgtgtgactatgt

SEQ ID NO: 51579 - DNA, 80 bp, synthetic construct
  misc_feature 1..80: note = Artificially Synthesized Probe
  source 1..80: mol_type = other DNA
aacgatgggatgtccagtcttgggtctctgtccagagacagagatttttagtttaccagcttttgtgagattgatcaatg

SEQ ID NO: 51580 - DNA, 80 bp, synthetic construct
  misc_feature 1..80: note = Artificially Synthesized Probe
  source 1..80: mol_type = other DNA
tgtccagtcttgggtctctgtccagagacagagatttttagtttaccagcttttgtgagattgatcaatggataaaacca

SEQ ID NO: 51581 - DNA, 80 bp, synthetic construct
  misc_feature 1..80: note = Artificially Synthesized Probe
  source 1..80: mol_type = other DNA
tgggtctctgtccagagacagagatttttagtttaccagcttttgtgagattgatcaatggataaaaccatattccctcc

SEQ ID NO: 51582 - DNA, 80 bp, synthetic construct; identical to SEQ ID NO: 24410
  misc_feature 1..80: note = Artificially Synthesized Probe
  source 1..80: mol_type = other DNA

SEQ ID NO: 51583 - DNA, 80 bp, synthetic construct
  misc_feature 1..80: note = Artificially Synthesized Probe
  source 1..80: mol_type = other DNA
ttcacaggggccttgaatgaatgggctcaagcaatcttccaggattttaaactctctgttttaagtgtgcagcaagtttg

SEQ ID NO: 51584 - DNA, 80 bp, synthetic construct
  misc_feature 1..80: note = Artificially Synthesized Probe
  source 1..80: mol_type = other DNA
ctggtagccttgcttgcaggtagcaatgaagtagtcacggaactggtactgaggctgcaggttctggatgatggtgaact

SEQ ID NO: 51585 - DNA, 80 bp, synthetic construct
  misc_feature 1..80: note = Artificially Synthesized Probe
  source 1..80: mol_type = other DNA
gtagcgcagcttccagccccggctgtcccccgactcatctgtgaagaacagcagatccacagcattgctgctggtgtcga

SEQ ID NO: 51586 - DNA, 80 bp, synthetic construct; identical to SEQ ID NO: 24411
  misc_feature 1..80: note = Artificially Synthesized Probe
  source 1..80: mol_type = other DNA

SEQ ID NO: 51587 - DNA, 80 bp, synthetic construct
  misc_feature 1..80: note = Artificially Synthesized Probe
  source 1..80: mol_type = other DNA
taggacggctgtacctgtagctggtcataggggcagtgtacttgctggtggtcatcaatatcaaaaggctccaggaactt

SEQ ID NO: 51588 - DNA, 80 bp, synthetic construct
  misc_feature 1..80: note = Artificially Synthesized Probe
  source 1..80: mol_type = other DNA
gctgtgagagcagagccacagggcattacgggggactccagctggcccagcaagccctggctcaaccccttcccctctgc

SEQ ID NO: 51589 - DNA, 80 bp, synthetic construct; identical to SEQ ID NO: 24412
  misc_feature 1..80: note = Artificially Synthesized Probe
  source 1..80: mol_type = other DNA

SEQ ID NO: 51590 - DNA, 80 bp, synthetic construct
  misc_feature 1..80: note = Artificially Synthesized Probe
  source 1..80: mol_type = other DNA
tcgcccagcagggccccgcccccgcgcccgtggatgttggtgaacacctgccaggggaagttgcccatcttggctttttg

SEQ ID NO: 51591 - DNA, 80 bp, synthetic construct
  misc_feature 1..80: note = Artificially Synthesized Probe
  source 1..80: mol_type = other DNA
caaggaaagccaggctttcggcttctttgcattcaagattccctttcttggccccccattcaatatggctgaggtcagag

SEQ ID NO: 51592 - DNA, 80 bp, synthetic construct
  misc_feature 1..80: note = Artificially Synthesized Probe
  source 1..80: mol_type = other DNA
ggacataaattccttctttcccggggggttgcccagtggagaacccagttgcccacagaacctccccaggcttttcttat

SEQ ID NO: 51593 - DNA, 80 bp, synthetic construct
  misc_feature 1..80: note = Artificially Synthesized Probe
  source 1..80: mol_type = other DNA
tagcaggcgaacgccaggagaaaatgcggtgggaacaggtgaggtttcaagtaggatggagctgagctgcaggtgaggcg

SEQ ID NO: 51594 - DNA, 80 bp, synthetic construct
  misc_feature 1..80: note = Artificially Synthesized Probe
  source 1..80: mol_type = other DNA
taagtaaccccaagagtatagattatgggagtaaggcgtttaggaagcgatgagtttgagtgtttctaacctttgtgttt

SEQ ID NO: 51595 - DNA, 80 bp, synthetic construct
  misc_feature 1..80: note = Artificially Synthesized Probe
  source 1..80: mol_type = other DNA
cgggttcaagtgattctcctgcctcagccttcccagtagctgggactacaggcgtccgccaccgcgcccggctaattttt

SEQ ID NO: 51596 - DNA, 80 bp, synthetic construct
  misc_feature 1..80: note = Artificially Synthesized Probe
  source 1..80: mol_type = other DNA
ggcgcaatctcggctcactgcaacctccgcctcccgggttcaagcgattcttgtgccttagcctcctgcgtagctgggat

SEQ ID NO: 51597 - DNA, 80 bp, synthetic construct
  misc_feature 1..80: note = Artificially Synthesized Probe
  source 1..80: mol_type = other DNA
taatatttagtttttaataataattgtatttaatgaccagcttgaaaaattcctggaaatttaacactgggctccagcaa

SEQ ID NO: 51598 - DNA, 80 bp, synthetic construct; identical to SEQ ID NO: 24427
  misc_feature 1..80: note = Artificially Synthesized Probe
  source 1..80: mol_type = other DNA

SEQ ID NO: 51599 - DNA, 80 bp, synthetic construct
  misc_feature 1..80: note = Artificially Synthesized Probe
  source 1..80: mol_type = other DNA
gagccaatcagagtcctttcctgggaatatggcggccctaaccttgatctgatattttctctaaggaaggcagccatatt

SEQ ID NO: 51600 - DNA, 80 bp, synthetic construct
  misc_feature 1..80: note = Artificially Synthesized Probe
  source 1..80: mol_type = other DNA
gtgttatatctgggacaactcagaggcctaaaaatacagagatcgttatttattatccccaatttacagatgcacatcct

SEQ ID NO: 51601 - DNA, 80 bp, synthetic construct
  misc_feature 1..80: note = Artificially Synthesized Probe
  source 1..80: mol_type = other DNA
acaactacaacctcacagccacccacgcaatgatgcatacaaccacatctaccttttctcacatgagcatacctaggcca

SEQ ID NO: 51602 - DNA, 80 bp, synthetic construct
  misc_feature 1..80: note = Artificially Synthesized Probe
  source 1..80: mol_type = other DNA
gccttggtccctcttgggtgttagaggcaacagccctgtgtttgtttttctcttcactggcccctcccctccatctcttt

SEQ ID NO: 51603 - DNA, 80 bp, synthetic construct
  misc_feature 1..80: note = Artificially Synthesized Probe
  source 1..80: mol_type = other DNA
tgaggtcaggagttcgaaaccagcctggccaacatggtgaaaccccatctctactaaaaatacaacaattaggctgggtg

SEQ ID NO: 51604 - DNA, 80 bp, synthetic construct; identical to SEQ ID NO: 24428
  misc_feature 1..80: note = Artificially Synthesized Probe
  source 1..80: mol_type = other DNA

SEQ ID NO: 51605 - DNA, 80 bp, synthetic construct
  misc_feature 1..80: note = Artificially Synthesized Probe
  source 1..80: mol_type = other DNA
cttcagaatcaaaaccagaggaaaaagagacagtgatgagccaacagtgttcaccgtttcctgtttggagtcacggatcc

SEQ ID NO: 51606 - DNA, 80 bp, synthetic construct
  misc_feature 1..80: note = Artificially Synthesized Probe
  source 1..80: mol_type = other DNA
aagcacttttggaaatgggctgaaaaccctctgaaaattgtaaggcagacagaaagaatccccacctttgatctctttgt

SEQ ID NO: 51607 - DNA, 80 bp, synthetic construct; identical to SEQ ID NO: 24429
  misc_feature 1..80: note = Artificially Synthesized Probe
  source 1..80: mol_type = other DNA

SEQ ID NO: 51608 - DNA, 80 bp, synthetic construct
  misc_feature 1..80: note = Artificially Synthesized Probe
  source 1..80: mol_type = other DNA
gagatgagaacaaaggccgtgagggccatgtctttctcgttgttgttccgtaatccaccctgagatagagagcagaaagc

SEQ ID NO: 51609 - DNA, 80 bp, synthetic construct
  misc_feature 1..80: note = Artificially Synthesized Probe
  source 1..80: mol_type = other DNA
tgcaaatgtcaatgtacaatgtgcaatgtacaatgggtacaacggtctgatccattgtaaaaccagacacaggctctagc

SEQ ID NO: 51610 - DNA, 80 bp, synthetic construct
  misc_feature 1..80: note = Artificially Synthesized Probe
  source 1..80: mol_type = other DNA
attcaagcaattctcctgcctcagcctccgaagtagctgggattacaagcatgcaccaccacaccaagctaatttttttg

SEQ ID NO: 51611 - DNA, 80 bp, synthetic construct
  misc_feature 1..80: note = Artificially Synthesized Probe
  source 1..80: mol_type = other DNA
aagggaaagaggacatcgcagcgataatgaactgtgggagtgtgacccagttggggaggtcagaaaaagtgtccctgagg

SEQ ID NO: 51612 - DNA, 80 bp, synthetic construct; identical to SEQ ID NO: 24430
  misc_feature 1..80: note = Artificially Synthesized Probe
  source 1..80: mol_type = other DNA

SEQ ID NO: 51613 - DNA, 80 bp, synthetic construct; identical to SEQ ID NO: 24417
  misc_feature 1..80: note = Artificially Synthesized Probe
  source 1..80: mol_type = other DNA

SEQ ID NO: 51614 - DNA, 80 bp, synthetic construct
  misc_feature 1..80: note = Artificially Synthesized Probe
  source 1..80: mol_type = other DNA
cccagctactgaggaggttgaggtaggagaattgcttgaacctgggaggtggaggttgcagtgagccaagatcgggccat

SEQ ID NO: 51615 - DNA, 80 bp, synthetic construct
  misc_feature 1..80: note = Artificially Synthesized Probe
  source 1..80: mol_type = other DNA
atgttttgtttttgagacagggtctcactctgttatcagcctggagtgcagtgtcatgatcatggctcactgcagcctcg

SEQ ID NO: 51616 - DNA, 80 bp, synthetic construct; identical to SEQ ID NO: 24431
  misc_feature 1..80: note = Artificially Synthesized Probe
  source 1..80: mol_type = other DNA

SEQ ID NO: 51617 - DNA, 80 bp, synthetic construct
  misc_feature 1..80: note = Artificially Synthesized Probe
  source 1..80: mol_type = other DNA
accaggggctggccataaggatggagagaaggaggtgattcttataacatcatgggagaatgcaggtgttgatggattga

SEQ ID NO: 51618 - DNA, 80 bp, synthetic construct
  misc_feature 1..80: note = Artificially Synthesized Probe
  source 1..80: mol_type = other DNA
tttaatgaaattcttaataatttctgagcgaggggccgtgtctcttcattttgcgctgggcttcgcaggtctctggtttt

SEQ ID NO: 51619 - DNA, 80 bp, synthetic construct
  misc_feature 1..80: note = Artificially Synthesized Probe
  source 1..80: mol_type = other DNA
atcccagcctcttacaatcatttcttggtgtatcacgggcgcatcctcctggaagaccccgtcgggcttctgcttctcca

SEQ ID NO: 51620 - DNA, 80 bp, synthetic construct
  misc_feature 1..80: note = Artificially Synthesized Probe
  source 1..80: mol_type = other DNA
aatgagcgtgggggagggaccagggcctggcccagtttgcctggtttgccttcccaggccccaggacccagctgttgtat

SEQ ID NO: 51621 - DNA, 80 bp, synthetic construct; identical to SEQ ID NO: 24432
  misc_feature 1..80: note = Artificially Synthesized Probe
  source 1..80: mol_type = other DNA

SEQ ID NO: 51622 - DNA, 80 bp, synthetic construct
  misc_feature 1..80: note = Artificially Synthesized Probe
  source 1..80: mol_type = other DNA
gaaggactcaaagagggtgggggatcagaacgaggaggtggaaaagttctcaagaggacaagggattcagagaggagaag

SEQ ID NO: 51623 - DNA, 80 bp, synthetic construct
  misc_feature 1..80: note = Artificially Synthesized Probe
  source 1..80: mol_type = other DNA
gggacccaggggatgggcgtggccttgaaaagaggcagggtctcgagattctggcctgggaggagtcagggcctcagagg

SEQ ID NO: 51624 - DNA, 80 bp, synthetic construct
  misc_feature 1..80: note = Artificially Synthesized Probe
  source 1..80: mol_type = other DNA
gagaggcggggtctcatgaagagcctggcctgggaggagtcagggcctcagagggcgtggccttgagaagaggtgggggg

SEQ ID NO: 51625 - DNA, 80 bp, synthetic construct
  misc_feature 1..80: note = Artificially Synthesized Probe
  source 1..80: mol_type = other DNA
tgacctgggtaagtgtggcttgctcagacccacctgttcccggctccagggaactcaccctcagcacagcggcacagttc

SEQ ID NO: 51626 - DNA, 80 bp, synthetic construct; identical to SEQ ID NO: 24433
  misc_feature 1..80: note = Artificially Synthesized Probe
  source 1..80: mol_type = other DNA

SEQ ID NO: 51627 - DNA, 80 bp, synthetic construct
  misc_feature 1..80: note = Artificially Synthesized Probe
  source 1..80: mol_type = other DNA
cgttccgcgtcgacggcatcctctgtcatctgggccactggggtccctgcagcaggtgggaagaggacgttgctcaagcc

SEQ ID NO: 51628 - DNA, 80 bp, synthetic construct
  misc_feature 1..80: note = Artificially Synthesized Probe
  source 1..80: mol_type = other DNA
gggaggtgcttcacaggggcaccctggtccttgggtctcatttcaccagcagtaaaataattccagtaacaatattcagg

SEQ ID NO: 51629 - DNA, 80 bp, synthetic construct
  misc_feature 1..80: note = Artificially Synthesized Probe
  source 1..80: mol_type = other DNA
aagaccagcctgaccaatatggtgaaacaccgtctctactaaaaatacaaaaattagtgggcatggtggcgggcgcctgt

SEQ ID NO: 51630 - DNA, 80 bp, synthetic construct; identical to SEQ ID NO: 24434
  misc_feature 1..80: note = Artificially Synthesized Probe
  source 1..80: mol_type = other DNA

SEQ ID NO: 51631 - DNA, 80 bp, synthetic construct
  misc_feature 1..80: note = Artificially Synthesized Probe
  source 1..80: mol_type = other DNA
ggcttactgcaacctacgcctcccacgttcaatcgattatcctgcttcagcctcccgagtggctgggattacaggcatgt

SEQ ID NO: 51632 - DNA, 80 bp, synthetic construct
  misc_feature 1..80: note = Artificially Synthesized Probe
  source 1..80: mol_type = other DNA
gattacaggctattgagtctcatttaagctggtttcccatctaagaagcacagaaggtctagaaaaattaaaataaactg

SEQ ID NO: 51633 - DNA, 80 bp, synthetic construct
  misc_feature 1..80: note = Artificially Synthesized Probe
  source 1..80: mol_type = other DNA
cacgaggtcaggagatcgagaccatcctggctaacacggtgaaaccctgtctctactaaaaatacaaaaaaattagccgg

SEQ ID NO: 51634 - DNA, 80 bp, synthetic construct; identical to SEQ ID NO: 24435
  misc_feature 1..80: note = Artificially Synthesized Probe
  source 1..80: mol_type = other DNA

SEQ ID NO: 51635 - DNA, 80 bp, synthetic construct
  misc_feature 1..80: note = Artificially Synthesized Probe
  source 1..80: mol_type = other DNA
cagggtgagtgagagataccgatggctctagctccctcccgccctatcctacctcactaaacccaggtcatttacccccc

SEQ ID NO: 51636 - DNA, 80 bp, synthetic construct
  misc_feature 1..80: note = Artificially Synthesized Probe
  source 1..80: mol_type = other DNA
gacctggagatgctaggtcttcaacccctcagatccctcagaccccaagaccccctctactttctgatctttgggattct

SEQ ID NO: 51637 - DNA, 80 bp, synthetic construct
  misc_feature 1..80: note = Artificially Synthesized Probe
  source 1..80: mol_type = other DNA
acagacacacagatggtcagcagggcactgtccttaggatcaccctagcattgccgggcgcggtggctcgtgcctgtgat

SEQ ID NO: 51638 - DNA, 80 bp, synthetic construct
  misc_feature 1..80: note = Artificially Synthesized Probe
  source 1..80: mol_type = other DNA
ggaggatggcgtgaacccgggaggcggatattgcagtgagctgagatcgcgccactgcactccagcctggggaacagagt

SEQ ID NO: 51639 - DNA, 80 bp, synthetic construct; identical to SEQ ID NO: 24436
  misc_feature 1..80: note = Artificially Synthesized Probe
  source 1..80: mol_type = other DNA

SEQ ID NO: 51640 - DNA, 80 bp, synthetic construct
  misc_feature 1..80: note = Artificially Synthesized Probe
  source 1..80: mol_type = other DNA
tttagcggcacgatgacatatggaacggacaacgaggacttgggggggatggttacggtctgctggtgacgcctcttggt

SEQ ID NO: 51641 - DNA, 80 bp, synthetic construct
  misc_feature 1..80: note = Artificially Synthesized Probe
  source 1..80: mol_type = other DNA
gccggtaattgtagagaacggctcggatttccacctgctcgtttcgaacaacagagtagggtagccgcaggtcgatgaag

SEQ ID NO: 51642 - DNA, 80 bp, synthetic construct; identical to SEQ ID NO: 24437
  misc_feature 1..80: note = Artificially Synthesized Probe
  source 1..80: mol_type = other DNA

SEQ ID NO: 51643 - DNA, 80 bp, synthetic construct
  misc_feature 1..80: note = Artificially Synthesized Probe
  source 1..80: mol_type = other DNA
tgggttcaagcaattctcctgcctcagcctctcgagtagctgggactgcaggcacgcaccaccatgtccagctaattttt

SEQ ID NO: 51644 - DNA, 80 bp, synthetic construct
  misc_feature 1..80: note = Artificially Synthesized Probe
  source 1..80: mol_type = other DNA
tggccggagttaccactatttaatgatttacattctgtttgtagtttgactcagagatctacgtgtagggaggaagagaa

SEQ ID NO: 51645 - DNA, 80 bp, synthetic construct
  misc_feature 1..80: note = Artificially Synthesized Probe
  source 1..80: mol_type = other DNA
ttattttcagaaccccctgcaactcacatattcctaagaccctgagacccctgaacccatcagacccccaagtctcagat

SEQ ID NO: 51646 - DNA, 80 bp, synthetic construct
  misc_feature 1..80: note = Artificially Synthesized Probe
  source 1..80: mol_type = other DNA
aacctgatgatctagctaggtgcggtggctcatgcctgtaatcacagcactttgggaggctgaggcaggaggattgcttg

SEQ ID NO: 51647 - DNA, 80 bp, synthetic construct
  misc_feature 1..80: note = Artificially Synthesized Probe
  source 1..80: mol_type = other DNA
ttattttttatttatttattttttgagatggggtctcgctctgtcacccaggctggagtgcagtggcgtgatcttggctc

SEQ ID NO: 51648 - DNA, 80 bp, synthetic construct; identical to SEQ ID NO: 24438
  misc_feature 1..80: note = Artificially Synthesized Probe
  source 1..80: mol_type = other DNA

SEQ ID NO: 51649 - DNA, 80 bp, synthetic construct
  misc_feature 1..80: note = Artificially Synthesized Probe
  source 1..80: mol_type = other DNA
tttgccatgttgcccaggctggtctcaaactccgacctcaaatgatttgccggcctcagcctctgaaagtaatgggatta

SEQ ID NO: 51650 - DNA, 80 bp, synthetic construct
  misc_feature 1..80: note = Artificially Synthesized Probe
  source 1..80: mol_type = other DNA
aggcagattgcttgaggccaggagtttgagaccagcctggccaacatggtgacaccctgtctctactaaaaaaagaaaac

SEQ ID NO: 51651 - DNA, 80 bp, synthetic construct; identical to SEQ ID NO: 24439
  misc_feature 1..80: note = Artificially Synthesized Probe
  source 1..80: mol_type = other DNA

SEQ ID NO: 51652 - DNA, 80 bp, synthetic construct
  misc_feature 1..80: note = Artificially Synthesized Probe
  source 1..80: mol_type = other DNA
atatgttaacatgtcaacaataacaaatgacatattagtagtaaattataattatacattacaacaaaattaaattataa

SEQ ID NO: 51653 - DNA, 80 bp, synthetic construct
  misc_feature 1..80: note = Artificially Synthesized Probe
  source 1..80: mol_type = other DNA
atatgtaatatacaatatataatatattatatatgtaatatgcaacatataacatattatatatgtgatatgcaatatat

SEQ ID NO: 51654 - DNA, 80 bp, synthetic construct
  misc_feature 1..80: note = Artificially Synthesized Probe
  source 1..80: mol_type = other DNA
tgtaatatataatatatgtaatatgatatattatatatgtaatatataatatatgtaatatgatatattatatatgtaat

SEQ ID NO: 51655 - DNA, 80 bp, synthetic construct
  misc_feature 1..80: note = Artificially Synthesized Probe
  source 1..80: mol_type = other DNA
tgtggtatgttatatatgtaatatgtggtatataatatattgcatatgtaatatgtgatatgtagatatgaaatatatta

SEQ ID NO: 51656 - DNA, 80 bp, synthetic construct; identical to SEQ ID NO: 24418
  misc_feature 1..80: note = Artificially Synthesized Probe
  source 1..80: mol_type = other DNA

SEQ ID NO: 51657 - DNA, 80 bp, synthetic construct; identical to SEQ ID NO: 24440
  misc_feature 1..80: note = Artificially Synthesized Probe
  source 1..80: mol_type = other DNA

SEQ ID NO: 51658 - DNA, 80 bp, synthetic construct
  misc_feature 1..80: note = Artificially Synthesized Probe
  source 1..80: mol_type = other DNA
taactttgctagggattttccccgatgatgagcatgtgcactgctccgaaaacaccctagagttgtgttttgctcattat

SEQ ID NO: 51659 - DNA, 80 bp, synthetic construct
  misc_feature 1..80: note = Artificially Synthesized Probe
  source 1..80: mol_type = other DNA
aagagtctcataaaaagagtctaccagcagtatctgctgctggctcgttctgttgagcagccatgtctgtgtcgtctttc

SEQ ID NO: 51660 - DNA, 80 bp, synthetic construct
  misc_feature 1..80: note = Artificially Synthesized Probe
  source 1..80: mol_type = other DNA
cgccaccccctgcctggctaattgttttgtactttcagtagagacggggtttcaccacgttgaccaggctggtcttgaac

SEQ ID NO: 51661 - DNA, 80 bp, synthetic construct
  misc_feature 1..80: note = Artificially Synthesized Probe
  source 1..80: mol_type = other DNA
ttctcttcgtcttggcattcgtcctcctcgggccagtgctccacccaagtgtccttcccgatgatgtagctgaggctgga

SEQ ID NO: 51662 - DNA, 80 bp, synthetic construct; identical to SEQ ID NO: 24441
  misc_feature 1..80: note = Artificially Synthesized Probe
  source 1..80: mol_type = other DNA

SEQ ID NO: 51663 - DNA, 80 bp, synthetic construct
  misc_feature 1..80: note = Artificially Synthesized Probe
  source 1..80: mol_type = other DNA
agccagaatctcccacgtggtgatggagtctttcaaaaatatattcatgagcttcgtagagattctggatggagaagagg

SEQ ID NO: 51664 - DNA, 80 bp, synthetic construct
  misc_feature 1..80: note = Artificially Synthesized Probe
  source 1..80: mol_type = other DNA
atttttctaggttgggctgtggggttgcactgtgattccagagaagaccagagatagcaggtgcatgcaaattaaacggt

SEQ ID NO: 51665 - DNA, 80 bp, synthetic construct
  misc_feature 1..80: note = Artificially Synthesized Probe
  source 1..80: mol_type = other DNA
tccaggctggataagctctacattaaagtattggtgaactttgaaagctagacagtcatcctcagagtgtgagacctgag

SEQ ID NO: 51666 - DNA, 80 bp, synthetic construct
  misc_feature 1..80: note = Artificially Synthesized Probe
  source 1..80: mol_type = other DNA
tcttctgcaatgatgtcctcatccaggttacctgcagggggtttagatctgcatttagaacagagcaggccagttgccat

SEQ ID NO: 51667 - DNA, 80 bp, synthetic construct
  misc_feature 1..80: note = Artificially Synthesized Probe
  source 1..80: mol_type = other DNA
taaggctgggcacggtggctcacccctgtaatcccagcactttgggaggctgaggtgggtggatcgcttgaggtcaggac

SEQ ID NO: 51668 - DNA, 80 bp, synthetic construct; identical to SEQ ID NO: 24442
  misc_feature 1..80: note = Artificially Synthesized Probe
  source 1..80: mol_type = other DNA

SEQ ID NO: 51669 - DNA, 80 bp, synthetic construct
  misc_feature 1..80: note = Artificially Synthesized Probe
  source 1..80: mol_type = other DNA
tggaggacttcaggatgaattttcacgagccccagacacatctgccttgggaacttcttctccataaaaagaactaaaaa

SEQ ID NO: 51670 - DNA, 80 bp, synthetic construct
  misc_feature 1..80: note = Artificially Synthesized Probe
  source 1..80: mol_type = other DNA
cttgaggtcaggagttcgagacagcctggccaatgtggcaaaaccgcgcctctactaaaaatatgaaaattagccaggct

SEQ ID NO: 51671 - DNA, 80 bp, synthetic construct; identical to SEQ ID NO: 24443
  misc_feature 1..80: note = Artificially Synthesized Probe
  source 1..80: mol_type = other DNA

SEQ ID NO: 51672 - DNA, 80 bp, synthetic construct
  misc_feature 1..80: note = Artificially Synthesized Probe
  source 1..80: mol_type = other DNA
atccaggaggcggaggttacagtgagccgagactgcgcaactgcactccagcctggcgacagagcgagactccctctcaa

SEQ ID NO: 51673 - DNA, 80 bp, synthetic construct
  misc_feature 1..80: note = Artificially Synthesized Probe
  source 1..80: mol_type = other DNA
ctctacaaataataatttaaaaattagctgggcatgctggcatgcacctgtagtcctagctactcagaaggctgaggatg

SEQ ID NO: 51674 - DNA, 80 bp, synthetic construct
  misc_feature 1..80: note = Artificially Synthesized Probe
  source 1..80: mol_type = other DNA
aaaacagcttgacactaccagcaagtaaatgaaattggactggactaggctttgactcaaactgcactttcctcaaacat

SEQ ID NO: 51675 - DNA, 80 bp, synthetic construct
  misc_feature 1..80: note = Artificially Synthesized Probe
  source 1..80: mol_type = other DNA
attcagcaaatccatttacttttcttcctagactcacagtgagactacctttctcagctcctctttcaattaggtgtggc

SEQ ID NO: 51676 - DNA, 80 bp, synthetic construct
  misc_feature 1..80: note = Artificially Synthesized Probe
  source 1..80: mol_type = other DNA
gggagttcgacaccagcctggccaacacggtgaaacctcttttctactaaaaatacaaaaattagctgggtgtggtggca

SEQ ID NO: 51677 - DNA, 80 bp, synthetic construct; identical to SEQ ID NO: 24444
  misc_feature 1..80: note = Artificially Synthesized Probe
  source 1..80: mol_type = other DNA

SEQ ID NO: 51678 - DNA, 80 bp, synthetic construct
  misc_feature 1..80: note = Artificially Synthesized Probe
  source 1..80: mol_type = other DNA
aagcccagcccaaagtagatggaattcctaaaagagatacctgaatttactcacactctggaataatcaatccaagtgtc

SEQ ID NO: 51679 - DNA, 80 bp, synthetic construct
  misc_feature 1..80: note = Artificially Synthesized Probe
  source 1..80: mol_type = other DNA
agactttttgtctaattttcccagtgaccctcacactatcgcctctttgtgaaggagatcattctaaatttgcttgaatt

SEQ ID NO: 51680 - DNA, 80 bp, synthetic construct; identical to SEQ ID NO: 24445
  misc_feature 1..80: note = Artificially Synthesized Probe
  source 1..80: mol_type = other DNA

SEQ ID NO: 51681 - DNA, 80 bp, synthetic construct
  misc_feature 1..80: note = Artificially Synthesized Probe
  source 1..80: mol_type = other DNA
tttgttttgttttgttttgtttttgagacggagtcttgctctgttgcccaggctggagtgcagtggcacaatctcagctc

SEQ ID NO: 51682 - DNA, 80 bp, synthetic construct
  misc_feature 1..80: note = Artificially Synthesized Probe
  source 1..80: mol_type = other DNA
tcaccatgttggccagactagtcttgaactcctgacctcaagtgatccatccacctcggcctcccaaagtgctgcgattg

SEQ ID NO: 51683 - DNA, 80 bp, synthetic construct
  misc_feature 1..80: note = Artificially Synthesized Probe
  source 1..80: mol_type = other DNA
ttggcaggtctttctggaatgccacacaaattagttttctctggtgaagccaaacttggaactcaccttagctttcccat

SEQ ID NO: 51684 - DNA, 80 bp, synthetic construct; identical to SEQ ID NO: 24446
  misc_feature 1..80: note = Artificially Synthesized Probe
  source 1..80: mol_type = other DNA

SEQ ID NO: 51685 - DNA, 80 bp, synthetic construct
  misc_feature 1..80: note = Artificially Synthesized Probe
  source 1..80: mol_type = other DNA
acagacagaggcctcctcctaccctctcagacagcggcatcctcccccctcagacagaggcctcctccctcctcagacag

SEQ ID NO: 51686 - DNA, 80 bp, synthetic construct
  misc_feature 1..80: note = Artificially Synthesized Probe
  source 1..80: mol_type = other DNA
gcctcctccctcctcagacagggacctcctccctcctcagacggaggtttcctccctcctcagacaggggcctcctcccc

SEQ ID NO: 51687 - DNA, 80 bp, synthetic construct
  misc_feature 1..80: note = Artificially Synthesized Probe
  source 1..80: mol_type = other DNA
gcagagggacccttccttaccccccatgccaactggactttacatgagtgagaaatacaagtctgttgtgttaagacccc

SEQ ID NO: 51688 - DNA, 80 bp, synthetic construct
  misc_feature 1..80: note = Artificially Synthesized Probe
  source 1..80: mol_type = other DNA
gacctactcctggccaggcccaggtggctggcccgcgcgtgctgccgccgcagctctgtgatgtagttgcagcagtccag

SEQ ID NO: 51689 - DNA, 80 bp, synthetic construct
  misc_feature 1..80: note = Artificially Synthesized Probe
  source 1..80: mol_type = other DNA
agccgggggccggcagcaggagggacgcgggacggaccccagggaggacttccccgccgccagggcctcccctcctccct

SEQ ID NO: 51690 - DNA, 80 bp, synthetic construct; identical to SEQ ID NO: 24447
  misc_feature 1..80: note = Artificially Synthesized Probe
  source 1..80: mol_type = other DNA

SEQ ID NO: 51691 - DNA, 80 bp, synthetic construct
  misc_feature 1..80: note = Artificially Synthesized Probe
  source 1..80: mol_type = other DNA
ggcgacctcacctgccctctgggcggtctgctggccactgctgctcgtgaaggtcagccctgcgtcggagaagacaccgg

SEQ ID NO: 51692 - DNA, 80 bp, synthetic construct
  misc_feature 1..80: note = Artificially Synthesized Probe
  source 1..80: mol_type = other DNA
ctgtcccactctcatctcccccattcctgcttctgcccttcctttctctttctctttccttccttccttctctctccttc

SEQ ID NO: 51693 - DNA, 80 bp, synthetic construct
  misc_feature 1..80: note = Artificially Synthesized Probe
  source 1..80: mol_type = other DNA
tgggactacaggtgcatgccaccatgcccagctaatttttatatatttagtagagacgggatttcaccatgttggccagg

SEQ ID NO: 51694 - DNA, 80 bp, synthetic construct; identical to SEQ ID NO: 24448
  misc_feature 1..80: note = Artificially Synthesized Probe
  source 1..80: mol_type = other DNA

SEQ ID NO: 51695 - DNA, 80 bp, synthetic construct
  misc_feature 1..80: note = Artificially Synthesized Probe
  source 1..80: mol_type = other DNA
caggcatagctcactgcagcctcaaattcctgggctcaagcaatcctcgcacctctgcctcctgagcagatgggactaca

SEQ ID NO: 51696 - DNA, 80 bp, synthetic construct
  misc_feature 1..80: note = Artificially Synthesized Probe
  source 1..80: mol_type = other DNA
aataagagaagggagaggagaaagcccaaatcatggtagagatgaaagagtcagagaatgccagatggagagaaaataac

SEQ ID NO: 51697 - DNA, 80 bp, synthetic construct
  misc_feature 1..80: note = Artificially Synthesized Probe
  source 1..80: mol_type = other DNA
cattccaaatcttatctccatttcccctctgattccatctgcattcccatcctcactcctgatcccaagccaaccccatc

SEQ ID NO: 51698 - DNA, 80 bp, synthetic construct
  misc_feature 1..80: note = Artificially Synthesized Probe
  source 1..80: mol_type = other DNA
acaaggccaagagatcgagaccatcctggccaacatggtgaaacccccgtcttcactaaaaatacaaaaattagctgggc

SEQ ID NO: 51699 - DNA, 80 bp, synthetic construct; identical to SEQ ID NO: 24449
  misc_feature 1..80: note = Artificially Synthesized Probe
  source 1..80: mol_type = other DNA

SEQ ID NO: 51700 - DNA, 80 bp, synthetic construct
  misc_feature 1..80: note = Artificially Synthesized Probe
  source 1..80: mol_type = other DNA
gtcactggcccttaccttactctgcgtcagtttgttcttcttattcagcacgaacacgcccttgtccacggccaccagta

SEQ ID NO: 51701 - DNA, 80 bp, synthetic construct
  misc_feature 1..80: note = Artificially Synthesized Probe
  source 1..80: mol_type = other DNA
gaagtcagccctgggagagaggagtgcctgggatggagtgggtgctgggctagagtggaaagacagaaaggttgggggga

SEQ ID NO: 51702 - DNA, 80 bp, synthetic construct
  misc_feature 1..80: note = Artificially Synthesized Probe
  source 1..80: mol_type = other DNA
gagagtgaggggggagagagggaaagggaaagagggagagaaagggagagggagagagagggaaagagagagggagagag

SEQ ID NO: 51703 - DNA, 80 bp, synthetic construct; identical to SEQ ID NO: 24450
  misc_feature 1..80: note = Artificially Synthesized Probe
  source 1..80: mol_type = other DNA

SEQ ID NO: 51704 - DNA, 80 bp, synthetic construct
  misc_feature 1..80: note = Artificially Synthesized Probe
  source 1..80: mol_type = other DNA
agaggagtagggagagggagagggggcgagcgagcccagggcacacttaccgagcccacgcaggagtccttgacgtccac

SEQ ID NO: 51705 - DNA, 80 bp, synthetic construct
  misc_feature 1..80: note = Artificially Synthesized Probe
  source 1..80: mol_type = other DNA
ctgcccttgttcatgatctggggggacaggctggcatcaggctggggagggtgagtggcagggaacgcagggagggatcc

SEQ ID NO: 51706 - DNA, 80 bp, synthetic construct
  misc_feature 1..80: note = Artificially Synthesized Probe
  source 1..80: mol_type = other DNA
ctgagctctgtacgtagcactgagagatgcaggtaattgttggagttgcccacggtgctgtagggcagagcctgcatggt

SEQ ID NO: 51707 - DNA, 80 bp, synthetic construct
  misc_feature 1..80: note = Artificially Synthesized Probe
  source 1..80: mol_type = other DNA
gattaagttagggatctggagatggaatcattatcctggattatgtaggtggagctaatgtaatcataagggtctttatt

SEQ ID NO: 51708 - DNA, 80 bp, synthetic construct; identical to SEQ ID NO: 24419
  misc_feature 1..80: note = Artificially Synthesized Probe
  source 1..80: mol_type = other DNA

SEQ ID NO: 51709 - DNA, 80 bp, synthetic construct; identical to SEQ ID NO: 24451
  misc_feature 1..80: note = Artificially Synthesized Probe
  source 1..80: mol_type = other DNA

SEQ ID NO: 51710 - DNA, 80 bp, synthetic construct
  misc_feature 1..80: note = Artificially Synthesized Probe
  source 1..80: mol_type = other DNA
gaagccaggagaactgagaccacctcacaacaatgggcctgtcccaaacactacacaaccctccttgtgagattcaggct

SEQ ID NO: 51711 - DNA, 80 bp, synthetic construct
  misc_feature 1..80: note = Artificially Synthesized Probe
  source 1..80: mol_type = other DNA
caaatgagaatgtctatgcaaatggcaggaccccactgtgcaggacagaacccctctatgcagatgagagtatctctatg

SEQ ID NO: 51712 - DNA, 80 bp, synthetic construct
  misc_feature 1..80: note = Artificially Synthesized Probe
  source 1..80: mol_type = other DNA
gggcttctggctggggtgtgtgttgatgctgagtttggccacgccatctccctgggttagagactgcacagtgtcctcgc

SEQ ID NO: 51713 - DNA, 80 bp, synthetic construct; identical to SEQ ID NO: 24452
  misc_feature 1..80: note = Artificially Synthesized Probe
  source 1..80: mol_type = other DNA

SEQ ID NO: 51714 - DNA, 80 bp, synthetic construct
  misc_feature 1..80: note = Artificially Synthesized Probe
  source 1..80: mol_type = other DNA
tagacctcctccctcagagtagagtccactttcatactgggcctgtgccccccatcagactggactccacctttatactg

SEQ ID NO: 51715 - DNA, 80 bp, synthetic construct
  misc_feature 1..80: note = Artificially Synthesized Probe
  source 1..80: mol_type = other DNA
tgggcctgtgcccccatcagcccggaccccacctttatactggccctgcctccccccatcaggctggaatccatcttcat

SEQ ID NO: 51716 - DNA, 80 bp, synthetic construct
  misc_feature 1..80: note = Artificially Synthesized Probe
  source 1..80: mol_type = other DNA
ctgagtgcaagatgacggtggcagacacgtacaaagacttccccaccaggtcttctgctcgggggttctgcaccccgtcc

SEQ ID NO: 51717 - DNA, 80 bp, synthetic construct; identical to SEQ ID NO: 24453
  misc_feature 1..80: note = Artificially Synthesized Probe
  source 1..80: mol_type = other DNA

SEQ ID NO: 51718 - DNA, 80 bp, synthetic construct
  misc_feature 1..80: note = Artificially Synthesized Probe
  source 1..80: mol_type = other DNA
ccaccttgccccactcccaccccccacatggtcccacctccagcccctcacctggccccacccccagccccccaccttcc

SEQ ID NO: 51719 - DNA, 80 bp, synthetic construct
  misc_feature 1..80: note = Artificially Synthesized Probe
  source 1..80: mol_type = other DNA
tcatgtaagcctgggaggtcaaggctgcagttaaaaaaaaaaaaaaaaaaaagctgggtacaaaagcataatatttatga

SEQ ID NO: 51720 - DNA, 80 bp, synthetic construct
  misc_feature 1..80: note = Artificially Synthesized Probe
  source 1..80: mol_type = other DNA
cctgactccacccccagtcccccacctggtcttcacctggtccctcacctggctcttacctggccccacccccagtccct

SEQ ID NO: 51721 - DNA, 80 bp, synthetic construct
  misc_feature 1..80: note = Artificially Synthesized Probe
  source 1..80: mol_type = other DNA
gcccctcctcctcttaccgtactccttcacctcaaactcagtggagaagacctgctgtggtgagttttcatagtaggctc

SEQ ID NO: 51722 - DNA, 80 bp, synthetic construct; identical to SEQ ID NO: 24454
  misc_feature 1..80: note = Artificially Synthesized Probe
  source 1..80: mol_type = other DNA

SEQ ID NO: 51723 - DNA, 80 bp, synthetic construct
  misc_feature 1..80: note = Artificially Synthesized Probe
  source 1..80: mol_type = other DNA
cagcggctcacgcctgtcatcccagcactctgggaggctgaggcgggcagatcacctgaggtcaggagttcaagaccagc

SEQ ID NO: 51724 - DNA, 80 bp, synthetic construct
  misc_feature 1..80: note = Artificially Synthesized Probe
  source 1..80: mol_type = other DNA
tccagcctgggagacagagtgagagtctgtctcgaaaaaaagaacaaggaccggagtcagtcaaccttaggtttcaatct

SEQ ID NO: 51725 - DNA, 80 bp, synthetic construct
  misc_feature 1..80: note = Artificially Synthesized Probe
  source 1..80: mol_type = other DNA
ttcatatgagtaggggctcattttttcagtgtctctctgaatactaataactagtagtgtcatttcatttgctgccaaca

SEQ ID NO: 51726 - DNA, 80 bp, synthetic construct; identical to SEQ ID NO: 24455
  misc_feature 1..80: note = Artificially Synthesized Probe
  source 1..80: mol_type = other DNA

SEQ ID NO: 51727 - DNA, 80 bp, synthetic construct
  misc_feature 1..80: note = Artificially Synthesized Probe
  source 1..80: mol_type = other DNA
ataagtttaaaagaaattgtacagaggtaacagggatcaggcaagtggcatatctgaaggccgtgagctggctttaggaa

SEQ ID NO: 51728 - DNA, 80 bp, synthetic construct
  misc_feature 1..80: note = Artificially Synthesized Probe
  source 1..80: mol_type = other DNA
cctcccgggttcacaccattctcctgcctcagcctctcgagtagctgggactacaggtgcccgccaccacgcccagctaa

SEQ ID NO: 51729 - DNA, 80 bp, synthetic construct; identical to SEQ ID NO: 24456
  misc_feature 1..80: note = Artificially Synthesized Probe
  source 1..80: mol_type = other DNA

SEQ ID NO: 51730 - DNA, 80 bp, synthetic construct
  misc_feature 1..80: note = Artificially Synthesized Probe
  source 1..80: mol_type = other DNA
aaagaaagaaaacaacagaagagagaaatagatcaaagaaagaaacaaagcccaggattgggttagggaacgaggcaaga

SEQ ID NO: 51731 - DNA, 80 bp, synthetic construct
  misc_feature 1..80: note = Artificially Synthesized Probe
  source 1..80: mol_type = other DNA
tcttggcctcgagcagtcttcccacctctgcctcccgaaatgttggaattacaggcttgagccattgcatttgccccaat

SEQ ID NO: 51732 - DNA, 80 bp, synthetic construct
  misc_feature 1..80: note = Artificially Synthesized Probe
  source 1..80: mol_type = other DNA
agctgcaaccacaagcaagcaccaccacacacagctgtttttttgtttgtttttaacttttcttttttgtagagacaggg

SEQ ID NO: 51733 - DNA, 80 bp, synthetic construct
  misc_feature 1..80: note = Artificially Synthesized Probe
  source 1..80: mol_type = other DNA
ccttctctcctcccatccttctcgcttcttccagtaagttttttattaaacccaactatataccagcattgtgctgagtt

SEQ ID NO: 51734 - DNA, 80 bp, synthetic construct; identical to SEQ ID NO: 24457
  misc_feature 1..80: note = Artificially Synthesized Probe
  source 1..80: mol_type = other DNA

SEQ ID NO: 51735 - DNA, 80 bp, synthetic construct
  misc_feature 1..80: note = Artificially Synthesized Probe
  source 1..80: mol_type = other DNA
agggaggatggcccgtgtggctccagaagagtgaacgagggggagagagggaggaggggagggcagggaagggacagggc

SEQ ID NO: 51736 - DNA, 80 bp, synthetic construct
  misc_feature 1..80: note = Artificially Synthesized Probe
  source 1..80: mol_type = other DNA
tcctctggctgccgtcggtagaatagatgacatacaattatccgtcatgatcccgatattcagataaggtaactgaggct

SEQ ID NO: 51737 - DNA, 80 bp, synthetic construct
  misc_feature 1..80: note = Artificially Synthesized Probe
  source 1..80: mol_type = other DNA
ttgtgtgttgtgtgtgctatgtttgtgtgcactgtgttgtgtggtcgtgtatgttgtgtggttgtgtgttgtgtggttgt

SEQ ID NO: 51738 - DNA, 80 bp, synthetic construct; identical to SEQ ID NO: 24458
  misc_feature 1..80: note = Artificially Synthesized Probe
  source 1..80: mol_type = other DNA

SEQ ID NO: 51739 - DNA, 80 bp, synthetic construct
  misc_feature 1..80: note = Artificially Synthesized Probe
  source 1..80: mol_type = other DNA
gtgtgggtgtgtgtctgcatatctctttgcctctgtgtctctgccactgcaccccttccggtgtgtctttctctgtctct

SEQ ID NO: 51740 - DNA, 80 bp, synthetic construct; identical to SEQ ID NO: 24420
  misc_feature 1..80: note = Artificially Synthesized Probe
  source 1..80: mol_type = other DNA

SEQ ID NO: 51741 - DNA, 80 bp, synthetic construct
  misc_feature 1..80: note = Artificially Synthesized Probe
  source 1..80: mol_type = other DNA
tgagaccctagcccgcccacgccggtgccccgccctctccagccgcccccagcctcacctgtggagccaggggtgtagat

SEQ ID NO: 51742 - DNA, 80 bp, synthetic construct
  misc_feature 1..80: note = Artificially Synthesized Probe
  source 1..80: mol_type = other DNA
cattgtcaggggtctgttccaaggccccatgcccacggtccagcttccggatcttgggctgggtccctccttgcctgccc

SEQ ID NO: 51743 - DNA, 80 bp, synthetic construct; identical to SEQ ID NO: 24459
  misc_feature 1..80: note = Artificially Synthesized Probe
  source 1..80: mol_type = other DNA

SEQ ID NO: 51744 - DNA, 80 bp, synthetic construct
  misc_feature 1..80: note = Artificially Synthesized Probe
  source 1..80: mol_type = other DNA
aggggaggagtctcagaaggggtggggtctcagggaaggtcagggcttagaaggggaggagattcagaaggggtgggggg

SEQ ID NO: 51745 - DNA, 80 bp, synthetic construct
  misc_feature 1..80: note = Artificially Synthesized Probe
  source 1..80: mol_type = other DNA
aggagggggggagtgggcgtggctgtgggtgtcagccgggtcctgcgccagtctgcactcaccgtgaaggtgacgttgcc

SEQ ID NO: 51746 - DNA, 80 bp, synthetic construct
  misc_feature 1..80: note = Artificially Synthesized Probe
  source 1..80: mol_type = other DNA
gtgatgatagagtacctgtcggagtggggcacgggagtgggcttgtcattccacggatgtgagacgccagtcctcactgg

SEQ ID NO: 51747 - DNA, 80 bp, synthetic construct
  misc_feature 1..80: note = Artificially Synthesized Probe
  source 1..80: mol_type = other DNA
gggcctggcctttgaaagcctgggcaacgagggggccacacatcccaccaaaccctgaaccttccaaccagcgtcagcaa

SEQ ID NO: 51748 - DNA, 80 bp, synthetic construct; identical to SEQ ID NO: 24460
  misc_feature 1..80: note = Artificially Synthesized Probe
  source 1..80: mol_type = other DNA

SEQ ID NO: 51749 - DNA, 80 bp, synthetic construct
  misc_feature 1..80: note = Artificially Synthesized Probe
  source 1..80: mol_type = other DNA
aacagatgacctcaattctagaaacatcccaaactccaattccaccatacctggattccacaaacacccaacccataaac

SEQ ID NO: 51750 - DNA, 80 bp, synthetic construct
  misc_feature 1..80: note = Artificially Synthesized Probe
  source 1..80: mol_type = other DNA
acccaaactcacaggcagcccaaatatatataatcattcccaacctgctaacccctgaatccacaaacacccaaatgcac

SEQ ID NO: 51751 - DNA, 80 bp, synthetic construct
  misc_feature 1..80: note = Artificially Synthesized Probe
  source 1..80: mol_type = other DNA
cagctcatacttggagatgtatctgtcaacaccattggccagctggggaaaggtggagcctgtgaaaaatccctcctgga

SEQ ID NO: 51752 - DNA, 80 bp, synthetic construct
  misc_feature 1..80: note = Artificially Synthesized Probe
  source 1..80: mol_type = other DNA
tggtgctgggacagtgcagggtcagagggacagagggacagagggagaggatggggaggagtgagcagcgcctgctggag

SEQ ID NO: 51753 - DNA, 80 bp, synthetic construct; identical to SEQ ID NO: 24461
  misc_feature 1..80: note = Artificially Synthesized Probe
  source 1..80: mol_type = other DNA

SEQ ID NO: 51754 - DNA, 80 bp, synthetic construct
  misc_feature 1..80: note = Artificially Synthesized Probe
  source 1..80: mol_type = other DNA
gaggcttccatgctgagggaggggaagtagaatgggggagggacagagcccagcacagaaactcccagtttcatgaaatg

SEQ ID NO: 51755 - DNA, 80 bp, synthetic construct
  misc_feature 1..80: note = Artificially Synthesized Probe
  source 1..80: mol_type = other DNA
gagtttattttccaaggaggctcccctcacttacccttgtcaggatgcctgagtgactttggtggtgaaaaaagtcatca

SEQ ID NO: 51756 - DNA, 80 bp, synthetic construct; identical to SEQ ID NO: 24462
  misc_feature 1..80: note = Artificially Synthesized Probe
  source 1..80: mol_type = other DNA

SEQ ID NO: 51757 - DNA, 80 bp, synthetic construct
  misc_feature 1..80: note = Artificially Synthesized Probe
  source 1..80: mol_type = other DNA
caccatgcccggataatttttttatttttgtggagatgggggtcccacgatgttgcccagtccagtcttgaactcctggg

SEQ ID NO: 51758 - DNA, 80 bp, synthetic construct
  misc_feature 1..80: note = Artificially Synthesized Probe
  source 1..80: mol_type = other DNA
tgtttcgttttttcatgaacaatatacctcagaggctatttcacctcagtgagcaaagaactgcctcattcttacaggtt

SEQ ID NO: 51759 - DNA, 80 bp, synthetic construct
  misc_feature 1..80: note = Artificially Synthesized Probe
  source 1..80: mol_type = other DNA
aacaattctcctgcctcagcctccggaatggctgaaattataggtgagcaccaccacgtctggcaatttttgtattttta

SEQ ID NO: 51760 - DNA, 80 bp, synthetic construct
  misc_feature 1..80: note = Artificially Synthesized Probe
  source 1..80: mol_type = other DNA
acaccaggctctctgcagtgaataagcttgaacctgcgttattttctagctctgaaactagctgtgatctttgggtaagc

SEQ ID NO: 51761 - DNA, 80 bp, synthetic construct; identical to SEQ ID NO: 24463
  misc_feature 1..80: note = Artificially Synthesized Probe
  source 1..80: mol_type = other DNA

SEQ ID NO: 51762 - DNA, 80 bp, synthetic construct
  misc_feature 1..80: note = Artificially Synthesized Probe
  source 1..80: mol_type = other DNA
aagtgattctcctgcctcagcctcccaaagagctgggatcacaggcatgcgccactacacctggctaattttttttttct

SEQ ID NO: 51763 - DNA, 80 bp, synthetic construct
  misc_feature 1..80: note = Artificially Synthesized Probe
  source 1..80: mol_type = other DNA
cctggatagtgcagaaagaagggcattgggtcccaaggaggggtcagccccaagggtctgttcctggacaaggaggtctg

SEQ ID NO: 51764 - DNA, 80 bp, synthetic construct
  misc_feature 1..80: note = Artificially Synthesized Probe
  source 1..80: mol_type = other DNA
tagaagtgagccaccacaccccggcagccggtgtcattttaactggcattcctctgacgttctgcagcattgctgcccag

SEQ ID NO: 51765 - DNA, 80 bp, synthetic construct; identical to SEQ ID NO: 24464
  misc_feature 1..80: note = Artificially Synthesized Probe
  source 1..80: mol_type = other DNA

SEQ ID NO: 51766 - DNA, 80 bp, synthetic construct
  misc_feature 1..80: note = Artificially Synthesized Probe
  source 1..80: mol_type = other DNA
tcacttgaggccaggagttggagaccagcctggccaacatggtgaaaccccgtctttactgaaagtacaaaaattagcca

SEQ ID NO: 51767 - DNA, 80 bp, synthetic construct
  misc_feature 1..80: note = Artificially Synthesized Probe
  source 1..80: mol_type = other DNA
ttaaaaaaaggaaagaaactggatctcccaattgccccattccatcttctatcccccactttctcctcaagccaccccat

SEQ ID NO: 51768 - DNA, 80 bp, synthetic construct
  misc_feature 1..80: note = Artificially Synthesized Probe
  source 1..80: mol_type = other DNA
taatccaactaaacaatgcgactgaagatagttctggttgttgtgacaattaaagaaaccaggatgcctagaagccacca

SEQ ID NO: 51769 - DNA, 80 bp, synthetic construct
  misc_feature 1..80: note = Artificially Synthesized Probe
  source 1..80: mol_type = other DNA
ggtggctcacacctgtcatcccagcactttggaaggccgagatgggtggatcacctgaggtcaggagttcaagaccagcc

SEQ ID NO: 51770 - DNA, 80 bp, synthetic construct; identical to SEQ ID NO: 24465
  misc_feature 1..80: note = Artificially Synthesized Probe
  source 1..80: mol_type = other DNA

SEQ ID NO: 51771 - DNA, 80 bp, synthetic construct
  misc_feature 1..80: note = Artificially Synthesized Probe
  source 1..80: mol_type = other DNA
ctgggagggaaggagggagggagatgagaccgggaattcttcagaacctcgtgacttttttctgggagatgtgcattggt

SEQ ID NO: 51772 - DNA, 80 bp, synthetic construct
  misc_feature 1..80: note = Artificially Synthesized Probe
  source 1..80: mol_type = other DNA
ggaatcaaggagggagagtgtggccaaccgggctgaccattcgtgggttatctggaagctacatatactgaaaaagtagt

SEQ ID NO: 51773 - DNA, 80 bp, synthetic construct; identical to SEQ ID NO: 24466
  misc_feature 1..80: note = Artificially Synthesized Probe
  source 1..80: mol_type = other DNA

SEQ ID NO: 51774 - DNA, 80 bp, synthetic construct
  misc_feature 1..80: note = Artificially Synthesized Probe
  source 1..80: mol_type = other DNA
tctaaataacattggatgcattatttgaccctccatgcttcagttctagaaaacaaggcaagaatacaggcagccctcac

SEQ ID NO: 51775 - DNA, 80 bp, synthetic construct
  misc_feature 1..80: note = Artificially Synthesized Probe
  source 1..80: mol_type = other DNA
aaagaaaataagaggaaggaagtgggaatgatttctgggtgggggacccagatgcccccggctcacacctgcctgagttc

SEQ ID NO: 51776 - DNA, 80 bp, synthetic construct
  misc_feature 1..80: note = Artificially Synthesized Probe
  source 1..80: mol_type = other DNA
tccaccctattactgattaattcaagttaaccttgacctgactgactgaatcaatctatctgcctggcaacaatggctct

SEQ ID NO: 51777 - DNA, 80 bp, synthetic construct
  misc_feature 1..80: note = Artificially Synthesized Probe
  source 1..80: mol_type = other DNA
acatgaggtagtgtttcttctcctccagcttcagggcttctctgcacttgatggggctgatgaacgtgcgctgctgtcca

SEQ ID NO: 51778 - DNA, 80 bp, synthetic construct
  misc_feature 1..80: note = Artificially Synthesized Probe
  source 1..80: mol_type = other DNA
gagatgcacagcctacagcctcctttctagtcttggagtggaagtcccaagtggcacccaggaaacaatccttaacccag

SEQ ID NO: 51779 - DNA, 80 bp, synthetic construct
  misc_feature 1..80: note = Artificially Synthesized Probe
  source 1..80: mol_type = other DNA
gcctcccaagtagctgagattacaggcgcccgccaccgcacctggctaattcttatatttttagtagagacagggtttca

SEQ ID NO: 51780 - DNA, 80 bp, synthetic construct; identical to SEQ ID NO: 24467
  misc_feature 1..80: note = Artificially Synthesized Probe
  source 1..80: mol_type = other DNA

SEQ ID NO: 51781 - DNA, 80 bp, synthetic construct
  misc_feature 1..80: note = Artificially Synthesized Probe
  source 1..80: mol_type = other DNA
cctcctgagttcaaacaattctcctgcctcagcctcccaagtagctgggatgacaggcaccagccaccacgcccggctaa

SEQ ID NO: 51782 - DNA, 80 bp, synthetic construct
  misc_feature 1..80: note = Artificially Synthesized Probe
  source 1..80: mol_type = other DNA
atggccctgtcgcccaggctggagtgcagtggtgccatcatagcccactctggcctcaaactactgggctcaagcaatcc

SEQ ID NO: 51783 - DNA, 80 bp, synthetic construct
  misc_feature 1..80: note = Artificially Synthesized Probe
  source 1..80: mol_type = other DNA
gccaggattttgagaccagcctggccaacagggtgaaaccccgtctctactaaaaatacaaaattagccgggcgtggtgg

SEQ ID NO: 51784 - DNA, 80 bp, synthetic construct; identical to SEQ ID NO: 24468
  misc_feature 1..80: note = Artificially Synthesized Probe
  source 1..80: mol_type = other DNA

SEQ ID NO: 51785 - DNA, 80 bp, synthetic construct
  misc_feature 1..80: note = Artificially Synthesized Probe
  source 1..80: mol_type = other DNA
ccttaaactgcatgagttcttaactgctgcagcaaaagatgactgcaaactcggtgcgttaaaacaacatgtttcttatc

SEQ ID NO: 51786 - DNA, 80 bp, synthetic construct
  misc_feature 1..80: note = Artificially Synthesized Probe
  source 1..80: mol_type = other DNA
acaggactgtgttcccttctggaggaaacagatgaacccatttcctcgcctttttcagtgtctaggagccgcctgcattc

SEQ ID NO: 51787 - DNA, 80 bp, synthetic construct
  misc_feature 1..80: note = Artificially Synthesized Probe
  source 1..80: mol_type = other DNA
gggccaattactgtcactcctttcaaagtccatcagtgattggtcactgagcttctgctcttcaatttatgcacagacag

SEQ ID NO: 51788 - DNA, 80 bp, synthetic construct; identical to SEQ ID NO: 24469
  misc_feature 1..80: note = Artificially Synthesized Probe
  source 1..80: mol_type = other DNA

SEQ ID NO: 51789 - DNA, 80 bp, synthetic construct
  misc_feature 1..80: note = Artificially Synthesized Probe
  source 1..80: mol_type = other DNA
cagcctcccgagtagctggaattacaggtgcccaccaccatgcccagctaattttttatttttagtagagatggggtttc

SEQ ID NO: 51790 - DNA, 80 bp, synthetic construct
  misc_feature 1..80: note = Artificially Synthesized Probe
  source 1..80: mol_type = other DNA
tctggccatgctcctccctgctttaaattcctccatggctcctgtggacccctggatgaagccccatgtgcctgcctgtc

SEQ ID NO: 51791 - DNA, 80 bp, synthetic construct
  misc_feature 1..80: note = Artificially Synthesized Probe
  source 1..80: mol_type = other DNA
tatttgtttctgcttacaggaagccttcaccccagccctgttccctgccgctgtcccatgcttgtgtctccagcgaggaa

SEQ ID NO: 51792 - DNA, 80 bp, synthetic construct
  misc_feature 1..80: note = Artificially Synthesized Probe
  source 1..80: mol_type = other DNA
caggtcgaggctgtgcagctgggtgctgtgcctgctattgtatgtgatactcaacaaacttaggaggccccatgttatat

SEQ ID NO: 51793 - DNA, 80 bp, synthetic construct; identical to SEQ ID NO: 24470
  misc_feature 1..80: note = Artificially Synthesized Probe
  source 1..80: mol_type = other DNA

SEQ ID NO: 51794 - DNA, 80 bp, synthetic construct
  misc_feature 1..80: note = Artificially Synthesized Probe
  source 1..80: mol_type = other DNA
cccggttagcttctattattattatttgttttgagatggagtcttgctctgttgcccaggctggaatgcaatggtgcaat

SEQ ID NO: 51795 - DNA, 80 bp, synthetic construct
  misc_feature 1..80: note = Artificially Synthesized Probe
  source 1..80: mol_type = other DNA
ctgacctcaaacgatccgtccgccttggccccccaaagtgctgggattacaggcgtgagccaccacgcccagcctattct

SEQ ID NO: 51796 - DNA, 80 bp, synthetic construct
  misc_feature 1..80: note = Artificially Synthesized Probe
  source 1..80: mol_type = other DNA
cagttcccgtcacggcgctgatggcccagtgatggtactgccaggtgacatgtccctctgcctgacccccactctgggca

SEQ ID NO: 51797 - DNA, 80 bp, synthetic construct; identical to SEQ ID NO: 24471
  misc_feature 1..80: note = Artificially Synthesized Probe
  source 1..80: mol_type = other DNA

SEQ ID NO: 51798 - DNA, 80 bp, synthetic construct; identical to SEQ ID NO: 24421
  misc_feature 1..80: note = Artificially Synthesized Probe
  source 1..80: mol_type = other DNA

SEQ ID NO: 51799 - DNA, 80 bp, synthetic construct
  misc_feature 1..80: note = Artificially Synthesized Probe
  source 1..80: mol_type = other DNA
cctccccacatacgctgtggaagaagggcaggagtgagaaatgctgggggaggacgaccctttggtctgagatgtggagg

SEQ ID NO: 51800 - DNA, 80 bp, synthetic construct
  misc_feature 1..80: note = Artificially Synthesized Probe
  source 1..80: mol_type = other DNA
cactccccccaaccacagcagccctggccttgcccactctaccccagactcacccaggctgcacccacctcgctcccaca

SEQ ID NO: 51801 - DNA, 80 bp, synthetic construct
  misc_feature 1..80: note = Artificially Synthesized Probe
  source 1..80: mol_type = other DNA
tgatccaaacttagaaaggagcaagacaaggtactaaggcatagaaaagatgtttactccatgttgtaaattatacaaag

SEQ ID NO: 51802 - DNA, 80 bp, synthetic construct
  misc_feature 1..80: note = Artificially Synthesized Probe
  source 1..80: mol_type = other DNA
ttattttgttttattctattttttttttttttttttttttgagacagagtcttgctctttcgcccaggctggagtgcagt

SEQ ID NO: 51803 - DNA, 80 bp, synthetic construct
  misc_feature 1..80: note = Artificially Synthesized Probe
  source 1..80: mol_type = other DNA
tctcgatctcctgacctcgtgatctgcccgcctcagcctcccaaagtgctgggattacaggcgcgagccgccacacccgg

SEQ ID NO: 51804 - DNA, 80 bp, synthetic construct; identical to SEQ ID NO: 24422
  misc_feature 1..80: note = Artificially Synthesized Probe
  source 1..80: mol_type = other DNA

SEQ ID NO: 51805 - DNA, 80 bp, synthetic construct
  misc_feature 1..80: note = Artificially Synthesized Probe
  source 1..80: mol_type = other DNA
ttcctccattgattactaagatgctttgacagtctcagcttacgtggtcattgctgtggtctcacattaacatgcaaagc

SEQ ID NO: 51806 - DNA, 80 bp, synthetic construct
  misc_feature 1..80: note = Artificially Synthesized Probe
  source 1..80: mol_type = other DNA
tggtacagatctcaaggatcatagtgttcttggcatcctgaggcctcttttctagaaacacagaagagagaaagatggga

SEQ ID NO: 51807 - DNA, 80 bp, synthetic construct
  misc_feature 1..80: note = Artificially Synthesized Probe
  source 1..80: mol_type = other DNA
ttgaggtcgaatttattacaggtgagttgatctttggccttagcatggtacattgtcaccacctggtaagatgggagagg

SEQ ID NO: 51808 - DNA, 80 bp, synthetic construct; identical to SEQ ID NO: 24423
  misc_feature 1..80: note = Artificially Synthesized Probe
  source 1..80: mol_type = other DNA

SEQ ID NO: 51809 - DNA, 80 bp, synthetic construct
  misc_feature 1..80: note = Artificially Synthesized Probe
  source 1..80: mol_type = other DNA
gaaccttgaccagtcgggtcttgtacactgtgggggagaggcagacagtttgggtggtgggctaggttgaccatgagggg

SEQ ID NO: 51810 - DNA, 80 bp, synthetic construct
  misc_feature 1..80: note = Artificially Synthesized Probe
  source 1..80: mol_type = other DNA
cacatcaaggttcagttcctggtggtcaggggcgtccttttggtattgagccaaggcttggaacaccatgaaggtggcct

SEQ ID NO: 51811 - DNA, 80 bp, synthetic construct
  misc_feature 1..80: note = Artificially Synthesized Probe
  source 1..80: mol_type = other DNA
gacatgttcagaactctccgagagacagaaacttacaccaggacttggagatgctgagaacatgtctagaatccatcaga

SEQ ID NO: 51812 - DNA, 80 bp, synthetic construct
  misc_feature 1..80: note = Artificially Synthesized Probe
  source 1..80: mol_type = other DNA
aagaacagaatgaaaccgtagccagaggatactgagcatataatctacaacccaagagtgacactgtaacactgagaacg

SEQ ID NO: 51813 - DNA, 80 bp, synthetic construct
  misc_feature 1..80: note = Artificially Synthesized Probe
  source 1..80: mol_type = other DNA
gcctggtagaactgggaacatggtctagaacccaccagcaagacagggtaagattgtgagatagaactgggaacctggtc

SEQ ID NO: 51814 - DNA, 80 bp, synthetic construct; identical to SEQ ID NO: 24424
  misc_feature 1..80: note = Artificially Synthesized Probe
  source 1..80: mol_type = other DNA

SEQ ID NO: 51815 - DNA, 80 bp, synthetic construct
  misc_feature 1..80: note = Artificially Synthesized Probe
  source 1..80: mol_type = other DNA
caaagtcaaagtcttttagctgcagtagggccaagagggcataggatgtggcctccacgttgtagagctgcttaccaggg

SEQ ID NO: 51816 - DNA, 80 bp, synthetic construct
  misc_feature 1..80: note = Artificially Synthesized Probe
  source 1..80: mol_type = other DNA
gctcctgccttacctctcttgtttcatcaactctcacttctccctttgaaatgaatgcttaatacgcatttgttgaataa

SEQ ID NO: 51817 - DNA, 80 bp, synthetic construct
  misc_feature 1..80: note = Artificially Synthesized Probe
  source 1..80: mol_type = other DNA
gttatgcatcccagcttgataccttaggactatccatctcagcttggcttagggtcatctgtcccagctcagctaaaagc

SEQ ID NO: 51818 - DNA, 80 bp, synthetic construct; identical to SEQ ID NO: 24425
  misc_feature 1..80: note = Artificially Synthesized Probe
  source 1..80: mol_type = other DNA

SEQ ID NO: 51819 - DNA, 80 bp, synthetic construct
  misc_feature 1..80: note = Artificially Synthesized Probe
  source 1..80: mol_type = other DNA
tccatttttgagaatttcccagatattttagccaccatgagctgccttgttgctgcatatctattatgtatctggagaaa

SEQ ID NO: 51820 - DNA, 80 bp, synthetic construct
  misc_feature 1..80: note = Artificially Synthesized Probe
  source 1..80: mol_type = other DNA
ccaatttcacggtgtcaatgcgacatcactgaacaaagtcctggggagacattctccaaattgttactcataaactagta

SEQ ID NO: 51821 - DNA, 80 bp, synthetic construct; identical to SEQ ID NO: 24416
  misc_feature 1..80: note = Artificially Synthesized Probe
  source 1..80: mol_type = other DNA

SEQ ID NO: 51822 - DNA, 80 bp, synthetic construct; identical to SEQ ID NO: 24426
  misc_feature 1..80: note = Artificially Synthesized Probe
  source 1..80: mol_type = other DNA

SEQ ID NO: 51823 - DNA, 80 bp, synthetic construct
  misc_feature 1..80: note = Artificially Synthesized Probe
  source 1..80: mol_type = other DNA
cgtctgcagggccccagctaagcagcccgcggagagcgagcggcgcgtgcgcccccgctgattggctggcacaaccggca

SEQ ID NO: 51824 - DNA, 80 bp, synthetic construct
  misc_feature 1..80: note = Artificially Synthesized Probe
  source 1..80: mol_type = other DNA
cagaacacttgcgttagcctacagttgggcaaaatcatctaacacgggggtccccaacccccaggtcacagactggtacc

SEQ ID NO: 51825 - DNA, 80 bp, synthetic construct; identical to SEQ ID NO: 24580
  misc_feature 1..80: note = Artificially Synthesized Probe
  source 1..80: mol_type = other DNA

SEQ ID NO: 51826 - DNA, 80 bp, synthetic construct
  misc_feature 1..80: note = Artificially Synthesized Probe
  source 1..80: mol_type = other DNA
agtgtagtttctactgaatgcatatcacttttgcatcattgtaaagtcaaaaaaattttaagttgaaccattgtaagttg

SEQ ID NO: 51827 - DNA, 80 bp, synthetic construct
  misc_feature 1..80: note = Artificially Synthesized Probe
  source 1..80: mol_type = other DNA
tcactgctgaaatttcctgtctcttcatgcatattgttcagcttttccactacagcctttgacatactaatcatatttat

SEQ ID NO: 51828 - DNA, 80 bp, synthetic construct
  misc_feature 1..80: note = Artificially Synthesized Probe
  source 1..80: mol_type = other DNA
cacgtgtaggacagaagaaactgaaataagtaatatttatgcctggaataggcttccctcttttgtttctaggcttttag

SEQ ID NO: 51829 - DNA, 80 bp, synthetic construct; identical to SEQ ID NO: 24581
  misc_feature 1..80: note = Artificially Synthesized Probe
  source 1..80: mol_type = other DNA

SEQ ID NO: 51830 - DNA, 80 bp, synthetic construct
  misc_feature 1..80: note = Artificially Synthesized Probe
  source 1..80: mol_type = other DNA
gtgggctctgtgttcctgcatctcaggggtggtgctttctcagtgattctgcccgtccttcagtggtaggagacctctaa

SEQ ID NO: 51831 - DNA, 80 bp, synthetic construct
  misc_feature 1..80: note = Artificially Synthesized Probe
  source 1..80: mol_type = other DNA
ctccatgcctgaaggcttctgttcctccaggtaggctttgtaccttttccatagcatcaactactcctcccctccagatc

SEQ ID NO: 51832 - DNA, 80 bp, synthetic construct
  misc_feature 1..80: note = Artificially Synthesized Probe
  source 1..80: mol_type = other DNA
tctgtggctcccagagatctagagttcttccagatcacacctggcttttactaacaggttaaaaatgtttcctgaattct

SEQ ID NO: 51833 - DNA, 80 bp, synthetic construct; identical to SEQ ID NO: 24482
  misc_feature 1..80: note = Artificially Synthesized Probe
  source 1..80: mol_type = other DNA

SEQ ID NO: 51834 - DNA, 80 bp, synthetic construct; identical to SEQ ID NO: 24582
  misc_feature 1..80: note = Artificially Synthesized Probe
  source 1..80: mol_type = other DNA

SEQ ID NO: 51835 - DNA, 80 bp, synthetic construct
  misc_feature 1..80: note = Artificially Synthesized Probe
  source 1..80: mol_type = other DNA
cggcagggagactcaccataggaaggccccctgtgttggaggtggtgtaggttaatgctctcgccctctcttcctccttc

SEQ ID NO: 51836 - DNA, 80 bp, synthetic construct
  misc_feature 1..80: note = Artificially Synthesized Probe
  source 1..80: mol_type = other DNA
taaagatcttcagggggccacagaagaaagaggtatgaagccctaactcggtgaattagaaccactttgatgtcctgtgg

SEQ ID NO: 51837 - DNA, 80 bp, synthetic construct
  misc_feature 1..80: note = Artificially Synthesized Probe
  source 1..80: mol_type = other DNA
gagcccagcaccacatgtgctcagggatgctgcctgttgttgttatgaccctcacaacccagcccgggaaagccatgtct

SEQ ID NO: 51838 - DNA, 80 bp, synthetic construct
  misc_feature 1..80: note = Artificially Synthesized Probe
  source 1..80: mol_type = other DNA
aggggggcagagagccctgatttaagcctgggggtgtgcccaactctcctggggggtccaggccccctttatagaaatca

SEQ ID NO: 51839 - DNA, 80 bp, synthetic construct; identical to SEQ ID NO: 24583
  misc_feature 1..80: note = Artificially Synthesized Probe
  source 1..80: mol_type = other DNA

SEQ ID NO: 51840 - DNA, 80 bp, synthetic construct
  misc_feature 1..80: note = Artificially Synthesized Probe
  source 1..80: mol_type = other DNA
tggatggggaaaaacgctggtgataaactgcctccctgagggacccaggccttgtcccaggaagtctcagagcaagccct

SEQ ID NO: 51841 - DNA, 80 bp, synthetic construct
  misc_feature 1..80: note = Artificially Synthesized Probe
  source 1..80: mol_type = other DNA
ctgatagagacactagagaagagggcacagaatggaggacttactatgtggatttacttgtatctggtcctcatcaagag

SEQ ID NO: 51842 - DNA, 80 bp, synthetic construct; identical to SEQ ID NO: 24584
  misc_feature 1..80: note = Artificially Synthesized Probe
  source 1..80: mol_type = other DNA

SEQ ID NO: 51843 - DNA, 80 bp, synthetic construct
  misc_feature 1..80: note = Artificially Synthesized Probe
  source 1..80: mol_type = other DNA
gtgcgtgatctgtcttgttttgagattggtttgaagcctctaatttttagggtgttactgtttatgtgtccttgcatctc

SEQ ID NO: 51844 - DNA, 80 bp, synthetic construct
  misc_feature 1..80: note = Artificially Synthesized Probe
  source 1..80: mol_type = other DNA
tagagccagtggtttaagcagacagtttgtggggctggccattggtgaagaaagttagggtaggaccaaaggtcaccaca

SEQ ID NO: 51845 - DNA, 80 bp, synthetic construct
  misc_feature 1..80: note = Artificially Synthesized Probe
  source 1..80: mol_type = other DNA
gttctgggagcagagcactcatccaggcctagtcttggtcagtggtggtctctaacacgcactcccctgatctcccattg

SEQ ID NO: 51846 - DNA, 80 bp, synthetic construct
  misc_feature 1..80: note = Artificially Synthesized Probe
  source 1..80: mol_type = other DNA
gcctgctgcttcctccatcattaatgttgtggggtacaggccctcactcacgcgtatttgttatcaagcagcagggcaca

SEQ ID NO: 51847 - DNA, 80 bp, synthetic construct
  misc_feature 1..80: note = Artificially Synthesized Probe
  source 1..80: mol_type = other DNA
cacactgcccgaggaccagcctccttcctttaattctccagaagctgtctttctccactctggccttgaccgaggtgcct

SEQ ID NO: 51848 - DNA, 80 bp, synthetic construct; identical to SEQ ID NO: 24585
  misc_feature 1..80: note = Artificially Synthesized Probe
  source 1..80: mol_type = other DNA

SEQ ID NO: 51849 - DNA, 80 bp, synthetic construct
  misc_feature 1..80: note = Artificially Synthesized Probe
  source 1..80: mol_type = other DNA
tggggggaggccaccctgggggcagttgacctgccaatgcccagcttccttcccatcttgcctgcccaccctttgtggaa

SEQ ID NO: 51850 - DNA, 80 bp, synthetic construct
  misc_feature 1..80: note = Artificially Synthesized Probe
  source 1..80: mol_type = other DNA
cttttccataatgaggccccctgagttcactaggccatcagtacacatcagtccagaggctcagctgggggcatgtctgt

SEQ ID NO: 51851 - DNA, 80 bp, synthetic construct
  misc_feature 1..80: note = Artificially Synthesized Probe
  source 1..80: mol_type = other DNA
tttttcttggtagaaggaagttttctcatcttcacgcagctagggttagaattggacatcctggccgggaaacgtggtgt

SEQ ID NO: 51852 - DNA, 80 bp, synthetic construct; identical to SEQ ID NO: 24586
  misc_feature 1..80: note = Artificially Synthesized Probe
  source 1..80: mol_type = other DNA

SEQ ID NO: 51853 - DNA, 80 bp, synthetic construct
  misc_feature 1..80: note = Artificially Synthesized Probe
  source 1..80: mol_type = other DNA
gcctcagcttcccaagtagctgggattataggcacatgccaccatgcccagctattttttgtatttttagtagagatggg

SEQ ID NO: 51854 - DNA, 80 bp, synthetic construct
  misc_feature 1..80: note = Artificially Synthesized Probe
  source 1..80: mol_type = other DNA
caatcctctcaccttagcctcccaaagtgctgggattacaggcgtgagccaccacgcccagcctaaaactgggttcttgt

SEQ ID NO: 51855 - DNA, 80 bp, synthetic construct
  misc_feature 1..80: note = Artificially Synthesized Probe
  source 1..80: mol_type = other DNA
tctttatgtgttctaaggactctggctgaattcttgaccctctgcctgctttccataaaaattgtgctctgtgtgtcttt

SEQ ID NO: 51856 - DNA, 80 bp, synthetic construct; identical to SEQ ID NO: 24587
  misc_feature 1..80: note = Artificially Synthesized Probe
  source 1..80: mol_type = other DNA

SEQ ID NO: 51857 - DNA, 80 bp, synthetic construct
  misc_feature 1..80: note = Artificially Synthesized Probe
  source 1..80: mol_type = other DNA
ctcttatggcttttctttgccaacaccactgggggcagcgatgcaggggagggagaagggcaatggctccaggagaagga

SEQ ID NO: 51858 - DNA, 80 bp, synthetic construct
  misc_feature 1..80: note = Artificially Synthesized Probe
  source 1..80: mol_type = other DNA
cacacacctgatgtctgcagataggcttcgacttagcatgcggagaactgggggccttggttgttgctgactcggccctg

SEQ ID NO: 51859 - DNA, 80 bp, synthetic construct
  misc_feature 1..80: note = Artificially Synthesized Probe
  source 1..80: mol_type = other DNA
accacaggaccccttgcctttatcccttgctccccagccctttccatctgtcccaccctcccgggccagatagctttctt

SEQ ID NO: 51860 - DNA, 80 bp, synthetic construct; identical to SEQ ID NO: 24588
  misc_feature 1..80: note = Artificially Synthesized Probe
  source 1..80: mol_type = other DNA

SEQ ID NO: 51861 - DNA, 80 bp, synthetic construct
  misc_feature 1..80: note = Artificially Synthesized Probe
  source 1..80: mol_type = other DNA
agaggggaagacccagagcccagcccataacttcccctctctgtagcctctgggtccctcactgcatgccagctgggaca

SEQ ID NO: 51862 - DNA, 80 bp, synthetic construct
  misc_feature 1..80: note = Artificially Synthesized Probe
  source 1..80: mol_type = other DNA
actgtcatatcatcagtgtgaattgtgcctttgttacatttaatacttttgggcttgaattctactttgatgtctatccc

SEQ ID NO: 51863 - DNA, 80 bp, synthetic construct
  misc_feature 1..80: note = Artificially Synthesized Probe
  source 1..80: mol_type = other DNA
gacagggcctaaaaccagggtgactttctttcccttcttctcaactgtaggaaaaaacgaggagtcattggagagtacag

SEQ ID NO: 51864 - DNA, 80 bp, synthetic construct
  misc_feature 1..80: note = Artificially Synthesized Probe
  source 1..80: mol_type = other DNA
gccggctggtgctgaggagcagcggcagtttctcacagagcagtgcatcgcctccttccgcctgtgcctgagccgcttcc

SEQ ID NO: 51865 - DNA, 80 bp, synthetic construct
  misc_feature 1..80: note = Artificially Synthesized Probe
  source 1..80: mol_type = other DNA
aaggttggtgggcagagctaagacagattggagcttcacggtagcagcacatgggagggatgggcgaggagagctgcagg

SEQ ID NO: 51866 - DNA, 80 bp, synthetic construct; identical to SEQ ID NO: 24589
  misc_feature 1..80: note = Artificially Synthesized Probe
  source 1..80: mol_type = other DNA

SEQ ID NO: 51867 - DNA, 80 bp, synthetic construct
  misc_feature 1..80: note = Artificially Synthesized Probe
  source 1..80: mol_type = other DNA
gcctctgcttcatgggggttgggtgctgacagcctcctccagctctttttggaaagcggatgatgtagcgatccttaaca

SEQ ID NO: 51868 - DNA, 80 bp, synthetic construct
  misc_feature 1..80: note = Artificially Synthesized Probe
  source 1..80: mol_type = other DNA
ggtcgttgtcctgcaccatgtagctacattctaagggggaggcagacttaaaaacatacagatggccaggcgtggtggct

SEQ ID NO: 51869 - DNA, 80 bp, synthetic construct
  misc_feature 1..80: note = Artificially Synthesized Probe
  source 1..80: mol_type = other DNA
tcatgagaattgctcgaacccgggaggcagaggttgcagtgagccaagattgggccactgcacttcagcctgggcaacag

SEQ ID NO: 51870 - DNA, 80 bp, synthetic construct; identical to SEQ ID NO: 24590
  misc_feature 1..80: note = Artificially Synthesized Probe
  source 1..80: mol_type = other DNA

SEQ ID NO: 51871 - DNA, 80 bp, synthetic construct
  misc_feature 1..80: note = Artificially Synthesized Probe
  source 1..80: mol_type = other DNA
cagaatggacagttggccaagagatgggccctggcttggcactggctatgtgcaggaagtggcacttcacagaattctgt

SEQ ID NO: 51872 - DNA, 80 bp, synthetic construct; identical to SEQ ID NO: 24483
  misc_feature 1..80: note = Artificially Synthesized Probe
  source 1..80: mol_type = other DNA

SEQ ID NO: 51873 - DNA, 80 bp, synthetic construct
  misc_feature 1..80: note = Artificially Synthesized Probe
  source 1..80: mol_type = other DNA
tgcagtgcatgctagcaaacgatggccagctccggcttccctggctgttggtgccacactggagcctggcttgctcactg

SEQ ID NO: 51874 - DNA, 80 bp, synthetic construct
  misc_feature 1..80: note = Artificially Synthesized Probe
  source 1..80: mol_type = other DNA
ttgctttgggaactttcccctttccctcttttgggagcagcagagcccactgcaagagcccacacacacatcagtggaac

SEQ ID NO: 51875 - DNA, 80 bp, synthetic construct; identical to SEQ ID NO: 24591
  misc_feature 1..80: note = Artificially Synthesized Probe
  source 1..80: mol_type = other DNA

SEQ ID NO: 51876 - DNA, 80 bp, synthetic construct
  misc_feature 1..80: note = Artificially Synthesized Probe
  source 1..80: mol_type = other DNA
ataaagtgcttagctcagcactagacacaaaatgctgttattacagcctgccccttctcttgatgatttttttagaagta

SEQ ID NO: 51877 - DNA, 80 bp, synthetic construct
  misc_feature 1..80: note = Artificially Synthesized Probe
  source 1..80: mol_type = other DNA
ccagaagagttttggattttggcttttttcagatcttagaatatttgcattatacttctggctgagccatcgctaagcca

SEQ ID NO: 51878 - DNA, 80 bp, synthetic construct
  misc_feature 1..80: note = Artificially Synthesized Probe
  source 1..80: mol_type = other DNA
aattatccaggcgtgatggtgcacacctgtaatcccagttaatcaggaggttgaggcaggagaatcgcttgaactgggga

SEQ ID NO: 51879 - DNA, 80 bp, synthetic construct; identical to SEQ ID NO: 24592
  misc_feature 1..80: note = Artificially Synthesized Probe
  source 1..80: mol_type = other DNA

SEQ ID NO: 51880 - DNA, 80 bp, synthetic construct
  misc_feature 1..80: note = Artificially Synthesized Probe
  source 1..80: mol_type = other DNA
acactcatagtttgccattttgctcttaccatgaatgccccctcgccaggtcattttggtcatctgtgatggtccagggt

SEQ ID NO: 51881 - DNA, 80 bp, synthetic construct
  misc_feature 1..80: note = Artificially Synthesized Probe
  source 1..80: mol_type = other DNA
ctgccagcttttctgttcgttgcattcccaggctgagttccttggttctcagaaatggaatgctatcttgaatcttagac

SEQ ID NO: 51882 - DNA, 80 bp, synthetic construct
  misc_feature 1..80: note = Artificially Synthesized Probe
  source 1..80: mol_type = other DNA
gcttctgtgtttgcttcacccagaaacctttgctgagcaccagttaccaccaccaaattgaatgcaggttgttaacacct

SEQ ID NO: 51883 - DNA, 80 bp, synthetic construct
  misc_feature 1..80: note = Artificially Synthesized Probe
  source 1..80: mol_type = other DNA
tcaattgtttgttccttcacattagtagtagtattccactgtatgatatatcacagtttatctactcacctaatgaagga

SEQ ID NO: 51884 - DNA, 80 bp, synthetic construct; identical to SEQ ID NO: 24593
  misc_feature 1..80: note = Artificially Synthesized Probe
  source 1..80: mol_type = other DNA

SEQ ID NO: 51885 - DNA, 80 bp, synthetic construct
  misc_feature 1..80: note = Artificially Synthesized Probe
  source 1..80: mol_type = other DNA
caagcagagcctgcctggagctgtgtggttgactcctgaaccctcaggtctttcacagacacctccaggtgaggctctgc

SEQ ID NO: 51886 - DNA, 80 bp, synthetic construct
  misc_feature 1..80: note = Artificially Synthesized Probe
  source 1..80: mol_type = other DNA
gggctcttctttcctcgatgagaatgatagtgatatgaaagcagaattattgtgttaatgaggtgagggatgcagtgctg

SEQ ID NO: 51887 - DNA, 80 bp, synthetic construct
  misc_feature 1..80: note = Artificially Synthesized Probe
  source 1..80: mol_type = other DNA
tctgtcctgagagacctttgttgcctgcctgaggctgccctccctcccaaggttggcactgctgcacacaggctgcccct

SEQ ID NO: 51888 - DNA, 80 bp, synthetic construct; identical to SEQ ID NO: 24594
  misc_feature 1..80: note = Artificially Synthesized Probe
  source 1..80: mol_type = other DNA

SEQ ID NO: 51889 - DNA, 80 bp, synthetic construct
  misc_feature 1..80: note = Artificially Synthesized Probe
  source 1..80: mol_type = other DNA
ctgctgcaaggggttcaaggcagagggggttggttataagatgttccctggagccaataatcttgaatgaaaacaaagct

SEQ ID NO: 51890 - DNA, 80 bp, synthetic construct
  misc_feature 1..80: note = Artificially Synthesized Probe
  source 1..80: mol_type = other DNA
aagacaaatactggatgattccactcagatgaggtatgaggagtagcagcctggcagcgctagcccaatcagaccccatt

SEQ ID NO: 51891 - DNA, 80 bp, synthetic construct
  misc_feature 1..80: note = Artificially Synthesized Probe
  source 1..80: mol_type = other DNA
agcctgggtaaaggacaggtcagctgggtgtgaacccccaccccttgcccccctgttgtgagtacagtatccccacctgc

SEQ ID NO: 51892 - DNA, 80 bp, synthetic construct; identical to SEQ ID NO: 24595
  misc_feature 1..80: note = Artificially Synthesized Probe
  source 1..80: mol_type = other DNA

SEQ ID NO: 51893 - DNA, 80 bp, synthetic construct
  misc_feature 1..80: note = Artificially Synthesized Probe
  source 1..80: mol_type = other DNA
atagtttgcaaaaggagaacttgatatttttctgaacttaggaatcttgattttgtatttcagtctgtctgcctcatggt

SEQ ID NO: 51894 - DNA, 80 bp, synthetic construct
  misc_feature 1..80: note = Artificially Synthesized Probe
  source 1..80: mol_type = other DNA
gttgaaccattttccattcctatcagcagtgtatgattcttccagttgctctgtgttggcattatcagtttttaaaaaaa

SEQ ID NO: 51895 - DNA, 80 bp, synthetic construct
  misc_feature 1..80: note = Artificially Synthesized Probe
  source 1..80: mol_type = other DNA
tgtttaagcttggaaaagagaatgaaactacccacaactgtcccacaagccatgacatggcagaagtgtttgtgtttcgt

SEQ ID NO: 51896 - DNA, 80 bp, synthetic construct; identical to SEQ ID NO: 24596
  misc_feature 1..80: note = Artificially Synthesized Probe
  source 1..80: mol_type = other DNA

SEQ ID NO: 51897 - DNA, 80 bp, synthetic construct
  misc_feature 1..80: note = Artificially Synthesized Probe
  source 1..80: mol_type = other DNA
ggtgtgactagaatctgctggaagctggtgtgactagaatctgctggaagctggtgtgactagaatctgctggaagctgg

SEQ ID NO: 51898 - DNA, 80 bp, synthetic construct
  misc_feature 1..80: note = Artificially Synthesized Probe
  source 1..80: mol_type = other DNA
gggaggccaaggcgggcaaatcacttgaggtcaggagtttgagaccagcctggccaacatggcaaaaccccgtctcaact

SEQ ID NO: 51899 - DNA, 80 bp, synthetic construct
  misc_feature 1..80: note = Artificially Synthesized Probe
  source 1..80: mol_type = other DNA
tcaaaaaaaaaaaaaaaagctaaactaaaaaaacaaaaaactgtcgcaaggttgtggaagaagacaggctccatgtggcc

SEQ ID NO: 51900 - DNA, 80 bp, synthetic construct
  misc_feature 1..80: note = Artificially Synthesized Probe
  source 1..80: mol_type = other DNA
cacaagggaggaggagtgtggtaccctggaccagccgcggtgcctgtcggggctggccattgatggctgcccctcatcaa

SEQ ID NO: 51901 - DNA, 80 bp, synthetic construct; identical to SEQ ID NO: 24597
  misc_feature 1..80: note = Artificially Synthesized Probe
  source 1..80: mol_type = other DNA

SEQ ID NO: 51902 - DNA, 80 bp, synthetic construct
  misc_feature 1..80: note = Artificially Synthesized Probe
  source 1..80: mol_type = other DNA
ccacagatagtcattcatcctgcttctgttctgattctctaatgttgtgaatcaggtgagaaagtttgcacatctatcat

SEQ ID NO: 51903 - DNA, 80 bp, synthetic construct
  misc_feature 1..80: note = Artificially Synthesized Probe
  source 1..80: mol_type = other DNA
atttgggaccaaataattctctgttgtggggatgttgtgtgtgcactgcaggactttcagcaatatccctggtctctacc

SEQ ID NO: 51904 - DNA, 80 bp, synthetic construct; identical to SEQ ID NO: 24598
  misc_feature 1..80: note = Artificially Synthesized Probe
  source 1..80: mol_type = other DNA

SEQ ID NO: 51905 - DNA, 80 bp, synthetic construct
  misc_feature 1..80: note = Artificially Synthesized Probe
  source 1..80: mol_type = other DNA
aacagacattctaattataatttttcatgattagaagtatcaggaatggttggctttaagtctaccaggtctagctatgg

SEQ ID NO: 51906 - DNA, 80 bp, synthetic construct
  misc_feature 1..80: note = Artificially Synthesized Probe
  source 1..80: mol_type = other DNA
tgccaaaatttgtataacataaaatttaccattgtaaccattttaagtgaacaattcagtggcataaagaacattcacaa

SEQ ID NO: 51907 - DNA, 80 bp, synthetic construct
  misc_feature 1..80: note = Artificially Synthesized Probe
  source 1..80: mol_type = other DNA
ctggcctatagaacactactccaagggctcccagccaattccccttcacacagggcaagaggtcctgggtggctccaaag

SEQ ID NO: 51908 - DNA, 80 bp, synthetic construct
  misc_feature 1..80: note = Artificially Synthesized Probe
  source 1..80: mol_type = other DNA
ctgtggagccctactggtcttgcagataggctggcactgctccaggatccccaccagacagtttgcacacctggagtcac

SEQ ID NO: 51909 - DNA, 80 bp, synthetic construct
  misc_feature 1..80: note = Artificially Synthesized Probe
  source 1..80: mol_type = other DNA
catcctccaggccaccatacaatagtgacagatggcacctgggatcaggtctgccttacggctttgcacatcttgggaca

SEQ ID NO: 51910 - DNA, 80 bp, synthetic construct; identical to SEQ ID NO: 24599
  misc_feature 1..80: note = Artificially Synthesized Probe
  source 1..80: mol_type = other DNA

SEQ ID NO: 51911 - DNA, 80 bp, synthetic construct
  misc_feature 1..80: note = Artificially Synthesized Probe
  source 1..80: mol_type = other DNA
tcccattttatgaaaggtcagactgctcagcttcttttcattcttcctgtgggcaactattgcacccttttctgtgagct

SEQ ID NO: 51912 - DNA, 80 bp, synthetic construct
  misc_feature 1..80: note = Artificially Synthesized Probe
  source 1..80: mol_type = other DNA
gagcatcagggggaaaggtgaggtggcaccaggtagagagacctccagggaccaaggtgggaacaagtgtggctggaggg

SEQ ID NO: 51913 - DNA, 80 bp, synthetic construct; identical to SEQ ID NO: 24600
  misc_feature 1..80: note = Artificially Synthesized Probe
  source 1..80: mol_type = other DNA

SEQ ID NO: 51914 - DNA, 80 bp, synthetic construct
  misc_feature 1..80: note = Artificially Synthesized Probe
  source 1..80: mol_type = other DNA
aggcctgagagagggctggccatgatggctggctcagtgttcagcacacagcacatgcccaggcggatttgtaaagtaac

SEQ ID NO: 51915 - DNA, 80 bp, synthetic construct
  misc_feature 1..80: note = Artificially Synthesized Probe
  source 1..80: mol_type = other DNA
attctgtgaggtgaggggttatggcactgtgctcaacccaggaggcatcatgttgccttacctcactacaccacgaagct

SEQ ID NO: 51916 - DNA, 80 bp, synthetic construct
  misc_feature 1..80: note = Artificially Synthesized Probe
  source 1..80: mol_type = other DNA
ctatctggggcctcaggcatgaatcagctaagggcccccataagctgtctggacactttgtgccttagcattgatcagct

SEQ ID NO: 51917 - DNA, 80 bp, synthetic construct
  misc_feature 1..80: note = Artificially Synthesized Probe
  source 1..80: mol_type = other DNA
gtatatggcctattttacttaacatagtgttttcaaggttcattcatgttatagagcatgtatcacaatttcattccttt

SEQ ID NO: 51918 - DNA, 80 bp, synthetic construct
  misc_feature 1..80: note = Artificially Synthesized Probe
  source 1..80: mol_type = other DNA
ctttctgctccaatctgggggacaaactggcttggtgcaggtggagtggtggaaaacaaaccagagaggaatgtccattc

SEQ ID NO: 51919 - DNA, 80 bp, synthetic construct; identical to SEQ ID NO: 24601
  misc_feature 1..80: note = Artificially Synthesized Probe
  source 1..80: mol_type = other DNA

SEQ ID NO: 51920 - DNA, 80 bp, synthetic construct
  misc_feature 1..80: note = Artificially Synthesized Probe
  source 1..80: mol_type = other DNA
gcttgcagaaccctcatctagtacaaagcctcatacatgaggggaaacagactgagagactgacatctatgtcaagtcag

SEQ ID NO: 51921 - DNA, 80 bp, synthetic construct
  misc_feature 1..80: note = Artificially Synthesized Probe
  source 1..80: mol_type = other DNA
gccctgggtcatgaagtcacagctggaggagtggtctgccacagcattgaggccagggccatagaggagagcaagggtat

SEQ ID NO: 51922 - DNA, 80 bp, synthetic construct
  misc_feature 1..80: note = Artificially Synthesized Probe
  source 1..80: mol_type = other DNA
aggtgtctgggcacttgcttcagtgagtcccttatccccataacagctttgtgcaaaccacagcccaggtatcaccttct

SEQ ID NO: 51923 - DNA, 80 bp, synthetic construct
  misc_feature 1..80: note = Artificially Synthesized Probe
  source 1..80: mol_type = other DNA
gggcagatcacttgacgtcaggagttcgagaccagcctgggcaacgtggtgaaaccccatctctactaaaaatacaaaaa

SEQ ID NO: 51924 - DNA, 80 bp, synthetic construct; identical to SEQ ID NO: 24602
  misc_feature 1..80: note = Artificially Synthesized Probe
  source 1..80: mol_type = other DNA

SEQ ID NO: 51925 - DNA, 80 bp, synthetic construct
  misc_feature 1..80: note = Artificially Synthesized Probe
  source 1..80: mol_type = other DNA
ccctgctctactcactaatctttgagctaatctttggttttattccttttaatgaagcatacctgaagccccaccccttt

SEQ ID NO: 51926 - DNA, 80 bp, synthetic construct
  misc_feature 1..80: note = Artificially Synthesized Probe
  source 1..80: mol_type = other DNA
cccgggaagcaggctttccaaagcctggctgccaggcattgctggggacgtttttctgtttgttttgctttgttattttt

SEQ ID NO: 51927 - DNA, 80 bp, synthetic construct
  misc_feature 1..80: note = Artificially Synthesized Probe
  source 1..80: mol_type = other DNA
agctgggattagaggcgtgtgccaccatgccaggctaattcttgtatttttagtagagatggggcttctccatgttggtc

SEQ ID NO: 51928 - DNA, 80 bp, synthetic construct; identical to SEQ ID NO: 24603
  misc_feature 1..80: note = Artificially Synthesized Probe
  source 1..80: mol_type = other DNA

SEQ ID NO: 51929 - DNA, 80 bp, synthetic construct
  misc_feature 1..80: note = Artificially Synthesized Probe
  source 1..80: mol_type = other DNA
tcagcagacgggaagctcacagtgaatggagcctcctacatacagccacagggccctccctgcccagtgttcaggagcag

SEQ ID NO: 51930 - DNA, 80 bp, synthetic construct; identical to SEQ ID NO: 24484
  misc_feature 1..80: note = Artificially Synthesized Probe
  source 1..80: mol_type = other DNA

SEQ ID NO: 51931 - DNA, 80 bp, synthetic construct
  misc_feature 1..80: note = Artificially Synthesized Probe
  source 1..80: mol_type = other DNA
ctggccagcagtgggcagaatgggaccaggtgggacaagcttgcaggccaagaagtgagagggctttcggagcagctgga

SEQ ID NO: 51932 - DNA, 80 bp, synthetic construct; identical to SEQ ID NO: 24604
  misc_feature 1..80: note = Artificially Synthesized Probe
  source 1..80: mol_type = other DNA

SEQ ID NO: 51933 - DNA, 80 bp, synthetic construct
  misc_feature 1..80: note = Artificially Synthesized Probe
  source 1..80: mol_type = other DNA
ccagagatcactgacctaagcactgtggccagagtccagccctccgagcctaaagcagctgtaccactggccgtgaataa

SEQ ID NO: 51934 - DNA, 80 bp, synthetic construct
  misc_feature 1..80: note = Artificially Synthesized Probe
  source 1..80: mol_type = other DNA
tctgtcagtctccaccttgaggagtcaaagactacactcctaaaccagtggtgctgggccagagatcagttctgaaaatg

SEQ ID NO: 51935 - DNA, 80 bp, synthetic construct
  misc_feature 1..80: note = Artificially Synthesized Probe
  source 1..80: mol_type = other DNA
ttcaacctacttcttgtttccccagaacctccagtgggcccgcgacgtgttgctaggcagcagtatcccgtggcaacaac

SEQ ID NO: 51936 - DNA, 80 bp, synthetic construct
  misc_feature 1..80: note = Artificially Synthesized Probe
  source 1..80: mol_type = other DNA
gcatgaattgaccccctaggtgggtgttcccagggcctcaagtttgcggcatcctcagagggcaggcagggtggtacagt

SEQ ID NO: 51937 - DNA, 80 bp, synthetic construct; identical to SEQ ID NO: 24605
  misc_feature 1..80: note = Artificially Synthesized Probe
  source 1..80: mol_type = other DNA

SEQ ID NO: 51938 - DNA, 80 bp, synthetic construct
  misc_feature 1..80: note = Artificially Synthesized Probe
  source 1..80: mol_type = other DNA
atcccagctactcaggaagctgaggcaggagaattgcttgagcccgggaggtggaggttgcggtgagccgagatcatgcc

SEQ ID NO: 51939 - DNA, 80 bp, synthetic construct
  misc_feature 1..80: note = Artificially Synthesized Probe
  source 1..80: mol_type = other DNA
cctggccaacatggtgaaaccctgtctctactaaaatacaaaaattagctgggcatggtggcaggcacctgtaatcccag

SEQ ID NO: 51940 - DNA, 80 bp, synthetic construct
  misc_feature 1..80: note = Artificially Synthesized Probe
  source 1..80: mol_type = other DNA
ccctgatattgcgtgtcaggtggagacttactccttgagcagggcagggccaatcacctaggcctgcctgcctctcatcc

SEQ ID NO: 51941 - DNA, 80 bp, synthetic construct
  misc_feature 1..80: note = Artificially Synthesized Probe
  source 1..80: mol_type = other DNA
cctggatgactaatttacaattccctgataagcatcttatgcacttacaggtgtttttatatcttctttagagaaaatgt

SEQ ID NO: 51942 - DNA, 80 bp, synthetic construct; identical to SEQ ID NO: 24606
  misc_feature 1..80: note = Artificially Synthesized Probe
  source 1..80: mol_type = other DNA

SEQ ID NO: 51943 - DNA, 80 bp, synthetic construct
  misc_feature 1..80: note = Artificially Synthesized Probe
  source 1..80: mol_type = other DNA
gtcttctggggtcagagtaggagcttgagatcctgaaagccctgcatctgcccaccctctctgttttggtattttataga

SEQ ID NO: 51944 - DNA, 80 bp, synthetic construct
  misc_feature 1..80: note = Artificially Synthesized Probe
  source 1..80: mol_type = other DNA
acaagctagtgcacatagatgcgcataaaaggcaaaagtgcacacacttctgccccttgtattttttcgctaaacaatat

SEQ ID NO: 51945 - DNA, 80 bp, synthetic construct; identical to SEQ ID NO: 24607
  misc_feature 1..80: note = Artificially Synthesized Probe
  source 1..80: mol_type = other DNA

SEQ ID NO: 51946 - DNA, 80 bp, synthetic construct
  misc_feature 1..80: note = Artificially Synthesized Probe
  source 1..80: mol_type = other DNA
tttttgtattttttttttttttttttttttttagagacaaggtttcaccatgttggccaggatggtctcgaactcctggc

SEQ ID NO: 51947 - DNA, 80 bp, synthetic construct
  misc_feature 1..80: note = Artificially Synthesized Probe
  source 1..80: mol_type = other DNA
acacacacacagaaaggctcagtgcttcacctatgaagcactgccttgactgtgacattacgttaattttaacttctatg

SEQ ID NO: 51948 - DNA, 80 bp, synthetic construct
  misc_feature 1..80: note = Artificially Synthesized Probe
  source 1..80: mol_type = other DNA
ttaatttccctgtcctgggttcctcaccttgaaagtgggcttctattacctggcttgaagagtaactgtaggaatcaagt

SEQ ID NO: 51949 - DNA, 80 bp, synthetic construct; identical to SEQ ID NO: 24608
  misc_feature 1..80: note = Artificially Synthesized Probe
  source 1..80: mol_type = other DNA

SEQ ID NO: 51950 - DNA, 80 bp, synthetic construct
  misc_feature 1..80: note = Artificially Synthesized Probe
  source 1..80: mol_type = other DNA
tgtgggagggaaggctggtacagcctcatgtaggcctggcacataggcaatgccatccctgcacctggaagcccctgaag

SEQ ID NO: 51951 - DNA, 80 bp, synthetic construct
  misc_feature 1..80: note = Artificially Synthesized Probe
  source 1..80: mol_type = other DNA
gggctacttgtgctccttgagctatgcctagtgtccagtatgtcaagaaatgctgggcagttcctgaatgctttcagcaa

SEQ ID NO: 51952 - DNA, 80 bp, synthetic construct
  misc_feature 1..80: note = Artificially Synthesized Probe
  source 1..80: mol_type = other DNA
tagcctgcactggggtttactgcttagtctagtgggaagcaaaggcagtaggtgggtgctggcccttgagaggagataaa

SEQ ID NO: 51953 - DNA, 80 bp, synthetic construct
  misc_feature 1..80: note = Artificially Synthesized Probe
  source 1..80: mol_type = other DNA
tgcctgccaccatgcccagctaatttttttatttttagtagagatggggtttcaccatgttggccaggctggtctcgaac

SEQ ID NO: 51954 - DNA, 80 bp, synthetic construct
  misc_feature 1..80: note = Artificially Synthesized Probe
  source 1..80: mol_type = other DNA
gaaaattgtgagagttgtagtttaggaaaaattcaaaccccttttcctttgttctcacaccaacacagcagtcaacacaa

SEQ ID NO: 51955 - DNA, 80 bp, synthetic construct; identical to SEQ ID NO: 24609
  misc_feature 1..80: note = Artificially Synthesized Probe
  source 1..80: mol_type = other DNA

SEQ ID NO: 51956 - DNA, 80 bp, synthetic construct
  misc_feature 1..80: note = Artificially Synthesized Probe
  source 1..80: mol_type = other DNA
ctcagagaaacacatttcccagtttattataagggatgttataggagggtacagggaaggctctatcctcctgtaattgt

SEQ ID NO: 51957 - DNA, 80 bp, synthetic construct
  misc_feature 1..80: note = Artificially Synthesized Probe
  source 1..80: mol_type = other DNA
cccaacaaggcctgtctgttcagattcttcttgccctctctgcagcattccttcctccaggatgtggggcaggactctta

SEQ ID NO: 51958 - DNA, 80 bp, synthetic construct; identical to SEQ ID NO: 24610
  misc_feature 1..80: note = Artificially Synthesized Probe
  source 1..80: mol_type = other DNA

SEQ ID NO: 51959 - DNA, 80 bp, synthetic construct
  misc_feature 1..80: note = Artificially Synthesized Probe
  source 1..80: mol_type = other DNA
gtaatcccagcactttggtaggcagaggtgggtggaccacctgaggtcagaagttcgagaccagcctggcgaaaccccat

SEQ ID NO: 51960 - DNA, 80 bp, synthetic construct
  misc_feature 1..80: note = Artificially Synthesized Probe
  source 1..80: mol_type = other DNA
ctccgtgtcaaaaaaaaaaaaaaagtgtgcgtgtgtgctttttagcgactttgctttttccatgacaccaagtcttggag

SEQ ID NO: 51961 - DNA, 80 bp, synthetic construct
  misc_feature 1..80: note = Artificially Synthesized Probe
  source 1..80: mol_type = other DNA
aggagatgcccacatgaatatttgtggattaatttcattcatccctttcccctcagcagttggtctccaagctcattctc

SEQ ID NO: 51962 - DNA, 80 bp, synthetic construct
  misc_feature 1..80: note = Artificially Synthesized Probe
  source 1..80: mol_type = other DNA
gctacagggcatgtaggagggacagggagctgggctctcccatgcagggtggggtgctgctcagccagaaagggggcagg

SEQ ID NO: 51963 - DNA, 80 bp, synthetic construct; identical to SEQ ID NO: 24611
  misc_feature 1..80: note = Artificially Synthesized Probe
  source 1..80: mol_type = other DNA

SEQ ID NO: 51964 - DNA, 80 bp, synthetic construct
  misc_feature 1..80: note = Artificially Synthesized Probe
  source 1..80: mol_type = other DNA
aggaaagcaggcaccaagctaggtggtaggtgctgctggggtggctacccacaccatggaggctgagggtttgtgtctgg

SEQ ID NO: 51965 - DNA, 80 bp, synthetic construct
  misc_feature 1..80: note = Artificially Synthesized Probe
  source 1..80: mol_type = other DNA
attaggtatatgatttacaaatattttcttccattgtgtgtgttgtcttttcactttttgatagtgtcctttgcataaaa

SEQ ID NO: 51966 - DNA, 80 bp, synthetic construct
  misc_feature 1..80: note = Artificially Synthesized Probe
  source 1..80: mol_type = other DNA
gttctccttccttccccaaaatgtttgcttattttagcaggcagggttttttcttgtttcaacccagtttccagcctctg

SEQ ID NO: 51967 - DNA, 80 bp, synthetic construct
  misc_feature 1..80: note = Artificially Synthesized Probe
  source 1..80: mol_type = other DNA
tgctcaggtgggcagcccccaggtcccaagatcactgagaagagcacagattttgggcacaggcaggcacagctcccagc

SEQ ID NO: 51968 - DNA, 80 bp, synthetic construct; identical to SEQ ID NO: 24612
  misc_feature 1..80: note = Artificially Synthesized Probe
  source 1..80: mol_type = other DNA

SEQ ID NO: 51969 - DNA, 80 bp, synthetic construct
  misc_feature 1..80: note = Artificially Synthesized Probe
  source 1..80: mol_type = other DNA
tctggttgtcctggtggtctacctcccctcttcctagcggataggtggcttttggttttccactattagaaaaagaatgc

SEQ ID NO: 51970 - DNA, 80 bp, synthetic construct
  misc_feature 1..80: note = Artificially Synthesized Probe
  source 1..80: mol_type = other DNA
ccccctcccaggactcagaaccacagatgactttcattttggcctatctgtggagtgtgccaaaaaaccccaggtggttt

SEQ ID NO: 51971 - DNA, 80 bp, synthetic construct; identical to SEQ ID NO: 24613
  misc_feature 1..80: note = Artificially Synthesized Probe
  source 1..80: mol_type = other DNA

SEQ ID NO: 51972 - DNA, 80 bp, synthetic construct
  misc_feature 1..80: note = Artificially Synthesized Probe
  source 1..80: mol_type = other DNA
cagcaagaatcagtcatgcccattgtactttaattcgccaccagttggttgtgtaaccttggaggaaccccctccctgca

SEQ ID NO: 51973 - DNA, 80 bp, synthetic construct
  misc_feature 1..80: note = Artificially Synthesized Probe
  source 1..80: mol_type = other DNA
ctaggacagcattgccattgccctcccaaaacctctcctagctcagcaggcagggagtgcctagtgactgaattcctctc

SEQ ID NO: 51974 - DNA, 80 bp, synthetic construct
  misc_feature 1..80: note = Artificially Synthesized Probe
  source 1..80: mol_type = other DNA
cacctccctgaccagccccagcctgacttgccccttctctctctccatccctctggcttgtaagagaggtaccttccctg

SEQ ID NO: 51975 - DNA, 80 bp, synthetic construct; identical to SEQ ID NO: 24614
  misc_feature 1..80: note = Artificially Synthesized Probe
  source 1..80: mol_type = other DNA

SEQ ID NO: 51976 - DNA, 80 bp, synthetic construct; identical to SEQ ID NO: 24485
  misc_feature 1..80: note = Artificially Synthesized Probe
  source 1..80: mol_type = other DNA

SEQ ID NO: 51977 - DNA, 80 bp, synthetic construct
  misc_feature 1..80: note = Artificially Synthesized Probe
  source 1..80: mol_type = other DNA
gccaggccctgggccagctgtgtggtccaaaagggctcaggtccacaggccagcctgcaagcctggattagtagtcacct

SEQ ID NO: 51978 - DNA, 80 bp, synthetic construct
  misc_feature 1..80: note = Artificially Synthesized Probe
  source 1..80: mol_type = other DNA
ccagctgtcctagacaggagtgttatctgaatggcccattggctggatggggaggatggaattaggtagcagtgggcagg

SEQ ID NO: 51979 - DNA, 80 bp, synthetic construct
  misc_feature 1..80: note = Artificially Synthesized Probe
  source 1..80: mol_type = other DNA
tggctggctagctgggttgtaccatttttccttggtagcctacaggcgtgtcctgggctggggctcttgaggctgagagc

SEQ ID NO: 51980 - DNA, 80 bp, synthetic construct; identical to SEQ ID NO: 24615
  misc_feature 1..80: note = Artificially Synthesized Probe
  source 1..80: mol_type = other DNA

SEQ ID NO: 51981 - DNA, 80 bp, synthetic construct
  misc_feature 1..80: note = Artificially Synthesized Probe
  source 1..80: mol_type = other DNA
tctgggtgccgggagagaatgctgccaaagggatgcttgtcaagtgcttgtcttctgcagcagcaattgccagtattcct

SEQ ID NO: 51982 - DNA, 80 bp, synthetic construct
  misc_feature 1..80: note = Artificially Synthesized Probe
  source 1..80: mol_type = other DNA
tgtcgttggaaattcagaggtcacatctaagctctctgttccagcagtgatgtctgctgtggacatgtgatggggaggga

SEQ ID NO: 51983 - DNA, 80 bp, synthetic construct
  misc_feature 1..80: note = Artificially Synthesized Probe
  source 1..80: mol_type = other DNA
ccactaagccattagagaggcccactctcaaggggtgcccaggtccctaggggagatgatcaggtaaacagagcacatga

SEQ ID NO: 51984 - DNA, 80 bp, synthetic construct; identical to SEQ ID NO: 24616
  misc_feature 1..80: note = Artificially Synthesized Probe
  source 1..80: mol_type = other DNA

SEQ ID NO: 51985 - DNA, 80 bp, synthetic construct
  misc_feature 1..80: note = Artificially Synthesized Probe
  source 1..80: mol_type = other DNA
ggagacaggcctgcccctcctggagcacaggccccatcacctaagtgagcagacagtgtgagaatgacaggagagtgacg

SEQ ID NO: 51986 - DNA, 80 bp, synthetic construct
  misc_feature 1..80: note = Artificially Synthesized Probe
  source 1..80: mol_type = other DNA
ctggaccctgttttcctgggccaggtgcagtttggtctttctcacaaagaaagggggactgaattgaggagcgtcttcca

SEQ ID NO: 51987 - DNA, 80 bp, synthetic construct
  misc_feature 1..80: note = Artificially Synthesized Probe
  source 1..80: mol_type = other DNA
gaataatttttctacccctttctctcttctccctcagatactcatatgatacatacgttagttttctagatggtatcccc

SEQ ID NO: 51988 - DNA, 80 bp, synthetic construct
  misc_feature 1..80: note = Artificially Synthesized Probe
  source 1..80: mol_type = other DNA
cacttctacatacaatggcttgttgaattctcataattcatgagatgtaggtagtgccattgtccctgcctcgcaaatta

SEQ ID NO: 51989 - DNA, 80 bp, synthetic construct
  misc_feature 1..80: note = Artificially Synthesized Probe
  source 1..80: mol_type = other DNA
ctgatgctcagatctgtcgtcccgtgtgtctctgcctggtgtgccaggcatgtggccctgggtctgcgtgcatgcatatg

SEQ ID NO: 51990 - DNA, 80 bp, synthetic construct; identical to SEQ ID NO: 24617
  misc_feature 1..80: note = Artificially Synthesized Probe
  source 1..80: mol_type = other DNA

SEQ ID NO: 51991 - DNA, 80 bp, synthetic construct
  misc_feature 1..80: note = Artificially Synthesized Probe
  source 1..80: mol_type = other DNA
gtcaggggatcaaaggaaacccagtcacataacagtgggaatcataggacagaaaagaaagaaaaaagtttaaattgagg

SEQ ID NO: 51992 - DNA, 80 bp, synthetic construct
  misc_feature 1..80: note = Artificially Synthesized Probe
  source 1..80: mol_type = other DNA
cagggaaaaaaggtcctgtttttaagagtcttaaaagagttagcaaacttgtgtggattctaaatgtatccccgagctct

SEQ ID NO: 51993 - DNA, 80 bp, synthetic construct
  misc_feature 1..80: note = Artificially Synthesized Probe
  source 1..80: mol_type = other DNA
agaagctacagtgtgtcctcaccagtaggagaggtcagtaggaggaagtacacacagaggagtggcagggacaaggccac

SEQ ID NO: 51994 - DNA, 80 bp, synthetic construct; identical to SEQ ID NO: 24618
  misc_feature 1..80: note = Artificially Synthesized Probe
  source 1..80: mol_type = other DNA

SEQ ID NO: 51995 - DNA, 80 bp, synthetic construct
  misc_feature 1..80: note = Artificially Synthesized Probe
  source 1..80: mol_type = other DNA
cacattcgctgaccatttatttcgcctgctcacatttgtttttgaattttcagttgtatttttagtcttcagaatttttg

SEQ ID NO: 51996 - DNA, 80 bp, synthetic construct
  misc_feature 1..80: note = Artificially Synthesized Probe
  source 1..80: mol_type = other DNA
ctaaggtcatatagccagtaagtggcagagcccagactgggaacccatgtcccttgggccagcctccatgccggagtttc

SEQ ID NO: 51997 - DNA, 80 bp, synthetic construct
  misc_feature 1..80: note = Artificially Synthesized Probe
  source 1..80: mol_type = other DNA
ggagctcgctgtttaacattcctgaatagaggagcatttttcagcatgaacttcatttcccaccacaagttatttttcag

SEQ ID NO: 51998 - DNA, 80 bp, synthetic construct
  misc_feature 1..80: note = Artificially Synthesized Probe
  source 1..80: mol_type = other DNA
ctccctgcttccctgcctccctccctccgttcctcccttccttccttccctccacctctccttccctcctctttcttttc

SEQ ID NO: 51999 - DNA, 80 bp, synthetic construct; identical to SEQ ID NO: 24619
  misc_feature 1..80: note = Artificially Synthesized Probe
  source 1..80: mol_type = other DNA

SEQ ID NO: 52000 - DNA, 80 bp, synthetic construct
  misc_feature 1..80: note = Artificially Synthesized Probe
  source 1..80: mol_type = other DNA
tcctgttctacatgctttgtcctcgtaggacactgctctgggcccaggtgcactgtctgcagggggaggtacacttgcaa

SEQ ID NO: 52001 - DNA, 80 bp, synthetic construct
  misc_feature 1..80: note = Artificially Synthesized Probe
  source 1..80: mol_type = other DNA
gcagggactacaagcaccccatcttgggaccaaaaggaggagggggttgctgttagaagtttccctcttgagagaagact

SEQ ID NO: 52002 - DNA, 80 bp, synthetic construct; identical to SEQ ID NO: 24620
  misc_feature 1..80: note = Artificially Synthesized Probe
  source 1..80: mol_type = other DNA

SEQ ID NO: 52003 - DNA, 80 bp, synthetic construct
  misc_feature 1..80: note = Artificially Synthesized Probe
  source 1..80: mol_type = other DNA
gacagcaggaggggctctgaagaccatagcacctggtcgaagtccagcataatcctctgatcttccctgtttgcctgctc

SEQ ID NO: 52004 - DNA, 80 bp, synthetic construct
  misc_feature 1..80: note = Artificially Synthesized Probe
  source 1..80: mol_type = other DNA
aatggaaaacagatgaaagggcagctgttccagcagaggcaggaagggccaggccccacccgctcaggctgcacccccct

SEQ ID NO: 52005 - DNA, 80 bp, synthetic construct
  misc_feature 1..80: note = Artificially Synthesized Probe
  source 1..80: mol_type = other DNA
ttctcttccctttttcctccctctgctttcccccaaccccacacacaacttttttcctatttggcaagtttgaccaagtt

SEQ ID NO: 52006 - DNA, 80 bp, synthetic construct
  misc_feature 1..80: note = Artificially Synthesized Probe
  source 1..80: mol_type = other DNA
cctgtgagcccggtgaggatcaccccagccagcctcaggctccaatcctgacctgagtggctttgagcaagctggtcagt

SEQ ID NO: 52007 - DNA, 80 bp, synthetic construct
  misc_feature 1..80: note = Artificially Synthesized Probe
  source 1..80: mol_type = other DNA
gtctggtcaggaatattttctatcaaattcagtttctcagggatggtttctatcaaattcctttttcctgtgaatgtgcc

SEQ ID NO: 52008 - DNA, 80 bp, synthetic construct; identical to SEQ ID NO: 24621
  misc_feature 1..80: note = Artificially Synthesized Probe
  source 1..80: mol_type = other DNA

SEQ ID NO: 52009 - DNA, 80 bp, synthetic construct
  misc_feature 1..80: note = Artificially Synthesized Probe
  source 1..80: mol_type = other DNA
tgatctctaaatatgagtaaatagtctagaattaagttaggtcagagcaggtagagcctcatggctcttccccgtggact

SEQ ID NO: 52010 - DNA, 80 bp, synthetic construct
  misc_feature 1..80: note = Artificially Synthesized Probe
  source 1..80: mol_type = other DNA
ggagaaagcacacagcaagaactggccaccataggtccagctctgagctttatttccagggaggagcctacctggctata

SEQ ID NO: 52011 - DNA, 80 bp, synthetic construct; identical to SEQ ID NO: 24622
  misc_feature 1..80: note = Artificially Synthesized Probe
  source 1..80: mol_type = other DNA

SEQ ID NO: 52012 - DNA, 80 bp, synthetic construct
  misc_feature 1..80: note = Artificially Synthesized Probe
  source 1..80: mol_type = other DNA
gaggtggctgccagtcctcagcaagtgtgcttgggagctctcctggaggcctgcgctgaccttgcagttggccagattgt

SEQ ID NO: 52013 - DNA, 80 bp, synthetic construct
  misc_feature 1..80: note = Artificially Synthesized Probe
  source 1..80: mol_type = other DNA
ctaggcagtgaaaccacctcggggtgtggaggcccgagtgctgtggctgctggagggagctctgagagcagcggactgca

SEQ ID NO: 52014 - DNA, 80 bp, synthetic construct
  misc_feature 1..80: note = Artificially Synthesized Probe
  source 1..80: mol_type = other DNA
tttggagttagacctaggctaaattctgctattctccagtgggagcatcttgtcagtgtgggagctggtccgaaccagtg

SEQ ID NO: 52015 - DNA, 80 bp, synthetic construct; identical to SEQ ID NO: 24623
  misc_feature 1..80: note = Artificially Synthesized Probe
  source 1..80: mol_type = other DNA

SEQ ID NO: 52016 - DNA, 80 bp, synthetic construct
  misc_feature 1..80: note = Artificially Synthesized Probe
  source 1..80: mol_type = other DNA
ctttatcgtgttctgaggccatggaaactatattctaaggggtttggaaacttattagcttagactaataagcctggtga

SEQ ID NO: 52017 - DNA, 80 bp, synthetic construct
  misc_feature 1..80: note = Artificially Synthesized Probe
  source 1..80: mol_type = other DNA
caaagatcctgtgcaggccgtccagggaggacacctggcacagaccatggcaactgccaccattcatggcctgaaaccac

SEQ ID NO: 52018 - DNA, 80 bp, synthetic construct
  misc_feature 1..80: note = Artificially Synthesized Probe
  source 1..80: mol_type = other DNA
gaatgtcagatgtggcttttctaagatccgggctcccctcctgagatgaaacagaagcagctcagcagtcttccaaagag

SEQ ID NO: 52019 - DNA, 80 bp, synthetic construct; identical to SEQ ID NO: 24486
  misc_feature 1..80: note = Artificially Synthesized Probe
  source 1..80: mol_type = other DNA

SEQ ID NO: 52020 - DNA, 80 bp, synthetic construct
  misc_feature 1..80: note = Artificially Synthesized Probe
  source 1..80: mol_type = other DNA
gcccaatctgttccccagattccctgcaacccctctctctccacaaaggtcctcacccagatatggtacccactgccaca

SEQ ID NO: 52021 - DNA, 80 bp, synthetic construct
  misc_feature 1..80: note = Artificially Synthesized Probe
  source 1..80: mol_type = other DNA
tattggtgactaagatcccagttctgcctcctggtgatggagaactgtggggacagccatcttggggcatcttttcccct

SEQ ID NO: 52022 - DNA, 80 bp, synthetic construct; identical to SEQ ID NO: 24624
  misc_feature 1..80: note = Artificially Synthesized Probe
  source 1..80: mol_type = other DNA

SEQ ID NO: 52023 - DNA, 80 bp, synthetic construct
  misc_feature 1..80: note = Artificially Synthesized Probe
  source 1..80: mol_type = other DNA
ggaaactggctgactcggaactgtaaggctcagcagtctctgctgtcacactctaggtagaaaaattgccagacacaggt

SEQ ID NO: 52024 - DNA, 80 bp, synthetic construct
  misc_feature 1..80: note = Artificially Synthesized Probe
  source 1..80: mol_type = other DNA
cggtggctcacgcctgtaatcccagcactttgggaggctgaggcaggtggatcatttgagattaggagtttgagaccagc

SEQ ID NO: 52025 - DNA, 80 bp, synthetic construct
  misc_feature 1..80: note = Artificially Synthesized Probe
  source 1..80: mol_type = other DNA
ctttaaatcttctgatagaagccacctgtgaaaacatcgatagcctgagaaggccaaaaccaaggcaagtatataccagt

SEQ ID NO: 52026 - DNA, 80 bp, synthetic construct; identical to SEQ ID NO: 24625
  misc_feature 1..80: note = Artificially Synthesized Probe
  source 1..80: mol_type = other DNA

SEQ ID NO: 52027 - DNA, 80 bp, synthetic construct
  misc_feature 1..80: note = Artificially Synthesized Probe
  source 1..80: mol_type = other DNA
accagccacgtgagccaaaggccaagcatatatttccaaggagggtgtgaccacttaagcaggctcctgctggcctgtgg

SEQ ID NO: 52028 - DNA, 80 bp, synthetic construct
  misc_feature 1..80: note = Artificially Synthesized Probe
  source 1..80: mol_type = other DNA
aattaggtcccacagggttttcctgcatagggtgctgacagtgccagtaagcgcagctctttgagcccagagaatcctca

SEQ ID NO: 52029 - DNA, 80 bp, synthetic construct
  misc_feature 1..80: note = Artificially Synthesized Probe
  source 1..80: mol_type = other DNA
gtttttacctgtcagacatggcagtatccatctgatggggctttggagagggctggcacagatacaggcacagagtgcag

SEQ ID NO: 52030 - DNA, 80 bp, synthetic construct
  misc_feature 1..80: note = Artificially Synthesized Probe
  source 1..80: mol_type = other DNA
ccctcctgctgtgatagccaggcactgggaccccaagctgcccagcccattctgagcctcagtgtgttcatctgtgctgg

SEQ ID NO: 52031 - DNA, 80 bp, synthetic construct; identical to SEQ ID NO: 24626
  misc_feature 1..80: note = Artificially Synthesized Probe
  source 1..80: mol_type = other DNA

SEQ ID NO: 52032 - DNA, 80 bp, synthetic construct
  misc_feature 1..80: note = Artificially Synthesized Probe
  source 1..80: mol_type = other DNA
cccagccatagtggccttattgctgtgtgactgcaccagtgtccagtgtttctgaacctgtccctatgtgtgtctgtcaa

SEQ ID NO: 52033 - DNA, 80 bp, synthetic construct
  misc_feature 1..80: note = Artificially Synthesized Probe
  source 1..80: mol_type = other DNA
tgatctctaggtaacccagcctccttcttctgtgtccccagcagcaagtccagtgcctggcagggagcagtatccctcga

SEQ ID NO: 52034 - DNA, 80 bp, synthetic construct; identical to SEQ ID NO: 24627
  misc_feature 1..80: note = Artificially Synthesized Probe
  source 1..80: mol_type = other DNA

SEQ ID NO: 52035 - DNA, 80 bp, synthetic construct
  misc_feature 1..80: note = Artificially Synthesized Probe
  source 1..80: mol_type = other DNA
cgtgcaggttggcccatccctgcctttccttggcctcccctcagctggagtgggaggagcagccaggagttggtagactg

SEQ ID NO: 52036 - DNA, 80 bp, synthetic construct
  misc_feature 1..80: note = Artificially Synthesized Probe
  source 1..80: mol_type = other DNA
aaatatcagcagcctctgctcatcaaacgctctgctggttgttttaagtgttcagtcaggttgcaaagttttgttttgtt

SEQ ID NO: 52037 - DNA, 80 bp, synthetic construct
  misc_feature 1..80: note = Artificially Synthesized Probe
  source 1..80: mol_type = other DNA
agcgaccctccctgagctctgcaaagctgctcatgtcctggggatggggtactgttgctgttcttggaatactgaaactg

SEQ ID NO: 52038 - DNA, 80 bp, synthetic construct
  misc_feature 1..80: note = Artificially Synthesized Probe
  source 1..80: mol_type = other DNA
attactccagcggtcttcactgcagcccccctgcccaactgtaacagcaaggacagctcggctgtggccagtcgtttccc

SEQ ID NO: 52039 - DNA, 80 bp, synthetic construct; identical to SEQ ID NO: 24628
  misc_feature 1..80: note = Artificially Synthesized Probe
  source 1..80: mol_type = other DNA

SEQ ID NO: 52040 - DNA, 80 bp, synthetic construct
  misc_feature 1..80: note = Artificially Synthesized Probe
  source 1..80: mol_type = other DNA
ccctagctccactgcacagatgccacggcggagccggcgggtaggaacttggcgggggcgggggccgggactggggccgg

SEQ ID NO: 52041 - DNA, 80 bp, synthetic construct
  misc_feature 1..80: note = Artificially Synthesized Probe
  source 1..80: mol_type = other DNA
tccccggcgcccccgcggaggaaatcggccggcggcggggtgctgcgcccccatgcccagggcgggctggcacccggttc

SEQ ID NO: 52042 - DNA, 80 bp, synthetic construct
  misc_feature 1..80: note = Artificially Synthesized Probe
  source 1..80: mol_type = other DNA
agagcaactttgcggcggaaggcgccgacgaggagctgtgccgtgccgctcttggggatggtgagctggccgcccggccg

SEQ ID NO: 52043 - DNA, 80 bp, synthetic construct; identical to SEQ ID NO: 24629
  misc_feature 1..80: note = Artificially Synthesized Probe
  source 1..80: mol_type = other DNA

SEQ ID NO: 52044 - DNA, 80 bp, synthetic construct
  misc_feature 1..80: note = Artificially Synthesized Probe
  source 1..80: mol_type = other DNA
ttacctgtggatggcgcggggaatcccttgccctcagtagccccgcctggagagacaggaccgcgttgtggggggtgggg

SEQ ID NO: 52045 - DNA, 80 bp, synthetic construct
  misc_feature 1..80: note = Artificially Synthesized Probe
  source 1..80: mol_type = other DNA
taggggaggaacaggactgcgggaggggccagaccctcagctcctcagggcatcaggaagatagggagctgctggtctgg

SEQ ID NO: 52046 - DNA, 80 bp, synthetic construct
  misc_feature 1..80: note = Artificially Synthesized Probe
  source 1..80: mol_type = other DNA
gataggcttagttcagctgtagtcttggctccctgcaggctggctgccctggaacaagtctctcccccagcaaggtgtaa

SEQ ID NO: 52047 - DNA, 80 bp, synthetic construct
  misc_feature 1..80: note = Artificially Synthesized Probe
  source 1..80: mol_type = other DNA
ctaatttatttttttgagacaggctttcactctgttgcccaggctggagtgcggtggcacaatctcagcttactgcagcc

SEQ ID NO: 52048 - DNA, 80 bp, synthetic construct; identical to SEQ ID NO: 24630
  misc_feature 1..80: note = Artificially Synthesized Probe
  source 1..80: mol_type = other DNA

SEQ ID NO: 52049 - DNA, 80 bp, synthetic construct
  misc_feature 1..80: note = Artificially Synthesized Probe
  source 1..80: mol_type = other DNA
caatgcagtctgctcctacaccctgtgcccactgctcttgggaatgggatgccaacaggctccccgccctcgcctgttcc

SEQ ID NO: 52050 - DNA, 80 bp, synthetic construct
  misc_feature 1..80: note = Artificially Synthesized Probe
  source 1..80: mol_type = other DNA
acgggcatacagggctggcttggggctaggagggcccaggaagacagaacactcacccactgtgtcagctcaggcaccca

SEQ ID NO: 52051 - DNA, 80 bp, synthetic construct
  misc_feature 1..80: note = Artificially Synthesized Probe
  source 1..80: mol_type = other DNA
gtagcccacttcactgtgcagtgaagggctctgtggtcattttgaatgatgtttttggtgatgtgggaaaatacatgtac

SEQ ID NO: 52052 - DNA, 80 bp, synthetic construct; identical to SEQ ID NO: 24631
  misc_feature 1..80: note = Artificially Synthesized Probe
  source 1..80: mol_type = other DNA

SEQ ID NO: 52053 - DNA, 80 bp, synthetic construct
  misc_feature 1..80: note = Artificially Synthesized Probe
  source 1..80: mol_type = other DNA
ggaatcagagtcaccttagggctacaccaagggcaaagggatgtggaggccaggatttgtgggttttacctggaatacta

SEQ ID NO: 52054 - DNA, 80 bp, synthetic construct
  misc_feature 1..80: note = Artificially Synthesized Probe
  source 1..80: mol_type = other DNA
gccttgaggtataggtgtgagccagagagatgcagccctcctgcctgcaccacccatctgctccaccctggggagcccag

SEQ ID NO: 52055 - DNA, 80 bp, synthetic construct
  misc_feature 1..80: note = Artificially Synthesized Probe
  source 1..80: mol_type = other DNA
gacaacctgggtgagctggagaggaaagagactgctgtgtgaagtagatgaccacctgcccagctgcctgcttgctccct

SEQ ID NO: 52056 - DNA, 80 bp, synthetic construct
  misc_feature 1..80: note = Artificially Synthesized Probe
  source 1..80: mol_type = other DNA
cgtggcatcccagctgggcatggccctgggaatgacagaatggggcagggggttgcatctgaatcctgtgggtgtggcag

SEQ ID NO: 52057 - DNA, 80 bp, synthetic construct; identical to SEQ ID NO: 24632
  misc_feature 1..80: note = Artificially Synthesized Probe
  source 1..80: mol_type = other DNA

SEQ ID NO: 52058 - DNA, 80 bp, synthetic construct; identical to SEQ ID NO: 24487
  misc_feature 1..80: note = Artificially Synthesized Probe
  source 1..80: mol_type = other DNA

SEQ ID NO: 52059 - DNA, 80 bp, synthetic construct
  misc_feature 1..80: note = Artificially Synthesized Probe
  source 1..80: mol_type = other DNA
aactcagtttccctctctggaaaatgaggggtgagttgattacatactcaggttgtccctcccagtgtagacataggatg

SEQ ID NO: 52060 - DNA, 80 bp, synthetic construct
  misc_feature 1..80: note = Artificially Synthesized Probe
  source 1..80: mol_type = other DNA
gcctgtgccctagaagtggaggaagctctagaaggagtcatgactgaaaggtggggtccgccaaggtgacagatagagct

SEQ ID NO: 52061 - DNA, 80 bp, synthetic construct
  misc_feature 1..80: note = Artificially Synthesized Probe
  source 1..80: mol_type = other DNA
gagtgaaaggctgtgtctggcagaaaagagagcccctgcccctccaggagtaagctcccctgagaccacagtgtgctgga

SEQ ID NO: 52062 - DNA, 80 bp, synthetic construct; identical to SEQ ID NO: 24633
  misc_feature 1..80: note = Artificially Synthesized Probe
  source 1..80: mol_type = other DNA

SEQ ID NO: 52063 - DNA, 80 bp, synthetic construct
  misc_feature 1..80: note = Artificially Synthesized Probe
  source 1..80: mol_type = other DNA
taacttgtatcaggcactcagcttagagtctggggcttcataaattattcagattgttaaaatctctctctgtgacctca

SEQ ID NO: 52064 - DNA, 80 bp, synthetic construct
  misc_feature 1..80: note = Artificially Synthesized Probe
  source 1..80: mol_type = other DNA
taagcaagcattatcccagccactgtggccatcagggaacccagccctggtgacaccagggcccaggaatcaagtggggc

SEQ ID NO: 52065 - DNA, 80 bp, synthetic construct
  misc_feature 1..80: note = Artificially Synthesized Probe
  source 1..80: mol_type = other DNA
cccatctatgatcctgcctctgcctttccctcagatgccgtgggggtgttggcctggtgctggctccctccacctgccct

SEQ ID NO: 52066 - DNA, 80 bp, synthetic construct; identical to SEQ ID NO: 24634
  misc_feature 1..80: note = Artificially Synthesized Probe
  source 1..80: mol_type = other DNA

SEQ ID NO: 52067 - DNA, 80 bp, synthetic construct
  misc_feature 1..80: note = Artificially Synthesized Probe
  source 1..80: mol_type = other DNA
ttctcatgggtctcttgctgcaaacacagaagcccagctccacctggtgtaggcagaaagccagttggcttgctaccacc

SEQ ID NO: 52068 - DNA, 80 bp, synthetic construct
  misc_feature 1..80: note = Artificially Synthesized Probe
  source 1..80: mol_type = other DNA
attaggaggggaagcctgactgggatcctggggcccatctgctggctgaattcccatggctggtggtgggtcttaggcct

SEQ ID NO: 52069 - DNA, 80 bp, synthetic construct
  misc_feature 1..80: note = Artificially Synthesized Probe
  source 1..80: mol_type = other DNA
tagtttactggttgttttggtggaaggactgaccttttcattcttgtagcagtgtcttttgtaaagcaagagtttttcaa

SEQ ID NO: 52070 - DNA, 80 bp, synthetic construct
  misc_feature 1..80: note = Artificially Synthesized Probe
  source 1..80: mol_type = other DNA
actagctggcctgaccctgcccgggaaacgtgcccttcagcacactgttaccagaaaaaggccaagcaagatgccagaat

SEQ ID NO: 52071 - DNA, 80 bp, synthetic construct; identical to SEQ ID NO: 24635
  misc_feature 1..80: note = Artificially Synthesized Probe
  source 1..80: mol_type = other DNA

SEQ ID NO: 52072 - DNA, 80 bp, synthetic construct
  misc_feature 1..80: note = Artificially Synthesized Probe
  source 1..80: mol_type = other DNA
atagaccctgtctgttggaaagcaggtgtcttttcataagctgcttcaggatccacatctgcatggtaggaagatgcagc

SEQ ID NO: 52073 - DNA, 80 bp, synthetic construct
  misc_feature 1..80: note = Artificially Synthesized Probe
  source 1..80: mol_type = other DNA
ggtctcaaggctgcgagttttaaactcctctcaggccttaacagctcagggctggaggtgccctggctttcctcccaggg

SEQ ID NO: 52074 - DNA, 80 bp, synthetic construct; identical to SEQ ID NO: 24636
  misc_feature 1..80: note = Artificially Synthesized Probe
  source 1..80: mol_type = other DNA

SEQ ID NO: 52075 - DNA, 80 bp, synthetic construct
  misc_feature 1..80: note = Artificially Synthesized Probe
  source 1..80: mol_type = other DNA
actaggacactgcagggaaccaggccctggagctagtgataggtagggggtgcccagtgctgcagcaggtaaagcaagga

SEQ ID NO: 52076 - DNA, 80 bp, synthetic construct
  misc_feature 1..80: note = Artificially Synthesized Probe
  source 1..80: mol_type = other DNA
tgagggcagagcctagccagagcttccctgcagcctgctttgactcagcagttccacctctaacaaatggtctggtggct

SEQ ID NO: 52077 - DNA, 80 bp, synthetic construct
  misc_feature 1..80: note = Artificially Synthesized Probe
  source 1..80: mol_type = other DNA
tgtcatttgctgccactcatgagaaggaagggggtggggatacacttctgtctccttgggacagtgagaggggtccaaga

SEQ ID NO: 52078 - DNA, 80 bp, synthetic construct
  misc_feature 1..80: note = Artificially Synthesized Probe
  source 1..80: mol_type = other DNA
cgggcagctttgcctggcacatgaaccgctccatcgtgctgctgctcaaggtgctggcccagctgcgggaccacagcacc

SEQ ID NO: 52079 - DNA, 80 bp, synthetic construct; identical to SEQ ID NO: 24637
  misc_feature 1..80: note = Artificially Synthesized Probe
  source 1..80: mol_type = other DNA

SEQ ID NO: 52080 - DNA, 80 bp, synthetic construct
  misc_feature 1..80: note = Artificially Synthesized Probe
  source 1..80: mol_type = other DNA
catgtgaatttttggtcaaggttctttttcttttttctttttgaatatggatgttcagttgttccggaaccatttgttgc

SEQ ID NO: 52081 - DNA, 80 bp, synthetic construct
  misc_feature 1..80: note = Artificially Synthesized Probe
  source 1..80: mol_type = other DNA
tgtagggaaaacagatgttcagaagatagctgtggttccccagacaaaggccagtaacagtggggtgagcgacaggggtg

SEQ ID NO: 52082 - DNA, 80 bp, synthetic construct
  misc_feature 1..80: note = Artificially Synthesized Probe
  source 1..80: mol_type = other DNA
gctggactgggcctcctcccatgcctgcactgtctcaccctctggctgtctcactcacctaccacttgccaggcgatgtg

SEQ ID NO: 52083 - DNA, 80 bp, synthetic construct; identical to SEQ ID NO: 24638
  misc_feature 1..80: note = Artificially Synthesized Probe
  source 1..80: mol_type = other DNA

SEQ ID NO: 52084 - DNA, 80 bp, synthetic construct
  misc_feature 1..80: note = Artificially Synthesized Probe
  source 1..80: mol_type = other DNA
ctcgaagacacgctgagcgagctcgcagaggtatgccacctgtgtcctcctctcctccacggcccatgaacacgcttcca

SEQ ID NO: 52085 - DNA, 80 bp, synthetic construct
  misc_feature 1..80: note = Artificially Synthesized Probe
  source 1..80: mol_type = other DNA
gtggtaatgaatgcacatgaattcagtgagtcatggatgcacttggtgattagtaagagccatagtgactccatgaaact

SEQ ID NO: 52086 - DNA, 80 bp, synthetic construct
  misc_feature 1..80: note = Artificially Synthesized Probe
  source 1..80: mol_type = other DNA
ccagggaggttaagcagccagcctacgaggtggggctgttgggagttgagccaggactgcctccaaagcttatgcctggt

SEQ ID NO: 52087 - DNA, 80 bp, synthetic construct
  misc_feature 1..80: note = Artificially Synthesized Probe
  source 1..80: mol_type = other DNA
atgcttggtggccctgggcaggtcccctcccataaaatgcccagagctgcccggagttcacgtcatggagtcaaagggga

SEQ ID NO: 52088 - DNA, 80 bp, synthetic construct; identical to SEQ ID NO: 24639
  misc_feature 1..80: note = Artificially Synthesized Probe
  source 1..80: mol_type = other DNA

SEQ ID NO: 52089 - DNA, 80 bp, synthetic construct
  misc_feature 1..80: note = Artificially Synthesized Probe
  source 1..80: mol_type = other DNA
cctgaggatggccaggagggcctcccccagccgaagaagccccctctggctgatggctcagggccagggcccgagccagg

SEQ ID NO: 52090 - DNA, 80 bp, synthetic construct
  misc_feature 1..80: note = Artificially Synthesized Probe
  source 1..80: mol_type = other DNA
acaccacccctgctgccaggtcgccccgcaagggaccggggccccgagagccggcccactgagctgtccctggaggagct

SEQ ID NO: 52091 - DNA, 80 bp, synthetic construct
  misc_feature 1..80: note = Artificially Synthesized Probe
  source 1..80: mol_type = other DNA
ggcaagacacttctgttggatgcctaccgtgtgtggcagcagggccagaagggtgtggcctatgacctgggccgtgtgga

SEQ ID NO: 52092 - DNA, 80 bp, synthetic construct
  misc_feature 1..80: note = Artificially Synthesized Probe
  source 1..80: mol_type = other DNA
aagtttttaaattgtgtagtgtgatccgtccaatattactattcttttcaaaactgggtcattctagtacctctctggcc

SEQ ID NO: 52093 - DNA, 80 bp, synthetic construct; identical to SEQ ID NO: 24640
  misc_feature 1..80: note = Artificially Synthesized Probe
  source 1..80: mol_type = other DNA

SEQ ID NO: 52094 - DNA, 80 bp, synthetic construct
  misc_feature 1..80: note = Artificially Synthesized Probe
  source 1..80: mol_type = other DNA
tttccttcaagacttctgtggctgtcatctaaagatggctgcagtgaccagagatccccttgtcattttgccttcttttt

SEQ ID NO: 52095 - DNA, 80 bp, synthetic construct
  misc_feature 1..80: note = Artificially Synthesized Probe
  source 1..80: mol_type = other DNA
cagtattccctctaatcatgtcagtttgcaatgcatcctacccccaactgccccatatcatatggaccttgggcactgaa

SEQ ID NO: 52096 - DNA, 80 bp, synthetic construct; identical to SEQ ID NO: 24641
  misc_feature 1..80: note = Artificially Synthesized Probe
  source 1..80: mol_type = other DNA

SEQ ID NO: 52097 - DNA, 80 bp, synthetic construct
  misc_feature 1..80: note = Artificially Synthesized Probe
  source 1..80: mol_type = other DNA
acagcagtggggacggctggctattcagcagagtctggggtgttggggggcacccgagccacagggcatgccccctacct

SEQ ID NO: 52098 - DNA, 80 bp, synthetic construct
  misc_feature 1..80: note = Artificially Synthesized Probe
  source 1..80: mol_type = other DNA
gacaggtaagcccaatttagcctgtgccagcctcatcttgcggagcctgctccatatcaaggccctaggatgcaggctga

SEQ ID NO: 52099 - DNA, 80 bp, synthetic construct
  misc_feature 1..80: note = Artificially Synthesized Probe
  source 1..80: mol_type = other DNA
ttttctgtaacaaggaggatggcccctagccagctgacctcaactgggaaggtcattccgtttggaacagaagtagaagc

SEQ ID NO: 52100 - DNA, 80 bp, synthetic construct
  misc_feature 1..80: note = Artificially Synthesized Probe
  source 1..80: mol_type = other DNA
agggaggaagcaaggcagcaacactcctgagtagggaagatggggttagtgcaaggtccaggccagggctggggaggggg

SEQ ID NO: 52101 - DNA, 80 bp, synthetic construct; identical to SEQ ID NO: 24488
  misc_feature 1..80: note = Artificially Synthesized Probe
  source 1..80: mol_type = other DNA

SEQ ID NO: 52102 - DNA, 80 bp, synthetic construct; identical to SEQ ID NO: 24642
  misc_feature 1..80: note = Artificially Synthesized Probe
  source 1..80: mol_type = other DNA

SEQ ID NO: 52103 - DNA, 80 bp, synthetic construct
  misc_feature 1..80: note = Artificially Synthesized Probe
  source 1..80: mol_type = other DNA
gctttgaccaagcaggctgtgggccagacgaggcatgctgtggggagtaggtgggcctggtccccagctaagggccagag

SEQ ID NO: 52104 - DNA, 80 bp, synthetic construct
  misc_feature 1..80: note = Artificially Synthesized Probe
  source 1..80: mol_type = other DNA
ggtggacatgggagtggtgatcactcaggagataggagggctgtttctgcttttgacgtccttaaaagatagacccacac

SEQ ID NO: 52105 - DNA, 80 bp, synthetic construct
  misc_feature 1..80: note = Artificially Synthesized Probe
  source 1..80: mol_type = other DNA
acagcctgggttatgggggtggccagagccaggggacccaggtccttacctttcaggttgcctgctgctgggcgacgcca

SEQ ID NO: 52106 - DNA, 80 bp, synthetic construct; identical to SEQ ID NO: 24643
  misc_feature 1..80: note = Artificially Synthesized Probe
  source 1..80: mol_type = other DNA

SEQ ID NO: 52107 - DNA, 80 bp, synthetic construct
  misc_feature 1..80: note = Artificially Synthesized Probe
  source 1..80: mol_type = other DNA
gagcacagggacactgcactcaccttcctccagcgtgtctgctcacgctgccagctaggctgctacaacaccactggtat

SEQ ID NO: 52108 - DNA, 80 bp, synthetic construct
  misc_feature 1..80: note = Artificially Synthesized Probe
  source 1..80: mol_type = other DNA
catgtggaattgaggaacagggcattttagcaaaaccaatgtcagaagagacagggtcatcggtggtagcaaactgcccc

SEQ ID NO: 52109 - DNA, 80 bp, synthetic construct; identical to SEQ ID NO: 24644
  misc_feature 1..80: note = Artificially Synthesized Probe
  source 1..80: mol_type = other DNA

SEQ ID NO: 52110 - DNA, 80 bp, synthetic construct
  misc_feature 1..80: note = Artificially Synthesized Probe
  source 1..80: mol_type = other DNA
cctggaaatcgaaggcccatggtgggagcagttgccaaggccaggctgcagggagaggccaagctgggggcagcactggg

SEQ ID NO: 52111 - DNA, 80 bp, synthetic construct
  misc_feature 1..80: note = Artificially Synthesized Probe
  source 1..80: mol_type = other DNA
acagttacttttatgtgttgacctgtaccctatgactttgctaaacacacttagaagttctagggctttattttctagat

SEQ ID NO: 52112 - DNA, 80 bp, synthetic construct
  misc_feature 1..80: note = Artificially Synthesized Probe
  source 1..80: mol_type = other DNA
actgaccacctgttcctgcattccctgggttgggagctgcacccatgcctagggtcctgcaggacataatcctcccagac

SEQ ID NO: 52113 - DNA, 80 bp, synthetic construct
  misc_feature 1..80: note = Artificially Synthesized Probe
  source 1..80: mol_type = other DNA
cagcattgtgggggctcagtggtgccatatgggcagtgttggcagccccaggcgcacaggatgtcctgtgggacagcact

SEQ ID NO: 52114 - DNA, 80 bp, synthetic construct
  misc_feature 1..80: note = Artificially Synthesized Probe
  source 1..80: mol_type = other DNA
cctgaccctgtgccagctgactctgtccagcggcccagtgatgctcacaccaagcctcgccctgcactagctgccgccac

SEQ ID NO: 52115 - DNA, 80 bp, synthetic construct; identical to SEQ ID NO: 24645
  misc_feature 1..80: note = Artificially Synthesized Probe
  source 1..80: mol_type = other DNA

SEQ ID NO: 52116 - DNA, 80 bp, synthetic construct
  misc_feature 1..80: note = Artificially Synthesized Probe
  source 1..80: mol_type = other DNA
acgtgtttgctactgtttcctccccacaaagccttatagtaagtaggaaggatggcttggtcaggtaggaaaaggatact

SEQ ID NO: 52117 - DNA, 80 bp, synthetic construct
  misc_feature 1..80: note = Artificially Synthesized Probe
  source 1..80: mol_type = other DNA
atgggcaagacagaagccagccaggatgagggcaggggcaggtcagggggcttgtgaaggaaaacagagaggacaaaggt

SEQ ID NO: 52118 - DNA, 80 bp, synthetic construct
  misc_feature 1..80: note = Artificially Synthesized Probe
  source 1..80: mol_type = other DNA
ggatgtagaggcagcgctgctacagccagtgagtgagaggggagtagacaaggcaccatccccctcgctggtcctgacac

SEQ ID NO: 52119 - DNA, 80 bp, synthetic construct; identical to SEQ ID NO: 24646
  misc_feature 1..80: note = Artificially Synthesized Probe
  source 1..80: mol_type = other DNA

SEQ ID NO: 52120 - DNA, 80 bp, synthetic construct
  misc_feature 1..80: note = Artificially Synthesized Probe
  source 1..80: mol_type = other DNA
tgtcacccctggaggctcacctgtcttcccagttgaatttcctacccatctgaaaaacgagacagccactctgcagaagt

SEQ ID NO: 52121 - DNA, 80 bp, synthetic construct
  misc_feature 1..80: note = Artificially Synthesized Probe
  source 1..80: mol_type = other DNA
ttccagtatattgtggaataggacagatgacagtggatatccttgccttgtttcttgatcttggagggaaattaagtatg

SEQ ID NO: 52122 - DNA, 80 bp, synthetic construct
  misc_feature 1..80: note = Artificially Synthesized Probe
  source 1..80: mol_type = other DNA
atgtaggcatcctctagcccagtcagcctcggttgcactggtcgtggccctgtgagacaaagaattacttccctttgggt

SEQ ID NO: 52123 - DNA, 80 bp, synthetic construct
  misc_feature 1..80: note = Artificially Synthesized Probe
  source 1..80: mol_type = other DNA
catcctggccaacatggtgaaaccccatctctactaaaaatacaaaaattagctgggtgtggtggtgggtacctgtaatc

SEQ ID NO: 52124 - DNA, 80 bp, synthetic construct; identical to SEQ ID NO: 24647
  misc_feature 1..80: note = Artificially Synthesized Probe
  source 1..80: mol_type = other DNA

SEQ ID NO: 52125 - DNA, 80 bp, synthetic construct
  misc_feature 1..80: note = Artificially Synthesized Probe
  source 1..80: mol_type = other DNA
ttacaggaatgagccaccaagcctggcctgtttgttttcctcactctgttgcccaggctggagtgcagcagtgcgatcat

SEQ ID NO: 52126 - DNA, 80 bp, synthetic construct
  misc_feature 1..80: note = Artificially Synthesized Probe
  source 1..80: mol_type = other DNA
tggggtttcaccatgttgcccaagctggtcttaaactcctgggctcaggagatccactcgcctcagcctcccaaagtgct

SEQ ID NO: 52127 - DNA, 80 bp, synthetic construct; identical to SEQ ID NO: 24648
  misc_feature 1..80: note = Artificially Synthesized Probe
  source 1..80: mol_type = other DNA

SEQ ID NO: 52128 - DNA, 80 bp, synthetic construct
  misc_feature 1..80: note = Artificially Synthesized Probe
  source 1..80: mol_type = other DNA
ctccccagagccattgaccccaccgagagaacacagaggaagccatggtgtcttttataacctaatctcagcagcaactg

SEQ ID NO: 52129 - DNA, 80 bp, synthetic construct
  misc_feature 1..80: note = Artificially Synthesized Probe
  source 1..80: mol_type = other DNA
ctctgttagatctaagaaagaggatctgtttcctagcataccttcttcagcctggagagttgatccttttctattcccat

SEQ ID NO: 52130 - DNA, 80 bp, synthetic construct
  misc_feature 1..80: note = Artificially Synthesized Probe
  source 1..80: mol_type = other DNA
tgcaatctccgcctcccgggttcaagcagttctcctgtctcggcctcccgagtagctgggactacagacacccgccacca

SEQ ID NO: 52131 - DNA, 80 bp, synthetic construct
  misc_feature 1..80: note = Artificially Synthesized Probe
  source 1..80: mol_type = other DNA
ggcagagcagctggatggggatggccatggccgctgaggcctctgcctagcccagcagtcgcctgctggccccagctttg

SEQ ID NO: 52132 - DNA, 80 bp, synthetic construct
  misc_feature 1..80: note = Artificially Synthesized Probe
  source 1..80: mol_type = other DNA
tggttgatgaccagtgtggtgggagagtccagacctgagtgagaaggtggggagcagcaagggaagtgagggcctggagg

SEQ ID NO: 52133 - DNA, 80 bp, synthetic construct; identical to SEQ ID NO: 24489
  misc_feature 1..80: note = Artificially Synthesized Probe
  source 1..80: mol_type = other DNA

SEQ ID NO: 52134 - DNA, 80 bp, synthetic construct; identical to SEQ ID NO: 24649
  misc_feature 1..80: note = Artificially Synthesized Probe
  source 1..80: mol_type = other DNA

SEQ ID NO: 52135 - DNA, 80 bp, synthetic construct
  misc_feature 1..80: note = Artificially Synthesized Probe
  source 1..80: mol_type = other DNA
cagtgtcctcttgggtggtgagtggtttcttggcagcaccaacctggactgcctcagccaggaccccagcattggccaca

SEQ ID NO: 52136 - DNA, 80 bp, synthetic construct
  misc_feature 1..80: note = Artificially Synthesized Probe
  source 1..80: mol_type = other DNA
tcaggagccacggcacagtccgcaggtgaagatggcccccacaagttccccggcagagccacactgctggccggcagagg

SEQ ID NO: 52137 - DNA, 80 bp, synthetic construct; identical to SEQ ID NO: 24650
  misc_feature 1..80: note = Artificially Synthesized Probe
  source 1..80: mol_type = other DNA

SEQ ID NO: 52138 - DNA, 80 bp, synthetic construct
  misc_feature 1..80: note = Artificially Synthesized Probe
  source 1..80: mol_type = other DNA
gcatgggcctggtgacagacacttgagggacatcagcagcaggcagaagggtggacaggttgggctgggccaagcaggcg

SEQ ID NO: 52139 - DNA, 80 bp, synthetic construct
  misc_feature 1..80: note = Artificially Synthesized Probe
  source 1..80: mol_type = other DNA
catgggctctgtgtaaaccccattccttttaaagccatggggctgcagaggaatgtggagacgagccaggccagccgggt

SEQ ID NO: 52140 - DNA, 80 bp, synthetic construct
  misc_feature 1..80: note = Artificially Synthesized Probe
  source 1..80: mol_type = other DNA
gggcttcagtgtcctccctggggcatagacaccaataggacatgcatcctaggatggttgtggaaatacgacagttcatg

SEQ ID NO: 52141 - DNA, 80 bp, synthetic construct; identical to SEQ ID NO: 24651
  misc_feature 1..80: note = Artificially Synthesized Probe
  source 1..80: mol_type = other DNA

SEQ ID NO: 52142 - DNA, 80 bp, synthetic construct
  misc_feature 1..80: note = Artificially Synthesized Probe
  source 1..80: mol_type = other DNA
agtgagactcagcccctgagctctcccccaacagctgccagctccaaggcccccagcagtgggagtgcccagccaccaga

SEQ ID NO: 52143 - DNA, 80 bp, synthetic construct
  misc_feature 1..80: note = Artificially Synthesized Probe
  source 1..80: mol_type = other DNA
gagaccaagcagaagctgaaggtgacctcaggggctgggctggagccatgtgtgggtgggaggcataggttacaaagggg

SEQ ID NO: 52144 - DNA, 80 bp, synthetic construct
  misc_feature 1..80: note = Artificially Synthesized Probe
  source 1..80: mol_type = other DNA
gcagcaccaaattgactaagatacagattgaggaggtctcttccactttgggtctactggcaggttttttttttttttaa

SEQ ID NO: 52145 - DNA, 80 bp, synthetic construct
  misc_feature 1..80: note = Artificially Synthesized Probe
  source 1..80: mol_type = other DNA
ccggccctctccgcagtcagccatcctttctgcccagtctgctgccaacgtgaggaaggagagcctatgccagccagccc

SEQ ID NO: 52146 - DNA, 80 bp, synthetic construct
  misc_feature 1..80: note = Artificially Synthesized Probe
  source 1..80: mol_type = other DNA
ccagaggcccacatggatgccactccccacacagcccccaggcctgcccagcccacctcctcatggcatcctccctgtac

SEQ ID NO: 52147 - DNA, 80 bp, synthetic construct; identical to SEQ ID NO: 24652
  misc_feature 1..80: note = Artificially Synthesized Probe
  source 1..80: mol_type = other DNA

SEQ ID NO: 52148 - DNA, 80 bp, synthetic construct
  misc_feature 1..80: note = Artificially Synthesized Probe
  source 1..80: mol_type = other DNA
agcattatatctaaaaaaatgtacataccttagttaagaaatactttattgctaaaaaatgctgacacagaaacccaaag

SEQ ID NO: 52149 - DNA, 80 bp, synthetic construct
  misc_feature 1..80: note = Artificially Synthesized Probe
  source 1..80: mol_type = other DNA
tcagctgagatgagaatgctcctcctcgtatgggagtgctacagtccatggtgttaacagaaccatcagtgagccatgtc

SEQ ID NO: 52150 - DNA, 80 bp, synthetic construct; identical to SEQ ID NO: 24490
  misc_feature 1..80: note = Artificially Synthesized Probe
  source 1..80: mol_type = other DNA

SEQ ID NO: 52151 - DNA, 80 bp, synthetic construct
  misc_feature 1..80: note = Artificially Synthesized Probe
  source 1..80: mol_type = other DNA
ggtacaaagataaataggacaggattgctgcctttgggaagtttacaaggctattaagagggacagacccagaggcaggg

SEQ ID NO: 52152 - DNA, 80 bp, synthetic construct
  misc_feature 1..80: note = Artificially Synthesized Probe
  source 1..80: mol_type = other DNA
ccaggtacggtggctcatacctataacagcactttgggaggccgagacaggtggatcgcttgaggccaggagtttgaaac

SEQ ID NO: 52153 - DNA, 80 bp, synthetic construct
  misc_feature 1..80: note = Artificially Synthesized Probe
  source 1..80: mol_type = other DNA
taagccgaggcgcttgagctcaagggttcaagaccaacctggacaacatagtgaaaccccgtctctacaaaaaaacaatt

SEQ ID NO: 52154 - DNA, 80 bp, synthetic construct
  misc_feature 1..80: note = Artificially Synthesized Probe
  source 1..80: mol_type = other DNA
aaaaaaaaaaaaatggtagttgctagtaaaggggattatacagtacatgttcaaagcccccacagtcttcccaatgtgtc

SEQ ID NO: 52155 - DNA, 80 bp, synthetic construct; identical to SEQ ID NO: 24491
  misc_feature 1..80: note = Artificially Synthesized Probe
  source 1..80: mol_type = other DNA

SEQ ID NO: 52156 - DNA, 80 bp, synthetic construct; identical to SEQ ID NO: 24473
  misc_feature 1..80: note = Artificially Synthesized Probe
  source 1..80: mol_type = other DNA

SEQ ID NO: 52157 - DNA, 80 bp, synthetic construct
  misc_feature 1..80: note = Artificially Synthesized Probe
  source 1..80: mol_type = other DNA
attgaatagctttttgctggtacttttattagagaattggaaattttgttttctgctttatggagtgatgttgatgatgc

SEQ ID NO: 52158 - DNA, 80 bp, synthetic construct
  misc_feature 1..80: note = Artificially Synthesized Probe
  source 1..80: mol_type = other DNA
ctttttgctgtgctagaaagagtactgggctttgagtcctatttttgtctctttttagcattatgactttgggcaggtca

SEQ ID NO: 52159 - DNA, 80 bp, synthetic construct
  misc_feature 1..80: note = Artificially Synthesized Probe
  source 1..80: mol_type = other DNA
gattatgttaaagccagcacaggtgcccttttagtggggagagttgacttgagttttaacatagaacaattttgaaaata

SEQ ID NO: 52160 - DNA, 80 bp, synthetic construct; identical to SEQ ID NO: 24492
  misc_feature 1..80: note = Artificially Synthesized Probe
  source 1..80: mol_type = other DNA

SEQ ID NO: 52161 - DNA, 80 bp, synthetic construct
  misc_feature 1..80: note = Artificially Synthesized Probe
  source 1..80: mol_type = other DNA
ggtagtggttggatgcgttcctttgagacattacttaggaagcagatgagctttcttccttgtggaataggttggccttg

SEQ ID NO: 52162 - DNA, 80 bp, synthetic construct
  misc_feature 1..80: note = Artificially Synthesized Probe
  source 1..80: mol_type = other DNA
ttggcatctaggaagacttgccatgacttagagctagcacgtgtcctgcagaaagtgggttgagaggcctgtgtcttggc

SEQ ID NO: 52163 - DNA, 80 bp, synthetic construct; identical to SEQ ID NO: 24493
  misc_feature 1..80: note = Artificially Synthesized Probe
  source 1..80: mol_type = other DNA

SEQ ID NO: 52164 - DNA, 80 bp, synthetic construct
  misc_feature 1..80: note = Artificially Synthesized Probe
  source 1..80: mol_type = other DNA
ctgtaagtgaaggcagcagttcagacggaggctatgtgatgctcagtgggattagaggtgttttcggattcagtgcacag

SEQ ID NO: 52165 - DNA, 80 bp, synthetic construct
  misc_feature 1..80: note = Artificially Synthesized Probe
  source 1..80: mol_type = other DNA
gggctgtcggcctgccttgaggatgaccagagcctatctgagactttatttggagtaatgtctttgtattttgaaaacaa

SEQ ID NO: 52166 - DNA, 80 bp, synthetic construct
  misc_feature 1..80: note = Artificially Synthesized Probe
  source 1..80: mol_type = other DNA
caccatccatctccaaaactctcttcatcttgaaaagttgaaatgctatacccattaaacagtaactctctattgccctc

SEQ ID NO: 52167 - DNA, 80 bp, synthetic construct
  misc_feature 1..80: note = Artificially Synthesized Probe
  source 1..80: mol_type = other DNA
gtttcctgccttgttaagtttgaatagtattctgttgtatgtatacaccacattttgttcattcatctgttgttggacac

SEQ ID NO: 52168 - DNA, 80 bp, synthetic construct
  misc_feature 1..80: note = Artificially Synthesized Probe
  source 1..80: mol_type = other DNA
ctccctagtagctgggactacaggcgcctctcaccataccctgctagttttttgtattttttagtagagacggagtttca

SEQ ID NO: 52169 - DNA, 80 bp, synthetic construct; identical to SEQ ID NO: 24494
  misc_feature 1..80: note = Artificially Synthesized Probe
  source 1..80: mol_type = other DNA

SEQ ID NO: 52170 - DNA, 80 bp, synthetic construct
  misc_feature 1..80: note = Artificially Synthesized Probe
  source 1..80: mol_type = other DNA
ttttttcatattgtatagtggtcccagtgtccattttggcatagcttatgataaagttgcagtttctggccaggcatggt

SEQ ID NO: 52171 - DNA, 80 bp, synthetic construct
  misc_feature 1..80: note = Artificially Synthesized Probe
  source 1..80: mol_type = other DNA
agtcccagctactcaggaggctgaggcaggagaatcacttgaacccgggaggtggaggttgcagtgagccgagatcgcgc

SEQ ID NO: 52172 - DNA, 80 bp, synthetic construct
  misc_feature 1..80: note = Artificially Synthesized Probe
  source 1..80: mol_type = other DNA
tcttctttgtctgtgagaaagtacttccttccttgcatgaacccttaagagaactcagagcctattgtgaaagcctgtgc

SEQ ID NO: 52173 - DNA, 80 bp, synthetic construct; identical to SEQ ID NO: 24495
  misc_feature 1..80: note = Artificially Synthesized Probe
  source 1..80: mol_type = other DNA

SEQ ID NO: 52174 - DNA, 80 bp, synthetic construct
  misc_feature 1..80: note = Artificially Synthesized Probe
  source 1..80: mol_type = other DNA
tctacctcctagtgggattccccttcatccctgctgtcacgggtccatctgggatcctggcatctttttaaaaataagag

SEQ ID NO: 52175 - DNA, 80 bp, synthetic construct
  misc_feature 1..80: note = Artificially Synthesized Probe
  source 1..80: mol_type = other DNA
gaaagaaaccctaaaccccttggtagttgctccccagttgtccttctctccaagcccactaaaccagcggttcccatcca

SEQ ID NO: 52176 - DNA, 80 bp, synthetic construct; identical to SEQ ID NO: 24496
  misc_feature 1..80: note = Artificially Synthesized Probe
  source 1..80: mol_type = other DNA

SEQ ID NO: 52177 - DNA, 80 bp, synthetic construct
  misc_feature 1..80: note = Artificially Synthesized Probe
  source 1..80: mol_type = other DNA
tgctattttgtatatgacttctttcatttagcataatgttttcaaggttcttctgtgttgtagcatgtatcagaaattta

SEQ ID NO: 52178 - DNA, 80 bp, synthetic construct
  misc_feature 1..80: note = Artificially Synthesized Probe
  source 1..80: mol_type = other DNA
tttcatttcttttgggtagatacacataggagtggaattccctggtcatatgctagctctgtttaacattttgaggaact

SEQ ID NO: 52179 - DNA, 80 bp, synthetic construct
  misc_feature 1..80: note = Artificially Synthesized Probe
  source 1..80: mol_type = other DNA
ctctgttatgtccttcaccctgctttccctaatgttaacatcttacataatcatacaattatcaagaacagaaatctagt

SEQ ID NO: 52180 - DNA, 80 bp, synthetic construct
  misc_feature 1..80: note = Artificially Synthesized Probe
  source 1..80: mol_type = other DNA
caaaacattttgttctccctaaaacacccattgattccctgttgcctacaggtaaagttcatggcctctgtgttgtcact

SEQ ID NO: 52181 - DNA, 80 bp, synthetic construct; identical to SEQ ID NO: 24497
  misc_feature 1..80: note = Artificially Synthesized Probe
  source 1..80: mol_type = other DNA

SEQ ID NO: 52182 - DNA, 80 bp, synthetic construct
  misc_feature 1..80: note = Artificially Synthesized Probe
  source 1..80: mol_type = other DNA
caggccggaggggctgcaggcgcgaggctgggttacgtgaggaagctgggggtttcgcgggcagctttagagccccagtc

SEQ ID NO: 52183 - DNA, 80 bp, synthetic construct
  misc_feature 1..80: note = Artificially Synthesized Probe
  source 1..80: mol_type = other DNA
cctgatgcattgccaggaaatgatgaatgctatcgtaagggaccaaggagctccttgtgtgttagaccacaccgctgtcc

SEQ ID NO: 52184 - DNA, 80 bp, synthetic construct
  misc_feature 1..80: note = Artificially Synthesized Probe
  source 1..80: mol_type = other DNA
atgagaagtgatgctcgtggcagtgctgaatctctctgaatatggtaaggactgatgcctgcctattttgcggacctcag

SEQ ID NO: 52185 - DNA, 80 bp, synthetic construct
  misc_feature 1..80: note = Artificially Synthesized Probe
  source 1..80: mol_type = other DNA
cagttgctggaaagacataaagttaacatgttttgttgaaatctgttgttccattacctgggtcttctactgtgttgagc

SEQ ID NO: 52186 - DNA, 80 bp, synthetic construct
  misc_feature 1..80: note = Artificially Synthesized Probe
  source 1..80: mol_type = other DNA
ctgagaaggtcatagcttttcaaggtagaatagatcatatgctggagcagaattgtattcatctgtgggtatttgaagag

SEQ ID NO: 52187 - DNA, 80 bp, synthetic construct; identical to SEQ ID NO: 24498
  misc_feature 1..80: note = Artificially Synthesized Probe
  source 1..80: mol_type = other DNA

SEQ ID NO: 52188 - DNA, 80 bp, synthetic construct
  misc_feature 1..80: note = Artificially Synthesized Probe
  source 1..80: mol_type = other DNA
tgtgcagccctcaggagttgggatacccagggaatggtagaatattaatggtagatggtgtttcgaggttccctagtgta

SEQ ID NO: 52189 - DNA, 80 bp, synthetic construct
  misc_feature 1..80: note = Artificially Synthesized Probe
  source 1..80: mol_type = other DNA
tctttccatccattcatctccatacccttctcctatcctagtgtaataagagtttgctcctgcctttgttttccctgaaa

SEQ ID NO: 52190 - DNA, 80 bp, synthetic construct; identical to SEQ ID NO: 24499
  misc_feature 1..80: note = Artificially Synthesized Probe
  source 1..80: mol_type = other DNA

SEQ ID NO: 52191 - DNA, 80 bp, synthetic construct
  misc_feature 1..80: note = Artificially Synthesized Probe
  source 1..80: mol_type = other DNA
ggctaaggcaggacaatagcttgagcctggaaggcagaggttgcagcgagctgagatcatgccactgcactccagcctgg

SEQ ID NO: 52192 - DNA, 80 bp, synthetic construct
  misc_feature 1..80: note = Artificially Synthesized Probe
  source 1..80: mol_type = other DNA
cttggctttgatgcttttaaagagtagtgatcagttattttgtctaacgtctctcaatttaaaggtttgtccagtgtttt

SEQ ID NO: 52193 - DNA, 80 bp, synthetic construct
  misc_feature 1..80: note = Artificially Synthesized Probe
  source 1..80: mol_type = other DNA
ggctcaagcagtcttcctgtctcagcctcctgagtagtttaggactacagacaccaggccaccatgctcagctgattttt

SEQ ID NO: 52194 - DNA, 80 bp, synthetic construct
  misc_feature 1..80: note = Artificially Synthesized Probe
  source 1..80: mol_type = other DNA
cttctgatatcatatgtttggggtattttccccccataccaattctccaactctccatataccaactgggtgtcctacaa

SEQ ID NO: 52195 - DNA, 80 bp, synthetic construct
  misc_feature 1..80: note = Artificially Synthesized Probe
  source 1..80: mol_type = other DNA
ccctaccccttttagatttgataatttgctagaatgactcacaggacttagaaaaacactttacatttaccaatttatta

SEQ ID NO: 52196 - DNA, 80 bp, synthetic construct; identical to SEQ ID NO: 24500
  misc_feature 1..80: note = Artificially Synthesized Probe
  source 1..80: mol_type = other DNA

SEQ ID NO: 52197 - DNA, 80 bp, synthetic construct
  misc_feature 1..80: note = Artificially Synthesized Probe
  source 1..80: mol_type = other DNA
gcttttgcattgtaccacaaggcccttgatctgcagaaacatgaccggtttgaggagtctgccaaagcctaccatgagct

SEQ ID NO: 52198 - DNA, 80 bp, synthetic construct
  misc_feature 1..80: note = Artificially Synthesized Probe
  source 1..80: mol_type = other DNA
cctatttccccacctctaggtatctgcctcattgagtttttatgagggttgagtaaatccagtgaagcatgtaaaatgat

SEQ ID NO: 52199 - DNA, 80 bp, synthetic construct; identical to SEQ ID NO: 24501
  misc_feature 1..80: note = Artificially Synthesized Probe
  source 1..80: mol_type = other DNA

SEQ ID NO: 52200 - DNA, 80 bp, synthetic construct
  misc_feature 1..80: note = Artificially Synthesized Probe
  source 1..80: mol_type = other DNA
gactggaggtttgggaattggtcccaacctgaaattgatttaggaaggtgtatatttcattaggaggaaaggcgtttgtt

SEQ ID NO: 52201 - DNA, 80 bp, synthetic construct
  misc_feature 1..80: note = Artificially Synthesized Probe
  source 1..80: mol_type = other DNA
tgctaggcatgcagacacttatgactcaagcaaaaaccttgatggtttttgctgccgatgagatagaatactgagtttta

SEQ ID NO: 52202 - DNA, 80 bp, synthetic construct
  misc_feature 1..80: note = Artificially Synthesized Probe
  source 1..80: mol_type = other DNA
gaggacccagagagggaaaattagtttattccatgtttactgagctttggttatggaccagttggtgggcatgttggtct

SEQ ID NO: 52203 - DNA, 80 bp, synthetic construct; identical to SEQ ID NO: 24474
  misc_feature 1..80: note = Artificially Synthesized Probe
  source 1..80: mol_type = other DNA

SEQ ID NO: 52204 - DNA, 80 bp, synthetic construct
  misc_feature 1..80: note = Artificially Synthesized Probe
  source 1..80: mol_type = other DNA
tcagccttaaaagggacaacatgctcattgtaaacaatggagaagtacagaaaatacatagaacagtttctttttacact

SEQ ID NO: 52205 - DNA, 80 bp, synthetic construct; identical to SEQ ID NO: 24502
  misc_feature 1..80: note = Artificially Synthesized Probe
  source 1..80: mol_type = other DNA

SEQ ID NO: 52206 - DNA, 80 bp, synthetic construct
  misc_feature 1..80: note = Artificially Synthesized Probe
  source 1..80: mol_type = other DNA
ttcttgggggcctttttgtatgataagtcagatgacggtagaagataactgaatggggcttcatttgagcttctcagtct

SEQ ID NO: 52207 - DNA, 80 bp, synthetic construct
  misc_feature 1..80: note = Artificially Synthesized Probe
  source 1..80: mol_type = other DNA
gccacctgccccaggaaagagcttcttggtgcccgtgagtttttctgttagaaaatgttttagtctttgtcctgtggttg

SEQ ID NO: 52208 - DNA, 80 bp, synthetic construct; identical to SEQ ID NO: 24503
  misc_feature 1..80: note = Artificially Synthesized Probe
  source 1..80: mol_type = other DNA

SEQ ID NO: 52209 - DNA, 80 bp, synthetic construct
  misc_feature 1..80: note = Artificially Synthesized Probe
  source 1..80: mol_type = other DNA
ggtggggcagtttctctctgttggatgcccagactctctgcaaactattaatacctcagggtggtctgttcttctctgtg

SEQ ID NO: 52210 - DNA, 80 bp, synthetic construct
  misc_feature 1..80: note = Artificially Synthesized Probe
  source 1..80: mol_type = other DNA
ttctgttctgttttgttcacaggcagtttcatccggtgatgagaaagaggggttgaaacaccctgggctgatactgaaat

SEQ ID NO: 52211 - DNA, 80 bp, synthetic construct
  misc_feature 1..80: note = Artificially Synthesized Probe
  source 1..80: mol_type = other DNA
aagaagagtttgtagtggtggatcaccaagctatagtacccaaggctctagggtaggtccataggtgataacaattagta

SEQ ID NO: 52212 - DNA, 80 bp, synthetic construct
  misc_feature 1..80: note = Artificially Synthesized Probe
  source 1..80: mol_type = other DNA
ttggtatctctaggtctacaccaatatagtggtaataataaagaagagcatagttgtgaaagttaaatgagttggtatgc

SEQ ID NO: 52213 - DNA, 80 bp, synthetic construct; identical to SEQ ID NO: 24504
  misc_feature 1..80: note = Artificially Synthesized Probe
  source 1..80: mol_type = other DNA

SEQ ID NO: 52214 - DNA, 80 bp, synthetic construct
  misc_feature 1..80: note = Artificially Synthesized Probe
  source 1..80: mol_type = other DNA
tgtcagtgtaggccatggatatgtattatattctatgagttaaaattcattatcatcattattttgttgcttactgttcc

SEQ ID NO: 52215 - DNA, 80 bp, synthetic construct
  misc_feature 1..80: note = Artificially Synthesized Probe
  source 1..80: mol_type = other DNA
gacttcccaggctcaaacgatcctccgacctcatgcccccaagtagctgggactataggcatgcaccaccaccacaccca

SEQ ID NO: 52216 - DNA, 80 bp, synthetic construct
  misc_feature 1..80: note = Artificially Synthesized Probe
  source 1..80: mol_type = other DNA
accaccaggcctgggcatattttcttttctttcttctccttttacttattaaatatgtaaggaatacagatattcagatt

SEQ ID NO: 52217 - DNA, 80 bp, synthetic construct
  misc_feature 1..80: note = Artificially Synthesized Probe
  source 1..80: mol_type = other DNA
taggtgtggtgatgtgcctctgtagcctcagctactcatggagctgaggtgagaggattgcttgagcccagaagtttgag

SEQ ID NO: 52218 - DNA, 80 bp, synthetic construct; identical to SEQ ID NO: 24505
  misc_feature 1..80: note = Artificially Synthesized Probe
  source 1..80: mol_type = other DNA

SEQ ID NO: 52219 - DNA, 80 bp, synthetic construct
  misc_feature 1..80: note = Artificially Synthesized Probe
  source 1..80: mol_type = other DNA
tttgccctctgcttgtgtcgcttccaggcagtgatgctggactccacagatgtcaacctctggtataagattggacatgt

SEQ ID NO: 52220 - DNA, 80 bp, synthetic construct
  misc_feature 1..80: note = Artificially Synthesized Probe
  source 1..80: mol_type = other DNA
ttacacaagtgagtcatgctttgatgctttcttccatgtgccagtggtttttggaacagcagaggaaaggcagtttgggt

SEQ ID NO: 52221 - DNA, 80 bp, synthetic construct; identical to SEQ ID NO: 24506
  misc_feature 1..80: note = Artificially Synthesized Probe
  source 1..80: mol_type = other DNA

SEQ ID NO: 52222 - DNA, 80 bp, synthetic construct
  misc_feature 1..80: note = Artificially Synthesized Probe
  source 1..80: mol_type = other DNA
gcctgggcaacatggtgaaaccctgtctcttcaaaaaatacaaaaattaactggacttgatggtgcgtgactgtcatccc

SEQ ID NO: 52223 - DNA, 80 bp, synthetic construct
  misc_feature 1..80: note = Artificially Synthesized Probe
  source 1..80: mol_type = other DNA
ggtaagacttgaggtacaatttgtcctgagacaaaattcctctccagttgtaaacttgtgaatacagataaattaatgtg

SEQ ID NO: 52224 - DNA, 80 bp, synthetic construct
  misc_feature 1..80: note = Artificially Synthesized Probe
  source 1..80: mol_type = other DNA
gatgggtcccaaaacttagcaaacttagcaaggcaaatttgaggtcctgaggctcaggaataattctctttgacctgatg

SEQ ID NO: 52225 - DNA, 80 bp, synthetic construct
  misc_feature 1..80: note = Artificially Synthesized Probe
  source 1..80: mol_type = other DNA
ctcatcttgtgttttctctgacccaactctggaatcagttctttttgtctttagcctatccagtcaagataccattttct

SEQ ID NO: 52226 - DNA, 80 bp, synthetic construct
  misc_feature 1..80: note = Artificially Synthesized Probe
  source 1..80: mol_type = other DNA
gaactagccctagcctcttggtctgtgatgggagtggcggctcagatgatctttgaatcatctttgagggttcttcttcc

SEQ ID NO: 52227 - DNA, 80 bp, synthetic construct; identical to SEQ ID NO: 24507
  misc_feature 1..80: note = Artificially Synthesized Probe
  source 1..80: mol_type = other DNA

SEQ ID NO: 52228 - DNA, 80 bp, synthetic construct
  misc_feature 1..80: note = Artificially Synthesized Probe
  source 1..80: mol_type = other DNA
taagcagtcaggaggaactgggctatgtctttaatactttgcttagaagtctcagcaaaatagccaattttattgctcac

SEQ ID NO: 52229 - DNA, 80 bp, synthetic construct
  misc_feature 1..80: note = Artificially Synthesized Probe
  source 1..80: mol_type = other DNA
acattctgtacatgattatttattctctagtaagatggaagccgtctctgtacctcttctcttctttctgagccctcatc

SEQ ID NO: 52230 - DNA, 80 bp, synthetic construct
  misc_feature 1..80: note = Artificially Synthesized Probe
  source 1..80: mol_type = other DNA
gcccggctaattttttgttttttatttttagtagagacagggtttcaccgtgttagccaggatgttcttgatctcctgac

SEQ ID NO: 52231 - DNA, 80 bp, synthetic construct; identical to SEQ ID NO: 24508
  misc_feature 1..80: note = Artificially Synthesized Probe
  source 1..80: mol_type = other DNA

SEQ ID NO: 52232 - DNA, 80 bp, synthetic construct
  misc_feature 1..80: note = Artificially Synthesized Probe
  source 1..80: mol_type = other DNA
aggatcacctgaacctaggagctagaggttacaatgagccatgattgtgccactgcactccagcctgggtgacagagcga

SEQ ID NO: 52233 - DNA, 80 bp, synthetic construct
  misc_feature 1..80: note = Artificially Synthesized Probe
  source 1..80: mol_type = other DNA
ctctggaggctggagagtctttttttctcttccttttaaaaagacaaataggaacaggatagaatgtgttgagatagatg

SEQ ID NO: 52234 - DNA, 80 bp, synthetic construct
  misc_feature 1..80: note = Artificially Synthesized Probe
  source 1..80: mol_type = other DNA
atatgtgaaaacatgtcaagatacagaacatgtgcagcgccccagaaggcaggttactttgggtcccttccactttttac

SEQ ID NO: 52235 - DNA, 80 bp, synthetic construct; identical to SEQ ID NO: 24475
  misc_feature 1..80: note = Artificially Synthesized Probe
  source 1..80: mol_type = other DNA

SEQ ID NO: 52236 - DNA, 80 bp, synthetic construct; identical to SEQ ID NO: 24509
  misc_feature 1..80: note = Artificially Synthesized Probe
  source 1..80: mol_type = other DNA

SEQ ID NO: 52237 - DNA, 80 bp, synthetic construct
  misc_feature 1..80: note = Artificially Synthesized Probe
  source 1..80: mol_type = other DNA
agaatatgatagttgtacagggctgtgttttgactctagcagtttcttcttctggaggctttgagtctcttcttgggtgc

SEQ ID NO: 52238 - DNA, 80 bp, synthetic construct
  misc_feature 1..80: note = Artificially Synthesized Probe
  source 1..80: mol_type = other DNA
gagaaacagaaccaataggatgtatgtacatatatagaaagagatttattgtaaggaattggctcatgtggtattggtag

SEQ ID NO: 52239 - DNA, 80 bp, synthetic construct
  misc_feature 1..80: note = Artificially Synthesized Probe
  source 1..80: mol_type = other DNA
tttagtgagaaggtagaaaaccccccccaccgcaatgtcccagttcaaaggtagtcaggcagaaaaattctcttatgcgg

SEQ ID NO: 52240 - DNA, 80 bp, synthetic construct; identical to SEQ ID NO: 24510
  misc_feature 1..80: note = Artificially Synthesized Probe
  source 1..80: mol_type = other DNA

SEQ ID NO: 52241 - DNA, 80 bp, synthetic construct
  misc_feature 1..80: note = Artificially Synthesized Probe
  source 1..80: mol_type = other DNA
aagcagcatgttaaattgactctcagtggcattttatgtatttgatatgagtagggagggatgctgctgggttaaggcct

SEQ ID NO: 52242 - DNA, 80 bp, synthetic construct
  misc_feature 1..80: note = Artificially Synthesized Probe
  source 1..80: mol_type = other DNA
tacccttcaggtttcatgtggtctcagagaaaccatgtcccttatttgtctgatgcaggcacctttggaccatctattga

SEQ ID NO: 52243 - DNA, 80 bp, synthetic construct; identical to SEQ ID NO: 24511
  misc_feature 1..80: note = Artificially Synthesized Probe
  source 1..80: mol_type = other DNA

SEQ ID NO: 52244 - DNA, 80 bp, synthetic construct
  misc_feature 1..80: note = Artificially Synthesized Probe
  source 1..80: mol_type = other DNA
tgtgttcactggtgagacctggactgttcccaattacaagtgctgaaagcttttgtaatttatatcatagttctgctttg

SEQ ID NO: 52245 - DNA, 80 bp, synthetic construct
  misc_feature 1..80: note = Artificially Synthesized Probe
  source 1..80: mol_type = other DNA
ctttccagatcaataacttgaggatgctcattatgacattaacttgagtgatgtacatgtcttaaattgtaggcagtagc

SEQ ID NO: 52246 - DNA, 80 bp, synthetic construct
  misc_feature 1..80: note = Artificially Synthesized Probe
  source 1..80: mol_type = other DNA
agcacactccttgaccatctatgtagtggctgcttggcaacctattgtgtggaattggacatactttatttaaccaggtg

SEQ ID NO: 52247 - DNA, 80 bp, synthetic construct
  misc_feature 1..80: note = Artificially Synthesized Probe
  source 1..80: mol_type = other DNA
ttatacgaaggtgacatgctatatagataattgtgtttgcttttttcacttaatagtatgttttaggccaggcgtggtgg

SEQ ID NO: 52248 - DNA, 80 bp, synthetic construct
  misc_feature 1..80: note = Artificially Synthesized Probe
  source 1..80: mol_type = other DNA
actgcaggtgcacaccaacatgcctgactaatttttgtattttttgtagagatggggtttcatcatggtgcccaggctgg

SEQ ID NO: 52249 - DNA, 80 bp, synthetic construct; identical to SEQ ID NO: 24512
  misc_feature 1..80: note = Artificially Synthesized Probe
  source 1..80: mol_type = other DNA

SEQ ID NO: 52250 - DNA, 80 bp, synthetic construct
  misc_feature 1..80: note = Artificially Synthesized Probe
  source 1..80: mol_type = other DNA
gattctaggagcaggattttcctgatgttaactggcaaggccagagcttctgagtgcggtctcagaagtcataaactgtc

SEQ ID NO: 52251 - DNA, 80 bp, synthetic construct
  misc_feature 1..80: note = Artificially Synthesized Probe
  source 1..80: mol_type = other DNA
cccatgccatgtgtgcacgcttactgtgtggctggtgaaggtcaggagcacaccacattctcccctcaggtcccatggat

SEQ ID NO: 52252 - DNA, 80 bp, synthetic construct
  misc_feature 1..80: note = Artificially Synthesized Probe
  source 1..80: mol_type = other DNA
ttcgctagctgtcctctggatgcttggggcagcctgctgcccagcttgcctcctgcctttccccttcccagggttttgtt

SEQ ID NO: 52253 - DNA, 80 bp, synthetic construct; identical to SEQ ID NO: 24513
  misc_feature 1..80: note = Artificially Synthesized Probe
  source 1..80: mol_type = other DNA

SEQ ID NO: 52254 - DNA, 80 bp, synthetic construct
  misc_feature 1..80: note = Artificially Synthesized Probe
  source 1..80: mol_type = other DNA
gggccacacctcagagctgctcacttacaaacttatctgtttctcaggtcacctctctgttgctttctgagctctagctg

SEQ ID NO: 52255 - DNA, 80 bp, synthetic construct
  misc_feature 1..80: note = Artificially Synthesized Probe
  source 1..80: mol_type = other DNA
ggaactgagggaacatctgtcatgagggagctaaccttgagggagacagataagaagcacatgaaacagataaattcatg

SEQ ID NO: 52256 - DNA, 80 bp, synthetic construct; identical to SEQ ID NO: 24514
  misc_feature 1..80: note = Artificially Synthesized Probe
  source 1..80: mol_type = other DNA

SEQ ID NO: 52257 - DNA, 80 bp, synthetic construct
  misc_feature 1..80: note = Artificially Synthesized Probe
  source 1..80: mol_type = other DNA
ctagtgtatgtgggtattaagaaggctatttactgccctacccaggccagactgaagtggttattttatttataggaaga

SEQ ID NO: 52258 - DNA, 80 bp, synthetic construct
  misc_feature 1..80: note = Artificially Synthesized Probe
  source 1..80: mol_type = other DNA
ttggaaggctgaggctggagaatcgcttgaacctgggaggcagatgttgcagtgagccgagattgcaccactgcactcca

SEQ ID NO: 52259 - DNA, 80 bp, synthetic construct
  misc_feature 1..80: note = Artificially Synthesized Probe
  source 1..80: mol_type = other DNA
gtagatgaggccttggggctgcgaaaaaagaggcaagcgctgattgtgcgggagaaggagccggacctgaaacttgtgca

SEQ ID NO: 52260 - DNA, 80 bp, synthetic construct
  misc_feature 1..80: note = Artificially Synthesized Probe
  source 1..80: mol_type = other DNA
ggttggaggtgcatgcttacttgattactaagaagcaggtcagctctctctcaagtacctccagtctcagtccctttttg

SEQ ID NO: 52261 - DNA, 80 bp, synthetic construct
  misc_feature 1..80: note = Artificially Synthesized Probe
  source 1..80: mol_type = other DNA
gttcagagtacttaaatggggagcccagagacagtcccgggtctgggcttctccgctctcaagtccatgttttctctcta

SEQ ID NO: 52262 - DNA, 80 bp, synthetic construct; identical to SEQ ID NO: 24515
  misc_feature 1..80: note = Artificially Synthesized Probe
  source 1..80: mol_type = other DNA

SEQ ID NO: 52263 - DNA, 80 bp, synthetic construct
  misc_feature 1..80: note = Artificially Synthesized Probe
  source 1..80: mol_type = other DNA
ccctagcaacggggagagcaacatctctctcatagggttgtcatgataatgacaaaacatgtagggctagcacagaggca

SEQ ID NO: 52264 - DNA, 80 bp, synthetic construct
  misc_feature 1..80: note = Artificially Synthesized Probe
  source 1..80: mol_type = other DNA
ggtgccctttcttgtattttgtcagctggattagagtccttctcccatctgagtgtgtgctccccaactacagagggttg

SEQ ID NO: 52265 - DNA, 80 bp, synthetic construct; identical to SEQ ID NO: 24516
  misc_feature 1..80: note = Artificially Synthesized Probe
  source 1..80: mol_type = other DNA

SEQ ID NO: 52266 - DNA, 80 bp, synthetic construct
  misc_feature 1..80: note = Artificially Synthesized Probe
  source 1..80: mol_type = other DNA
tttttaaacaatgctttaaaaatgtgtaaactagctgggcatggtggctaacgcctataatcccagtactttgggaggct

SEQ ID NO: 52267 - DNA, 80 bp, synthetic construct
  misc_feature 1..80: note = Artificially Synthesized Probe
  source 1..80: mol_type = other DNA
gaagtcaaggctacagtgagctgtgatggcaccactgcattccagcctgggtgacagagcaagacccccatctcaaaaaa

SEQ ID NO: 52268 - DNA, 80 bp, synthetic construct
  misc_feature 1..80: note = Artificially Synthesized Probe
  source 1..80: mol_type = other DNA
taaatgtaacactaactgaaggcaggaaaaagatagaagaaattccttctagccctgggagcctccatcatttagattct

SEQ ID NO: 52269 - DNA, 80 bp, synthetic construct; identical to SEQ ID NO: 24517
  misc_feature 1..80: note = Artificially Synthesized Probe
  source 1..80: mol_type = other DNA

SEQ ID NO: 52270 - DNA, 80 bp, synthetic construct
  misc_feature 1..80: note = Artificially Synthesized Probe
  source 1..80: mol_type = other DNA
tgcattggcgctatctcggctcactgcaagctccgcctcccgggttcacgccgttctgctgcctgagcctcccgagtagc

SEQ ID NO: 52271 - DNA, 80 bp, synthetic construct
  misc_feature 1..80: note = Artificially Synthesized Probe
  source 1..80: mol_type = other DNA
gtgcgatcttggctcactgcaacctccacctcccaggttcaagcgattctcctgcctcagcctcccaagtaattagaatt

SEQ ID NO: 52272 - DNA, 80 bp, synthetic construct
  misc_feature 1..80: note = Artificially Synthesized Probe
  source 1..80: mol_type = other DNA
cctgaagcactgttcttttattcctttctcaacacttcctggatgctggctctgtgcaggggactgtgctctgtgctagg

SEQ ID NO: 52273 - DNA, 80 bp, synthetic construct
  misc_feature 1..80: note = Artificially Synthesized Probe
  source 1..80: mol_type = other DNA
ggaaggctgggtggtggagctggggtctgactgaggcacaggcattggctaggcagagggctatgctgtgggaggggacg

SEQ ID NO: 52274 - DNA, 80 bp, synthetic construct; identical to SEQ ID NO: 24518
  misc_feature 1..80: note = Artificially Synthesized Probe
  source 1..80: mol_type = other DNA

SEQ ID NO: 52275 - DNA, 80 bp, synthetic construct
  misc_feature 1..80: note = Artificially Synthesized Probe
  source 1..80: mol_type = other DNA
agcaggctccagcccatttggtaatccactgaggtgctgctccccataggccctgcccatggtccaagttcttatagacc

SEQ ID NO: 52276 - DNA, 80 bp, synthetic construct
  misc_feature 1..80: note = Artificially Synthesized Probe
  source 1..80: mol_type = other DNA
atggatttcatacatacctacttgagtctgaaagtgcctcaggccaagatgcttatggggcttctgctgcagtgaggggc

SEQ ID NO: 52277 - DNA, 80 bp, synthetic construct
  misc_feature 1..80: note = Artificially Synthesized Probe
  source 1..80: mol_type = other DNA
gcaggccattttccactatgcttggagtattcctctgacagggtggtgatcaggtgttgtggccctctccctttagctgg

SEQ ID NO: 52278 - DNA, 80 bp, synthetic construct; identical to SEQ ID NO: 24519
  misc_feature 1..80: note = Artificially Synthesized Probe
  source 1..80: mol_type = other DNA

SEQ ID NO: 52279 - DNA, 80 bp, synthetic construct
  misc_feature 1..80: note = Artificially Synthesized Probe
  source 1..80: mol_type = other DNA
ctcaagtggaagtgggagcccccagccctagaggagcctctcagcctgctcacagtgccactgcccgtcagggccatttc

SEQ ID NO: 52280 - DNA, 80 bp, synthetic construct
  misc_feature 1..80: note = Artificially Synthesized Probe
  source 1..80: mol_type = other DNA
ggtcctgctctcttgctgactgtgtacatcctgagttctttgatcttagaaaacagtcagcaaagttaccaaccaccata

SEQ ID NO: 52281 - DNA, 80 bp, synthetic construct; identical to SEQ ID NO: 24476
  misc_feature 1..80: note = Artificially Synthesized Probe
  source 1..80: mol_type = other DNA

SEQ ID NO: 52282 - DNA, 80 bp, synthetic construct
  misc_feature 1..80: note = Artificially Synthesized Probe
  source 1..80: mol_type = other DNA
acatgacattcttctattgtccatatagttcacactgttcttttgctcttatcatattgctgagtgctcagagggtactg

SEQ ID NO: 52283 - DNA, 80 bp, synthetic construct; identical to SEQ ID NO: 24520
  misc_feature 1..80: note = Artificially Synthesized Probe
  source 1..80: mol_type = other DNA

SEQ ID NO: 52284 - DNA, 80 bp, synthetic construct
  misc_feature 1..80: note = Artificially Synthesized Probe
  source 1..80: mol_type = other DNA
accgtgtaagattttaatttgcattctttgtgaaggtgatatttctgggggagataaatccaagaaaggggtaaaacgga

SEQ ID NO: 52285 - DNA, 80 bp, synthetic construct
  misc_feature 1..80: note = Artificially Synthesized Probe
  source 1..80: mol_type = other DNA
ccaggtactgtgtattttttctgattgtcagaaacaaacccacaaagctccagcatacaccatcagtaacatttctcatt

SEQ ID NO: 52286 - DNA, 80 bp, synthetic construct
  misc_feature 1..80: note = Artificially Synthesized Probe
  source 1..80: mol_type = other DNA
aaattcctgaagtcaggagctgtgacttgttcatcttttgagagctagaagcaacatactcatgtccctgtgtatttaca

SEQ ID NO: 52287 - DNA, 80 bp, synthetic construct; identical to SEQ ID NO: 24521
  misc_feature 1..80: note = Artificially Synthesized Probe
  source 1..80: mol_type = other DNA

SEQ ID NO: 52288 - DNA, 80 bp, synthetic construct
  misc_feature 1..80: note = Artificially Synthesized Probe
  source 1..80: mol_type = other DNA
tgccattctcctgcctcagcctcacgcatagctgggactacaggtgcctgccaccgcgcctggctaattttttgtatttt

SEQ ID NO: 52289 - DNA, 80 bp, synthetic construct
  misc_feature 1..80: note = Artificially Synthesized Probe
  source 1..80: mol_type = other DNA
aggctttaggatcctcaatttctgagccttcctggagtttatggtgccagtgggttggtttcttaatactcccctttctc

SEQ ID NO: 52290 - DNA, 80 bp, synthetic construct
  misc_feature 1..80: note = Artificially Synthesized Probe
  source 1..80: mol_type = other DNA
ttctgtctttgtgagtttataccttttttactccttcgttgttactggaatggagtttgggagctaaccatatgtgttcg

SEQ ID NO: 52291 - DNA, 80 bp, synthetic construct; identical to SEQ ID NO: 24522
  misc_feature 1..80: note = Artificially Synthesized Probe
  source 1..80: mol_type = other DNA

SEQ ID NO: 52292 - DNA, 80 bp, synthetic construct
  misc_feature 1..80: note = Artificially Synthesized Probe
  source 1..80: mol_type = other DNA
ctgctttttactccaaggtcttgttccctagtcccatttacctggatggtttcgactttctttttaatcttcattttagt

SEQ ID NO: 52293 - DNA, 80 bp, synthetic construct
  misc_feature 1..80: note = Artificially Synthesized Probe
  source 1..80: mol_type = other DNA
gaacccgggaggcagaggttgcagagagccgagatcgcgccactgcactccagccagggcgacagggcgagacccggtct

SEQ ID NO: 52294 - DNA, 80 bp, synthetic construct
  misc_feature 1..80: note = Artificially Synthesized Probe
  source 1..80: mol_type = other DNA
cacaggtgcacaccactatgcccagctaattttatttcttgttttttgtagagatgaggtcttgctatattgcccaggct

SEQ ID NO: 52295 - DNA, 80 bp, synthetic construct
  misc_feature 1..80: note = Artificially Synthesized Probe
  source 1..80: mol_type = other DNA
gtgcaatacgtgaatgaagacattcacaagtgccctgagtgtttatgctgcaggggttctgggttgagggaacaccacaa

SEQ ID NO: 52296 - DNA, 80 bp, synthetic construct
  misc_feature 1..80: note = Artificially Synthesized Probe
  source 1..80: mol_type = other DNA
cttagttgttgggctcccatgaggtcctagaacacaccaggtgctcttctggcctgtgcctttgtacctgttcttgtcct

SEQ ID NO: 52297 - DNA, 80 bp, synthetic construct; identical to SEQ ID NO: 24523
  misc_feature 1..80: note = Artificially Synthesized Probe
  source 1..80: mol_type = other DNA

SEQ ID NO: 52298 - DNA, 80 bp, synthetic construct
  misc_feature 1..80: note = Artificially Synthesized Probe
  source 1..80: mol_type = other DNA
ttttagctgccttcttcctgactcagatttagtttctctaacaggaagagttcagatgcttgtgtcagaacgtgtgttgt

SEQ ID NO: 52299 - DNA, 80 bp, synthetic construct
  misc_feature 1..80: note = Artificially Synthesized Probe
  source 1..80: mol_type = other DNA
gctaaccctttactcgcgacctttcgcttcaccttcacagcagccctgcgaggtgagtgttgttattggtgccatttaca

SEQ ID NO: 52300 - DNA, 80 bp, synthetic construct
  misc_feature 1..80: note = Artificially Synthesized Probe
  source 1..80: mol_type = other DNA
gaatctggtaggaatcgagcagtgtgaccattcactttgggaattcttcttcccactatcctataacctgcttatgtttt

SEQ ID NO: 52301 - DNA, 80 bp, synthetic construct
  misc_feature 1..80: note = Artificially Synthesized Probe
  source 1..80: mol_type = other DNA
aaattgaatctatataagcacacctgttgagtgtgtatcagtgtataactgttgagtgagattagtgcacatggcagcac

SEQ ID NO: 52302 - DNA, 80 bp, synthetic construct; identical to SEQ ID NO: 24524
  misc_feature 1..80: note = Artificially Synthesized Probe
  source 1..80: mol_type = other DNA

SEQ ID NO: 52303 - DNA, 80 bp, synthetic construct
  misc_feature 1..80: note = Artificially Synthesized Probe
  source 1..80: mol_type = other DNA
ccaggcttggcggaggtcgtgctcagcgtctaccacagctggaggaggcacagcaccagcctgcccaacccgctgctgag

SEQ ID NO: 52304 - DNA, 80 bp, synthetic construct
  misc_feature 1..80: note = Artificially Synthesized Probe
  source 1..80: mol_type = other DNA
gcatctacttgtgggcctggaacctggtttttttgtgggtgtcgaagcaggaagtcactgaacctagtttgtgcctagaa

SEQ ID NO: 52305 - DNA, 80 bp, synthetic construct
  misc_feature 1..80: note = Artificially Synthesized Probe
  source 1..80: mol_type = other DNA
aaccctgatccattagcaattagcagttacttcccatcctgtcttcccccagctctaggcaaccacaaatccactttctg

SEQ ID NO: 52306 - DNA, 80 bp, synthetic construct; identical to SEQ ID NO: 24525
  misc_feature 1..80: note = Artificially Synthesized Probe
  source 1..80: mol_type = other DNA

SEQ ID NO: 52307 - DNA, 80 bp, synthetic construct
  misc_feature 1..80: note = Artificially Synthesized Probe
  source 1..80: mol_type = other DNA
tcacggctcactgcagcttcaacctcctgggctcgggtagtcctcccacctcagccttcaaagtagctggaaccacagcc

SEQ ID NO: 52308 - DNA, 80 bp, synthetic construct
  misc_feature 1..80: note = Artificially Synthesized Probe
  source 1..80: mol_type = other DNA
gcgacaaggcgagactcttgtctcaaaaaaaaaaaatttgttttgttttgtagagatgggggtctccttttgttacgatg

SEQ ID NO: 52309 - DNA, 80 bp, synthetic construct
  misc_feature 1..80: note = Artificially Synthesized Probe
  source 1..80: mol_type = other DNA
ctggcctatgactatttttaacagatgataaaacagcagaagctaaatagcgtgcttagagaagctttgggggccaccag

SEQ ID NO: 52310 - DNA, 80 bp, synthetic construct; identical to SEQ ID NO: 24526
  misc_feature 1..80: note = Artificially Synthesized Probe
  source 1..80: mol_type = other DNA

SEQ ID NO: 52311 - DNA, 80 bp, synthetic construct
  misc_feature 1..80: note = Artificially Synthesized Probe
  source 1..80: mol_type = other DNA
gtgccttctcatcactgagcctcagcttcctcaagtgccctgggaatggtataccagctgcccagaacttttaagggttg

SEQ ID NO: 52312 - DNA, 80 bp, synthetic construct
  misc_feature 1..80: note = Artificially Synthesized Probe
  source 1..80: mol_type = other DNA
tacatccatgtggctctttttatgttctggcgagtagccactgattatcacttatgaaatggcaagtggatagaaagaat

SEQ ID NO: 52313 - DNA, 80 bp, synthetic construct
  misc_feature 1..80: note = Artificially Synthesized Probe
  source 1..80: mol_type = other DNA
gctgctgaccaaaggcagaagctctgcaggtaggaggcattatgtgttctgtggccaggctaatatctgaacccccagca

SEQ ID NO: 52314 - DNA, 80 bp, synthetic construct; identical to SEQ ID NO: 24527
  misc_feature 1..80: note = Artificially Synthesized Probe
  source 1..80: mol_type = other DNA

SEQ ID NO: 52315 - DNA, 80 bp, synthetic construct
  misc_feature 1..80: note = Artificially Synthesized Probe
  source 1..80: mol_type = other DNA
cctcccgaggagctgggactacaggcgtgtgccaccatgcctggctaatttttgtattttttggcagagatggggtttca

SEQ ID NO: 52316 - DNA, 80 bp, synthetic construct
  misc_feature 1..80: note = Artificially Synthesized Probe
  source 1..80: mol_type = other DNA
aaaattgcttccccttgcccttgcccctgactctcggcagggggcagggtctctgcatatctttgtcttaactggtccaa

SEQ ID NO: 52317 - DNA, 80 bp, synthetic construct
  misc_feature 1..80: note = Artificially Synthesized Probe
  source 1..80: mol_type = other DNA
gatataccaccttttgtttatccatttatcagttgatggattttgggtttctacttatgcattattttgaattatgttgc

SEQ ID NO: 52318 - DNA, 80 bp, synthetic construct
  misc_feature 1..80: note = Artificially Synthesized Probe
  source 1..80: mol_type = other DNA
agtgtctcctcggaactgccctgctggtatggtgaatggcagatttggacctgacttcccagggacccactgcctgggtg

SEQ ID NO: 52319 - DNA, 80 bp, synthetic construct
  misc_feature 1..80: note = Artificially Synthesized Probe
  source 1..80: mol_type = other DNA
gtgggcagaaaattgaccatgttgagggtgtgtgtgtgtatgtgtgtgtgtgtgtgtgtgtgcatgcatgtgtacatgca

SEQ ID NO: 52320 - DNA, 80 bp, synthetic construct; identical to SEQ ID NO: 24528
  misc_feature 1..80: note = Artificially Synthesized Probe
  source 1..80: mol_type = other DNA

SEQ ID NO: 52321 - DNA, 80 bp, synthetic construct
  misc_feature 1..80: note = Artificially Synthesized Probe
  source 1..80: mol_type = other DNA
cagcaaccatttagtctaaagaaagcaacactgtttgatgtgaagaacattagttctggaattaggacaggcctggcttc

SEQ ID NO: 52322 - DNA, 80 bp, synthetic construct
  misc_feature 1..80: note = Artificially Synthesized Probe
  source 1..80: mol_type = other DNA
tggtaaaaaacccaccctcatggcctccacagtctagtgagataagtggtgtaaagcatctggcacatcatagtcagtct

SEQ ID NO: 52323 - DNA, 80 bp, synthetic construct; identical to SEQ ID NO: 24529
  misc_feature 1..80: note = Artificially Synthesized Probe
  source 1..80: mol_type = other DNA

SEQ ID NO: 52324 - DNA, 80 bp, synthetic construct
  misc_feature 1..80: note = Artificially Synthesized Probe
  source 1..80: mol_type = other DNA
cgccatgcctggctaattttttgtatctttagtagagacggggtttcaccatgttggccaggctggtcttgaactcctga

SEQ ID NO: 52325 - DNA, 80 bp, synthetic construct
  misc_feature 1..80: note = Artificially Synthesized Probe
  source 1..80: mol_type = other DNA
gagggaaggtcagcagataaacaagtgaacaaaggtctctggttttcctaggcagaggaccctgcggccttccgcagtgt

SEQ ID NO: 52326 - DNA, 80 bp, synthetic construct; identical to SEQ ID NO: 24477
  misc_feature 1..80: note = Artificially Synthesized Probe
  source 1..80: mol_type = other DNA

SEQ ID NO: 52327 - DNA, 80 bp, synthetic construct
  misc_feature 1..80: note = Artificially Synthesized Probe
  source 1..80: mol_type = other DNA
ggtcatagatcaacaggatcccaaggcagaagaatttttcttagtacagaacaaaatgaaaagtctcccatgtctacttc

SEQ ID NO: 52328 - DNA, 80 bp, synthetic construct
  misc_feature 1..80: note = Artificially Synthesized Probe
  source 1..80: mol_type = other DNA
ttcccagtaggggcggccgggcagaggcgcccctcacctcccagacggggcggctggccgggcgggggctgaccccccac

SEQ ID NO: 52329 - DNA, 80 bp, synthetic construct; identical to SEQ ID NO: 24530
  misc_feature 1..80: note = Artificially Synthesized Probe
  source 1..80: mol_type = other DNA

SEQ ID NO: 52330 - DNA, 80 bp, synthetic construct
  misc_feature 1..80: note = Artificially Synthesized Probe
  source 1..80: mol_type = other DNA
acgatggcggccaggcagagacgctcctcacttcccagacggggtggcggccgggcagaggctgcaatctcggcactttg

SEQ ID NO: 52331 - DNA, 80 bp, synthetic construct
  misc_feature 1..80: note = Artificially Synthesized Probe
  source 1..80: mol_type = other DNA
ctggagaccagcccggccaacacagcgaaaccccgtctccaccgaaaaaatatgaaaaccagtcaggcgtggcggcgcac

SEQ ID NO: 52332 - DNA, 80 bp, synthetic construct; identical to SEQ ID NO: 24531
  misc_feature 1..80: note = Artificially Synthesized Probe
  source 1..80: mol_type = other DNA

SEQ ID NO: 52333 - DNA, 80 bp, synthetic construct
  misc_feature 1..80: note = Artificially Synthesized Probe
  source 1..80: mol_type = other DNA
tccttggtggaaagcaggtgtgggagctctcaccagcactatttagaagcagtcattgctctgctctcctggctatgtgt

SEQ ID NO: 52334 - DNA, 80 bp, synthetic construct
  misc_feature 1..80: note = Artificially Synthesized Probe
  source 1..80: mol_type = other DNA
ctgtgacatgtccacactggctgaaagtggccttcagactctcctagagttatttcagggacaagtacaagtacagagct

SEQ ID NO: 52335 - DNA, 80 bp, synthetic construct
  misc_feature 1..80: note = Artificially Synthesized Probe
  source 1..80: mol_type = other DNA
tggaactcctctgcttctgagtagtttttggtttttgatgtgcttgttttttaaagaattggatgcctagccattaatag

SEQ ID NO: 52336 - DNA, 80 bp, synthetic construct
  misc_feature 1..80: note = Artificially Synthesized Probe
  source 1..80: mol_type = other DNA
cctcatacagcattgccgggcctttttcagattgataagaacctgaagtcgctggagcggtgccagtccctggaggagat

SEQ ID NO: 52337 - DNA, 80 bp, synthetic construct; identical to SEQ ID NO: 24532
  misc_feature 1..80: note = Artificially Synthesized Probe
  source 1..80: mol_type = other DNA

SEQ ID NO: 52338 - DNA, 80 bp, synthetic construct
  misc_feature 1..80: note = Artificially Synthesized Probe
  source 1..80: mol_type = other DNA
cagtgtgtgctgtcatgctttaatttttgcagtgagaaatagtgtctagtgttgttttgttttaatatgcatatctctat

SEQ ID NO: 52339 - DNA, 80 bp, synthetic construct
  misc_feature 1..80: note = Artificially Synthesized Probe
  source 1..80: mol_type = other DNA
gtggcagaggaggaaggaagaatggtcaggtcatcatctgtccatccacttgtttattcatccatcttgttttgtattgc

SEQ ID NO: 52340 - DNA, 80 bp, synthetic construct
  misc_feature 1..80: note = Artificially Synthesized Probe
  source 1..80: mol_type = other DNA
ctcctgaatccttctgtgcttctgttcctcaggaggtaaactcttaccaagagcctgccagggaactggcagctgctggg

SEQ ID NO: 52341 - DNA, 80 bp, synthetic construct
  misc_feature 1..80: note = Artificially Synthesized Probe
  source 1..80: mol_type = other DNA
cgttgccaccatcctcaggagggttgagttggcaccgagataaacatggaagataatacgcaaaatatgcttagtggcat

SEQ ID NO: 52342 - DNA, 80 bp, synthetic construct; identical to SEQ ID NO: 24533
  misc_feature 1..80: note = Artificially Synthesized Probe
  source 1..80: mol_type = other DNA

SEQ ID NO: 52343 - DNA, 80 bp, synthetic construct
  misc_feature 1..80: note = Artificially Synthesized Probe
  source 1..80: mol_type = other DNA
tggcccagcatggctatgtgtgggagggacagccagcataccaggaagggtgctgggtgggagaaaggggagagaggcca

SEQ ID NO: 52344 - DNA, 80 bp, synthetic construct
  misc_feature 1..80: note = Artificially Synthesized Probe
  source 1..80: mol_type = other DNA
ccgaatgctgtggaagctcctgctttttgtgaattaaggtttcctgattattgctcagttttgtattgagagtgttttct

SEQ ID NO: 52345 - DNA, 80 bp, synthetic construct; identical to SEQ ID NO: 24534
  misc_feature 1..80: note = Artificially Synthesized Probe
  source 1..80: mol_type = other DNA

SEQ ID NO: 52346 - DNA, 80 bp, synthetic construct
  misc_feature 1..80: note = Artificially Synthesized Probe
  source 1..80: mol_type = other DNA
tatgttttgcatttaacttgtttcatttagcttttctcaagtggggcattgaacttgcagtcttttcctgtgggtgtata

SEQ ID NO: 52347 - DNA, 80 bp, synthetic construct
  misc_feature 1..80: note = Artificially Synthesized Probe
  source 1..80: mol_type = other DNA
gctggcttatagaaaccctattgatttttttgtgtttgagtctgggtgcttcactgagttcccattatttcttgttttct

SEQ ID NO: 52348 - DNA, 80 bp, synthetic construct
  misc_feature 1..80: note = Artificially Synthesized Probe
  source 1..80: mol_type = other DNA
gtcttgtccctgactttcacaatgactctggttgcatttagtagtctttatcatgctggaaaataatcctctggctctca

SEQ ID NO: 52349 - DNA, 80 bp, synthetic construct
  misc_feature 1..80: note = Artificially Synthesized Probe
  source 1..80: mol_type = other DNA
atcttttttttttttttttttttgagatggagtctccctcaccaggctggagtgcaatggcgcgatctcggctcactgca

SEQ ID NO: 52350 - DNA, 80 bp, synthetic construct
  misc_feature 1..80: note = Artificially Synthesized Probe
  source 1..80: mol_type = other DNA
tggggggggttttgatctgtgttcagataccacaccacattccaaaggcagttccaggtatttctgaccccacacctgtt

SEQ ID NO: 52351 - DNA, 80 bp, synthetic construct; identical to SEQ ID NO: 24535
  misc_feature 1..80: note = Artificially Synthesized Probe
  source 1..80: mol_type = other DNA

SEQ ID NO: 52352 - DNA, 80 bp, synthetic construct
  misc_feature 1..80: note = Artificially Synthesized Probe
  source 1..80: mol_type = other DNA
tgatgtggtggctgaggctcaaatggcttacacattggccccatcagggcacctggggaggaggaggctgatagagtgat

SEQ ID NO: 52353 - DNA, 80 bp, synthetic construct
  misc_feature 1..80: note = Artificially Synthesized Probe
  source 1..80: mol_type = other DNA
gttggggtgcctgtctcaccttggctggctctgcagcctcattcccagcatccccactttataaatggggaagttgaggt

SEQ ID NO: 52354 - DNA, 80 bp, synthetic construct; identical to SEQ ID NO: 24536
  misc_feature 1..80: note = Artificially Synthesized Probe
  source 1..80: mol_type = other DNA

SEQ ID NO: 52355 - DNA, 80 bp, synthetic construct
  misc_feature 1..80: note = Artificially Synthesized Probe
  source 1..80: mol_type = other DNA
ccctctctgcggacagcagtggtagcatcctgaaggtatcatcctccaccactggccttgtgcggctcaccaacaacctc

SEQ ID NO: 52356 - DNA, 80 bp, synthetic construct
  misc_feature 1..80: note = Artificially Synthesized Probe
  source 1..80: mol_type = other DNA
gtttgtgcgcaggctgcaaaccttcctggggctggtcggatctggggattagagactgtgtagcacttggtgccatgggg

SEQ ID NO: 52357 - DNA, 80 bp, synthetic construct
  misc_feature 1..80: note = Artificially Synthesized Probe
  source 1..80: mol_type = other DNA
caccctgcatcgtccaggaagtctttaaggcagagaatcttcctctgaagcactctgggctctctcctcaattcccgctc

SEQ ID NO: 52358 - DNA, 80 bp, synthetic construct; identical to SEQ ID NO: 24537
  misc_feature 1..80: note = Artificially Synthesized Probe
  source 1..80: mol_type = other DNA

SEQ ID NO: 52359 - DNA, 80 bp, synthetic construct
  misc_feature 1..80: note = Artificially Synthesized Probe
  source 1..80: mol_type = other DNA
actcacttggaaactttcttaataaggctctcacctgtctgccccacccctcctctgtgagccattgtggctgcatctgt

SEQ ID NO: 52360 - DNA, 80 bp, synthetic construct
  misc_feature 1..80: note = Artificially Synthesized Probe
  source 1..80: mol_type = other DNA
tccgcctgcctcagcctcccaaagtgctgggattacaggcgtgagccactgcgcctgacccaatttatcattttaaccat

SEQ ID NO: 52361 - DNA, 80 bp, synthetic construct
  misc_feature 1..80: note = Artificially Synthesized Probe
  source 1..80: mol_type = other DNA
agggtatcagtaactgcatgtggcatgaaggagagtagtgtgactatcattggacactatgggtctctgtccgatgacat

SEQ ID NO: 52362 - DNA, 80 bp, synthetic construct
  misc_feature 1..80: note = Artificially Synthesized Probe
  source 1..80: mol_type = other DNA
attgactgcagcatggctgtgcaggaggaggccaaggagccccacgtctcttcagtgctaccctggatcattctacaccg

SEQ ID NO: 52363 - DNA, 80 bp, synthetic construct; identical to SEQ ID NO: 24538
  misc_feature 1..80: note = Artificially Synthesized Probe
  source 1..80: mol_type = other DNA

SEQ ID NO: 52364 - DNA, 80 bp, synthetic construct
  misc_feature 1..80: note = Artificially Synthesized Probe
  source 1..80: mol_type = other DNA
aatccccatgacacccgaagggatggtaagccgagggcagcatggagtgagcacaggttccacatcccaactgtcacttc

SEQ ID NO: 52365 - DNA, 80 bp, synthetic construct
  misc_feature 1..80: note = Artificially Synthesized Probe
  source 1..80: mol_type = other DNA
tgctgagtgatgagaatccagggagggcgagccccagacccttaatggagatggcaatggatccatagtcagtgcaatgg

SEQ ID NO: 52366 - DNA, 80 bp, synthetic construct
  misc_feature 1..80: note = Artificially Synthesized Probe
  source 1..80: mol_type = other DNA
ttgctgtccagacttggcctaatgcacatctagtttgtgtgcagttgttagaataatatgtgtctattgatgcttgtatt

SEQ ID NO: 52367 - DNA, 80 bp, synthetic construct; identical to SEQ ID NO: 24539
  misc_feature 1..80: note = Artificially Synthesized Probe
  source 1..80: mol_type = other DNA

SEQ ID NO: 52368 - DNA, 80 bp, synthetic construct
  misc_feature 1..80: note = Artificially Synthesized Probe
  source 1..80: mol_type = other DNA
ggcagaggaagacattggggaggtggagtggggccagggactgagcaagccttaagtcaggcaggagacctggggcatgg

SEQ ID NO: 52369 - DNA, 80 bp, synthetic construct
  misc_feature 1..80: note = Artificially Synthesized Probe
  source 1..80: mol_type = other DNA
ttcattcttacgggtcatgccgtgatgaacacctcattcatgcctttttgcttgtacccaattttttttttaggataaat

SEQ ID NO: 52370 - DNA, 80 bp, synthetic construct
  misc_feature 1..80: note = Artificially Synthesized Probe
  source 1..80: mol_type = other DNA
attctccttttcctcaaaattaattatgcaaacaaaaattagttttcaaaaaactgccagcaagtaaatgcggatagagg

SEQ ID NO: 52371 - DNA, 80 bp, synthetic construct; identical to SEQ ID NO: 24540
  misc_feature 1..80: note = Artificially Synthesized Probe
  source 1..80: mol_type = other DNA

SEQ ID NO: 52372 - DNA, 80 bp, synthetic construct
  misc_feature 1..80: note = Artificially Synthesized Probe
  source 1..80: mol_type = other DNA
tctactttctgtttctatgaatttgactactgtaggtacgttatatacatggaatcgtacaatatttgtctttttatgac

SEQ ID NO: 52373 - DNA, 80 bp, synthetic construct
  misc_feature 1..80: note = Artificially Synthesized Probe
  source 1..80: mol_type = other DNA
ctggtgaggatattatcacccaggaaaaataataacagttatcacatactgaattctctggaagcagatactaagacagg

SEQ ID NO: 52374 - DNA, 80 bp, synthetic construct
  misc_feature 1..80: note = Artificially Synthesized Probe
  source 1..80: mol_type = other DNA
cataaatgcaaacagcatggagcagaatgaatatgacaaattggaacaattggttgcatttaagagccaaaagtaacagg

SEQ ID NO: 52375 - DNA, 80 bp, synthetic construct
  misc_feature 1..80: note = Artificially Synthesized Probe
  source 1..80: mol_type = other DNA
cctagagacctagctacttgggaggctgagaaaggaggatgacttgagcccaggagttggaggctgcattgagctatgac

SEQ ID NO: 52376 - DNA, 80 bp, synthetic construct; identical to SEQ ID NO: 24541
  misc_feature 1..80: note = Artificially Synthesized Probe
  source 1..80: mol_type = other DNA

SEQ ID NO: 52377 - DNA, 80 bp, synthetic construct
  misc_feature 1..80: note = Artificially Synthesized Probe
  source 1..80: mol_type = other DNA
caacatagtgaaaccctgtctctacaaaaaattaaaaaattagctgggtgtggtagctcgcgcctgtagtcccagctact

SEQ ID NO: 52378 - DNA, 80 bp, synthetic construct
  misc_feature 1..80: note = Artificially Synthesized Probe
  source 1..80: mol_type = other DNA
ttccattgtaacaaattacttttctctcattcaaaatgcatcagatatgcacagatggatgctgtgactgaggttcacca

SEQ ID NO: 52379 - DNA, 80 bp, synthetic construct
  misc_feature 1..80: note = Artificially Synthesized Probe
  source 1..80: mol_type = other DNA
gggaaaggaaaagtctgtagtcatgttgataaagacagaaaagcccgaaaagaggagactgagcctcgcagcccctgcag

SEQ ID NO: 52380 - DNA, 80 bp, synthetic construct
  misc_feature 1..80: note = Artificially Synthesized Probe
  source 1..80: mol_type = other DNA
agaaggtcctggtgctgcaattcagatggggctctgctgcgattctatgtaagtgcttccccttgggctgcagactgcca

SEQ ID NO: 52381 - DNA, 80 bp, synthetic construct; identical to SEQ ID NO: 24542
  misc_feature 1..80: note = Artificially Synthesized Probe
  source 1..80: mol_type = other DNA

SEQ ID NO: 52382 - DNA, 80 bp, synthetic construct
  misc_feature 1..80: note = Artificially Synthesized Probe
  source 1..80: mol_type = other DNA
tactcacaatgccaagtagtagttgctcattcaatagctattattacatccattcagtcactaaatgattagtgagagca

SEQ ID NO: 52383 - DNA, 80 bp, synthetic construct; identical to SEQ ID NO: 24478
  misc_feature 1..80: note = Artificially Synthesized Probe
  source 1..80: mol_type = other DNA

SEQ ID NO: 52384 - DNA, 80 bp, synthetic construct
  misc_feature 1..80: note = Artificially Synthesized Probe
  source 1..80: mol_type = other DNA
agacagggacctcagacccagcctataatatttattcgtgaagttctattgggatataaccatgcccattcatttacata

SEQ ID NO: 52385 - DNA, 80 bp, synthetic construct
  misc_feature 1..80: note = Artificially Synthesized Probe
  source 1..80: mol_type = other DNA
acaactgcaccctccctcccagtactccccatcttcctgtgctttcccctcagcgcttaacctctagcatgctgtgtgat

SEQ ID NO: 52386 - DNA, 80 bp, synthetic construct; identical to SEQ ID NO: 24543
  misc_feature 1..80: note = Artificially Synthesized Probe
  source 1..80: mol_type = other DNA

SEQ ID NO: 52387 - DNA, 80 bp, synthetic construct
  misc_feature 1..80: note = Artificially Synthesized Probe
  source 1..80: mol_type = other DNA
cagctctactctccaagactatttttggaagagttttgccaggctgagtctgtaatgctgcccaggactcagccactccc

SEQ ID NO: 52388 - DNA, 80 bp, synthetic construct
  misc_feature 1..80: note = Artificially Synthesized Probe
  source 1..80: mol_type = other DNA
tgaaggggcaacaggatggtcctatttcatttttcttaatctgtgtcttttctactggagcatgaattctagctgctgat

SEQ ID NO: 52389 - DNA, 80 bp, synthetic construct
  misc_feature 1..80: note = Artificially Synthesized Probe
  source 1..80: mol_type = other DNA
cagcttctgcatgactggtttgttgtttccttcctgcattttcaaagaggcttttctctcttgccacatgctgtcctgtc

SEQ ID NO: 52390 - DNA, 80 bp, synthetic construct; identical to SEQ ID NO: 24544
  misc_feature 1..80: note = Artificially Synthesized Probe
  source 1..80: mol_type = other DNA

SEQ ID NO: 52391 - DNA, 80 bp, synthetic construct
  misc_feature 1..80: note = Artificially Synthesized Probe
  source 1..80: mol_type = other DNA
cctcttgagtctcttcttttcttgagttatttcttttcatatgttttacttgggttgatggattcttatctgttcatctc

SEQ ID NO: 52392 - DNA, 80 bp, synthetic construct
  misc_feature 1..80: note = Artificially Synthesized Probe
  source 1..80: mol_type = other DNA
ctgctgtatttgccacaaatttgtcttctgataaaaataagagttaacaagaaagcatgctcttcactaccctacctccc

SEQ ID NO: 52393 - DNA, 80 bp, synthetic construct
  misc_feature 1..80: note = Artificially Synthesized Probe
  source 1..80: mol_type = other DNA
aaccttctacctcaactgccctgagtagctgggactacagatgtgtaccaccatgccctggctaatttttaaattttttg

SEQ ID NO: 52394 - DNA, 80 bp, synthetic construct
  misc_feature 1..80: note = Artificially Synthesized Probe
  source 1..80: mol_type = other DNA
tatagtatgtaacctcttgcagcttgcttttattttagtatactgagatacagttacattgatacaagtacatctagttt

SEQ ID NO: 52395 - DNA, 80 bp, synthetic construct; identical to SEQ ID NO: 24545
  misc_feature 1..80: note = Artificially Synthesized Probe
  source 1..80: mol_type = other DNA

SEQ ID NO: 52396 - DNA, 80 bp, synthetic construct
  misc_feature 1..80: note = Artificially Synthesized Probe
  source 1..80: mol_type = other DNA
taacgtccaccaagaggttgttttatgtatacatgtgagagtttctcttgtgtagattcctgtaaaaggaactactggat

SEQ ID NO: 52397 - DNA, 80 bp, synthetic construct
  misc_feature 1..80: note = Artificially Synthesized Probe
  source 1..80: mol_type = other DNA
aggtacagtagacttaaatgttgatgcccatctgaaaggcatgaaatggtatttcattgttctttagatgttctttctaa

SEQ ID NO: 52398 - DNA, 80 bp, synthetic construct; identical to SEQ ID NO: 24546
  misc_feature 1..80: note = Artificially Synthesized Probe
  source 1..80: mol_type = other DNA

SEQ ID NO: 52399 - DNA, 80 bp, synthetic construct
  misc_feature 1..80: note = Artificially Synthesized Probe
  source 1..80: mol_type = other DNA
aaagatctcctttacattagtctactagtttgctcttgtatttcatgtgtctgtattccatctaaattttatttttgtta

SEQ ID NO: 52400 - DNA, 80 bp, synthetic construct
  misc_feature 1..80: note = Artificially Synthesized Probe
  source 1..80: mol_type = other DNA
tactgaattgtctttgagagattttgatacctggtagggttaacctactcacgtacctcttagtctcttggctattcttg

SEQ ID NO: 52401 - DNA, 80 bp, synthetic construct
  misc_feature 1..80: note = Artificially Synthesized Probe
  source 1..80: mol_type = other DNA
gtcgtaaatgtggtatatctctctgtttatttaggtcttatgctttcatgtcccttaattcagcttaataattttctcca

SEQ ID NO: 52402 - DNA, 80 bp, synthetic construct
  misc_feature 1..80: note = Artificially Synthesized Probe
  source 1..80: mol_type = other DNA
gagcactagttttttgaataattttttcttatgcacagctcctttgcttattgcttctattaattttagtgggtggtaga

SEQ ID NO: 52403 - DNA, 80 bp, synthetic construct
  misc_feature 1..80: note = Artificially Synthesized Probe
  source 1..80: mol_type = other DNA
tttctcagtttttaagagctgtttgtatattaggggtattagtcccttgtcagtggtatatgttgcaaatattttctccc

SEQ ID NO: 52404 - DNA, 80 bp, synthetic construct; identical to SEQ ID NO: 24547
  misc_feature 1..80: note = Artificially Synthesized Probe
  source 1..80: mol_type = other DNA

SEQ ID NO: 52405 - DNA, 80 bp, synthetic construct
  misc_feature 1..80: note = Artificially Synthesized Probe
  source 1..80: mol_type = other DNA
gggcaggatttggcccatggggtggtttgccacctgtggtctagagctctctctctctttttggggagtgttataataaa

SEQ ID NO: 52406 - DNA, 80 bp, synthetic construct
  misc_feature 1..80: note = Artificially Synthesized Probe
  source 1..80: mol_type = other DNA
ctttaaaaagttctgtggtacctcgagttatgcccctttttcattgctaaaatagtttgtgctttctccccccacctttt

SEQ ID NO: 52407 - DNA, 80 bp, synthetic construct
  misc_feature 1..80: note = Artificially Synthesized Probe
  source 1..80: mol_type = other DNA
tgaatggttattttagtattcactctttttttttcttttttctatttttattatttttaaaaattttgggccaggtgcag

SEQ ID NO: 52408 - DNA, 80 bp, synthetic construct; identical to SEQ ID NO: 24548
  misc_feature 1..80: note = Artificially Synthesized Probe
  source 1..80: mol_type = other DNA

SEQ ID NO: 52409 - DNA, 80 bp, synthetic construct
  misc_feature 1..80: note = Artificially Synthesized Probe
  source 1..80: mol_type = other DNA
acagctcactgcagcctggacctcctgggctcgagcagtcttcctgccttagcctcccacgtagctgggactacaggtgt

SEQ ID NO: 52410 - DNA, 80 bp, synthetic construct
  misc_feature 1..80: note = Artificially Synthesized Probe
  source 1..80: mol_type = other DNA
acttttctaatgcctgtattgaagactgtaagttttcccagatacatctttgtctgactcccatatattctgatatttgg

SEQ ID NO: 52411 - DNA, 80 bp, synthetic construct
  misc_feature 1..80: note = Artificially Synthesized Probe
  source 1..80: mol_type = other DNA
gttgggcataacaatagccgtcggctctcatattcttagatgtaacttgtttactatgttgttcacatcctctctgatcc

SEQ ID NO: 52412 - DNA, 80 bp, synthetic construct
  misc_feature 1..80: note = Artificially Synthesized Probe
  source 1..80: mol_type = other DNA
atttggcccttctctactacgtaatactaagtgttaatacaaaggttaaagaggaattcaccagtatctcctttagtagt

SEQ ID NO: 52413 - DNA, 80 bp, synthetic construct
  misc_feature 1..80: note = Artificially Synthesized Probe
  source 1..80: mol_type = other DNA
ttcgttgaggaaatcaatgactaaataaatgagtgaagttcccaggaggcaaatatcttcttctggtggctggtagaaat

SEQ ID NO: 52414 - DNA, 80 bp, synthetic construct; identical to SEQ ID NO: 24549
  misc_feature 1..80: note = Artificially Synthesized Probe
  source 1..80: mol_type = other DNA

SEQ ID NO: 52415 - DNA, 80 bp, synthetic construct
  misc_feature 1..80: note = Artificially Synthesized Probe
  source 1..80: mol_type = other DNA
tctgcacaagtggctttgggagtcacttaactcttcaggacctgggttattacaggttataagtgtgggaccgtcggatt

SEQ ID NO: 52416 - DNA, 80 bp, synthetic construct
  misc_feature 1..80: note = Artificially Synthesized Probe
  source 1..80: mol_type = other DNA
acccttacaaggaggagctggagacagccttggagcagtgcttctactgcctgtacagcttccccagcaagaagagtaag

SEQ ID NO: 52417 - DNA, 80 bp, synthetic construct
  misc_feature 1..80: note = Artificially Synthesized Probe
  source 1..80: mol_type = other DNA
agctcttttgaaggatgtcatatttgtcaacagtcatcttggcagtcctgcttggagttgcatcagaaggaggagagaag

SEQ ID NO: 52418 - DNA, 80 bp, synthetic construct
  misc_feature 1..80: note = Artificially Synthesized Probe
  source 1..80: mol_type = other DNA
tacttgaggccagaattttaaggctggagtgcactgtgattgcatctgtgaatagccctgggtggcagagcaaggcccca

SEQ ID NO: 52419 - DNA, 80 bp, synthetic construct; identical to SEQ ID NO: 24550
  misc_feature 1..80: note = Artificially Synthesized Probe
  source 1..80: mol_type = other DNA

SEQ ID NO: 52420 - DNA, 80 bp, synthetic construct
  misc_feature 1..80: note = Artificially Synthesized Probe
  source 1..80: mol_type = other DNA
tgtggtttctaatgtctgtctttctacagactaggcttatgcttttcagacacttggatttggggattatagtgggcatg

SEQ ID NO: 52421 - DNA, 80 bp, synthetic construct
  misc_feature 1..80: note = Artificially Synthesized Probe
  source 1..80: mol_type = other DNA
cccagctaatttttgtagtgcagattttttttttttaagtataatggggatttgttttaggctctccaatatgccataac

SEQ ID NO: 52422 - DNA, 80 bp, synthetic construct; identical to SEQ ID NO: 24551
  misc_feature 1..80: note = Artificially Synthesized Probe
  source 1..80: mol_type = other DNA

SEQ ID NO: 52423 - DNA, 80 bp, synthetic construct
  misc_feature 1..80: note = Artificially Synthesized Probe
  source 1..80: mol_type = other DNA
cgctctgccactgctgtatatgctcctttgcttctttttctgctctgtaccagactgaggggcaggagaggctggagagt

SEQ ID NO: 52424 - DNA, 80 bp, synthetic construct
  misc_feature 1..80: note = Artificially Synthesized Probe
  source 1..80: mol_type = other DNA
ttatcatttcaaaaacaaggagcagtccaaggccatcaagttctacatgcatgacatctgcatctgccccaataggtcag

SEQ ID NO: 52425 - DNA, 80 bp, synthetic construct; identical to SEQ ID NO: 24479
  misc_feature 1..80: note = Artificially Synthesized Probe
  source 1..80: mol_type = other DNA

SEQ ID NO: 52426 - DNA, 80 bp, synthetic construct
  misc_feature 1..80: note = Artificially Synthesized Probe
  source 1..80: mol_type = other DNA
gcaggttttccataaaaagaagagcagaggagaaggcctcttttccaaagtcctctgggagggttattggtaaagggtta

SEQ ID NO: 52427 - DNA, 80 bp, synthetic construct; identical to SEQ ID NO: 24552
  misc_feature 1..80: note = Artificially Synthesized Probe
  source 1..80: mol_type = other DNA

SEQ ID NO: 52428 - DNA, 80 bp, synthetic construct
  misc_feature 1..80: note = Artificially Synthesized Probe
  source 1..80: mol_type = other DNA
tttgtaaagtttgatgcacttgattaagagggaatattttttcctacctaggaggtaagccttgggtgaaggtcaaaagg

SEQ ID NO: 52429 - DNA, 80 bp, synthetic construct
  misc_feature 1..80: note = Artificially Synthesized Probe
  source 1..80: mol_type = other DNA
gtcaggatccatctggccaagaagagaagggactgggtgtgagtggaaaagccagtttgcaagacttgtgtagattgtgt

SEQ ID NO: 52430 - DNA, 80 bp, synthetic construct
  misc_feature 1..80: note = Artificially Synthesized Probe
  source 1..80: mol_type = other DNA
tcaggtttcctcgtctgttcccctacttccacatctgaaaagtgagggtgataaaacccacctgtctttgcatggcacct

SEQ ID NO: 52431 - DNA, 80 bp, synthetic construct
  misc_feature 1..80: note = Artificially Synthesized Probe
  source 1..80: mol_type = other DNA
aaccctgccacagaggcgtggtctcccgtgggattggccccagtgccaggaaagcacttgatggcttgatcctgggctcc

SEQ ID NO: 52432 - DNA, 80 bp, synthetic construct; identical to SEQ ID NO: 24553
  misc_feature 1..80: note = Artificially Synthesized Probe
  source 1..80: mol_type = other DNA

SEQ ID NO: 52433 - DNA, 80 bp, synthetic construct
  misc_feature 1..80: note = Artificially Synthesized Probe
  source 1..80: mol_type = other DNA
ctgctcagggtcccagagagagaatggggtagaagctgggttgctggggtccaggggtctctgctgcccatgattctggt

SEQ ID NO: 52434 - DNA, 80 bp, synthetic construct
  misc_feature 1..80: note = Artificially Synthesized Probe
  source 1..80: mol_type = other DNA
caggggaacagagtccaagagctcatccattagagtacttactgcatgcctattaggcgctgggtgattaaaatacattt

SEQ ID NO: 52435 - DNA, 80 bp, synthetic construct
  misc_feature 1..80: note = Artificially Synthesized Probe
  source 1..80: mol_type = other DNA
tattatcttgtcagtatttgtattgggattgcattgaatgtataaattaacttgggaagaactgacatctttatattttt

SEQ ID NO: 52436 - DNA, 80 bp, synthetic construct; identical to SEQ ID NO: 24554
  misc_feature 1..80: note = Artificially Synthesized Probe
  source 1..80: mol_type = other DNA

SEQ ID NO: 52437 - DNA, 80 bp, synthetic construct
  misc_feature 1..80: note = Artificially Synthesized Probe
  source 1..80: mol_type = other DNA
agctccaacttgtccctatggattgagtatggcaccatgtcctatgccttgcactcattcgcctcacgtcaattgaagca

SEQ ID NO: 52438 - DNA, 80 bp, synthetic construct
  misc_feature 1..80: note = Artificially Synthesized Probe
  source 1..80: mol_type = other DNA
gtactttattcttgtccacacatccatgctgggagctcactgacgaatctccccatgaggcttaagccataccatggtca

SEQ ID NO: 52439 - DNA, 80 bp, synthetic construct
  misc_feature 1..80: note = Artificially Synthesized Probe
  source 1..80: mol_type = other DNA
tcaaaggagcttgttggatccttgtaaaattcttgagcttaggttgggatttttgaagtctctcttggtaggggattaca

SEQ ID NO: 52440 - DNA, 80 bp, synthetic construct; identical to SEQ ID NO: 24555
  misc_feature 1..80: note = Artificially Synthesized Probe
  source 1..80: mol_type = other DNA

SEQ ID NO: 52441 - DNA, 80 bp, synthetic construct
  misc_feature 1..80: note = Artificially Synthesized Probe
  source 1..80: mol_type = other DNA
atctctactaaaaatacaaaaattagccaggcatggtggtgcatgcctgttatcccagctcctcgggaggctgaggcagg

SEQ ID NO: 52442 - DNA, 80 bp, synthetic construct
  misc_feature 1..80: note = Artificially Synthesized Probe
  source 1..80: mol_type = other DNA
ttaagggcaaagctcaaatccctctggctgcccctactacctcagaaacaggcttgtttctttccagactgtaaaaaaaa

SEQ ID NO: 52443 - DNA, 80 bp, synthetic construct
  misc_feature 1..80: note = Artificially Synthesized Probe
  source 1..80: mol_type = other DNA
ataattcctgtggatctagtacattccttttaactgctgtaaccctattttattgtaactgttctgcactaaagtccctt

SEQ ID NO: 52444 - DNA, 80 bp, synthetic construct; identical to SEQ ID NO: 24556
  misc_feature 1..80: note = Artificially Synthesized Probe
  source 1..80: mol_type = other DNA

SEQ ID NO: 52445 - DNA, 80 bp, synthetic construct
  misc_feature 1..80: note = Artificially Synthesized Probe
  source 1..80: mol_type = other DNA
tgatcttgttgctattgcaaatgggatttttctctaccataatgtcttcttttatggtttgtatatatgaaggctattga

SEQ ID NO: 52446 - DNA, 80 bp, synthetic construct
  misc_feature 1..80: note = Artificially Synthesized Probe
  source 1..80: mol_type = other DNA
acttaggctcataacctttgggactgaactcagtgttgatcttatggaagccattggcccaggaagctcaggtcctgaaa

SEQ ID NO: 52447 - DNA, 80 bp, synthetic construct
  misc_feature 1..80: note = Artificially Synthesized Probe
  source 1..80: mol_type = other DNA
ctgggttttttccacctctggagagacagcttccaaccctgaaatgtgtcacgaggacacagtcccctgattgctacttt

SEQ ID NO: 52448 - DNA, 80 bp, synthetic construct
  misc_feature 1..80: note = Artificially Synthesized Probe
  source 1..80: mol_type = other DNA
aggctttggagccagagcgttctagctgtatgacctggaagcagtaacctgacattcctgttgtggttccttctccaagg

SEQ ID NO: 52449 - DNA, 80 bp, synthetic construct
  misc_feature 1..80: note = Artificially Synthesized Probe
  source 1..80: mol_type = other DNA
tcagtgactgtccctccttttcctgtctgaggtattgtgacctccacaccacaaggacagggacattggcattgtgccct

SEQ ID NO: 52450 - DNA, 80 bp, synthetic construct; identical to SEQ ID NO: 24557
  misc_feature 1..80: note = Artificially Synthesized Probe
  source 1..80: mol_type = other DNA

SEQ ID NO: 52451 - DNA, 80 bp, synthetic construct
  misc_feature 1..80: note = Artificially Synthesized Probe
  source 1..80: mol_type = other DNA
gagcactgggtagcacattgctcccttatttcagtcctggggccattgctacagggttttcacataaacaagcacccact

SEQ ID NO: 52452 - DNA, 80 bp, synthetic construct
  misc_feature 1..80: note = Artificially Synthesized Probe
  source 1..80: mol_type = other DNA
tcaatccaggaccacagagaggagggatcagagacctgggctgctcagagcagctctgtgggcttgcacatgcaggcttc

SEQ ID NO: 52453 - DNA, 80 bp, synthetic construct; identical to SEQ ID NO: 24558
  misc_feature 1..80: note = Artificially Synthesized Probe
  source 1..80: mol_type = other DNA

SEQ ID NO: 52454 - DNA, 80 bp, synthetic construct
  misc_feature 1..80: note = Artificially Synthesized Probe
  source 1..80: mol_type = other DNA
tgctgagtgttagtaaatgtcctctccagtgctgtggagcagggtgctaggtgaatctgcattagatgctgcagggggaa

SEQ ID NO: 52455 - DNA, 80 bp, synthetic construct
  misc_feature 1..80: note = Artificially Synthesized Probe
  source 1..80: mol_type = other DNA
gtgaaatggtgagggcatttctgtgtcttggttgttaagaggagtataaacttgcaaataggtcggcagagctttgtaca

SEQ ID NO: 52456 - DNA, 80 bp, synthetic construct
  misc_feature 1..80: note = Artificially Synthesized Probe
  source 1..80: mol_type = other DNA
tctcctgcctcagcctcctgagtagctgggattacaggcatgcgccaccatgcccggctgattttttgtatttttggtag

SEQ ID NO: 52457 - DNA, 80 bp, synthetic construct
  misc_feature 1..80: note = Artificially Synthesized Probe
  source 1..80: mol_type = other DNA
tcatccactacatgctgggcaaggtggctgagaagcagcagcagccacccaccgtttacttgctgcactacaggcaggct

SEQ ID NO: 52458 - DNA, 80 bp, synthetic construct
  misc_feature 1..80: note = Artificially Synthesized Probe
  source 1..80: mol_type = other DNA
gctcaaggttccagtgaccgtccttcaacctgccgcaaacttatctgtgttgagcagcttcatgtgcaattgaattaaaa

SEQ ID NO: 52459 - DNA, 80 bp, synthetic construct; identical to SEQ ID NO: 24559
  misc_feature 1..80: note = Artificially Synthesized Probe
  source 1..80: mol_type = other DNA

SEQ ID NO: 52460 - DNA, 80 bp, synthetic construct
  misc_feature 1..80: note = Artificially Synthesized Probe
  source 1..80: mol_type = other DNA
agtcttctgattgttgttcaagaaaagagcagttctttactccctggattttctctcatggtttccagagtgtttctgat

SEQ ID NO: 52461 - DNA, 80 bp, synthetic construct
  misc_feature 1..80: note = Artificially Synthesized Probe
  source 1..80: mol_type = other DNA
cagcccaggacttgaagcttctgaaggccctgtgcacgttggctttgccctttctgaggctatgtgcccagtctctacca

SEQ ID NO: 52462 - DNA, 80 bp, synthetic construct; identical to SEQ ID NO: 24560
  misc_feature 1..80: note = Artificially Synthesized Probe
  source 1..80: mol_type = other DNA

SEQ ID NO: 52463 - DNA, 80 bp, synthetic construct
  misc_feature 1..80: note = Artificially Synthesized Probe
  source 1..80: mol_type = other DNA
cctgtagtttagcagggcgtttgtttatctgcacggacccttgataggtttggtttcctctccacttcttgctatgacaa

SEQ ID NO: 52464 - DNA, 80 bp, synthetic construct
  misc_feature 1..80: note = Artificially Synthesized Probe
  source 1..80: mol_type = other DNA
tgccccaaggtcgtactgactgatgagagtgtttgctttccctcagccatattgatgaggttctctttttaatatttgct

SEQ ID NO: 52465 - DNA, 80 bp, synthetic construct
  misc_feature 1..80: note = Artificially Synthesized Probe
  source 1..80: mol_type = other DNA
gccaggtgtggtggtggaggccagtagtcccaactacttgggaggctgagatgggaggatcacttgagcctgggaggtgg

SEQ ID NO: 52466 - DNA, 80 bp, synthetic construct
  misc_feature 1..80: note = Artificially Synthesized Probe
  source 1..80: mol_type = other DNA
cttgagtccaggagtttgagatatagagctggggatctcagagactagcgggcaacatgatgagacccccccatctctac

SEQ ID NO: 52467 - DNA, 80 bp, synthetic construct; identical to SEQ ID NO: 24561
  misc_feature 1..80: note = Artificially Synthesized Probe
  source 1..80: mol_type = other DNA

SEQ ID NO: 52468 - DNA, 80 bp, synthetic construct; identical to SEQ ID NO: 24480
  misc_feature 1..80: note = Artificially Synthesized Probe
  source 1..80: mol_type = other DNA

SEQ ID NO: 52469 - DNA, 80 bp, synthetic construct
  misc_feature 1..80: note = Artificially Synthesized Probe
  source 1..80: mol_type = other DNA
cactttgggggtgagaagggtaaggcccagaggagtgatgtgatgacttgccttaagtcacctgcaggaacagagaggag

SEQ ID NO: 52470 - DNA, 80 bp, synthetic construct
  misc_feature 1..80: note = Artificially Synthesized Probe
  source 1..80: mol_type = other DNA
agatgatgtcaactctgtttttcctccatgtttttttcttcaagatttggcctctactactgcctgatagagcagatgag

SEQ ID NO: 52471 - DNA, 80 bp, synthetic construct; identical to SEQ ID NO: 24562
  misc_feature 1..80: note = Artificially Synthesized Probe
  source 1..80: mol_type = other DNA

SEQ ID NO: 52472 - DNA, 80 bp, synthetic construct
  misc_feature 1..80: note = Artificially Synthesized Probe
  source 1..80: mol_type = other DNA
cgcggtggcgggcgcctgtagtcccagctactcgggaggctgaggcaggagaatggcgtgaacccgggaagcggagcttg

SEQ ID NO: 52473 - DNA, 80 bp, synthetic construct
  misc_feature 1..80: note = Artificially Synthesized Probe
  source 1..80: mol_type = other DNA
ttcattcaagaatctttactcgccacttggatgaactttaccagttgaatgctttgccctcccccaagtttggccacctg

SEQ ID NO: 52474 - DNA, 80 bp, synthetic construct
  misc_feature 1..80: note = Artificially Synthesized Probe
  source 1..80: mol_type = other DNA
tgggtgaggggggccacttagccagggcctgcaatggcagttctcagccctcataccacccactgtgccctccaagtggg

SEQ ID NO: 52475 - DNA, 80 bp, synthetic construct
  misc_feature 1..80: note = Artificially Synthesized Probe
  source 1..80: mol_type = other DNA
aatggatgcaatgagctgcctgcccacccacccccccaccacacccacggggaagacgttttcgaggcctgtgggtgcct

SEQ ID NO: 52476 - DNA, 80 bp, synthetic construct; identical to SEQ ID NO: 24563
  misc_feature 1..80: note = Artificially Synthesized Probe
  source 1..80: mol_type = other DNA

SEQ ID NO: 52477 - DNA, 80 bp, synthetic construct
  misc_feature 1..80: note = Artificially Synthesized Probe
  source 1..80: mol_type = other DNA
aacaaatcttagcaactgggaaggctgctcacactagaggtgtcgttctcctaggtgtactttcggctccatgcttccat

SEQ ID NO: 52478 - DNA, 80 bp, synthetic construct
  misc_feature 1..80: note = Artificially Synthesized Probe
  source 1..80: mol_type = other DNA
taccccatctgcatcccagatggctcgtttactgcaatgtgttgttcagagggttgctacacagtaaacagtaaactaga

SEQ ID NO: 52479 - DNA, 80 bp, synthetic construct
  misc_feature 1..80: note = Artificially Synthesized Probe
  source 1..80: mol_type = other DNA
cctcctgccctctccactggggcacagctctgttctgtgcagaacactgtagaaagtcagtttttgctttgcagactctc

SEQ ID NO: 52480 - DNA, 80 bp, synthetic construct
  misc_feature 1..80: note = Artificially Synthesized Probe
  source 1..80: mol_type = other DNA
gtgcaatcttagctcaccacaacctctgcttcctgggttcaagcaattctcctgcttcaccctcccgagtagctgggatc

SEQ ID NO: 52481 - DNA, 80 bp, synthetic construct; identical to SEQ ID NO: 24564
  misc_feature 1..80: note = Artificially Synthesized Probe
  source 1..80: mol_type = other DNA

SEQ ID NO: 52482 - DNA, 80 bp, synthetic construct
  misc_feature 1..80: note = Artificially Synthesized Probe
  source 1..80: mol_type = other DNA
atctctgagtccgctgcctagctgggcactgtgcgaaattcagctgacccctgcctgactgggcactgtgcggggttcag

SEQ ID NO: 52483 - DNA, 80 bp, synthetic construct
  misc_feature 1..80: note = Artificially Synthesized Probe
  source 1..80: mol_type = other DNA
aggtgggcagccgctgtgctcagaatttatagctacccatttttttagtcacaaagggcccccaacatacaatgatactt

SEQ ID NO: 52484 - DNA, 80 bp, synthetic construct
  misc_feature 1..80: note = Artificially Synthesized Probe
  source 1..80: mol_type = other DNA
aatcattttctgtatatttataacacttaaatgcacacatacaattgtaaggtttcatttattttataaaaatgaactac

SEQ ID NO: 52485 - DNA, 80 bp, synthetic construct; identical to SEQ ID NO: 24565
  misc_feature 1..80: note = Artificially Synthesized Probe
  source 1..80: mol_type = other DNA

SEQ ID NO: 52486 - DNA, 80 bp, synthetic construct
  misc_feature 1..80: note = Artificially Synthesized Probe
  source 1..80: mol_type = other DNA
gccagaaagattaggcagtgtccagttaggagccagagcctgtgtgggtgctgtaggggcaactatgggctctgtgacac

SEQ ID NO: 52487 - DNA, 80 bp, synthetic construct
  misc_feature 1..80: note = Artificially Synthesized Probe
  source 1..80: mol_type = other DNA
aggactcccactcttcagctgggacactgccgggccccggagcctccctcccctcctcctctggcccaggtctgacatcc

SEQ ID NO: 52488 - DNA, 80 bp, synthetic construct
  misc_feature 1..80: note = Artificially Synthesized Probe
  source 1..80: mol_type = other DNA
gttttggtgagggggggtgctgggtctggggtgacacgggcaatgttgcggctgctcattaacctcatggattcacagtg

SEQ ID NO: 52489 - DNA, 80 bp, synthetic construct
  misc_feature 1..80: note = Artificially Synthesized Probe
  source 1..80: mol_type = other DNA
gaagagtgtggcctcctggaggggctcctggtgcagtcagcttagtgatgcctgcattgttcagcagcacattgttactg

SEQ ID NO: 52490 - DNA, 80 bp, synthetic construct; identical to SEQ ID NO: 24566
  misc_feature 1..80: note = Artificially Synthesized Probe
  source 1..80: mol_type = other DNA

SEQ ID NO: 52491 - DNA, 80 bp, synthetic construct
  misc_feature 1..80: note = Artificially Synthesized Probe
  source 1..80: mol_type = other DNA
tttacccatttttatatctctaattgatttatctcttctaattttattggctaatattgcacaggtggatagtagcagag

SEQ ID NO: 52492 - DNA, 80 bp, synthetic construct
  misc_feature 1..80: note = Artificially Synthesized Probe
  source 1..80: mol_type = other DNA
tggggatgctagtaggtgggtagaattggtcccagggctctgcttcctgccagatagtctttatagagtggctccttgga

SEQ ID NO: 52493 - DNA, 80 bp, synthetic construct
  misc_feature 1..80: note = Artificially Synthesized Probe
  source 1..80: mol_type = other DNA
cctggatatagcatgggcatctgcctccaactttctgaactaagtgggtagggcttgagagcaggtttaaagaagtgctg

SEQ ID NO: 52494 - DNA, 80 bp, synthetic construct
  misc_feature 1..80: note = Artificially Synthesized Probe
  source 1..80: mol_type = other DNA
tgttgagagaggctgaggatctgagtgtgtgctgtgtctcttacctcctggaaggttcatgtcattactcccagtctcag

SEQ ID NO: 52495 - DNA, 80 bp, synthetic construct; identical to SEQ ID NO: 24567
  misc_feature 1..80: note = Artificially Synthesized Probe
  source 1..80: mol_type = other DNA

SEQ ID NO: 52496 - DNA, 80 bp, synthetic construct
  misc_feature 1..80: note = Artificially Synthesized Probe
  source 1..80: mol_type = other DNA
ccattagggttgagtatgcctctagaagcaggaaaggagggaggcaggagcgcctcagaaagggggccatgatgccagct

SEQ ID NO: 52497 - DNA, 80 bp, synthetic construct
  misc_feature 1..80: note = Artificially Synthesized Probe
  source 1..80: mol_type = other DNA
cagtggttgcacagttttgaacatttgtttaaaaaaaatgtcttcaaagtgattcctgtcaaagacacaaagccatcagg

SEQ ID NO: 52498 - DNA, 80 bp, synthetic construct; identical to SEQ ID NO: 24568
  misc_feature 1..80: note = Artificially Synthesized Probe
  source 1..80: mol_type = other DNA

SEQ ID NO: 52499 - DNA, 80 bp, synthetic construct
  misc_feature 1..80: note = Artificially Synthesized Probe
  source 1..80: mol_type = other DNA
gagaccagccttgggtctactgtgagaggagaggggcgtcagcactgattgcaggccaccactgagcccttatactacca

SEQ ID NO: 52500 - DNA, 80 bp, synthetic construct
  misc_feature 1..80: note = Artificially Synthesized Probe
  source 1..80: mol_type = other DNA
gacaaaggacttcacttctcaatttcctcacctgttgaatggggtaatgtcttcgttatgggtattaaacaaaagtgctt

SEQ ID NO: 52501 - DNA, 80 bp, synthetic construct
  misc_feature 1..80: note = Artificially Synthesized Probe
  source 1..80: mol_type = other DNA
ggtggaggtagtgtcctctgaagcagcagctcctgagtgggcttgggcatggggctttctggatcctggtttcctacccc

SEQ ID NO: 52502 - DNA, 80 bp, synthetic construct; identical to SEQ ID NO: 24481
  misc_feature 1..80: note = Artificially Synthesized Probe
  source 1..80: mol_type = other DNA

SEQ ID NO: 52503 - DNA, 80 bp, synthetic construct; identical to SEQ ID NO: 24569
  misc_feature 1..80: note = Artificially Synthesized Probe
  source 1..80: mol_type = other DNA

SEQ ID NO: 52504 - DNA, 80 bp, synthetic construct
  misc_feature 1..80: note = Artificially Synthesized Probe
  source 1..80: mol_type = other DNA
cggaacagccaggagggcatcacagctgacctctggccaagctgagaaagagagcaagagagagaacaacagagagagaa

SEQ ID NO: 52505 - DNA, 80 bp, synthetic construct
  misc_feature 1..80: note = Artificially Synthesized Probe
  source 1..80: mol_type = other DNA
gtgaccttcagggggttcccagtgattactctttatacatattcaagcaacataaggagatctttgaacaagacctctac

SEQ ID NO: 52506 - DNA, 80 bp, synthetic construct
  misc_feature 1..80: note = Artificially Synthesized Probe
  source 1..80: mol_type = other DNA
ggctcggtcatgcccttgtttccccaagaggaacctgagctgagggcaggtaggcactcatccaaaactgcctgctgtag

SEQ ID NO: 52507 - DNA, 80 bp, synthetic construct; identical to SEQ ID NO: 24570
  misc_feature 1..80: note = Artificially Synthesized Probe
  source 1..80: mol_type = other DNA

SEQ ID NO: 52508 - DNA, 80 bp, synthetic construct
  misc_feature 1..80: note = Artificially Synthesized Probe
  source 1..80: mol_type = other DNA
gctgtgccaggtgcatagaacagcactggtccctgctgtagaggaggttggtgcaaatcagtcagttacatagctgaggg

SEQ ID NO: 52509 - DNA, 80 bp, synthetic construct
  misc_feature 1..80: note = Artificially Synthesized Probe
  source 1..80: mol_type = other DNA
agccagggtcagaagagtgggagccttggaggctggtatccaccaagggtggtgatgcctacctagtcccactgacagca

SEQ ID NO: 52510 - DNA, 80 bp, synthetic construct
  misc_feature 1..80: note = Artificially Synthesized Probe
  source 1..80: mol_type = other DNA
tccatgctgtcaccgtctgtgtcgtgtgccgtctgtgctcatcttcgcctgttcgccccatgctgcctccaccaatattg

SEQ ID NO: 52511 - DNA, 80 bp, synthetic construct
  misc_feature 1..80: note = Artificially Synthesized Probe
  source 1..80: mol_type = other DNA
ccctgctacccctgtgaccaggagcaccttcatgtctgctcgccctgtgatttggagagtgtgtttgatgcgcttggctt

SEQ ID NO: 52512 - DNA, 80 bp, synthetic construct; identical to SEQ ID NO: 24571
  misc_feature 1..80: note = Artificially Synthesized Probe
  source 1..80: mol_type = other DNA

SEQ ID NO: 52513 - DNA, 80 bp, synthetic construct
  misc_feature 1..80: note = Artificially Synthesized Probe
  source 1..80: mol_type = other DNA
ggggaggtcagtttctggttggagtgccattcctaaacagaccttctcaaagtgggagagactgtaagtggagctcagtt

SEQ ID NO: 52514 - DNA, 80 bp, synthetic construct
  misc_feature 1..80: note = Artificially Synthesized Probe
  source 1..80: mol_type = other DNA
tcagcctcccaagtagctgggattacaggcatgtgccactatacccagctaattttaaaattttttttgtagagatgagg

SEQ ID NO: 52515 - DNA, 80 bp, synthetic construct
  misc_feature 1..80: note = Artificially Synthesized Probe
  source 1..80: mol_type = other DNA
cggcatttattgaacatctgttgtgtgccaggcatggaaaagggtgccatggggaaagtcaagatgatggtgccttgatt

SEQ ID NO: 52516 - DNA, 80 bp, synthetic construct; identical to SEQ ID NO: 24572
  misc_feature 1..80: note = Artificially Synthesized Probe
  source 1..80: mol_type = other DNA

SEQ ID NO: 52517 - DNA, 80 bp, synthetic construct
  misc_feature 1..80: note = Artificially Synthesized Probe
  source 1..80: mol_type = other DNA
atggctgggggatgccagcctcacaccttacagaactgcttcgcttcttctggcatttgtatcaagaggggctgttcacc

SEQ ID NO: 52518 - DNA, 80 bp, synthetic construct
  misc_feature 1..80: note = Artificially Synthesized Probe
  source 1..80: mol_type = other DNA
tctgccaggcttcgaggtgcctggcagtgctcagttggccctcacctgtgagcactggcaaagaatggacaagtggtgca

SEQ ID NO: 52519 - DNA, 80 bp, synthetic construct
  misc_feature 1..80: note = Artificially Synthesized Probe
  source 1..80: mol_type = other DNA
ctggtggacgtgttcttttcctgtggttggccaggattgactgaggcagcttttatctagtcagaaaatttctcaaaata

SEQ ID NO: 52520 - DNA, 80 bp, synthetic construct; identical to SEQ ID NO: 24573
  misc_feature 1..80: note = Artificially Synthesized Probe
  source 1..80: mol_type = other DNA

SEQ ID NO: 52521 - DNA, 80 bp, synthetic construct
  misc_feature 1..80: note = Artificially Synthesized Probe
  source 1..80: mol_type = other DNA
cgttgccagctgtcattcctttacagttgatcctgcaaatcccaccctggaagtagaaggttctggagcttagagggagg

SEQ ID NO: 52522 - DNA, 80 bp, synthetic construct
  misc_feature 1..80: note = Artificially Synthesized Probe
  source 1..80: mol_type = other DNA
ttgtgtgggcagatttttaaaagaacattctgaaaaaaagagcaaggccaacctatagcctgcttgctagtgccattctt

SEQ ID NO: 52523 - DNA, 80 bp, synthetic construct
  misc_feature 1..80: note = Artificially Synthesized Probe
  source 1..80: mol_type = other DNA
taagtctggctctcctacatcaaagaggctttccatctgtctcttgctctgcctcagaaccagggggcccagaaccccct

SEQ ID NO: 52524 - DNA, 80 bp, synthetic construct; identical to SEQ ID NO: 24574
  misc_feature 1..80: note = Artificially Synthesized Probe
  source 1..80: mol_type = other DNA

SEQ ID NO: 52525 - DNA, 80 bp, synthetic construct
  misc_feature 1..80: note = Artificially Synthesized Probe
  source 1..80: mol_type = other DNA
ttatcaggagattctcaaatttttagatagacacacctttcttctgttggtggtgatggtcgtgttagtaaattctagtt

SEQ ID NO: 52526 - DNA, 80 bp, synthetic construct
  misc_feature 1..80: note = Artificially Synthesized Probe
  source 1..80: mol_type = other DNA
agggagtggtccttgcccaaaggtacatggctgatggatgggggtcctaccccagagaagaagcctttgacctgtgacct

SEQ ID NO: 52527 - DNA, 80 bp, synthetic construct
  misc_feature 1..80: note = Artificially Synthesized Probe
  source 1..80: mol_type = other DNA
agcaggggcttcctgcttcaggaatgggggtggctctgggttacacaccacagtccaaacaaccctccctgctgcctgcc

SEQ ID NO: 52528 - DNA, 80 bp, synthetic construct
  misc_feature 1..80: note = Artificially Synthesized Probe
  source 1..80: mol_type = other DNA
agctggtggcaggatgagggtccttttcacatgctctgcgatgttcctggcaaacttaccccactgttcatgtctgtctg

SEQ ID NO: 52529 - DNA, 80 bp, synthetic construct; identical to SEQ ID NO: 24575
  misc_feature 1..80: note = Artificially Synthesized Probe
  source 1..80: mol_type = other DNA

SEQ ID NO: 52530 - DNA, 80 bp, synthetic construct
  misc_feature 1..80: note = Artificially Synthesized Probe
  source 1..80: mol_type = other DNA
gccttgggccttgagtcccttttggtggctctcatttgaagagataacacatccctggactccttcctgtggtgctgccc

SEQ ID NO: 52531 - DNA, 80 bp, synthetic construct; identical to SEQ ID NO: 24472
  misc_feature 1..80: note = Artificially Synthesized Probe
  source 1..80: mol_type = other DNA

SEQ ID NO: 52532 - DNA, 80 bp, synthetic construct
  misc_feature 1..80: note = Artificially Synthesized Probe
  source 1..80: mol_type = other DNA
gtgagccccattagcagagccttcctcagggccacttaggtaccttgattaccccttaaacaagggtttgtctagaatca

SEQ ID NO: 52533 - DNA, 80 bp, synthetic construct
  misc_feature 1..80: note = Artificially Synthesized Probe
  source 1..80: mol_type = other DNA
ccctgttccactgctgtggatgttattttaagagtctcagcagagtccccactcaattggtggtcgttcttcagggagca

SEQ ID NO: 52534 - DNA, 80 bp, synthetic construct; identical to SEQ ID NO: 24576
  misc_feature 1..80: note = Artificially Synthesized Probe
  source 1..80: mol_type = other DNA

SEQ ID NO: 52535 - DNA, 80 bp, synthetic construct
  misc_feature 1..80: note = Artificially Synthesized Probe
  source 1..80: mol_type = other DNA
gctgaggagacccagccctagcttgtctttcagggagacttcaactgcggggcatggcctgctgtctttcagagactctg

SEQ ID NO: 52536 - DNA, 80 bp, synthetic construct
  misc_feature 1..80: note = Artificially Synthesized Probe
  source 1..80: mol_type = other DNA
gtcagggacagaggtaggaagacaatggcaatcgtgttaaaaaacctgaagtgggggcctagagcagcaaaatcatttgg

SEQ ID NO: 52537 - DNA, 80 bp, synthetic construct
  misc_feature 1..80: note = Artificially Synthesized Probe
  source 1..80: mol_type = other DNA
ttgatcccctcatgctggggactcaagtttgggacattttgtgagggctgcaggcctgctcataactgccattcagtgct

SEQ ID NO: 52538 - DNA, 80 bp, synthetic construct
  misc_feature 1..80: note = Artificially Synthesized Probe
  source 1..80: mol_type = other DNA
tatacatctatatcatctcctctgttatgttgtttagatcaatcatctgtctcctcattttttctccacttgatttgtct

SEQ ID NO: 52539 - DNA, 80 bp, synthetic construct
  misc_feature 1..80: note = Artificially Synthesized Probe
  source 1..80: mol_type = other DNA
catcagttcctgggcagtggacatggcaaaggcagctatgaaggaagggctatggcagggatgcctacaaggtcactgtc

SEQ ID NO: 52540 - DNA, 80 bp, synthetic construct; identical to SEQ ID NO: 24577
  misc_feature 1..80: note = Artificially Synthesized Probe
  source 1..80: mol_type = other DNA

SEQ ID NO: 52541 - DNA, 80 bp, synthetic construct
  misc_feature 1..80: note = Artificially Synthesized Probe
  source 1..80: mol_type = other DNA
atgcatggaaactgaagtataaataattatggcatttacagaggctctcagagatagtaggtgacagagcagaatttcag

SEQ ID NO: 52542 - DNA, 80 bp, synthetic construct
  misc_feature 1..80: note = Artificially Synthesized Probe
  source 1..80: mol_type = other DNA
tgggctcaagtgatcctcccacctcagcctcccaagtaactgccacgcctgcctaatttttttttttttttaattttttg

SEQ ID NO: 52543 - DNA, 80 bp, synthetic construct; identical to SEQ ID NO: 24578
  misc_feature 1..80: note = Artificially Synthesized Probe
  source 1..80: mol_type = other DNA

SEQ ID NO: 52544 - DNA, 80 bp, synthetic construct
  misc_feature 1..80: note = Artificially Synthesized Probe
  source 1..80: mol_type = other DNA
cttgaacttagctctcttggttgctagtttattgagcttcaccttgaggtatgtaaagttcaagacaaagttttattttt

SEQ ID NO: 52545 - DNA, 80 bp, synthetic construct
  misc_feature 1..80: note = Artificially Synthesized Probe
  source 1..80: mol_type = other DNA
ggggcacgcctgtagtcccagctactcaggaggctgaggcaggaggattgcttgaacctgggaggtagaggttgcagtga

SEQ ID NO: 52546 - DNA, 80 bp, synthetic construct
  misc_feature 1..80: note = Artificially Synthesized Probe
  source 1..80: mol_type = other DNA
attcattgcagtctgccttcaggtgatactgtactacttcgtaggcagtggaagagctgctcatcttttgcactcgtttt

SEQ ID NO: 52547 - DNA, 80 bp, synthetic construct
  misc_feature 1..80: note = Artificially Synthesized Probe
  source 1..80: mol_type = other DNA
gatccaagttttatctggcttcatattcattctacctgaaaaattacctttaacatttcttgtaactcagatctgctggt

SEQ ID NO: 52548 - DNA, 80 bp, synthetic construct; identical to SEQ ID NO: 24579
  misc_feature 1..80: note = Artificially Synthesized Probe
  source 1..80: mol_type = other DNA

SEQ ID NO: 52549 - DNA, 80 bp, synthetic construct
  misc_feature 1..80: note = Artificially Synthesized Probe
  source 1..80: mol_type = other DNA
gcctggctaatttttattttatttatttatttatttatttattttagagatgggggtctcactatcttgcccagggtggt

SEQ ID NO: 52550 - DNA, 80 bp, synthetic construct
  misc_feature 1..80: note = Artificially Synthesized Probe
  source 1..80: mol_type = other DNA
tgtcctgtttcaccctcatctccttttgtgactccgattagcatgttggatcatttggatgctctgttctgattcctcct

SEQ ID NO: 52551 - DNA, 80 bp, synthetic construct
  misc_feature 1..80: note = Artificially Synthesized Probe
  source 1..80: mol_type = other DNA
gcctgtagtcccagctactcgggaggctgaggcaggagaatcgcttgaaccgggaggtggaggttgcagtgcgccgagat

SEQ ID NO: 52552 - DNA, 80 bp, synthetic construct
  misc_feature 1..80: note = Artificially Synthesized Probe
  source 1..80: mol_type = other DNA
ttcaaaacacaggttgaggccaggcgtggtggctcacgcctgtaatcccagcactttggaaggccaaggtgggtggatca

SEQ ID NO: 52553 - DNA, 80 bp, synthetic construct
  misc_feature 1..80: note = Artificially Synthesized Probe
  source 1..80: mol_type = other DNA
caagaccagcctgaccaacatggagaaaccccgtctctactaaaaatacaaaaattagctgggcatggtggtgcatgccg

SEQ ID NO: 52554 - DNA, 80 bp, synthetic construct
  misc_feature 1..80: note = Artificially Synthesized Probe
  source 1..80: mol_type = other DNA
aaaatacaaaaaaattagccaggtatggtggcacatgcctgtaatcccagctactcaagaggctgagataggagaatcac

SEQ ID NO: 52555 - DNA, 80 bp, synthetic construct; identical to SEQ ID NO: 24664
  misc_feature 1..80: note = Artificially Synthesized Probe
  source 1..80: mol_type = other DNA

SEQ ID NO: 52556 - DNA, 80 bp, synthetic construct
  misc_feature 1..80: note = Artificially Synthesized Probe
  source 1..80: mol_type = other DNA
cttaccctgcatgagggcaacattaatggtgaataaataacttcttcaggaacacaacagactggtacagttgccttttt

SEQ ID NO: 52557 - DNA, 80 bp, synthetic construct
  misc_feature 1..80: note = Artificially Synthesized Probe
  source 1..80: mol_type = other DNA
gaagtggttgtgttgcaccacgtaaactcaccaaacataatatagtactgcgattttccattcaggttcttctggtcaat

SEQ ID NO: 52558 - DNA, 80 bp, synthetic construct; identical to SEQ ID NO: 24665
  misc_feature 1..80: note = Artificially Synthesized Probe
  source 1..80: mol_type = other DNA

SEQ ID NO: 52559 - DNA, 80 bp, synthetic construct
  misc_feature 1..80: note = Artificially Synthesized Probe
  source 1..80: mol_type = other DNA
ggcgtgatctcggctcactgcaacctccacctcccgggttcaagtgattctcctgcctcagcctcctgagtagttgggat

SEQ ID NO: 52560 - DNA, 80 bp, synthetic construct
  misc_feature 1..80: note = Artificially Synthesized Probe
  source 1..80: mol_type = other DNA
cagcgtgcctggcccatacaacttttatttcacacacctggaagtttttgttcttaatataccactgttcttaattagtt

SEQ ID NO: 52561 - DNA, 80 bp, synthetic construct
  misc_feature 1..80: note = Artificially Synthesized Probe
  source 1..80: mol_type = other DNA
caacacccagctaattttttgtatttttagtagagacagggtttcaccatgttagccaggatgttctcgatcccctgacc

SEQ ID NO: 52562 - DNA, 80 bp, synthetic construct
  misc_feature 1..80: note = Artificially Synthesized Probe
  source 1..80: mol_type = other DNA
gccaccgtgcccgactggtccctttcctaaacattctactctgccttttcagcataaaaggcagccatagacaatatata

SEQ ID NO: 52563 - DNA, 80 bp, synthetic construct; identical to SEQ ID NO: 24654
  misc_feature 1..80: note = Artificially Synthesized Probe
  source 1..80: mol_type = other DNA

SEQ ID NO: 52564 - DNA, 80 bp, synthetic construct; identical to SEQ ID NO: 24666
  misc_feature 1..80: note = Artificially Synthesized Probe
  source 1..80: mol_type = other DNA

SEQ ID NO: 52565 - DNA, 80 bp, synthetic construct
  misc_feature 1..80: note = Artificially Synthesized Probe
  source 1..80: mol_type = other DNA
agaggctcgctctattgcccagactgaatctctgctcactgcaacctccgcctcccaggttcaagcgattctcctgcctc

SEQ ID NO: 52566 - DNA, 80 bp, synthetic construct
  misc_feature 1..80: note = Artificially Synthesized Probe
  source 1..80: mol_type = other DNA
taagattacaggtgtgaaccactgtgcctggcctaaactttcacatatgtgaaagcaaatacaatttaaagccttgagag

SEQ ID NO: 52567 - DNA, 80 bp, synthetic construct
  misc_feature 1..80: note = Artificially Synthesized Probe
  source 1..80: mol_type = other DNA
cgtgcctgtggtcccagctactcgggaagctcaggcagctgaactgtttgaacctgggagatggaggagccattgcaccc

SEQ ID NO: 52568 - DNA, 80 bp, synthetic construct; identical to SEQ ID NO: 24667
  misc_feature 1..80: note = Artificially Synthesized Probe
  source 1..80: mol_type = other DNA

SEQ ID NO: 52569 - DNA, 80 bp, synthetic construct
  misc_feature 1..80: note = Artificially Synthesized Probe
  source 1..80: mol_type = other DNA
gagccgagatcgcgccactgcactccatcctgggctacagagcgagactccgtctcaaaaaaaaaaaaaaaaaaattagc

SEQ ID NO: 52570 - DNA, 80 bp, synthetic construct
  misc_feature 1..80: note = Artificially Synthesized Probe
  source 1..80: mol_type = other DNA
aaatacataaaataaataaaaaccttgagcaagttgtgtgatctgagtcatgcagcatgcaggtgtaacctctgcttctt

SEQ ID NO: 52571 - DNA, 80 bp, synthetic construct
  misc_feature 1..80: note = Artificially Synthesized Probe
  source 1..80: mol_type = other DNA
acctaactcagaccagatggcacaaaagatgccgtgactgttacatcttcagggtgaaatgttaaatataccttctcaaa

SEQ ID NO: 52572 - DNA, 80 bp, synthetic construct
  misc_feature 1..80: note = Artificially Synthesized Probe
  source 1..80: mol_type = other DNA
gggatctgtgttttccacacagttgtccttaaactttgagcttgaattagctctcttgaagctagaattttttttttttt

SEQ ID NO: 52573 - DNA, 80 bp, synthetic construct; identical to SEQ ID NO: 24668
  misc_feature 1..80: note = Artificially Synthesized Probe
  source 1..80: mol_type = other DNA

SEQ ID NO: 52574 - DNA, 80 bp, synthetic construct
  misc_feature 1..80: note = Artificially Synthesized Probe
  source 1..80: mol_type = other DNA
tcaacctcaagtgattcgcttgccttatcttgacctgcctgtacaaaagtaaaagctcattgtgttgtaccctgaagaat

SEQ ID NO: 52575 - DNA, 80 bp, synthetic construct
  misc_feature 1..80: note = Artificially Synthesized Probe
  source 1..80: mol_type = other DNA
aaaaaaatttacacaaatgaaatagtgatgtaggaagagttaatcacgtgcttcataccttggtttcgccccaggtggcc

SEQ ID NO: 52576 - DNA, 80 bp, synthetic construct
  misc_feature 1..80: note = Artificially Synthesized Probe
  source 1..80: mol_type = other DNA
aattagctgggattatagttgtgcgccaccacacttggctaacttttttgtatttttgtggagacagggtttcaccatgg

SEQ ID NO: 52577 - DNA, 80 bp, synthetic construct
  misc_feature 1..80: note = Artificially Synthesized Probe
  source 1..80: mol_type = other DNA
atctctgctcactgcaacctctgcctcccgggttcaagtgattcttctgcctcagcctcccgagtagctgggactacagg

SEQ ID NO: 52578 - DNA, 80 bp, synthetic construct; identical to SEQ ID NO: 24669
  misc_feature 1..80: note = Artificially Synthesized Probe
  source 1..80: mol_type = other DNA

SEQ ID NO: 52579 - DNA, 80 bp, synthetic construct
  misc_feature 1..80: note = Artificially Synthesized Probe
  source 1..80: mol_type = other DNA
atgtctccttggacttcaggggacctaataccaataaaagtaataataatgataataggccaagcaccatggctcacgcc

SEQ ID NO: 52580 - DNA, 80 bp, synthetic construct
  misc_feature 1..80: note = Artificially Synthesized Probe
  source 1..80: mol_type = other DNA
tgaagcaagagaatcacttgaacccgggagacggaggtttgagtgagccaagatcgtgccactgcactctagcctaggcg

SEQ ID NO: 52581 - DNA, 80 bp, synthetic construct
  misc_feature 1..80: note = Artificially Synthesized Probe
  source 1..80: mol_type = other DNA
agttcgagaccagcctggccaacgtggaccctgtctctactaaaagtacaaaaattagccggtcatggtggcgcgcgcct

SEQ ID NO: 52582 - DNA, 80 bp, synthetic construct; identical to SEQ ID NO: 24670
  misc_feature 1..80: note = Artificially Synthesized Probe
  source 1..80: mol_type = other DNA

SEQ ID NO: 52583 - DNA, 80 bp, synthetic construct
  misc_feature 1..80: note = Artificially Synthesized Probe
  source 1..80: mol_type = other DNA
actgcaaccatcggtttctccaatgctctgtggggaaggggaaataacaccggttagaggtgataatggttaatttgggc

SEQ ID NO: 52584 - DNA, 80 bp, synthetic construct
  misc_feature 1..80: note = Artificially Synthesized Probe
  source 1..80: mol_type = other DNA
agacggtagccagcgccactcgcagcatgcatatggcccagagctggaccaaagcccgggccatgggggtgtgcactgcg

SEQ ID NO: 52585 - DNA, 80 bp, synthetic construct
  misc_feature 1..80: note = Artificially Synthesized Probe
  source 1..80: mol_type = other DNA
gaaatacatgaagctcaggtgacattttttattttttagagatggggtcttgctatgttgcctaggctggatttgaactt

SEQ ID NO: 52586 - DNA, 80 bp, synthetic construct
  misc_feature 1..80: note = Artificially Synthesized Probe
  source 1..80: mol_type = other DNA
tggtcgtgcatgcctgtagtcccagctacttgggaggctgaggtgggaggatcgcttgaacccgggaagcagaagctgca

SEQ ID NO: 52587 - DNA, 80 bp, synthetic construct; identical to SEQ ID NO: 24655
  misc_feature 1..80: note = Artificially Synthesized Probe
  source 1..80: mol_type = other DNA

SEQ ID NO: 52588 - DNA, 80 bp, synthetic construct
  misc_feature 1..80: note = Artificially Synthesized Probe
  source 1..80: mol_type = other DNA
ttttttttttttttttgagatgaagtgaagtctcactctgttgcggaggctggagtgccgtggcgcgatcttggctcact

SEQ ID NO: 52589 - DNA, 80 bp, synthetic construct
  misc_feature 1..80: note = Artificially Synthesized Probe
  source 1..80: mol_type = other DNA
ctcaaacgcctgagctcaggcaatctgcccccctcagcctcccaaagtgctgggattacaggcatgagccactgagccca

SEQ ID NO: 52590 - DNA, 80 bp, synthetic construct
  misc_feature 1..80: note = Artificially Synthesized Probe
  source 1..80: mol_type = other DNA
gagtgcagtggcccgatctcagctcactgcaagctctgcctcccgggttcacgccattctcctgcctcagcgtcccgagt

SEQ ID NO: 52591 - DNA, 80 bp, synthetic construct
  misc_feature 1..80: note = Artificially Synthesized Probe
  source 1..80: mol_type = other DNA
cagatggatcacgaagtcaggagatcgagaccatcccggctaacacggtgaaacacagtctctaccaaaaatacaaaaaa

SEQ ID NO: 52592 - DNA, 80 bp, synthetic construct; identical to SEQ ID NO: 24656
  misc_feature 1..80: note = Artificially Synthesized Probe
  source 1..80: mol_type = other DNA

SEQ ID NO: 52593 - DNA, 80 bp, synthetic construct
  misc_feature 1..80: note = Artificially Synthesized Probe
  source 1..80: mol_type = other DNA
aaagtaaagttaaaaccaaatgacctgccaaagctccaggccaatggcaccaatgttctcaaattctgagaggtcatact

SEQ ID NO: 52594 - DNA, 80 bp, synthetic construct
  misc_feature 1..80: note = Artificially Synthesized Probe
  source 1..80: mol_type = other DNA
atcatacaaagaggccacacacctggtacgggggcttctggagcatcggcgctggccagtccccatccaggtcaccgttc

SEQ ID NO: 52595 - DNA, 80 bp, synthetic construct
  misc_feature 1..80: note = Artificially Synthesized Probe
  source 1..80: mol_type = other DNA
gtgcggttgtgcaatcatggctcactgcagcctcaacctcttgggctccagtgatcctcctgcctcagcctcccaagtag

SEQ ID NO: 52596 - DNA, 80 bp, synthetic construct
  misc_feature 1..80: note = Artificially Synthesized Probe
  source 1..80: mol_type = other DNA
ttagccaccacacccagccagatgctcagatttgagaaaggaaattattagatgccaagtggcaggcacaggctggtgac

SEQ ID NO: 52597 - DNA, 80 bp, synthetic construct; identical to SEQ ID NO: 24657
  misc_feature 1..80: note = Artificially Synthesized Probe
  source 1..80: mol_type = other DNA

SEQ ID NO: 52598 - DNA, 80 bp, synthetic construct
  misc_feature 1..80: note = Artificially Synthesized Probe
  source 1..80: mol_type = other DNA
tattcgggaggctgaggcaggagaatcacttgaacctgggaggcggaggttgccgtgagctgagatcacgccactgcact

SEQ ID NO: 52599 - DNA, 80 bp, synthetic construct
  misc_feature 1..80: note = Artificially Synthesized Probe
  source 1..80: mol_type = other DNA
cagccatgcagcaattgtccagtaactgggtacttacaaactacatttgtgcactttttagagttgcccaggaaaaattc

SEQ ID NO: 52600 - DNA, 80 bp, synthetic construct; identical to SEQ ID NO: 24653
  misc_feature 1..80: note = Artificially Synthesized Probe
  source 1..80: mol_type = other DNA

SEQ ID NO: 52601 - DNA, 80 bp, synthetic construct; identical to SEQ ID NO: 24658
  misc_feature 1..80: note = Artificially Synthesized Probe
  source 1..80: mol_type = other DNA

SEQ ID NO: 52602 - DNA, 80 bp, synthetic construct
  misc_feature 1..80: note = Artificially Synthesized Probe
  source 1..80: mol_type = other DNA
tgccaccatgcctgggtaattttttgtgtctagtagagacagagtttcaccatgttgaccaggctggtctcgaactcctg

SEQ ID NO: 52603 - DNA, 80 bp, synthetic construct
  misc_feature 1..80: note = Artificially Synthesized Probe
  source 1..80: mol_type = other DNA
aaaaaaagcaaaaattagctgggcgtggtggtgtgtggctgtagtcccagctgctcgggaggctgaggtgagaggatcat

SEQ ID NO: 52604 - DNA, 80 bp, synthetic construct
  misc_feature 1..80: note = Artificially Synthesized Probe
  source 1..80: mol_type = other DNA
ggagtgcagtggtgcaatcagagctcactacaaccttgacctcccaggctcaagtgaccctcccacctcagcctccccag

SEQ ID NO: 52605 - DNA, 80 bp, synthetic construct
  misc_feature 1..80: note = Artificially Synthesized Probe
  source 1..80: mol_type = other DNA
ctgcacccagacatttctccagaatgtttttttcatcctgaatatttcattcattaatgaggatggatgtggctgaaatg

SEQ ID NO: 52606 - DNA, 80 bp, synthetic construct
  misc_feature 1..80: note = Artificially Synthesized Probe
  source 1..80: mol_type = other DNA
ctggaaactggaaacaggaggtatgtctacaaagacccatccctggctcagttaagtattttattatcaaaactattttt

SEQ ID NO: 52607 - DNA, 80 bp, synthetic construct; identical to SEQ ID NO: 24659
  misc_feature 1..80: note = Artificially Synthesized Probe
  source 1..80: mol_type = other DNA

SEQ ID NO: 52608 - DNA, 80 bp, synthetic construct
  misc_feature 1..80: note = Artificially Synthesized Probe
  source 1..80: mol_type = other DNA
atttttgtatttttagtagagatggggtttcaccatgctggccaggctggtctcaaactcctgaccttgtgatccacctg

SEQ ID NO: 52609 - DNA, 80 bp, synthetic construct
  misc_feature 1..80: note = Artificially Synthesized Probe
  source 1..80: mol_type = other DNA
ggatcttggctcactgcagtctccgcctcccgggtttaagtgattctcctgcatcaacctcccgagtagaatagctgtga

SEQ ID NO: 52610 - DNA, 80 bp, synthetic construct; identical to SEQ ID NO: 24660
  misc_feature 1..80: note = Artificially Synthesized Probe
  source 1..80: mol_type = other DNA

SEQ ID NO: 52611 - DNA, 80 bp, synthetic construct
  misc_feature 1..80: note = Artificially Synthesized Probe
  source 1..80: mol_type = other DNA
agtggtggcgtgtccctgtagtcccagggacctgtgaggctgaggtgaggggatcacttgaacccaggaagtggaggttg

SEQ ID NO: 52612 - DNA, 80 bp, synthetic construct
  misc_feature 1..80: note = Artificially Synthesized Probe
  source 1..80: mol_type = other DNA
ggtcaggagttcgagaccagcctgactaacatggtgaaaccccacctctactaaaaatacaaaaattagccagccatggt

SEQ ID NO: 52613 - DNA, 80 bp, synthetic construct
  misc_feature 1..80: note = Artificially Synthesized Probe
  source 1..80: mol_type = other DNA
acacatgtaatggatgttcatgaggaaatgtagacagatgggctctgtgttgcctgtctgaggttttatgcataacttat

SEQ ID NO: 52614 - DNA, 80 bp, synthetic construct
  misc_feature 1..80: note = Artificially Synthesized Probe
  source 1..80: mol_type = other DNA
agtactcaggcagaccctgccttctagaagcctcctcaccacctaggataggctgaataagaagaacctgtaaagattgc

SEQ ID NO: 52615 - DNA, 80 bp, synthetic construct
  misc_feature 1..80: note = Artificially Synthesized Probe
  source 1..80: mol_type = other DNA
ggaactgttgaattaaaaactgaaatactaagaaaaatttattttaatctttttttgaccccaaattatgctgcttggca

SEQ ID NO: 52616 - DNA, 80 bp, synthetic construct; identical to SEQ ID NO: 24661
  misc_feature 1..80: note = Artificially Synthesized Probe
  source 1..80: mol_type = other DNA

SEQ ID NO: 52617 - DNA, 80 bp, synthetic construct
  misc_feature 1..80: note = Artificially Synthesized Probe
  source 1..80: mol_type = other DNA
ggtgggcacctgtaaccccagctacttgggaggctgaggtaggagaatcgcttgaacctgggaggcagaggttgcagtga

SEQ ID NO: 52618 - DNA, 80 bp, synthetic construct
  misc_feature 1..80: note = Artificially Synthesized Probe
  source 1..80: mol_type = other DNA
gtttcagatatctgggtgttttttagttctatttttatttttattttgtattttgtatcatttatttatttatttatttg

SEQ ID NO: 52619 - DNA, 80 bp, synthetic construct; identical to SEQ ID NO: 24662
  misc_feature 1..80: note = Artificially Synthesized Probe
  source 1..80: mol_type = other DNA

SEQ ID NO: 52620 - DNA, 80 bp, synthetic construct
  misc_feature 1..80: note = Artificially Synthesized Probe
  source 1..80: mol_type = other DNA
atctcctgacctcgtgatctgcccacctcggcctcccaaagtgctgggattacaggtgtgagccaccgcgcccggctcta

SEQ ID NO: 52621 - DNA, 80 bp, synthetic construct
  misc_feature 1..80: note = Artificially Synthesized Probe
  source 1..80: mol_type = other DNA
tagtgacagggtctcactatgttggccaagctggtctcgaactcctggactcaagtaatcctcctgcctggcctcccaaa

SEQ ID NO: 52622 - DNA, 80 bp, synthetic construct
  misc_feature 1..80: note = Artificially Synthesized Probe
  source 1..80: mol_type = other DNA
ccaggttcaagcaattctcctgcctcagcctcctgagtacctgggactacaggcatgtgccactatgcccggctaatttt

SEQ ID NO: 52623 - DNA, 80 bp, synthetic construct; identical to SEQ ID NO: 24663
  misc_feature 1..80: note = Artificially Synthesized Probe
  source 1..80: mol_type = other DNA

SEQ ID NO: 52624 - DNA, 80 bp, synthetic construct
  misc_feature 1..80: note = Artificially Synthesized Probe
  source 1..80: mol_type = other DNA
gccacagacaacatataaatgaacagagtgaggctgcattccagtaagacttcatttatgcacactgaaatctaaatttc

SEQ ID NO: 52625 - DNA, 80 bp, synthetic construct
  misc_feature 1..80: note = Artificially Synthesized Probe
  source 1..80: mol_type = other DNA
tccctcagacgctttattgtttacaaaacagatggatcccatagggaaggaacacaatcattatgctgacagcagcgaac

SEQ ID NO: 52626 - DNA, 80 bp, synthetic construct
  misc_feature 1..80: note = Artificially Synthesized Probe
  source 1..80: mol_type = other DNA
tccctgtcctggcagtgccggccctcaggagccatcccaggaagcaattcgtcctaaccctcctccctccccagccccac

SEQ ID NO: 52627 - DNA, 80 bp, synthetic construct; identical to SEQ ID NO: 24682
  misc_feature 1..80: note = Artificially Synthesized Probe
  source 1..80: mol_type = other DNA

SEQ ID NO: 52628 - DNA, 80 bp, synthetic construct
  misc_feature 1..80: note = Artificially Synthesized Probe
  source 1..80: mol_type = other DNA
tgcttctcactcactctacaagtaccctctcgcctgctgggagggttgcaaactaccacccgtgggccaaatgcagtctc

SEQ ID NO: 52629 - DNA, 80 bp, synthetic construct
  misc_feature 1..80: note = Artificially Synthesized Probe
  source 1..80: mol_type = other DNA
taggactcctccctggcatgctgagtctggctgcaccgttgagtggtcgcaacagactgtggaggctgaaaatactgact

SEQ ID NO: 52630 - DNA, 80 bp, synthetic construct
  misc_feature 1..80: note = Artificially Synthesized Probe
  source 1..80: mol_type = other DNA
ggtgattccactttataagaaaggaaactgctttaattaaagcaggttaataattaaaacttcaaagtactgcacagcca

SEQ ID NO: 52631 - DNA, 80 bp, synthetic construct
  misc_feature 1..80: note = Artificially Synthesized Probe
  source 1..80: mol_type = other DNA
gtgggtttttccccctgcactcccaggagcaggacctctcccaggtcgctgtgcaacactgcacgccttcctattccaga

SEQ ID NO: 52632 - DNA, 80 bp, synthetic construct
  misc_feature 1..80: note = Artificially Synthesized Probe
  source 1..80: mol_type = other DNA
cacagttggggagacagactttgaacagtcccgtgtggtcagtgttacctcgaggtcacgctgattccccagagctaaca

SEQ ID NO: 52633 - DNA, 80 bp, synthetic construct; identical to SEQ ID NO: 24683
  misc_feature 1..80: note = Artificially Synthesized Probe
  source 1..80: mol_type = other DNA

SEQ ID NO: 52634 - DNA, 80 bp, synthetic construct
  misc_feature 1..80: note = Artificially Synthesized Probe
  source 1..80: mol_type = other DNA
gggctcgtgtgaggcttctccctacacccctcaaagcttaagcagtttaaatgctcgctttattgtgaaaagattgacaa

SEQ ID NO: 52635 - DNA, 80 bp, synthetic construct
  misc_feature 1..80: note = Artificially Synthesized Probe
  source 1..80: mol_type = other DNA
agggacaggacccctgctgctgcctggagagcactcacaggagcactcacaggaggaataaccacctgcaaggcttgcaa

SEQ ID NO: 52636 - DNA, 80 bp, synthetic construct
  misc_feature 1..80: note = Artificially Synthesized Probe
  source 1..80: mol_type = other DNA
aagaggggagttagggagaggggagttagtgagtggggagttagggagggggagttagggagaggggagttagggagggg

SEQ ID NO: 52637 - DNA, 80 bp, synthetic construct; identical to SEQ ID NO: 24684
  misc_feature 1..80: note = Artificially Synthesized Probe
  source 1..80: mol_type = other DNA

SEQ ID NO: 52638 - DNA, 80 bp, synthetic construct
  misc_feature 1..80: note = Artificially Synthesized Probe
  source 1..80: mol_type = other DNA
gagttagggagaggggagttagggaggggggagttagggagaggggggttagggagaagggagttagggaggggagttag

SEQ ID NO: 52639 - DNA, 80 bp, synthetic construct
  misc_feature 1..80: note = Artificially Synthesized Probe
  source 1..80: mol_type = other DNA
gagttagggagaggggggttagggagaggggagttagggaggggagttagggagaagggagttagggagaggggagctag

SEQ ID NO: 52640 - DNA, 80 bp, synthetic construct
  misc_feature 1..80: note = Artificially Synthesized Probe
  source 1..80: mol_type = other DNA
atgcaataccctgcaacataaacattttcttttccaaggatctgcaggggtggacatgatgctccaggcacagagtagga

SEQ ID NO: 52641 - DNA, 80 bp, synthetic construct; identical to SEQ ID NO: 24685
  misc_feature 1..80: note = Artificially Synthesized Probe
  source 1..80: mol_type = other DNA

SEQ ID NO: 52642 - DNA, 80 bp, synthetic construct
  misc_feature 1..80: note = Artificially Synthesized Probe
  source 1..80: mol_type = other DNA
gagttaaggagaggggagttagggaagggagttagggagaggggagttagggagaagggagttagggaggggggagttag

SEQ ID NO: 52643 - DNA, 80 bp, synthetic construct
  misc_feature 1..80: note = Artificially Synthesized Probe
  source 1..80: mol_type = other DNA
gcactctgagcaaggctataatgaagggagtggcgactccctggacagcagacagccaagagggtttgtttctccagctt

SEQ ID NO: 52644 - DNA, 80 bp, synthetic construct
  misc_feature 1..80: note = Artificially Synthesized Probe
  source 1..80: mol_type = other DNA
gggtaggcaggtggcaggtgcgccaaccccttatctctggagaagagctaccttcctttcccttcccacacccagagagc

SEQ ID NO: 52645 - DNA, 80 bp, synthetic construct; identical to SEQ ID NO: 24686
  misc_feature 1..80: note = Artificially Synthesized Probe
  source 1..80: mol_type = other DNA

SEQ ID NO: 52646 - DNA, 80 bp, synthetic construct
  misc_feature 1..80: note = Artificially Synthesized Probe
  source 1..80: mol_type = other DNA
ctgcacctgtccccgcccctagtatccagcacacggcaggcagcaggcaccgtcctgtgggacagaagcctcacacgggc

SEQ ID NO: 52647 - DNA, 80 bp, synthetic construct
  misc_feature 1..80: note = Artificially Synthesized Probe
  source 1..80: mol_type = other DNA
ccctgtgattacactgggctccctgggaaaatccaggatcatctcactactttaaggccggctgatcagcaaccttaatt

SEQ ID NO: 52648 - DNA, 80 bp, synthetic construct
  misc_feature 1..80: note = Artificially Synthesized Probe
  source 1..80: mol_type = other DNA
cttcagaaccctctacggtttgcagttactgccttgtaaagaggctgtgtctgcttaatttgtatcatcgatgttacacc

SEQ ID NO: 52649 - DNA, 80 bp, synthetic construct
  misc_feature 1..80: note = Artificially Synthesized Probe
  source 1..80: mol_type = other DNA
caccgcggtggcacctgcacgagcccacctgcttactgccaccttctctcctcacgctttcctccaggctcggctcccgg

SEQ ID NO: 52650 - DNA, 80 bp, synthetic construct; identical to SEQ ID NO: 24687
  misc_feature 1..80: note = Artificially Synthesized Probe
  source 1..80: mol_type = other DNA

SEQ ID NO: 52651 - DNA, 80 bp, synthetic construct
  misc_feature 1..80: note = Artificially Synthesized Probe
  source 1..80: mol_type = other DNA
atggaagaaacgacccagccagttaggcaggccttgagtcaatgcctgaagtgaccgaaatcaccaccagatggcagcat

SEQ ID NO: 52652 - DNA, 80 bp, synthetic construct
  misc_feature 1..80: note = Artificially Synthesized Probe
  source 1..80: mol_type = other DNA
gtttctaattcccttgatattggcatttcataagagctttccaggaaatctcgatagttcagagtgcactgagtgaaaag

SEQ ID NO: 52653 - DNA, 80 bp, synthetic construct
  misc_feature 1..80: note = Artificially Synthesized Probe
  source 1..80: mol_type = other DNA
tttatacatctacctatctacctatacggttgccagaaagtaccgagactccgaggacgggccatatgtacttgggggag

SEQ ID NO: 52654 - DNA, 80 bp, synthetic construct; identical to SEQ ID NO: 24688
  misc_feature 1..80: note = Artificially Synthesized Probe
  source 1..80: mol_type = other DNA

SEQ ID NO: 52655 - DNA, 80 bp, synthetic construct
  misc_feature 1..80: note = Artificially Synthesized Probe
  source 1..80: mol_type = other DNA
ttgtgacatgtcattctcttttgtgatcacgttaatttggacatgaaaaagtgacactagaagttggtccccacactgct

SEQ ID NO: 52656 - DNA, 80 bp, synthetic construct
  misc_feature 1..80: note = Artificially Synthesized Probe
  source 1..80: mol_type = other DNA
gctaggatagagggctcattgaggccagcagggaggagcacctgggaggagccccactgccgttccacaggctccagcca

SEQ ID NO: 52657 - DNA, 80 bp, synthetic construct
  misc_feature 1..80: note = Artificially Synthesized Probe
  source 1..80: mol_type = other DNA
ttaggagccttctacgacctgacacttgtttcaagtttgggcccttacactggagagctagccggattcacttgacacca

SEQ ID NO: 52658 - DNA, 80 bp, synthetic construct; identical to SEQ ID NO: 24689
  misc_feature 1..80: note = Artificially Synthesized Probe
  source 1..80: mol_type = other DNA

SEQ ID NO: 52659 - DNA, 80 bp, synthetic construct
  misc_feature 1..80: note = Artificially Synthesized Probe
  source 1..80: mol_type = other DNA
tgagctgtgtgcctggaggaaggctccaaattggatgagggcagggagagcaaggactgggatggggtggggaaggttgg

SEQ ID NO: 52660 - DNA, 80 bp, synthetic construct
  misc_feature 1..80: note = Artificially Synthesized Probe
  source 1..80: mol_type = other DNA
gcggggaggcgtcccacactaatcagagggggatggtccccacactaaccagagggggaggtgccccacatgaatcagag

SEQ ID NO: 52661 - DNA, 80 bp, synthetic construct
  misc_feature 1..80: note = Artificially Synthesized Probe
  source 1..80: mol_type = other DNA
agaggggaatggtccccacactaattagagaggaggggtgcccacactaaccagagggtaatggtccccacgctagtccc

SEQ ID NO: 52662 - DNA, 80 bp, synthetic construct
  misc_feature 1..80: note = Artificially Synthesized Probe
  source 1..80: mol_type = other DNA
tttataaaagctgagtcctgatggccttgctcagtgtttccgttttgagttaaatgaactcgatgccttcgtatttcacg

SEQ ID NO: 52663 - DNA, 80 bp, synthetic construct
  misc_feature 1..80: note = Artificially Synthesized Probe
  source 1..80: mol_type = other DNA
acgggtcagggggcgggacgcggcagggtcggagggcggcggcaggctccgggacgggggtccgggcccgtggctggggc

SEQ ID NO: 52664 - DNA, 80 bp, synthetic construct; identical to SEQ ID NO: 24671
  misc_feature 1..80: note = Artificially Synthesized Probe
  source 1..80: mol_type = other DNA

SEQ ID NO: 52665 - DNA, 80 bp, synthetic construct
  misc_feature 1..80: note = Artificially Synthesized Probe
  source 1..80: mol_type = other DNA
tcgccccgcctctgggcccgcgttcccggcagcctctgctctgcggctgcgcgcggacggcgcgagggctgctgggagct

SEQ ID NO: 52666 - DNA, 80 bp, synthetic construct; identical to SEQ ID NO: 24673
  misc_feature 1..80: note = Artificially Synthesized Probe
  source 1..80: mol_type = other DNA

SEQ ID NO: 52667 - DNA, 80 bp, synthetic construct
  misc_feature 1..80: note = Artificially Synthesized Probe
  source 1..80: mol_type = other DNA
agccccacaccatcaggccgtgcgcagtagcaggcaaggggctgcgaccaccagggcccaccagctcacagcaacccgcc

SEQ ID NO: 52668 - DNA, 80 bp, synthetic construct
  misc_feature 1..80: note = Artificially Synthesized Probe
  source 1..80: mol_type = other DNA
ccagaggaacccaaggaaagggaacaaacccccattggatgtggggaggcatcggcggggaggctgccttgaggctgcaa

SEQ ID NO: 52669 - DNA, 80 bp, synthetic construct
  misc_feature 1..80: note = Artificially Synthesized Probe
  source 1..80: mol_type = other DNA
gggtagggacagggcctgacccaccagtgcagacaaccgggccacaggctgggatgctaggaggccagctgccagggcga

SEQ ID NO: 52670 - DNA, 80 bp, synthetic construct
  misc_feature 1..80: note = Artificially Synthesized Probe
  source 1..80: mol_type = other DNA
gaggcaggtggatcaccagatcacccgaagtcaggagttcgagaccatcctgggcaacatggtgaaaccctgtctccact

SEQ ID NO: 52671 - DNA, 80 bp, synthetic construct; identical to SEQ ID NO: 24674
  misc_feature 1..80: note = Artificially Synthesized Probe
  source 1..80: mol_type = other DNA

SEQ ID NO: 52672 - DNA, 80 bp, synthetic construct
  misc_feature 1..80: note = Artificially Synthesized Probe
  source 1..80: mol_type = other DNA
cgtccactccttgcccaggccgcccacgtacagacgctcgtccttcactgccagccattcggccttgaagcctggccaag

SEQ ID NO: 52673 - DNA, 80 bp, synthetic construct
  misc_feature 1..80: note = Artificially Synthesized Probe
  source 1..80: mol_type = other DNA
tgccctcccctcagctcctgaaggttcagtgaccactctcaagtctcctctgatccccaactccccgctcctcaagctgt

SEQ ID NO: 52674 - DNA, 80 bp, synthetic construct; identical to SEQ ID NO: 24675
  misc_feature 1..80: note = Artificially Synthesized Probe
  source 1..80: mol_type = other DNA

SEQ ID NO: 52675 - DNA, 80 bp, synthetic construct
  misc_feature 1..80: note = Artificially Synthesized Probe
  source 1..80: mol_type = other DNA
tccttcgcttcctccactacctatgacatagcgggggaaagagacaaccatgagagaggggtccctcctcgctgccctcc

SEQ ID NO: 52676 - DNA, 80 bp, synthetic construct
  misc_feature 1..80: note = Artificially Synthesized Probe
  source 1..80: mol_type = other DNA
ggagctgtgccctctgaactgcccgagactgtagtagcttctctgcagggccctggagggacctgcggtctcctggtctg

SEQ ID NO: 52677 - DNA, 80 bp, synthetic construct
  misc_feature 1..80: note = Artificially Synthesized Probe
  source 1..80: mol_type = other DNA
gtgcgaggcaggaagtaggcgaccaacgcctcagttgatacctcaggtgaggtccgtcccctgcccagccctgggcaaac

SEQ ID NO: 52678 - DNA, 80 bp, synthetic construct
  misc_feature 1..80: note = Artificially Synthesized Probe
  source 1..80: mol_type = other DNA
cggagctcagaggagctggcagctcctctgccagcgtccttggcacctccccagctcctctctggaggaagacactggcc

SEQ ID NO: 52679 - DNA, 80 bp, synthetic construct; identical to SEQ ID NO: 24676
  misc_feature 1..80: note = Artificially Synthesized Probe
  source 1..80: mol_type = other DNA

SEQ ID NO: 52680 - DNA, 80 bp, synthetic construct
  misc_feature 1..80: note = Artificially Synthesized Probe
  source 1..80: mol_type = other DNA
agctcttcctcctagaaactgctcagtgtgaagtgacagtaggctatgctcctggctaagggtaagggggccgcaggtca

SEQ ID NO: 52681 - DNA, 80 bp, synthetic construct
  misc_feature 1..80: note = Artificially Synthesized Probe
  source 1..80: mol_type = other DNA
cggtgccgtcgccgtcggacagaatcacccagggcacggctttgctgccttcgatctggtagacgacccccgtccggtca

SEQ ID NO: 52682 - DNA, 80 bp, synthetic construct
  misc_feature 1..80: note = Artificially Synthesized Probe
  source 1..80: mol_type = other DNA
tttttcaggtaactgaaccaggtgttttcctcttgggcccttgactctgtgtccaggtctgcgataactgcgattcgata

SEQ ID NO: 52683 - DNA, 80 bp, synthetic construct
  misc_feature 1..80: note = Artificially Synthesized Probe
  source 1..80: mol_type = other DNA
ggcagcacccacaaagaacgtcaggatcaccttccagcgggggcggaagcgggggtccgcggccttggtcatggacgcca

SEQ ID NO: 52684 - DNA, 80 bp, synthetic construct; identical to SEQ ID NO: 24677
  misc_feature 1..80: note = Artificially Synthesized Probe
  source 1..80: mol_type = other DNA

SEQ ID NO: 52685 - DNA, 80 bp, synthetic construct
  misc_feature 1..80: note = Artificially Synthesized Probe
  source 1..80: mol_type = other DNA
gtgaggaaggaagttccatgcaggctggtgctctgtggtccctctaaagagagaagcgcaggagagtcaggtgggagggg

SEQ ID NO: 52686 - DNA, 80 bp, synthetic construct
  misc_feature 1..80: note = Artificially Synthesized Probe
  source 1..80: mol_type = other DNA
tgtggggagggcactgtgaatgatggaaacgtcccttctcagcctgggtcgtgcctaacctgggtctcaaatcccactct

SEQ ID NO: 52687 - DNA, 80 bp, synthetic construct
  misc_feature 1..80: note = Artificially Synthesized Probe
  source 1..80: mol_type = other DNA
acgttagagtattgtatacagttatcggtttgtttgtttctgtctccacctctgtatcctggctcctagaacagtgcctg

SEQ ID NO: 52688 - DNA, 80 bp, synthetic construct; identical to SEQ ID NO: 24678
  misc_feature 1..80: note = Artificially Synthesized Probe
  source 1..80: mol_type = other DNA

SEQ ID NO: 52689 - DNA, 80 bp, synthetic construct
  misc_feature 1..80: note = Artificially Synthesized Probe
  source 1..80: mol_type = other DNA
cgccaagcccacttcccgggcatacagcatgatggctcagtgcagccatggggcaccaggcccacgtctgcgccgccttg

SEQ ID NO: 52690 - DNA, 80 bp, synthetic construct
  misc_feature 1..80: note = Artificially Synthesized Probe
  source 1..80: mol_type = other DNA
gcttccctggctgggtcctccttgagaaaacaacaaagcagcaaacatgtgcctttatgggcagacgctgtcctccctgc

SEQ ID NO: 52691 - DNA, 80 bp, synthetic construct
  misc_feature 1..80: note = Artificially Synthesized Probe
  source 1..80: mol_type = other DNA
gagaagatacaaaaacagggtgacaattccacatggaactttcggacagtcctaggttttagccccagggtgaggttcaa

SEQ ID NO: 52692 - DNA, 80 bp, synthetic construct; identical to SEQ ID NO: 24679
  misc_feature 1..80: note = Artificially Synthesized Probe
  source 1..80: mol_type = other DNA

SEQ ID NO: 52693 - DNA, 80 bp, synthetic construct
  misc_feature 1..80: note = Artificially Synthesized Probe
  source 1..80: mol_type = other DNA
atcacgctcactgcagcctcaacctctgaggctcaagcgatcctcccacctcagcctcccaagtagctgggactacaggc

SEQ ID NO: 52694 - DNA, 80 bp, synthetic construct
  misc_feature 1..80: note = Artificially Synthesized Probe
  source 1..80: mol_type = other DNA
gtagctgggattacaggcatgcaccaccacgcccgtctaattttgtatttttagtagagatgcagtttctccatgttggt

SEQ ID NO: 52695 - DNA, 80 bp, synthetic construct
  misc_feature 1..80: note = Artificially Synthesized Probe
  source 1..80: mol_type = other DNA
cctgggctcaagtgatcctcctgcctcagcctcccaaagtgctgggatcacaggtgcgagcacccgcacccccccttacc

SEQ ID NO: 52696 - DNA, 80 bp, synthetic construct; identical to SEQ ID NO: 24680
  misc_feature 1..80: note = Artificially Synthesized Probe
  source 1..80: mol_type = other DNA

SEQ ID NO: 52697 - DNA, 80 bp, synthetic construct; identical to SEQ ID NO: 24672
  misc_feature 1..80: note = Artificially Synthesized Probe
  source 1..80: mol_type = other DNA

SEQ ID NO: 52698 - DNA, 80 bp, synthetic construct
  misc_feature 1..80: note = Artificially Synthesized Probe
  source 1..80: mol_type = other DNA
caccaacatcccctgacactccctcgccacctgccatgaagtagcatccatcagatggcacactcccagcttcagcggct

SEQ ID NO: 52699 - DNA, 80 bp, synthetic construct
  misc_feature 1..80: note = Artificially Synthesized Probe
  source 1..80: mol_type = other DNA
tcgggcctgctcttcgcaccagcagctcggtctctcctacggggcatcagctccctgggaagacttgcccactcgccctc

SEQ ID NO: 52700 - DNA, 80 bp, synthetic construct
  misc_feature 1..80: note = Artificially Synthesized Probe
  source 1..80: mol_type = other DNA
aaagagatgccaggtgagccattagccacttcttcaacagcccctctgcactctaccgggggccccaccttaggcatatt

SEQ ID NO: 52701 - DNA, 80 bp, synthetic construct
  misc_feature 1..80: note = Artificially Synthesized Probe
  source 1..80: mol_type = other DNA
acccccatgttcttccctgttcaactccctcagcactccggagagccactgtcctcaccttcaccattcctgtcaaatct

SEQ ID NO: 52702 - DNA, 80 bp, synthetic construct; identical to SEQ ID NO: 24681
  misc_feature 1..80: note = Artificially Synthesized Probe
  source 1..80: mol_type = other DNA

SEQ ID NO: 52703 - DNA, 80 bp, synthetic construct
  misc_feature 1..80: note = Artificially Synthesized Probe
  source 1..80: mol_type = other DNA
tggcaaacccagtgagcacattgtcagtgtccctcctcgaggcaggggggcactctctgtgggcctcctcccaggcaggt

SEQ ID NO: 52704 - DNA, 80 bp, synthetic construct
  misc_feature 1..80: note = Artificially Synthesized Probe
  source 1..80: mol_type = other DNA
tgcttccctttttgacttaccaaggaaatggagatccaaaggaaagcctgaagcactttgtggcttccacgggttcgttt

SEQ ID NO: 52705 - DNA, 80 bp, synthetic construct; identical to SEQ ID NO: 24701
  misc_feature 1..80: note = Artificially Synthesized Probe
  source 1..80: mol_type = other DNA

SEQ ID NO: 52706 - DNA, 80 bp, synthetic construct
  misc_feature 1..80: note = Artificially Synthesized Probe
  source 1..80: mol_type = other DNA
ggctcactgaaacctccgcctcccgggttcaagtgattcttctgcctcaacctcccgagtagctgggattacaggagcct

SEQ ID NO: 52707 - DNA, 80 bp, synthetic construct
  misc_feature 1..80: note = Artificially Synthesized Probe
  source 1..80: mol_type = other DNA
tgtttactcatcattctgataatattctgctaggaaagccagaaatcttccccttcgttcattcaacacatattggttga

SEQ ID NO: 52708 - DNA, 80 bp, synthetic construct
  misc_feature 1..80: note = Artificially Synthesized Probe
  source 1..80: mol_type = other DNA
ttttaaatgaaataacatgaaaaagaaggcaggatagcatggggtaagagtggactctatagagtcggattgccaggact

SEQ ID NO: 52709 - DNA, 80 bp, synthetic construct
  misc_feature 1..80: note = Artificially Synthesized Probe
  source 1..80: mol_type = other DNA
atttctgtaaaatgcatgtctggcatggagtaagccttctatacatgtggctattatggctctctcagagagaaaagtca

SEQ ID NO: 52710 - DNA, 80 bp, synthetic construct; identical to SEQ ID NO: 24691
  misc_feature 1..80: note = Artificially Synthesized Probe
  source 1..80: mol_type = other DNA

SEQ ID NO: 52711 - DNA, 80 bp, synthetic construct; identical to SEQ ID NO: 24702
  misc_feature 1..80: note = Artificially Synthesized Probe
  source 1..80: mol_type = other DNA

SEQ ID NO: 52712 - DNA, 80 bp, synthetic construct
  misc_feature 1..80: note = Artificially Synthesized Probe
  source 1..80: mol_type = other DNA
gtctaagaatttggttaacacagaatgagttgaggagcaaaatatactgttgtcaaactgataaaatctcaaacaataaa

SEQ ID NO: 52713 - DNA, 80 bp, synthetic construct
  misc_feature 1..80: note = Artificially Synthesized Probe
  source 1..80: mol_type = other DNA
ctgtaatgccatatcccatataaagtaaacatagggcaagtggtcatattattctggatatttaaattctaaagaagaca

SEQ ID NO: 52714 - DNA, 80 bp, synthetic construct
  misc_feature 1..80: note = Artificially Synthesized Probe
  source 1..80: mol_type = other DNA
cacaccattcttccgcctcagcctcccaagtagctgggactacaagcgcctgccaccacgctcagctaatttttgtattt

SEQ ID NO: 52715 - DNA, 80 bp, synthetic construct; identical to SEQ ID NO: 24703
  misc_feature 1..80: note = Artificially Synthesized Probe
  source 1..80: mol_type = other DNA

SEQ ID NO: 52716 - DNA, 80 bp, synthetic construct
  misc_feature 1..80: note = Artificially Synthesized Probe
  source 1..80: mol_type = other DNA
ccactgcgcctggtccaggactgagctttatatcagcagagttctagttttgatttttcttttctacaacctacctgtgt

SEQ ID NO: 52717 - DNA, 80 bp, synthetic construct
  misc_feature 1..80: note = Artificially Synthesized Probe
  source 1..80: mol_type = other DNA
ccaagctaggatactggctttatttaaggaccacctggctaactttctaagttgtcttgagccttggtgtttgcttcagt

SEQ ID NO: 52718 - DNA, 80 bp, synthetic construct
  misc_feature 1..80: note = Artificially Synthesized Probe
  source 1..80: mol_type = other DNA
ttcagctatccagatagtgacacctcctgtagacaaggaagccgagtcgtatcaaggagaggaagaactagtttcccaaa

SEQ ID NO: 52719 - DNA, 80 bp, synthetic construct; identical to SEQ ID NO: 24704
  misc_feature 1..80: note = Artificially Synthesized Probe
  source 1..80: mol_type = other DNA

SEQ ID NO: 52720 - DNA, 80 bp, synthetic construct
  misc_feature 1..80: note = Artificially Synthesized Probe
  source 1..80: mol_type = other DNA
agtaattccacagttcaagtacagagcttttgtttaatgctctgctgttactgctttgaaattcttaatgtattgaacaa

SEQ ID NO: 52721 - DNA, 80 bp, synthetic construct
  misc_feature 1..80: note = Artificially Synthesized Probe
  source 1..80: mol_type = other DNA
atgtaatttttatcttccttcgctgatttgagcaactcttgtctaaaatcaccctttccttctgaggtctaggaggtttt

SEQ ID NO: 52722 - DNA, 80 bp, synthetic construct
  misc_feature 1..80: note = Artificially Synthesized Probe
  source 1..80: mol_type = other DNA
tccctgggatttgtggttcttccagcagacttgggtaatttctttgccaacatctgtcagcatcaatgaagttagcttgg

SEQ ID NO: 52723 - DNA, 80 bp, synthetic construct; identical to SEQ ID NO: 24705
  misc_feature 1..80: note = Artificially Synthesized Probe
  source 1..80: mol_type = other DNA

SEQ ID NO: 52724 - DNA, 80 bp, synthetic construct
  misc_feature 1..80: note = Artificially Synthesized Probe
  source 1..80: mol_type = other DNA
aatattccactgtgtgtatatacagtaagtcctcacttaaaaggttgatagatttttggaaactgaatttaagtgacagc

SEQ ID NO: 52725 - DNA, 80 bp, synthetic construct
  misc_feature 1..80: note = Artificially Synthesized Probe
  source 1..80: mol_type = other DNA
acataccatataatgaaaccaattttaccataggctcattgatataaacaagagttggccaggcatggtggcccacacct

SEQ ID NO: 52726 - DNA, 80 bp, synthetic construct
  misc_feature 1..80: note = Artificially Synthesized Probe
  source 1..80: mol_type = other DNA
aggcacaagaatagcttgaacctgggaggtggaggttgcagtgagctgagattgcatcactgcactccagcttgggcaac

SEQ ID NO: 52727 - DNA, 80 bp, synthetic construct
  misc_feature 1..80: note = Artificially Synthesized Probe
  source 1..80: mol_type = other DNA
ttgatggactcttgggctgctgccaccttttgactatttttaataacgctgctgtgaatgttggtgtaaaaatatctctt

SEQ ID NO: 52728 - DNA, 80 bp, synthetic construct; identical to SEQ ID NO: 24706
  misc_feature 1..80: note = Artificially Synthesized Probe
  source 1..80: mol_type = other DNA

SEQ ID NO: 52729 - DNA, 80 bp, synthetic construct
  misc_feature 1..80: note = Artificially Synthesized Probe
  source 1..80: mol_type = other DNA
tttttgagacggagtctcactctgtcgcccaggctggagtgcagtggcagggtcatggctcactgcaacctctaactccc

SEQ ID NO: 52730 - DNA, 80 bp, synthetic construct
  misc_feature 1..80: note = Artificially Synthesized Probe
  source 1..80: mol_type = other DNA
ggcctcccaaagtgctgggattataggtgtgagccaccgtacccggcctttattttttaattcttttttttttttttttt

SEQ ID NO: 52731 - DNA, 80 bp, synthetic construct
  misc_feature 1..80: note = Artificially Synthesized Probe
  source 1..80: mol_type = other DNA
tttttagtagagacggggtttcaccgtgttagccaggatggtctcaatctcctgacctcgtgatccacccgcctcagcct

SEQ ID NO: 52732 - DNA, 80 bp, synthetic construct
  misc_feature 1..80: note = Artificially Synthesized Probe
  source 1..80: mol_type = other DNA
ccatgcctggctaatttttgtattttttgtagagatggggttttaccacgttgcccagtctggtcttgaactcctggcct

SEQ ID NO: 52733 - DNA, 80 bp, synthetic construct; identical to SEQ ID NO: 24707
  misc_feature 1..80: note = Artificially Synthesized Probe
  source 1..80: mol_type = other DNA

SEQ ID NO: 52734 - DNA, 80 bp, synthetic construct
  misc_feature 1..80: note = Artificially Synthesized Probe
  source 1..80: mol_type = other DNA
tacagaactataacacaattatcaatgccagtaaagttatgttaatataatacttttatcaaatcaatggtccatattcc

SEQ ID NO: 52735 - DNA, 80 bp, synthetic construct
  misc_feature 1..80: note = Artificially Synthesized Probe
  source 1..80: mol_type = other DNA
ggccaggagttcaaggtgagcctgggcaacatagtgagaccctctctaaaagaaaataataaaaattaaaaatacaatat

SEQ ID NO: 52736 - DNA, 80 bp, synthetic construct
  misc_feature 1..80: note = Artificially Synthesized Probe
  source 1..80: mol_type = other DNA
caattcttgtgcctcagcctcccaagtatctgagattacaggcatgcaccaccacattcggctaatttttgtatttttag

SEQ ID NO: 52737 - DNA, 80 bp, synthetic construct; identical to SEQ ID NO: 24708
  misc_feature 1..80: note = Artificially Synthesized Probe
  source 1..80: mol_type = other DNA

SEQ ID NO: 52738 - DNA, 80 bp, synthetic construct
  misc_feature 1..80: note = Artificially Synthesized Probe
  source 1..80: mol_type = other DNA
agatattttctgatattatcactctgcagttaattttatatagttactattttttccccacgcaattaataagcaagtgc

SEQ ID NO: 52739 - DNA, 80 bp, synthetic construct
  misc_feature 1..80: note = Artificially Synthesized Probe
  source 1..80: mol_type = other DNA
ggctctcagcattctactgtaaagaaggaccctcctttctccccaggaaggtgtttttgtttttttaaatgaaggagacc

SEQ ID NO: 52740 - DNA, 80 bp, synthetic construct
  misc_feature 1..80: note = Artificially Synthesized Probe
  source 1..80: mol_type = other DNA
gcatttgagggaatctcagctttgggaggccactttgtaagtgatcttaagagattaagtacatccttaattaaaagaaa

SEQ ID NO: 52741 - DNA, 80 bp, synthetic construct; identical to SEQ ID NO: 24709
  misc_feature 1..80: note = Artificially Synthesized Probe
  source 1..80: mol_type = other DNA

SEQ ID NO: 52742 - DNA, 80 bp, synthetic construct
  misc_feature 1..80: note = Artificially Synthesized Probe
  source 1..80: mol_type = other DNA
atattgactacatacctcaagtgcttatagaataaatagtattacaatgaaaattttatcactgcattgctcctctgatt

SEQ ID NO: 52743 - DNA, 80 bp, synthetic construct
  misc_feature 1..80: note = Artificially Synthesized Probe
  source 1..80: mol_type = other DNA
agatggagtctcgctctgtcacccaggctggagtgcaatctcagctcaatgcaacctcagcctcccgggttcaaatgatt

SEQ ID NO: 52744 - DNA, 80 bp, synthetic construct
  misc_feature 1..80: note = Artificially Synthesized Probe
  source 1..80: mol_type = other DNA
attgtgcatggccatcccagaagctctttaaaatgtggttttccagcactgacattttaggattccctaattctaagtta

SEQ ID NO: 52745 - DNA, 80 bp, synthetic construct
  misc_feature 1..80: note = Artificially Synthesized Probe
  source 1..80: mol_type = other DNA
gaaattcagtggtttctaaaggggcatggctcagctgtggcctctgaagcgctgtggttccgctgacgtgggatgataac

SEQ ID NO: 52746 - DNA, 80 bp, synthetic construct; identical to SEQ ID NO: 24710
  misc_feature 1..80: note = Artificially Synthesized Probe
  source 1..80: mol_type = other DNA

SEQ ID NO: 52747 - DNA, 80 bp, synthetic construct
  misc_feature 1..80: note = Artificially Synthesized Probe
  source 1..80: mol_type = other DNA
tttcctgcctcagcctcctgagtagctgggattacaggcacgtgccaccgcacccagcaaattttttgtatttttagtag

SEQ ID NO: 52748 - DNA, 80 bp, synthetic construct
  misc_feature 1..80: note = Artificially Synthesized Probe
  source 1..80: mol_type = other DNA
atttttttgagtgtggcataaggttttcttaaggagaggcatgtctctctatggaggagacctaacacctgcttctttat

SEQ ID NO: 52749 - DNA, 80 bp, synthetic construct; identical to SEQ ID NO: 24711
  misc_feature 1..80: note = Artificially Synthesized Probe
  source 1..80: mol_type = other DNA

SEQ ID NO: 52750 - DNA, 80 bp, synthetic construct
  misc_feature 1..80: note = Artificially Synthesized Probe
  source 1..80: mol_type = other DNA
tcttagaagaaatctaggattctacaggaagggaacagtggcttatgaaaagaaaggcaggaagccttttggaaagtgaa

SEQ ID NO: 52751 - DNA, 80 bp, synthetic construct
  misc_feature 1..80: note = Artificially Synthesized Probe
  source 1..80: mol_type = other DNA
gggggtgatggtgaatggggaggagggtacagaaaagacagggtcttagactttgttttaattttgtatttaattatata

SEQ ID NO: 52752 - DNA, 80 bp, synthetic construct; identical to SEQ ID NO: 24690
  misc_feature 1..80: note = Artificially Synthesized Probe
  source 1..80: mol_type = other DNA

SEQ ID NO: 52753 - DNA, 80 bp, synthetic construct
  misc_feature 1..80: note = Artificially Synthesized Probe
  source 1..80: mol_type = other DNA
ctttattacaaaagaggtagtgcactcaaataccatttcattttgctttctccatatgacagcatcccctggagaagggt

SEQ ID NO: 52754 - DNA, 80 bp, synthetic construct; identical to SEQ ID NO: 24712
  misc_feature 1..80: note = Artificially Synthesized Probe
  source 1..80: mol_type = other DNA

SEQ ID NO: 52755 - DNA, 80 bp, synthetic construct
  misc_feature 1..80: note = Artificially Synthesized Probe
  source 1..80: mol_type = other DNA
ttttaacttcctacactgatttgagcaactcttgtctaaaaccaccctttcctcctgaggtctaggatattttatttatt

SEQ ID NO: 52756 - DNA, 80 bp, synthetic construct
  misc_feature 1..80: note = Artificially Synthesized Probe
  source 1..80: mol_type = other DNA
gctgggattactggcatgcgctaccacacccggctaatttttttatttttagtagaggtggggtttcaccatgttagtca

SEQ ID NO: 52757 - DNA, 80 bp, synthetic construct
  misc_feature 1..80: note = Artificially Synthesized Probe
  source 1..80: mol_type = other DNA
atcctaactgtgtgaaattcctatgtttcatgccctcctttcttttttctcagcaggagtcctggcaaaataagcatgca

SEQ ID NO: 52758 - DNA, 80 bp, synthetic construct
  misc_feature 1..80: note = Artificially Synthesized Probe
  source 1..80: mol_type = other DNA
tgaatgcatggattgtactaggcttttctatggcagtatggagagggctgggtggtttctgctctgaatgcctagtatag

SEQ ID NO: 52759 - DNA, 80 bp, synthetic construct
  misc_feature 1..80: note = Artificially Synthesized Probe
  source 1..80: mol_type = other DNA
tgttgcttcagagggagagaagaagcaagaggagggacttgaggatggtgtgtttagttccctgaatccctgcccagaaa

SEQ ID NO: 52760 - DNA, 80 bp, synthetic construct; identical to SEQ ID NO: 24713
  misc_feature 1..80: note = Artificially Synthesized Probe
  source 1..80: mol_type = other DNA

SEQ ID NO: 52761 - DNA, 80 bp, synthetic construct
  misc_feature 1..80: note = Artificially Synthesized Probe
  source 1..80: mol_type = other DNA
catgaaatctagtgctttgcactgcagctaaaaggcaccgcagctaaaaagaagtgaagctgggatttgaacccagctgt

SEQ ID NO: 52762 - DNA, 80 bp, synthetic construct
  misc_feature 1..80: note = Artificially Synthesized Probe
  source 1..80: mol_type = other DNA
tctctcatggtgaggaggaatttataggtgctctgagccactgaagcgtggatcccttttgctgtattttctggtctggg

SEQ ID NO: 52763 - DNA, 80 bp, synthetic construct; identical to SEQ ID NO: 24714
  misc_feature 1..80: note = Artificially Synthesized Probe
  source 1..80: mol_type = other DNA

SEQ ID NO: 52764 - DNA, 80 bp, synthetic construct
  misc_feature 1..80: note = Artificially Synthesized Probe
  source 1..80: mol_type = other DNA
cggactcaggtgatcctcccacctcaacgtcccaggaagctgggactacaggcaatgtgtcaccatgcccagctaatttt

SEQ ID NO: 52765 - DNA, 80 bp, synthetic construct
  misc_feature 1..80: note = Artificially Synthesized Probe
  source 1..80: mol_type = other DNA
aggtccacctagcctctttatatccagtgacataaatgctgactcaatccaaccatacttgagctggaagccttgagctg

SEQ ID NO: 52766 - DNA, 80 bp, synthetic construct; identical to SEQ ID NO: 24692
  misc_feature 1..80: note = Artificially Synthesized Probe
  source 1..80: mol_type = other DNA

SEQ ID NO: 52767 - DNA, 80 bp, synthetic construct
  misc_feature 1..80: note = Artificially Synthesized Probe
  source 1..80: mol_type = other DNA
ctccagaattagatgcgaaaattatcagtgaagaaatctaagtgcttggggaagatatttggagtctgagtacctctctt

SEQ ID NO: 52768 - DNA, 80 bp, synthetic construct
  misc_feature 1..80: note = Artificially Synthesized Probe
  source 1..80: mol_type = other DNA
ggacggtttctttaggggctctctccctagggtccagccttcgatgattttaagggctccgagctgtttgtttcagactt

SEQ ID NO: 52769 - DNA, 80 bp, synthetic construct; identical to SEQ ID NO: 24715
  misc_feature 1..80: note = Artificially Synthesized Probe
  source 1..80: mol_type = other DNA

SEQ ID NO: 52770 - DNA, 80 bp, synthetic construct
  misc_feature 1..80: note = Artificially Synthesized Probe
  source 1..80: mol_type = other DNA
ttatatatatatgaatatatatgtgtatatatatactttatttataagtatactttatatatatatacttatatattaag

SEQ ID NO: 52771 - DNA, 80 bp, synthetic construct
  misc_feature 1..80: note = Artificially Synthesized Probe
  source 1..80: mol_type = other DNA
attcagaaataaaattacaaaagatttcccttttttgaaggcattagatcactccagaaatgaaccatctgaaaaaaatc

SEQ ID NO: 52772 - DNA, 80 bp, synthetic construct; identical to SEQ ID NO: 24716
  misc_feature 1..80: note = Artificially Synthesized Probe
  source 1..80: mol_type = other DNA

SEQ ID NO: 52773 - DNA, 80 bp, synthetic construct
  misc_feature 1..80: note = Artificially Synthesized Probe
  source 1..80: mol_type = other DNA
tgcagagtagtcagaatccccagtttttcaatatgtgacttcagaaataatgtggcataaataccccaaggggtttagac

SEQ ID NO: 52774 - DNA, 80 bp, synthetic construct
  misc_feature 1..80: note = Artificially Synthesized Probe
  source 1..80: mol_type = other DNA
ggctgggcgcggtggctcatgcctgtaatcccagcactttgggaggacgaggtgggcggatcacaaggtcaagagatcaa

SEQ ID NO: 52775 - DNA, 80 bp, synthetic construct
  misc_feature 1..80: note = Artificially Synthesized Probe
  source 1..80: mol_type = other DNA
gattgctttgtgtctaaaacttaaagcatagagccaagtgctatttctgccacgtgctggaaatgaatgtaagggctcca

SEQ ID NO: 52776 - DNA, 80 bp, synthetic construct
  misc_feature 1..80: note = Artificially Synthesized Probe
  source 1..80: mol_type = other DNA
attgcactccagcctgggtgacagagcgagatgctgtctcaaaaaaaaaaaaaaattatctgggggtgttggtgggcacc

SEQ ID NO: 52777 - DNA, 80 bp, synthetic construct; identical to SEQ ID NO: 24717
  misc_feature 1..80: note = Artificially Synthesized Probe
  source 1..80: mol_type = other DNA

SEQ ID NO: 52778 - DNA, 80 bp, synthetic construct
  misc_feature 1..80: note = Artificially Synthesized Probe
  source 1..80: mol_type = other DNA
acagacaaggaacccataaagatgctggtaagaaagtctggaacagtttatcaaatgcaaattggggatcttaaaattat

SEQ ID NO: 52779 - DNA, 80 bp, synthetic construct
  misc_feature 1..80: note = Artificially Synthesized Probe
  source 1..80: mol_type = other DNA
gaatctttgactattcacaattctgaatagaggagagcatgtactgggggagagcctgctggattggcacgagacaactt

SEQ ID NO: 52780 - DNA, 80 bp, synthetic construct
  misc_feature 1..80: note = Artificially Synthesized Probe
  source 1..80: mol_type = other DNA
aagattttatggttatgaaaataaaaataatccaaagctttaggctatttgctgtgcaaattttgtaactattagcattg

SEQ ID NO: 52781 - DNA, 80 bp, synthetic construct; identical to SEQ ID NO: 24718
  misc_feature 1..80: note = Artificially Synthesized Probe
  source 1..80: mol_type = other DNA

SEQ ID NO: 52782 - DNA, 80 bp, synthetic construct
  misc_feature 1..80: note = Artificially Synthesized Probe
  source 1..80: mol_type = other DNA
gagtcatgtgttccagtggcttgggttcacagtgcatatacacaataatgtgacgaaagtggaaatggagatggtcctgc

SEQ ID NO: 52783 - DNA, 80 bp, synthetic construct
  misc_feature 1..80: note = Artificially Synthesized Probe
  source 1..80: mol_type = other DNA
tgaaaaacctaaactctttttcatccaggcctgccaaggtgaagagatacagccttccgtatccatcgaagcagatgctc

SEQ ID NO: 52784 - DNA, 80 bp, synthetic construct
  misc_feature 1..80: note = Artificially Synthesized Probe
  source 1..80: mol_type = other DNA
ggtatattcagtctctgtgtaatcatctgaagaaattggtcccaaggtgagagctcttttttttcttccatttgtaatta

SEQ ID NO: 52785 - DNA, 80 bp, synthetic construct; identical to SEQ ID NO: 24719
  misc_feature 1..80: note = Artificially Synthesized Probe
  source 1..80: mol_type = other DNA

SEQ ID NO: 52786 - DNA, 80 bp, synthetic construct
  misc_feature 1..80: note = Artificially Synthesized Probe
  source 1..80: mol_type = other DNA
aagtttcctaaaaagtaacttgcaagtgttggggaaaagttttctgggctgttgctttttgaagtagcctcgccgtaatt

SEQ ID NO: 52787 - DNA, 80 bp, synthetic construct
  misc_feature 1..80: note = Artificially Synthesized Probe
  source 1..80: mol_type = other DNA
ggaaaggaagatacagagttaaaaaaagacagagtccttgccctcaggttgcttacaagctagagggatagacaaacaaa

SEQ ID NO: 52788 - DNA, 80 bp, synthetic construct
  misc_feature 1..80: note = Artificially Synthesized Probe
  source 1..80: mol_type = other DNA
gggcagagggaatagcatgaacaaaagcatgggggccttttatttgttcgtttatttatcactcactcttacgtcctgag

SEQ ID NO: 52789 - DNA, 80 bp, synthetic construct
  misc_feature 1..80: note = Artificially Synthesized Probe
  source 1..80: mol_type = other DNA
ctgaattcctgggggcagagaccctgtttcattcaactttatatcctcagcccctgacctgatatattgtgagcttgtta

SEQ ID NO: 52790 - DNA, 80 bp, synthetic construct; identical to SEQ ID NO: 24720
  misc_feature 1..80: note = Artificially Synthesized Probe
  source 1..80: mol_type = other DNA

SEQ ID NO: 52791 - DNA, 80 bp, synthetic construct
  misc_feature 1..80: note = Artificially Synthesized Probe
  source 1..80: mol_type = other DNA
gtgcaactgtgtacaagagagacaaaatctgctctccagggagctaaaagtccagtgaaggaaggacagataataaaaat

SEQ ID NO: 52792 - DNA, 80 bp, synthetic construct
  misc_feature 1..80: note = Artificially Synthesized Probe
  source 1..80: mol_type = other DNA
ttgatgtttcaatacatatatgtgttgtataatgatcaaatcagggtagttagtgtatccatcacctcatgcatttatca

SEQ ID NO: 52793 - DNA, 80 bp, synthetic construct
  misc_feature 1..80: note = Artificially Synthesized Probe
  source 1..80: mol_type = other DNA
aagtagctaggattatatgctcaaaccacagtgcccagctcagaatgccttactgttaaccatagtcaccccactgtgca

SEQ ID NO: 52794 - DNA, 80 bp, synthetic construct; identical to SEQ ID NO: 24721
  misc_feature 1..80: note = Artificially Synthesized Probe
  source 1..80: mol_type = other DNA

SEQ ID NO: 52795 - DNA, 80 bp, synthetic construct; identical to SEQ ID NO: 24693
  misc_feature 1..80: note = Artificially Synthesized Probe
  source 1..80: mol_type = other DNA

SEQ ID NO: 52796 - DNA, 80 bp, synthetic construct
  misc_feature 1..80: note = Artificially Synthesized Probe
  source 1..80: mol_type = other DNA
ttctttgtttatatacttagtatggggattgctggatcatatagtatttttatttttcattttatgaggaactggcatac

SEQ ID NO: 52797 - DNA, 80 bp, synthetic construct
  misc_feature 1..80: note = Artificially Synthesized Probe
  source 1..80: mol_type = other DNA
tttttatttttttttagacaacatcttgctctgtcaggctggagtgcagtggcgcaatctcagctcactgcagcctctgc

SEQ ID NO: 52798 - DNA, 80 bp, synthetic construct
  misc_feature 1..80: note = Artificially Synthesized Probe
  source 1..80: mol_type = other DNA
cctcagcctcccaaagtgctggtattacaggcgtgagccacggcgcccagctgtcactgtggttttgatttgcatttccg

SEQ ID NO: 52799 - DNA, 80 bp, synthetic construct
  misc_feature 1..80: note = Artificially Synthesized Probe
  source 1..80: mol_type = other DNA
taagagaaaaccaattaatggaagaaggttgggggtagggttaaggataagtatttgttgaggctctcatgtattggatg

SEQ ID NO: 52800 - DNA, 80 bp, synthetic construct; identical to SEQ ID NO: 24722
  misc_feature 1..80: note = Artificially Synthesized Probe
  source 1..80: mol_type = other DNA

SEQ ID NO: 52801 - DNA, 80 bp, synthetic construct
  misc_feature 1..80: note = Artificially Synthesized Probe
  source 1..80: mol_type = other DNA
ggattgttattcaatatcagtttgagatgatggtttcttggtctgtacacataaatgttgtgggaatgaggctaatggtg

SEQ ID NO: 52802 - DNA, 80 bp, synthetic construct
  misc_feature 1..80: note = Artificially Synthesized Probe
  source 1..80: mol_type = other DNA
ttggttcctaagaccaatggataactctcatcctctaaaagttgagaaaactatgttgttaggcatggaggcatgagtta

SEQ ID NO: 52803 - DNA, 80 bp, synthetic construct; identical to SEQ ID NO: 24723
  misc_feature 1..80: note = Artificially Synthesized Probe
  source 1..80: mol_type = other DNA

SEQ ID NO: 52804 - DNA, 80 bp, synthetic construct
  misc_feature 1..80: note = Artificially Synthesized Probe
  source 1..80: mol_type = other DNA
tagggcaaggttggtgagatttgctgtaagtcatcaaaaggttactagtggaagtaatgtttgacgtcctcgagagagta

SEQ ID NO: 52805 - DNA, 80 bp, synthetic construct
  misc_feature 1..80: note = Artificially Synthesized Probe
  source 1..80: mol_type = other DNA
tgaggatagccacagtaacaagtaccatgtggcttacggaggaatgtgcaataagtgactttagatcagtttgtcgtaga

SEQ ID NO: 52806 - DNA, 80 bp, synthetic construct
  misc_feature 1..80: note = Artificially Synthesized Probe
  source 1..80: mol_type = other DNA
tatacatgggctttgggaagtcataggtgaagtcagtataggggtatttttactatgaaggccattatacatgccaatca

SEQ ID NO: 52807 - DNA, 80 bp, synthetic construct
  misc_feature 1..80: note = Artificially Synthesized Probe
  source 1..80: mol_type = other DNA
gaagaccctttcttcctggcagaactcctctatatcatacggcagaagaagctgctgcagcacctcaactgtaccaaaga

SEQ ID NO: 52808 - DNA, 80 bp, synthetic construct; identical to SEQ ID NO: 24724
  misc_feature 1..80: note = Artificially Synthesized Probe
  source 1..80: mol_type = other DNA

SEQ ID NO: 52809 - DNA, 80 bp, synthetic construct
  misc_feature 1..80: note = Artificially Synthesized Probe
  source 1..80: mol_type = other DNA
agaggtagtagtcaggctgttaagattagaaggggtgatgttagcggatcagaggagaaagttaatgagaagttgaatag

SEQ ID NO: 52810 - DNA, 80 bp, synthetic construct
  misc_feature 1..80: note = Artificially Synthesized Probe
  source 1..80: mol_type = other DNA
tatgtatgtagtctaagccatatatgttggaaattgaaagtagcaaagcaaggcctaccctggctttgcaggcagcaaat

SEQ ID NO: 52811 - DNA, 80 bp, synthetic construct
  misc_feature 1..80: note = Artificially Synthesized Probe
  source 1..80: mol_type = other DNA
atgctaatatgatacttatgtaaatagagggcatttggtaagtatgttctatcataatctaatgaaatcatttattttgc

SEQ ID NO: 52812 - DNA, 80 bp, synthetic construct
  misc_feature 1..80: note = Artificially Synthesized Probe
  source 1..80: mol_type = other DNA
gagatgtataatttgcaaatttttttcctattttgtaggttgtctcttccctcggttttttttttttttttttttttttt

SEQ ID NO: 52813 - DNA, 80 bp, synthetic construct; identical to SEQ ID NO: 24725
  misc_feature 1..80: note = Artificially Synthesized Probe
  source 1..80: mol_type = other DNA

SEQ ID NO: 52814 - DNA, 80 bp, synthetic construct
  misc_feature 1..80: note = Artificially Synthesized Probe
  source 1..80: mol_type = other DNA
tgctgttttggtaactctagatttgtagtatattttgaagtcaggtggtgggatgcctccagttttgttctttttgctca

SEQ ID NO: 52815 - DNA, 80 bp, synthetic construct
  misc_feature 1..80: note = Artificially Synthesized Probe
  source 1..80: mol_type = other DNA
gctcaagcaatcctcccacctcagactcctgagtagctaggactacaggcatttgccactgcacttggcttgtcactggt

SEQ ID NO: 52816 - DNA, 80 bp, synthetic construct
  misc_feature 1..80: note = Artificially Synthesized Probe
  source 1..80: mol_type = other DNA
ttaagttaatgatattttaattgtttaatatttatttaataattttattattcaattattatttaatattaatttaaata

SEQ ID NO: 52817 - DNA, 80 bp, synthetic construct
  misc_feature 1..80: note = Artificially Synthesized Probe
  source 1..80: mol_type = other DNA
agatcctgtctctaacaaaaagaggcaatttcaggaagtgatccctgccatgaacaaatcaaaacaggataatggtagtt

SEQ ID NO: 52818 - DNA, 80 bp, synthetic construct
  misc_feature 1..80: note = Artificially Synthesized Probe
  source 1..80: mol_type = other DNA
gatgataaaccaggagattctaaacctccttctcagcctctgatgctaatgagataagagttgggaggtcagcaaagctt

SEQ ID NO: 52819 - DNA, 80 bp, synthetic construct; identical to SEQ ID NO: 24726
  misc_feature 1..80: note = Artificially Synthesized Probe
  source 1..80: mol_type = other DNA

SEQ ID NO: 52820 - DNA, 80 bp, synthetic construct
  misc_feature 1..80: note = Artificially Synthesized Probe
  source 1..80: mol_type = other DNA
aatgatggagccacaatttaaaattgaatgtgttttcagaacctgtgcttgcttccagtgatatgtattgcctaccctga

SEQ ID NO: 52821 - DNA, 80 bp, synthetic construct
  misc_feature 1..80: note = Artificially Synthesized Probe
  source 1..80: mol_type = other DNA
ttgacctttcatttggtgttgaccacattctgccttgtgttatgaatattgtgtatatgccatcctcggtaaatgtttca

SEQ ID NO: 52822 - DNA, 80 bp, synthetic construct; identical to SEQ ID NO: 24727
  misc_feature 1..80: note = Artificially Synthesized Probe
  source 1..80: mol_type = other DNA

SEQ ID NO: 52823 - DNA, 80 bp, synthetic construct
  misc_feature 1..80: note = Artificially Synthesized Probe
  source 1..80: mol_type = other DNA
taatcccagctactcgggaggctgaggcatgagaatcacttgaatccaggaggtggaggctgcagtgagctgagatcaca

SEQ ID NO: 52824 - DNA, 80 bp, synthetic construct
  misc_feature 1..80: note = Artificially Synthesized Probe
  source 1..80: mol_type = other DNA
agcctgctttcacactaaggaaaaaactagtattccctgtgcccctggatgcactttcattatagcagagagtttttgtt

SEQ ID NO: 52825 - DNA, 80 bp, synthetic construct
  misc_feature 1..80: note = Artificially Synthesized Probe
  source 1..80: mol_type = other DNA
aaactttcttttttttggagatagtctcattctgtcacccagactggagtgcaggggggcaatcacggctcactgtagtc

SEQ ID NO: 52826 - DNA, 80 bp, synthetic construct; identical to SEQ ID NO: 24728
  misc_feature 1..80: note = Artificially Synthesized Probe
  source 1..80: mol_type = other DNA

SEQ ID NO: 52827 - DNA, 80 bp, synthetic construct
  misc_feature 1..80: note = Artificially Synthesized Probe
  source 1..80: mol_type = other DNA
ggttcaagcgatcctcccacctcagcctcccaagtagctgagactacaggtgtgtgtccatgcacagctaactttttatt

SEQ ID NO: 52828 - DNA, 80 bp, synthetic construct
  misc_feature 1..80: note = Artificially Synthesized Probe
  source 1..80: mol_type = other DNA
caaaaaccacgttcttagcctagattgagcttagattgcctctctagacaactaccccttagttataattctgtgtcccc

SEQ ID NO: 52829 - DNA, 80 bp, synthetic construct
  misc_feature 1..80: note = Artificially Synthesized Probe
  source 1..80: mol_type = other DNA
gaagtttttatttggttagagacaggtttccctgtaggaagatgatggctcatttacactcagctgctctgcaagcagaa

SEQ ID NO: 52830 - DNA, 80 bp, synthetic construct
  misc_feature 1..80: note = Artificially Synthesized Probe
  source 1..80: mol_type = other DNA
tcccggggtcttgagaagagagtaatgcatacttggagtgaaataagcaagatgaaaaaagagatgtgtttctggggtag

SEQ ID NO: 52831 - DNA, 80 bp, synthetic construct
  misc_feature 1..80: note = Artificially Synthesized Probe
  source 1..80: mol_type = other DNA
aaaattagccaggtgtggcggcgagcacctgtaatcccagctactcgggaggctgagacaggagaatctcttgaatccag

SEQ ID NO: 52832 - DNA, 80 bp, synthetic construct; identical to SEQ ID NO: 24729
  misc_feature 1..80: note = Artificially Synthesized Probe
  source 1..80: mol_type = other DNA

SEQ ID NO: 52833 - DNA, 80 bp, synthetic construct
  misc_feature 1..80: note = Artificially Synthesized Probe
  source 1..80: mol_type = other DNA
gggctcttcttggcagaggggatgtctggcttgcctgaagggagtggctctgtaaggacgccttgatgctttcttcatta

SEQ ID NO: 52834 - DNA, 80 bp, synthetic construct
  misc_feature 1..80: note = Artificially Synthesized Probe
  source 1..80: mol_type = other DNA
atgaggcagctgaggcctggggatgtgaacaacctgctcacagtcctcatttactggatttgacttcagccaggtgaact

SEQ ID NO: 52835 - DNA, 80 bp, synthetic construct; identical to SEQ ID NO: 24730
  misc_feature 1..80: note = Artificially Synthesized Probe
  source 1..80: mol_type = other DNA

SEQ ID NO: 52836 - DNA, 80 bp, synthetic construct
  misc_feature 1..80: note = Artificially Synthesized Probe
  source 1..80: mol_type = other DNA
atagagggaggtgggggggtgggggaagtctcttgggtaactgccaaactttgccttcatacaatgggttccaggaaaac

SEQ ID NO: 52837 - DNA, 80 bp, synthetic construct
  misc_feature 1..80: note = Artificially Synthesized Probe
  source 1..80: mol_type = other DNA
aagcaatccaagcctctgataaactctcccaccctaaatccttaaaaactcttagtctgtaagtgagtgggctctgacct

SEQ ID NO: 52838 - DNA, 80 bp, synthetic construct
  misc_feature 1..80: note = Artificially Synthesized Probe
  source 1..80: mol_type = other DNA
gtggtcacagtccttgtccagttggcagaactgacatgtgaaggcaagtgaaggatggtgagatactgaggaaagagcaa

SEQ ID NO: 52839 - DNA, 80 bp, synthetic construct; identical to SEQ ID NO: 24731
  misc_feature 1..80: note = Artificially Synthesized Probe
  source 1..80: mol_type = other DNA

SEQ ID NO: 52840 - DNA, 80 bp, synthetic construct
  misc_feature 1..80: note = Artificially Synthesized Probe
  source 1..80: mol_type = other DNA
ggacaaaatgctgttgataaaacctcctgtcaggcctctgagcccaagctaagccatcatatcccttgtgacctgcacat

SEQ ID NO: 52841 - DNA, 80 bp, synthetic construct
  misc_feature 1..80: note = Artificially Synthesized Probe
  source 1..80: mol_type = other DNA
cgctctgtcactcaggctggagtgaagtggcaccatctcagctcactgcaacctccgcttcctgggttcgagcgattctc

SEQ ID NO: 52842 - DNA, 80 bp, synthetic construct
  misc_feature 1..80: note = Artificially Synthesized Probe
  source 1..80: mol_type = other DNA
gccagagaacaaccccctttgactgtaattttccactacttacccaaatcctataaaacggccccacccctatctccctt

SEQ ID NO: 52843 - DNA, 80 bp, synthetic construct
  misc_feature 1..80: note = Artificially Synthesized Probe
  source 1..80: mol_type = other DNA
gtatttcatatttctgttttgctagaacttagtgcttgtgcaaggttaaattctagaatcaggaaacgttgtttttaggg

SEQ ID NO: 52844 - DNA, 80 bp, synthetic construct; identical to SEQ ID NO: 24732
  misc_feature 1..80: note = Artificially Synthesized Probe
  source 1..80: mol_type = other DNA

SEQ ID NO: 52845 - DNA, 80 bp, synthetic construct
  misc_feature 1..80: note = Artificially Synthesized Probe
  source 1..80: mol_type = other DNA
gacaaagtctcgctctctcacccaggctagagtgtagtggtgtgatcttggcttactgcaaccttcgtctcctgggttca

SEQ ID NO: 52846 - DNA, 80 bp, synthetic construct
  misc_feature 1..80: note = Artificially Synthesized Probe
  source 1..80: mol_type = other DNA
aatggaatgaaccattgtgtctggcctcattcattctttctttcataaaagtttggatactgccaaacaaaattaaagac

SEQ ID NO: 52847 - DNA, 80 bp, synthetic construct
  misc_feature 1..80: note = Artificially Synthesized Probe
  source 1..80: mol_type = other DNA
caggttggatatcatggggcttacccttagcaaggcattctattccacctatgcccaggcggtgtaaaacatataagcat

SEQ ID NO: 52848 - DNA, 80 bp, synthetic construct; identical to SEQ ID NO: 24733
  misc_feature 1..80: note = Artificially Synthesized Probe
  source 1..80: mol_type = other DNA

SEQ ID NO: 52849 - DNA, 80 bp, synthetic construct
  misc_feature 1..80: note = Artificially Synthesized Probe
  source 1..80: mol_type = other DNA
ctgcctacagaaagggatgaactttatcttggaccttttaatgtagtgtggatgggcgtctgtagctggaggtcttcagg

SEQ ID NO: 52850 - DNA, 80 bp, synthetic construct
  misc_feature 1..80: note = Artificially Synthesized Probe
  source 1..80: mol_type = other DNA
tgcagtccagccctcaaagtgctaagtgacttactgaagcctcgaagccatttctggaggatttgcaattctttgtatct

SEQ ID NO: 52851 - DNA, 80 bp, synthetic construct
  misc_feature 1..80: note = Artificially Synthesized Probe
  source 1..80: mol_type = other DNA
tctggtgagatttgcgttgtatgtgacaaatcttttaacttttttctgttagggtttcagttttgttggaagtctgcagt

SEQ ID NO: 52852 - DNA, 80 bp, synthetic construct; identical to SEQ ID NO: 24694
  misc_feature 1..80: note = Artificially Synthesized Probe
  source 1..80: mol_type = other DNA

SEQ ID NO: 52853 - DNA, 80 bp, synthetic construct; identical to SEQ ID NO: 24734
  misc_feature 1..80: note = Artificially Synthesized Probe
  source 1..80: mol_type = other DNA

SEQ ID NO: 52854 - DNA, 80 bp, synthetic construct
  misc_feature 1..80: note = Artificially Synthesized Probe
  source 1..80: mol_type = other DNA
gcccgctaccacgcccagctaattttttatatttttagtagagacagggtttcaccatgttagccaggatggtctcaatc

SEQ ID NO: 52855 - DNA, 80 bp, synthetic construct
  misc_feature 1..80: note = Artificially Synthesized Probe
  source 1..80: mol_type = other DNA
acttatttggcaatgcaaacaactgtttatttcctaacataacttttgcaaatctgaatttttatgaaaagatttttaaa

SEQ ID NO: 52856 - DNA, 80 bp, synthetic construct
  misc_feature 1..80: note = Artificially Synthesized Probe
  source 1..80: mol_type = other DNA
tctgcatacatatttcagacaggtatttcttggaagaaagaacatatgctgtgaaacttacatgtctcagtaggtctcat

SEQ ID NO: 52857 - DNA, 80 bp, synthetic construct
  misc_feature 1..80: note = Artificially Synthesized Probe
  source 1..80: mol_type = other DNA
tatgttcattatggaatatttgggaaatacaaaaacacaccaagaaaaaagtatatttatttataattctattttgctat

SEQ ID NO: 52858 - DNA, 80 bp, synthetic construct; identical to SEQ ID NO: 24735
  misc_feature 1..80: note = Artificially Synthesized Probe
  source 1..80: mol_type = other DNA

SEQ ID NO: 52859 - DNA, 80 bp, synthetic construct
  misc_feature 1..80: note = Artificially Synthesized Probe
  source 1..80: mol_type = other DNA
tggttaatcctataaatccttgtcctccaaatttgtactggaattccaggatgtggctggggtaaaaaccttccatgttg

SEQ ID NO: 52860 - DNA, 80 bp, synthetic construct
  misc_feature 1..80: note = Artificially Synthesized Probe
  source 1..80: mol_type = other DNA
atatttcctgagaagccccaccttttctcttgataacccactatggagctgtcatttgtgaatttaagaagaaacacttg

SEQ ID NO: 52861 - DNA, 80 bp, synthetic construct
  misc_feature 1..80: note = Artificially Synthesized Probe
  source 1..80: mol_type = other DNA
cctgtctgtactaaaaaaaattagctgggcatggtggcgcacacctgtgatcctagctacatgggaggctggggcatgag

SEQ ID NO: 52862 - DNA, 80 bp, synthetic construct
  misc_feature 1..80: note = Artificially Synthesized Probe
  source 1..80: mol_type = other DNA
ctgataaaggagatatatgtacatatactatatatataatcttctataaatccataaaatattaaacaatccaacctaga

SEQ ID NO: 52863 - DNA, 80 bp, synthetic construct
  misc_feature 1..80: note = Artificially Synthesized Probe
  source 1..80: mol_type = other DNA
atctgagggacagtctctgacacataggggtgttagtatgtggatgaaatcctcactgtttctggttgtggattatatct

SEQ ID NO: 52864 - DNA, 80 bp, synthetic construct; identical to SEQ ID NO: 24736
  misc_feature 1..80: note = Artificially Synthesized Probe
  source 1..80: mol_type = other DNA

SEQ ID NO: 52865 - DNA, 80 bp, synthetic construct
  misc_feature 1..80: note = Artificially Synthesized Probe
  source 1..80: mol_type = other DNA
tgtgcaggaaggtcttgaactcctggcctcaagcaatcttcctgcctcagcctcccaaagtattgaaattataggcgtga

SEQ ID NO: 52866 - DNA, 80 bp, synthetic construct
  misc_feature 1..80: note = Artificially Synthesized Probe
  source 1..80: mol_type = other DNA
tgtggtatagtcatataaaggaatactatcaagtagtgaaataaaatcaattagaattattaggctgaaccatatgaaat

SEQ ID NO: 52867 - DNA, 80 bp, synthetic construct
  misc_feature 1..80: note = Artificially Synthesized Probe
  source 1..80: mol_type = other DNA
ttaacaacccttcttactccagagtctcatgcttgaatcttttcctttgcttcatggcttcgtgttgtagaaacttgcaa

SEQ ID NO: 52868 - DNA, 80 bp, synthetic construct
  misc_feature 1..80: note = Artificially Synthesized Probe
  source 1..80: mol_type = other DNA
atatgtatattgtacaaatatacagatgcatgggggtgatgagaagtttagagtagtagttgcctgggatgggattgggt

SEQ ID NO: 52869 - DNA, 80 bp, synthetic construct
  misc_feature 1..80: note = Artificially Synthesized Probe
  source 1..80: mol_type = other DNA
tcctttttgcgtctcagtgctgattaatggaatttagccaccagattgggtgattttttggcttgttgaatagttggcca

SEQ ID NO: 52870 - DNA, 80 bp, synthetic construct; identical to SEQ ID NO: 24737
  misc_feature 1..80: note = Artificially Synthesized Probe
  source 1..80: mol_type = other DNA

SEQ ID NO: 52871 - DNA, 80 bp, synthetic construct
  misc_feature 1..80: note = Artificially Synthesized Probe
  source 1..80: mol_type = other DNA
agctccacctcctgggttcatgccattctcctgcctcagcctcccgagtagctgggactacaggtgcctgccaccatgcc

SEQ ID NO: 52872 - DNA, 80 bp, synthetic construct
  misc_feature 1..80: note = Artificially Synthesized Probe
  source 1..80: mol_type = other DNA
aaataagtgttaagtcaaggggttcctctacagaatcagtcatcttcaccatgacacccacaacgcccaaattgctgctg

SEQ ID NO: 52873 - DNA, 80 bp, synthetic construct
  misc_feature 1..80: note = Artificially Synthesized Probe
  source 1..80: mol_type = other DNA
cttgaggccaggagtatgagaccagcctggccaacatggtgaaaccctgtctgtactaaaaatgcaaaaattagccgggt

SEQ ID NO: 52874 - DNA, 80 bp, synthetic construct; identical to SEQ ID NO: 24738
  misc_feature 1..80: note = Artificially Synthesized Probe
  source 1..80: mol_type = other DNA

SEQ ID NO: 52875 - DNA, 80 bp, synthetic construct
  misc_feature 1..80: note = Artificially Synthesized Probe
  source 1..80: mol_type = other DNA
tttaaatatgccttcttagtgtggtgaaaaacagcattagacttggagtcagaaggcctgcttctaccacttactgtgtt

SEQ ID NO: 52876 - DNA, 80 bp, synthetic construct
  misc_feature 1..80: note = Artificially Synthesized Probe
  source 1..80: mol_type = other DNA
acagatcagaaaatcaaggcccagagaaactaagtagtcttggagataggagccatggcctctccacttgagttatcatc

SEQ ID NO: 52877 - DNA, 80 bp, synthetic construct
  misc_feature 1..80: note = Artificially Synthesized Probe
  source 1..80: mol_type = other DNA
taaaaaagctatgccggggtccagcctctccaggtccttgtgtgtgaaaaaccactcagtcaaagttccccttttatttc

SEQ ID NO: 52878 - DNA, 80 bp, synthetic construct
  misc_feature 1..80: note = Artificially Synthesized Probe
  source 1..80: mol_type = other DNA
ttcctagttctttccagaggcttccttctgcctgccttccagccacatcgcctgagattgacaacgccctacagcaagac

SEQ ID NO: 52879 - DNA, 80 bp, synthetic construct; identical to SEQ ID NO: 24739
  misc_feature 1..80: note = Artificially Synthesized Probe
  source 1..80: mol_type = other DNA

SEQ ID NO: 52880 - DNA, 80 bp, synthetic construct; identical to SEQ ID NO: 24695
  misc_feature 1..80: note = Artificially Synthesized Probe
  source 1..80: mol_type = other DNA

SEQ ID NO: 52881 - DNA, 80 bp, synthetic construct
  misc_feature 1..80: note = Artificially Synthesized Probe
  source 1..80: mol_type = other DNA
agggagatttattttttatgggagacagtatcatacaatggttacgaacattggctttggtgctggatgagcctagattc

SEQ ID NO: 52882 - DNA, 80 bp, synthetic construct
  misc_feature 1..80: note = Artificially Synthesized Probe
  source 1..80: mol_type = other DNA
agaattagctggaataatgttcatgaagcattagcatgaggccaatatttggtatagcattcagtaaatgctcacttctg

SEQ ID NO: 52883 - DNA, 80 bp, synthetic construct
  misc_feature 1..80: note = Artificially Synthesized Probe
  source 1..80: mol_type = other DNA
tcaagccattctcctacctcagcctccctagtagctgggattacaggcatgcaccaccatgcccagctaatttttgtatt

SEQ ID NO: 52884 - DNA, 80 bp, synthetic construct
  misc_feature 1..80: note = Artificially Synthesized Probe
  source 1..80: mol_type = other DNA
gccttgtccagttttttctttcaagtgccttttaatctgtaggttagatttcctccctgcccccaaatctctttcttttt

SEQ ID NO: 52885 - DNA, 80 bp, synthetic construct; identical to SEQ ID NO: 24696
  misc_feature 1..80: note = Artificially Synthesized Probe
  source 1..80: mol_type = other DNA

SEQ ID NO: 52886 - DNA, 80 bp, synthetic construct
  misc_feature 1..80: note = Artificially Synthesized Probe
  source 1..80: mol_type = other DNA
ctgaagtgcaatggcacaatttcagctcactacaacctctgcctcctgggttcaagcgattctcctgcctcagcctcctg

SEQ ID NO: 52887 - DNA, 80 bp, synthetic construct
  misc_feature 1..80: note = Artificially Synthesized Probe
  source 1..80: mol_type = other DNA
ccaccatacccggccacatattagaattgtatcatttcgttttcccttcatccattatttggttacccagtgatacagct

SEQ ID NO: 52888 - DNA, 80 bp, synthetic construct
  misc_feature 1..80: note = Artificially Synthesized Probe
  source 1..80: mol_type = other DNA
cacagagacaaagtttggtagactcactaaaactagagatcagaattgtcaagaaaccacaaggcaaatgctagatgcgg

SEQ ID NO: 52889 - DNA, 80 bp, synthetic construct
  misc_feature 1..80: note = Artificially Synthesized Probe
  source 1..80: mol_type = other DNA
ctcccaggttcaggtgattctcctgcctcagcctcctgaatatctgggattacaagcaggcaccaccatgcctgtctaat

SEQ ID NO: 52890 - DNA, 80 bp, synthetic construct; identical to SEQ ID NO: 24697
  misc_feature 1..80: note = Artificially Synthesized Probe
  source 1..80: mol_type = other DNA

SEQ ID NO: 52891 - DNA, 80 bp, synthetic construct
  misc_feature 1..80: note = Artificially Synthesized Probe
  source 1..80: mol_type = other DNA
gagactagactgggcaacatgacaaaacccggtctctacaaaaaatacaaaaattagctgggtgtggtggcgtgcacctg

SEQ ID NO: 52892 - DNA, 80 bp, synthetic construct
  misc_feature 1..80: note = Artificially Synthesized Probe
  source 1..80: mol_type = other DNA
ctcaaaaaaatagttcaattgtcccattttttcccaggggatacatcttcagtttggttcctaagtcattttgacatgac

SEQ ID NO: 52893 - DNA, 80 bp, synthetic construct; identical to SEQ ID NO: 24698
  misc_feature 1..80: note = Artificially Synthesized Probe
  source 1..80: mol_type = other DNA

SEQ ID NO: 52894 - DNA, 80 bp, synthetic construct
  misc_feature 1..80: note = Artificially Synthesized Probe
  source 1..80: mol_type = other DNA
gtgcccacatttgcagtggtacaaagcaattacctgctcaaatggtagcattataccttaaatacagaatttctcaaagt

SEQ ID NO: 52895 - DNA, 80 bp, synthetic construct
  misc_feature 1..80: note = Artificially Synthesized Probe
  source 1..80: mol_type = other DNA
aacaatatgaggtggcgggtgagggacgagagaaaggtcatttgttaaagcaatctctgatattcgaaacactgagtgtt

SEQ ID NO: 52896 - DNA, 80 bp, synthetic construct
  misc_feature 1..80: note = Artificially Synthesized Probe
  source 1..80: mol_type = other DNA
aatggtgccatctcggctcactgcaacctctgcctcctgggttcaagtgatcctcctgcctcagcctcctgagtagctgg

SEQ ID NO: 52897 - DNA, 80 bp, synthetic construct
  misc_feature 1..80: note = Artificially Synthesized Probe
  source 1..80: mol_type = other DNA
tgcccagaattatttttatggtcagaagcattccaaacatttcccccctactaaaatagcttttaaatgatcaaatgcac

SEQ ID NO: 52898 - DNA, 80 bp, synthetic construct; identical to SEQ ID NO: 24699
  misc_feature 1..80: note = Artificially Synthesized Probe
  source 1..80: mol_type = other DNA

SEQ ID NO: 52899 - DNA, 80 bp, synthetic construct
  misc_feature 1..80: note = Artificially Synthesized Probe
  source 1..80: mol_type = other DNA
ccttatcacagaaataaattacttacccaccattggaaaagggcctgaacacccctcagccaaaacggaaaggttctaaa

SEQ ID NO: 52900 - DNA, 80 bp, synthetic construct
  misc_feature 1..80: note = Artificially Synthesized Probe
  source 1..80: mol_type = other DNA
ttggaagcccagaaggaaatttgtattatctatagttatgtcacctcgatataaccactgtttgttatggaggttttgat

SEQ ID NO: 52901 - DNA, 80 bp, synthetic construct
  misc_feature 1..80: note = Artificially Synthesized Probe
  source 1..80: mol_type = other DNA
tcagcatacaacattgagtctaaaggaaaccacacctgaacttactctttaacaaaaaagcaaaaaaagaactttcagat

SEQ ID NO: 52902 - DNA, 80 bp, synthetic construct; identical to SEQ ID NO: 24700
  misc_feature 1..80: note = Artificially Synthesized Probe
  source 1..80: mol_type = other DNA

SEQ ID NO: 52903 - DNA, 80 bp, synthetic construct
  misc_feature 1..80: note = Artificially Synthesized Probe
  source 1..80: mol_type = other DNA
ggaggtggaggttgctttgagctgagattgcactactgcactctagcctgggagacagagtgagagactccatctcaaaa

SEQ ID NO: 52904 - DNA, 80 bp, synthetic construct
  misc_feature 1..80: note = Artificially Synthesized Probe
  source 1..80: mol_type = other DNA
aagctgtgacttagagttcagtggttaataacatagactttggcatcagattgtaccagctctgccattaattagctttg

SEQ ID NO: 52905 - DNA, 80 bp, synthetic construct
  misc_feature 1..80: note = Artificially Synthesized Probe
  source 1..80: mol_type = other DNA
aatatagattgtatacagatttgcttggtaatgcctcttcccctacattcctgagcaacttgagggcagatgctgttata

SEQ ID NO: 52906 - DNA, 80 bp, synthetic construct; identical to SEQ ID NO: 24750
  misc_feature 1..80: note = Artificially Synthesized Probe
  source 1..80: mol_type = other DNA

SEQ ID NO: 52907 - DNA, 80 bp, synthetic construct
  misc_feature 1..80: note = Artificially Synthesized Probe
  source 1..80: mol_type = other DNA
cacacccagctaatttttctattgttagtagagacagagttttgccacgttgcccaggctggtcttgaactcctgggttc

SEQ ID NO: 52908 - DNA, 80 bp, synthetic construct
  misc_feature 1..80: note = Artificially Synthesized Probe
  source 1..80: mol_type = other DNA
aagatcacttgatgtcaggagttcaagaccagcctggccaacatggtgagaccctgtctctactaaaaatacaaaaatta

SEQ ID NO: 52909 - DNA, 80 bp, synthetic construct
  misc_feature 1..80: note = Artificially Synthesized Probe
  source 1..80: mol_type = other DNA
aaaaaaaacctgcaccaagactcaatcatatgtttggtatattattcaaccagtggttgtacctctgtgatatgctttca

SEQ ID NO: 52910 - DNA, 80 bp, synthetic construct; identical to SEQ ID NO: 24751
  misc_feature 1..80: note = Artificially Synthesized Probe
  source 1..80: mol_type = other DNA

SEQ ID NO: 52911 - DNA, 80 bp, synthetic construct
  misc_feature 1..80: note = Artificially Synthesized Probe
  source 1..80: mol_type = other DNA
tgagccacaaggccagttggtccatgacaaagttgtgcaaaactggtaaacgtctgcttcggagcttgctgcttaataaa

SEQ ID NO: 52912 - DNA, 80 bp, synthetic construct
  misc_feature 1..80: note = Artificially Synthesized Probe
  source 1..80: mol_type = other DNA
gtatgaaaaaaaaaaaaaagttactacggagaaataaacaggccggcttcacctccaacctagtggggaaaaaaagccta

SEQ ID NO: 52913 - DNA, 80 bp, synthetic construct
  misc_feature 1..80: note = Artificially Synthesized Probe
  source 1..80: mol_type = other DNA
taacaccccctaatgcagccctcagccatgggctgagagattggtggataaatacccggcttcctggacgacaggcggag

SEQ ID NO: 52914 - DNA, 80 bp, synthetic construct; identical to SEQ ID NO: 24741
  misc_feature 1..80: note = Artificially Synthesized Probe
  source 1..80: mol_type = other DNA

SEQ ID NO: 52915 - DNA, 80 bp, synthetic construct
  misc_feature 1..80: note = Artificially Synthesized Probe
  source 1..80: mol_type = other DNA
aaaaaaaaaaatctgcatttcaacagaatccccagctccctcctacgcacctttaagtttaagaagtggtagtcaaagcc

SEQ ID NO: 52916 - DNA, 80 bp, synthetic construct
  misc_feature 1..80: note = Artificially Synthesized Probe
  source 1..80: mol_type = other DNA
gacactagctgggctcctcggggcgcgccccaggtggtccgaagcccggtccgccctccacgcaggtgccccgcgctccc

SEQ ID NO: 52917 - DNA, 80 bp, synthetic construct
  misc_feature 1..80: note = Artificially Synthesized Probe
  source 1..80: mol_type = other DNA
tggccaacatggcgaaaccctgtctctgcaaaaagtaaaaaaattagctgggtgtggtggcatgtgcctgtaatcccagc

SEQ ID NO: 52918 - DNA, 80 bp, synthetic construct
  misc_feature 1..80: note = Artificially Synthesized Probe
  source 1..80: mol_type = other DNA
aaggaaggaaggaaggaaggaaggaaggaaggaaggaaagaaaatgcaaattctggagcccttactccagccctttgcaa

SEQ ID NO: 52919 - DNA, 80 bp, synthetic construct
  misc_feature 1..80: note = Artificially Synthesized Probe
  source 1..80: mol_type = other DNA
aggcggagggcctgagcccgcgcttccaccaactggacatcgacgacttgcagagcatccgcgccctgcgcgacttcctg

SEQ ID NO: 52920 - DNA, 80 bp, synthetic construct
  misc_feature 1..80: note = Artificially Synthesized Probe
  source 1..80: mol_type = other DNA
gtcatgtgagtttcagggggaaaaatatgactttctttttgtttctttctctttttgaaaggtgatgatccaatgccctt

SEQ ID NO: 52921 - DNA, 80 bp, synthetic construct; identical to SEQ ID NO: 24742
  misc_feature 1..80: note = Artificially Synthesized Probe
  source 1..80: mol_type = other DNA

SEQ ID NO: 52922 - DNA, 80 bp, synthetic construct
  misc_feature 1..80: note = Artificially Synthesized Probe
  source 1..80: mol_type = other DNA
acctcccggggtcaagcaattctcctgcctcagcctcccgagtagctgagattacaggcacccactaccacacccggcta

SEQ ID NO: 52923 - DNA, 80 bp, synthetic construct
  misc_feature 1..80: note = Artificially Synthesized Probe
  source 1..80: mol_type = other DNA
caaagataagtgtgacatatcacaatgcttttgggatccatgtcatgaactcaatcctagaatgatagaatgctgtgagt

SEQ ID NO: 52924 - DNA, 80 bp, synthetic construct; identical to SEQ ID NO: 24743
  misc_feature 1..80: note = Artificially Synthesized Probe
  source 1..80: mol_type = other DNA

SEQ ID NO: 52925 - DNA, 80 bp, synthetic construct
  misc_feature 1..80: note = Artificially Synthesized Probe
  source 1..80: mol_type = other DNA
ctcccaggttcaagcgattctcctgtctcagcctctggagtagctgggattacaggtgtgcaccaccacgcccagctcat

SEQ ID NO: 52926 - DNA, 80 bp, synthetic construct
  misc_feature 1..80: note = Artificially Synthesized Probe
  source 1..80: mol_type = other DNA
gaaatgtcttgcctatacctgcaggtattcaataaatgttactattatacttttcctacaaacattggagtgcctgccat

SEQ ID NO: 52927 - DNA, 80 bp, synthetic construct
  misc_feature 1..80: note = Artificially Synthesized Probe
  source 1..80: mol_type = other DNA
ggtacagggaagcttgcttccttgaggattttattccccaagaagttaactgtggattcttagaactgtggtttttatta

SEQ ID NO: 52928 - DNA, 80 bp, synthetic construct
  misc_feature 1..80: note = Artificially Synthesized Probe
  source 1..80: mol_type = other DNA
tgggactacaggcgtgtgccgctacgcccggctaatttttatatttttagtagagacagggctttgccatgttggccagg

SEQ ID NO: 52929 - DNA, 80 bp, synthetic construct; identical to SEQ ID NO: 24744
  misc_feature 1..80: note = Artificially Synthesized Probe
  source 1..80: mol_type = other DNA

SEQ ID NO: 52930 - DNA, 80 bp, synthetic construct
  misc_feature 1..80: note = Artificially Synthesized Probe
  source 1..80: mol_type = other DNA
tgcaacctccgcctctcaggtacgagagattctccgccccagcctctcaagtagctgggtttacaggcgagcaccaccac

SEQ ID NO: 52931 - DNA, 80 bp, synthetic construct
  misc_feature 1..80: note = Artificially Synthesized Probe
  source 1..80: mol_type = other DNA
ggcgccgacccctagggatgcgctcagcccacgcctcccgcgaggcggttttcgctttccgtgattcgctgagccccagg

SEQ ID NO: 52932 - DNA, 80 bp, synthetic construct
  misc_feature 1..80: note = Artificially Synthesized Probe
  source 1..80: mol_type = other DNA
aagttcttaacctaagaaggtgaatggtgagagttgcacttgtactctgtcagtttctgagtgggatgagatcatagaaa

SEQ ID NO: 52933 - DNA, 80 bp, synthetic construct
  misc_feature 1..80: note = Artificially Synthesized Probe
  source 1..80: mol_type = other DNA
atgtctggggctctctccaggtttggtcagaaagcttttatcttttttgtggctatatagggacgcagccattataggga

SEQ ID NO: 52934 - DNA, 80 bp, synthetic construct; identical to SEQ ID NO: 24745
  misc_feature 1..80: note = Artificially Synthesized Probe
  source 1..80: mol_type = other DNA

SEQ ID NO: 52935 - DNA, 80 bp, synthetic construct
  misc_feature 1..80: note = Artificially Synthesized Probe
  source 1..80: mol_type = other DNA
tgtagtcccagctagtcgggaggctgaggcaggagaatggcatgaacccgggaggcggaacttgcagtgagcccagatcg

SEQ ID NO: 52936 - DNA, 80 bp, synthetic construct
  misc_feature 1..80: note = Artificially Synthesized Probe
  source 1..80: mol_type = other DNA
attaaaaattagctgggcatagtggcatgttccagcttctcgagagactgaggtgggaggatcgcttgggcccaggaggt

SEQ ID NO: 52937 - DNA, 80 bp, synthetic construct
  misc_feature 1..80: note = Artificially Synthesized Probe
  source 1..80: mol_type = other DNA
cgcttacattagcctatagtctggcaaagtcatctaacacaaagcctattttatcataaaatgttgagtatcttatgtaa

SEQ ID NO: 52938 - DNA, 80 bp, synthetic construct; identical to SEQ ID NO: 24746
  misc_feature 1..80: note = Artificially Synthesized Probe
  source 1..80: mol_type = other DNA

SEQ ID NO: 52939 - DNA, 80 bp, synthetic construct
  misc_feature 1..80: note = Artificially Synthesized Probe
  source 1..80: mol_type = other DNA
atcaaagaggacacctcctccccttaagaggatttatttcctcgaaggcacagcttctatgatctgtgtttttctttctt

SEQ ID NO: 52940 - DNA, 80 bp, synthetic construct
  misc_feature 1..80: note = Artificially Synthesized Probe
  source 1..80: mol_type = other DNA
gagaacagaccaattcactttgagagaaatactacaaaataatggtctacagtcttcaaaaaagtcattgccaactacct

SEQ ID NO: 52941 - DNA, 80 bp, synthetic construct
  misc_feature 1..80: note = Artificially Synthesized Probe
  source 1..80: mol_type = other DNA
aaccccgtctctactaaaaatacaagaaattagccaggcatggtggcaggcgcctgtagtcccagctacttgggagactg

SEQ ID NO: 52942 - DNA, 80 bp, synthetic construct; identical to SEQ ID NO: 24747
  misc_feature 1..80: note = Artificially Synthesized Probe
  source 1..80: mol_type = other DNA

SEQ ID NO: 52943 - DNA, 80 bp, synthetic construct
  misc_feature 1..80: note = Artificially Synthesized Probe
  source 1..80: mol_type = other DNA
gcgagaaacattttctctgcaaagaaacggtctccgctcgctttgggctttcgctttccttgaaagggcgcattcataga

SEQ ID NO: 52944 - DNA, 80 bp, synthetic construct
  misc_feature 1..80: note = Artificially Synthesized Probe
  source 1..80: mol_type = other DNA
cacagcaaaatgttaacaattagtgaacttaggtgatgggcatagggtatttatcgaactattcttgtaacttctctgta

SEQ ID NO: 52945 - DNA, 80 bp, synthetic construct
  misc_feature 1..80: note = Artificially Synthesized Probe
  source 1..80: mol_type = other DNA
ccacaagaatgtgcagctcccttgcaatgggaacttgtggggaatgccattcagaaaatgaaataaaatctacagatccg

SEQ ID NO: 52946 - DNA, 80 bp, synthetic construct
  misc_feature 1..80: note = Artificially Synthesized Probe
  source 1..80: mol_type = other DNA
aatcccagctacttgggaggctgaggcaggagaatcacttaaacccgagatagaggttgcagtgagctgagatcgcgcca

SEQ ID NO: 52947 - DNA, 80 bp, synthetic construct; identical to SEQ ID NO: 24748
  misc_feature 1..80: note = Artificially Synthesized Probe
  source 1..80: mol_type = other DNA

SEQ ID NO: 52948 - DNA, 80 bp, synthetic construct
  misc_feature 1..80: note = Artificially Synthesized Probe
  source 1..80: mol_type = other DNA
gagctcaggagtttgcgaccagcccggccaacatggagaaaccccgtttctacgaaaaatacaaaaattatttgagtgca

SEQ ID NO: 52949 - DNA, 80 bp, synthetic construct
  misc_feature 1..80: note = Artificially Synthesized Probe
  source 1..80: mol_type = other DNA
aaaaaaagtgatgagataaaaaccaggatggaaaaacagcccattccacacgtgaagtgtccataatgaaggacagacag

SEQ ID NO: 52950 - DNA, 80 bp, synthetic construct; identical to SEQ ID NO: 24749
  misc_feature 1..80: note = Artificially Synthesized Probe
  source 1..80: mol_type = other DNA

SEQ ID NO: 52951 - DNA, 80 bp, synthetic construct
  misc_feature 1..80: note = Artificially Synthesized Probe
  source 1..80: mol_type = other DNA
ctgggcatggtggcacacaccttcatcccagctacttgggaggctgaagcagtagaatcacttgatcctgggaggcggag

SEQ ID NO: 52952 - DNA, 80 bp, synthetic construct
  misc_feature 1..80: note = Artificially Synthesized Probe
  source 1..80: mol_type = other DNA
ttgatcctgggaggcggaggttgcagtgagccgagattgtgccactgcactgcagcctaggcaacaaaacaagactctgt

SEQ ID NO: 52953 - DNA, 80 bp, synthetic construct
  misc_feature 1..80: note = Artificially Synthesized Probe
  source 1..80: mol_type = other DNA
ggcaacaaaacaagactctgtctcacaaaacaaaataaaaaaattttaggccaggtgtagtggctcacgcctgtaattcc

SEQ ID NO: 52954 - DNA, 80 bp, synthetic construct; identical to SEQ ID NO: 24740
  misc_feature 1..80: note = Artificially Synthesized Probe
  source 1..80: mol_type = other DNA

SEQ ID NO: 52955 - DNA, 80 bp, synthetic construct
  misc_feature 1..80: note = Artificially Synthesized Probe
  source 1..80: mol_type = other DNA
tgaggcaggagaattgcttgaacccggaagtcggaggttgcagtgagccaagattgtgccactgcactccagcctgcgtg

SEQ ID NO: 52956 - DNA, 80 bp, synthetic construct; identical to SEQ ID NO: 24752
  misc_feature 1..80: note = Artificially Synthesized Probe
  source 1..80: mol_type = other DNA

SEQ ID NO: 52957 - DNA, 80 bp, synthetic construct
  misc_feature 1..80: note = Artificially Synthesized Probe
  source 1..80: mol_type = other DNA
ggagcggggcccccaggacagtccagacagaccaccctgcggcggagcagcagagcctttggggacaaagggcattgctg

SEQ ID NO: 52958 - DNA, 80 bp, synthetic construct
  misc_feature 1..80: note = Artificially Synthesized Probe
  source 1..80: mol_type = other DNA
cagaggacttagagctcctggctgatcctcagaggcccccagttggaactccgaccccccactcagcgcaggaaggttct

SEQ ID NO: 52959 - DNA, 80 bp, synthetic construct
  misc_feature 1..80: note = Artificially Synthesized Probe
  source 1..80: mol_type = other DNA
gctttcagctcagaagccggggccactccgcactgcccctctccggcccggccacaccactcaccctgcatccaggacac

SEQ ID NO: 52960 - DNA, 80 bp, synthetic construct; identical to SEQ ID NO: 24763
  misc_feature 1..80: note = Artificially Synthesized Probe
  source 1..80: mol_type = other DNA

SEQ ID NO: 52961 - DNA, 80 bp, synthetic construct
  misc_feature 1..80: note = Artificially Synthesized Probe
  source 1..80: mol_type = other DNA
ctccgtgggctgttggatgtttgcgtggtgtgagtgagttaactgaatttacacaggaaatggaatcagtcttttaggct

SEQ ID NO: 52962 - DNA, 80 bp, synthetic construct
  misc_feature 1..80: note = Artificially Synthesized Probe
  source 1..80: mol_type = other DNA
cccaaacaaccaaatgcctggaccttacagcccggctcctgggcacggactgagggtgtactccagcccatgccaacacc

SEQ ID NO: 52963 - DNA, 80 bp, synthetic construct
  misc_feature 1..80: note = Artificially Synthesized Probe
  source 1..80: mol_type = other DNA
tcgcagatgtcaccagctctgttctgcagatgaatttgatgccgagtcagggcatgatcccaaatgaagtccaagctgtg

SEQ ID NO: 52964 - DNA, 80 bp, synthetic construct; identical to SEQ ID NO: 24764
  misc_feature 1..80: note = Artificially Synthesized Probe
  source 1..80: mol_type = other DNA

SEQ ID NO: 52965 - DNA, 80 bp, synthetic construct; identical to SEQ ID NO: 24753
  misc_feature 1..80: note = Artificially Synthesized Probe
  source 1..80: mol_type = other DNA

SEQ ID NO: 52966 - DNA, 80 bp, synthetic construct
  misc_feature 1..80: note = Artificially Synthesized Probe
  source 1..80: mol_type = other DNA
catagaaagagagcagagcccgtgagctgacccctgacacctcagtcacccccacatccctgaccgagaccctcctaggg

SEQ ID NO: 52967 - DNA, 80 bp, synthetic construct
  misc_feature 1..80: note = Artificially Synthesized Probe
  source 1..80: mol_type = other DNA
gtccacctgcaggagggaaagcggtggcctgcaccttccgcctggcccaggcaccctcatcccctgccctatgaccccgc

SEQ ID NO: 52968 - DNA, 80 bp, synthetic construct; identical to SEQ ID NO: 24765
  misc_feature 1..80: note = Artificially Synthesized Probe
  source 1..80: mol_type = other DNA

SEQ ID NO: 52969 - DNA, 80 bp, synthetic construct
  misc_feature 1..80: note = Artificially Synthesized Probe
  source 1..80: mol_type = other DNA
gctcgtcttgtgtgccaggcactgccaggtgccatcgccccgagagcatcggcactggccccgaatgctggtcaaaggaa

SEQ ID NO: 52970 - DNA, 80 bp, synthetic construct
  misc_feature 1..80: note = Artificially Synthesized Probe
  source 1..80: mol_type = other DNA
cacccaccggtgttcccggatgtcggctcgataatcgtgtccccgggcttcagcgtcccgtcgcgctcagcatcctcaat

SEQ ID NO: 52971 - DNA, 80 bp, synthetic construct
  misc_feature 1..80: note = Artificially Synthesized Probe
  source 1..80: mol_type = other DNA
cgggcttgggggtctgtgggttctgaaaaattgccacctctccactcacctcccctacacctgcacctgggcactagcct

SEQ ID NO: 52972 - DNA, 80 bp, synthetic construct; identical to SEQ ID NO: 24766
  misc_feature 1..80: note = Artificially Synthesized Probe
  source 1..80: mol_type = other DNA

SEQ ID NO: 52973 - DNA, 80 bp, synthetic construct
  misc_feature 1..80: note = Artificially Synthesized Probe
  source 1..80: mol_type = other DNA
tccctctccagctcttaaaaatatttagtttttaagagcgagagactgggctgcatgaaatgtgatttgagggacctggg

SEQ ID NO: 52974 - DNA, 80 bp, synthetic construct
  misc_feature 1..80: note = Artificially Synthesized Probe
  source 1..80: mol_type = other DNA
tgcattctcggacccctctgggtcccatactgtgaaaccctcagttagatcattctcactagcgcctgggggccagctcc

SEQ ID NO: 52975 - DNA, 80 bp, synthetic construct
  misc_feature 1..80: note = Artificially Synthesized Probe
  source 1..80: mol_type = other DNA
gcgtacgagttaagggtccctattgtctgacaaatgagcacagagccggccctgctgccttgggggtctctgtgaagggg

SEQ ID NO: 52976 - DNA, 80 bp, synthetic construct
  misc_feature 1..80: note = Artificially Synthesized Probe
  source 1..80: mol_type = other DNA
cacacctgtgatcccagcgctgtgggaggccaaggtgggaggatcatttaagcccggaagtctgggaccagcctgggcaa

SEQ ID NO: 52977 - DNA, 80 bp, synthetic construct; identical to SEQ ID NO: 24767
  misc_feature 1..80: note = Artificially Synthesized Probe
  source 1..80: mol_type = other DNA

SEQ ID NO: 52978 - DNA, 80 bp, synthetic construct
  misc_feature 1..80: note = Artificially Synthesized Probe
  source 1..80: mol_type = other DNA
ggctctgcgctcttggtgaagagcgacccttaggaattccctccacgttcttgagcctggaaactgcgtcctgcaaagaa

SEQ ID NO: 52979 - DNA, 80 bp, synthetic construct
  misc_feature 1..80: note = Artificially Synthesized Probe
  source 1..80: mol_type = other DNA
tggacagcgggtggctcacagcacgtgctaggacccgtccactgctccttagcaggcatgacgctaaccctccccacctg

SEQ ID NO: 52980 - DNA, 80 bp, synthetic construct
  misc_feature 1..80: note = Artificially Synthesized Probe
  source 1..80: mol_type = other DNA
cctctgacacaatgccctgttgtgtgtttttcccaaacttaagctgatatgttcttggccactcattaaccagcgagttt

SEQ ID NO: 52981 - DNA, 80 bp, synthetic construct
  misc_feature 1..80: note = Artificially Synthesized Probe
  source 1..80: mol_type = other DNA
accataggggtgtccccgattttcttcagaatatctggcaagatttttggagattttgccctgaaacagaggagtccaca

SEQ ID NO: 52982 - DNA, 80 bp, synthetic construct; identical to SEQ ID NO: 24768
  misc_feature 1..80: note = Artificially Synthesized Probe
  source 1..80: mol_type = other DNA

SEQ ID NO: 52983 - DNA, 80 bp, synthetic construct
  misc_feature 1..80: note = Artificially Synthesized Probe
  source 1..80: mol_type = other DNA
caaatactgactccaaaacaaaggtttaggtccaccttttcagaaaggctttactggagatgacatttcctttcatctct

SEQ ID NO: 52984 - DNA, 80 bp, synthetic construct
  misc_feature 1..80: note = Artificially Synthesized Probe
  source 1..80: mol_type = other DNA
cagaaaggctttactggagatgacatttcctttcatctctcagcatgtgaccataggaagcaaaaaagtgtcagggcaga

SEQ ID NO: 52985 - DNA, 80 bp, synthetic construct
  misc_feature 1..80: note = Artificially Synthesized Probe
  source 1..80: mol_type = other DNA
accctggtccaggtggtttcctaaatggccctcatgcccctgccatcctcccccagggagatgctgatgacaccccctat

SEQ ID NO: 52986 - DNA, 80 bp, synthetic construct; identical to SEQ ID NO: 24769
  misc_feature 1..80: note = Artificially Synthesized Probe
  source 1..80: mol_type = other DNA

SEQ ID NO: 52987 - DNA, 80 bp, synthetic construct
  misc_feature 1..80: note = Artificially Synthesized Probe
  source 1..80: mol_type = other DNA
aagggaaccaggcttggcaggtgtagagagccagggccaggtggaaagccaagccccagggtgacagcgccggggattag

SEQ ID NO: 52988 - DNA, 80 bp, synthetic construct
  misc_feature 1..80: note = Artificially Synthesized Probe
  source 1..80: mol_type = other DNA
cagtcggcaacagagcaagaccctgtctctaaaaacagacaaaaaccccttgccaccatgggcagcacacagcttccatc

SEQ ID NO: 52989 - DNA, 80 bp, synthetic construct
  misc_feature 1..80: note = Artificially Synthesized Probe
  source 1..80: mol_type = other DNA
ggatgtgacttgcagggatagccctggagccccttatctcaaggactcccacttccacagcccaagaggctcctgggagg

SEQ ID NO: 52990 - DNA, 80 bp, synthetic construct
  misc_feature 1..80: note = Artificially Synthesized Probe
  source 1..80: mol_type = other DNA
tgaggtgcaggtgcaacgccatttacaacctggagggcatcgtctccttctcatgccctagagttaggagctcacggagc

SEQ ID NO: 52991 - DNA, 80 bp, synthetic construct; identical to SEQ ID NO: 24770
  misc_feature 1..80: note = Artificially Synthesized Probe
  source 1..80: mol_type = other DNA

SEQ ID NO: 52992 - DNA, 80 bp, synthetic construct
  misc_feature 1..80: note = Artificially Synthesized Probe
  source 1..80: mol_type = other DNA
cccatctctattaaaagcataaaaatccaccgggcgtgctggcacatgcctgtaatcccagctactagggaggctgaggt

SEQ ID NO: 52993 - DNA, 80 bp, synthetic construct
  misc_feature 1..80: note = Artificially Synthesized Probe
  source 1..80: mol_type = other DNA
agattacactaaggaaataaagataatcctaaggcttagtgagcttgatttcagtttcatgctggggtagggatttttgt

SEQ ID NO: 52994 - DNA, 80 bp, synthetic construct
  misc_feature 1..80: note = Artificially Synthesized Probe
  source 1..80: mol_type = other DNA
cttacaaaatgatggcttcttcaccgaacagtctgtgccaccagaaaaacagcccttatggaaaaatatgtaatgcctac

SEQ ID NO: 52995 - DNA, 80 bp, synthetic construct
  misc_feature 1..80: note = Artificially Synthesized Probe
  source 1..80: mol_type = other DNA
attcaagaccagcctgggtgaaaccccatctcctaaaaatacaaaaatcagctgggtgtgatggtgggcacccatagtcc

SEQ ID NO: 52996 - DNA, 80 bp, synthetic construct; identical to SEQ ID NO: 24771
  misc_feature 1..80: note = Artificially Synthesized Probe
  source 1..80: mol_type = other DNA

SEQ ID NO: 52997 - DNA, 80 bp, synthetic construct
  misc_feature 1..80: note = Artificially Synthesized Probe
  source 1..80: mol_type = other DNA
tgtccaggtaacaaactcctgccctccaggttatggatcagccctcttgtgatcaaaagcaggacttacggggcagtgtg

SEQ ID NO: 52998 - DNA, 80 bp, synthetic construct
  misc_feature 1..80: note = Artificially Synthesized Probe
  source 1..80: mol_type = other DNA
gtgggccccacttctgcctggggggtctcagaaggcatgctgggacctggcaaagcaaggagagaggcgtcggttcaggc

SEQ ID NO: 52999 - DNA, 80 bp, synthetic construct
  misc_feature 1..80: note = Artificially Synthesized Probe
  source 1..80: mol_type = other DNA
aaaatggaagcagacagttgcttgggccgggtgcggtggctcacgcctctcatcccagcacttcgggaggctgaggcagg

SEQ ID NO: 53000 - DNA, 80 bp, synthetic construct
  misc_feature 1..80: note = Artificially Synthesized Probe
  source 1..80: mol_type = other DNA
acacgtcgttctgggcatgtgtgaggggattccggattagcacaagagtcaagaggcagataacgtgtgctactgtggag

SEQ ID NO: 53001 - DNA, 80 bp, synthetic construct; identical to SEQ ID NO: 24772
  misc_feature 1..80: note = Artificially Synthesized Probe
  source 1..80: mol_type = other DNA

SEQ ID NO: 53002 - DNA, 80 bp, synthetic construct
  misc_feature 1..80: note = Artificially Synthesized Probe
  source 1..80: mol_type = other DNA
cagcggctgaggtgagtggggaagggagggtgattgtttaatgggtgcagaggttgtgctggggatgatgaaaacgttct

SEQ ID NO: 53003 - DNA, 80 bp, synthetic construct
  misc_feature 1..80: note = Artificially Synthesized Probe
  source 1..80: mol_type = other DNA
tctgctgcccctcctctggggggacaaggaacccacgaccacctcccaccttgccttcttcagagggcccaggactgggc

SEQ ID NO: 53004 - DNA, 80 bp, synthetic construct
  misc_feature 1..80: note = Artificially Synthesized Probe
  source 1..80: mol_type = other DNA
tcactttcaagtgattgatttttaggttatttgaatttcatctcaattaaaaaacccaaacacgcaaactgctcccgcca

SEQ ID NO: 53005 - DNA, 80 bp, synthetic construct; identical to SEQ ID NO: 24773
  misc_feature 1..80: note = Artificially Synthesized Probe
  source 1..80: mol_type = other DNA

SEQ ID NO: 53006 - DNA, 80 bp, synthetic construct
  misc_feature 1..80: note = Artificially Synthesized Probe
  source 1..80: mol_type = other DNA
atggtgaaaccccgtttctactaaaactacaaaaattagccaagcatggtggcgcacacctgtagtcccagctactcggg

SEQ ID NO: 53007 - DNA, 80 bp, synthetic construct
  misc_feature 1..80: note = Artificially Synthesized Probe
  source 1..80: mol_type = other DNA
tcagtttaagatcttaataacaggggaaactgggggaactctatctattttttcaatttttctaaatctaaaactgctct

SEQ ID NO: 53008 - DNA, 80 bp, synthetic construct
  misc_feature 1..80: note = Artificially Synthesized Probe
  source 1..80: mol_type = other DNA
agtaggattacagacgcccgccaccacatccggctaatttttgtatttttagtagagacgaagtttcaccatgttggcca

SEQ ID NO: 53009 - DNA, 80 bp, synthetic construct
  misc_feature 1..80: note = Artificially Synthesized Probe
  source 1..80: mol_type = other DNA
aaaaagaaaaagttgcggaagccggctgcctttggaagcccttggagtatgctgttcaggtggtctctgcgcacaggccc

SEQ ID NO: 53010 - DNA, 80 bp, synthetic construct; identical to SEQ ID NO: 24774
  misc_feature 1..80: note = Artificially Synthesized Probe
  source 1..80: mol_type = other DNA

SEQ ID NO: 53011 - DNA, 80 bp, synthetic construct
  misc_feature 1..80: note = Artificially Synthesized Probe
  source 1..80: mol_type = other DNA
ggcccagcgccttgcttttggcccctcgcctcgccctggagccctctctcgcaaggtaagggactgccgggaacgcagat

SEQ ID NO: 53012 - DNA, 80 bp, synthetic construct
  misc_feature 1..80: note = Artificially Synthesized Probe
  source 1..80: mol_type = other DNA
gatctcgttccctctctctccccgctccccacacatcctcttggtcctgcgtctccacaggaccctacaccagctgtcat

SEQ ID NO: 53013 - DNA, 80 bp, synthetic construct
  misc_feature 1..80: note = Artificially Synthesized Probe
  source 1..80: mol_type = other DNA
ccgttcgctccttaaaccacaagacccccttggggtcacgacgttcccggggcacccctgcactcgcgcgccagcactcc

SEQ ID NO: 53014 - DNA, 80 bp, synthetic construct
  misc_feature 1..80: note = Artificially Synthesized Probe
  source 1..80: mol_type = other DNA
cctcgggaagccgagaatttcgcgctccgctctcccacccacgctccgcctcccgcttgcatcctacagctcagctgcgg

SEQ ID NO: 53015 - DNA, 80 bp, synthetic construct; identical to SEQ ID NO: 24775
  misc_feature 1..80: note = Artificially Synthesized Probe
  source 1..80: mol_type = other DNA

SEQ ID NO: 53016 - DNA, 80 bp, synthetic construct
  misc_feature 1..80: note = Artificially Synthesized Probe
  source 1..80: mol_type = other DNA
ttgggagaccctgtctcgccgcctttcggtgcagatgatgcaactctgggcggaggcgcggagagggaaaccgggaccca

SEQ ID NO: 53017 - DNA, 80 bp, synthetic construct
  misc_feature 1..80: note = Artificially Synthesized Probe
  source 1..80: mol_type = other DNA
caggcgggcggtgattggcggagaggcgggggcggaggccggcgccggccaatgtctcgtggcagagcacccgccccccc

SEQ ID NO: 53018 - DNA, 80 bp, synthetic construct
  misc_feature 1..80: note = Artificially Synthesized Probe
  source 1..80: mol_type = other DNA
caaccgcagacccgggtcgccgccccctcccccgccttcctcttcgcctgagcccgcccgccccgggttccagccacccc

SEQ ID NO: 53019 - DNA, 80 bp, synthetic construct
  misc_feature 1..80: note = Artificially Synthesized Probe
  source 1..80: mol_type = other DNA
gggcgtgtgtcgcgggcccgggagggggcgccgcgccggggcgggactcgatggccgcgctctgtggccgccggacgccg

SEQ ID NO: 53020 - DNA, 80 bp, synthetic construct
  misc_feature 1..80: note = Artificially Synthesized Probe
  source 1..80: mol_type = other DNA
ccgcggggctccttcgccaggtcccggaggccgcgggcggggccgtttcccaaacatcgtgctctggactttcagaggct

SEQ ID NO: 53021 - DNA, 80 bp, synthetic construct
  misc_feature 1..80: note = Artificially Synthesized Probe
  source 1..80: mol_type = other DNA
cagcctcctccggcccgcgcagctccgccgcggtctctgccacgtggggctcacagtaggggagggagtgagacgtgaat

SEQ ID NO: 53022 - DNA, 80 bp, synthetic construct; identical to SEQ ID NO: 24754
  misc_feature 1..80: note = Artificially Synthesized Probe
  source 1..80: mol_type = other DNA

SEQ ID NO: 53023 - DNA, 80 bp, synthetic construct
  misc_feature 1..80: note = Artificially Synthesized Probe
  source 1..80: mol_type = other DNA
gtggacatgctccaggaagacttgatttggggaccctgacattggaatttgcatctttttttttttctgagatgttcaaa

SEQ ID NO: 53024 - DNA, 80 bp, synthetic construct
  misc_feature 1..80: note = Artificially Synthesized Probe
  source 1..80: mol_type = other DNA
cgcctgcccaggcctggtcctgcgctgcagagccaaggacgggagatggggttagacttggggccctcacggaccagcct

SEQ ID NO: 53025 - DNA, 80 bp, synthetic construct; identical to SEQ ID NO: 24755
  misc_feature 1..80: note = Artificially Synthesized Probe
  source 1..80: mol_type = other DNA

SEQ ID NO: 53026 - DNA, 80 bp, synthetic construct
  misc_feature 1..80: note = Artificially Synthesized Probe
  source 1..80: mol_type = other DNA
gctggacaaagggccctacccagtgtggcctgatgaggggtccctgcaggaatcacaggtacagcccaccagcccagggc

SEQ ID NO: 53027 - DNA, 80 bp, synthetic construct
  misc_feature 1..80: note = Artificially Synthesized Probe
  source 1..80: mol_type = other DNA
cactcacactggatctgctcgtgcaccaccagggcgaagtggtccatctccaggatgtgcgagagcctgcccagcgtgtc

SEQ ID NO: 53028 - DNA, 80 bp, synthetic construct
  misc_feature 1..80: note = Artificially Synthesized Probe
  source 1..80: mol_type = other DNA
tcgggtgtgtgtgtgagatgggaaagaagtcgaattcactcctaggtttgggcagaaccctcagcctttccagtgtcaag

SEQ ID NO: 53029 - DNA, 80 bp, synthetic construct; identical to SEQ ID NO: 24756
  misc_feature 1..80: note = Artificially Synthesized Probe
  source 1..80: mol_type = other DNA

SEQ ID NO: 53030 - DNA, 80 bp, synthetic construct
  misc_feature 1..80: note = Artificially Synthesized Probe
  source 1..80: mol_type = other DNA
ctccggctgctgcacttgtaaagtgggtgcttctcagcttcatggtttgaggggtgcagccagcttcggcctaagtggtg

SEQ ID NO: 53031 - DNA, 80 bp, synthetic construct
  misc_feature 1..80: note = Artificially Synthesized Probe
  source 1..80: mol_type = other DNA
tggtgaaacatcctaagaggaagttacattagagaaaatcacatatttcatctcataggccgtaaacagggccatttagg

SEQ ID NO: 53032 - DNA, 80 bp, synthetic construct
  misc_feature 1..80: note = Artificially Synthesized Probe
  source 1..80: mol_type = other DNA
ggtgactgcgcacctgtttgaactgcgtgtaggtgaccgcgcacctgtttgagctgcctgtagctgaccgggcacctgtt

SEQ ID NO: 53033 - DNA, 80 bp, synthetic construct
  misc_feature 1..80: note = Artificially Synthesized Probe
  source 1..80: mol_type = other DNA
tgcctgtaggtgactgggcacccgtttgagctgcctgtaggtgaccgcgcacccgcttgagctgcctgtagctgaccgcg

SEQ ID NO: 53034 - DNA, 80 bp, synthetic construct
  misc_feature 1..80: note = Artificially Synthesized Probe
  source 1..80: mol_type = other DNA
acatatttcatctcataggccgtaaacagggccatttaggaagccatgtgttaacgaggggagacggatgctctgtgccg

SEQ ID NO: 53035 - DNA, 80 bp, synthetic construct; identical to SEQ ID NO: 24757
  misc_feature 1..80: note = Artificially Synthesized Probe
  source 1..80: mol_type = other DNA

SEQ ID NO: 53036 - DNA, 80 bp, synthetic construct
  misc_feature 1..80: note = Artificially Synthesized Probe
  source 1..80: mol_type = other DNA
acatggaagtcctctgccacgagcctacacgcggcaggaaccagtctgggccctggtggggagaaagaaaccaagagtcc

SEQ ID NO: 53037 - DNA, 80 bp, synthetic construct
  misc_feature 1..80: note = Artificially Synthesized Probe
  source 1..80: mol_type = other DNA
tctctcccctgacctccaggtgggcccaggacagcctgcacacaaagggtgggtgggctgaggtctgagggcctggagtg

SEQ ID NO: 53038 - DNA, 80 bp, synthetic construct
  misc_feature 1..80: note = Artificially Synthesized Probe
  source 1..80: mol_type = other DNA
aacccaggactgagctctgagcaggggctgagactgaccccgcctcatccaccacgggcgcctggtcgaagcccttctcc

SEQ ID NO: 53039 - DNA, 80 bp, synthetic construct
  misc_feature 1..80: note = Artificially Synthesized Probe
  source 1..80: mol_type = other DNA
acctcagcaggaggccacagggaccgctctcctgcctgtcacactgggcagggccagcacaggccacggggaccgctctc

SEQ ID NO: 53040 - DNA, 80 bp, synthetic construct; identical to SEQ ID NO: 24758
  misc_feature 1..80: note = Artificially Synthesized Probe
  source 1..80: mol_type = other DNA

SEQ ID NO: 53041 - DNA, 80 bp, synthetic construct
  misc_feature 1..80: note = Artificially Synthesized Probe
  source 1..80: mol_type = other DNA
cgctcaggcactcagataaacacgtcctctcatgctcgctctctgcccctcacacactcacacgcacaggtacacatggc

SEQ ID NO: 53042 - DNA, 80 bp, synthetic construct
  misc_feature 1..80: note = Artificially Synthesized Probe
  source 1..80: mol_type = other DNA
gctgagctctcgggagctgtgtagccgctgcagcttgcaggccatggaggaaaccctgcaggtgcaggggacagggcatg

SEQ ID NO: 53043 - DNA, 80 bp, synthetic construct
  misc_feature 1..80: note = Artificially Synthesized Probe
  source 1..80: mol_type = other DNA
cagcactcggtcccaatctggagtttgggggaagcagcagagggagtcagggtggataggaggtggcacagggcccggcc

SEQ ID NO: 53044 - DNA, 80 bp, synthetic construct; identical to SEQ ID NO: 24759
  misc_feature 1..80: note = Artificially Synthesized Probe
  source 1..80: mol_type = other DNA

SEQ ID NO: 53045 - DNA, 80 bp, synthetic construct
  misc_feature 1..80: note = Artificially Synthesized Probe
  source 1..80: mol_type = other DNA
cagcaagtcaatggcggtgaccaccccgaacaccatctgccgctgactggacttcccggtgctgtggtctgaggggagaa

SEQ ID NO: 53046 - DNA, 80 bp, synthetic construct
  misc_feature 1..80: note = Artificially Synthesized Probe
  source 1..80: mol_type = other DNA
gcagcgctggccctcctgcagctcctgcgcggccttcacggccaccgccaccgtgctgccagcactgccacctgcagaga

SEQ ID NO: 53047 - DNA, 80 bp, synthetic construct
  misc_feature 1..80: note = Artificially Synthesized Probe
  source 1..80: mol_type = other DNA
gcatcggcttcttccttgtgcaccatggagtttctgtgtccactcggggcttcataatgagctggggtgggcactggtgc

SEQ ID NO: 53048 - DNA, 80 bp, synthetic construct
  misc_feature 1..80: note = Artificially Synthesized Probe
  source 1..80: mol_type = other DNA
tgacaccagctgtccctaggagccctgaagtcagagtcagaggcgtcttctctgggcttagtttgagggtgcacacagca

SEQ ID NO: 53049 - DNA, 80 bp, synthetic construct; identical to SEQ ID NO: 24760
  misc_feature 1..80: note = Artificially Synthesized Probe
  source 1..80: mol_type = other DNA

SEQ ID NO: 53050 - DNA, 80 bp, synthetic construct
  misc_feature 1..80: note = Artificially Synthesized Probe
  source 1..80: mol_type = other DNA
ttttagtagagacggggtttctccctgttggccaggctggtcttgaactcctgacctcaggtgatccacccgcctcgacc

SEQ ID NO: 53051 - DNA, 80 bp, synthetic construct
  misc_feature 1..80: note = Artificially Synthesized Probe
  source 1..80: mol_type = other DNA
aagtgacatgacacacggaatgcacatgtagaaacctcacatgtccctgcctgcgttttagaagctggtgtgtgctctcc

SEQ ID NO: 53052 - DNA, 80 bp, synthetic construct
  misc_feature 1..80: note = Artificially Synthesized Probe
  source 1..80: mol_type = other DNA
gcctcaggctccagtcccctccccagctgctccagggtgctcgcagcacccagtcccggccatgggccccgtcaatgcag

SEQ ID NO: 53053 - DNA, 80 bp, synthetic construct; identical to SEQ ID NO: 24761
  misc_feature 1..80: note = Artificially Synthesized Probe
  source 1..80: mol_type = other DNA

SEQ ID NO: 53054 - DNA, 80 bp, synthetic construct
  misc_feature 1..80: note = Artificially Synthesized Probe
  source 1..80: mol_type = other DNA
ctgagcaggaccccaccacagcccgtcagcgtgggagccgctcccacgtgaccaagagggtgaacagcctcatggtggac

SEQ ID NO: 53055 - DNA, 80 bp, synthetic construct
  misc_feature 1..80: note = Artificially Synthesized Probe
  source 1..80: mol_type = other DNA
tgctctccctcaggccaaagtcagctttttggctcttaacagacttttccggggccttaattttcacacgttttccctgc

SEQ ID NO: 53056 - DNA, 80 bp, synthetic construct
  misc_feature 1..80: note = Artificially Synthesized Probe
  source 1..80: mol_type = other DNA
actctgtcccctaggctggagtgcagtggtgcagtcttggctcactgcaacctccacctcctgggttcaagtgattctcg

SEQ ID NO: 53057 - DNA, 80 bp, synthetic construct
  misc_feature 1..80: note = Artificially Synthesized Probe
  source 1..80: mol_type = other DNA
ggtcagccaggctccccagtgtgagggtgagttacaggctgcaccggcactgtggccgggctctggactcgacctaccgt

SEQ ID NO: 53058 - DNA, 80 bp, synthetic construct; identical to SEQ ID NO: 24762
  misc_feature 1..80: note = Artificially Synthesized Probe
  source 1..80: mol_type = other DNA

SEQ ID NO: 53059 - DNA, 80 bp, synthetic construct
  misc_feature 1..80: note = Artificially Synthesized Probe
  source 1..80: mol_type = other DNA
cgtttaaaagaacatctttattatttccccaggccgatcacagccctgaacaaaagcatctgatacacatttgtcagtct

SEQ ID NO: 53060 - DNA, 80 bp, synthetic construct; identical to SEQ ID NO: 24777
  misc_feature 1..80: note = Artificially Synthesized Probe
  source 1..80: mol_type = other DNA

SEQ ID NO: 53061 - DNA, 80 bp, synthetic construct
  misc_feature 1..80: note = Artificially Synthesized Probe
  source 1..80: mol_type = other DNA
atccagatacctgaatggactgttctcttagctctcttcatggaattttgtcggttcaagaagtcataccccagcccaag

SEQ ID NO: 53062 - DNA, 80 bp, synthetic construct
  misc_feature 1..80: note = Artificially Synthesized Probe
  source 1..80: mol_type = other DNA
agattctcatacctggagactaggagggctaagaccccttctagagataaaaataaaagttgtgaagaaaaagaccaagg

SEQ ID NO: 53063 - DNA, 80 bp, synthetic construct
  misc_feature 1..80: note = Artificially Synthesized Probe
  source 1..80: mol_type = other DNA
agacctgcatgattgggagcaggtgatggaatgtgggctcgagtgtcagcagagccaagaagggactgactactctttgc

SEQ ID NO: 53064 - DNA, 80 bp, synthetic construct
  misc_feature 1..80: note = Artificially Synthesized Probe
  source 1..80: mol_type = other DNA
taaaatttaagttaagaagagtcccacagtgtggctgtttggcaataaccagtccatagaagaggtagctgtggaggtca

SEQ ID NO: 53065 - DNA, 80 bp, synthetic construct
  misc_feature 1..80: note = Artificially Synthesized Probe
  source 1..80: mol_type = other DNA
gaagggaggaagagttaagcactggggaatccagccggggaatcctgggcccaccatggccctgacatcctgctctctgt

SEQ ID NO: 53066 - DNA, 80 bp, synthetic construct; identical to SEQ ID NO: 24776
  misc_feature 1..80: note = Artificially Synthesized Probe
  source 1..80: mol_type = other DNA

SEQ ID NO: 53067 - DNA, 80 bp, synthetic construct
  misc_feature 1..80: note = Artificially Synthesized Probe
  source 1..80: mol_type = other DNA
atatttaagtttattattattattattattatttgacaatcttatatccaatgggctctctagaagctgcatccccagcc

SEQ ID NO: 53068 - DNA, 80 bp, synthetic construct
  misc_feature 1..80: note = Artificially Synthesized Probe
  source 1..80: mol_type = other DNA
tcctccagcccttcctccagcccttcctccggagccctcctccagcccttcctccagcccttcctctggagccctcctcc

SEQ ID NO: 53069 - DNA, 80 bp, synthetic construct
  misc_feature 1..80: note = Artificially Synthesized Probe
  source 1..80: mol_type = other DNA
acacaaacccaagccatgaaagtacagcaaaccccatcctgccccctgactgcagtttcctggggctctgccgtctgcct

SEQ ID NO: 53070 - DNA, 80 bp, synthetic construct
  misc_feature 1..80: note = Artificially Synthesized Probe
  source 1..80: mol_type = other DNA
cacacacatcacaagctgacaagtgggacttttggctgaagacaaaaggagtcacataccatcatttggagcagggccag

SEQ ID NO: 53071 - DNA, 80 bp, synthetic construct; identical to SEQ ID NO: 24789
  misc_feature 1..80: note = Artificially Synthesized Probe
  source 1..80: mol_type = other DNA

SEQ ID NO: 53072 - DNA, 80 bp, synthetic construct
  misc_feature 1..80: note = Artificially Synthesized Probe
  source 1..80: mol_type = other DNA
ttaacagaatgaagaacaaaaatcatgatcatctcactagatgcaggaaaagcatttgacaaaatttaacatcctttcat

SEQ ID NO: 53073 - DNA, 80 bp, synthetic construct
  misc_feature 1..80: note = Artificially Synthesized Probe
  source 1..80: mol_type = other DNA
cactacttctattcaatatagtaacataggtcccagccgagcaattagcaaaaggtgccaagaatatacaatgggaaatg

SEQ ID NO: 53074 - DNA, 80 bp, synthetic construct
  misc_feature 1..80: note = Artificially Synthesized Probe
  source 1..80: mol_type = other DNA
tgaatagatatttctcaaaagaagacatataaatggctaagagacatatgaaaaaatgcttaacatcactaaccattagg

SEQ ID NO: 53075 - DNA, 80 bp, synthetic construct; identical to SEQ ID NO: 24790
  misc_feature 1..80: note = Artificially Synthesized Probe
  source 1..80: mol_type = other DNA

SEQ ID NO: 53076 - DNA, 80 bp, synthetic construct
  misc_feature 1..80: note = Artificially Synthesized Probe
  source 1..80: mol_type = other DNA
gatattaaaaaaaaaatgtcgtttaacttcttgtttgtttcagtgtaatgctcttaaagtcatagcatgaaaataattga

SEQ ID NO: 53077 - DNA, 80 bp, synthetic construct
  misc_feature 1..80: note = Artificially Synthesized Probe
  source 1..80: mol_type = other DNA
cagcactttggttggctgaggcgggcagatcacttgaggtcgaaagttcgagaccagcctgatcaacatggagaaacccc

SEQ ID NO: 53078 - DNA, 80 bp, synthetic construct
  misc_feature 1..80: note = Artificially Synthesized Probe
  source 1..80: mol_type = other DNA
ctaaacgctgtctcaaaaaaaaaaagaaaacaaaacaaaagaaaccaataaccaagttatggaatcaacctaagtgtcca

SEQ ID NO: 53079 - DNA, 80 bp, synthetic construct
  misc_feature 1..80: note = Artificially Synthesized Probe
  source 1..80: mol_type = other DNA
tgttctcacctatatgtggaatctaaaacagtttaactcactgaagcatggacaggtagcatgatgtttaccagaggctg

SEQ ID NO: 53080 - DNA, 80 bp, synthetic construct
  misc_feature 1..80: note = Artificially Synthesized Probe
  source 1..80: mol_type = other DNA
catcacaaaaaagttaaagatttgaagtgataaatatgttaattagcttaatttaatcatttcatattatattcaaaaat

SEQ ID NO: 53081 - DNA, 80 bp, synthetic construct; identical to SEQ ID NO: 24791
  misc_feature 1..80: note = Artificially Synthesized Probe
  source 1..80: mol_type = other DNA

SEQ ID NO: 53082 - DNA, 80 bp, synthetic construct
  misc_feature 1..80: note = Artificially Synthesized Probe
  source 1..80: mol_type = other DNA
ccacgtccgggggtgaggccccttgagatgcagaatggagccaaggaggaaggaagagggtgcggcagcaagtgggtctc

SEQ ID NO: 53083 - DNA, 80 bp, synthetic construct
  misc_feature 1..80: note = Artificially Synthesized Probe
  source 1..80: mol_type = other DNA
tcccggccacgtctcttgtccaaaacatcgtactcctctcttcgtcctagattgagctcctataacagataagaaagtgt

SEQ ID NO: 53084 - DNA, 80 bp, synthetic construct
  misc_feature 1..80: note = Artificially Synthesized Probe
  source 1..80: mol_type = other DNA
acgccttaacatgacagtggatgggatccccaaaggtcaccaagtactataggctgatcagtccaacgggataaggatca

SEQ ID NO: 53085 - DNA, 80 bp, synthetic construct; identical to SEQ ID NO: 24792
  misc_feature 1..80: note = Artificially Synthesized Probe
  source 1..80: mol_type = other DNA

SEQ ID NO: 53086 - DNA, 80 bp, synthetic construct
  misc_feature 1..80: note = Artificially Synthesized Probe
  source 1..80: mol_type = other DNA
tttccggagggtctacggcgaggctgacttacgttatagagctggttctggccctgctggtacgcgggggcgtctgcgct

SEQ ID NO: 53087 - DNA, 80 bp, synthetic construct
  misc_feature 1..80: note = Artificially Synthesized Probe
  source 1..80: mol_type = other DNA
ccaggtgtcaatttagattgcatattcctcattactgttcccaactgggattttgttttcttttaaagagacagtgatcg

SEQ ID NO: 53088 - DNA, 80 bp, synthetic construct
  misc_feature 1..80: note = Artificially Synthesized Probe
  source 1..80: mol_type = other DNA
gggccggggcgtggcagcccctttttctgagcccagttgtcctttttcctcccgcctgtgacacgtgcattcatcacgct

SEQ ID NO: 53089 - DNA, 80 bp, synthetic construct
  misc_feature 1..80: note = Artificially Synthesized Probe
  source 1..80: mol_type = other DNA
gggactctgaggacaatccagggtggatggcggctggtcaagatcccgcctcctatcttgacccccggagcagtgtactg

SEQ ID NO: 53090 - DNA, 80 bp, synthetic construct; identical to SEQ ID NO: 24793
  misc_feature 1..80: note = Artificially Synthesized Probe
  source 1..80: mol_type = other DNA

SEQ ID NO: 53091 - DNA, 80 bp, synthetic construct
  misc_feature 1..80: note = Artificially Synthesized Probe
  source 1..80: mol_type = other DNA
ctgcaaggcaccaagtgaaaaacccacgctctggtcagctccccagttacagatgaggaaagggccttttcaagagaaag

SEQ ID NO: 53092 - DNA, 80 bp, synthetic construct
  misc_feature 1..80: note = Artificially Synthesized Probe
  source 1..80: mol_type = other DNA
tccatctcagccagacactgccacctcctcctcagcccactcaaggcacacacttggctggtccttgctttgctcctgga

SEQ ID NO: 53093 - DNA, 80 bp, synthetic construct
  misc_feature 1..80: note = Artificially Synthesized Probe
  source 1..80: mol_type = other DNA
gattccatccagcaggtagcagagtttgggatccagcaggccaaagctctgtgcctctgtgccaagagataaagctggtc

SEQ ID NO: 53094 - DNA, 80 bp, synthetic construct
  misc_feature 1..80: note = Artificially Synthesized Probe
  source 1..80: mol_type = other DNA
cctattggcaccaacggcagatgtggccgctgtggggccaaagaacctggggcaatgggaggggaggtggaaacaaggcg

SEQ ID NO: 53095 - DNA, 80 bp, synthetic construct; identical to SEQ ID NO: 24794
  misc_feature 1..80: note = Artificially Synthesized Probe
  source 1..80: mol_type = other DNA

SEQ ID NO: 53096 - DNA, 80 bp, synthetic construct
  misc_feature 1..80: note = Artificially Synthesized Probe
  source 1..80: mol_type = other DNA
tctccctgtcccctagtcccagctccatggcctcagccttctctgtctcccctcctcccactacacacaccccattccca

SEQ ID NO: 53097 - DNA, 80 bp, synthetic construct; identical to SEQ ID NO: 24779
  misc_feature 1..80: note = Artificially Synthesized Probe
  source 1..80: mol_type = other DNA

SEQ ID NO: 53098 - DNA, 80 bp, synthetic construct
  misc_feature 1..80: note = Artificially Synthesized Probe
  source 1..80: mol_type = other DNA
actgcaaatttcccaggggcccctaactcctagtgccatattaacctttgtcaagctgtagttaatgcacgtttagttgg

SEQ ID NO: 53099 - DNA, 80 bp, synthetic construct
  misc_feature 1..80: note = Artificially Synthesized Probe
  source 1..80: mol_type = other DNA
tccagcctggccaacgtggtgaaaccccatctctactaaaaatacgaaaattagctgggcgtggtggctggcagctttga

SEQ ID NO: 53100 - DNA, 80 bp, synthetic construct; identical to SEQ ID NO: 24795
  misc_feature 1..80: note = Artificially Synthesized Probe
  source 1..80: mol_type = other DNA

SEQ ID NO: 53101 - DNA, 80 bp, synthetic construct
  misc_feature 1..80: note = Artificially Synthesized Probe
  source 1..80: mol_type = other DNA
ctgtcattctttctggctgtgtgatttggggcaggttatgtatgctctgtcagctgcctcttctgttgaacagggtgaaa

SEQ ID NO: 53102 - DNA, 80 bp, synthetic construct
  misc_feature 1..80: note = Artificially Synthesized Probe
  source 1..80: mol_type = other DNA
gccagccctgcctacccctccatgccagcaacgttttggcctccctgacgaactatggaagcagatgattcaaaggcagc

SEQ ID NO: 53103 - DNA, 80 bp, synthetic construct
  misc_feature 1..80: note = Artificially Synthesized Probe
  source 1..80: mol_type = other DNA
tccaagctctttgtccagccatgttagggctctgccataaccagtccaggcctgaaaagaccacagctttgtgccaccct

SEQ ID NO: 53104 - DNA, 80 bp, synthetic construct; identical to SEQ ID NO: 24796
  misc_feature 1..80: note = Artificially Synthesized Probe
  source 1..80: mol_type = other DNA

SEQ ID NO: 53105 - DNA, 80 bp, synthetic construct
  misc_feature 1..80: note = Artificially Synthesized Probe
  source 1..80: mol_type = other DNA
gggcacagggtagacaatcactcgatatcatggaatttttcagggctgaacttcagtgatgaggaagatgctgggcccag

SEQ ID NO: 53106 - DNA, 80 bp, synthetic construct
  misc_feature 1..80: note = Artificially Synthesized Probe
  source 1..80: mol_type = other DNA
atttatgggactggttgagactcagaagaaaatccaggagaaaatcactcagctgcttgtcacagaaaattagaacagaa

SEQ ID NO: 53107 - DNA, 80 bp, synthetic construct
  misc_feature 1..80: note = Artificially Synthesized Probe
  source 1..80: mol_type = other DNA
tttctgcatagttttatgactgatgacaagtgtgctgtgtgtggttgggtggaggagaggatattaaccccaacataatt

SEQ ID NO: 53108 - DNA, 80 bp, synthetic construct
  misc_feature 1..80: note = Artificially Synthesized Probe
  source 1..80: mol_type = other DNA
tgttagccaaatatttcccctctgataggaatattttctaagaatcagctgataacttgcgtgctggaccttgttatctg

SEQ ID NO: 53109 - DNA, 80 bp, synthetic construct; identical to SEQ ID NO: 24797
  misc_feature 1..80: note = Artificially Synthesized Probe
  source 1..80: mol_type = other DNA

SEQ ID NO: 53110 - DNA, 80 bp, synthetic construct
  misc_feature 1..80: note = Artificially Synthesized Probe
  source 1..80: mol_type = other DNA
tgtgatgagaatcaaaagacaatgatgtctgatatttgggtcgagtcttctgagtccctgccctcatggggcttaagtct

SEQ ID NO: 53111 - DNA, 80 bp, synthetic construct
  misc_feature 1..80: note = Artificially Synthesized Probe
  source 1..80: mol_type = other DNA
ccaaagggaccagcagctgcttcctaggaggtttcagggtattacatggtagctacttttctgtaaaagtggagaagctg

SEQ ID NO: 53112 - DNA, 80 bp, synthetic construct
  misc_feature 1..80: note = Artificially Synthesized Probe
  source 1..80: mol_type = other DNA
gggcatggggacttcactgcatggccatgaatggattgagattcagacctgcatcattacaggggccacagcatgtgaga

SEQ ID NO: 53113 - DNA, 80 bp, synthetic construct; identical to SEQ ID NO: 24798
  misc_feature 1..80: note = Artificially Synthesized Probe
  source 1..80: mol_type = other DNA

SEQ ID NO: 53114 - DNA, 80 bp, synthetic construct
  misc_feature 1..80: note = Artificially Synthesized Probe
  source 1..80: mol_type = other DNA
cacaccacgatgccctgctaatttttgtaattttagtagagatggggttttgccatgttggtcaggctggtctcaaactc

SEQ ID NO: 53115 - DNA, 80 bp, synthetic construct
  misc_feature 1..80: note = Artificially Synthesized Probe
  source 1..80: mol_type = other DNA
atggggtgaaggaccccataagggtatgtgttccattttgccacctattgttactgccatgatttctactttaagcccat

SEQ ID NO: 53116 - DNA, 80 bp, synthetic construct
  misc_feature 1..80: note = Artificially Synthesized Probe
  source 1..80: mol_type = other DNA
ttgtatctaagtgttgtgagtctaattagtgacagtgagcctcgccatccctttgtagccttttgtcatcttcattaaaa

SEQ ID NO: 53117 - DNA, 80 bp, synthetic construct; identical to SEQ ID NO: 24799
  misc_feature 1..80: note = Artificially Synthesized Probe
  source 1..80: mol_type = other DNA

SEQ ID NO: 53118 - DNA, 80 bp, synthetic construct
  misc_feature 1..80: note = Artificially Synthesized Probe
  source 1..80: mol_type = other DNA
tacttttaaagtgacttcctgtgtctgatggagttagattcttatgagtgccaggagacaaacagggggctacttttggg

SEQ ID NO: 53119 - DNA, 80 bp, synthetic construct
  misc_feature 1..80: note = Artificially Synthesized Probe
  source 1..80: mol_type = other DNA
gatccggagtttccacctacctctgatttcacagcccttgccattttgcccacttttgacacttagtcacaacggcttgt

SEQ ID NO: 53120 - DNA, 80 bp, synthetic construct
  misc_feature 1..80: note = Artificially Synthesized Probe
  source 1..80: mol_type = other DNA
ctagggctgcctgcaggggctgtaggcttgggaaagattgtgtaggtgacagtgaatcagaatgaagtggtagattttgt

SEQ ID NO: 53121 - DNA, 80 bp, synthetic construct; identical to SEQ ID NO: 24800
  misc_feature 1..80: note = Artificially Synthesized Probe
  source 1..80: mol_type = other DNA

SEQ ID NO: 53122 - DNA, 80 bp, synthetic construct
  misc_feature 1..80: note = Artificially Synthesized Probe
  source 1..80: mol_type = other DNA
cagaacctggccaggtttcccagcccaggatggggatacccactcttcaggggtgtttgaagataaaaacagataatggg

SEQ ID NO: 53123 - DNA, 80 bp, synthetic construct
  misc_feature 1..80: note = Artificially Synthesized Probe
  source 1..80: mol_type = other DNA
aaaatacaaaaaaattagccgggcgtggtggcaggcacctgtggtcccagctgctcaggaggctgaggcaggagaatggt

SEQ ID NO: 53124 - DNA, 80 bp, synthetic construct
  misc_feature 1..80: note = Artificially Synthesized Probe
  source 1..80: mol_type = other DNA
gcctggcacacagtgggagctcagtagtgtgtagactttctgagaactcctcacttcacaaaatgataatgatgtaacac

SEQ ID NO: 53125 - DNA, 80 bp, synthetic construct
  misc_feature 1..80: note = Artificially Synthesized Probe
  source 1..80: mol_type = other DNA
tgcagctccaataggtcacatggctagagattttctgagtgcatctgatgcaaagtcccttctcaatctaccttatccca

SEQ ID NO: 53126 - DNA, 80 bp, synthetic construct; identical to SEQ ID NO: 24801
  misc_feature 1..80: note = Artificially Synthesized Probe
  source 1..80: mol_type = other DNA

SEQ ID NO: 53127 - DNA, 80 bp, synthetic construct
  misc_feature 1..80: note = Artificially Synthesized Probe
  source 1..80: mol_type = other DNA
tggtacctggtaagcgctcagtttgtaggcactgatggaatcaatatgaatcacagtagctcatgatccaggtaggagtg

SEQ ID NO: 53128 - DNA, 80 bp, synthetic construct
  misc_feature 1..80: note = Artificially Synthesized Probe
  source 1..80: mol_type = other DNA
aacttagaaaacaggaagtcactgttcttaggaaggcagtggcagcagctatgggtgggggggtgggggcggtgtctgtg

SEQ ID NO: 53129 - DNA, 80 bp, synthetic construct
  misc_feature 1..80: note = Artificially Synthesized Probe
  source 1..80: mol_type = other DNA
ttgaagatttgttctgggccaggaaccacacgtgtgagttttctcattcagtcttcacagtgactctgatttcacagcta

SEQ ID NO: 53130 - DNA, 80 bp, synthetic construct; identical to SEQ ID NO: 24802
  misc_feature 1..80: note = Artificially Synthesized Probe
  source 1..80: mol_type = other DNA

SEQ ID NO: 53131 - DNA, 80 bp, synthetic construct
  misc_feature 1..80: note = Artificially Synthesized Probe
  source 1..80: mol_type = other DNA
tgaactgcagaacgactccagctaatttactggcaacatataatgttttactactctctttaatttgctaccagcctggc

SEQ ID NO: 53132 - DNA, 80 bp, synthetic construct; identical to SEQ ID NO: 24780
  misc_feature 1..80: note = Artificially Synthesized Probe
  source 1..80: mol_type = other DNA

SEQ ID NO: 53133 - DNA, 80 bp, synthetic construct
  misc_feature 1..80: note = Artificially Synthesized Probe
  source 1..80: mol_type = other DNA
tggaggttgcagtgagttgagatagcaccactgcactccagcctgggccatagagtgagactctgtctaaaaaaataaat

SEQ ID NO: 53134 - DNA, 80 bp, synthetic construct; identical to SEQ ID NO: 24803
  misc_feature 1..80: note = Artificially Synthesized Probe
  source 1..80: mol_type = other DNA

SEQ ID NO: 53135 - DNA, 80 bp, synthetic construct
  misc_feature 1..80: note = Artificially Synthesized Probe
  source 1..80: mol_type = other DNA
caaagatttcttaatgattgtataaactcaaaacaaacaaaagaaccaaagaaaagggaagtcttcagcatcagtccagt

SEQ ID NO: 53136 - DNA, 80 bp, synthetic construct
  misc_feature 1..80: note = Artificially Synthesized Probe
  source 1..80: mol_type = other DNA
cctcccaggcagccatgattacaggcacctgccaccacacctggctaattttttgtatttttagcagagacggggtttca

SEQ ID NO: 53137 - DNA, 80 bp, synthetic construct
  misc_feature 1..80: note = Artificially Synthesized Probe
  source 1..80: mol_type = other DNA
aagtaggaaaaaatcagaattgcccataataccactttcaaacacagccattattaatatgatggcagatggctgaccaa

SEQ ID NO: 53138 - DNA, 80 bp, synthetic construct
  misc_feature 1..80: note = Artificially Synthesized Probe
  source 1..80: mol_type = other DNA
ctctctactaaaagtatgaaaattagccgggcatggtggcacgtgcctataatcccagctacttgggaggctgaggcagg

SEQ ID NO: 53139 - DNA, 80 bp, synthetic construct
  misc_feature 1..80: note = Artificially Synthesized Probe
  source 1..80: mol_type = other DNA
ttatttcatatattcatatttcatgttactttgtcattttactattaataaatatcctttttaaaggttgcctaataagc

SEQ ID NO: 53140 - DNA, 80 bp, synthetic construct; identical to SEQ ID NO: 24804
  misc_feature 1..80: note = Artificially Synthesized Probe
  source 1..80: mol_type = other DNA

SEQ ID NO: 53141 - DNA, 80 bp, synthetic construct
  misc_feature 1..80: note = Artificially Synthesized Probe
  source 1..80: mol_type = other DNA
tgacagagtgagaccctgtctcaaaaaaaaataagtgaataaataataatactttgaaaaatgaaagctaagactaatag

SEQ ID NO: 53142 - DNA, 80 bp, synthetic construct
  misc_feature 1..80: note = Artificially Synthesized Probe
  source 1..80: mol_type = other DNA
agaccagtctagccaatatggtaaaaccccatctctactaaaaatacaaaaattagtcaggcatggtggcatgtgcctgt

SEQ ID NO: 53143 - DNA, 80 bp, synthetic construct
  misc_feature 1..80: note = Artificially Synthesized Probe
  source 1..80: mol_type = other DNA
agtgctagccaaggaaatgaaagtatgaagtgacaaagagatgtctcctgtttttcacaggtggtcagagcgggcttcag

SEQ ID NO: 53144 - DNA, 80 bp, synthetic construct
  misc_feature 1..80: note = Artificially Synthesized Probe
  source 1..80: mol_type = other DNA
gcccatgattgatcctgcaagggagctcttcaaagctccatctcactgtgtatttgactgcagaactgggaccgaactca

SEQ ID NO: 53145 - DNA, 80 bp, synthetic construct; identical to SEQ ID NO: 24805
  misc_feature 1..80: note = Artificially Synthesized Probe
  source 1..80: mol_type = other DNA

SEQ ID NO: 53146 - DNA, 80 bp, synthetic construct
  misc_feature 1..80: note = Artificially Synthesized Probe
  source 1..80: mol_type = other DNA
atccaggctatactgccagcctccattacctgtctgcattcagccaaacatagtcattgtcatctcttcttcccctggtc

SEQ ID NO: 53147 - DNA, 80 bp, synthetic construct
  misc_feature 1..80: note = Artificially Synthesized Probe
  source 1..80: mol_type = other DNA
tgaaattcttatgttgaaatcctaactcccaacacctcagaatgtgaccgtacttgaagaaaaggtcttgaaagaggtca

SEQ ID NO: 53148 - DNA, 80 bp, synthetic construct
  misc_feature 1..80: note = Artificially Synthesized Probe
  source 1..80: mol_type = other DNA
gcctgaccaacatggtaaaaccccaactcggccgggtgcggtggctcatgcctgtattcccagcactttgggaggtggag

SEQ ID NO: 53149 - DNA, 80 bp, synthetic construct
  misc_feature 1..80: note = Artificially Synthesized Probe
  source 1..80: mol_type = other DNA
gaggcagaggttgcagtgagccgagatcacgccattgcactccagcctgggcaacaagagcgaaactccatctcaaacaa

SEQ ID NO: 53150 - DNA, 80 bp, synthetic construct; identical to SEQ ID NO: 24806
  misc_feature 1..80: note = Artificially Synthesized Probe
  source 1..80: mol_type = other DNA

SEQ ID NO: 53151 - DNA, 80 bp, synthetic construct
  misc_feature 1..80: note = Artificially Synthesized Probe
  source 1..80: mol_type = other DNA
tgagggtggaggtgacagacacagatgtagcctcccagccgagcagagaggtgggcaaggaaacaaatcatcccacgaga

SEQ ID NO: 53152 - DNA, 80 bp, synthetic construct
  misc_feature 1..80: note = Artificially Synthesized Probe
  source 1..80: mol_type = other DNA
agtctctcaggttagcagacaacacttgctatatgccaggcacatagagtgtaagatacacacacacacttgcatacata

SEQ ID NO: 53153 - DNA, 80 bp, synthetic construct
  misc_feature 1..80: note = Artificially Synthesized Probe
  source 1..80: mol_type = other DNA
ggcatctggtcctcctcctgttcgaggctgcacaacttagcttcttcagacttataaataccacttagcatttagtgtct

SEQ ID NO: 53154 - DNA, 80 bp, synthetic construct; identical to SEQ ID NO: 24807
  misc_feature 1..80: note = Artificially Synthesized Probe
  source 1..80: mol_type = other DNA

SEQ ID NO: 53155 - DNA, 80 bp, synthetic construct
  misc_feature 1..80: note = Artificially Synthesized Probe
  source 1..80: mol_type = other DNA
aattgagtgaggtaagccgggtagatcttatttgctccactttgcagataaagagactgaaggtcagggaggtgaagtga

SEQ ID NO: 53156 - DNA, 80 bp, synthetic construct
  misc_feature 1..80: note = Artificially Synthesized Probe
  source 1..80: mol_type = other DNA
aaattccaggcagtattttgccatttctctgagaatttaattttttctgaggataaactctcacagtatacagagaaaat

SEQ ID NO: 53157 - DNA, 80 bp, synthetic construct
  misc_feature 1..80: note = Artificially Synthesized Probe
  source 1..80: mol_type = other DNA
aatcctagcactttgggaggctgaagctggaggatttcttgagctcaggagtttgagacatagcaagacccgtctctgca

SEQ ID NO: 53158 - DNA, 80 bp, synthetic construct
  misc_feature 1..80: note = Artificially Synthesized Probe
  source 1..80: mol_type = other DNA
agaccctgcctcaaaaacaaaaacaaaaacaaaaaaagctctagatacttgtgtatgaaaaaaacactatgtaagctgca

SEQ ID NO: 53159 - DNA, 80 bp, synthetic construct; identical to SEQ ID NO: 24808
  misc_feature 1..80: note = Artificially Synthesized Probe
  source 1..80: mol_type = other DNA

SEQ ID NO: 53160 - DNA, 80 bp, synthetic construct
  misc_feature 1..80: note = Artificially Synthesized Probe
  source 1..80: mol_type = other DNA
accaaaacaaaaacaaataacatgaacccttacatcaaagaaggtgtgtgcggcaagattctggcagggcagaaagtgga

SEQ ID NO: 53161 - DNA, 80 bp, synthetic construct
  misc_feature 1..80: note = Artificially Synthesized Probe
  source 1..80: mol_type = other DNA
aaaccaactactgctggtaaatagcatgatcactattgttattatccagtgctgtaaggacgagatgctttcaccagcag

SEQ ID NO: 53162 - DNA, 80 bp, synthetic construct
  misc_feature 1..80: note = Artificially Synthesized Probe
  source 1..80: mol_type = other DNA
gttgagggcgcctcctcagagtccctgtggcccccgcagcttccccggaagaaacccgtgcatccatcggctagcccaag

SEQ ID NO: 53163 - DNA, 80 bp, synthetic construct
  misc_feature 1..80: note = Artificially Synthesized Probe
  source 1..80: mol_type = other DNA
tggcaggcattcttgaattagatgatgtggagagccgttgtcgcaagatgtgctcgctctcctggaaagggaccaaaatg

SEQ ID NO: 53164 - DNA, 80 bp, synthetic construct; identical to SEQ ID NO: 24809
  misc_feature 1..80: note = Artificially Synthesized Probe
  source 1..80: mol_type = other DNA

SEQ ID NO: 53165 - DNA, 80 bp, synthetic construct
  misc_feature 1..80: note = Artificially Synthesized Probe
  source 1..80: mol_type = other DNA
caaagtcacaaaccacacccgtgaaggacgccctccgcaagacagagaggaggctgggcctgggaaggaacctccggccc

SEQ ID NO: 53166 - DNA, 80 bp, synthetic construct
  misc_feature 1..80: note = Artificially Synthesized Probe
  source 1..80: mol_type = other DNA
gcgtgatctcccatctgagctgctcacacgctgccgcccgcccccacttgcggtcccttgtccccgaaccgcacccgccc

SEQ ID NO: 53167 - DNA, 80 bp, synthetic construct
  misc_feature 1..80: note = Artificially Synthesized Probe
  source 1..80: mol_type = other DNA
cagtggccaggatcgggcctggctccggctggcccggcacacgagcacggcgacagtggcaagactgggagggccggcgc

SEQ ID NO: 53168 - DNA, 80 bp, synthetic construct; identical to SEQ ID NO: 24810
  misc_feature 1..80: note = Artificially Synthesized Probe
  source 1..80: mol_type = other DNA

SEQ ID NO: 53169 - DNA, 80 bp, synthetic construct
  misc_feature 1..80: note = Artificially Synthesized Probe
  source 1..80: mol_type = other DNA
tagagctttttcctgattgtctctggcttgagctaaccaggtggcatgacaaagtacttaacaaaaactacagatgcaga

SEQ ID NO: 53170 - DNA, 80 bp, synthetic construct
  misc_feature 1..80: note = Artificially Synthesized Probe
  source 1..80: mol_type = other DNA
ccaggggtctgccttgtaacacgttcccccagcttctcatgtacaccaccactcttcggggaccaccaccttctgggttg

SEQ ID NO: 53171 - DNA, 80 bp, synthetic construct; identical to SEQ ID NO: 24811
  misc_feature 1..80: note = Artificially Synthesized Probe
  source 1..80: mol_type = other DNA

SEQ ID NO: 53172 - DNA, 80 bp, synthetic construct
  misc_feature 1..80: note = Artificially Synthesized Probe
  source 1..80: mol_type = other DNA
cgtttagaatatgctagtgaggacagtcctggaatttctttgtctctttccagccctgctttctctacctccagtcgttt

SEQ ID NO: 53173 - DNA, 80 bp, synthetic construct
  misc_feature 1..80: note = Artificially Synthesized Probe
  source 1..80: mol_type = other DNA
ttttgctcctggaatggagccacaagctgctctgggccatttagagactctaagtggtttgctcagggctatatggaagt

SEQ ID NO: 53174 - DNA, 80 bp, synthetic construct
  misc_feature 1..80: note = Artificially Synthesized Probe
  source 1..80: mol_type = other DNA
aaagaacaaggacacattgcagccaaaatggagctagaatcttgcctctgtccatccttcactggagttatcctggatgg

SEQ ID NO: 53175 - DNA, 80 bp, synthetic construct
  misc_feature 1..80: note = Artificially Synthesized Probe
  source 1..80: mol_type = other DNA
tgctcacagacttagcaagcaaaactcgtttgtcatatcctaaggaatgaggataaacaactgatgagattctgttaccc

SEQ ID NO: 53176 - DNA, 80 bp, synthetic construct; identical to SEQ ID NO: 24812
  misc_feature 1..80: note = Artificially Synthesized Probe
  source 1..80: mol_type = other DNA

SEQ ID NO: 53177 - DNA, 80 bp, synthetic construct
  misc_feature 1..80: note = Artificially Synthesized Probe
  source 1..80: mol_type = other DNA
gcccagttgtaggcatcactaggactcagtaattacataattgctcagataattgagagaatgattgattgattagtggt

SEQ ID NO: 53178 - DNA, 80 bp, synthetic construct
  misc_feature 1..80: note = Artificially Synthesized Probe
  source 1..80: mol_type = other DNA
caaaatactggtgttaatacagtaatttctgattccttccacctgtgccctgctcagcgatccagtgttcaagctggtca

SEQ ID NO: 53179 - DNA, 80 bp, synthetic construct
  misc_feature 1..80: note = Artificially Synthesized Probe
  source 1..80: mol_type = other DNA
ccccaggctgtgaccaggcccctgccctgcatgtgactcaggcctagcccctgctggggcaggaatgccacccagcacag

SEQ ID NO: 53180 - DNA, 80 bp, synthetic construct; identical to SEQ ID NO: 24813
  misc_feature 1..80: note = Artificially Synthesized Probe
  source 1..80: mol_type = other DNA

SEQ ID NO: 53181 - DNA, 80 bp, synthetic construct
  misc_feature 1..80: note = Artificially Synthesized Probe
  source 1..80: mol_type = other DNA
catggagaaattgggagcaatggctcacgcctgtaaatcccagcactttgggaggctgaggcaggcggatcacttgaggc

SEQ ID NO: 53182 - DNA, 80 bp, synthetic construct
  misc_feature 1..80: note = Artificially Synthesized Probe
  source 1..80: mol_type = other DNA
ttgcggtgagccgagatcaagccactgcactccagccttggtgacagagtgaaactgtgtctcaaaaattttaaaaaaaa

SEQ ID NO: 53183 - DNA, 80 bp, synthetic construct
  misc_feature 1..80: note = Artificially Synthesized Probe
  source 1..80: mol_type = other DNA
aaatacactactttctctggctttttccttacaactcttttttttttttttttttttttgagatgaagtcttgctctgtc

SEQ ID NO: 53184 - DNA, 80 bp, synthetic construct
  misc_feature 1..80: note = Artificially Synthesized Probe
  source 1..80: mol_type = other DNA
catgttggccaggcttgtctcaaactcctgacttcaggtcatccgcctgccttagcctctcaaagtgctgggattatagg

SEQ ID NO: 53185 - DNA, 80 bp, synthetic construct; identical to SEQ ID NO: 24814
  misc_feature 1..80: note = Artificially Synthesized Probe
  source 1..80: mol_type = other DNA

SEQ ID NO: 53186 - DNA, 80 bp, synthetic construct; identical to SEQ ID NO: 24781
  misc_feature 1..80: note = Artificially Synthesized Probe
  source 1..80: mol_type = other DNA

SEQ ID NO: 53187 - DNA, 80 bp, synthetic construct
  misc_feature 1..80: note = Artificially Synthesized Probe
  source 1..80: mol_type = other DNA
aacccagggtaggtttcctggcatcattcctgtgttttctactctccctccctaatcctctgaaagtttgaacaaaaata

SEQ ID NO: 53188 - DNA, 80 bp, synthetic construct
  misc_feature 1..80: note = Artificially Synthesized Probe
  source 1..80: mol_type = other DNA
tctctacaaaaaatagaaaaattatctgggtgtggtggtgcgcacctgtagtcccagctactcgggaagctgaggtggga

SEQ ID NO: 53189 - DNA, 80 bp, synthetic construct; identical to SEQ ID NO: 24815
  misc_feature 1..80: note = Artificially Synthesized Probe
  source 1..80: mol_type = other DNA

SEQ ID NO: 53190 - DNA, 80 bp, synthetic construct
  misc_feature 1..80: note = Artificially Synthesized Probe
  source 1..80: mol_type = other DNA
gttggtttgctgcacctatcaagtcgtcatttacattagatattctcctaatgctatccctcctccagccccctgacccc

SEQ ID NO: 53191 - DNA, 80 bp, synthetic construct
  misc_feature 1..80: note = Artificially Synthesized Probe
  source 1..80: mol_type = other DNA
ccaggcagccagaatgaagcccagccagagccaaaaggctttcctggaggtgtgtttgtcagtttggcaacccttggtgt

SEQ ID NO: 53192 - DNA, 80 bp, synthetic construct
  misc_feature 1..80: note = Artificially Synthesized Probe
  source 1..80: mol_type = other DNA
cagctttctcccatgggagggagttcaccttgcggcttccaaactcagccgggccgcccctaggcatgtcacctcttctc

SEQ ID NO: 53193 - DNA, 80 bp, synthetic construct; identical to SEQ ID NO: 24816
  misc_feature 1..80: note = Artificially Synthesized Probe
  source 1..80: mol_type = other DNA

SEQ ID NO: 53194 - DNA, 80 bp, synthetic construct
  misc_feature 1..80: note = Artificially Synthesized Probe
  source 1..80: mol_type = other DNA
aagatcaggagttcgagaccaccctggccaatatggtgaaaccccatctttaccagaaatacaaaaattagccggctgtg

SEQ ID NO: 53195 - DNA, 80 bp, synthetic construct
  misc_feature 1..80: note = Artificially Synthesized Probe
  source 1..80: mol_type = other DNA
gctcaaaaaaaaaaggagaaaatagtcaaagtacatttttgatgccttgtattaacctcccttttgtgtcccccaccctc

SEQ ID NO: 53196 - DNA, 80 bp, synthetic construct
  misc_feature 1..80: note = Artificially Synthesized Probe
  source 1..80: mol_type = other DNA
tttctctgccaagccaggctttgcagttttgagtatttctctgcttataggaacattttaaactagaaaccttggatctt

SEQ ID NO: 53197 - DNA, 80 bp, synthetic construct
  misc_feature 1..80: note = Artificially Synthesized Probe
  source 1..80: mol_type = other DNA
gcctgataggatgctggattaaagattggttctgaccaattcacagagtataggatgcccacaggaggaaagctgaatat

SEQ ID NO: 53198 - DNA, 80 bp, synthetic construct; identical to SEQ ID NO: 24817
  misc_feature 1..80: note = Artificially Synthesized Probe
  source 1..80: mol_type = other DNA

SEQ ID NO: 53199 - DNA, 80 bp, synthetic construct
  misc_feature 1..80: note = Artificially Synthesized Probe
  source 1..80: mol_type = other DNA
tatggctctcctcgacacagaagtcacaacccaggttggggacctaggcgtctctgcatgtgcctgtgtaggagcctgtg

SEQ ID NO: 53200 - DNA, 80 bp, synthetic construct
  misc_feature 1..80: note = Artificially Synthesized Probe
  source 1..80: mol_type = other DNA
ccacctgagttctctctacaatgtccaaagaatgggaccagtaaaagggggccagggcaattctcccaccccctggaaaa

SEQ ID NO: 53201 - DNA, 80 bp, synthetic construct
  misc_feature 1..80: note = Artificially Synthesized Probe
  source 1..80: mol_type = other DNA
tttttttctccatcatctgtgcttgctcttccatctttactcttgatagcctcattgcctgtctcctcagatagccttgg

SEQ ID NO: 53202 - DNA, 80 bp, synthetic construct
  misc_feature 1..80: note = Artificially Synthesized Probe
  source 1..80: mol_type = other DNA
ctcggctggttagcataggaggtcacactatctgttctggtgcaggaattgtccagggaattacagtcaaggctgcaatg

SEQ ID NO: 53203 - DNA, 80 bp, synthetic construct; identical to SEQ ID NO: 24818
  misc_feature 1..80: note = Artificially Synthesized Probe
  source 1..80: mol_type = other DNA

SEQ ID NO: 53204 - DNA, 80 bp, synthetic construct
  misc_feature 1..80: note = Artificially Synthesized Probe
  source 1..80: mol_type = other DNA
cagcctccaatttagtgggaacttgaactgaactgtgctaatttattacttggacaccaaagagttattattttgtggag

SEQ ID NO: 53205 - DNA, 80 bp, synthetic construct
  misc_feature 1..80: note = Artificially Synthesized Probe
  source 1..80: mol_type = other DNA
ttcctttttctgtgagtaccgtgtcctacgaatttacaggggatggtcagagaaatggtgacaaagaaaaggaggtttgt

SEQ ID NO: 53206 - DNA, 80 bp, synthetic construct; identical to SEQ ID NO: 24819
  misc_feature 1..80: note = Artificially Synthesized Probe
  source 1..80: mol_type = other DNA

SEQ ID NO: 53207 - DNA, 80 bp, synthetic construct
  misc_feature 1..80: note = Artificially Synthesized Probe
  source 1..80: mol_type = other DNA
gtttccttgattctaagcatatcttcacattttaacccatgaaacagatctacatcttacaatggatatttagtgttttt

SEQ ID NO: 53208 - DNA, 80 bp, synthetic construct
  misc_feature 1..80: note = Artificially Synthesized Probe
  source 1..80: mol_type = other DNA
aactcaggctgattgaaggcagcttatttgtttccccaaacacttggctccaaacacagagggctccctgctgagtgatg

SEQ ID NO: 53209 - DNA, 80 bp, synthetic construct
  misc_feature 1..80: note = Artificially Synthesized Probe
  source 1..80: mol_type = other DNA
ttggacaaggatgctggctcccaaaacaggggcccaaataacttgaattctcaaaagctatttttatctttctcagcccc

SEQ ID NO: 53210 - DNA, 80 bp, synthetic construct
  misc_feature 1..80: note = Artificially Synthesized Probe
  source 1..80: mol_type = other DNA
ttaaaggcagacacttttaattagacaaaagcaaagggaaagaagaatagaagtacagttaccgaaaaggccccaagatc

SEQ ID NO: 53211 - DNA, 80 bp, synthetic construct; identical to SEQ ID NO: 24820
  misc_feature 1..80: note = Artificially Synthesized Probe
  source 1..80: mol_type = other DNA

SEQ ID NO: 53212 - DNA, 80 bp, synthetic construct
  misc_feature 1..80: note = Artificially Synthesized Probe
  source 1..80: mol_type = other DNA
acctgcctccagtggccagtcccttataaactggagatcagtgagatagaaagtcactcatagatgccttccaccttcct

SEQ ID NO: 53213 - DNA, 80 bp, synthetic construct
  misc_feature 1..80: note = Artificially Synthesized Probe
  source 1..80: mol_type = other DNA
ctcccggcatcatgcctggctaattttttttgtatttttagtagagacggggtttcaccatgttggccaggctggtcttg

SEQ ID NO: 53214 - DNA, 80 bp, synthetic construct
  misc_feature 1..80: note = Artificially Synthesized Probe
  source 1..80: mol_type = other DNA
aattatttgggggaatttatttatttcacagcagcaggaattatttatctagcctaggctgccagacacttctgagcatc

SEQ ID NO: 53215 - DNA, 80 bp, synthetic construct; identical to SEQ ID NO: 24821
  misc_feature 1..80: note = Artificially Synthesized Probe
  source 1..80: mol_type = other DNA

SEQ ID NO: 53216 - DNA, 80 bp, synthetic construct
  misc_feature 1..80: note = Artificially Synthesized Probe
  source 1..80: mol_type = other DNA
tcagcacagatctcagtattactaccaatcacagcacttagaagtacctaaaatcaaacaaatgcacaaacagaagaatt

SEQ ID NO: 53217 - DNA, 80 bp, synthetic construct
  misc_feature 1..80: note = Artificially Synthesized Probe
  source 1..80: mol_type = other DNA
gaatttagaactaatgttgttggggaaatttccattttgagataagctacaggataattattgccttgtcctgcttttta

SEQ ID NO: 53218 - DNA, 80 bp, synthetic construct; identical to SEQ ID NO: 24782
  misc_feature 1..80: note = Artificially Synthesized Probe
  source 1..80: mol_type = other DNA

SEQ ID NO: 53219 - DNA, 80 bp, synthetic construct
  misc_feature 1..80: note = Artificially Synthesized Probe
  source 1..80: mol_type = other DNA
gtaatgaatgccatgcagcaatttcagttttcaagagcgaggcctgtggaaagtcaagtgagtaaagaccaggcaatgtg

SEQ ID NO: 53220 - DNA, 80 bp, synthetic construct
  misc_feature 1..80: note = Artificially Synthesized Probe
  source 1..80: mol_type = other DNA
tcactgcaagctctgcctcccaggttcacgccattctcatgcctcagcctcccgagtagctgggactacaggcgcccgcc

SEQ ID NO: 53221 - DNA, 80 bp, synthetic construct; identical to SEQ ID NO: 24822
  misc_feature 1..80: note = Artificially Synthesized Probe
  source 1..80: mol_type = other DNA

SEQ ID NO: 53222 - DNA, 80 bp, synthetic construct
  misc_feature 1..80: note = Artificially Synthesized Probe
  source 1..80: mol_type = other DNA
gttccaaggacacaaattccaaaggggattttctgttcaacagataattctgttggattggattattactactttccagc

SEQ ID NO: 53223 - DNA, 80 bp, synthetic construct
  misc_feature 1..80: note = Artificially Synthesized Probe
  source 1..80: mol_type = other DNA
gctggctttcagtcatcattttggacagttctgagcttctgctttattatcggatttatttgtctgtctgcacatcccct

SEQ ID NO: 53224 - DNA, 80 bp, synthetic construct; identical to SEQ ID NO: 24823
  misc_feature 1..80: note = Artificially Synthesized Probe
  source 1..80: mol_type = other DNA

SEQ ID NO: 53225 - DNA, 80 bp, synthetic construct
  misc_feature 1..80: note = Artificially Synthesized Probe
  source 1..80: mol_type = other DNA
ctcacaccgacatataaatgcacatacacatacattttaggcatagctatttatttttaattctttatgtgatacccaat

SEQ ID NO: 53226 - DNA, 80 bp, synthetic construct
  misc_feature 1..80: note = Artificially Synthesized Probe
  source 1..80: mol_type = other DNA
agaaaggcaagttaatacccataaagaacttcgcactccctcagttgaaggatgctctataaatacaaagcatcgttata

SEQ ID NO: 53227 - DNA, 80 bp, synthetic construct
  misc_feature 1..80: note = Artificially Synthesized Probe
  source 1..80: mol_type = other DNA
accatcaatcagtttaattcgaagactcctcaaagtgagcctcctggtagcccagcaggaactgttttagagtcttcttc

SEQ ID NO: 53228 - DNA, 80 bp, synthetic construct; identical to SEQ ID NO: 24824
  misc_feature 1..80: note = Artificially Synthesized Probe
  source 1..80: mol_type = other DNA

SEQ ID NO: 53229 - DNA, 80 bp, synthetic construct
  misc_feature 1..80: note = Artificially Synthesized Probe
  source 1..80: mol_type = other DNA
ggaaaggaagctacattcccaaacatagagaagagcaaactgcaataaaaaaaaaaaaaacaggagttcctaccactaaa

SEQ ID NO: 53230 - DNA, 80 bp, synthetic construct
  misc_feature 1..80: note = Artificially Synthesized Probe
  source 1..80: mol_type = other DNA
cggctcactgcagccttgacctcctgtgctcaagcgatcctctagcttcagcatcccaagtagcgaggaacacaggcaca

SEQ ID NO: 53231 - DNA, 80 bp, synthetic construct
  misc_feature 1..80: note = Artificially Synthesized Probe
  source 1..80: mol_type = other DNA
agctagcactacaggtgtgtgccacagtgcccggctaatttttgtatttttagtagagacagggtttcaccatgttggcc

SEQ ID NO: 53232 - DNA, 80 bp, synthetic construct
  misc_feature 1..80: note = Artificially Synthesized Probe
  source 1..80: mol_type = other DNA
aaggagttgtcttggaagatggagacgtatttgattttcagttgtaagatccagttaaacaagggaattcactggagaag

SEQ ID NO: 53233 - DNA, 80 bp, synthetic construct; identical to SEQ ID NO: 24825
  misc_feature 1..80: note = Artificially Synthesized Probe
  source 1..80: mol_type = other DNA

SEQ ID NO: 53234 - DNA, 80 bp, synthetic construct
  misc_feature 1..80: note = Artificially Synthesized Probe
  source 1..80: mol_type = other DNA
agactcaggccttggacctcttctctaatcttacacacttcttttgtgatttcatctattcattctcggtactttatttt

SEQ ID NO: 53235 - DNA, 80 bp, synthetic construct
  misc_feature 1..80: note = Artificially Synthesized Probe
  source 1..80: mol_type = other DNA
cccagctaatttttgtatttttagtagagatggggtttcaccatgttggccaggttggtcttgaactcctgacctcaggt

SEQ ID NO: 53236 - DNA, 80 bp, synthetic construct
  misc_feature 1..80: note = Artificially Synthesized Probe
  source 1..80: mol_type = other DNA
tcaatatctaacggacaactcagctctacttgtcctaagcagaactccttatttctcccccagcaaacctgccttttcca

SEQ ID NO: 53237 - DNA, 80 bp, synthetic construct
  misc_feature 1..80: note = Artificially Synthesized Probe
  source 1..80: mol_type = other DNA
gtggaaaagaaaataaaaattagccaaaaaccaaccactcaaacataatctttaacattttgctatattttcttctaatg

SEQ ID NO: 53238 - DNA, 80 bp, synthetic construct; identical to SEQ ID NO: 24826
  misc_feature 1..80: note = Artificially Synthesized Probe
  source 1..80: mol_type = other DNA

SEQ ID NO: 53239 - DNA, 80 bp, synthetic construct
  misc_feature 1..80: note = Artificially Synthesized Probe
  source 1..80: mol_type = other DNA
acctccacctcctgggttcaagcaactctcctgcctcagcttcccgagtagctgggactacaggcgcccatcaccacgcc

SEQ ID NO: 53240 - DNA, 80 bp, synthetic construct
  misc_feature 1..80: note = Artificially Synthesized Probe
  source 1..80: mol_type = other DNA
tgagccactgcgctcagcgtgattatttcttcagaataaattaagacacatggaaacatgtaccctaaaagacaaatata

SEQ ID NO: 53241 - DNA, 80 bp, synthetic construct
  misc_feature 1..80: note = Artificially Synthesized Probe
  source 1..80: mol_type = other DNA
ctgggctatttaaacttagggctgacttactttccagaaagacaaaaccaatttacattcagcagtttttgagagactct

SEQ ID NO: 53242 - DNA, 80 bp, synthetic construct
  misc_feature 1..80: note = Artificially Synthesized Probe
  source 1..80: mol_type = other DNA
cagaattggatcaactcacttttcaaaccagccatccaggtcacacagcctgtatatatgtcagctgaccttgaaacttg

SEQ ID NO: 53243 - DNA, 80 bp, synthetic construct; identical to SEQ ID NO: 24827
  misc_feature 1..80: note = Artificially Synthesized Probe
  source 1..80: mol_type = other DNA

SEQ ID NO: 53244 - DNA, 80 bp, synthetic construct
  misc_feature 1..80: note = Artificially Synthesized Probe
  source 1..80: mol_type = other DNA
gccactacactcggctttatttttcttttgatgtaccctcttacaaagtgatttcttttttttttctttctgtttctttc

SEQ ID NO: 53245 - DNA, 80 bp, synthetic construct
  misc_feature 1..80: note = Artificially Synthesized Probe
  source 1..80: mol_type = other DNA
ccaactaattttttgtatttttagtagagatggggtttcatcaagttggccaggctggtctcaaactcctgacctcaggt

SEQ ID NO: 53246 - DNA, 80 bp, synthetic construct
  misc_feature 1..80: note = Artificially Synthesized Probe
  source 1..80: mol_type = other DNA
tactgtgaatattttccctctttaccatctaccttttatttggtgtctttggcacatagaagttgaaatttaagtcatca

SEQ ID NO: 53247 - DNA, 80 bp, synthetic construct; identical to SEQ ID NO: 24828
  misc_feature 1..80: note = Artificially Synthesized Probe
  source 1..80: mol_type = other DNA

SEQ ID NO: 53248 - DNA, 80 bp, synthetic construct
  misc_feature 1..80: note = Artificially Synthesized Probe
  source 1..80: mol_type = other DNA
gtatttatcacagttttctttaaagaagtaaaatcaaagtgggcaaaggcatctgttggaagcgctctaaatatgcagat

SEQ ID NO: 53249 - DNA, 80 bp, synthetic construct
  misc_feature 1..80: note = Artificially Synthesized Probe
  source 1..80: mol_type = other DNA
atggcctagagaggattctttgtgtgtccacacctgtgttgcctgcatgaaagatcagtgaacatttgctagtgtgtgga

SEQ ID NO: 53250 - DNA, 80 bp, synthetic construct; identical to SEQ ID NO: 24778
  misc_feature 1..80: note = Artificially Synthesized Probe
  source 1..80: mol_type = other DNA

SEQ ID NO: 53251 - DNA, 80 bp, synthetic construct
  misc_feature 1..80: note = Artificially Synthesized Probe
  source 1..80: mol_type = other DNA
cacacacacacacacccatctgtagtcttacagggagatctattctgaggcctttccttgaagagctgtggttctgtgtt

SEQ ID NO: 53252 - DNA, 80 bp, synthetic construct; identical to SEQ ID NO: 24829
  misc_feature 1..80: note = Artificially Synthesized Probe
  source 1..80: mol_type = other DNA

SEQ ID NO: 53253 - DNA, 80 bp, synthetic construct
  misc_feature 1..80: note = Artificially Synthesized Probe
  source 1..80: mol_type = other DNA
cttctccttatgagttgcctgtgaattgttaaatatgcctagtgatgatgtgcgtggctcctgttggaatcccaaatttt

SEQ ID NO: 53254 - DNA, 80 bp, synthetic construct
  misc_feature 1..80: note = Artificially Synthesized Probe
  source 1..80: mol_type = other DNA
ttcgtgcagaactgggagtcctaggtcttttctgctctgccacaggcaagtccacgttctctctttcagccaagggtcac

SEQ ID NO: 53255 - DNA, 80 bp, synthetic construct
  misc_feature 1..80: note = Artificially Synthesized Probe
  source 1..80: mol_type = other DNA
ctggtcaccagcctccttgtcacactgactcacggatctgctagctctggccttggaaattaaccactacactctcatct

SEQ ID NO: 53256 - DNA, 80 bp, synthetic construct
  misc_feature 1..80: note = Artificially Synthesized Probe
  source 1..80: mol_type = other DNA
ccagagataccccacttccttcttcctaaatatttctctctgatttcattcgcaagagaaatctgcctaattatagatgg

SEQ ID NO: 53257 - DNA, 80 bp, synthetic construct
  misc_feature 1..80: note = Artificially Synthesized Probe
  source 1..80: mol_type = other DNA
ccagcctcaggcaaagttactgcctgagactttaaagtcagattttaatctccttaatctcctttcccttccacccaccc

SEQ ID NO: 53258 - DNA, 80 bp, synthetic construct; identical to SEQ ID NO: 24830
  misc_feature 1..80: note = Artificially Synthesized Probe
  source 1..80: mol_type = other DNA

SEQ ID NO: 53259 - DNA, 80 bp, synthetic construct
  misc_feature 1..80: note = Artificially Synthesized Probe
  source 1..80: mol_type = other DNA
tgagcatataagaaaaacgactgccatgggttaaaactgtctttttttttttttttttttttgacggagtcttgctctgt

SEQ ID NO: 53260 - DNA, 80 bp, synthetic construct
  misc_feature 1..80: note = Artificially Synthesized Probe
  source 1..80: mol_type = other DNA
aagttggccaggctggtctccaactcctgacctcaggtgatccacccgcctcagcctcccgaagtgctaggattacaggt

SEQ ID NO: 53261 - DNA, 80 bp, synthetic construct; identical to SEQ ID NO: 24831
  misc_feature 1..80: note = Artificially Synthesized Probe
  source 1..80: mol_type = other DNA

SEQ ID NO: 53262 - DNA, 80 bp, synthetic construct
  misc_feature 1..80: note = Artificially Synthesized Probe
  source 1..80: mol_type = other DNA
ataaagggaagaaatcgaacacttatcctgggcatttatcagggtaaccaaatagttaacaagggtaagtttctctctat

SEQ ID NO: 53263 - DNA, 80 bp, synthetic construct
  misc_feature 1..80: note = Artificially Synthesized Probe
  source 1..80: mol_type = other DNA
cctcctgaggaaagtacaataaccaccttgaaatgttcttgctacattaaacctgaatcccatcaacctccagattcaac

SEQ ID NO: 53264 - DNA, 80 bp, synthetic construct
  misc_feature 1..80: note = Artificially Synthesized Probe
  source 1..80: mol_type = other DNA
aattctagatatgcaagagacagagaaactgtctttgttggataaaatgaactgtgaagtaaaaaacatgagacagagaa

SEQ ID NO: 53265 - DNA, 80 bp, synthetic construct; identical to SEQ ID NO: 24783
  misc_feature 1..80: note = Artificially Synthesized Probe
  source 1..80: mol_type = other DNA

SEQ ID NO: 53266 - DNA, 80 bp, synthetic construct; identical to SEQ ID NO: 24832
  misc_feature 1..80: note = Artificially Synthesized Probe
  source 1..80: mol_type = other DNA

SEQ ID NO: 53267 - DNA, 80 bp, synthetic construct
  misc_feature 1..80: note = Artificially Synthesized Probe
  source 1..80: mol_type = other DNA
actctccccaagccctaccaagcaaatagaatgagcctttcagagagctcttggctctgtgtcatgtcttacttagctgc

SEQ ID NO: 53268 - DNA, 80 bp, synthetic construct
  misc_feature 1..80: note = Artificially Synthesized Probe
  source 1..80: mol_type = other DNA
aacaattcatagtgataataatagctagcagccaggtatggtggctcacgcctgtaatcccagcactttgggaggcctag

SEQ ID NO: 53269 - DNA, 80 bp, synthetic construct
  misc_feature 1..80: note = Artificially Synthesized Probe
  source 1..80: mol_type = other DNA
attgtgccactgcactccagcctgggcaagagtgagactgtgtctcaaaataataataataataacatctaacacatata

SEQ ID NO: 53270 - DNA, 80 bp, synthetic construct
  misc_feature 1..80: note = Artificially Synthesized Probe
  source 1..80: mol_type = other DNA
aggggcaaagatgtaaaggttacagtgccaaatttgtagtatttgttcttatcatacatagatggaagaggctattggcc

SEQ ID NO: 53271 - DNA, 80 bp, synthetic construct; identical to SEQ ID NO: 24833
  misc_feature 1..80: note = Artificially Synthesized Probe
  source 1..80: mol_type = other DNA

SEQ ID NO: 53272 - DNA, 80 bp, synthetic construct
  misc_feature 1..80: note = Artificially Synthesized Probe
  source 1..80: mol_type = other DNA
agaagaaagacaaacaaagctgcttttctttttttccaaacagacccagagatggaagatggtcctgacttgaaagtgcc

SEQ ID NO: 53273 - DNA, 80 bp, synthetic construct
  misc_feature 1..80: note = Artificially Synthesized Probe
  source 1..80: mol_type = other DNA
agatcgtagctcactgcagccttgacctcctgggctcaagtgatcctcccacctcagcctcccgagtagctagaactaca

SEQ ID NO: 53274 - DNA, 80 bp, synthetic construct; identical to SEQ ID NO: 24834
  misc_feature 1..80: note = Artificially Synthesized Probe
  source 1..80: mol_type = other DNA

SEQ ID NO: 53275 - DNA, 80 bp, synthetic construct
  misc_feature 1..80: note = Artificially Synthesized Probe
  source 1..80: mol_type = other DNA
ccaggcaaagaatcaaaaggccagacgagccagaccatagagctgtgaggggctgaagaatgtggagaagcactgtgttt

SEQ ID NO: 53276 - DNA, 80 bp, synthetic construct
  misc_feature 1..80: note = Artificially Synthesized Probe
  source 1..80: mol_type = other DNA
tgggcccatcctgacacattgtattgcaccaagccccactctctctgtctaaggcacagccacccagccgggatgcccgg

SEQ ID NO: 53277 - DNA, 80 bp, synthetic construct
  misc_feature 1..80: note = Artificially Synthesized Probe
  source 1..80: mol_type = other DNA
atggaagaaccagacctgcctgagtacctaacatggcaaagggccttcggaacatgaagaatagcagagataagaatgtt

SEQ ID NO: 53278 - DNA, 80 bp, synthetic construct
  misc_feature 1..80: note = Artificially Synthesized Probe
  source 1..80: mol_type = other DNA
aagcttagaaaagacttgaggactttaaagctgctttcctatttgaaaggctgtctcatggaaaagagattggacttgtg

SEQ ID NO: 53279 - DNA, 80 bp, synthetic construct; identical to SEQ ID NO: 24835
  misc_feature 1..80: note = Artificially Synthesized Probe
  source 1..80: mol_type = other DNA

SEQ ID NO: 53280 - DNA, 80 bp, synthetic construct
  misc_feature 1..80: note = Artificially Synthesized Probe
  source 1..80: mol_type = other DNA
ttttggaagaatactcgaagaaaataccccaaaatattcacagtggtaatttctgaacagttggattatgagtgatttaa

SEQ ID NO: 53281 - DNA, 80 bp, synthetic construct
  misc_feature 1..80: note = Artificially Synthesized Probe
  source 1..80: mol_type = other DNA
agtattcaaactcacatagctaatggacagttgggttattcatactgtttaatcccaaccatgtaaagaaagtagcacgt

SEQ ID NO: 53282 - DNA, 80 bp, synthetic construct
  misc_feature 1..80: note = Artificially Synthesized Probe
  source 1..80: mol_type = other DNA
tgaaaattaaactaaaaagacatttttaaaaaaggagttcagtccagattagcttgaagggccccatagacctgctgatc

SEQ ID NO: 53283 - DNA, 80 bp, synthetic construct
  misc_feature 1..80: note = Artificially Synthesized Probe
  source 1..80: mol_type = other DNA
agacctccccgctccccatcatgtggcttttagggcctcatattctggtcacctcactttccacctgtgtccccagtcca

SEQ ID NO: 53284 - DNA, 80 bp, synthetic construct; identical to SEQ ID NO: 24836
  misc_feature 1..80: note = Artificially Synthesized Probe
  source 1..80: mol_type = other DNA

SEQ ID NO: 53285 - DNA, 80 bp, synthetic construct
  misc_feature 1..80: note = Artificially Synthesized Probe
  source 1..80: mol_type = other DNA
ttccaaaataggccaagaaccgattaggccgacgttctttagatctggaaggatagtagacctgtgagttaaaggtgatt

SEQ ID NO: 53286 - DNA, 80 bp, synthetic construct
  misc_feature 1..80: note = Artificially Synthesized Probe
  source 1..80: mol_type = other DNA
aatagggttaatttagttggagaaggagtggagatgaggccacacaagtctttaatacaccaagaaaaactgaggcagca

SEQ ID NO: 53287 - DNA, 80 bp, synthetic construct; identical to SEQ ID NO: 24837
  misc_feature 1..80: note = Artificially Synthesized Probe
  source 1..80: mol_type = other DNA

SEQ ID NO: 53288 - DNA, 80 bp, synthetic construct
  misc_feature 1..80: note = Artificially Synthesized Probe
  source 1..80: mol_type = other DNA
ctaaattgccattacaagcttgactgctgaaataaagcttagtaaagctgcattttcactgaagcatttattatgcaaaa

SEQ ID NO: 53289 - DNA, 80 bp, synthetic construct
  misc_feature 1..80: note = Artificially Synthesized Probe
  source 1..80: mol_type = other DNA
aattatttggttacaagtaattcatttaattcatgacaagctacaatttcttgacttttattgtgtattcttgggaacat

SEQ ID NO: 53290 - DNA, 80 bp, synthetic construct
  misc_feature 1..80: note = Artificially Synthesized Probe
  source 1..80: mol_type = other DNA
atcccagcactttgggaggctgaggtgggtagattgctggagcctaggaatttgaggtcagcctgggcaacatggtgaaa

SEQ ID NO: 53291 - DNA, 80 bp, synthetic construct
  misc_feature 1..80: note = Artificially Synthesized Probe
  source 1..80: mol_type = other DNA
gagagactccctctcaaaaacaaacaaacaaaaagaggcactgaaaggaaactgtcatttatagtagttagaatactaaa

SEQ ID NO: 53292 - DNA, 80 bp, synthetic construct; identical to SEQ ID NO: 24838
  misc_feature 1..80: note = Artificially Synthesized Probe
  source 1..80: mol_type = other DNA

SEQ ID NO: 53293 - DNA, 80 bp, synthetic construct
  misc_feature 1..80: note = Artificially Synthesized Probe
  source 1..80: mol_type = other DNA
aaaagcagtggtggggtggggcggtcacaggaccatacctgtcactgcattcagttctgtgagggtggccagggactcct

SEQ ID NO: 53294 - DNA, 80 bp, synthetic construct
  misc_feature 1..80: note = Artificially Synthesized Probe
  source 1..80: mol_type = other DNA
agaacctgcccactccctcttctgcctctcaaccaagacttctggggacctttctttttaccctctggacaactcttaga

SEQ ID NO: 53295 - DNA, 80 bp, synthetic construct
  misc_feature 1..80: note = Artificially Synthesized Probe
  source 1..80: mol_type = other DNA
gatcaagctggcatctcctttctcagtgacctttctgaacctaaagctaccaggcccataaattcccccctggtgctcac

SEQ ID NO: 53296 - DNA, 80 bp, synthetic construct
  misc_feature 1..80: note = Artificially Synthesized Probe
  source 1..80: mol_type = other DNA
gtgtcttccaaacacacttctgcactaagagttgccactcccttcctttctcccctcagcctctccagaagcaaagccca

SEQ ID NO: 53297 - DNA, 80 bp, synthetic construct; identical to SEQ ID NO: 24839
  misc_feature 1..80: note = Artificially Synthesized Probe
  source 1..80: mol_type = other DNA

SEQ ID NO: 53298 - DNA, 80 bp, synthetic construct
  misc_feature 1..80: note = Artificially Synthesized Probe
  source 1..80: mol_type = other DNA
ggctcatggttttggccctctctgaggtgcctaatctgatccagtaaccacacaaactgggctgcaaaggaactaaccaa

SEQ ID NO: 53299 - DNA, 80 bp, synthetic construct
  misc_feature 1..80: note = Artificially Synthesized Probe
  source 1..80: mol_type = other DNA
tcccatgtgttgggtcttcctgcgaggccttcacaaagatgattttgtcattcgctgaaagcgtgaagtgaatcaacggc

SEQ ID NO: 53300 - DNA, 80 bp, synthetic construct
  misc_feature 1..80: note = Artificially Synthesized Probe
  source 1..80: mol_type = other DNA
aattctcctgcctcagcctcccgagtagctggagttataggcatgcgccaccatgcccggctaattttgtatttttagta

SEQ ID NO: 53301 - DNA, 80 bp, synthetic construct; identical to SEQ ID NO: 24840
  misc_feature 1..80: note = Artificially Synthesized Probe
  source 1..80: mol_type = other DNA

SEQ ID NO: 53302 - DNA, 80 bp, synthetic construct
  misc_feature 1..80: note = Artificially Synthesized Probe
  source 1..80: mol_type = other DNA
atcatctcctatgttcctaacactggttataaatgtttatttcatttaatcctcagaactggctcagaaaataggccaca

SEQ ID NO: 53303 - DNA, 80 bp, synthetic construct
  misc_feature 1..80: note = Artificially Synthesized Probe
  source 1..80: mol_type = other DNA
gacgatgacaataactatgaaaggattttatatttgcacagcattttgcagcagtgcccctcagctttgaacccagggca

SEQ ID NO: 53304 - DNA, 80 bp, synthetic construct
  misc_feature 1..80: note = Artificially Synthesized Probe
  source 1..80: mol_type = other DNA
gtgtcccactgctctgccaccgctggtgccgtgtgggagtcaaggctggggagcctgaatggtgggccaggccgggggcc

SEQ ID NO: 53305 - DNA, 80 bp, synthetic construct; identical to SEQ ID NO: 24841
  misc_feature 1..80: note = Artificially Synthesized Probe
  source 1..80: mol_type = other DNA

SEQ ID NO: 53306 - DNA, 80 bp, synthetic construct
  misc_feature 1..80: note = Artificially Synthesized Probe
  source 1..80: mol_type = other DNA
ggagcattttaagagccctgttcagccaggcgcggtggctcacgcctgtgatcccagcactttgggaggccaaggcgggc

SEQ ID NO: 53307 - DNA, 80 bp, synthetic construct
  misc_feature 1..80: note = Artificially Synthesized Probe
  source 1..80: mol_type = other DNA
ggttgcagtgagccgagatcgcgccaccgcagtccagcccggcgacagagcgagactctgtctcaaaaacaaaacaaaac

SEQ ID NO: 53308 - DNA, 80 bp, synthetic construct
  misc_feature 1..80: note = Artificially Synthesized Probe
  source 1..80: mol_type = other DNA
ttcagaggtgaaagcctcacattggcagaacccaggtatttggtatctagggaacccaggaaataacaatcaggccaaac

SEQ ID NO: 53309 - DNA, 80 bp, synthetic construct
  misc_feature 1..80: note = Artificially Synthesized Probe
  source 1..80: mol_type = other DNA
ttcaatggtgcggcacagaggcctgaggcagggaggctcccgctgccctcgcaggccctggctgaccctcccctgcccgc

SEQ ID NO: 53310 - DNA, 80 bp, synthetic construct
  misc_feature 1..80: note = Artificially Synthesized Probe
  source 1..80: mol_type = other DNA
ggaagatctaaggggggcatttgaaaatgaaaagggagcttgcagggagagcagccaactcagcccatccaagagcagac

SEQ ID NO: 53311 - DNA, 80 bp, synthetic construct; identical to SEQ ID NO: 24842
  misc_feature 1..80: note = Artificially Synthesized Probe
  source 1..80: mol_type = other DNA

SEQ ID NO: 53312 - DNA, 80 bp, synthetic construct
  misc_feature 1..80: note = Artificially Synthesized Probe
  source 1..80: mol_type = other DNA
tggttaacgccagggcagttgggaggtaaattaaggggcacaagctcaggaatccctcctttcagtcctgtcaccagccc

SEQ ID NO: 53313 - DNA, 80 bp, synthetic construct
  misc_feature 1..80: note = Artificially Synthesized Probe
  source 1..80: mol_type = other DNA
ttgaacaaccaggtaattaactgaaagaaaacgactggaggctggggaggggagggttaagagtcattgtgggccgcctt

SEQ ID NO: 53314 - DNA, 80 bp, synthetic construct; identical to SEQ ID NO: 24843
  misc_feature 1..80: note = Artificially Synthesized Probe
  source 1..80: mol_type = other DNA

SEQ ID NO: 53315 - DNA, 80 bp, synthetic construct
  misc_feature 1..80: note = Artificially Synthesized Probe
  source 1..80: mol_type = other DNA
ggactggacaatttcggagtgttgttgtgaagatcagctgagactgtttatgtgaaaatactttgtaaactgaaaaaaat

SEQ ID NO: 53316 - DNA, 80 bp, synthetic construct
  misc_feature 1..80: note = Artificially Synthesized Probe
  source 1..80: mol_type = other DNA
ctgctaccacatcctttcactctggcttatggggcttgctgcctgctgaggggtcagcagagaaaccccctgcaaccccc

SEQ ID NO: 53317 - DNA, 80 bp, synthetic construct
  misc_feature 1..80: note = Artificially Synthesized Probe
  source 1..80: mol_type = other DNA
aagaccagtctggccaagatggtgcaaccccgtctctactaaaaacacaaaaattagccaggcgtggtggagggtgcctg

SEQ ID NO: 53318 - DNA, 80 bp, synthetic construct
  misc_feature 1..80: note = Artificially Synthesized Probe
  source 1..80: mol_type = other DNA
ttcacatctataattccagcactttgggaggccgaggtgtgtggatcacggggtcaggagttcaagaccagcctggccaa

SEQ ID NO: 53319 - DNA, 80 bp, synthetic construct; identical to SEQ ID NO: 24844
  misc_feature 1..80: note = Artificially Synthesized Probe
  source 1..80: mol_type = other DNA

SEQ ID NO: 53320 - DNA, 80 bp, synthetic construct; identical to SEQ ID NO: 24784
  misc_feature 1..80: note = Artificially Synthesized Probe
  source 1..80: mol_type = other DNA

SEQ ID NO: 53321 - DNA, 80 bp, synthetic construct
  misc_feature 1..80: note = Artificially Synthesized Probe
  source 1..80: mol_type = other DNA
tccgatctcagtctatgaggcaggcacaacccaccattccaacaacactaattgagtgccatttcatgacacaacagcat

SEQ ID NO: 53322 - DNA, 80 bp, synthetic construct
  misc_feature 1..80: note = Artificially Synthesized Probe
  source 1..80: mol_type = other DNA
tcaatccttctgcctcagcctcctgagtagctgggattacaagtatctaccaccacatctgactaatttatttttagaat

SEQ ID NO: 53323 - DNA, 80 bp, synthetic construct
  misc_feature 1..80: note = Artificially Synthesized Probe
  source 1..80: mol_type = other DNA
ggaactcattcaaactcagtttctccagctatcacatggaaataacaattgttaccccaaaaggtttgttaaaggcacaa

SEQ ID NO: 53324 - DNA, 80 bp, synthetic construct; identical to SEQ ID NO: 24845
  misc_feature 1..80: note = Artificially Synthesized Probe
  source 1..80: mol_type = other DNA

SEQ ID NO: 53325 - DNA, 80 bp, synthetic construct
  misc_feature 1..80: note = Artificially Synthesized Probe
  source 1..80: mol_type = other DNA
tgggatgaggaccctgatcagacactgaggggaaccggatattgaaggttgatggttgtgctcaactaactgggcagagt

SEQ ID NO: 53326 - DNA, 80 bp, synthetic construct
  misc_feature 1..80: note = Artificially Synthesized Probe
  source 1..80: mol_type = other DNA
agagatttttgaaaaatattctctctgatggagcccaacaagtatttccctttctgcatgtgcgtgcgtgtttttatgtc

SEQ ID NO: 53327 - DNA, 80 bp, synthetic construct
  misc_feature 1..80: note = Artificially Synthesized Probe
  source 1..80: mol_type = other DNA
cgtttgattcattagtccacacctcgtggagaggtaacttgaaaggcagcgccgagaagcacgtaatggatttgtgaggt

SEQ ID NO: 53328 - DNA, 80 bp, synthetic construct; identical to SEQ ID NO: 24846
  misc_feature 1..80: note = Artificially Synthesized Probe
  source 1..80: mol_type = other DNA

SEQ ID NO: 53329 - DNA, 80 bp, synthetic construct
  misc_feature 1..80: note = Artificially Synthesized Probe
  source 1..80: mol_type = other DNA
ctttgtgggtaggtgacactctcattgagatagcagcaatgccctatttagtggtctctcagctttctttctattcatct

SEQ ID NO: 53330 - DNA, 80 bp, synthetic construct
  misc_feature 1..80: note = Artificially Synthesized Probe
  source 1..80: mol_type = other DNA
aaacccagagtgacatagcgcagggacttggctcacttttctgagatctgtaaaatgtgatgtgactggctctcagaaag

SEQ ID NO: 53331 - DNA, 80 bp, synthetic construct; identical to SEQ ID NO: 24847
  misc_feature 1..80: note = Artificially Synthesized Probe
  source 1..80: mol_type = other DNA

SEQ ID NO: 53332 - DNA, 80 bp, synthetic construct
  misc_feature 1..80: note = Artificially Synthesized Probe
  source 1..80: mol_type = other DNA
acagtctgtgtgtgaaggtttggagctaaatataaccaaagcatcctgtacataaaggggaatacttcagtggctgagaa

SEQ ID NO: 53333 - DNA, 80 bp, synthetic construct
  misc_feature 1..80: note = Artificially Synthesized Probe
  source 1..80: mol_type = other DNA
tttgtgtccttgctagtacacagcctccctgtgaaagcaagcaatgtccccaagcaaatccatatatccgggacctacgg

SEQ ID NO: 53334 - DNA, 80 bp, synthetic construct
  misc_feature 1..80: note = Artificially Synthesized Probe
  source 1..80: mol_type = other DNA
ttaatttttcttctctcattctttctatcttcccctctctatctctttcttcctttagaaattatatttgaggccgggcg

SEQ ID NO: 53335 - DNA, 80 bp, synthetic construct
  misc_feature 1..80: note = Artificially Synthesized Probe
  source 1..80: mol_type = other DNA
actccggaggctgaggcaggagaatcccttgaacctgcgaggcggaggttgcagcgagccgagatcgcgccactgcactc

SEQ ID NO: 53336 - DNA, 80 bp, synthetic construct; identical to SEQ ID NO: 24848
  misc_feature 1..80: note = Artificially Synthesized Probe
  source 1..80: mol_type = other DNA

SEQ ID NO: 53337 - DNA, 80 bp, synthetic construct
  misc_feature 1..80: note = Artificially Synthesized Probe
  source 1..80: mol_type = other DNA
aagaactcatataagcaggctaaaattaatttgttaatttgtcacatttaaaatagtctattttattctatatttacaat

SEQ ID NO: 53338 - DNA, 80 bp, synthetic construct
  misc_feature 1..80: note = Artificially Synthesized Probe
  source 1..80: mol_type = other DNA
agctgttgtggaaaacggtttggtggttcctcagaaagttaaaaatagaactactggccgggcgcagtggctcatgcctg

SEQ ID NO: 53339 - DNA, 80 bp, synthetic construct
  misc_feature 1..80: note = Artificially Synthesized Probe
  source 1..80: mol_type = other DNA
gcaagagaattgcttgaagccaggaagggaggttgcagtgagccaagatcatgccattgcactccagcctgggcaacaag

SEQ ID NO: 53340 - DNA, 80 bp, synthetic construct; identical to SEQ ID NO: 24849
  misc_feature 1..80: note = Artificially Synthesized Probe
  source 1..80: mol_type = other DNA

SEQ ID NO: 53341 - DNA, 80 bp, synthetic construct
  misc_feature 1..80: note = Artificially Synthesized Probe
  source 1..80: mol_type = other DNA
tgtcaggggctgggaggaggcgggaatggggagttatggtttcatgggtacagagtttcagtttcgcaaaatgaaaagaa

SEQ ID NO: 53342 - DNA, 80 bp, synthetic construct
  misc_feature 1..80: note = Artificially Synthesized Probe
  source 1..80: mol_type = other DNA
gcctgtgctatgaaaattgcctcaggtgtaagacagtcttgtcagtattggagcgtgctcacagttgacatgtgtgaagg

SEQ ID NO: 53343 - DNA, 80 bp, synthetic construct
  misc_feature 1..80: note = Artificially Synthesized Probe
  source 1..80: mol_type = other DNA
gtgaaagcaaatcagaaaacaaagagtgggtcagtagcctgtgtgggcaggagccaacccagaggccaacaggtgtctct

SEQ ID NO: 53344 - DNA, 80 bp, synthetic construct
  misc_feature 1..80: note = Artificially Synthesized Probe
  source 1..80: mol_type = other DNA
cactgctctcagagacaaaggtaggcaacagtttgcaaaatttagacgcttatgtgtgcacaaaggaaaaaaagaagaaa

SEQ ID NO: 53345 - DNA, 80 bp, synthetic construct
  misc_feature 1..80: note = Artificially Synthesized Probe
  source 1..80: mol_type = other DNA
acctccttcttgaactgacagttcacccctagaaggaggtgggaaaccactcagatccatctcaaagggatgcctaccag

SEQ ID NO: 53346 - DNA, 80 bp, synthetic construct; identical to SEQ ID NO: 24850
  misc_feature 1..80: note = Artificially Synthesized Probe
  source 1..80: mol_type = other DNA

SEQ ID NO: 53347 - DNA, 80 bp, synthetic construct
  misc_feature 1..80: note = Artificially Synthesized Probe
  source 1..80: mol_type = other DNA
cctgcctcagcctcctgagtagttgggattacaggtgtccaccactatgcccagctaagttttgcatttttagtagagac

SEQ ID NO: 53348 - DNA, 80 bp, synthetic construct
  misc_feature 1..80: note = Artificially Synthesized Probe
  source 1..80: mol_type = other DNA
tttctgcttctcagaataagcatctctatccttagcttcaaatcataaacaacttagaaacagttacttagctgagtact

SEQ ID NO: 53349 - DNA, 80 bp, synthetic construct; identical to SEQ ID NO: 24851
  misc_feature 1..80: note = Artificially Synthesized Probe
  source 1..80: mol_type = other DNA

SEQ ID NO: 53350 - DNA, 80 bp, synthetic construct
  misc_feature 1..80: note = Artificially Synthesized Probe
  source 1..80: mol_type = other DNA
agaattattaattccaggaagcatgtgccctggtcaggcacagaatcagcaaaaaccccactggagacccaaaataccct

SEQ ID NO: 53351 - DNA, 80 bp, synthetic construct
  misc_feature 1..80: note = Artificially Synthesized Probe
  source 1..80: mol_type = other DNA
ataggagaagaggacaagcagggggacagaactgagtcaggagacactttagacgatggagggttgggggatggaggtgg

SEQ ID NO: 53352 - DNA, 80 bp, synthetic construct
  misc_feature 1..80: note = Artificially Synthesized Probe
  source 1..80: mol_type = other DNA
aggtaattggaacgttctagagactgttgggttgacttggatttggggtcaataaacatagcggctccactacactagtg

SEQ ID NO: 53353 - DNA, 80 bp, synthetic construct; identical to SEQ ID NO: 24852
  misc_feature 1..80: note = Artificially Synthesized Probe
  source 1..80: mol_type = other DNA

SEQ ID NO: 53354 - DNA, 80 bp, synthetic construct; identical to SEQ ID NO: 24785
  misc_feature 1..80: note = Artificially Synthesized Probe
  source 1..80: mol_type = other DNA

SEQ ID NO: 53355 - DNA, 80 bp, synthetic construct
  misc_feature 1..80: note = Artificially Synthesized Probe
  source 1..80: mol_type = other DNA
gatttcagagctggaaagagggttagagacctattccaggactttactctacagcaaagcagtccgggttccagagagcc

SEQ ID NO: 53356 - DNA, 80 bp, synthetic construct
  misc_feature 1..80: note = Artificially Synthesized Probe
  source 1..80: mol_type = other DNA
tctcatgctgtcttaggtgaactttcaaagtccagcgtaagaaaaagtttccagcaacagcattgtggttagtattgcag

SEQ ID NO: 53357 - DNA, 80 bp, synthetic construct
  misc_feature 1..80: note = Artificially Synthesized Probe
  source 1..80: mol_type = other DNA
gcaataatggacgggtgtgctcaccccagagcttgggactgggtaaatactcataaatgacagaggtgggagtagttgtt

SEQ ID NO: 53358 - DNA, 80 bp, synthetic construct; identical to SEQ ID NO: 24853
  misc_feature 1..80: note = Artificially Synthesized Probe
  source 1..80: mol_type = other DNA

SEQ ID NO: 53359 - DNA, 80 bp, synthetic construct
  misc_feature 1..80: note = Artificially Synthesized Probe
  source 1..80: mol_type = other DNA
tcccacttggcttgctcgctcacttccttctgggtttgactagaatgccaccatcttagcaaggacatccctgcataccc

SEQ ID NO: 53360 - DNA, 80 bp, synthetic construct
  misc_feature 1..80: note = Artificially Synthesized Probe
  source 1..80: mol_type = other DNA
gggattttgttgctgctgtggttcagtttgttcatgattgtttcaaaagcacctagactgttcctgctacatagtaaata

SEQ ID NO: 53361 - DNA, 80 bp, synthetic construct
  misc_feature 1..80: note = Artificially Synthesized Probe
  source 1..80: mol_type = other DNA
tctggatttccattcatcaaagaagctatcgagtgtgagttctgttggaagagaggttggactagatgattttgtaggta

SEQ ID NO: 53362 - DNA, 80 bp, synthetic construct
  misc_feature 1..80: note = Artificially Synthesized Probe
  source 1..80: mol_type = other DNA
cttaaaagcagcagcttgtctccggatcctgaagcaaggaggttttgcatctctctggccttgaagatctccatcccgtg

SEQ ID NO: 53363 - DNA, 80 bp, synthetic construct; identical to SEQ ID NO: 24854
  misc_feature 1..80: note = Artificially Synthesized Probe
  source 1..80: mol_type = other DNA

SEQ ID NO: 53364 - DNA, 80 bp, synthetic construct
  misc_feature 1..80: note = Artificially Synthesized Probe
  source 1..80: mol_type = other DNA
gaggggagacctagcaaccctactgccaggagtgcattccaaagaaatagccacaaatgtgagcacagatgtatgcacag

SEQ ID NO: 53365 - DNA, 80 bp, synthetic construct
  misc_feature 1..80: note = Artificially Synthesized Probe
  source 1..80: mol_type = other DNA
cccaggcccggtgattctagtgttttcttggtcacgaacaggcccacaaggctggccccaaacctgctggaatgcctgtc

SEQ ID NO: 53366 - DNA, 80 bp, synthetic construct
  misc_feature 1..80: note = Artificially Synthesized Probe
  source 1..80: mol_type = other DNA
ggtgcccttctgagcctttttttcttttcctgtactggaactgcttggaagtggctgtcctgtttgtgagaaaacatgca

SEQ ID NO: 53367 - DNA, 80 bp, synthetic construct
  misc_feature 1..80: note = Artificially Synthesized Probe
  source 1..80: mol_type = other DNA
agtaaaaagaacagttacgaaataaaatgcacatatccaagcctagaaggacagtcaccaacatactaatcagtcttggg

SEQ ID NO: 53368 - DNA, 80 bp, synthetic construct; identical to SEQ ID NO: 24855
  misc_feature 1..80: note = Artificially Synthesized Probe
  source 1..80: mol_type = other DNA

SEQ ID NO: 53369 - DNA, 80 bp, synthetic construct
  misc_feature 1..80: note = Artificially Synthesized Probe
  source 1..80: mol_type = other DNA
gggaggctttcttagtggcaaattactactttcagggggagcattaaataaataagaaagtaaaggttgtaaatgttgtt

SEQ ID NO: 53370 - DNA, 80 bp, synthetic construct
  misc_feature 1..80: note = Artificially Synthesized Probe
  source 1..80: mol_type = other DNA
acctaaccctatccataacctgaattccacctacaatatctttctggctcagccaccagctttgtgattctgccatctcc

SEQ ID NO: 53371 - DNA, 80 bp, synthetic construct
  misc_feature 1..80: note = Artificially Synthesized Probe
  source 1..80: mol_type = other DNA
gggtctagacttttctccctggttcctgctacagatcttgctgtagatgggtgatggtgccatagcttgatcttggggac

SEQ ID NO: 53372 - DNA, 80 bp, synthetic construct; identical to SEQ ID NO: 24856
  misc_feature 1..80: note = Artificially Synthesized Probe
  source 1..80: mol_type = other DNA

SEQ ID NO: 53373 - DNA, 80 bp, synthetic construct
  misc_feature 1..80: note = Artificially Synthesized Probe
  source 1..80: mol_type = other DNA
cctccatggagatgcctcagacactctatttggcctttctacctttccattcagtcattcatttttgtaaaatgtacagt

SEQ ID NO: 53374 - DNA, 80 bp, synthetic construct
  misc_feature 1..80: note = Artificially Synthesized Probe
  source 1..80: mol_type = other DNA
cgttgctgggtagtgataaagccaaaactttaatttaggtctgattgcctcatgaatctatgctctttgcactttctgct

SEQ ID NO: 53375 - DNA, 80 bp, synthetic construct
  misc_feature 1..80: note = Artificially Synthesized Probe
  source 1..80: mol_type = other DNA
gctcctgaggacatcatttcagcttgtgtcaggaaagtgcttagcagtggatcaattgccagtcttctggtcaacctaat

SEQ ID NO: 53376 - DNA, 80 bp, synthetic construct; identical to SEQ ID NO: 24857
  misc_feature 1..80: note = Artificially Synthesized Probe
  source 1..80: mol_type = other DNA

SEQ ID NO: 53377 - DNA, 80 bp, synthetic construct
  misc_feature 1..80: note = Artificially Synthesized Probe
  source 1..80: mol_type = other DNA
cagaaagagcagctgttttatttctgggaaattgttgctagggttaaactgtatagatttagccacgactgaaggtgtcc

SEQ ID NO: 53378 - DNA, 80 bp, synthetic construct
  misc_feature 1..80: note = Artificially Synthesized Probe
  source 1..80: mol_type = other DNA
aaatgacaacccgctggggatcatgttttagagaagtagtttgaccgtgcttagtttgcataattgcctgcactgatttg

SEQ ID NO: 53379 - DNA, 80 bp, synthetic construct
  misc_feature 1..80: note = Artificially Synthesized Probe
  source 1..80: mol_type = other DNA
cctctaagaggaaaacaaacagaaaatgaaaagtaggcgtaataatggaagcttaggtgcaaattttagtgcagggtatt

SEQ ID NO: 53380 - DNA, 80 bp, synthetic construct
  misc_feature 1..80: note = Artificially Synthesized Probe
  source 1..80: mol_type = other DNA
cccaactctactgataaccaatcttgagcaaatcacttgccttcttgaagtttcagttcctctgtcagtaacagaggcca

SEQ ID NO: 53381 - DNA, 80 bp, synthetic construct
  misc_feature 1..80: note = Artificially Synthesized Probe
  source 1..80: mol_type = other DNA
ccacattatcactgcctatgtaaagcttctcctgggtgatattctatttcttatgctgcactggagaaatattctctata

SEQ ID NO: 53382 - DNA, 80 bp, synthetic construct; identical to SEQ ID NO: 24858
  misc_feature 1..80: note = Artificially Synthesized Probe
  source 1..80: mol_type = other DNA

SEQ ID NO: 53383 - DNA, 80 bp, synthetic construct
  misc_feature 1..80: note = Artificially Synthesized Probe
  source 1..80: mol_type = other DNA
tctggtatgaattagagaggtggcctgtacacatatgtgttgtttattagcttttatctgatgatctcaaagcactgaca

SEQ ID NO: 53384 - DNA, 80 bp, synthetic construct
  misc_feature 1..80: note = Artificially Synthesized Probe
  source 1..80: mol_type = other DNA
agctgccatttttcttagctttttttccttcagtcttcccagccaacctctcatcttactaggcctaaggaaatgatgca

SEQ ID NO: 53385 - DNA, 80 bp, synthetic construct
  misc_feature 1..80: note = Artificially Synthesized Probe
  source 1..80: mol_type = other DNA
gcaaatcagagaataacagcaaatgcttttatcgctcaggcagctcaatcacatttggttttccatttcactctagtaag

SEQ ID NO: 53386 - DNA, 80 bp, synthetic construct; identical to SEQ ID NO: 24859
  misc_feature 1..80: note = Artificially Synthesized Probe
  source 1..80: mol_type = other DNA

SEQ ID NO: 53387 - DNA, 80 bp, synthetic construct
  misc_feature 1..80: note = Artificially Synthesized Probe
  source 1..80: mol_type = other DNA
ttacaggcatgccaccacacctggctaattttgtatttttttttttcagtagagacggggtttctccatgttggccaggc

SEQ ID NO: 53388 - DNA, 80 bp, synthetic construct
  misc_feature 1..80: note = Artificially Synthesized Probe
  source 1..80: mol_type = other DNA
ccaccttcctgcaatgacaaaagaaagtcaaggtcatccctgtacatctgtctggcctatacatctgttttgtaaacaag

SEQ ID NO: 53389 - DNA, 80 bp, synthetic construct
  misc_feature 1..80: note = Artificially Synthesized Probe
  source 1..80: mol_type = other DNA
gaaagaaatggtcaattcctagtgtctctttcaaggagaacgtatttgcagcatttcttaactcagaacagaactggagc

SEQ ID NO: 53390 - DNA, 80 bp, synthetic construct; identical to SEQ ID NO: 24860
  misc_feature 1..80: note = Artificially Synthesized Probe
  source 1..80: mol_type = other DNA

SEQ ID NO: 53391 - DNA, 80 bp, synthetic construct
  misc_feature 1..80: note = Artificially Synthesized Probe
  source 1..80: mol_type = other DNA
tcagcaaccccacaatctccgtctgggccagtcatctcagcaggtgcttgacaggcaaccaggctggaagagaatgcctc

SEQ ID NO: 53392 - DNA, 80 bp, synthetic construct
  misc_feature 1..80: note = Artificially Synthesized Probe
  source 1..80: mol_type = other DNA
cccagatagtcttggaagaagctgggaggcatattcttagatttaagcaagaaattacaatgttgactcaaatcaggatt

SEQ ID NO: 53393 - DNA, 80 bp, synthetic construct
  misc_feature 1..80: note = Artificially Synthesized Probe
  source 1..80: mol_type = other DNA
aaaccgttggtaggtgttatgggttgaactgtgtcccctcaaaagatattgaagtcctaacaccctctgaatgtcacctt

SEQ ID NO: 53394 - DNA, 80 bp, synthetic construct
  misc_feature 1..80: note = Artificially Synthesized Probe
  source 1..80: mol_type = other DNA
tgggatgatgcatctacaagccaaggaacaccaaagattgccagcaaccaccagaagctggggagaggcttgggacagat

SEQ ID NO: 53395 - DNA, 80 bp, synthetic construct; identical to SEQ ID NO: 24861
  misc_feature 1..80: note = Artificially Synthesized Probe
  source 1..80: mol_type = other DNA

SEQ ID NO: 53396 - DNA, 80 bp, synthetic construct
  misc_feature 1..80: note = Artificially Synthesized Probe
  source 1..80: mol_type = other DNA
tggccaagtcccagctgtgctccagggacttattggcagtggcgttgccactggcctaaatgggtgccttgggcttgccc

SEQ ID NO: 53397 - DNA, 80 bp, synthetic construct
  misc_feature 1..80: note = Artificially Synthesized Probe
  source 1..80: mol_type = other DNA
ctcctttttgcattaaatcctacccattcatatcctacctcccaggatgctttcctttaatcctctagcccagctttctc

SEQ ID NO: 53398 - DNA, 80 bp, synthetic construct
  misc_feature 1..80: note = Artificially Synthesized Probe
  source 1..80: mol_type = other DNA
ctcccttccccctgggaacgtgtaatgcacatttgcagacagaagttttggaaaagtcctgcacttaaacaacaacaaac

SEQ ID NO: 53399 - DNA, 80 bp, synthetic construct
  misc_feature 1..80: note = Artificially Synthesized Probe
  source 1..80: mol_type = other DNA
tcactgaacacattgtttaggagccaggtccttgggacaaggaagggtgacacatctgagcaggtggcaacagggtctgc

SEQ ID NO: 53400 - DNA, 80 bp, synthetic construct; identical to SEQ ID NO: 24862
  misc_feature 1..80: note = Artificially Synthesized Probe
  source 1..80: mol_type = other DNA

SEQ ID NO: 53401 - DNA, 80 bp, synthetic construct
  misc_feature 1..80: note = Artificially Synthesized Probe
  source 1..80: mol_type = other DNA
gccatggacccccagggctgaattccccacctatcaagtggggacatcaataaaagtgccacaggattagttgacctaat

SEQ ID NO: 53402 - DNA, 80 bp, synthetic construct
  misc_feature 1..80: note = Artificially Synthesized Probe
  source 1..80: mol_type = other DNA
gcaactgtaatgcagccgctgacatacaatcgcttgctcagaaaatacactgaaagtgaattaatgcgcagctatgttct

SEQ ID NO: 53403 - DNA, 80 bp, synthetic construct
  misc_feature 1..80: note = Artificially Synthesized Probe
  source 1..80: mol_type = other DNA
ctagtttgcctgccaaggcctaagatcagtgggtcactgtccttatggttaccatggtcctggacagtcccagcagagaa

SEQ ID NO: 53404 - DNA, 80 bp, synthetic construct; identical to SEQ ID NO: 24863
  misc_feature 1..80: note = Artificially Synthesized Probe
  source 1..80: mol_type = other DNA

SEQ ID NO: 53405 - DNA, 80 bp, synthetic construct
  misc_feature 1..80: note = Artificially Synthesized Probe
  source 1..80: mol_type = other DNA
acctatatttacatattattataatattctcttgcacaaaaccttccaagggcttcctctggtgagtgaagattcccttg

SEQ ID NO: 53406 - DNA, 80 bp, synthetic construct
  misc_feature 1..80: note = Artificially Synthesized Probe
  source 1..80: mol_type = other DNA
tgttgttgttgttgagatacggtttacataccataagacattgtctgagcctagatatactaataatacatggtattttt

SEQ ID NO: 53407 - DNA, 80 bp, synthetic construct; identical to SEQ ID NO: 24786
  misc_feature 1..80: note = Artificially Synthesized Probe
  source 1..80: mol_type = other DNA

SEQ ID NO: 53408 - DNA, 80 bp, synthetic construct
  misc_feature 1..80: note = Artificially Synthesized Probe
  source 1..80: mol_type = other DNA
ctaaattcatcttctctggaaggcagcatgagtgcagctcatgtggggcaaggcacaagggctgcccctcgccctccggc

SEQ ID NO: 53409 - DNA, 80 bp, synthetic construct; identical to SEQ ID NO: 24864
  misc_feature 1..80: note = Artificially Synthesized Probe
  source 1..80: mol_type = other DNA

SEQ ID NO: 53410 - DNA, 80 bp, synthetic construct
  misc_feature 1..80: note = Artificially Synthesized Probe
  source 1..80: mol_type = other DNA
tcaaaagtcctgggtttaagggctgaatttgccatttgcttatgacatggcaatttcttgatctgtattatttttctcta

SEQ ID NO: 53411 - DNA, 80 bp, synthetic construct
  misc_feature 1..80: note = Artificially Synthesized Probe
  source 1..80: mol_type = other DNA
tttcttttcttttccttttcttttcttttcttttcttttccttttcttttcttttcttttttcttttcttttcctttcct

SEQ ID NO: 53412 - DNA, 80 bp, synthetic construct; identical to SEQ ID NO: 24865
  misc_feature 1..80: note = Artificially Synthesized Probe
  source 1..80: mol_type = other DNA

SEQ ID NO: 53413 - DNA, 80 bp, synthetic construct
  misc_feature 1..80: note = Artificially Synthesized Probe
  source 1..80: mol_type = other DNA
caggccacttctgactacaaagtagctacactttacatgagagatgcattcctaaagactttgcaaaattctgattaatt

SEQ ID NO: 53414 - DNA, 80 bp, synthetic construct
  misc_feature 1..80: note = Artificially Synthesized Probe
  source 1..80: mol_type = other DNA
tttgagatggagtcttgctctgtcgcccaggctggagtgcaatggtgtgatcttggctcacggcaacccctgcatcccag

SEQ ID NO: 53415 - DNA, 80 bp, synthetic construct
  misc_feature 1..80: note = Artificially Synthesized Probe
  source 1..80: mol_type = other DNA
tgggtgatccacctgccttggcctcccaaagttctgagattacaggtgtaagccaccacgcctggcctgaattttttttt

SEQ ID NO: 53416 - DNA, 80 bp, synthetic construct
  misc_feature 1..80: note = Artificially Synthesized Probe
  source 1..80: mol_type = other DNA
caactcaatactgtcttcctttgttgatcattccacatagaattttagatggttggccaattagaaggttagatttctat

SEQ ID NO: 53417 - DNA, 80 bp, synthetic construct; identical to SEQ ID NO: 24866
  misc_feature 1..80: note = Artificially Synthesized Probe
  source 1..80: mol_type = other DNA

SEQ ID NO: 53418 - DNA, 80 bp, synthetic construct
  misc_feature 1..80: note = Artificially Synthesized Probe
  source 1..80: mol_type = other DNA
tcctaaggtctagggcccgcaggacctatattgcctactgcttagataaatgggcttcccttcagctcttaaagttcttg

SEQ ID NO: 53419 - DNA, 80 bp, synthetic construct
  misc_feature 1..80: note = Artificially Synthesized Probe
  source 1..80: mol_type = other DNA
atctcttggcatataggagccattttgtgctcttcaaaatggctgacaggaattttctgaggaagctatggtctgaaacc

SEQ ID NO: 53420 - DNA, 80 bp, synthetic construct
  misc_feature 1..80: note = Artificially Synthesized Probe
  source 1..80: mol_type = other DNA
tttggactgcaagagcttgtggctataactctattcacagcccatttctggtttccaagtagctccctttccaacaagag

SEQ ID NO: 53421 - DNA, 80 bp, synthetic construct; identical to SEQ ID NO: 24867
  misc_feature 1..80: note = Artificially Synthesized Probe
  source 1..80: mol_type = other DNA

SEQ ID NO: 53422 - DNA, 80 bp, synthetic construct
  misc_feature 1..80: note = Artificially Synthesized Probe
  source 1..80: mol_type = other DNA
cttttgtagctcaatctttattgttcccaatgaaacccaaagaaaacggacaagattcattttgtccagaaagcatttgt

SEQ ID NO: 53423 - DNA, 80 bp, synthetic construct
  misc_feature 1..80: note = Artificially Synthesized Probe
  source 1..80: mol_type = other DNA
ctaaactcagcatggaaattagcacaggccccacacaatgatgaaaattagatgagaccataaagaagtgagcctgaaga

SEQ ID NO: 53424 - DNA, 80 bp, synthetic construct
  misc_feature 1..80: note = Artificially Synthesized Probe
  source 1..80: mol_type = other DNA
tggggcacatgagaggtgcttggtaaatatttactcaattggtaagtcaagtggcctgtcagatggtttaaataatcaga

SEQ ID NO: 53425 - DNA, 80 bp, synthetic construct
  misc_feature 1..80: note = Artificially Synthesized Probe
  source 1..80: mol_type = other DNA
ggcacatgcctgtaatcccagctacacaggaggctgaggcaggagaatcacttgaacccaggatgggggttgtggtgagc

SEQ ID NO: 53426 - DNA, 80 bp, synthetic construct; identical to SEQ ID NO: 24868
  misc_feature 1..80: note = Artificially Synthesized Probe
  source 1..80: mol_type = other DNA

SEQ ID NO: 53427 - DNA, 80 bp, synthetic construct
  misc_feature 1..80: note = Artificially Synthesized Probe
  source 1..80: mol_type = other DNA
ttttccacctgcttgtgtcactttaacgctggtaacaatgtcaacagtgggtctgggagatccccatacatctgggctta

SEQ ID NO: 53428 - DNA, 80 bp, synthetic construct
  misc_feature 1..80: note = Artificially Synthesized Probe
  source 1..80: mol_type = other DNA
aaagtctatgcagctatgaagaagccactcacacctctccatgatccgacagaggttttcttgtctcccttctccacaga

SEQ ID NO: 53429 - DNA, 80 bp, synthetic construct; identical to SEQ ID NO: 24869
  misc_feature 1..80: note = Artificially Synthesized Probe
  source 1..80: mol_type = other DNA

SEQ ID NO: 53430 - DNA, 80 bp, synthetic construct
  misc_feature 1..80: note = Artificially Synthesized Probe
  source 1..80: mol_type = other DNA
gggaattaaataaaactacagagaacccctgcttggaaggggtcaatgcttcactctcaccattttgaaattcttaattg

SEQ ID NO: 53431 - DNA, 80 bp, synthetic construct
  misc_feature 1..80: note = Artificially Synthesized Probe
  source 1..80: mol_type = other DNA
ctgacctgcaacccctggggcttgggctcaggcttttcacgtgatgggtcacctggctcagctgccttctccctgcagca

SEQ ID NO: 53432 - DNA, 80 bp, synthetic construct
  misc_feature 1..80: note = Artificially Synthesized Probe
  source 1..80: mol_type = other DNA
cttggagccagtacaattttgcatggtggggaattagcaaaatacaagaagacacagtagactctagtatctacagcaaa

SEQ ID NO: 53433 - DNA, 80 bp, synthetic construct
  misc_feature 1..80: note = Artificially Synthesized Probe
  source 1..80: mol_type = other DNA
ctcagccagctttgggggtggcccactaagagtctcagatattcacatctccagctgtttaatgcttcatgcatttgttc

SEQ ID NO: 53434 - DNA, 80 bp, synthetic construct; identical to SEQ ID NO: 24870
  misc_feature 1..80: note = Artificially Synthesized Probe
  source 1..80: mol_type = other DNA

SEQ ID NO: 53435 - DNA, 80 bp, synthetic construct
  misc_feature 1..80: note = Artificially Synthesized Probe
  source 1..80: mol_type = other DNA
ggagtgggttgaactgcaaattgaggcgcatccctctaaggaagttccagaatagatgcattttctgagagtaaaatgga

SEQ ID NO: 53436 - DNA, 80 bp, synthetic construct
  misc_feature 1..80: note = Artificially Synthesized Probe
  source 1..80: mol_type = other DNA
tttactgtaaaaattgagaggaaaagagtaagtgcttagtaaggggaatacctttagaagtaggcttcagaatccagtct

SEQ ID NO: 53437 - DNA, 80 bp, synthetic construct
  misc_feature 1..80: note = Artificially Synthesized Probe
  source 1..80: mol_type = other DNA
cagacctacgagcctcactttcttcatttacgagaagagatagatcctgctgctttttctgctatttgccataggatggt

SEQ ID NO: 53438 - DNA, 80 bp, synthetic construct
  misc_feature 1..80: note = Artificially Synthesized Probe
  source 1..80: mol_type = other DNA
ctatttatttttttctccttgagcctgaaaattagttgctgagtagcacaaatcaaaacaggcaagcaaagtggacagtg

SEQ ID NO: 53439 - DNA, 80 bp, synthetic construct; identical to SEQ ID NO: 24871
  misc_feature 1..80: note = Artificially Synthesized Probe
  source 1..80: mol_type = other DNA

SEQ ID NO: 53440 - DNA, 80 bp, synthetic construct
  misc_feature 1..80: note = Artificially Synthesized Probe
  source 1..80: mol_type = other DNA
tatctcacagatgctaaaactaaagcctagagagaaatttctgcccaagtatacactgcaatgtaatgacagaggaagaa

SEQ ID NO: 53441 - DNA, 80 bp, synthetic construct; identical to SEQ ID NO: 24787
  misc_feature 1..80: note = Artificially Synthesized Probe
  source 1..80: mol_type = other DNA

SEQ ID NO: 53442 - DNA, 80 bp, synthetic construct
  misc_feature 1..80: note = Artificially Synthesized Probe
  source 1..80: mol_type = other DNA
tttaggcacttccgaatcagatctccactccacagtcccctgcgtgaagaggcaccattgccgccatctcacagaggaag

SEQ ID NO: 53443 - DNA, 80 bp, synthetic construct; identical to SEQ ID NO: 24872
  misc_feature 1..80: note = Artificially Synthesized Probe
  source 1..80: mol_type = other DNA

SEQ ID NO: 53444 - DNA, 80 bp, synthetic construct
  misc_feature 1..80: note = Artificially Synthesized Probe
  source 1..80: mol_type = other DNA
gctaaacatgaaaacaatgcttacaataaaatattaagaaaaaaagcacttgaaactttttaatgatatgttttatgttt

SEQ ID NO: 53445 - DNA, 80 bp, synthetic construct
  misc_feature 1..80: note = Artificially Synthesized Probe
  source 1..80: mol_type = other DNA
tccgtcagtgatttttatatctttactaaaatatctcaaactaagagaacagaaaaatgttggctacctgaaatatttat

SEQ ID NO: 53446 - DNA, 80 bp, synthetic construct
  misc_feature 1..80: note = Artificially Synthesized Probe
  source 1..80: mol_type = other DNA
aatctccaacagtgttagccttgcttattttccgctttcctccggtgttaaagcctaatcagaaaaaatgagcatatttc

SEQ ID NO: 53447 - DNA, 80 bp, synthetic construct; identical to SEQ ID NO: 24873
  misc_feature 1..80: note = Artificially Synthesized Probe
  source 1..80: mol_type = other DNA

SEQ ID NO: 53448 - DNA, 80 bp, synthetic construct
  misc_feature 1..80: note = Artificially Synthesized Probe
  source 1..80: mol_type = other DNA
tttgagatggaatcttgctctgtcgcccaggctggagtgcagtggtacgatctcagctcactgcaacctccgcctcccgg

SEQ ID NO: 53449 - DNA, 80 bp, synthetic construct
  misc_feature 1..80: note = Artificially Synthesized Probe
  source 1..80: mol_type = other DNA
gcctcccagagtgcattcaacaattcttattgataattattgcacattgactctgctccaggtaccatgctaagtgctgg

SEQ ID NO: 53450 - DNA, 80 bp, synthetic construct
  misc_feature 1..80: note = Artificially Synthesized Probe
  source 1..80: mol_type = other DNA
aatgtttgttcaaagtgacgaacaccatcactttagtgttaataaaaattagccttggccgaagcagagctaagaaattt

SEQ ID NO: 53451 - DNA, 80 bp, synthetic construct
  misc_feature 1..80: note = Artificially Synthesized Probe
  source 1..80: mol_type = other DNA
ctaagagagttccctcagggcaactggacccttctaagtaaagcacaagacacaatgctgggtaacttttgactggaaaa

SEQ ID NO: 53452 - DNA, 80 bp, synthetic construct
  misc_feature 1..80: note = Artificially Synthesized Probe
  source 1..80: mol_type = other DNA
cccaatctcactgtaggcctccgccatcttatctttctgcagttcctgcagaagagggcgtggaacactgatttttacca

SEQ ID NO: 53453 - DNA, 80 bp, synthetic construct; identical to SEQ ID NO: 24874
  misc_feature 1..80: note = Artificially Synthesized Probe
  source 1..80: mol_type = other DNA

SEQ ID NO: 53454 - DNA, 80 bp, synthetic construct
  misc_feature 1..80: note = Artificially Synthesized Probe
  source 1..80: mol_type = other DNA
gaatctaggtggccacccggaccagtgatgactgggtggattttgtttctgattcctttcaaagtaatactttgaaaaac

SEQ ID NO: 53455 - DNA, 80 bp, synthetic construct
  misc_feature 1..80: note = Artificially Synthesized Probe
  source 1..80: mol_type = other DNA
gcacagcccccatcttgcatatattttttcagacatgtttttacttcgggagaatattcccctacagagtaagtatcttt

SEQ ID NO: 53456 - DNA, 80 bp, synthetic construct; identical to SEQ ID NO: 24875
  misc_feature 1..80: note = Artificially Synthesized Probe
  source 1..80: mol_type = other DNA

SEQ ID NO: 53457 - DNA, 80 bp, synthetic construct
  misc_feature 1..80: note = Artificially Synthesized Probe
  source 1..80: mol_type = other DNA
cacattacattacttctcattgtcacatctctgcaaagaaggtattacaagtctttctttagaggtgagaaaactgaggc

SEQ ID NO: 53458 - DNA, 80 bp, synthetic construct
  misc_feature 1..80: note = Artificially Synthesized Probe
  source 1..80: mol_type = other DNA
gtcagagctccatctcctcactgataaaagacaaacaccacactgaccgctgggtgcattcttggctactgcagagtagg

SEQ ID NO: 53459 - DNA, 80 bp, synthetic construct
  misc_feature 1..80: note = Artificially Synthesized Probe
  source 1..80: mol_type = other DNA
cctaataatctgggcatttccaaagaaatgcaaatgcaacagcttagtaaaaagtagacattttaaaagggatgtatgca

SEQ ID NO: 53460 - DNA, 80 bp, synthetic construct
  misc_feature 1..80: note = Artificially Synthesized Probe
  source 1..80: mol_type = other DNA
acctcgtttctgggctaggatattttgaaacacttttgtctattagctttatctaaaatagctaaaatatcagtctccat

SEQ ID NO: 53461 - DNA, 80 bp, synthetic construct; identical to SEQ ID NO: 24876
  misc_feature 1..80: note = Artificially Synthesized Probe
  source 1..80: mol_type = other DNA

SEQ ID NO: 53462 - DNA, 80 bp, synthetic construct
  misc_feature 1..80: note = Artificially Synthesized Probe
  source 1..80: mol_type = other DNA
agctcaggcaccctcactctgccacactgtgtgtgtgacttagaccccacaaggcttttctgagaaaacagctgtgacct

SEQ ID NO: 53463 - DNA, 80 bp, synthetic construct
  misc_feature 1..80: note = Artificially Synthesized Probe
  source 1..80: mol_type = other DNA
atcaggtgggccgaggacatttgcttgcttcaccttccctgtttctttagattgaaattcagcctgccccacttctcagg

SEQ ID NO: 53464 - DNA, 80 bp, synthetic construct
  misc_feature 1..80: note = Artificially Synthesized Probe
  source 1..80: mol_type = other DNA
cagccctttggagtctcctccgagctgccagctctttgcactgagctgaggggctcaagttaggctcaaaaagataggag

SEQ ID NO: 53465 - DNA, 80 bp, synthetic construct; identical to SEQ ID NO: 24877
  misc_feature 1..80: note = Artificially Synthesized Probe
  source 1..80: mol_type = other DNA

SEQ ID NO: 53466 - DNA, 80 bp, synthetic construct
  misc_feature 1..80: note = Artificially Synthesized Probe
  source 1..80: mol_type = other DNA
ggctgccacccggtgcttcctgcctgtgcccctctcctccttggttaccccacttactcccgggcccattggagtgtttc

SEQ ID NO: 53467 - DNA, 80 bp, synthetic construct
  misc_feature 1..80: note = Artificially Synthesized Probe
  source 1..80: mol_type = other DNA
ttctgtgaaacactccctctccgtttctctaccctgggcctgcctcggttgctctcttgcttccttcttccttcctctct

SEQ ID NO: 53468 - DNA, 80 bp, synthetic construct
  misc_feature 1..80: note = Artificially Synthesized Probe
  source 1..80: mol_type = other DNA
cccagcccctcaccaccctccactacccacacccactcccctacacatacacaaagagtttctagaagttccctgccgtc

SEQ ID NO: 53469 - DNA, 80 bp, synthetic construct; identical to SEQ ID NO: 24878
  misc_feature 1..80: note = Artificially Synthesized Probe
  source 1..80: mol_type = other DNA

SEQ ID NO: 53470 - DNA, 80 bp, synthetic construct
  misc_feature 1..80: note = Artificially Synthesized Probe
  source 1..80: mol_type = other DNA
aggctgccacctgcaagggtctcctgcatggcaacccagatcgacaatcagggttcagggtcacacccaggagggtgagg

SEQ ID NO: 53471 - DNA, 80 bp, synthetic construct
  misc_feature 1..80: note = Artificially Synthesized Probe
  source 1..80: mol_type = other DNA
ttacatggatctttttaatctcagttggttgggggaggggggtacttggttcttgggtcacacaagctctatcccaaagc

SEQ ID NO: 53472 - DNA, 80 bp, synthetic construct; identical to SEQ ID NO: 24788
  misc_feature 1..80: note = Artificially Synthesized Probe
  source 1..80: mol_type = other DNA

SEQ ID NO: 53473 - DNA, 80 bp, synthetic construct
  misc_feature 1..80: note = Artificially Synthesized Probe
  source 1..80: mol_type = other DNA
gcccttcctccggagccctcctccagcccttcctccagcccttcctccggagccctcctccagcccttcctccagccctt

SEQ ID NO: 53474 - DNA, 80 bp, synthetic construct
  misc_feature 1..80: note = Artificially Synthesized Probe
  source 1..80: mol_type = other DNA
tgtgaagcaactttaattgccaccctcagacggggcagcaggagtgtcttaagcacagggccgttctaccccctgggagc

SEQ ID NO: 53475 - DNA, 80 bp, synthetic construct
  misc_feature 1..80: note = Artificially Synthesized Probe
  source 1..80: mol_type = other DNA
gtctcgaacacctcacctcaggtgatctgcctgcctcggcctcccaaagtgctaggattacaggcgttagccaccgtgcc

SEQ ID NO: 53476 - DNA, 80 bp, synthetic construct
  misc_feature 1..80: note = Artificially Synthesized Probe
  source 1..80: mol_type = other DNA
ccagcaaatttttttgtacttttagtagagacggggtttcgcagtgtttgccaggcaggtctcgaaatcctgacctcaga

SEQ ID NO: 53477 - DNA, 80 bp, synthetic construct
  misc_feature 1..80: note = Artificially Synthesized Probe
  source 1..80: mol_type = other DNA
ccccatctacccacgagtccaccccagccccgcaggtgcataccacagccgagctcgtcgctggagtcgggacagtctgg

SEQ ID NO: 53478 - DNA, 80 bp, synthetic construct
  misc_feature 1..80: note = Artificially Synthesized Probe
  source 1..80: mol_type = other DNA
ggtgggcattgccctttctgggtacatggctcaatccctggggcacagggttggtcaggtcccaaatgcccacccaagaa

SEQ ID NO: 53479 - DNA, 80 bp, synthetic construct; identical to SEQ ID NO: 24881
  misc_feature 1..80: note = Artificially Synthesized Probe
  source 1..80: mol_type = other DNA

SEQ ID NO: 53480 - DNA, 80 bp, synthetic construct
  misc_feature 1..80: note = Artificially Synthesized Probe
  source 1..80: mol_type = other DNA
ccagctaacttttgtatttttagtagagatggggtttcactgtgttggccaggctggtctcgaacgcctgacctcaagtg

SEQ ID NO: 53481 - DNA, 80 bp, synthetic construct
  misc_feature 1..80: note = Artificially Synthesized Probe
  source 1..80: mol_type = other DNA
gctggtgtgcccgggtacccatccgcatcactgctctcctcctgtccggctacgcccagggctgagtgacggtggtggca

SEQ ID NO: 53482 - DNA, 80 bp, synthetic construct
  misc_feature 1..80: note = Artificially Synthesized Probe
  source 1..80: mol_type = other DNA
ctgttgcccaggctggagtgcactggcacaatcctagctcactgcagcggcaacctcccaggatcaagtgatcgatcctc

SEQ ID NO: 53483 - DNA, 80 bp, synthetic construct
  misc_feature 1..80: note = Artificially Synthesized Probe
  source 1..80: mol_type = other DNA
gacaaaccaccctcaggccccgccccctgtaagccccgccaaggggcgtggccactcactgcactcctcctcatcgctgc

SEQ ID NO: 53484 - DNA, 80 bp, synthetic construct; identical to SEQ ID NO: 24882
  misc_feature 1..80: note = Artificially Synthesized Probe
  source 1..80: mol_type = other DNA

SEQ ID NO: 53485 - DNA, 80 bp, synthetic construct
  misc_feature 1..80: note = Artificially Synthesized Probe
  source 1..80: mol_type = other DNA
tcacgcctgtaatctcagcactttggcaggccgaggcaggtggatcacttgaggtcacgagttcgagaccagcctggcct

SEQ ID NO: 53486 - DNA, 80 bp, synthetic construct
  misc_feature 1..80: note = Artificially Synthesized Probe
  source 1..80: mol_type = other DNA
ggcgacagaacgagactccgtcaccacaaaaaagaaaaaaaaaagagctggtagcggagttgggcttcgaactcaggtct

SEQ ID NO: 53487 - DNA, 80 bp, synthetic construct
  misc_feature 1..80: note = Artificially Synthesized Probe
  source 1..80: mol_type = other DNA
cgtagcaaaagggaaactgaggcagtgggtgggaaactgaggcactgggtagaaaatctgctcagtcaccaagtcctgtt

SEQ ID NO: 53488 - DNA, 80 bp, synthetic construct; identical to SEQ ID NO: 24883
  misc_feature 1..80: note = Artificially Synthesized Probe
  source 1..80: mol_type = other DNA

SEQ ID NO: 53489 - DNA, 80 bp, synthetic construct
  misc_feature 1..80: note = Artificially Synthesized Probe
  source 1..80: mol_type = other DNA
ccagagaagatcccggctgtcctagattctgagcagggaagctcagctgcttgccgacctggaggggcacggaggggccc

SEQ ID NO: 53490 - DNA, 80 bp, synthetic construct
  misc_feature 1..80: note = Artificially Synthesized Probe
  source 1..80: mol_type = other DNA
cactccccactgccagcccctcctcggccttcaggcctaattgcacctacttgccacagggtccctgagctctatggatc

SEQ ID NO: 53491 - DNA, 80 bp, synthetic construct
  misc_feature 1..80: note = Artificially Synthesized Probe
  source 1..80: mol_type = other DNA
tggacagtagagcacagcagtccccgcctcatagggtgtaagcctgacaggagttacagtgaccagtgactttctctcct

SEQ ID NO: 53492 - DNA, 80 bp, synthetic construct
  misc_feature 1..80: note = Artificially Synthesized Probe
  source 1..80: mol_type = other DNA
ggaacagatggacagaggagtaaggagggggaaggcaagagcccccacacccaccaagctccatacacatggggatggga

SEQ ID NO: 53493 - DNA, 80 bp, synthetic construct
  misc_feature 1..80: note = Artificially Synthesized Probe
  source 1..80: mol_type = other DNA
gccaacatggtgaaaccccatctctactaaaaatacaaaaattagccgggcatggtgacggtgcctgtagtcccaagcta

SEQ ID NO: 53494 - DNA, 80 bp, synthetic construct; identical to SEQ ID NO: 24884
  misc_feature 1..80: note = Artificially Synthesized Probe
  source 1..80: mol_type = other DNA

SEQ ID NO: 53495 - DNA, 80 bp, synthetic construct
  misc_feature 1..80: note = Artificially Synthesized Probe
  source 1..80: mol_type = other DNA
ccactggccaccaatacctcttaggccagggcgaacacgtccacgggggtatattcaacttgtgaccccagtctctgcga

SEQ ID NO: 53496 - DNA, 80 bp, synthetic construct
  misc_feature 1..80: note = Artificially Synthesized Probe
  source 1..80: mol_type = other DNA
gcgtgattagcggtcggacaatctgagcctgctaagagctttcctgaccacgctggtatgaagggcggcttggaggtgac

SEQ ID NO: 53497 - DNA, 80 bp, synthetic construct; identical to SEQ ID NO: 24885
  misc_feature 1..80: note = Artificially Synthesized Probe
  source 1..80: mol_type = other DNA

SEQ ID NO: 53498 - DNA, 80 bp, synthetic construct
  misc_feature 1..80: note = Artificially Synthesized Probe
  source 1..80: mol_type = other DNA
ccatccaaccgccgctcatgctgtccccacagcggcgccggccacgcgctgtccagaccgctctcttatccctgcgcacg

SEQ ID NO: 53499 - DNA, 80 bp, synthetic construct
  misc_feature 1..80: note = Artificially Synthesized Probe
  source 1..80: mol_type = other DNA
cagaggggacactctccagggtcacagggggccccatggttgtggcattcctgagagaggtgacactctccagggtcaca

SEQ ID NO: 53500 - DNA, 80 bp, synthetic construct; identical to SEQ ID NO: 24879
  misc_feature 1..80: note = Artificially Synthesized Probe
  source 1..80: mol_type = other DNA

SEQ ID NO: 53501 - DNA, 80 bp, synthetic construct
  misc_feature 1..80: note = Artificially Synthesized Probe
  source 1..80: mol_type = other DNA
gctggagtggtgaccatatctgtcttcttcaacatcacatccccagctacctagcagagtgccttgggctggtacacgct

SEQ ID NO: 53502 - DNA, 80 bp, synthetic construct; identical to SEQ ID NO: 24897
  misc_feature 1..80: note = Artificially Synthesized Probe
  source 1..80: mol_type = other DNA

SEQ ID NO: 53503 - DNA, 80 bp, synthetic construct
  misc_feature 1..80: note = Artificially Synthesized Probe
  source 1..80: mol_type = other DNA
agagcctctctgccctgcccccaccacccccagtctcgcctgtctgccaagcgcacaggaaactctccttcatccaaacc

SEQ ID NO: 53504 - DNA, 80 bp, synthetic construct
  misc_feature 1..80: note = Artificially Synthesized Probe
  source 1..80: mol_type = other DNA
gagaaaagaaataagacacagagaaagtatagaggaataaaagtgggcccaggggaccggcgctcagcaagtgaggacct

SEQ ID NO: 53505 - DNA, 80 bp, synthetic construct
  misc_feature 1..80: note = Artificially Synthesized Probe
  source 1..80: mol_type = other DNA
gtgctgtgcctggatgtgctagatttatgtttaactttacacaaacatctcagtgtagtaaagagtaacagagcagtatt

SEQ ID NO: 53506 - DNA, 80 bp, synthetic construct; identical to SEQ ID NO: 24898
  misc_feature 1..80: note = Artificially Synthesized Probe
  source 1..80: mol_type = other DNA

SEQ ID NO: 53507 - DNA, 80 bp, synthetic construct
  misc_feature 1..80: note = Artificially Synthesized Probe
  source 1..80: mol_type = other DNA
tttttgagacagagtcttgctctgtcgcccaggctggagtgcagtggcgcgatctcggctcactgccacctctgcctccc

SEQ ID NO: 53508 - DNA, 80 bp, synthetic construct
  misc_feature 1..80: note = Artificially Synthesized Probe
  source 1..80: mol_type = other DNA
tggcctcccaaaatgctgggattacacgtgtgaggcaagaactttttaaaagtgcatcttgcgcagccctagatccatta

SEQ ID NO: 53509 - DNA, 80 bp, synthetic construct
  misc_feature 1..80: note = Artificially Synthesized Probe
  source 1..80: mol_type = other DNA
catgcctgtagccccagctacttgggaggctgaggcaggagaattgcttgaacccgggaggcagaggttgcagtgagcca

SEQ ID NO: 53510 - DNA, 80 bp, synthetic construct
  misc_feature 1..80: note = Artificially Synthesized Probe
  source 1..80: mol_type = other DNA
ctctttcttttccccatacctctcacgctgtatcaggccccaattcttgggaacgtcaccttagaactgtcccacacatt

SEQ ID NO: 53511 - DNA, 80 bp, synthetic construct; identical to SEQ ID NO: 24899
  misc_feature 1..80: note = Artificially Synthesized Probe
  source 1..80: mol_type = other DNA

SEQ ID NO: 53512 - DNA, 80 bp, synthetic construct
  misc_feature 1..80: note = Artificially Synthesized Probe
  source 1..80: mol_type = other DNA
cccaagttgttggtgccgcaaacaaaaaattggacatgacacacacaaatagcaaagcagcaaaagtttattaagcacag

SEQ ID NO: 53513 - DNA, 80 bp, synthetic construct
  misc_feature 1..80: note = Artificially Synthesized Probe
  source 1..80: mol_type = other DNA
tggcctctgtgtgtttacgtgtcatttccttcccatagttttaagtacatgcatgatatgcactctgtaggcatgaacct

SEQ ID NO: 53514 - DNA, 80 bp, synthetic construct
  misc_feature 1..80: note = Artificially Synthesized Probe
  source 1..80: mol_type = other DNA
ggtgcatgccaccacgcccggctaatttttgtatttttagtagagatggggtttcaccatgttggccaggctgatctcga

SEQ ID NO: 53515 - DNA, 80 bp, synthetic construct; identical to SEQ ID NO: 24900
  misc_feature 1..80: note = Artificially Synthesized Probe
  source 1..80: mol_type = other DNA

SEQ ID NO: 53516 - DNA, 80 bp, synthetic construct
  misc_feature 1..80: note = Artificially Synthesized Probe
  source 1..80: mol_type = other DNA
ctggctcaggcccctgcctccctcggcaaggccacaatgaaccggggagtcccttttaggcacttgcttctggtgctgca

SEQ ID NO: 53517 - DNA, 80 bp, synthetic construct
  misc_feature 1..80: note = Artificially Synthesized Probe
  source 1..80: mol_type = other DNA
tgctgggcaaaaaaggggatacagtggaactgacctgtacagcttcccagaagaagagcatacaattccactggaaaaac

SEQ ID NO: 53518 - DNA, 80 bp, synthetic construct
  misc_feature 1..80: note = Artificially Synthesized Probe
  source 1..80: mol_type = other DNA
tggtcttagttaaactctgggatcccagagggcttgggttgacagaaactcagtggcattcttatccagagtttctctac

SEQ ID NO: 53519 - DNA, 80 bp, synthetic construct; identical to SEQ ID NO: 24901
  misc_feature 1..80: note = Artificially Synthesized Probe
  source 1..80: mol_type = other DNA

SEQ ID NO: 53520 - DNA, 80 bp, synthetic construct; identical to SEQ ID NO: 24887
  misc_feature 1..80: note = Artificially Synthesized Probe
  source 1..80: mol_type = other DNA

SEQ ID NO: 53521 - DNA, 80 bp, synthetic construct
  misc_feature 1..80: note = Artificially Synthesized Probe
  source 1..80: mol_type = other DNA
gcaatctccacctcccaggctcaagtcatcatcccacctcagcctcccaagtagctgggactacaggcatgcaccaccat

SEQ ID NO: 53522 - DNA, 80 bp, synthetic construct
  misc_feature 1..80: note = Artificially Synthesized Probe
  source 1..80: mol_type = other DNA
ggtgtgtgtcactatgcctagccaaaaaaaatttttttaattaaaaaaaaaaaggccggctgtagtggctcacacctgta

SEQ ID NO: 53523 - DNA, 80 bp, synthetic construct
  misc_feature 1..80: note = Artificially Synthesized Probe
  source 1..80: mol_type = other DNA
aggagactcgcttgaacctgggaggcaaaggctgcagtgagctgagattgcaccactgcactccagcctgggtgacagag

SEQ ID NO: 53524 - DNA, 80 bp, synthetic construct
  misc_feature 1..80: note = Artificially Synthesized Probe
  source 1..80: mol_type = other DNA
tgattctcctgcctcagcctcccgagtagctgggactacaggcgtatgccaccatgcctggctaattttttgtactttta

SEQ ID NO: 53525 - DNA, 80 bp, synthetic construct; identical to SEQ ID NO: 24902
  misc_feature 1..80: note = Artificially Synthesized Probe
  source 1..80: mol_type = other DNA

SEQ ID NO: 53526 - DNA, 80 bp, synthetic construct
  misc_feature 1..80: note = Artificially Synthesized Probe
  source 1..80: mol_type = other DNA
ggattacaggcatgagctactgcacttggccttttctcctggttttaaaactattatatgctcattacaaaatatttggt

SEQ ID NO: 53527 - DNA, 80 bp, synthetic construct
  misc_feature 1..80: note = Artificially Synthesized Probe
  source 1..80: mol_type = other DNA
catgaccacaacacatcacagcctcaagtgatcttcccacttcagccttcccagtagctgggactacaggtgcacgccac

SEQ ID NO: 53528 - DNA, 80 bp, synthetic construct
  misc_feature 1..80: note = Artificially Synthesized Probe
  source 1..80: mol_type = other DNA
ttgttcggcgtggagaatattatatacataattacgtaaatgatatcatactgtatataccttttttcctactccttcct

SEQ ID NO: 53529 - DNA, 80 bp, synthetic construct; identical to SEQ ID NO: 24903
  misc_feature 1..80: note = Artificially Synthesized Probe
  source 1..80: mol_type = other DNA

SEQ ID NO: 53530 - DNA, 80 bp, synthetic construct
  misc_feature 1..80: note = Artificially Synthesized Probe
  source 1..80: mol_type = other DNA
atagctattttggaaagtctacttgacagaaataaaattgtgaatattcttttttgttgtttttttgagacagagtctca

SEQ ID NO: 53531 - DNA, 80 bp, synthetic construct
  misc_feature 1..80: note = Artificially Synthesized Probe
  source 1..80: mol_type = other DNA
aaaatgctgggattataggcatgagccaccactcccagccccacttttttcagactggaaaacgcacactcacatgtgca

SEQ ID NO: 53532 - DNA, 80 bp, synthetic construct
  misc_feature 1..80: note = Artificially Synthesized Probe
  source 1..80: mol_type = other DNA
ttcaccatgttgaccagggtggtctggaacttctaccctcaagtgatctacccaccttggcctcccaaagtgctgggatt

SEQ ID NO: 53533 - DNA, 80 bp, synthetic construct; identical to SEQ ID NO: 24904
  misc_feature 1..80: note = Artificially Synthesized Probe
  source 1..80: mol_type = other DNA

SEQ ID NO: 53534 - DNA, 80 bp, synthetic construct
  misc_feature 1..80: note = Artificially Synthesized Probe
  source 1..80: mol_type = other DNA
aaataaaggtcaggagtggtggctcacgcctgtaatcccagcactttgggaggccgaggtggacagatcatgaggtcatg

SEQ ID NO: 53535 - DNA, 80 bp, synthetic construct
  misc_feature 1..80: note = Artificially Synthesized Probe
  source 1..80: mol_type = other DNA
atcgcgccactacactccagcctaggcgacagagcaagactctgtctcaaaataaataaataaataaataaataaataaa

SEQ ID NO: 53536 - DNA, 80 bp, synthetic construct
  misc_feature 1..80: note = Artificially Synthesized Probe
  source 1..80: mol_type = other DNA
attcaacataatactgcaatcccttgccagtgcaataaggcaagaaaaatgaaataaaaggaaaactgatcagaaagaaa

SEQ ID NO: 53537 - DNA, 80 bp, synthetic construct; identical to SEQ ID NO: 24905
  misc_feature 1..80: note = Artificially Synthesized Probe
  source 1..80: mol_type = other DNA

SEQ ID NO: 53538 - DNA, 80 bp, synthetic construct
  misc_feature 1..80: note = Artificially Synthesized Probe
  source 1..80: mol_type = other DNA
gaggcgggcggatcatgaggtcaggagatcgagaccatcctggctaacacggtgaaaccctgtctctactaaaaacacaa

SEQ ID NO: 53539 - DNA, 80 bp, synthetic construct
  misc_feature 1..80: note = Artificially Synthesized Probe
  source 1..80: mol_type = other DNA
aaaaaaaaaaaattagctgagcattatggtgtatgcctgtagtcccagctactggggaggctgaggtgggaggattgctt

SEQ ID NO: 53540 - DNA, 80 bp, synthetic construct
  misc_feature 1..80: note = Artificially Synthesized Probe
  source 1..80: mol_type = other DNA
tctaaaaaacatgcgtagggccaggtgcagtggctcatgcctgtaatcccagcactttgggaagttgaggctggcggatc

SEQ ID NO: 53541 - DNA, 80 bp, synthetic construct
  misc_feature 1..80: note = Artificially Synthesized Probe
  source 1..80: mol_type = other DNA
tgcagagtgacttgggtagattttggagccatttagaaggtaacatccacaggaactggtaaataaatacgtgggagaag

SEQ ID NO: 53542 - DNA, 80 bp, synthetic construct
  misc_feature 1..80: note = Artificially Synthesized Probe
  source 1..80: mol_type = other DNA
gtgagccaagactgttccactgcactccagcctgggcaacagagtaagagtctgtctcccgaaaaaaaaaaaaagaaaaa

SEQ ID NO: 53543 - DNA, 80 bp, synthetic construct; identical to SEQ ID NO: 24906
  misc_feature 1..80: note = Artificially Synthesized Probe
  source 1..80: mol_type = other DNA

SEQ ID NO: 53544 - DNA, 80 bp, synthetic construct
  misc_feature 1..80: note = Artificially Synthesized Probe
  source 1..80: mol_type = other DNA
gctctgcaaaatccctattaagaagaagaaaagaggctgggcacagtggctcaccgctgtaatcccagcacgttgggagg

SEQ ID NO: 53545 - DNA, 80 bp, synthetic construct
  misc_feature 1..80: note = Artificially Synthesized Probe
  source 1..80: mol_type = other DNA
atagatgtatatacatctatttattgtgaatatacatctatacacacacgtgtgtgtacacatatatttaaaatttattt

SEQ ID NO: 53546 - DNA, 80 bp, synthetic construct
  misc_feature 1..80: note = Artificially Synthesized Probe
  source 1..80: mol_type = other DNA
agcgagaccctatatcaaaaaagaagaataataagaaaagacagtttacagaatataagaaaatatattcacaatccaca

SEQ ID NO: 53547 - DNA, 80 bp, synthetic construct; identical to SEQ ID NO: 24907
  misc_feature 1..80: note = Artificially Synthesized Probe
  source 1..80: mol_type = other DNA

SEQ ID NO: 53548 - DNA, 80 bp, synthetic construct
  misc_feature 1..80: note = Artificially Synthesized Probe
  source 1..80: mol_type = other DNA
ggatcacgaggtcaggagatcgagaccatcctggctaacacggtgaaaccctgtctctactaaaaatacaaaaaattagc

SEQ ID NO: 53549 - DNA, 80 bp, synthetic construct
  misc_feature 1..80: note = Artificially Synthesized Probe
  source 1..80: mol_type = other DNA
acaaacaaaaaacatgcaacaatccagcaatattgcacccctaggcatttatcctagagcaatgaagacttatgcccaca

SEQ ID NO: 53550 - DNA, 80 bp, synthetic construct; identical to SEQ ID NO: 24888
  misc_feature 1..80: note = Artificially Synthesized Probe
  source 1..80: mol_type = other DNA

SEQ ID NO: 53551 - DNA, 80 bp, synthetic construct
  misc_feature 1..80: note = Artificially Synthesized Probe
  source 1..80: mol_type = other DNA
ataaaaaggatgaatcatagtacacaccacaacctggatgaatctccagggaattatgctgagtgaaaaaaagccaatct

SEQ ID NO: 53552 - DNA, 80 bp, synthetic construct; identical to SEQ ID NO: 24908
  misc_feature 1..80: note = Artificially Synthesized Probe
  source 1..80: mol_type = other DNA

SEQ ID NO: 53553 - DNA, 80 bp, synthetic construct
  misc_feature 1..80: note = Artificially Synthesized Probe
  source 1..80: mol_type = other DNA
ttgagtccaggagttcgagaccagcctggccaacatggcaaaaccggtctctactaaaaatacaaaaattagctgggcgt

SEQ ID NO: 53554 - DNA, 80 bp, synthetic construct
  misc_feature 1..80: note = Artificially Synthesized Probe
  source 1..80: mol_type = other DNA
agcaggcaggcagggccaggaaagcgtataatttttgtagttcaaatgactaacctaaaaagtgaagattggccaggcgc

SEQ ID NO: 53555 - DNA, 80 bp, synthetic construct; identical to SEQ ID NO: 24909
  misc_feature 1..80: note = Artificially Synthesized Probe
  source 1..80: mol_type = other DNA

SEQ ID NO: 53556 - DNA, 80 bp, synthetic construct
  misc_feature 1..80: note = Artificially Synthesized Probe
  source 1..80: mol_type = other DNA
aaagattatcttaagacaacttagaaatgtatattattagtattttctatttcattgtaagttatttgtaaatattggtt

SEQ ID NO: 53557 - DNA, 80 bp, synthetic construct
  misc_feature 1..80: note = Artificially Synthesized Probe
  source 1..80: mol_type = other DNA
gaaatgaaattaaggatatgaactttttgagcacatcttgtcagcactgagtagtattatttaaaacttttggggggggc

SEQ ID NO: 53558 - DNA, 80 bp, synthetic construct
  misc_feature 1..80: note = Artificially Synthesized Probe
  source 1..80: mol_type = other DNA
tcccaacttcctgatttctaacaataacagtatcaccctccttgttctcccaatttctgaaacacagagtcatgtttttt

SEQ ID NO: 53559 - DNA, 80 bp, synthetic construct
  misc_feature 1..80: note = Artificially Synthesized Probe
  source 1..80: mol_type = other DNA
ctgggcaacagggcgaaacctcgtctctacaaaaaatacaaaagttagtcgggagtggtggcacatgcttgtagtcccag

SEQ ID NO: 53560 - DNA, 80 bp, synthetic construct; identical to SEQ ID NO: 24910
  misc_feature 1..80: note = Artificially Synthesized Probe
  source 1..80: mol_type = other DNA

SEQ ID NO: 53561 - DNA, 80 bp, synthetic construct
  misc_feature 1..80: note = Artificially Synthesized Probe
  source 1..80: mol_type = other DNA
tataaagcctccacagatacccctggggcacccactggacacatgccctcagggccccagagcaaggagctgtttgtggg

SEQ ID NO: 53562 - DNA, 80 bp, synthetic construct
  misc_feature 1..80: note = Artificially Synthesized Probe
  source 1..80: mol_type = other DNA
cctctcagcgccactgctcagtttcccagtggaaacctctgcacccaggaggtttccccacagcttgcctgtgctgcctc

SEQ ID NO: 53563 - DNA, 80 bp, synthetic construct
  misc_feature 1..80: note = Artificially Synthesized Probe
  source 1..80: mol_type = other DNA
gggttcaagggattctcctgcctcagcctcccgagtaactgggattacaggcgtgcaccaccattcctggctaatttttg

SEQ ID NO: 53564 - DNA, 80 bp, synthetic construct
  misc_feature 1..80: note = Artificially Synthesized Probe
  source 1..80: mol_type = other DNA
accagttgtcccatgaatttgtcccagactcactcatatgcttagacctttcatattatcttgccatagctttttcaaag

SEQ ID NO: 53565 - DNA, 80 bp, synthetic construct; identical to SEQ ID NO: 24911
  misc_feature 1..80: note = Artificially Synthesized Probe
  source 1..80: mol_type = other DNA

SEQ ID NO: 53566 - DNA, 80 bp, synthetic construct
  misc_feature 1..80: note = Artificially Synthesized Probe
  source 1..80: mol_type = other DNA
agacagagtctgggacaacacctaaatgtagatgtcagagcaagagttcaagacgaagaaaaacgaatcatacttagaaa

SEQ ID NO: 53567 - DNA, 80 bp, synthetic construct
  misc_feature 1..80: note = Artificially Synthesized Probe
  source 1..80: mol_type = other DNA
gggcaggaaccactgaaggaacaaataaagggggaggttgggtccaggttgtcttgagtagggaagtttttttaaaaagt

SEQ ID NO: 53568 - DNA, 80 bp, synthetic construct
  misc_feature 1..80: note = Artificially Synthesized Probe
  source 1..80: mol_type = other DNA
cactttgaggagcaactctgaggttgcacctaatactttcacttctatctattaaccaaaattgagtcacttggacacat

SEQ ID NO: 53569 - DNA, 80 bp, synthetic construct
  misc_feature 1..80: note = Artificially Synthesized Probe
  source 1..80: mol_type = other DNA
gagagtgagtgactgaactggtatccaggctcccacaccaaggcagaaagagggagaggacctgggcatctcagggaggc

SEQ ID NO: 53570 - DNA, 80 bp, synthetic construct; identical to SEQ ID NO: 24912
  misc_feature 1..80: note = Artificially Synthesized Probe
  source 1..80: mol_type = other DNA

SEQ ID NO: 53571 - DNA, 80 bp, synthetic construct
  misc_feature 1..80: note = Artificially Synthesized Probe
  source 1..80: mol_type = other DNA
ttttttttgagacagagtctcactctgtcacccaggctggagtgcagtggcgtgatcttggctcactgcaatctccacct

SEQ ID NO: 53572 - DNA, 80 bp, synthetic construct
  misc_feature 1..80: note = Artificially Synthesized Probe
  source 1..80: mol_type = other DNA
gtggcagtgacagtttgactcctgatttaagcctgattctgcttaactttttcccttgactttggcattttcactttgac

SEQ ID NO: 53573 - DNA, 80 bp, synthetic construct
  misc_feature 1..80: note = Artificially Synthesized Probe
  source 1..80: mol_type = other DNA
ctcaagtgatccaccgccttggcctcccaaagtgctgggatttcaggcgtgagccaccgcacccggccaaaaatttcttt

SEQ ID NO: 53574 - DNA, 80 bp, synthetic construct; identical to SEQ ID NO: 24913
  misc_feature 1..80: note = Artificially Synthesized Probe
  source 1..80: mol_type = other DNA

SEQ ID NO: 53575 - DNA, 80 bp, synthetic construct
  misc_feature 1..80: note = Artificially Synthesized Probe
  source 1..80: mol_type = other DNA
aacttgtatctactaaaaatacaaaaattagccagatgtggtggtgtacacctgtaatcccagctactccgaaggctgag

SEQ ID NO: 53576 - DNA, 80 bp, synthetic construct
  misc_feature 1..80: note = Artificially Synthesized Probe
  source 1..80: mol_type = other DNA
tgaggttgggcattcgagaccagcctgaccaacaaggagaaaccctgtctctactgaaaatacaaaattagccgggcttg

SEQ ID NO: 53577 - DNA, 80 bp, synthetic construct
  misc_feature 1..80: note = Artificially Synthesized Probe
  source 1..80: mol_type = other DNA
atagtgaaaagctttcttcctacacatgagtattcacttcctcttcctagaggcaaccaaggttatttttgtgtgtgtgt

SEQ ID NO: 53578 - DNA, 80 bp, synthetic construct; identical to SEQ ID NO: 24914
  misc_feature 1..80: note = Artificially Synthesized Probe
  source 1..80: mol_type = other DNA

SEQ ID NO: 53579 - DNA, 80 bp, synthetic construct
  misc_feature 1..80: note = Artificially Synthesized Probe
  source 1..80: mol_type = other DNA
ctctgtcacctagactggagtgcagtggtgccatctcatttgtttcactgcaacctttgacttctgggctcaagtgattc

SEQ ID NO: 53580 - DNA, 80 bp, synthetic construct
  misc_feature 1..80: note = Artificially Synthesized Probe
  source 1..80: mol_type = other DNA
cacctcgatctttcaaagagctgggatgagagatttccaccatgcctggcctcattttcttttttaatttttttttagac

SEQ ID NO: 53581 - DNA, 80 bp, synthetic construct
  misc_feature 1..80: note = Artificially Synthesized Probe
  source 1..80: mol_type = other DNA
ctttattcagttagtgatgtttcttagatacgggtccaaattagtacacaaagcacttcctcattcctctcttacggctg

SEQ ID NO: 53582 - DNA, 80 bp, synthetic construct
  misc_feature 1..80: note = Artificially Synthesized Probe
  source 1..80: mol_type = other DNA
ttgtactggtttattctcctacaatgtgtgagagttgggtaattacttaatctcaatatgtgagagtttaggcagttacc

SEQ ID NO: 53583 - DNA, 80 bp, synthetic construct; identical to SEQ ID NO: 24915
  misc_feature 1..80: note = Artificially Synthesized Probe
  source 1..80: mol_type = other DNA

SEQ ID NO: 53584 - DNA, 80 bp, synthetic construct
  misc_feature 1..80: note = Artificially Synthesized Probe
  source 1..80: mol_type = other DNA
ctcctggttgcagagctccaagtcctcacacagatacgcctgtttgagaagcagcgggcaagaaagacgcaagcccagag

SEQ ID NO: 53585 - DNA, 80 bp, synthetic construct
  misc_feature 1..80: note = Artificially Synthesized Probe
  source 1..80: mol_type = other DNA
ctttgggaccaaggaaactttcccctgatcatcaagaatcttaagatagaagactcagatacttacatctgtgaagtgga

SEQ ID NO: 53586 - DNA, 80 bp, synthetic construct
  misc_feature 1..80: note = Artificially Synthesized Probe
  source 1..80: mol_type = other DNA
tcaaactggcctccaaatgtcttaaaacccttcttgatcaggtgagggatgctggtgggcggaggagggaagaggccttg

SEQ ID NO: 53587 - DNA, 80 bp, synthetic construct
  misc_feature 1..80: note = Artificially Synthesized Probe
  source 1..80: mol_type = other DNA
gacggcgataatggagagatgttgttggtttcctgttgtctgcccttctccttggggatggtatgtgtgtgacacagctg

SEQ ID NO: 53588 - DNA, 80 bp, synthetic construct; identical to SEQ ID NO: 24916
  misc_feature 1..80: note = Artificially Synthesized Probe
  source 1..80: mol_type = other DNA

SEQ ID NO: 53589 - DNA, 80 bp, synthetic construct
  misc_feature 1..80: note = Artificially Synthesized Probe
  source 1..80: mol_type = other DNA
gagaagactaggtcccctagagctgaggcctgtcttgaaggactcactggggccctcatcctcagggggctgattggcag

SEQ ID NO: 53590 - DNA, 80 bp, synthetic construct
  misc_feature 1..80: note = Artificially Synthesized Probe
  source 1..80: mol_type = other DNA
actcagggacactaacaccagtaagccaaccctgatgatgttctatgttgtacctctggacctctaagccaggccactgt

SEQ ID NO: 53591 - DNA, 80 bp, synthetic construct; identical to SEQ ID NO: 24917
  misc_feature 1..80: note = Artificially Synthesized Probe
  source 1..80: mol_type = other DNA

SEQ ID NO: 53592 - DNA, 80 bp, synthetic construct
  misc_feature 1..80: note = Artificially Synthesized Probe
  source 1..80: mol_type = other DNA
tctgtgatggcttccgggaggagggaggtggcctgctgtaggaaaatgctgggtggaagaagggagagaaggctggagag

SEQ ID NO: 53593 - DNA, 80 bp, synthetic construct
  misc_feature 1..80: note = Artificially Synthesized Probe
  source 1..80: mol_type = other DNA
gaaggcctccagcatagtctataagaaagagggggaacaggtggagttctccttcccactcgcctttacagttgaaaagc

SEQ ID NO: 53594 - DNA, 80 bp, synthetic construct
  misc_feature 1..80: note = Artificially Synthesized Probe
  source 1..80: mol_type = other DNA
tttctcttggaactggtcatgagcagcgatttcccactggaactgtgagcttccagaggtcagagactgtgctagactcc

SEQ ID NO: 53595 - DNA, 80 bp, synthetic construct
  misc_feature 1..80: note = Artificially Synthesized Probe
  source 1..80: mol_type = other DNA
ccaggccttgcctcagtatgctggctctggaaacctcaccctggcccttgaagcgaaaacaggaaagttgcatcaggaag

SEQ ID NO: 53596 - DNA, 80 bp, synthetic construct
  misc_feature 1..80: note = Artificially Synthesized Probe
  source 1..80: mol_type = other DNA
gggtttggggctggttttgaactgagacatccatgagccagcctggggctggcttcactgaagatccccaaagcacttgg

SEQ ID NO: 53597 - DNA, 80 bp, synthetic construct; identical to SEQ ID NO: 24918
  misc_feature 1..80: note = Artificially Synthesized Probe
  source 1..80: mol_type = other DNA

SEQ ID NO: 53598 - DNA, 80 bp, synthetic construct
  misc_feature 1..80: note = Artificially Synthesized Probe
  source 1..80: mol_type = other DNA
tgaaaacctgctctaaaaggctaaaagaaggtcacccatatagagtatcattttaattgttctactgaatctcaggcctt

SEQ ID NO: 53599 - DNA, 80 bp, synthetic construct
  misc_feature 1..80: note = Artificially Synthesized Probe
  source 1..80: mol_type = other DNA
gaaaaatttgacctgtgaggtgtggggacccacctcccctaagctgatgctgagtttgaaactggagaacaaggaggcaa

SEQ ID NO: 53600 - DNA, 80 bp, synthetic construct
  misc_feature 1..80: note = Artificially Synthesized Probe
  source 1..80: mol_type = other DNA
tggttggcagagaccacccagagtcccggcctcccaatgcctgagttggggggttatgggtatggtgtcctctgtggtcc

SEQ ID NO: 53601 - DNA, 80 bp, synthetic construct; identical to SEQ ID NO: 24919
  misc_feature 1..80: note = Artificially Synthesized Probe
  source 1..80: mol_type = other DNA

SEQ ID NO: 53602 - DNA, 80 bp, synthetic construct
  misc_feature 1..80: note = Artificially Synthesized Probe
  source 1..80: mol_type = other DNA
atgcatgcacacacacacttacacattcacgcacatactctcacccacacactgtcgtacacgtacactcacacacttat

SEQ ID NO: 53603 - DNA, 80 bp, synthetic construct
  misc_feature 1..80: note = Artificially Synthesized Probe
  source 1..80: mol_type = other DNA
cacacacacacattcacaccattcacacacgcacacacatgcacacactcacacatgcacacacacatgcactcacacac

SEQ ID NO: 53604 - DNA, 80 bp, synthetic construct
  misc_feature 1..80: note = Artificially Synthesized Probe
  source 1..80: mol_type = other DNA
gagggattgcagggcagtcctcagtcccctggcccgtggaggagggcggtgcattgagcacatttctctcccttgcagtt

SEQ ID NO: 53605 - DNA, 80 bp, synthetic construct; identical to SEQ ID NO: 24889
  misc_feature 1..80: note = Artificially Synthesized Probe
  source 1..80: mol_type = other DNA

SEQ ID NO: 53606 - DNA, 80 bp, synthetic construct; identical to SEQ ID NO: 24920
  misc_feature 1..80: note = Artificially Synthesized Probe
  source 1..80: mol_type = other DNA

SEQ ID NO: 53607 - DNA, 80 bp, synthetic construct
  misc_feature 1..80: note = Artificially Synthesized Probe
  source 1..80: mol_type = other DNA
actccctttcttgtccctggacagcgccaagcagagcggatgtctcagatcaagagactcctcagtgagaagaagacctg

SEQ ID NO: 53608 - DNA, 80 bp, synthetic construct
  misc_feature 1..80: note = Artificially Synthesized Probe
  source 1..80: mol_type = other DNA
gtgaggagatgggggctaaaggggtgtggtggagaggatagaggggtgggaaaagatggccaggagctagaaggaggcag

SEQ ID NO: 53609 - DNA, 80 bp, synthetic construct
  misc_feature 1..80: note = Artificially Synthesized Probe
  source 1..80: mol_type = other DNA
ggacagacctgctccccttcttctttgttcctgcagccggtttcagaagacatgtagccccatttgaggcacgaggccag

SEQ ID NO: 53610 - DNA, 80 bp, synthetic construct; identical to SEQ ID NO: 24921
  misc_feature 1..80: note = Artificially Synthesized Probe
  source 1..80: mol_type = other DNA

SEQ ID NO: 53611 - DNA, 80 bp, synthetic construct
  misc_feature 1..80: note = Artificially Synthesized Probe
  source 1..80: mol_type = other DNA
gcacaaaatcacacagccaagccagtcaaggatggatgcagatccagaggtttctggcagccagtacctcctgccccatg

SEQ ID NO: 53612 - DNA, 80 bp, synthetic construct
  misc_feature 1..80: note = Artificially Synthesized Probe
  source 1..80: mol_type = other DNA
agaactaagatgatcatctccagtttatagaccagaaccagagctcagagaggctagatgattgattaccaagtgccgga

SEQ ID NO: 53613 - DNA, 80 bp, synthetic construct; identical to SEQ ID NO: 24922
  misc_feature 1..80: note = Artificially Synthesized Probe
  source 1..80: mol_type = other DNA

SEQ ID NO: 53614 - DNA, 80 bp, synthetic construct
  misc_feature 1..80: note = Artificially Synthesized Probe
  source 1..80: mol_type = other DNA
gaaccctctaagggacctcaaaggtgattgtgccaggctctgcgcctgccccacaccctcccttaccctcctccagacca

SEQ ID NO: 53615 - DNA, 80 bp, synthetic construct
  misc_feature 1..80: note = Artificially Synthesized Probe
  source 1..80: mol_type = other DNA
cctattgctgctggggctccccatttgcttactttgcatttgtgcccactctccacccctgctcccctgagctgaaataa

SEQ ID NO: 53616 - DNA, 80 bp, synthetic construct
  misc_feature 1..80: note = Artificially Synthesized Probe
  source 1..80: mol_type = other DNA
ttcataagtcgcatgatctatgtaatagtctcttttaactaccttttgtgtttctgtgtgtatttttaaatttttgtctg

SEQ ID NO: 53617 - DNA, 80 bp, synthetic construct
  misc_feature 1..80: note = Artificially Synthesized Probe
  source 1..80: mol_type = other DNA
agataaatatgtcatttaagaaacggattcgaaaagaattggtggtaggggtctcatgaggccgggagagttacagaagg

SEQ ID NO: 53618 - DNA, 80 bp, synthetic construct
  misc_feature 1..80: note = Artificially Synthesized Probe
  source 1..80: mol_type = other DNA
gctttcccctcataggcttcttctgggagagaggtttcctggggtacgttctgatccctcaaaacggaaaggccctgttc

SEQ ID NO: 53619 - DNA, 80 bp, synthetic construct; identical to SEQ ID NO: 24890
  misc_feature 1..80: note = Artificially Synthesized Probe
  source 1..80: mol_type = other DNA

SEQ ID NO: 53620 - DNA, 80 bp, synthetic construct
  misc_feature 1..80: note = Artificially Synthesized Probe
  source 1..80: mol_type = other DNA
gccgtaatggcggggtggtgctgagggcaattggctagaccaattgtcttgcacgttttattttttattattatttttga

SEQ ID NO: 53621 - DNA, 80 bp, synthetic construct; identical to SEQ ID NO: 24886
  misc_feature 1..80: note = Artificially Synthesized Probe
  source 1..80: mol_type = other DNA

SEQ ID NO: 53622 - DNA, 80 bp, synthetic construct
  misc_feature 1..80: note = Artificially Synthesized Probe
  source 1..80: mol_type = other DNA
agtagagaccaggtttcactatgttggacaggctggcctcaaactcctggcctcaaatgatccgcccgccttggcctccc

SEQ ID NO: 53623 - DNA, 80 bp, synthetic construct
  misc_feature 1..80: note = Artificially Synthesized Probe
  source 1..80: mol_type = other DNA
ttgaacctgggagtttgagaccagcctgggcaacatggtgaaacccccatctctacaaaccccacaaaagttagctgggc

SEQ ID NO: 53624 - DNA, 80 bp, synthetic construct; identical to SEQ ID NO: 24891
  misc_feature 1..80: note = Artificially Synthesized Probe
  source 1..80: mol_type = other DNA

SEQ ID NO: 53625 - DNA, 80 bp, synthetic construct
  misc_feature 1..80: note = Artificially Synthesized Probe
  source 1..80: mol_type = other DNA
gcacatcccgcggctgggcttgagtgggctgcttgggggttatggggagaagataaaagtgcctgtgggaccacagactc

SEQ ID NO: 53626 - DNA, 80 bp, synthetic construct
  misc_feature 1..80: note = Artificially Synthesized Probe
  source 1..80: mol_type = other DNA
cactttggatctatgctctgtgcatctgtcttgcttctcagaatttcttcttttcctctttttttgtactaccctgcgct

SEQ ID NO: 53627 - DNA, 80 bp, synthetic construct
  misc_feature 1..80: note = Artificially Synthesized Probe
  source 1..80: mol_type = other DNA
gccggctccctcacatccaccctgggctgcaggcgtgctcggcaggctccccacagatcaaagcttgtccagggtctgca

SEQ ID NO: 53628 - DNA, 80 bp, synthetic construct; identical to SEQ ID NO: 24892
  misc_feature 1..80: note = Artificially Synthesized Probe
  source 1..80: mol_type = other DNA

SEQ ID NO: 53629 - DNA, 80 bp, synthetic construct
  misc_feature 1..80: note = Artificially Synthesized Probe
  source 1..80: mol_type = other DNA
actagggtaagacacctctggggacgctgagtatgggaatcaaaggccagatctctggggtggcagcggaagcccaaagc

SEQ ID NO: 53630 - DNA, 80 bp, synthetic construct
  misc_feature 1..80: note = Artificially Synthesized Probe
  source 1..80: mol_type = other DNA
gtcaagaatgcctctagtcttccccaggcatcttatcagggtaagctgaatttggaccccagagaagggatatcgtttat

SEQ ID NO: 53631 - DNA, 80 bp, synthetic construct; identical to SEQ ID NO: 24893
  misc_feature 1..80: note = Artificially Synthesized Probe
  source 1..80: mol_type = other DNA

SEQ ID NO: 53632 - DNA, 80 bp, synthetic construct
  misc_feature 1..80: note = Artificially Synthesized Probe
  source 1..80: mol_type = other DNA
catatgatagtcattgcattcttcactgccaggtacttacagtaaaaaaagaaaaaaaattaatgccacttttacttaag

SEQ ID NO: 53633 - DNA, 80 bp, synthetic construct
  misc_feature 1..80: note = Artificially Synthesized Probe
  source 1..80: mol_type = other DNA
gagattacaggcgcccgccaccatccccagctaatttttttgtatttttagtagacacgggggtttcatgatgttggcca

SEQ ID NO: 53634 - DNA, 80 bp, synthetic construct
  misc_feature 1..80: note = Artificially Synthesized Probe
  source 1..80: mol_type = other DNA
tatctatctatctatctatctatcacctatctatctaatctatctatatctgtctatctatctttatgtatctatcttat

SEQ ID NO: 53635 - DNA, 80 bp, synthetic construct
  misc_feature 1..80: note = Artificially Synthesized Probe
  source 1..80: mol_type = other DNA
ctcctggctaatttttgtattttcagtagagatagggtttcactatgttggccaggctggtctccaactcctgacctaaa

SEQ ID NO: 53636 - DNA, 80 bp, synthetic construct
  misc_feature 1..80: note = Artificially Synthesized Probe
  source 1..80: mol_type = other DNA
ccgggttcaagtgattctcctgcctcagcctcccaagtagctgagattacagacgtgcgtcaccatgcccagctaatttt

SEQ ID NO: 53637 - DNA, 80 bp, synthetic construct; identical to SEQ ID NO: 24894
  misc_feature 1..80: note = Artificially Synthesized Probe
  source 1..80: mol_type = other DNA

SEQ ID NO: 53638 - DNA, 80 bp, synthetic construct
  misc_feature 1..80: note = Artificially Synthesized Probe
  source 1..80: mol_type = other DNA
tcaatctttggagtagctgggattacaggcccgtaccactgtgcccggctaattttgtatttttagtagagaagggtttc

SEQ ID NO: 53639 - DNA, 80 bp, synthetic construct
  misc_feature 1..80: note = Artificially Synthesized Probe
  source 1..80: mol_type = other DNA
atctttctgtctaacctaatctattttatctatcttattcatcatctatctaatctgtctgtatgtttatctaatctatt

SEQ ID NO: 53640 - DNA, 80 bp, synthetic construct; identical to SEQ ID NO: 24895
  misc_feature 1..80: note = Artificially Synthesized Probe
  source 1..80: mol_type = other DNA

SEQ ID NO: 53641 - DNA, 80 bp, synthetic construct
  misc_feature 1..80: note = Artificially Synthesized Probe
  source 1..80: mol_type = other DNA
attgtagaaagggggttattcacataggttaagggaatcaatcaatttgaagcacagacactattaacagcaggaagagt

SEQ ID NO: 53642 - DNA, 80 bp, synthetic construct
  misc_feature 1..80: note = Artificially Synthesized Probe
  source 1..80: mol_type = other DNA
gacagaaaatatgcccagggcagggatagagtaggaaaaatatcccagcttctttcccccacccttccatctcatctctg

SEQ ID NO: 53643 - DNA, 80 bp, synthetic construct
  misc_feature 1..80: note = Artificially Synthesized Probe
  source 1..80: mol_type = other DNA
ttcatccaggctgggctggatgtgtgcatacatttcagtgacccgttttagaaacagaattaatatggtgaatagagaaa

SEQ ID NO: 53644 - DNA, 80 bp, synthetic construct
  misc_feature 1..80: note = Artificially Synthesized Probe
  source 1..80: mol_type = other DNA
catgttggcgggtgcctgtaatcccagctactcgggaggctgaggcaggagaatggcttgaatccaggaggcggaggttg

SEQ ID NO: 53645 - DNA, 80 bp, synthetic construct; identical to SEQ ID NO: 24896
  misc_feature 1..80: note = Artificially Synthesized Probe
  source 1..80: mol_type = other DNA

SEQ ID NO: 53646 - DNA, 80 bp, synthetic construct
  misc_feature 1..80: note = Artificially Synthesized Probe
  source 1..80: mol_type = other DNA
caaagatgccactgggggaaagaaggaccaagcttggaagacagagtaagtctggaggcaagatcttgtctcaccagcag

SEQ ID NO: 53647 - DNA, 80 bp, synthetic construct
  misc_feature 1..80: note = Artificially Synthesized Probe
  source 1..80: mol_type = other DNA
tggtccccagttaccacatcaagcttcccgaagctccacacagaccatgccacatctttaccaaaaaatcagcagtgggt

SEQ ID NO: 53648 - DNA, 80 bp, synthetic construct
  misc_feature 1..80: note = Artificially Synthesized Probe
  source 1..80: mol_type = other DNA
ggtgacagagtggatctaaactaaaaataaaaagatttacagtcaagcctcaaaggcttttcccataccttcttccacca

SEQ ID NO: 53649 - DNA, 80 bp, synthetic construct
  misc_feature 1..80: note = Artificially Synthesized Probe
  source 1..80: mol_type = other DNA
gggcgtatgacgccggagccctctgaccgcacctctgaccacaacaaacccctactccacccgtcttgtttgtcccaccc

SEQ ID NO: 53650 - DNA, 80 bp, synthetic construct
  misc_feature 1..80: note = Artificially Synthesized Probe
  source 1..80: mol_type = other DNA
gaatcttagattgaaggctctagatagtgatcatacctgttgcaacaactgggaaactcttgccatctgttgacttcact

SEQ ID NO: 53651 - DNA, 80 bp, synthetic construct; identical to SEQ ID NO: 24933
  misc_feature 1..80: note = Artificially Synthesized Probe
  source 1..80: mol_type = other DNA

SEQ ID NO: 53652 - DNA, 80 bp, synthetic construct
  misc_feature 1..80: note = Artificially Synthesized Probe
  source 1..80: mol_type = other DNA
aagccagggagatgagtacaaaatgggaagtgaaagtctcttctctatcactagtcctactcggagaggtaacaattttt

SEQ ID NO: 53653 - DNA, 80 bp, synthetic construct
  misc_feature 1..80: note = Artificially Synthesized Probe
  source 1..80: mol_type = other DNA
ttttgttctagtttgattttttttatgaactattattacaaatgatgctataatattcttgtacatctgtcactgcacat

SEQ ID NO: 53654 - DNA, 80 bp, synthetic construct
  misc_feature 1..80: note = Artificially Synthesized Probe
  source 1..80: mol_type = other DNA
gtctcccactgatacaacatcattgtggtgtttgcacctttaatgataatgattgttagggagatttgacaatgtaaatg

SEQ ID NO: 53655 - DNA, 80 bp, synthetic construct; identical to SEQ ID NO: 24934
  misc_feature 1..80: note = Artificially Synthesized Probe
  source 1..80: mol_type = other DNA

SEQ ID NO: 53656 - DNA, 80 bp, synthetic construct
  misc_feature 1..80: note = Artificially Synthesized Probe
  source 1..80: mol_type = other DNA
actagtaattgatagttctctagcgttactaaaccccagggtataccctgttggcacgtcacactccagctaattgaaga

SEQ ID NO: 53657 - DNA, 80 bp, synthetic construct
  misc_feature 1..80: note = Artificially Synthesized Probe
  source 1..80: mol_type = other DNA
ctaaggattcaccttgacccagacaaaagaccacttctaggaaagagaaaccagcaaagctttaatggttatggagggat

SEQ ID NO: 53658 - DNA, 80 bp, synthetic construct
  misc_feature 1..80: note = Artificially Synthesized Probe
  source 1..80: mol_type = other DNA
aaatgaaatctctcagaacctgatggtatttggatagcatatacccaccagaggaacaggcttttatctagcataccaca

SEQ ID NO: 53659 - DNA, 80 bp, synthetic construct; identical to SEQ ID NO: 24935
  misc_feature 1..80: note = Artificially Synthesized Probe
  source 1..80: mol_type = other DNA

SEQ ID NO: 53660 - DNA, 80 bp, synthetic construct
  misc_feature 1..80: note = Artificially Synthesized Probe
  source 1..80: mol_type = other DNA
atgtgaccaaatcaagagaaaacaaaaccaaataaagaatatccagataattgagttagcaaatgagaaccttaaaataa

SEQ ID NO: 53661 - DNA, 80 bp, synthetic construct
  misc_feature 1..80: note = Artificially Synthesized Probe
  source 1..80: mol_type = other DNA
tttagctattcaggcagagcaggaaacagtattaggaactgaaagatcggttaaaaatacccaaactgatgcacaaagag

SEQ ID NO: 53662 - DNA, 80 bp, synthetic construct
  misc_feature 1..80: note = Artificially Synthesized Probe
  source 1..80: mol_type = other DNA
ctcagaattttccaaaactgataaagtacattagccaacagattcaagaagctctctgactctaagctgaataaaaataa

SEQ ID NO: 53663 - DNA, 80 bp, synthetic construct
  misc_feature 1..80: note = Artificially Synthesized Probe
  source 1..80: mol_type = other DNA
ctgtaagaaaattactgttcacctagaattttatacccagttaatatatccttcaaaactgaatgcaaaatagagatgta

SEQ ID NO: 53664 - DNA, 80 bp, synthetic construct; identical to SEQ ID NO: 24936
  misc_feature 1..80: note = Artificially Synthesized Probe
  source 1..80: mol_type = other DNA

SEQ ID NO: 53665 - DNA, 80 bp, synthetic construct
  misc_feature 1..80: note = Artificially Synthesized Probe
  source 1..80: mol_type = other DNA
taataatggatatttaatccaaaagagaacgagagagagagaagcagaaaggaacacagaatagatgggagaaatagaaa

SEQ ID NO: 53666 - DNA, 80 bp, synthetic construct
  misc_feature 1..80: note = Artificially Synthesized Probe
  source 1..80: mol_type = other DNA
gacacagtttaattacaagaacacagaatagttgaaagtaaaggatggaaaaatataccatgcaaatattaacccttcaa

SEQ ID NO: 53667 - DNA, 80 bp, synthetic construct
  misc_feature 1..80: note = Artificially Synthesized Probe
  source 1..80: mol_type = other DNA
tgatatgttttcttaagtattttataaagtaggacttaccaaatacaactctgtggtggcatttttaaaagctctcaata

SEQ ID NO: 53668 - DNA, 80 bp, synthetic construct
  misc_feature 1..80: note = Artificially Synthesized Probe
  source 1..80: mol_type = other DNA
atagacaaatacacactcatagttagaaaattccacacctatctcaatagctaataggacaagcaaccaaaaatcagtga

SEQ ID NO: 53669 - DNA, 80 bp, synthetic construct; identical to SEQ ID NO: 24937
  misc_feature 1..80: note = Artificially Synthesized Probe
  source 1..80: mol_type = other DNA

SEQ ID NO: 53670 - DNA, 80 bp, synthetic construct
  misc_feature 1..80: note = Artificially Synthesized Probe
  source 1..80: mol_type = other DNA
taaaaaaactttacttatcttaataatgattatcattgtttgagtgcctgctaaatgctgttacctgctaggcgttttac

SEQ ID NO: 53671 - DNA, 80 bp, synthetic construct
  misc_feature 1..80: note = Artificially Synthesized Probe
  source 1..80: mol_type = other DNA
atgtaatctcttgcttcagggacagacactgtgaaatagcttactcaattatttcccttaatccttcctcaataataatt

SEQ ID NO: 53672 - DNA, 80 bp, synthetic construct
  misc_feature 1..80: note = Artificially Synthesized Probe
  source 1..80: mol_type = other DNA
gttgggctctgaagactgaaaaagttgctctgctgttagatttatgcttttcagaatatgttcttaatgaaagtttcacc

SEQ ID NO: 53673 - DNA, 80 bp, synthetic construct; identical to SEQ ID NO: 24938
  misc_feature 1..80: note = Artificially Synthesized Probe
  source 1..80: mol_type = other DNA

SEQ ID NO: 53674 - DNA, 80 bp, synthetic construct
  misc_feature 1..80: note = Artificially Synthesized Probe
  source 1..80: mol_type = other DNA
tagaacttcagctccttgagaaatactcaataagagttggtttcctgaaagtcatacctaggtgtttgtggggagagaga

SEQ ID NO: 53675 - DNA, 80 bp, synthetic construct
  misc_feature 1..80: note = Artificially Synthesized Probe
  source 1..80: mol_type = other DNA
agttcagaaacctaccacagtaaatgttccaactacagaagtctcaccaacttctcagaaaaccaccacaaaaaccacca

SEQ ID NO: 53676 - DNA, 80 bp, synthetic construct; identical to SEQ ID NO: 24939
  misc_feature 1..80: note = Artificially Synthesized Probe
  source 1..80: mol_type = other DNA

SEQ ID NO: 53677 - DNA, 80 bp, synthetic construct
  misc_feature 1..80: note = Artificially Synthesized Probe
  source 1..80: mol_type = other DNA
attcaccacagcaaaagttgcatttacgcagagtccttcagcagcacgtaagtccactaatgtacattccccagtgacta

SEQ ID NO: 53678 - DNA, 80 bp, synthetic construct
  misc_feature 1..80: note = Artificially Synthesized Probe
  source 1..80: mol_type = other DNA
atctaatgtgctatggtggaaatatgaacttgaccaagattgcaggattaaatggtctctaatttattgtagccagggtt

SEQ ID NO: 53679 - DNA, 80 bp, synthetic construct
  misc_feature 1..80: note = Artificially Synthesized Probe
  source 1..80: mol_type = other DNA
actttgaaaaaatatatgtatatatataaattgggatatatatatagggagagagatatatataattgggatatatatat

SEQ ID NO: 53680 - DNA, 80 bp, synthetic construct
  misc_feature 1..80: note = Artificially Synthesized Probe
  source 1..80: mol_type = other DNA
gtagtagttttagggagtcaacgaattattcaagaccccttcaaagaaccaaatatgtactgtctttaaggctgagtcct

SEQ ID NO: 53681 - DNA, 80 bp, synthetic construct
  misc_feature 1..80: note = Artificially Synthesized Probe
  source 1..80: mol_type = other DNA
agagatcctttcaaatagttcgtattattacaaggctctataaacgataggttctcagtggcaccaagtaattgtgtttt

SEQ ID NO: 53682 - DNA, 80 bp, synthetic construct; identical to SEQ ID NO: 24940
  misc_feature 1..80: note = Artificially Synthesized Probe
  source 1..80: mol_type = other DNA

SEQ ID NO: 53683 - DNA, 80 bp, synthetic construct
  misc_feature 1..80: note = Artificially Synthesized Probe
  source 1..80: mol_type = other DNA
tttacaattttatgacttctcttggtctaaaatttctaggttgaacacgtccagtttttaatagggcaaggcaaagagaa

SEQ ID NO: 53684 - DNA, 80 bp, synthetic construct
  misc_feature 1..80: note = Artificially Synthesized Probe
  source 1..80: mol_type = other DNA
actctttcagggcacaatataaaaaaattgtagccaccacttactgagtatatactatagtgatatgttccgttcacctt

SEQ ID NO: 53685 - DNA, 80 bp, synthetic construct; identical to SEQ ID NO: 24941
  misc_feature 1..80: note = Artificially Synthesized Probe
  source 1..80: mol_type = other DNA

SEQ ID NO: 53686 - DNA, 80 bp, synthetic construct
  misc_feature 1..80: note = Artificially Synthesized Probe
  source 1..80: mol_type = other DNA
caaacatgtttcttgccctcaagtcctataaccaaatttaaatggcatttgttttggtaatcaataactctttatcataa

SEQ ID NO: 53687 - DNA, 80 bp, synthetic construct
  misc_feature 1..80: note = Artificially Synthesized Probe
  source 1..80: mol_type = other DNA
tatgaaattgctagcaaatcaatgactttaacaaatttttgttgttaatcctttttttccccttcgtctgtaggtactac

SEQ ID NO: 53688 - DNA, 80 bp, synthetic construct
  misc_feature 1..80: note = Artificially Synthesized Probe
  source 1..80: mol_type = other DNA
aacgtcactcaaatagggaaaatagtacagtgaatcctcatatactcgctcggattcagcaattttcaactcatggatac

SEQ ID NO: 53689 - DNA, 80 bp, synthetic construct
  misc_feature 1..80: note = Artificially Synthesized Probe
  source 1..80: mol_type = other DNA
aatccagtaattccttaatatcagcaaatatttagtcaatatccaaacttccctgattatcttataattttttaattgat

SEQ ID NO: 53690 - DNA, 80 bp, synthetic construct; identical to SEQ ID NO: 24924
  misc_feature 1..80: note = Artificially Synthesized Probe
  source 1..80: mol_type = other DNA

SEQ ID NO: 53691 - DNA, 80 bp, synthetic construct; identical to SEQ ID NO: 24942
  misc_feature 1..80: note = Artificially Synthesized Probe
  source 1..80: mol_type = other DNA

SEQ ID NO: 53692 - DNA, 80 bp, synthetic construct
  misc_feature 1..80: note = Artificially Synthesized Probe
  source 1..80: mol_type = other DNA
atttaatataatggcctctagttccattcatgttgctgcaaatgacataactttattctttttatggctgaatgtatttc

SEQ ID NO: 53693 - DNA, 80 bp, synthetic construct
  misc_feature 1..80: note = Artificially Synthesized Probe
  source 1..80: mol_type = other DNA
gcctcccaagtagctggtactacaggtgtgtgccacgacacccggctaagtttttgaaatttattttttgtagagacagg

SEQ ID NO: 53694 - DNA, 80 bp, synthetic construct
  misc_feature 1..80: note = Artificially Synthesized Probe
  source 1..80: mol_type = other DNA
tgctattgtgaatagtgcttcaataaatatgtgaatgcacatatctttttgatatattggttttattttcctttggataa

SEQ ID NO: 53695 - DNA, 80 bp, synthetic construct; identical to SEQ ID NO: 24943
  misc_feature 1..80: note = Artificially Synthesized Probe
  source 1..80: mol_type = other DNA

SEQ ID NO: 53696 - DNA, 80 bp, synthetic construct
  misc_feature 1..80: note = Artificially Synthesized Probe
  source 1..80: mol_type = other DNA
catttagcaggttgtctcttcactctgttgattgtttcctttgctgtacacaagctttttagtttaatatagtcctattt

SEQ ID NO: 53697 - DNA, 80 bp, synthetic construct
  misc_feature 1..80: note = Artificially Synthesized Probe
  source 1..80: mol_type = other DNA
atggtgaggggcagaggtccagtttcattcttctgtattttcccagcactatttattgaagaaggtatccattttccaat

SEQ ID NO: 53698 - DNA, 80 bp, synthetic construct
  misc_feature 1..80: note = Artificially Synthesized Probe
  source 1..80: mol_type = other DNA
gatgctgccagctttgtttttgctcgggttgtgttagctctttggactcttttggttccacaatcattttaggacttttt

SEQ ID NO: 53699 - DNA, 80 bp, synthetic construct
  misc_feature 1..80: note = Artificially Synthesized Probe
  source 1..80: mol_type = other DNA
tgttttgtagttttccttgtaggggtctttcacctccttagttaaatctgttcctaggtattttatttatttttttagtt

SEQ ID NO: 53700 - DNA, 80 bp, synthetic construct
  misc_feature 1..80: note = Artificially Synthesized Probe
  source 1..80: mol_type = other DNA
ccctgtattagctttgagatatatgagtagagataaagataaagagacccgataacctgactttgaacaacttaaatcaa

SEQ ID NO: 53701 - DNA, 80 bp, synthetic construct; identical to SEQ ID NO: 24944
  misc_feature 1..80: note = Artificially Synthesized Probe
  source 1..80: mol_type = other DNA

SEQ ID NO: 53702 - DNA, 80 bp, synthetic construct
  misc_feature 1..80: note = Artificially Synthesized Probe
  source 1..80: mol_type = other DNA
ttttcctcattcaacagaatattagctgtgggtttgtcatgtatgacctttatgatgttaatatgcttcttctatgccta

SEQ ID NO: 53703 - DNA, 80 bp, synthetic construct
  misc_feature 1..80: note = Artificially Synthesized Probe
  source 1..80: mol_type = other DNA
ggcctgtgattttgttgttcttgttgtgttcttgtctggttttggtatcagggtaatgctggccttatagaatgagttag

SEQ ID NO: 53704 - DNA, 80 bp, synthetic construct; identical to SEQ ID NO: 24945
  misc_feature 1..80: note = Artificially Synthesized Probe
  source 1..80: mol_type = other DNA

SEQ ID NO: 53705 - DNA, 80 bp, synthetic construct
  misc_feature 1..80: note = Artificially Synthesized Probe
  source 1..80: mol_type = other DNA
tcttttcaaaaaaacaagttttcactttattgttttttagtctctattttgtttagctctgctctgatttttcttacttc

SEQ ID NO: 53706 - DNA, 80 bp, synthetic construct
  misc_feature 1..80: note = Artificially Synthesized Probe
  source 1..80: mol_type = other DNA
tgctacactgttgccatttctattttttcaagaaattttttgtctaatcctgaatttctcccttgacctaatggtcattc

SEQ ID NO: 53707 - DNA, 80 bp, synthetic construct
  misc_feature 1..80: note = Artificially Synthesized Probe
  source 1..80: mol_type = other DNA
ttctggagattgtttcatgtgccattgagaaaattctgtagctattgggtgaactcttctgttagtgtctgttaggtcca

SEQ ID NO: 53708 - DNA, 80 bp, synthetic construct
  misc_feature 1..80: note = Artificially Synthesized Probe
  source 1..80: mol_type = other DNA
agattggacaatatttgctttatatgtttgggtactccaggattgggtgcatacatacttagaattgttatatcctcttg

SEQ ID NO: 53709 - DNA, 80 bp, synthetic construct
  misc_feature 1..80: note = Artificially Synthesized Probe
  source 1..80: mol_type = other DNA
cacatgtatcatgttttaactcttccccatgttattactttatccaatcctccaaacaaccttatgaggtaagttggggc

SEQ ID NO: 53710 - DNA, 80 bp, synthetic construct; identical to SEQ ID NO: 24946
  misc_feature 1..80: note = Artificially Synthesized Probe
  source 1..80: mol_type = other DNA

SEQ ID NO: 53711 - DNA, 80 bp, synthetic construct
  misc_feature 1..80: note = Artificially Synthesized Probe
  source 1..80: mol_type = other DNA
tttctcttctttgtgtgtttgctctaccagtggtttttaaaatttctgtgtgttttcatgattgtagatatcattctttc

SEQ ID NO: 53712 - DNA, 80 bp, synthetic construct
  misc_feature 1..80: note = Artificially Synthesized Probe
  source 1..80: mol_type = other DNA
tttttctttcagcgctttgagtatatcatcccgttctctcctggcctgtaaggtttctgctgagaaatccattgttagtc

SEQ ID NO: 53713 - DNA, 80 bp, synthetic construct
  misc_feature 1..80: note = Artificially Synthesized Probe
  source 1..80: mol_type = other DNA
gtacagtggcgcaatctcagctcactgcagcctctgcctcccaagttcaagcgattctcccacctcagcctcctgagtag

SEQ ID NO: 53714 - DNA, 80 bp, synthetic construct; identical to SEQ ID NO: 24947
  misc_feature 1..80: note = Artificially Synthesized Probe
  source 1..80: mol_type = other DNA

SEQ ID NO: 53715 - DNA, 80 bp, synthetic construct
  misc_feature 1..80: note = Artificially Synthesized Probe
  source 1..80: mol_type = other DNA
gactcctaaaatttgaatagttggccactttagggtgtcccatatgtcatgtaaactttgcccatttttttattcttttt

SEQ ID NO: 53716 - DNA, 80 bp, synthetic construct
  misc_feature 1..80: note = Artificially Synthesized Probe
  source 1..80: mol_type = other DNA
aagttgtttggttcttttatatgtatctttttttgataaacatctcattaatatcctgaattgtttttctgatttctttg

SEQ ID NO: 53717 - DNA, 80 bp, synthetic construct
  misc_feature 1..80: note = Artificially Synthesized Probe
  source 1..80: mol_type = other DNA
ccatgaccgtcgcgcggccgagcgtgcccgcggcgctgcccctcctcggggagctgccccggctgctgctgctggtgctg

SEQ ID NO: 53718 - DNA, 80 bp, synthetic construct; identical to SEQ ID NO: 24948
  misc_feature 1..80: note = Artificially Synthesized Probe
  source 1..80: mol_type = other DNA

SEQ ID NO: 53719 - DNA, 80 bp, synthetic construct
  misc_feature 1..80: note = Artificially Synthesized Probe
  source 1..80: mol_type = other DNA
gcggttactagtggagatttgctagggaataggatgccatgtgggccaatgttcggacccaagtgttggcagtggtgggc

SEQ ID NO: 53720 - DNA, 80 bp, synthetic construct
  misc_feature 1..80: note = Artificially Synthesized Probe
  source 1..80: mol_type = other DNA
gatgacccttccacttgaccatgcctctctagattcacatttgtgggcaatctgtttacagatgtaaatactttatgtat

SEQ ID NO: 53721 - DNA, 80 bp, synthetic construct
  misc_feature 1..80: note = Artificially Synthesized Probe
  source 1..80: mol_type = other DNA
tggcagtagtagtggtgggacaaccctgtgggacacaagcagtctgtgccagtgttggctgtgggtgcggtgattgggtg

SEQ ID NO: 53722 - DNA, 80 bp, synthetic construct
  misc_feature 1..80: note = Artificially Synthesized Probe
  source 1..80: mol_type = other DNA
cgctgggccagatggacttgtcctcaggcctccctgtggtgcatgtgagtgctggctgtggtaggaagaggtagagtatt

SEQ ID NO: 53723 - DNA, 80 bp, synthetic construct
  misc_feature 1..80: note = Artificially Synthesized Probe
  source 1..80: mol_type = other DNA
catagccgcatgcactggaatttgtcctcagggaaccagaaaatgcctggctgctcctctattgggggtgtcaggtcgct

SEQ ID NO: 53724 - DNA, 80 bp, synthetic construct; identical to SEQ ID NO: 24949
  misc_feature 1..80: note = Artificially Synthesized Probe
  source 1..80: mol_type = other DNA

SEQ ID NO: 53725 - DNA, 80 bp, synthetic construct
  misc_feature 1..80: note = Artificially Synthesized Probe
  source 1..80: mol_type = other DNA
ctctctttgatgatctcttcaaaatgtgattatgtaattcctgcttaggtttctctccatggaagaggagaagaccagag

SEQ ID NO: 53726 - DNA, 80 bp, synthetic construct
  misc_feature 1..80: note = Artificially Synthesized Probe
  source 1..80: mol_type = other DNA
atctcggctcactgcaagctctgcctcccgggttcacgccattctcctgcctcagcctcccaagtagctgggactatagg

SEQ ID NO: 53727 - DNA, 80 bp, synthetic construct; identical to SEQ ID NO: 24950
  misc_feature 1..80: note = Artificially Synthesized Probe
  source 1..80: mol_type = other DNA

SEQ ID NO: 53728 - DNA, 80 bp, synthetic construct
  misc_feature 1..80: note = Artificially Synthesized Probe
  source 1..80: mol_type = other DNA
ttcccacttataggtgagaagatgcagtatttggttttctgttcctgcattaattcacttaggataatggtttccagctg

SEQ ID NO: 53729 - DNA, 80 bp, synthetic construct
  misc_feature 1..80: note = Artificially Synthesized Probe
  source 1..80: mol_type = other DNA
tatgtctttatggtagaatgatttttgttggtttgggtatatacccaataatgagattgctaggtcacatggtggttcta

SEQ ID NO: 53730 - DNA, 80 bp, synthetic construct
  misc_feature 1..80: note = Artificially Synthesized Probe
  source 1..80: mol_type = other DNA
cattgtggttttgattgcatttctctaatgattagtgatgttgagcatttttttcatatgcttgttggcctcatgtatgt

SEQ ID NO: 53731 - DNA, 80 bp, synthetic construct; identical to SEQ ID NO: 24925
  misc_feature 1..80: note = Artificially Synthesized Probe
  source 1..80: mol_type = other DNA

SEQ ID NO: 53732 - DNA, 80 bp, synthetic construct; identical to SEQ ID NO: 24951
  misc_feature 1..80: note = Artificially Synthesized Probe
  source 1..80: mol_type = other DNA

SEQ ID NO: 53733 - DNA, 80 bp, synthetic construct
  misc_feature 1..80: note = Artificially Synthesized Probe
  source 1..80: mol_type = other DNA
gtccattttcaatcttctgcatatggctagccagttatagcatttattgaatagagaatccattccccattgcttgttat

SEQ ID NO: 53734 - DNA, 80 bp, synthetic construct
  misc_feature 1..80: note = Artificially Synthesized Probe
  source 1..80: mol_type = other DNA
tccagctttgttctttttacttacggttgttttggctatttgggttcttttttgattccatatgaattttagaatgtata

SEQ ID NO: 53735 - DNA, 80 bp, synthetic construct
  misc_feature 1..80: note = Artificially Synthesized Probe
  source 1..80: mol_type = other DNA
atgatcttggttcactgcaacctccgtctcctgggttcaagtgattctcttgcctcagcctcccaagtagctacgattac

SEQ ID NO: 53736 - DNA, 80 bp, synthetic construct
  misc_feature 1..80: note = Artificially Synthesized Probe
  source 1..80: mol_type = other DNA
atggcccttttaaaaatatttattcttcctatgcatgagcatggaatatttttccatttgtttgtattgtctctgtcttc

SEQ ID NO: 53737 - DNA, 80 bp, synthetic construct; identical to SEQ ID NO: 24952
  misc_feature 1..80: note = Artificially Synthesized Probe
  source 1..80: mol_type = other DNA

SEQ ID NO: 53738 - DNA, 80 bp, synthetic construct
  misc_feature 1..80: note = Artificially Synthesized Probe
  source 1..80: mol_type = other DNA
ttgctcattcagtatgatgttggctgtgggtttttcctggcggctcttattattttgtggtatgttcctttgatgcctag

SEQ ID NO: 53739 - DNA, 80 bp, synthetic construct
  misc_feature 1..80: note = Artificially Synthesized Probe
  source 1..80: mol_type = other DNA
taaagcctacttgatcgtggtaagttaggtatttgatgtgctgctggatttgatctgctagtattttgttgaggattttt

SEQ ID NO: 53740 - DNA, 80 bp, synthetic construct
  misc_feature 1..80: note = Artificially Synthesized Probe
  source 1..80: mol_type = other DNA
attgcaagtgccatggtgatattaatatagttaagtactaaatatgcgcaaagcagtaaagaaagggggttattagggtc

SEQ ID NO: 53741 - DNA, 80 bp, synthetic construct
  misc_feature 1..80: note = Artificially Synthesized Probe
  source 1..80: mol_type = other DNA
gtatgtttggtggaatttgtctgtgaatccatctggtacagggctctttctggttggtaggttttttaaattactgattc

SEQ ID NO: 53742 - DNA, 80 bp, synthetic construct; identical to SEQ ID NO: 24953
  misc_feature 1..80: note = Artificially Synthesized Probe
  source 1..80: mol_type = other DNA

SEQ ID NO: 53743 - DNA, 80 bp, synthetic construct
  misc_feature 1..80: note = Artificially Synthesized Probe
  source 1..80: mol_type = other DNA
cctctagaggtgatgttactttgttaatttgagatttttctaacattttgatgtaggtgtttaatgctacaaactttcct

SEQ ID NO: 53744 - DNA, 80 bp, synthetic construct
  misc_feature 1..80: note = Artificially Synthesized Probe
  source 1..80: mol_type = other DNA
atcttcctggtattgatttatattttatgctgtggcctaagagtatggttagtatgattttggttttttgaatttgttta

SEQ ID NO: 53745 - DNA, 80 bp, synthetic construct
  misc_feature 1..80: note = Artificially Synthesized Probe
  source 1..80: mol_type = other DNA
tttctgccttgattatgtgtctaacattgtcaatggggtgttgaagtctcccactatattgtgtggttatttccatctct

SEQ ID NO: 53746 - DNA, 80 bp, synthetic construct; identical to SEQ ID NO: 24954
  misc_feature 1..80: note = Artificially Synthesized Probe
  source 1..80: mol_type = other DNA

SEQ ID NO: 53747 - DNA, 80 bp, synthetic construct
  misc_feature 1..80: note = Artificially Synthesized Probe
  source 1..80: mol_type = other DNA
ttagtcggcattccagcttgtgttaaaaaataaagaggaagtccttccttcttaaactggacatatggcaacattttttg

SEQ ID NO: 53748 - DNA, 80 bp, synthetic construct
  misc_feature 1..80: note = Artificially Synthesized Probe
  source 1..80: mol_type = other DNA
aattacactgcaatgtaagtaaaatgatacagatgatctttgaattttggaagtatttgatttttttttcctattctgct

SEQ ID NO: 53749 - DNA, 80 bp, synthetic construct; identical to SEQ ID NO: 24955
  misc_feature 1..80: note = Artificially Synthesized Probe
  source 1..80: mol_type = other DNA

SEQ ID NO: 53750 - DNA, 80 bp, synthetic construct
  misc_feature 1..80: note = Artificially Synthesized Probe
  source 1..80: mol_type = other DNA
tatagaagaaagagcttaacctctggagtcaaaccagtcggatgttggtttgaatcctgtttttttcacttagtaattat

SEQ ID NO: 53751 - DNA, 80 bp, synthetic construct
  misc_feature 1..80: note = Artificially Synthesized Probe
  source 1..80: mol_type = other DNA
ttaaggaagtcactgcatgcaatcactattattttcctaagctggatttctgataatttcatcactccctctggccacac

SEQ ID NO: 53752 - DNA, 80 bp, synthetic construct
  misc_feature 1..80: note = Artificially Synthesized Probe
  source 1..80: mol_type = other DNA
tgtggaatatgagtgccgtccaggttacagaagagaaccttctctatcaccaaaactaacttgccttcagaatttaaaat

SEQ ID NO: 53753 - DNA, 80 bp, synthetic construct
  misc_feature 1..80: note = Artificially Synthesized Probe
  source 1..80: mol_type = other DNA
gcaaaatttgtaacttgcctttcacagagctagtaggcaataaatagaggccgatgactagtttctctattaccaggttt

SEQ ID NO: 53754 - DNA, 80 bp, synthetic construct; identical to SEQ ID NO: 24956
  misc_feature 1..80: note = Artificially Synthesized Probe
  source 1..80: mol_type = other DNA

SEQ ID NO: 53755 - DNA, 80 bp, synthetic construct
  misc_feature 1..80: note = Artificially Synthesized Probe
  source 1..80: mol_type = other DNA
tgccaaagtcctatactgagacattcataagtccctcatggggactaatagatcaatttaaagaataataaataagaagt

SEQ ID NO: 53756 - DNA, 80 bp, synthetic construct
  misc_feature 1..80: note = Artificially Synthesized Probe
  source 1..80: mol_type = other DNA
ataagatgtggttacaggggtctttatgtcttattacatgcccctatacatgacaaacttaagtcccattataaagtgac

SEQ ID NO: 53757 - DNA, 80 bp, synthetic construct
  misc_feature 1..80: note = Artificially Synthesized Probe
  source 1..80: mol_type = other DNA
ttaaagggtcctgtggatgtctctctgaggaagcagagttgaatctgcatttacaaaatggaaaatttaagggttactca

SEQ ID NO: 53758 - DNA, 80 bp, synthetic construct; identical to SEQ ID NO: 24957
  misc_feature 1..80: note = Artificially Synthesized Probe
  source 1..80: mol_type = other DNA

SEQ ID NO: 53759 - DNA, 80 bp, synthetic construct
  misc_feature 1..80: note = Artificially Synthesized Probe
  source 1..80: mol_type = other DNA
tgaatctggggctagaagtgagtttttctatggcaataaactgacttaccctttcttggtctcagttttcttatctggaa

SEQ ID NO: 53760 - DNA, 80 bp, synthetic construct
  misc_feature 1..80: note = Artificially Synthesized Probe
  source 1..80: mol_type = other DNA
tactaaaatactccttttgtgggggagaaaacctttttctaacattatgttattttcccacctaagagctcttcagttta

SEQ ID NO: 53761 - DNA, 80 bp, synthetic construct
  misc_feature 1..80: note = Artificially Synthesized Probe
  source 1..80: mol_type = other DNA
tgtttctaatttgggagataatatgctcttattaatttactgagaagatacgtagaattttgtttttcatatttctgtgt

SEQ ID NO: 53762 - DNA, 80 bp, synthetic construct; identical to SEQ ID NO: 24958
  misc_feature 1..80: note = Artificially Synthesized Probe
  source 1..80: mol_type = other DNA

SEQ ID NO: 53763 - DNA, 80 bp, synthetic construct
  misc_feature 1..80: note = Artificially Synthesized Probe
  source 1..80: mol_type = other DNA
aatttattttgaattagactaaatatttatgtggtaggaatacttattcattcaaaaatttcacatttaattagtttgag

SEQ ID NO: 53764 - DNA, 80 bp, synthetic construct
  misc_feature 1..80: note = Artificially Synthesized Probe
  source 1..80: mol_type = other DNA
ttttcacatggcagtgcaattgtacagtgtctctattttgctgatttggagccaaatacactcattagtcacgttagatt

SEQ ID NO: 53765 - DNA, 80 bp, synthetic construct
  misc_feature 1..80: note = Artificially Synthesized Probe
  source 1..80: mol_type = other DNA
agagagaatgaggatggtgagagaaaagggcaaatgggtgcatttgagaagaaagattgtgtaagctataaaaatgattt

SEQ ID NO: 53766 - DNA, 80 bp, synthetic construct
  misc_feature 1..80: note = Artificially Synthesized Probe
  source 1..80: mol_type = other DNA
ccaatctcagatgataatagtacaggcatatttcctgtgatggagaaatgtctacatatctgttatatctactgtaaact

SEQ ID NO: 53767 - DNA, 80 bp, synthetic construct
  misc_feature 1..80: note = Artificially Synthesized Probe
  source 1..80: mol_type = other DNA
taaaatcgagcatgattgggttgaaacacttaagaagcctctcaaacctgtcaaaaaattttatttgagcattgtgatat

SEQ ID NO: 53768 - DNA, 80 bp, synthetic construct; identical to SEQ ID NO: 24959
  misc_feature 1..80: note = Artificially Synthesized Probe
  source 1..80: mol_type = other DNA

SEQ ID NO: 53769 - DNA, 80 bp, synthetic construct
  misc_feature 1..80: note = Artificially Synthesized Probe
  source 1..80: mol_type = other DNA
tgtattcatttttgtctgtaattactatcctggattaacagacttcatgtctgttttttctcaatatattcaaaggcgca

SEQ ID NO: 53770 - DNA, 80 bp, synthetic construct
  misc_feature 1..80: note = Artificially Synthesized Probe
  source 1..80: mol_type = other DNA
ctttttctcacttatattaatagatgccagtccagctcaaaacagcacagtggttaaggcagcagacaaatgggggaaat

SEQ ID NO: 53771 - DNA, 80 bp, synthetic construct; identical to SEQ ID NO: 24960
  misc_feature 1..80: note = Artificially Synthesized Probe
  source 1..80: mol_type = other DNA

SEQ ID NO: 53772 - DNA, 80 bp, synthetic construct
  misc_feature 1..80: note = Artificially Synthesized Probe
  source 1..80: mol_type = other DNA
acctatctcctttttaccctctacaatttttctacttaaattaagaatattacttaagcctattataagttaaagcatgt

SEQ ID NO: 53773 - DNA, 80 bp, synthetic construct
  misc_feature 1..80: note = Artificially Synthesized Probe
  source 1..80: mol_type = other DNA
gatatatcagaaacgttttaggaatgtgatttagagcctagcaaaaactcacagttagtactaagtcatctaaagtgagt

SEQ ID NO: 53774 - DNA, 80 bp, synthetic construct
  misc_feature 1..80: note = Artificially Synthesized Probe
  source 1..80: mol_type = other DNA
agtatcaatgtatagagtattatcaatttaccaaagctactgctttgagactccctggatcggtgggaatggagactggg

SEQ ID NO: 53775 - DNA, 80 bp, synthetic construct
  misc_feature 1..80: note = Artificially Synthesized Probe
  source 1..80: mol_type = other DNA
caggagattgagagtagcctggccaacatgatgaaaccctgactctactaaaaatacaaaaactagctgggtgtggtggc

SEQ ID NO: 53776 - DNA, 80 bp, synthetic construct; identical to SEQ ID NO: 24961
  misc_feature 1..80: note = Artificially Synthesized Probe
  source 1..80: mol_type = other DNA

SEQ ID NO: 53777 - DNA, 80 bp, synthetic construct
  misc_feature 1..80: note = Artificially Synthesized Probe
  source 1..80: mol_type = other DNA
aacaatttattgtagcaaaagttatgtgaatggggtctctctctctctcaaaatatcttattgtattgtactcacctatt

SEQ ID NO: 53778 - DNA, 80 bp, synthetic construct
  misc_feature 1..80: note = Artificially Synthesized Probe
  source 1..80: mol_type = other DNA
tgtgcacataaaaaacactccacttgctttattttggaaacataagctgttgagggtaagagctagctttatatatgttt

SEQ ID NO: 53779 - DNA, 80 bp, synthetic construct
  misc_feature 1..80: note = Artificially Synthesized Probe
  source 1..80: mol_type = other DNA
gataaattttagtttagggatggaagtgtaagcagatgcctgacttcgttttttgattgaaatgacagttacataattca

SEQ ID NO: 53780 - DNA, 80 bp, synthetic construct; identical to SEQ ID NO: 24962
  misc_feature 1..80: note = Artificially Synthesized Probe
  source 1..80: mol_type = other DNA

SEQ ID NO: 53781 - DNA, 80 bp, synthetic construct
  misc_feature 1..80: note = Artificially Synthesized Probe
  source 1..80: mol_type = other DNA
aatgccacaaatattcggggggaaagggatgatacattaggacttttaaagagaatgccttcattatgataatttgcatc

SEQ ID NO: 53782 - DNA, 80 bp, synthetic construct
  misc_feature 1..80: note = Artificially Synthesized Probe
  source 1..80: mol_type = other DNA
aaaataacttggtgtaaatgtatctgtaaaactttctgagtgtcttcatctcttaatcttctcttccacatgtagtagta

SEQ ID NO: 53783 - DNA, 80 bp, synthetic construct
  misc_feature 1..80: note = Artificially Synthesized Probe
  source 1..80: mol_type = other DNA
ctaaaaactccacgtcacattttagttgttgctgtagctgataaaccccacctgtagaatcttgtccatattctattact

SEQ ID NO: 53784 - DNA, 80 bp, synthetic construct; identical to SEQ ID NO: 24963
  misc_feature 1..80: note = Artificially Synthesized Probe
  source 1..80: mol_type = other DNA

SEQ ID NO: 53785 - DNA, 80 bp, synthetic construct
  misc_feature 1..80: note = Artificially Synthesized Probe
  source 1..80: mol_type = other DNA
acctacacctcttgaaaatagaacaacttgcagaattgagagtgattcctttcctaaaagtgtaagaaagcatagagatt

SEQ ID NO: 53786 - DNA, 80 bp, synthetic construct; identical to SEQ ID NO: 24926
  misc_feature 1..80: note = Artificially Synthesized Probe
  source 1..80: mol_type = other DNA

SEQ ID NO: 53787 - DNA, 80 bp, synthetic construct
  misc_feature 1..80: note = Artificially Synthesized Probe
  source 1..80: mol_type = other DNA
aattgctaaagagagatgaaccacattataaagtaatctttggctgtaaggcattttcatctttccttcgggttggcaaa

SEQ ID NO: 53788 - DNA, 80 bp, synthetic construct
  misc_feature 1..80: note = Artificially Synthesized Probe
  source 1..80: mol_type = other DNA
agatactacaatattaacataagaaaagattatatattatttctgaatcgagatgtccatagtcaaatttgtaaatctta

SEQ ID NO: 53789 - DNA, 80 bp, synthetic construct; identical to SEQ ID NO: 24964
  misc_feature 1..80: note = Artificially Synthesized Probe
  source 1..80: mol_type = other DNA

SEQ ID NO: 53790 - DNA, 80 bp, synthetic construct
  misc_feature 1..80: note = Artificially Synthesized Probe
  source 1..80: mol_type = other DNA
gccaattacattttaagtgttagactagactaagatgtactagttgtatagaatataactagatttattatggcaatgtt

SEQ ID NO: 53791 - DNA, 80 bp, synthetic construct
  misc_feature 1..80: note = Artificially Synthesized Probe
  source 1..80: mol_type = other DNA
atttcctaatagtttctaatattaggaaattctttgaactttcctagaagttctaagagtaggcacatatccatccacct

SEQ ID NO: 53792 - DNA, 80 bp, synthetic construct
  misc_feature 1..80: note = Artificially Synthesized Probe
  source 1..80: mol_type = other DNA
ataactgcaagtgtctgccctcaagttgcttatagtttgccacaggaagaccaaaatatatacttattgagagaaagaag

SEQ ID NO: 53793 - DNA, 80 bp, synthetic construct; identical to SEQ ID NO: 24965
  misc_feature 1..80: note = Artificially Synthesized Probe
  source 1..80: mol_type = other DNA

SEQ ID NO: 53794 - DNA, 80 bp, synthetic construct
  misc_feature 1..80: note = Artificially Synthesized Probe
  source 1..80: mol_type = other DNA
ccgtgtatcctgtagttatgaggttgagtggttttatttttgcttaagataacctctcctgtgagattttactttgattg

SEQ ID NO: 53795 - DNA, 80 bp, synthetic construct
  misc_feature 1..80: note = Artificially Synthesized Probe
  source 1..80: mol_type = other DNA
aatacttgaacatgaataatttttgtcttgtcacaccctagccctgtttgctttggttaatgtccaatgtgcaaatgcct

SEQ ID NO: 53796 - DNA, 80 bp, synthetic construct
  misc_feature 1..80: note = Artificially Synthesized Probe
  source 1..80: mol_type = other DNA
ttgttcctttgtcatgtcttccatctcaacccccacacacatctctttaaaaagagtaactgtccattcactctggtagg

SEQ ID NO: 53797 - DNA, 80 bp, synthetic construct
  misc_feature 1..80: note = Artificially Synthesized Probe
  source 1..80: mol_type = other DNA
atttgtattctattctagagaaatcatgccctaatccgggagaaatacgaaatggtcagattgatgtaccaggtggcata

SEQ ID NO: 53798 - DNA, 80 bp, synthetic construct
  misc_feature 1..80: note = Artificially Synthesized Probe
  source 1..80: mol_type = other DNA
tcagtaccagcctcataggatttgcaatgagaattaagttaatacacgtagagcttaaaatagtgccagccatgtagtaa

SEQ ID NO: 53799 - DNA, 80 bp, synthetic construct; identical to SEQ ID NO: 24966
  misc_feature 1..80: note = Artificially Synthesized Probe
  source 1..80: mol_type = other DNA

SEQ ID NO: 53800 - DNA, 80 bp, synthetic construct
  misc_feature 1..80: note = Artificially Synthesized Probe
  source 1..80: mol_type = other DNA
ggatttaatcatgattgggtgttcccaggtgaatttgatgacgtgagttgagcatgtgcacaagggagtgattaaaatga

SEQ ID NO: 53801 - DNA, 80 bp, synthetic construct
  misc_feature 1..80: note = Artificially Synthesized Probe
  source 1..80: mol_type = other DNA
gtgagaaataagaatgcgtcaattgagggtaaaacagaattggcaaccagaggacaaagctgtctacaaatacacttccc

SEQ ID NO: 53802 - DNA, 80 bp, synthetic construct; identical to SEQ ID NO: 24967
  misc_feature 1..80: note = Artificially Synthesized Probe
  source 1..80: mol_type = other DNA

SEQ ID NO: 53803 - DNA, 80 bp, synthetic construct
  misc_feature 1..80: note = Artificially Synthesized Probe
  source 1..80: mol_type = other DNA
ccttctagattttggtgatacaagggtttaaacagaactatggttgtgagaagttgagataaaatggtggacaaaagtat

SEQ ID NO: 53804 - DNA, 80 bp, synthetic construct
  misc_feature 1..80: note = Artificially Synthesized Probe
  source 1..80: mol_type = other DNA
tatattctgatgatacgtgactcgaaggaaagggttttgtggaaaggaaggaggactggtctgcaaatagcaatgatgaa

SEQ ID NO: 53805 - DNA, 80 bp, synthetic construct
  misc_feature 1..80: note = Artificially Synthesized Probe
  source 1..80: mol_type = other DNA
cccctgtctgttgagggatttggaactggctcactgtctcccaaccatcctacaatctggtattatccataattatttca

SEQ ID NO: 53806 - DNA, 80 bp, synthetic construct
  misc_feature 1..80: note = Artificially Synthesized Probe
  source 1..80: mol_type = other DNA
tttctagtttagttactgcagtatgttcatcaactctccactttcttcctatttataagtctcctactgtgatggatatt

SEQ ID NO: 53807 - DNA, 80 bp, synthetic construct; identical to SEQ ID NO: 24968
  misc_feature 1..80: note = Artificially Synthesized Probe
  source 1..80: mol_type = other DNA

SEQ ID NO: 53808 - DNA, 80 bp, synthetic construct
  misc_feature 1..80: note = Artificially Synthesized Probe
  source 1..80: mol_type = other DNA
ctcaaagacccttcatcatgagctcatcacagttaaatttagtaaaatgggggcaagaaaggaagatttcttaaaccacc

SEQ ID NO: 53809 - DNA, 80 bp, synthetic construct
  misc_feature 1..80: note = Artificially Synthesized Probe
  source 1..80: mol_type = other DNA
agcttttttcactttcattgaagtctttccacagactgcccttgctcaccacagaggcttctaggagcagtgtgaaggac

SEQ ID NO: 53810 - DNA, 80 bp, synthetic construct
  misc_feature 1..80: note = Artificially Synthesized Probe
  source 1..80: mol_type = other DNA
actgatacggccattttataggggaattttccaatatctaaaaaaaaccccacacatacgcatttaccctttgatccacc

SEQ ID NO: 53811 - DNA, 80 bp, synthetic construct; identical to SEQ ID NO: 24969
  misc_feature 1..80: note = Artificially Synthesized Probe
  source 1..80: mol_type = other DNA

SEQ ID NO: 53812 - DNA, 80 bp, synthetic construct
  misc_feature 1..80: note = Artificially Synthesized Probe
  source 1..80: mol_type = other DNA
agaagatgggaattccttctaatttttgttttgtctcaaaaattttagaataattgtctcacatattaaaaagccaagta

SEQ ID NO: 53813 - DNA, 80 bp, synthetic construct
  misc_feature 1..80: note = Artificially Synthesized Probe
  source 1..80: mol_type = other DNA
ccatctcggctcactgcaacccccatctcccaggctcaagcaagtcttctgcctcatcctcccaagtagctgggattaca

SEQ ID NO: 53814 - DNA, 80 bp, synthetic construct
  misc_feature 1..80: note = Artificially Synthesized Probe
  source 1..80: mol_type = other DNA
tcaaatgaataacgaccacagttaagagggagctgtgaggtagaattgaattaacctcggaacacagtattttgattata

SEQ ID NO: 53815 - DNA, 80 bp, synthetic construct
  misc_feature 1..80: note = Artificially Synthesized Probe
  source 1..80: mol_type = other DNA
aaatatattgcaaataatgagtcaggattctcactgttgaagggaattacaaataagggaacactagcatggagcctgtg

SEQ ID NO: 53816 - DNA, 80 bp, synthetic construct; identical to SEQ ID NO: 24970
  misc_feature 1..80: note = Artificially Synthesized Probe
  source 1..80: mol_type = other DNA

SEQ ID NO: 53817 - DNA, 80 bp, synthetic construct
  misc_feature 1..80: note = Artificially Synthesized Probe
  source 1..80: mol_type = other DNA
aagatggatgttccagctcaagaagggaaagtaagaatccgtccttcctccacttttttgttctattcagatgagccctc

SEQ ID NO: 53818 - DNA, 80 bp, synthetic construct
  misc_feature 1..80: note = Artificially Synthesized Probe
  source 1..80: mol_type = other DNA
agaaaattagctatcacaacatctgtgtgtgtatatacatatgtatttgcatgtgtgtgtatatatgtgtatatatattc

SEQ ID NO: 53819 - DNA, 80 bp, synthetic construct
  misc_feature 1..80: note = Artificially Synthesized Probe
  source 1..80: mol_type = other DNA
ttctatatgcaaacaagctgttacaaaacagcatgagttaaagacattcctagtgtgaaagtattctaagttctttgata

SEQ ID NO: 53820 - DNA, 80 bp, synthetic construct
  misc_feature 1..80: note = Artificially Synthesized Probe
  source 1..80: mol_type = other DNA
attatgtaaatatatgtatatataaattatatacttataaatgttatatgttatgtatattatatatgctatatgtatta

SEQ ID NO: 53821 - DNA, 80 bp, synthetic construct; identical to SEQ ID NO: 24971
  misc_feature 1..80: note = Artificially Synthesized Probe
  source 1..80: mol_type = other DNA

SEQ ID NO: 53822 - DNA, 80 bp, synthetic construct
  misc_feature 1..80: note = Artificially Synthesized Probe
  source 1..80: mol_type = other DNA
tcacaaattaagtgttctgaaaataagtgctgaaaaaattattgtgacatgtcaaatggattcagaagccaacatgaaca

SEQ ID NO: 53823 - DNA, 80 bp, synthetic construct
  misc_feature 1..80: note = Artificially Synthesized Probe
  source 1..80: mol_type = other DNA
taaagagaagaaagacaccttctttatagcaagattccaattacctacatgtagtaaaaatgatgcaattagaaagtcag

SEQ ID NO: 53824 - DNA, 80 bp, synthetic construct
  misc_feature 1..80: note = Artificially Synthesized Probe
  source 1..80: mol_type = other DNA
tattttagccaagtgatcaaaactaacatcactgatattgggacaaataacacctagttcctcctgataggatacattga

SEQ ID NO: 53825 - DNA, 80 bp, synthetic construct
  misc_feature 1..80: note = Artificially Synthesized Probe
  source 1..80: mol_type = other DNA
tttaaaaaattaagaaatgaaataataaaggtaagtgtaaaaattaaaatagaaaacaaaaataatagtgaaaatgaaat

SEQ ID NO: 53826 - DNA, 80 bp, synthetic construct; identical to SEQ ID NO: 24972
  misc_feature 1..80: note = Artificially Synthesized Probe
  source 1..80: mol_type = other DNA

SEQ ID NO: 53827 - DNA, 80 bp, synthetic construct
  misc_feature 1..80: note = Artificially Synthesized Probe
  source 1..80: mol_type = other DNA
tgccctattaattcaagaaattgcatttttaattaaaaatctttccaaaaagaaaaattcatgcctaaatggcttcactt

SEQ ID NO: 53828 - DNA, 80 bp, synthetic construct
  misc_feature 1..80: note = Artificially Synthesized Probe
  source 1..80: mol_type = other DNA
taacaaaacaaattagtatatgtaaaagaatacttactatacatcatgatggaatgaggtttatctggggagtgaaaggt

SEQ ID NO: 53829 - DNA, 80 bp, synthetic construct
  misc_feature 1..80: note = Artificially Synthesized Probe
  source 1..80: mol_type = other DNA
ctcttaatctaattaagggcatcttcaaaaacctacatctttcactgtactcaatattgaaagcctcaatgctttctacc

SEQ ID NO: 53830 - DNA, 80 bp, synthetic construct; identical to SEQ ID NO: 24973
  misc_feature 1..80: note = Artificially Synthesized Probe
  source 1..80: mol_type = other DNA

SEQ ID NO: 53831 - DNA, 80 bp, synthetic construct; identical to SEQ ID NO: 24927
  misc_feature 1..80: note = Artificially Synthesized Probe
  source 1..80: mol_type = other DNA

SEQ ID NO: 53832 - DNA, 80 bp, synthetic construct
  misc_feature 1..80: note = Artificially Synthesized Probe
  source 1..80: mol_type = other DNA
tttaaggctctcgccgctcaccagcatttggggctcctgctgtgtcggcccccagctgacttggctttaggggtcggcgt

SEQ ID NO: 53833 - DNA, 80 bp, synthetic construct
  misc_feature 1..80: note = Artificially Synthesized Probe
  source 1..80: mol_type = other DNA
tcttttcctgtgcagaagcgctttagtttaattagatcccatttttcataaaaaaagaatgagatcatgtcctttgcagg

SEQ ID NO: 53834 - DNA, 80 bp, synthetic construct
  misc_feature 1..80: note = Artificially Synthesized Probe
  source 1..80: mol_type = other DNA
caaggagaaggagagcattaggacaaatacctaatacatgcggggcttaaaacctagatgacaggttgatggctgcagca

SEQ ID NO: 53835 - DNA, 80 bp, synthetic construct
  misc_feature 1..80: note = Artificially Synthesized Probe
  source 1..80: mol_type = other DNA
aacatcattttcgtgggttggaacactcaatattgttaagatagcaattctccacacatcaatttataactccaatagat

SEQ ID NO: 53836 - DNA, 80 bp, synthetic construct; identical to SEQ ID NO: 24974
  misc_feature 1..80: note = Artificially Synthesized Probe
  source 1..80: mol_type = other DNA

SEQ ID NO: 53837 - DNA, 80 bp, synthetic construct
  misc_feature 1..80: note = Artificially Synthesized Probe
  source 1..80: mol_type = other DNA
gttcttaaagatgatgtgtctggagtttcttcttactggtgggtttgtggtctcgctgacttcaggattgaagctgcaga

SEQ ID NO: 53838 - DNA, 80 bp, synthetic construct
  misc_feature 1..80: note = Artificially Synthesized Probe
  source 1..80: mol_type = other DNA
agcaagatttattgtgaagagcaaaagaacaaagctaccacacagtggaaaaggacccaactgggttgccgctgctggcg

SEQ ID NO: 53839 - DNA, 80 bp, synthetic construct
  misc_feature 1..80: note = Artificially Synthesized Probe
  source 1..80: mol_type = other DNA
aaacctggagctagacagagtactgattggtgcatttacaatcctttagctagacacaaaagttctccaagtccccacta

SEQ ID NO: 53840 - DNA, 80 bp, synthetic construct; identical to SEQ ID NO: 24975
  misc_feature 1..80: note = Artificially Synthesized Probe
  source 1..80: mol_type = other DNA

SEQ ID NO: 53841 - DNA, 80 bp, synthetic construct
  misc_feature 1..80: note = Artificially Synthesized Probe
  source 1..80: mol_type = other DNA
catgcaaataaaaaatgtacatgtcttatctgtttttactctttggatgtcacgtttttaaacttaatttttcttttcct

SEQ ID NO: 53842 - DNA, 80 bp, synthetic construct
  misc_feature 1..80: note = Artificially Synthesized Probe
  source 1..80: mol_type = other DNA
gagggacctggcgcaccctccacagctgctggcccgggtgctaagcccctcactgcccggggctggcagcaccagccggc

SEQ ID NO: 53843 - DNA, 80 bp, synthetic construct
  misc_feature 1..80: note = Artificially Synthesized Probe
  source 1..80: mol_type = other DNA
acagtgcagcggcgggctgaagggctcctcaagcatggccagagcggacacggaggccgaggaggcgccgagagtgaacg

SEQ ID NO: 53844 - DNA, 80 bp, synthetic construct
  misc_feature 1..80: note = Artificially Synthesized Probe
  source 1..80: mol_type = other DNA
gttttcttcactgaaatttggctaatccaatattccacaactcttaactatttttatttcagtttccttccccttagcta

SEQ ID NO: 53845 - DNA, 80 bp, synthetic construct; identical to SEQ ID NO: 24976
  misc_feature 1..80: note = Artificially Synthesized Probe
  source 1..80: mol_type = other DNA

SEQ ID NO: 53846 - DNA, 80 bp, synthetic construct
  misc_feature 1..80: note = Artificially Synthesized Probe
  source 1..80: mol_type = other DNA
tttatcacatttttctattaagagaaattccacttagagtcagttcctttccaaagttgattttgttggctctctctcat

SEQ ID NO: 53847 - DNA, 80 bp, synthetic construct
  misc_feature 1..80: note = Artificially Synthesized Probe
  source 1..80: mol_type = other DNA
tacagaattataactggacatcttttgccaggtgacttttcagtgccttccactatagtagatggaatatacttccccac

SEQ ID NO: 53848 - DNA, 80 bp, synthetic construct
  misc_feature 1..80: note = Artificially Synthesized Probe
  source 1..80: mol_type = other DNA
ataggaaggaacacaaatgggggagtagaagaaaacagaaatgtattaataggcgacagtgagtacttcagctttatgtg

SEQ ID NO: 53849 - DNA, 80 bp, synthetic construct
  misc_feature 1..80: note = Artificially Synthesized Probe
  source 1..80: mol_type = other DNA
caagggttagtattgtgtcatcaaactcattacagacctcaattcattttgttttatttatttctgaacaacataatttg

SEQ ID NO: 53850 - DNA, 80 bp, synthetic construct; identical to SEQ ID NO: 24977
  misc_feature 1..80: note = Artificially Synthesized Probe
  source 1..80: mol_type = other DNA

SEQ ID NO: 53851 - DNA, 80 bp, synthetic construct
  misc_feature 1..80: note = Artificially Synthesized Probe
  source 1..80: mol_type = other DNA
actcttttttcttcccctgttgctttaggtacaaattatttggctcgacttctagtttttgtcttatttcaggcagctct

SEQ ID NO: 53852 - DNA, 80 bp, synthetic construct
  misc_feature 1..80: note = Artificially Synthesized Probe
  source 1..80: mol_type = other DNA
tagaaaacaaaagctgtgtatgagggacatggtgaaatagtaaagaagggtggaaaataaaagataagcaaagataaaat

SEQ ID NO: 53853 - DNA, 80 bp, synthetic construct
  misc_feature 1..80: note = Artificially Synthesized Probe
  source 1..80: mol_type = other DNA
catctctaccaaaatcaaacagattttgtagagagaaagaaacccaggacagggaaaaacaaccttatattatctagaga

SEQ ID NO: 53854 - DNA, 80 bp, synthetic construct; identical to SEQ ID NO: 24978
  misc_feature 1..80: note = Artificially Synthesized Probe
  source 1..80: mol_type = other DNA

SEQ ID NO: 53855 - DNA, 80 bp, synthetic construct
  misc_feature 1..80: note = Artificially Synthesized Probe
  source 1..80: mol_type = other DNA
gccgtgttgataaatatgaaaaagagagaaggtgatcaacaaaatcttaaccacttgaaaattaagatgctcctagatca

SEQ ID NO: 53856 - DNA, 80 bp, synthetic construct
  misc_feature 1..80: note = Artificially Synthesized Probe
  source 1..80: mol_type = other DNA
gccttcgttattaaggaaaacattaaaaataaaggaatttgaactcatctgtggaaactaaagagcaacaaactaaataa

SEQ ID NO: 53857 - DNA, 80 bp, synthetic construct
  misc_feature 1..80: note = Artificially Synthesized Probe
  source 1..80: mol_type = other DNA
tggttagaaaaagtggaaataaattgctaaaacacaaaagagagattaatggtttgtgtctataatagacaaaaagctct

SEQ ID NO: 53858 - DNA, 80 bp, synthetic construct
  misc_feature 1..80: note = Artificially Synthesized Probe
  source 1..80: mol_type = other DNA
ggagtcagagtaaagaaaatcaaaataattttccgaggtgtgaagtattagaatgaacacagaatgatggcatttcaggg

SEQ ID NO: 53859 - DNA, 80 bp, synthetic construct; identical to SEQ ID NO: 24979
  misc_feature 1..80: note = Artificially Synthesized Probe
  source 1..80: mol_type = other DNA

SEQ ID NO: 53860 - DNA, 80 bp, synthetic construct
  misc_feature 1..80: note = Artificially Synthesized Probe
  source 1..80: mol_type = other DNA
gataatcatcttaaaatatcgaagaatgtaggtacccaggaagattcttcaaatatgtgaaggaactattcacatttctt

SEQ ID NO: 53861 - DNA, 80 bp, synthetic construct
  misc_feature 1..80: note = Artificially Synthesized Probe
  source 1..80: mol_type = other DNA
atgaagtttttgttgaagtgagctggacaaaagataatgaaggtttgtatgtgtgaaagaaataattcaattgtattatt

SEQ ID NO: 53862 - DNA, 80 bp, synthetic construct; identical to SEQ ID NO: 24980
  misc_feature 1..80: note = Artificially Synthesized Probe
  source 1..80: mol_type = other DNA

SEQ ID NO: 53863 - DNA, 80 bp, synthetic construct
  misc_feature 1..80: note = Artificially Synthesized Probe
  source 1..80: mol_type = other DNA
gctttgctaattttaagaccttttctagtgatgttccttcatttagcagctgtgaagataaaccagcaagttttctgagt

SEQ ID NO: 53864 - DNA, 80 bp, synthetic construct
  misc_feature 1..80: note = Artificially Synthesized Probe
  source 1..80: mol_type = other DNA
atcatagataacatcaaatatttatgtttcatttaatttaggcttttttaatgaaaaaaaaagttttggcacatactaaa

SEQ ID NO: 53865 - DNA, 80 bp, synthetic construct
  misc_feature 1..80: note = Artificially Synthesized Probe
  source 1..80: mol_type = other DNA
atgaagccagccctgactaacataccatgcatgcatttatttttacactgaaacagctgagagaagacatagagcttttt

SEQ ID NO: 53866 - DNA, 80 bp, synthetic construct
  misc_feature 1..80: note = Artificially Synthesized Probe
  source 1..80: mol_type = other DNA
atacaaatttaggtttaaaatttatttacctttttacagaaaaaatggatgagaacttaaatttccatttttcttgttta

SEQ ID NO: 53867 - DNA, 80 bp, synthetic construct
  misc_feature 1..80: note = Artificially Synthesized Probe
  source 1..80: mol_type = other DNA
actcaattgaataatgtccttttaaaatgaatttggcaggagctgtttccaaggagaaaagacttttgagatacagttct

SEQ ID NO: 53868 - DNA, 80 bp, synthetic construct; identical to SEQ ID NO: 24981
  misc_feature 1..80: note = Artificially Synthesized Probe
  source 1..80: mol_type = other DNA

SEQ ID NO: 53869 - DNA, 80 bp, synthetic construct
  misc_feature 1..80: note = Artificially Synthesized Probe
  source 1..80: mol_type = other DNA
ctccaatcataacctgtacctaccctggaattatttcatttctgaagaagtctgcagtaataggtgcgtcatcatcaaat

SEQ ID NO: 53870 - DNA, 80 bp, synthetic construct
  misc_feature 1..80: note = Artificially Synthesized Probe
  source 1..80: mol_type = other DNA
aaaccatgaattaaaatttagtttctactgccttggaaggaaccatacaaggaaagccccctgaagcattaacatcaagg

SEQ ID NO: 53871 - DNA, 80 bp, synthetic construct; identical to SEQ ID NO: 24982
  misc_feature 1..80: note = Artificially Synthesized Probe
  source 1..80: mol_type = other DNA

SEQ ID NO: 53872 - DNA, 80 bp, synthetic construct
  misc_feature 1..80: note = Artificially Synthesized Probe
  source 1..80: mol_type = other DNA
cagggagcctaaggccaacccactgctgacttcttggaattggaccaaaaggaaaaccccacctcttcatgcccaagtga

SEQ ID NO: 53873 - DNA, 80 bp, synthetic construct; identical to SEQ ID NO: 24928
  misc_feature 1..80: note = Artificially Synthesized Probe
  source 1..80: mol_type = other DNA

SEQ ID NO: 53874 - DNA, 80 bp, synthetic construct
  misc_feature 1..80: note = Artificially Synthesized Probe
  source 1..80: mol_type = other DNA
atccttcatttgcatagggtgtaaccaattggagacctctaaagtgtacctagtggtgttaccaaattcttttagcttaa

SEQ ID NO: 53875 - DNA, 80 bp, synthetic construct
  misc_feature 1..80: note = Artificially Synthesized Probe
  source 1..80: mol_type = other DNA
agaacccaacttgcagtcaaggctttccatccagtagcaatattttgttagctggcttacttatgttaagtgttgctcac

SEQ ID NO: 53876 - DNA, 80 bp, synthetic construct
  misc_feature 1..80: note = Artificially Synthesized Probe
  source 1..80: mol_type = other DNA
acatgtatttctgtcaataatagcttttacttctcataattttgttttatatgtgcatttttattgaattaatctttcat

SEQ ID NO: 53877 - DNA, 80 bp, synthetic construct; identical to SEQ ID NO: 24983
  misc_feature 1..80: note = Artificially Synthesized Probe
  source 1..80: mol_type = other DNA

SEQ ID NO: 53878 - DNA, 80 bp, synthetic construct
  misc_feature 1..80: note = Artificially Synthesized Probe
  source 1..80: mol_type = other DNA
agacttccaagctgcattttcagctttcgctcctcagcctgctcaccaacatccaaataatccttcaattttcattattt

SEQ ID NO: 53879 - DNA, 80 bp, synthetic construct
  misc_feature 1..80: note = Artificially Synthesized Probe
  source 1..80: mol_type = other DNA
agtaaaatatctgaaatttttctagaattttggacaaagttccagacatttctactagcatgcactgatgacaccagttc

SEQ ID NO: 53880 - DNA, 80 bp, synthetic construct
  misc_feature 1..80: note = Artificially Synthesized Probe
  source 1..80: mol_type = other DNA
cacctgggctcaagcaatcctcccacctcagcctcctgagtagcaaggactataggtatgagccaccatgccccactgat

SEQ ID NO: 53881 - DNA, 80 bp, synthetic construct; identical to SEQ ID NO: 24984
  misc_feature 1..80: note = Artificially Synthesized Probe
  source 1..80: mol_type = other DNA

SEQ ID NO: 53882 - DNA, 80 bp, synthetic construct
  misc_feature 1..80: note = Artificially Synthesized Probe
  source 1..80: mol_type = other DNA
gtgtgatatattcttatcattagagagataagcttataccgtcaagaagaaatactgtgtctgtatttgagaatcttctc

SEQ ID NO: 53883 - DNA, 80 bp, synthetic construct
  misc_feature 1..80: note = Artificially Synthesized Probe
  source 1..80: mol_type = other DNA
tgttaaattaatagtgctgccataattgataattgattaaaacaataatcccttgctttgtaagttttcataaaagttat

SEQ ID NO: 53884 - DNA, 80 bp, synthetic construct
  misc_feature 1..80: note = Artificially Synthesized Probe
  source 1..80: mol_type = other DNA
gtatttttaactaatcatagtgtttaaattatgatggtttattctcagttttaaaattcatttcatcaatacattgataa

SEQ ID NO: 53885 - DNA, 80 bp, synthetic construct
  misc_feature 1..80: note = Artificially Synthesized Probe
  source 1..80: mol_type = other DNA
gtcctgttttggtgaatctatgaatgttcccacttttaaagatacaacatttaagtgccatttgcatccattttcttttt

SEQ ID NO: 53886 - DNA, 80 bp, synthetic construct
  misc_feature 1..80: note = Artificially Synthesized Probe
  source 1..80: mol_type = other DNA
cactctgtcacccaggctgaagtgcagtggtgtgatctcagcttactgcaacctccgccccctgggttcaagtgattctc

SEQ ID NO: 53887 - DNA, 80 bp, synthetic construct; identical to SEQ ID NO: 24985
  misc_feature 1..80: note = Artificially Synthesized Probe
  source 1..80: mol_type = other DNA

SEQ ID NO: 53888 - DNA, 80 bp, synthetic construct
  misc_feature 1..80: note = Artificially Synthesized Probe
  source 1..80: mol_type = other DNA
ctacatatttactagtcacatataaatctcactctaaccataatatcaaatcaaactagttagaaacaagcaggtatgag

SEQ ID NO: 53889 - DNA, 80 bp, synthetic construct
  misc_feature 1..80: note = Artificially Synthesized Probe
  source 1..80: mol_type = other DNA
gaaaaaggaagctcaattagctcattcagaacttttcttccttaagttcatgtgacattacttcaattatatcgtgaatt

SEQ ID NO: 53890 - DNA, 80 bp, synthetic construct; identical to SEQ ID NO: 24986
  misc_feature 1..80: note = Artificially Synthesized Probe
  source 1..80: mol_type = other DNA

SEQ ID NO: 53891 - DNA, 80 bp, synthetic construct
  misc_feature 1..80: note = Artificially Synthesized Probe
  source 1..80: mol_type = other DNA
aaatactttggaaggttgaggcaggtggattgcctaagctcaggagttcgagaccaacctgggcaacacggtgaaaccct

SEQ ID NO: 53892 - DNA, 80 bp, synthetic construct
  misc_feature 1..80: note = Artificially Synthesized Probe
  source 1..80: mol_type = other DNA
actccatctcttaaaaaaataaaaaaaataagtaaataaataaaaataaatggtctggttacacattttttttcacttct

SEQ ID NO: 53893 - DNA, 80 bp, synthetic construct
  misc_feature 1..80: note = Artificially Synthesized Probe
  source 1..80: mol_type = other DNA
aaacctcgtctctactaaaaatacaaaaactagccaggcatgacggtgcatgcctgtaatccctgctacttgggaggctg

SEQ ID NO: 53894 - DNA, 80 bp, synthetic construct
  misc_feature 1..80: note = Artificially Synthesized Probe
  source 1..80: mol_type = other DNA
acacaatgtgccctcctgcaaatgacttctgaaggccctattgtcaaaattattgataagttaaagtttttgtatgttac

SEQ ID NO: 53895 - DNA, 80 bp, synthetic construct; identical to SEQ ID NO: 24987
  misc_feature 1..80: note = Artificially Synthesized Probe
  source 1..80: mol_type = other DNA

SEQ ID NO: 53896 - DNA, 80 bp, synthetic construct
  misc_feature 1..80: note = Artificially Synthesized Probe
  source 1..80: mol_type = other DNA
agtgtgataggagagagaataaatggtagaaggaatttttttagagtggtcagaaaaggatattttgaaaaattgacatt

SEQ ID NO: 53897 - DNA, 80 bp, synthetic construct
  misc_feature 1..80: note = Artificially Synthesized Probe
  source 1..80: mol_type = other DNA
gtggtttgcctcttttttctcattgcttgtggtttaatttttattcctaagtcagagaattagcattgaatttgtttctt

SEQ ID NO: 53898 - DNA, 80 bp, synthetic construct
  misc_feature 1..80: note = Artificially Synthesized Probe
  source 1..80: mol_type = other DNA
tgaaatcatcatcttctgttactatgaagataccctttgtgctcttttcctaagcagtccctccacttggtgcaatcaat

SEQ ID NO: 53899 - DNA, 80 bp, synthetic construct; identical to SEQ ID NO: 24988
  misc_feature 1..80: note = Artificially Synthesized Probe
  source 1..80: mol_type = other DNA

SEQ ID NO: 53900 - DNA, 80 bp, synthetic construct
  misc_feature 1..80: note = Artificially Synthesized Probe
  source 1..80: mol_type = other DNA
agtaagggcaagttaactatttgctgaatgaatggtaattgaatctccttcatgtgtagttttctagtgtataatcttct

SEQ ID NO: 53901 - DNA, 80 bp, synthetic construct
  misc_feature 1..80: note = Artificially Synthesized Probe
  source 1..80: mol_type = other DNA
gcatatactgagtggggtgagtcaaggagagtgcttcagtattgttgactctaatcatctcagtaatttttcgtttgttt

SEQ ID NO: 53902 - DNA, 80 bp, synthetic construct
  misc_feature 1..80: note = Artificially Synthesized Probe
  source 1..80: mol_type = other DNA
cattatagatgtggaccaccatccccggctaatttttgtatttttagtagagatggggtttcacctttttggctaggctg

SEQ ID NO: 53903 - DNA, 80 bp, synthetic construct
  misc_feature 1..80: note = Artificially Synthesized Probe
  source 1..80: mol_type = other DNA
tcatggaaatttgtataacagctatttcaaagctgtctgctcttcactttttctccttcactctaatgtactcaagcctg

SEQ ID NO: 53904 - DNA, 80 bp, synthetic construct
  misc_feature 1..80: note = Artificially Synthesized Probe
  source 1..80: mol_type = other DNA
aaggagcctgtccctgccacacccaccatgtgcccttctttttgagatgtcatactactaccttttttttctcattgtag

SEQ ID NO: 53905 - DNA, 80 bp, synthetic construct; identical to SEQ ID NO: 24989
  misc_feature 1..80: note = Artificially Synthesized Probe
  source 1..80: mol_type = other DNA

SEQ ID NO: 53906 - DNA, 80 bp, synthetic construct
  misc_feature 1..80: note = Artificially Synthesized Probe
  source 1..80: mol_type = other DNA
ttactttctctcagcaaaaattccatcttggcatccagaggtttattggggtttgttacacatgcattctattcaatact

SEQ ID NO: 53907 - DNA, 80 bp, synthetic construct
  misc_feature 1..80: note = Artificially Synthesized Probe
  source 1..80: mol_type = other DNA
gtaaataggttggagtttaataagaggaacaatgtatatttcttaatggggggaagaagaagacaaagatacaggtatgt

SEQ ID NO: 53908 - DNA, 80 bp, synthetic construct
  misc_feature 1..80: note = Artificially Synthesized Probe
  source 1..80: mol_type = other DNA
ccttaggacgcgttggaaatgctgaatacagtttaaggtttctaaacattaatatgtagtgaaaacaatcaacccagatg

SEQ ID NO: 53909 - DNA, 80 bp, synthetic construct; identical to SEQ ID NO: 24990
  misc_feature 1..80: note = Artificially Synthesized Probe
  source 1..80: mol_type = other DNA

SEQ ID NO: 53910 - DNA, 80 bp, synthetic construct
  misc_feature 1..80: note = Artificially Synthesized Probe
  source 1..80: mol_type = other DNA
gatatttctttgtctgtacacaacctgtcaaatcttgcatgttctggccccatctctcactcaagatttatcttaagctg

SEQ ID NO: 53911 - DNA, 80 bp, synthetic construct
  misc_feature 1..80: note = Artificially Synthesized Probe
  source 1..80: mol_type = other DNA
gacctgcctctcttccccacatcttacctgtcacatctcttctctctgtgtttcttaatttatgctgtatcaaaagcaaa

SEQ ID NO: 53912 - DNA, 80 bp, synthetic construct
  misc_feature 1..80: note = Artificially Synthesized Probe
  source 1..80: mol_type = other DNA
tgttgttgactgcgtattgttagttttacagctgaaattattaaaggatcagtgaaattcttatggtggtaagaattaac

SEQ ID NO: 53913 - DNA, 80 bp, synthetic construct; identical to SEQ ID NO: 24991
  misc_feature 1..80: note = Artificially Synthesized Probe
  source 1..80: mol_type = other DNA

SEQ ID NO: 53914 - DNA, 80 bp, synthetic construct
  misc_feature 1..80: note = Artificially Synthesized Probe
  source 1..80: mol_type = other DNA
aattggaaaacctgaaagaaatggataagttcctagacatatatacctactgagattgaatcatgaagagatagaccacc

SEQ ID NO: 53915 - DNA, 80 bp, synthetic construct
  misc_feature 1..80: note = Artificially Synthesized Probe
  source 1..80: mol_type = other DNA
tatcaatcctactcaaactatttcaaaaaattacagagaagaaaatacatccaaattcattttataaggccagcattacc

SEQ ID NO: 53916 - DNA, 80 bp, synthetic construct; identical to SEQ ID NO: 24929
  misc_feature 1..80: note = Artificially Synthesized Probe
  source 1..80: mol_type = other DNA

SEQ ID NO: 53917 - DNA, 80 bp, synthetic construct
  misc_feature 1..80: note = Artificially Synthesized Probe
  source 1..80: mol_type = other DNA
ttcttaagcaatcccagtgccttcaaatatccctataaggccttacttctttcaggatcattttgattttccacataact

SEQ ID NO: 53918 - DNA, 80 bp, synthetic construct
  misc_feature 1..80: note = Artificially Synthesized Probe
  source 1..80: mol_type = other DNA
taattgtctatagttatacagaaaacagaggtgctgctagtttacctctgaatagagcctcactgtcagaggacctgttt

SEQ ID NO: 53919 - DNA, 80 bp, synthetic construct
  misc_feature 1..80: note = Artificially Synthesized Probe
  source 1..80: mol_type = other DNA
cgtgtggagcacacgatgctgcaaacttgcatgtcatctctttcaggtgtggcatttcaagggggcttgtgtcttgaaaa

SEQ ID NO: 53920 - DNA, 80 bp, synthetic construct
  misc_feature 1..80: note = Artificially Synthesized Probe
  source 1..80: mol_type = other DNA
atctgtttttcaaacttgtgttttgctctccatctgtatatttctagcatagtttattattcctcctgtggactattgca

SEQ ID NO: 53921 - DNA, 80 bp, synthetic construct; identical to SEQ ID NO: 24930
  misc_feature 1..80: note = Artificially Synthesized Probe
  source 1..80: mol_type = other DNA

SEQ ID NO: 53922 - DNA, 80 bp, synthetic construct
  misc_feature 1..80: note = Artificially Synthesized Probe
  source 1..80: mol_type = other DNA
accaacaggggagaaatgcatccagaggagggccagagcacagccttttaaaatgtggggtttgaggcagcaatcttagt

SEQ ID NO: 53923 - DNA, 80 bp, synthetic construct
  misc_feature 1..80: note = Artificially Synthesized Probe
  source 1..80: mol_type = other DNA
aaaagcccaaattccttagtatagtgtacaaggcagccatggtctacctactgcttgacactcaggtcttgccttcatgt

SEQ ID NO: 53924 - DNA, 80 bp, synthetic construct
  misc_feature 1..80: note = Artificially Synthesized Probe
  source 1..80: mol_type = other DNA
acctcagcctcccttgtagctgggactataggtgcacaccaccatgcccagctaatttatgtattttttgcatagacagg

SEQ ID NO: 53925 - DNA, 80 bp, synthetic construct; identical to SEQ ID NO: 24931
  misc_feature 1..80: note = Artificially Synthesized Probe
  source 1..80: mol_type = other DNA

SEQ ID NO: 53926 - DNA, 80 bp, synthetic construct
  misc_feature 1..80: note = Artificially Synthesized Probe
  source 1..80: mol_type = other DNA
tgttgctgcttgttttgatccaagaccaaagagtgattgataaatgtgctaagtattttctgtgttcttaagtatgtttg

SEQ ID NO: 53927 - DNA, 80 bp, synthetic construct
  misc_feature 1..80: note = Artificially Synthesized Probe
  source 1..80: mol_type = other DNA
cttctgcttgtatttattttgtaagttcagctgctcagtaagattgttttgagtgaagtctctgtgagtccatatgtgct

SEQ ID NO: 53928 - DNA, 80 bp, synthetic construct; identical to SEQ ID NO: 24932
  misc_feature 1..80: note = Artificially Synthesized Probe
  source 1..80: mol_type = other DNA

SEQ ID NO: 53929 - DNA, 80 bp, synthetic construct; identical to SEQ ID NO: 24923
  misc_feature 1..80: note = Artificially Synthesized Probe
  source 1..80: mol_type = other DNA

SEQ ID NO: 53930 - DNA, 80 bp, synthetic construct
  misc_feature 1..80: note = Artificially Synthesized Probe
  source 1..80: mol_type = other DNA
aaagctcccacatactaccaattacttaataggcatttataagcatctcttgttggtaatgctgaatttagaaaaatgat

SEQ ID NO: 53931 - DNA, 80 bp, synthetic construct
  misc_feature 1..80: note = Artificially Synthesized Probe
  source 1..80: mol_type = other DNA
gaccattatggatatagacagtctgtaacgtatgcatgtaataaaggattcaccatgattggagagcactctatttattg

SEQ ID NO: 53932 - DNA, 80 bp, synthetic construct
  misc_feature 1..80: note = Artificially Synthesized Probe
  source 1..80: mol_type = other DNA
atatacatatttgtatttttctgtgggacacaatttttctacagcttctcagaagggtctatggcttgtatacacacaca

SEQ ID NO: 53933 - DNA, 80 bp, synthetic construct
  misc_feature 1..80: note = Artificially Synthesized Probe
  source 1..80: mol_type = other DNA
gcacttgcgctgtcactcagcctggacgcgcttcttcgggtcgcgggtgcactccggcccggctcccgcctcggccccga

SEQ ID NO: 53934 - DNA, 80 bp, synthetic construct
  misc_feature 1..80: note = Artificially Synthesized Probe
  source 1..80: mol_type = other DNA
catggtgaaaccccgtctctactaaaaaatacaaaagttagctgggcattctagcgtgcgcctgtagtcccagctactca

SEQ ID NO: 53935 - DNA, 80 bp, synthetic construct
  misc_feature 1..80: note = Artificially Synthesized Probe
  source 1..80: mol_type = other DNA
gaaagaagaagaagaaaaaaaagggcagtgggagcaagccctagagcccagaaaaccagaaccccgtctgcactcccttc

SEQ ID NO: 53936 - DNA, 80 bp, synthetic construct
  misc_feature 1..80: note = Artificially Synthesized Probe
  source 1..80: mol_type = other DNA
cctcccccagcctgccctcccccagcctgccctccccaagcctcccctcccccagcctgccctctcccagcctgccctct

SEQ ID NO: 53937 - DNA, 80 bp, synthetic construct
  misc_feature 1..80: note = Artificially Synthesized Probe
  source 1..80: mol_type = other DNA
tctactaaaaatacaaaaaattagccgggtgtggtggcacgcgcctgtaatcccagctagttgggaggctgaggcaggag

SEQ ID NO: 53938 - DNA, 80 bp, synthetic construct
  misc_feature 1..80: note = Artificially Synthesized Probe
  source 1..80: mol_type = other DNA
caattcgagagagaatgcacataaagggcttagcggtgctcacagtattcattgctcttgtggtcctggggtggtcaggg

SEQ ID NO: 53939 - DNA, 80 bp, synthetic construct; identical to SEQ ID NO: 25003
  misc_feature 1..80: note = Artificially Synthesized Probe
  source 1..80: mol_type = other DNA

SEQ ID NO: 53940 - DNA, 80 bp, synthetic construct
  misc_feature 1..80: note = Artificially Synthesized Probe
  source 1..80: mol_type = other DNA
ggcgtatcacctgaggtcaggagtttgagaccagcctggctaacatgatgaaacctcatttctactaaaaatacaaaaaa

SEQ ID NO: 53941 - DNA, 80 bp, synthetic construct
  misc_feature 1..80: note = Artificially Synthesized Probe
  source 1..80: mol_type = other DNA
acaaaaaacaaaaacataacttcaggaggaacaaagaccacagagagacagggagagagattaggaaccctctgagagcc

SEQ ID NO: 53942 - DNA, 80 bp, synthetic construct
  misc_feature 1..80: note = Artificially Synthesized Probe
  source 1..80: mol_type = other DNA
gacagatgccccaccctgtgctgtttctcgcctgtttaagctggtgtttccagctggagacaaagtctgaacgtgctgtc

SEQ ID NO: 53943 - DNA, 80 bp, synthetic construct
  misc_feature 1..80: note = Artificially Synthesized Probe
  source 1..80: mol_type = other DNA
accggccagccttcctgcaggaggcgttcactggccgcgtgctggagggtgcagtcccaggtgagacaggaccacagccc

SEQ ID NO: 53944 - DNA, 80 bp, synthetic construct; identical to SEQ ID NO: 25004
  misc_feature 1..80: note = Artificially Synthesized Probe
  source 1..80: mol_type = other DNA

SEQ ID NO: 53945 - DNA, 80 bp, synthetic construct
  misc_feature 1..80: note = Artificially Synthesized Probe
  source 1..80: mol_type = other DNA
ccggtggtaaagacctggtggaaaggcacaggccccctcgtgtctgaggctaccaaggactgtggccaggcctggcccag

SEQ ID NO: 53946 - DNA, 80 bp, synthetic construct
  misc_feature 1..80: note = Artificially Synthesized Probe
  source 1..80: mol_type = other DNA
caaagcccgtccttcccaccccacctcggtggctaagtccacctgagctgccagaggggtcaggcctaaatctcaggaga

SEQ ID NO: 53947 - DNA, 80 bp, synthetic construct; identical to SEQ ID NO: 25005
  misc_feature 1..80: note = Artificially Synthesized Probe
  source 1..80: mol_type = other DNA

SEQ ID NO: 53948 - DNA, 80 bp, synthetic construct
  misc_feature 1..80: note = Artificially Synthesized Probe
  source 1..80: mol_type = other DNA
gggcaggcccaggagccagcacctgacccaggtcgcatccaatgctcctgtgctccgaccccataaacagcacaagccgg

SEQ ID NO: 53949 - DNA, 80 bp, synthetic construct
  misc_feature 1..80: note = Artificially Synthesized Probe
  source 1..80: mol_type = other DNA
ctgcccctgagggcaccacggctcctgccacccccgactcccccatctggagacagtggtggggggagacagtggctcag

SEQ ID NO: 53950 - DNA, 80 bp, synthetic construct
  misc_feature 1..80: note = Artificially Synthesized Probe
  source 1..80: mol_type = other DNA
cggggagcctgtgcacacgaggtgcccccacgcccctcacaatgcccccagcccatcggccctgtggacgttggccctca

SEQ ID NO: 53951 - DNA, 80 bp, synthetic construct
  misc_feature 1..80: note = Artificially Synthesized Probe
  source 1..80: mol_type = other DNA
caagtggggctggaccgcgaggtgaggtggcgccccggcagctccacacccgcacggccagggcagcccatctcctgcgg

SEQ ID NO: 53952 - DNA, 80 bp, synthetic construct
  misc_feature 1..80: note = Artificially Synthesized Probe
  source 1..80: mol_type = other DNA
gggcgtgaggggcccggcacagggcagggctccccaagcagccccgcccctctcagcctcatggcaacggctccccgctg

SEQ ID NO: 53953 - DNA, 80 bp, synthetic construct; identical to SEQ ID NO: 25006
  misc_feature 1..80: note = Artificially Synthesized Probe
  source 1..80: mol_type = other DNA

SEQ ID NO: 53954 - DNA, 80 bp, synthetic construct
  misc_feature 1..80: note = Artificially Synthesized Probe
  source 1..80: mol_type = other DNA
acagtaggtgctctgtaaacacccagcgcacagtggtgctctgtaaacgcttacccagcgcacagtaggtgctctgtaaa

SEQ ID NO: 53955 - DNA, 80 bp, synthetic construct
  misc_feature 1..80: note = Artificially Synthesized Probe
  source 1..80: mol_type = other DNA
tctgtaaacgctcacccagtgcacagtaggtgctctgtaaacgctcacccagcgcacagtaggtgctctgtaaacgctca

SEQ ID NO: 53956 - DNA, 80 bp, synthetic construct
  misc_feature 1..80: note = Artificially Synthesized Probe
  source 1..80: mol_type = other DNA
gcccacccagcgcacagtaggtgctctgtaaacgcttacccagcgcacagtaggtgctctgtaaacgcttacccagcgca

SEQ ID NO: 53957 - DNA, 80 bp, synthetic construct; identical to SEQ ID NO: 25007
  misc_feature 1..80: note = Artificially Synthesized Probe
  source 1..80: mol_type = other DNA

SEQ ID NO: 53958 - DNA, 80 bp, synthetic construct
  misc_feature 1..80: note = Artificially Synthesized Probe
  source 1..80: mol_type = other DNA
aacgcttacccagcacacagtaggtgctctgtaaacgcttacccagcgcacagtaggtgctctgtaaacgcttacccagt

SEQ ID NO: 53959 - DNA, 80 bp, synthetic construct
  misc_feature 1..80: note = Artificially Synthesized Probe
  source 1..80: mol_type = other DNA
ccagtgcacagtaggtgttctgtaaatgcttatccagtgccataggctagggcagcatcacagcctcatgcacttaggat

SEQ ID NO: 53960 - DNA, 80 bp, synthetic construct; identical to SEQ ID NO: 24993
  misc_feature 1..80: note = Artificially Synthesized Probe
  source 1..80: mol_type = other DNA

SEQ ID NO: 53961 - DNA, 80 bp, synthetic construct; identical to SEQ ID NO: 25008
  misc_feature 1..80: note = Artificially Synthesized Probe
  source 1..80: mol_type = other DNA

SEQ ID NO: 53962 - DNA, 80 bp, synthetic construct
  misc_feature 1..80: note = Artificially Synthesized Probe
  source 1..80: mol_type = other DNA
agaaggaactccgcgtgggcgggtggaagcccaagctggaggggccccggggtgctgcgtggcagtgtgtgaatggagtc

SEQ ID NO: 53963 - DNA, 80 bp, synthetic construct
  misc_feature 1..80: note = Artificially Synthesized Probe
  source 1..80: mol_type = other DNA
tcacaaaacagacaaacctgaggacacccagtgggtggggagcagcttcgacaggagcaagggagggtgttcctgctggg

SEQ ID NO: 53964 - DNA, 80 bp, synthetic construct
  misc_feature 1..80: note = Artificially Synthesized Probe
  source 1..80: mol_type = other DNA
agtggaggacagggacctgccaggctccccaaactgggtggccaggttcaccatcctggaaggcgaccccgatgggcagt

SEQ ID NO: 53965 - DNA, 80 bp, synthetic construct; identical to SEQ ID NO: 25009
  misc_feature 1..80: note = Artificially Synthesized Probe
  source 1..80: mol_type = other DNA

SEQ ID NO: 53966 - DNA, 80 bp, synthetic construct
  misc_feature 1..80: note = Artificially Synthesized Probe
  source 1..80: mol_type = other DNA
tgcccatgcacagatgccggcacacacagatgcccacacacagatgccggcacacacagatgcccacgcacagatggcgg

SEQ ID NO: 53967 - DNA, 80 bp, synthetic construct
  misc_feature 1..80: note = Artificially Synthesized Probe
  source 1..80: mol_type = other DNA
cacagatgccagcacacacagatgcccacacacacatgcccacacacaggtgcccacacacagatgcccacactgtccac

SEQ ID NO: 53968 - DNA, 80 bp, synthetic construct
  misc_feature 1..80: note = Artificially Synthesized Probe
  source 1..80: mol_type = other DNA
gcacaggtgcccacacaaagatgccggcacacacagatgcccacacacagatgcccacacacagatgccggcacacacag

SEQ ID NO: 53969 - DNA, 80 bp, synthetic construct
  misc_feature 1..80: note = Artificially Synthesized Probe
  source 1..80: mol_type = other DNA
atgccggcacacacagatgctggcgcacacagatgcccacacacagatgcccacacacagatgcccatgctggggtttga

SEQ ID NO: 53970 - DNA, 80 bp, synthetic construct
  misc_feature 1..80: note = Artificially Synthesized Probe
  source 1..80: mol_type = other DNA
tggtggaggtgggggccagatggcaaggggactatcgccaaggctcaaattcactccactgtgaggcaaaatatgtcagt

SEQ ID NO: 53971 - DNA, 80 bp, synthetic construct; identical to SEQ ID NO: 25010
  misc_feature 1..80: note = Artificially Synthesized Probe
  source 1..80: mol_type = other DNA

SEQ ID NO: 53972 - DNA, 80 bp, synthetic construct
  misc_feature 1..80: note = Artificially Synthesized Probe
  source 1..80: mol_type = other DNA
tggttctaccagagaaagaggccataggagacacatgcacagatatgtccacacgtgtagatgtgggtgtatttagatac

SEQ ID NO: 53973 - DNA, 80 bp, synthetic construct
  misc_feature 1..80: note = Artificially Synthesized Probe
  source 1..80: mol_type = other DNA
gcagttttgctctcaaagccttcacctgagtggataaagccaacccacatcacccaggacgatctcctttatttaaaatc

SEQ ID NO: 53974 - DNA, 80 bp, synthetic construct
  misc_feature 1..80: note = Artificially Synthesized Probe
  source 1..80: mol_type = other DNA
attctttgtgccttcttgtcctgcataatttgttttttcaaggttaaaaaggggcagaaggaaagtacaggtgctctgga

SEQ ID NO: 53975 - DNA, 80 bp, synthetic construct
  misc_feature 1..80: note = Artificially Synthesized Probe
  source 1..80: mol_type = other DNA
cggctgcccttagggctgagcggggccaggccaaggtccgcgtgcatgtgcaggacaccaacgagccccccgtgttccag

SEQ ID NO: 53976 - DNA, 80 bp, synthetic construct; identical to SEQ ID NO: 25011
  misc_feature 1..80: note = Artificially Synthesized Probe
  source 1..80: mol_type = other DNA

SEQ ID NO: 53977 - DNA, 80 bp, synthetic construct
  misc_feature 1..80: note = Artificially Synthesized Probe
  source 1..80: mol_type = other DNA
ctccaagcctggccctgtgtatccctgtctgtgtccacggggcccgggaagggccagcaccaactgaggcttaactaggt

SEQ ID NO: 53978 - DNA, 80 bp, synthetic construct
  misc_feature 1..80: note = Artificially Synthesized Probe
  source 1..80: mol_type = other DNA
tgcgtgtggtgtataggtgtgtggggggtggtatgtgcaaggtgggggggagtgtctatgtgtatatatgtgcatgtgtg

SEQ ID NO: 53979 - DNA, 80 bp, synthetic construct; identical to SEQ ID NO: 25012
  misc_feature 1..80: note = Artificially Synthesized Probe
  source 1..80: mol_type = other DNA

SEQ ID NO: 53980 - DNA, 80 bp, synthetic construct
  misc_feature 1..80: note = Artificially Synthesized Probe
  source 1..80: mol_type = other DNA
aagactggctgcaagtggacgcagccactggccggatccagacccagcacgtgctcagcccggcgtcccccttcctcaag

SEQ ID NO: 53981 - DNA, 80 bp, synthetic construct
  misc_feature 1..80: note = Artificially Synthesized Probe
  source 1..80: mol_type = other DNA
agccgactggtggggcaggctggggtgttggggtcactaagccgcggcctcctcgcctgcagcctcccagccccgcaccg

SEQ ID NO: 53982 - DNA, 80 bp, synthetic construct
  misc_feature 1..80: note = Artificially Synthesized Probe
  source 1..80: mol_type = other DNA
gccacctctgattgctgagctcactcagccccacccggagggtgtcttcagaactggcccctctcagccctgctgcacct

SEQ ID NO: 53983 - DNA, 80 bp, synthetic construct
  misc_feature 1..80: note = Artificially Synthesized Probe
  source 1..80: mol_type = other DNA
cttccagctgagccccaggctcccagagctcggccggaactggagcctcagccaggtcaacggtgcgctcccctcaccgc

SEQ ID NO: 53984 - DNA, 80 bp, synthetic construct; identical to SEQ ID NO: 25013
  misc_feature 1..80: note = Artificially Synthesized Probe
  source 1..80: mol_type = other DNA

SEQ ID NO: 53985 - DNA, 80 bp, synthetic construct
  misc_feature 1..80: note = Artificially Synthesized Probe
  source 1..80: mol_type = other DNA
tgaacgtgaccgtgtgccgctgcggcaaggacggcgtctgcctgccgggggccgcagcgctgctggcggggggcacaggc

SEQ ID NO: 53986 - DNA, 80 bp, synthetic construct
  misc_feature 1..80: note = Artificially Synthesized Probe
  source 1..80: mol_type = other DNA
cctaaccccgccccctcattaccagccacgccgcttcctccccagctccgcctcctccctaaccccgccccgtcattacc

SEQ ID NO: 53987 - DNA, 80 bp, synthetic construct
  misc_feature 1..80: note = Artificially Synthesized Probe
  source 1..80: mol_type = other DNA
ccctcattaccagcctcgccgcttcctccccagctcctcctcctccctaaccccgcccctcagtaccagccacgccgctt

SEQ ID NO: 53988 - DNA, 80 bp, synthetic construct
  misc_feature 1..80: note = Artificially Synthesized Probe
  source 1..80: mol_type = other DNA
gccacgccccttcctccccagctccgcctcctccctaaccccgccccctcattaccagccacgccccttctccactgccg

SEQ ID NO: 53989 - DNA, 80 bp, synthetic construct; identical to SEQ ID NO: 25014
  misc_feature 1..80: note = Artificially Synthesized Probe
  source 1..80: mol_type = other DNA

SEQ ID NO: 53990 - DNA, 80 bp, synthetic construct
  misc_feature 1..80: note = Artificially Synthesized Probe
  source 1..80: mol_type = other DNA
gtctcggggcaaggggctgctgcacggcccccaggacgaccttcgagacaatgtcctcaactacgatgagcaaggaggcg

SEQ ID NO: 53991 - DNA, 80 bp, synthetic construct
  misc_feature 1..80: note = Artificially Synthesized Probe
  source 1..80: mol_type = other DNA
aggacgcctacgacatcagccagctgcgtcacccgacagcgctgagcctgcctctgggaccgccgccacttcgcagagat

SEQ ID NO: 53992 - DNA, 80 bp, synthetic construct
  misc_feature 1..80: note = Artificially Synthesized Probe
  source 1..80: mol_type = other DNA
tgcatgcaagaaccggcgcctgcatgcacttatgggccgtcccagagcaccgcagaggaagatggtgtgcgggcgggagt

SEQ ID NO: 53993 - DNA, 80 bp, synthetic construct; identical to SEQ ID NO: 24994
  misc_feature 1..80: note = Artificially Synthesized Probe
  source 1..80: mol_type = other DNA

SEQ ID NO: 53994 - DNA, 80 bp, synthetic construct; identical to SEQ ID NO: 25015
  misc_feature 1..80: note = Artificially Synthesized Probe
  source 1..80: mol_type = other DNA

SEQ ID NO: 53995 - DNA, 80 bp, synthetic construct
  misc_feature 1..80: note = Artificially Synthesized Probe
  source 1..80: mol_type = other DNA
gtgtgtccccacgagctgagaggacagacatgcagacagagcctccgaaaggcagacgggccgttctgcggatgggggtg

SEQ ID NO: 53996 - DNA, 80 bp, synthetic construct
  misc_feature 1..80: note = Artificially Synthesized Probe
  source 1..80: mol_type = other DNA
accctcttcacaaccctgctgctgtgccctcaggacgctttgcctcccctcagacctcgcccccggacgtgggcagcttc

SEQ ID NO: 53997 - DNA, 80 bp, synthetic construct; identical to SEQ ID NO: 25016
  misc_feature 1..80: note = Artificially Synthesized Probe
  source 1..80: mol_type = other DNA

SEQ ID NO: 53998 - DNA, 80 bp, synthetic construct
  misc_feature 1..80: note = Artificially Synthesized Probe
  source 1..80: mol_type = other DNA
tgaccctggggcgcaactggacatgccactccccggcctcgtggcagtgatggcccctgcagaggcagcctgaggtcacc

SEQ ID NO: 53999 - DNA, 80 bp, synthetic construct
  misc_feature 1..80: note = Artificially Synthesized Probe
  source 1..80: mol_type = other DNA
gtcccacctttgcctcctaccagtgaacctcatctttgtatgaaagacagcaacctcctgggtaaatctgaatgaaaaac

SEQ ID NO: 54000 - DNA, 80 bp, synthetic construct
  misc_feature 1..80: note = Artificially Synthesized Probe
  source 1..80: mol_type = other DNA
ctgtgagcggagtggctccgggtgggtccctgggctgggggcagcaccccaggggttgtggggagtgagtgtaaccaaac

SEQ ID NO: 54001 - DNA, 80 bp, synthetic construct
  misc_feature 1..80: note = Artificially Synthesized Probe
  source 1..80: mol_type = other DNA
caacagctggggccattcctggcatgcctggccatccaggaacggggtggccccagattccagcctgggggaggggttga

SEQ ID NO: 54002 - DNA, 80 bp, synthetic construct
  misc_feature 1..80: note = Artificially Synthesized Probe
  source 1..80: mol_type = other DNA
gtggtgttcgtaaaccccattcccacctcgcagtggtgtttgtagactgcagcaagcgcccagtgtgtgcagagctttct

SEQ ID NO: 54003 - DNA, 80 bp, synthetic construct
  misc_feature 1..80: note = Artificially Synthesized Probe
  source 1..80: mol_type = other DNA
cttgggggtgtcattggggaccccctgtggggaagcaggtcactaatgtccatgggtcttgcctggcttgggtgggggac

SEQ ID NO: 54004 - DNA, 80 bp, synthetic construct; identical to SEQ ID NO: 24995
  misc_feature 1..80: note = Artificially Synthesized Probe
  source 1..80: mol_type = other DNA

SEQ ID NO: 54005 - DNA, 80 bp, synthetic construct
  misc_feature 1..80: note = Artificially Synthesized Probe
  source 1..80: mol_type = other DNA
gagggtctccggtggaggcagctggaggttgggtgaacagggctggcccaggtttggtggcagctgggcagggaggggat

SEQ ID NO: 54006 - DNA, 80 bp, synthetic construct
  misc_feature 1..80: note = Artificially Synthesized Probe
  source 1..80: mol_type = other DNA
atttccttcagagcatgcggttcagagcctaatctgggtctcagaccccacgtgactcctggctctgtctgtgtggcttt

SEQ ID NO: 54007 - DNA, 80 bp, synthetic construct
  misc_feature 1..80: note = Artificially Synthesized Probe
  source 1..80: mol_type = other DNA
tgatgaaggccccatgctgggcaggcaggtttccacttggcaggagctgccctgccctggaagtggcttgtgctctgtgg

SEQ ID NO: 54008 - DNA, 80 bp, synthetic construct; identical to SEQ ID NO: 24996
  misc_feature 1..80: note = Artificially Synthesized Probe
  source 1..80: mol_type = other DNA

SEQ ID NO: 54009 - DNA, 80 bp, synthetic construct
  misc_feature 1..80: note = Artificially Synthesized Probe
  source 1..80: mol_type = other DNA
gggttcggcctgacaggcttcctggccatgccaacatctccttcccggcccccgcccactcagacttaccagcccccaac

SEQ ID NO: 54010 - DNA, 80 bp, synthetic construct
  misc_feature 1..80: note = Artificially Synthesized Probe
  source 1..80: mol_type = other DNA
gttgccagtcttgagtggagcagagagaggggggagcggcaggagtgcccctctctggggggctgggggccaggtttcta

SEQ ID NO: 54011 - DNA, 80 bp, synthetic construct
  misc_feature 1..80: note = Artificially Synthesized Probe
  source 1..80: mol_type = other DNA
agtagctgtcgacacctgtggttttgcagggggaggggcggcccagctggcccagctctgaccccccggttctcggtgct

SEQ ID NO: 54012 - DNA, 80 bp, synthetic construct
  misc_feature 1..80: note = Artificially Synthesized Probe
  source 1..80: mol_type = other DNA
gcacacctctgtagtaggcacaggacttggtgccggctggggagtcccgtgagcctccctagaccccagcccacctgctg

SEQ ID NO: 54013 - DNA, 80 bp, synthetic construct
  misc_feature 1..80: note = Artificially Synthesized Probe
  source 1..80: mol_type = other DNA
ctgctcccagactccccatcgcctgcctgggacccccagcacctcccacccgtccccctgcccgacatggcagcccagca

SEQ ID NO: 54014 - DNA, 80 bp, synthetic construct; identical to SEQ ID NO: 24997
  misc_feature 1..80: note = Artificially Synthesized Probe
  source 1..80: mol_type = other DNA

SEQ ID NO: 54015 - DNA, 80 bp, synthetic construct
  misc_feature 1..80: note = Artificially Synthesized Probe
  source 1..80: mol_type = other DNA
catggggccttaaccacaatgaggtgaaaggggaacacagctcctcacttttgccaggcacatttcaagggctcagcagc

SEQ ID NO: 54016 - DNA, 80 bp, synthetic construct
  misc_feature 1..80: note = Artificially Synthesized Probe
  source 1..80: mol_type = other DNA
gccaggcccggggcacaggggacggggagagggcacaggggatgggagagggcagccctgtttcctcctccctcatctcc

SEQ ID NO: 54017 - DNA, 80 bp, synthetic construct
  misc_feature 1..80: note = Artificially Synthesized Probe
  source 1..80: mol_type = other DNA
tcctgtcagctgcggcagcttccaccaggctgtgctttagggtcaggggtctttcaggaagagccatgcagcccacccag

SEQ ID NO: 54018 - DNA, 80 bp, synthetic construct; identical to SEQ ID NO: 24998
  misc_feature 1..80: note = Artificially Synthesized Probe
  source 1..80: mol_type = other DNA

SEQ ID NO: 54019 - DNA, 80 bp, synthetic construct
  misc_feature 1..80: note = Artificially Synthesized Probe
  source 1..80: mol_type = other DNA
cacggctacttctcgattgggagggcccagcccgagccaggtcgcaacacacggccttgcagagtggcgtgtggcagccc

SEQ ID NO: 54020 - DNA, 80 bp, synthetic construct
  misc_feature 1..80: note = Artificially Synthesized Probe
  source 1..80: mol_type = other DNA
ggtctttaccggcctgagggtcgtcccggccctggagtagggtggggtgcacagcatctccctctgcaccccacactctg

SEQ ID NO: 54021 - DNA, 80 bp, synthetic construct
  misc_feature 1..80: note = Artificially Synthesized Probe
  source 1..80: mol_type = other DNA
agaagaagagtgaggctgggggtggggctgcccctctgtccccagccatgtccctcttggctgtgcagccacaacaagcc

SEQ ID NO: 54022 - DNA, 80 bp, synthetic construct; identical to SEQ ID NO: 24999
  misc_feature 1..80: note = Artificially Synthesized Probe
  source 1..80: mol_type = other DNA

SEQ ID NO: 54023 - DNA, 80 bp, synthetic construct
  misc_feature 1..80: note = Artificially Synthesized Probe
  source 1..80: mol_type = other DNA
tggggtcattccgtgtcaggaccccacgctctccccagccctggctggcccaggggctttccgtgtgcaccgctaccctg

SEQ ID NO: 54024 - DNA, 80 bp, synthetic construct
  misc_feature 1..80: note = Artificially Synthesized Probe
  source 1..80: mol_type = other DNA
tggatgggggctttgagggccagtacttggggtgtggccaccaaggccctggctcagtccgacgggggcggggctcacgt

SEQ ID NO: 54025 - DNA, 80 bp, synthetic construct
  misc_feature 1..80: note = Artificially Synthesized Probe
  source 1..80: mol_type = other DNA
ggacgcatctgtctttgttgcagagcctctgcctgtctttgggggttcctggatggaggaggcccaccaccctgtacccc

SEQ ID NO: 54026 - DNA, 80 bp, synthetic construct
  misc_feature 1..80: note = Artificially Synthesized Probe
  source 1..80: mol_type = other DNA
ccctcattctctaaaggtctcctgggagccagcggggccccatttcaggacagagctgaggcaggactcgcccaccttgc

SEQ ID NO: 54027 - DNA, 80 bp, synthetic construct; identical to SEQ ID NO: 25000
  misc_feature 1..80: note = Artificially Synthesized Probe
  source 1..80: mol_type = other DNA

SEQ ID NO: 54028 - DNA, 80 bp, synthetic construct
  misc_feature 1..80: note = Artificially Synthesized Probe
  source 1..80: mol_type = other DNA
ccgtcctccagtcctaggagacttagacctgccctgctgtcagctggggaggggcctgaggggctgcagagagggcagag

SEQ ID NO: 54029 - DNA, 80 bp, synthetic construct; identical to SEQ ID NO: 24992
  misc_feature 1..80: note = Artificially Synthesized Probe
  source 1..80: mol_type = other DNA

SEQ ID NO: 54030 - DNA, 80 bp, synthetic construct
  misc_feature 1..80: note = Artificially Synthesized Probe
  source 1..80: mol_type = other DNA
cctcaatgccatgctggaccgcgagaagactgatcgcttcagggtgcggagctgcgtggtcggacctgtgcccctcaagc

SEQ ID NO: 54031 - DNA, 80 bp, synthetic construct; identical to SEQ ID NO: 25001
  misc_feature 1..80: note = Artificially Synthesized Probe
  source 1..80: mol_type = other DNA

SEQ ID NO: 54032 - DNA, 80 bp, synthetic construct
  misc_feature 1..80: note = Artificially Synthesized Probe
  source 1..80: mol_type = other DNA
ggctcactgcaagctccgcctcccgggttcacgccattctcctgcctcagcctcccgagtagctgggactacaggcccct

SEQ ID NO: 54033 - DNA, 80 bp, synthetic construct
  misc_feature 1..80: note = Artificially Synthesized Probe
  source 1..80: mol_type = other DNA
aatctcagctgactgcaatctctacctccccagttcaagcaattctcctgcttcagcctcctgagtatctgggattacag

SEQ ID NO: 54034 - DNA, 80 bp, synthetic construct
  misc_feature 1..80: note = Artificially Synthesized Probe
  source 1..80: mol_type = other DNA
gtcagggaagaaaccactgatgccccttgggggctgggattctcagagaaggggcagtgagcgccgggcgcggtggctca

SEQ ID NO: 54035 - DNA, 80 bp, synthetic construct; identical to SEQ ID NO: 25002
  misc_feature 1..80: note = Artificially Synthesized Probe
  source 1..80: mol_type = other DNA

SEQ ID NO: 54036 - DNA, 80 bp, synthetic construct
  misc_feature 1..80: note = Artificially Synthesized Probe
  source 1..80: mol_type = other DNA
aaacaaaactgactacaaccagtgtttattcttgatttgtcaccactcttttcatgtcttgttttcttccacatgttaaa

SEQ ID NO: 54037 - DNA, 80 bp, synthetic construct
  misc_feature 1..80: note = Artificially Synthesized Probe
  source 1..80: mol_type = other DNA
ctctccagagctgtcagacagggatgtttaagtctgcagaagttatctgctaccttttgttcagctatgccctgtccata

SEQ ID NO: 54038 - DNA, 80 bp, synthetic construct
  misc_feature 1..80: note = Artificially Synthesized Probe
  source 1..80: mol_type = other DNA
acagtgaacaaggctctgtgggcacgggacctgccaagccaggcacgggagagaatctccttctctgccagttgctaaga

SEQ ID NO: 54039 - DNA, 80 bp, synthetic construct
  misc_feature 1..80: note = Artificially Synthesized Probe
  source 1..80: mol_type = other DNA
ccaatgaaaagcacagaaacgtgaaaaacagcgcactacataaactgcaaaaagtaaaaaaaaacctaactaacttaaca

SEQ ID NO: 54040 - DNA, 80 bp, synthetic construct; identical to SEQ ID NO: 25028
  misc_feature 1..80: note = Artificially Synthesized Probe
  source 1..80: mol_type = other DNA

SEQ ID NO: 54041 - DNA, 80 bp, synthetic construct
  misc_feature 1..80: note = Artificially Synthesized Probe
  source 1..80: mol_type = other DNA
ctcagaggtttgacttcagatgcttgagcactttcaacattatctttgcctttatccttctttatgcggataaacacaac

SEQ ID NO: 54042 - DNA, 80 bp, synthetic construct
  misc_feature 1..80: note = Artificially Synthesized Probe
  source 1..80: mol_type = other DNA
caaaaatttgattttgctacaattcacacttatgccctccctattcatatctgccaagaaattttcccaaatttgggaag

SEQ ID NO: 54043 - DNA, 80 bp, synthetic construct
  misc_feature 1..80: note = Artificially Synthesized Probe
  source 1..80: mol_type = other DNA
aaagaaggaaagcaaatgaggtaaattttataattgcctcagcttaccacccaaagcaaatatccaggtatcagttgcag

SEQ ID NO: 54044 - DNA, 80 bp, synthetic construct; identical to SEQ ID NO: 25029
  misc_feature 1..80: note = Artificially Synthesized Probe
  source 1..80: mol_type = other DNA

SEQ ID NO: 54045 - DNA, 80 bp, synthetic construct
  misc_feature 1..80: note = Artificially Synthesized Probe
  source 1..80: mol_type = other DNA
gccctagaataaatgctgccctggccctatctaagaaaatttaaaagcaacacatgaaagcatcaaactttttccaaatg

SEQ ID NO: 54046 - DNA, 80 bp, synthetic construct
  misc_feature 1..80: note = Artificially Synthesized Probe
  source 1..80: mol_type = other DNA
atacatattacataaatagtgggaaaagacatgaaaacagttataattatattctatatgttcaagaagctacaagactg

SEQ ID NO: 54047 - DNA, 80 bp, synthetic construct
  misc_feature 1..80: note = Artificially Synthesized Probe
  source 1..80: mol_type = other DNA
gctatccaaaaagaaatagaaaaaaaataagctttgagacaacttcaagtggcctaatacatgtgtaatcgaattcctga

SEQ ID NO: 54048 - DNA, 80 bp, synthetic construct; identical to SEQ ID NO: 25030
  misc_feature 1..80: note = Artificially Synthesized Probe
  source 1..80: mol_type = other DNA

SEQ ID NO: 54049 - DNA, 80 bp, synthetic construct
  misc_feature 1..80: note = Artificially Synthesized Probe
  source 1..80: mol_type = other DNA
atggtgtgcacctgtaatcccagctactagggagactgaggcacaagaatcatttgaacctgggaggctgagattgtgcc

SEQ ID NO: 54050 - DNA, 80 bp, synthetic construct
  misc_feature 1..80: note = Artificially Synthesized Probe
  source 1..80: mol_type = other DNA
taaattagaagttagaaaggtataaggtataggaaatattcccagaatatttggaaactaaataacacacttctaaataa

SEQ ID NO: 54051 - DNA, 80 bp, synthetic construct
  misc_feature 1..80: note = Artificially Synthesized Probe
  source 1..80: mol_type = other DNA
cccccatctctacaaaaaatttaaaaataaaaaattagccaagtgtggtagctcatacgtgtagtcccagctacttggga

SEQ ID NO: 54052 - DNA, 80 bp, synthetic construct; identical to SEQ ID NO: 25018
  misc_feature 1..80: note = Artificially Synthesized Probe
  source 1..80: mol_type = other DNA

SEQ ID NO: 54053 - DNA, 80 bp, synthetic construct; identical to SEQ ID NO: 25031
  misc_feature 1..80: note = Artificially Synthesized Probe
  source 1..80: mol_type = other DNA

SEQ ID NO: 54054 - DNA, 80 bp, synthetic construct
  misc_feature 1..80: note = Artificially Synthesized Probe
  source 1..80: mol_type = other DNA
ctacatattctacagatattaataaaatatgaactatatcaatacattagattaatgaaatagatgaattatttgaaagg

SEQ ID NO: 54055 - DNA, 80 bp, synthetic construct
  misc_feature 1..80: note = Artificially Synthesized Probe
  source 1..80: mol_type = other DNA
aacttgtccagataattgaagataaagaggtggaatgcttcctcattatacaaggcaaaatatagagagagaccaacatc

SEQ ID NO: 54056 - DNA, 80 bp, synthetic construct
  misc_feature 1..80: note = Artificially Synthesized Probe
  source 1..80: mol_type = other DNA
tgataataatgcatcaattaataggcccaaaaaatcaaatcagccacatagtcaatacatggagaaaaagcacttgaaaa

SEQ ID NO: 54057 - DNA, 80 bp, synthetic construct
  misc_feature 1..80: note = Artificially Synthesized Probe
  source 1..80: mol_type = other DNA
aagtcaagtatttctgctcttactacctctatttgacatttcactgaaggtttcagccagtaataaacaaaaggcataca

SEQ ID NO: 54058 - DNA, 80 bp, synthetic construct; identical to SEQ ID NO: 25032
  misc_feature 1..80: note = Artificially Synthesized Probe
  source 1..80: mol_type = other DNA

SEQ ID NO: 54059 - DNA, 80 bp, synthetic construct
  misc_feature 1..80: note = Artificially Synthesized Probe
  source 1..80: mol_type = other DNA
agacatagaatgaaggaattttgaaaaagaacaaagtcggaaaaattaatctacctgatttcaagccttatacagctaca

SEQ ID NO: 54060 - DNA, 80 bp, synthetic construct
  misc_feature 1..80: note = Artificially Synthesized Probe
  source 1..80: mol_type = other DNA
cagttagatagctatgttaaaaacaataaactttggtctttaccacaccccctatgcaagcatatctcagcgatatgggt

SEQ ID NO: 54061 - DNA, 80 bp, synthetic construct
  misc_feature 1..80: note = Artificially Synthesized Probe
  source 1..80: mol_type = other DNA
agtactttgttgccaaaaaatgctaatgattatctgacccttcaatgagtcataatctttttgctgcaaatcatttcctg

SEQ ID NO: 54062 - DNA, 80 bp, synthetic construct; identical to SEQ ID NO: 25033
  misc_feature 1..80: note = Artificially Synthesized Probe
  source 1..80: mol_type = other DNA

SEQ ID NO: 54063 - DNA, 80 bp, synthetic construct
  misc_feature 1..80: note = Artificially Synthesized Probe
  source 1..80: mol_type = other DNA
cctagagaaaacaatccaattagcacaactagaaagctgttctctgacctgttcacctccctgaagctgattttcatcgt

SEQ ID NO: 54064 - DNA, 80 bp, synthetic construct
  misc_feature 1..80: note = Artificially Synthesized Probe
  source 1..80: mol_type = other DNA
ccacttctaattcgagctctattgttattttcaccacgttttcagtgattcctccactgaagtcttgaacccctcaaagt

SEQ ID NO: 54065 - DNA, 80 bp, synthetic construct
  misc_feature 1..80: note = Artificially Synthesized Probe
  source 1..80: mol_type = other DNA
atctaatagcagctataacctgatgaaatgtatatcttaaataatttgaaagtcagaattactccttgatctggggcctg

SEQ ID NO: 54066 - DNA, 80 bp, synthetic construct
  misc_feature 1..80: note = Artificially Synthesized Probe
  source 1..80: mol_type = other DNA
tcagtaaactatgctgtaaacagatgtgctgtcatctgggctttgttgttccattgacagagcacagacaaagtagattt

SEQ ID NO: 54067 - DNA, 80 bp, synthetic construct; identical to SEQ ID NO: 25034
  misc_feature 1..80: note = Artificially Synthesized Probe
  source 1..80: mol_type = other DNA

SEQ ID NO: 54068 - DNA, 80 bp, synthetic construct
  misc_feature 1..80: note = Artificially Synthesized Probe
  source 1..80: mol_type = other DNA
cttgttctaggttagattttggtttaaaggactattgttgctgttttaatcttctatccagaccactcaaactttctccc

SEQ ID NO: 54069 - DNA, 80 bp, synthetic construct
  misc_feature 1..80: note = Artificially Synthesized Probe
  source 1..80: mol_type = other DNA
aagctaaatcacgtctaacttttgatttaaagtgagagatgtgtgactcttcctttcacctgaacacttacatgccattt

SEQ ID NO: 54070 - DNA, 80 bp, synthetic construct
  misc_feature 1..80: note = Artificially Synthesized Probe
  source 1..80: mol_type = other DNA
cgggtgtcccaaaataattataataataacatcaaagatcactgatcagcataacagatataataatgaaaaagtttaag

SEQ ID NO: 54071 - DNA, 80 bp, synthetic construct; identical to SEQ ID NO: 25035
  misc_feature 1..80: note = Artificially Synthesized Probe
  source 1..80: mol_type = other DNA

SEQ ID NO: 54072 - DNA, 80 bp, synthetic construct
  misc_feature 1..80: note = Artificially Synthesized Probe
  source 1..80: mol_type = other DNA
ctaacaaagcacatcatctatgtatattaaaaatgcttgcaactcagcaatagaatccaaacagcctaatttttaaaaaa

SEQ ID NO: 54073 - DNA, 80 bp, synthetic construct
  misc_feature 1..80: note = Artificially Synthesized Probe
  source 1..80: mol_type = other DNA
aagtgctgggagaatgctgagcaactggacctctcacacactggtgggaatgtaaaatgttaagaacaatttggaaagta

SEQ ID NO: 54074 - DNA, 80 bp, synthetic construct
  misc_feature 1..80: note = Artificially Synthesized Probe
  source 1..80: mol_type = other DNA
cactatgaagaaggagttgttttaaggaaattaacctgctagtaagtttataggaggaatcatggcagaaaagtctggat

SEQ ID NO: 54075 - DNA, 80 bp, synthetic construct
  misc_feature 1..80: note = Artificially Synthesized Probe
  source 1..80: mol_type = other DNA
cctcacagcagctttgtaatagcaaaagttggagttacaatcaacaggtgaacaggtatagtcattcaatggaatactac

SEQ ID NO: 54076 - DNA, 80 bp, synthetic construct; identical to SEQ ID NO: 25036
  misc_feature 1..80: note = Artificially Synthesized Probe
  source 1..80: mol_type = other DNA

SEQ ID NO: 54077 - DNA, 80 bp, synthetic construct
  misc_feature 1..80: note = Artificially Synthesized Probe
  source 1..80: mol_type = other DNA
ctgctttccatctgtcattgaaaattttgcaaatgatgcttaggtcatccaactgttcatctacaccaagagaatgctgt

SEQ ID NO: 54078 - DNA, 80 bp, synthetic construct
  misc_feature 1..80: note = Artificially Synthesized Probe
  source 1..80: mol_type = other DNA
catccatctatgtttttttccatgtatttctgacaactcaccattgattttggaaacttcccagtcgttttgtaagcttc

SEQ ID NO: 54079 - DNA, 80 bp, synthetic construct; identical to SEQ ID NO: 25037
  misc_feature 1..80: note = Artificially Synthesized Probe
  source 1..80: mol_type = other DNA

SEQ ID NO: 54080 - DNA, 80 bp, synthetic construct
  misc_feature 1..80: note = Artificially Synthesized Probe
  source 1..80: mol_type = other DNA
gctaatattttacatatattacttcaaaataattgtgaaaactgagctcagaagttgtgtaacttgcccaaggcagagag

SEQ ID NO: 54081 - DNA, 80 bp, synthetic construct
  misc_feature 1..80: note = Artificially Synthesized Probe
  source 1..80: mol_type = other DNA
tccacagacattatttactatatgataggagtaaaaaacttggatctgcagcataactggttggtagctatgtaatcttg

SEQ ID NO: 54082 - DNA, 80 bp, synthetic construct
  misc_feature 1..80: note = Artificially Synthesized Probe
  source 1..80: mol_type = other DNA
gctgtcagtgcaacataaacactgactgttatcatgtcctcctcaacaccaatcacagacattgtttctacaacttctga

SEQ ID NO: 54083 - DNA, 80 bp, synthetic construct
  misc_feature 1..80: note = Artificially Synthesized Probe
  source 1..80: mol_type = other DNA
cactgtgttctcgaagttattgtatctatttatatcatgtcagtgccagaaactaaaaacagaacagggttttggaccct

SEQ ID NO: 54084 - DNA, 80 bp, synthetic construct; identical to SEQ ID NO: 25017
  misc_feature 1..80: note = Artificially Synthesized Probe
  source 1..80: mol_type = other DNA

SEQ ID NO: 54085 - DNA, 80 bp, synthetic construct; identical to SEQ ID NO: 25038
  misc_feature 1..80: note = Artificially Synthesized Probe
  source 1..80: mol_type = other DNA

SEQ ID NO: 54086 - DNA, 80 bp, synthetic construct
  misc_feature 1..80: note = Artificially Synthesized Probe
  source 1..80: mol_type = other DNA
aattcagctctcaaccctggccctcacattttgaaagtttttttccggggctgtggtgggggagtctaaaaacatattta

SEQ ID NO: 54087 - DNA, 80 bp, synthetic construct; identical to SEQ ID NO: 25019
  misc_feature 1..80: note = Artificially Synthesized Probe
  source 1..80: mol_type = other DNA

SEQ ID NO: 54088 - DNA, 80 bp, synthetic construct
  misc_feature 1..80: note = Artificially Synthesized Probe
  source 1..80: mol_type = other DNA
tgggtaaacatactattcctatgtgtttatttttattttaaaaaagttctctggaactccacagttggagccagcaggca

SEQ ID NO: 54089 - DNA, 80 bp, synthetic construct; identical to SEQ ID NO: 25039
  misc_feature 1..80: note = Artificially Synthesized Probe
  source 1..80: mol_type = other DNA

SEQ ID NO: 54090 - DNA, 80 bp, synthetic construct
  misc_feature 1..80: note = Artificially Synthesized Probe
  source 1..80: mol_type = other DNA
agaagaggccatagcccctacaggaaaccacagagtgagcagcagccctgctgggggcacaggtgtttttcacctttaac

SEQ ID NO: 54091 - DNA, 80 bp, synthetic construct
  misc_feature 1..80: note = Artificially Synthesized Probe
  source 1..80: mol_type = other DNA
tggtgggtgcctgtaatcccagctactcggaaggctgaggtaggagaattgcttgaacccaggaggtggaggttgcagtg

SEQ ID NO: 54092 - DNA, 80 bp, synthetic construct
  misc_feature 1..80: note = Artificially Synthesized Probe
  source 1..80: mol_type = other DNA
gccctgtcagttttcttatcctccctcccatttcaacccatgtatcttctgataatctgtgttcctttttttttgttttt

SEQ ID NO: 54093 - DNA, 80 bp, synthetic construct; identical to SEQ ID NO: 25040
  misc_feature 1..80: note = Artificially Synthesized Probe
  source 1..80: mol_type = other DNA

SEQ ID NO: 54094 - DNA, 80 bp, synthetic construct
  misc_feature 1..80: note = Artificially Synthesized Probe
  source 1..80: mol_type = other DNA
atttgcatttcatctgtcttcaaaaggatttgttcatccttacaatgtggtgtttgtgcttgtattaggaagggtatagt

SEQ ID NO: 54095 - DNA, 80 bp, synthetic construct
  misc_feature 1..80: note = Artificially Synthesized Probe
  source 1..80: mol_type = other DNA
agtggtggaaacgttgggcgagatgggtggatactcatagaccctggtaacacagtgaattcctcatccaacaaacatct

SEQ ID NO: 54096 - DNA, 80 bp, synthetic construct
  misc_feature 1..80: note = Artificially Synthesized Probe
  source 1..80: mol_type = other DNA
gcaaagtctttctgaagtagtagatgtttaaggcaagaagaagacgcttcaagtagaaggaagagtgtgagataaagcac

SEQ ID NO: 54097 - DNA, 80 bp, synthetic construct; identical to SEQ ID NO: 25041
  misc_feature 1..80: note = Artificially Synthesized Probe
  source 1..80: mol_type = other DNA

SEQ ID NO: 54098 - DNA, 80 bp, synthetic construct
  misc_feature 1..80: note = Artificially Synthesized Probe
  source 1..80: mol_type = other DNA
agaagtgagaccccctttagatgcatgaatcagagtccagtgtgacacactggatcatgggagaaaagatcagatgctga

SEQ ID NO: 54099 - DNA, 80 bp, synthetic construct
  misc_feature 1..80: note = Artificially Synthesized Probe
  source 1..80: mol_type = other DNA
cattttctataataaaaaatactggaagcaacctacatatcaaaggacaagagaatcattaaaaaagtatgatgtgttaa

SEQ ID NO: 54100 - DNA, 80 bp, synthetic construct
  misc_feature 1..80: note = Artificially Synthesized Probe
  source 1..80: mol_type = other DNA
ctttggagggttttgaaagaggagtcagatgatctgattgacttttttaaaaggtcactgactgcaattcagtgagtaga

SEQ ID NO: 54101 - DNA, 80 bp, synthetic construct
  misc_feature 1..80: note = Artificially Synthesized Probe
  source 1..80: mol_type = other DNA
ggtgctaacagattttaagtttgtggagctggagaattaaattactcagaccaacactggagtcatccttaattcttaac

SEQ ID NO: 54102 - DNA, 80 bp, synthetic construct
  misc_feature 1..80: note = Artificially Synthesized Probe
  source 1..80: mol_type = other DNA
cttcctgacctcaacttaatggtatatgtatcctttccttgtttcatcacagtaattttcttacatgcctttatttttcc

SEQ ID NO: 54103 - DNA, 80 bp, synthetic construct; identical to SEQ ID NO: 25042
  misc_feature 1..80: note = Artificially Synthesized Probe
  source 1..80: mol_type = other DNA

SEQ ID NO: 54104 - DNA, 80 bp, synthetic construct
  misc_feature 1..80: note = Artificially Synthesized Probe
  source 1..80: mol_type = other DNA
cgtgatttaagtcatgctgaaatatttcctatgccatagacaggaggtgtaatgtacaacagcagcgaaagatctgagtt

SEQ ID NO: 54105 - DNA, 80 bp, synthetic construct
  misc_feature 1..80: note = Artificially Synthesized Probe
  source 1..80: mol_type = other DNA
actgaaaaaaaggaattgctaagatggaaatatttacacattttgtttagccacctcagccagagcaccagcttctccag

SEQ ID NO: 54106 - DNA, 80 bp, synthetic construct; identical to SEQ ID NO: 25043
  misc_feature 1..80: note = Artificially Synthesized Probe
  source 1..80: mol_type = other DNA

SEQ ID NO: 54107 - DNA, 80 bp, synthetic construct
  misc_feature 1..80: note = Artificially Synthesized Probe
  source 1..80: mol_type = other DNA
caggtacacatgaaataatgaagtatctattcctaatgtttaacttgtggtggggacaacagttgaaagagggcaattac

SEQ ID NO: 54108 - DNA, 80 bp, synthetic construct
  misc_feature 1..80: note = Artificially Synthesized Probe
  source 1..80: mol_type = other DNA
tgtgagggtcagccctggagtcagtgcaggccagctcctcctcctccccattggctttggtgaccacgcagccaggcctg

SEQ ID NO: 54109 - DNA, 80 bp, synthetic construct
  misc_feature 1..80: note = Artificially Synthesized Probe
  source 1..80: mol_type = other DNA
acttggcaaaagaacttgcattgtacttcacaccaaacactagaggctcaggattttctgctttgaacacaatgttggaa

SEQ ID NO: 54110 - DNA, 80 bp, synthetic construct
  misc_feature 1..80: note = Artificially Synthesized Probe
  source 1..80: mol_type = other DNA
gaaattagactatttcataccatatatgaaaatccgttaaaaatagattacagacaaaatataagacctgaaactataac

SEQ ID NO: 54111 - DNA, 80 bp, synthetic construct
  misc_feature 1..80: note = Artificially Synthesized Probe
  source 1..80: mol_type = other DNA
aggtttgttcaagtgattctcctgcctcagtctcccaagtggctgggattataggcacccaccaccacacccagctaatt

SEQ ID NO: 54112 - DNA, 80 bp, synthetic construct; identical to SEQ ID NO: 25044
  misc_feature 1..80: note = Artificially Synthesized Probe
  source 1..80: mol_type = other DNA

SEQ ID NO: 54113 - DNA, 80 bp, synthetic construct
  misc_feature 1..80: note = Artificially Synthesized Probe
  source 1..80: mol_type = other DNA
ctagcaatgatcttttaggtgtgaccccaaaaacacagactacaaaagcaaaaatagacaaatgggattgcatcaaacta

SEQ ID NO: 54114 - DNA, 80 bp, synthetic construct
  misc_feature 1..80: note = Artificially Synthesized Probe
  source 1..80: mol_type = other DNA
gacctgaatagtcatttctcaaaagaagacatacaaatagccaacaagtatatggaaaaaaatgctcattactaatcatc

SEQ ID NO: 54115 - DNA, 80 bp, synthetic construct
  misc_feature 1..80: note = Artificially Synthesized Probe
  source 1..80: mol_type = other DNA
tatggaggaaactcaaacaattaaaaatagaactaccatacgatccagaaatcccactactgggtatataaagtcagtat

SEQ ID NO: 54116 - DNA, 80 bp, synthetic construct; identical to SEQ ID NO: 25045
  misc_feature 1..80: note = Artificially Synthesized Probe
  source 1..80: mol_type = other DNA

SEQ ID NO: 54117 - DNA, 80 bp, synthetic construct
  misc_feature 1..80: note = Artificially Synthesized Probe
  source 1..80: mol_type = other DNA
aatttcagttagaaggaatgagtttaaaatatctattttacaacgtggtactatagttaacaacaatatagtgtatactt

SEQ ID NO: 54118 - DNA, 80 bp, synthetic construct
  misc_feature 1..80: note = Artificially Synthesized Probe
  source 1..80: mol_type = other DNA
accttcagactacgtgtataaaatgtttatgaatcacgtgaattttgtgttgagacttgggtctcatccccaagatatct

SEQ ID NO: 54119 - DNA, 80 bp, synthetic construct
  misc_feature 1..80: note = Artificially Synthesized Probe
  source 1..80: mol_type = other DNA
actttcatagcagtggttctcaatcgagtgtcagcaaaaaccttctcagaatgattacagagccatgaaagagtcttttc

SEQ ID NO: 54120 - DNA, 80 bp, synthetic construct
  misc_feature 1..80: note = Artificially Synthesized Probe
  source 1..80: mol_type = other DNA
tctcccaagacattctcaggtgacagcttgagaaatgcttacatagagatttccattttttatgggaaatgattttccaa

SEQ ID NO: 54121 - DNA, 80 bp, synthetic construct; identical to SEQ ID NO: 25046
  misc_feature 1..80: note = Artificially Synthesized Probe
  source 1..80: mol_type = other DNA

SEQ ID NO: 54122 - DNA, 80 bp, synthetic construct
  misc_feature 1..80: note = Artificially Synthesized Probe
  source 1..80: mol_type = other DNA
tcactgaccctaagctccatgagaagaagaactgcatcatattcatctttgcttctcatctcttccctgacacatagtgc

SEQ ID NO: 54123 - DNA, 80 bp, synthetic construct
  misc_feature 1..80: note = Artificially Synthesized Probe
  source 1..80: mol_type = other DNA
tgctgtgggacaatttttcacgtagaagggtgggaactgtgtgtgaagactcggggttgagaaagaagaatcaattgaaa

SEQ ID NO: 54124 - DNA, 80 bp, synthetic construct; identical to SEQ ID NO: 25047
  misc_feature 1..80: note = Artificially Synthesized Probe
  source 1..80: mol_type = other DNA

SEQ ID NO: 54125 - DNA, 80 bp, synthetic construct
  misc_feature 1..80: note = Artificially Synthesized Probe
  source 1..80: mol_type = other DNA
gggcccaggcaggcagcacagttgtccatatgctcagacagagcacatgcatccatcctcaccaccaagcaggtcctaag

SEQ ID NO: 54126 - DNA, 80 bp, synthetic construct
  misc_feature 1..80: note = Artificially Synthesized Probe
  source 1..80: mol_type = other DNA
ttggaacttcatccttgactaacaaggtcagatgtgtgtcttagaaagataactccaggagcagctacatgggggatgga

SEQ ID NO: 54127 - DNA, 80 bp, synthetic construct
  misc_feature 1..80: note = Artificially Synthesized Probe
  source 1..80: mol_type = other DNA
aacttccacacctggaaaaacatcaaaccaaatcttctggagaaatcattataaacggaagatgctaaattagcacatgg

SEQ ID NO: 54128 - DNA, 80 bp, synthetic construct; identical to SEQ ID NO: 25048
  misc_feature 1..80: note = Artificially Synthesized Probe
  source 1..80: mol_type = other DNA

SEQ ID NO: 54129 - DNA, 80 bp, synthetic construct
  misc_feature 1..80: note = Artificially Synthesized Probe
  source 1..80: mol_type = other DNA
agctagtgaactgagaattcaaaaggatcagccatagtagagaagtgacaaaatttgcaagttaaaataaggcagaaccc

SEQ ID NO: 54130 - DNA, 80 bp, synthetic construct; identical to SEQ ID NO: 25020
  misc_feature 1..80: note = Artificially Synthesized Probe
  source 1..80: mol_type = other DNA

SEQ ID NO: 54131 - DNA, 80 bp, synthetic construct
  misc_feature 1..80: note = Artificially Synthesized Probe
  source 1..80: mol_type = other DNA
atttctgacagttgtttaatctgaaggattgctttgggcacttgccaaaattactcatttccaggctttccccttgagag

SEQ ID NO: 54132 - DNA, 80 bp, synthetic construct
  misc_feature 1..80: note = Artificially Synthesized Probe
  source 1..80: mol_type = other DNA
atgctgtgttaggaactatacacatacttttgcatttaattcttcaacatccttactagaaaggtgctaccattttaccc

SEQ ID NO: 54133 - DNA, 80 bp, synthetic construct
  misc_feature 1..80: note = Artificially Synthesized Probe
  source 1..80: mol_type = other DNA
tgtaccttgctgtgggcctgaatttctgcctccctcagaatcagtgggagaagcaagagagtttatgcaaacaaactata

SEQ ID NO: 54134 - DNA, 80 bp, synthetic construct; identical to SEQ ID NO: 25049
  misc_feature 1..80: note = Artificially Synthesized Probe
  source 1..80: mol_type = other DNA

SEQ ID NO: 54135 - DNA, 80 bp, synthetic construct
  misc_feature 1..80: note = Artificially Synthesized Probe
  source 1..80: mol_type = other DNA
atccgagatctatatcccagaggtagctatgatagtccttcagccaacactatctcaattagaactagaaagtttgttaa

SEQ ID NO: 54136 - DNA, 80 bp, synthetic construct
  misc_feature 1..80: note = Artificially Synthesized Probe
  source 1..80: mol_type = other DNA
caggtggatcacttgagcccaggagttcaagaccagcctgggcaacataaggagacccccatctctacaaaaataaaaaa

SEQ ID NO: 54137 - DNA, 80 bp, synthetic construct
  misc_feature 1..80: note = Artificially Synthesized Probe
  source 1..80: mol_type = other DNA
ctcaaaaaaagatgtgctgtttggttacgagtatagtgtatcccttagtcattgtgaacaggagtatagatatctggcct

SEQ ID NO: 54138 - DNA, 80 bp, synthetic construct; identical to SEQ ID NO: 25050
  misc_feature 1..80: note = Artificially Synthesized Probe
  source 1..80: mol_type = other DNA

SEQ ID NO: 54139 - DNA, 80 bp, synthetic construct
  misc_feature 1..80: note = Artificially Synthesized Probe
  source 1..80: mol_type = other DNA
agttgtgagggaggatacttacagctctcacccacagctaatcattgagataggtgccaacatctccctaaaagggccca

SEQ ID NO: 54140 - DNA, 80 bp, synthetic construct
  misc_feature 1..80: note = Artificially Synthesized Probe
  source 1..80: mol_type = other DNA
cacaccaacccactgcaagctctgaaaactgccctttcctttatcctttctttctgtggtattctctctccatgcagact

SEQ ID NO: 54141 - DNA, 80 bp, synthetic construct
  misc_feature 1..80: note = Artificially Synthesized Probe
  source 1..80: mol_type = other DNA
ctgcatttcttccctctttatcacaaaagctttgtaactaggcataatatatgacaattgatgaccataaagccccttat

SEQ ID NO: 54142 - DNA, 80 bp, synthetic construct; identical to SEQ ID NO: 25051
  misc_feature 1..80: note = Artificially Synthesized Probe
  source 1..80: mol_type = other DNA

SEQ ID NO: 54143 - DNA, 80 bp, synthetic construct
  misc_feature 1..80: note = Artificially Synthesized Probe
  source 1..80: mol_type = other DNA
tctctttcctaggaaagtatcttaactgtaagtacattggacggcattgagtgctgcttccaattgagtcatctggtaaa

SEQ ID NO: 54144 - DNA, 80 bp, synthetic construct
  misc_feature 1..80: note = Artificially Synthesized Probe
  source 1..80: mol_type = other DNA
agtccttacagagggagagacagaatgagagcccgtgggcttagcaatacagtaaaaggtgaaagtaaagcagcggagag

SEQ ID NO: 54145 - DNA, 80 bp, synthetic construct
  misc_feature 1..80: note = Artificially Synthesized Probe
  source 1..80: mol_type = other DNA
tgaaagcgagaccctgagtgccactcccagaccgtaagagtgttgcgagatttagcaaatagcaaataaaaacatagaac

SEQ ID NO: 54146 - DNA, 80 bp, synthetic construct; identical to SEQ ID NO: 25052
  misc_feature 1..80: note = Artificially Synthesized Probe
  source 1..80: mol_type = other DNA

SEQ ID NO: 54147 - DNA, 80 bp, synthetic construct
  misc_feature 1..80: note = Artificially Synthesized Probe
  source 1..80: mol_type = other DNA
cccacaaacaaagacaaattctattaaataaatgggctatttacctttttaattatgacatatccggtgttggtatgggg

SEQ ID NO: 54148 - DNA, 80 bp, synthetic construct
  misc_feature 1..80: note = Artificially Synthesized Probe
  source 1..80: mol_type = other DNA
aatgtttgtgtcttcagcaagagtcaggtttccatactaaggagaaaatggagaaggaaacaatgagaaggtctgctgtc

SEQ ID NO: 54149 - DNA, 80 bp, synthetic construct
  misc_feature 1..80: note = Artificially Synthesized Probe
  source 1..80: mol_type = other DNA
acgcaatacctcagagagctactggtaggattctaaaacaaattccccctcccatatccaatttgtttaataacttaatt

SEQ ID NO: 54150 - DNA, 80 bp, synthetic construct; identical to SEQ ID NO: 25053
  misc_feature 1..80: note = Artificially Synthesized Probe
  source 1..80: mol_type = other DNA

SEQ ID NO: 54151 - DNA, 80 bp, synthetic construct
  misc_feature 1..80: note = Artificially Synthesized Probe
  source 1..80: mol_type = other DNA
aaggcttggagaagtaaaacccaccaagggtcacacagctagtgggtcaaagggattgggattcaaagccatgtttgtgc

SEQ ID NO: 54152 - DNA, 80 bp, synthetic construct
  misc_feature 1..80: note = Artificially Synthesized Probe
  source 1..80: mol_type = other DNA
agccagattagtatttaagctctgagacctcaagtgcaggattcttaccctcaatctaaaaaacactgtctcgataaaag

SEQ ID NO: 54153 - DNA, 80 bp, synthetic construct
  misc_feature 1..80: note = Artificially Synthesized Probe
  source 1..80: mol_type = other DNA
atgagctcacatttctgaggcccaggataagactctttgaattaagaaattacactcaccaatcaccagaagggtggtca

SEQ ID NO: 54154 - DNA, 80 bp, synthetic construct
  misc_feature 1..80: note = Artificially Synthesized Probe
  source 1..80: mol_type = other DNA
tctttgttgcaggcttgtccctattttgatttatgaacatcatcacagggctctgggctgcctcataactgacttcaaaa

SEQ ID NO: 54155 - DNA, 80 bp, synthetic construct
  misc_feature 1..80: note = Artificially Synthesized Probe
  source 1..80: mol_type = other DNA
gtaatttgcatttttcttgaggttctaaattgacttttttctttctgtccagttctaattctctcaaatgtcttgggcac

SEQ ID NO: 54156 - DNA, 80 bp, synthetic construct; identical to SEQ ID NO: 25054
  misc_feature 1..80: note = Artificially Synthesized Probe
  source 1..80: mol_type = other DNA

SEQ ID NO: 54157 - DNA, 80 bp, synthetic construct
  misc_feature 1..80: note = Artificially Synthesized Probe
  source 1..80: mol_type = other DNA
ccaaggttacctgttaagtctggcacttttcctagctactgtctgtgtctctatcccagaagaaagggtgaagtaaaatg

SEQ ID NO: 54158 - DNA, 80 bp, synthetic construct
  misc_feature 1..80: note = Artificially Synthesized Probe
  source 1..80: mol_type = other DNA
atgcattaatatcagaaatctgcaagaaaatacttggcaagtgaagtgacagccatagccacaattttgcaattgacatg

SEQ ID NO: 54159 - DNA, 80 bp, synthetic construct; identical to SEQ ID NO: 25055
  misc_feature 1..80: note = Artificially Synthesized Probe
  source 1..80: mol_type = other DNA

SEQ ID NO: 54160 - DNA, 80 bp, synthetic construct
  misc_feature 1..80: note = Artificially Synthesized Probe
  source 1..80: mol_type = other DNA
caagagtctggctacccagcctgcaggaagcaaggtggggacagaggtagctcctggaaccctggagaaatcacccaggc

SEQ ID NO: 54161 - DNA, 80 bp, synthetic construct
  misc_feature 1..80: note = Artificially Synthesized Probe
  source 1..80: mol_type = other DNA
gtgcactgcactgtataatggttaagactctgggcttggaattcactgtttggactctggctctgccacttagcatgtat

SEQ ID NO: 54162 - DNA, 80 bp, synthetic construct
  misc_feature 1..80: note = Artificially Synthesized Probe
  source 1..80: mol_type = other DNA
tactgtcattcccatttaattaacagatgaggaagccagggaatagagaagttcaggtaacctaaccagggtcacacaac

SEQ ID NO: 54163 - DNA, 80 bp, synthetic construct
  misc_feature 1..80: note = Artificially Synthesized Probe
  source 1..80: mol_type = other DNA
ataaattctcaagtgaatagttgcagaatcccatatcaaagacaagaatctcctcaaacggcccatggtgacagatacta

SEQ ID NO: 54164 - DNA, 80 bp, synthetic construct
  misc_feature 1..80: note = Artificially Synthesized Probe
  source 1..80: mol_type = other DNA
agaggcgtggcaagagactggagggaggacaggaagagtgtagctgggggtgtcacgcccccgttgccaacagccctctt

SEQ ID NO: 54165 - DNA, 80 bp, synthetic construct; identical to SEQ ID NO: 25056
  misc_feature 1..80: note = Artificially Synthesized Probe
  source 1..80: mol_type = other DNA

SEQ ID NO: 54166 - DNA, 80 bp, synthetic construct
  misc_feature 1..80: note = Artificially Synthesized Probe
  source 1..80: mol_type = other DNA
acacctcgtttgaccagcagtgggcctttctgggtaaaaggccttccctggttttatgtaaaactgtgttaattatagcc

SEQ ID NO: 54167 - DNA, 80 bp, synthetic construct
  misc_feature 1..80: note = Artificially Synthesized Probe
  source 1..80: mol_type = other DNA
tgctccaggtcctcatgtatttccacatggattcccactctcccataagtcctacatgattttgtaacttgtcatattca

SEQ ID NO: 54168 - DNA, 80 bp, synthetic construct; identical to SEQ ID NO: 25057
  misc_feature 1..80: note = Artificially Synthesized Probe
  source 1..80: mol_type = other DNA

SEQ ID NO: 54169 - DNA, 80 bp, synthetic construct
  misc_feature 1..80: note = Artificially Synthesized Probe
  source 1..80: mol_type = other DNA
tgggtttcaaacattccgcattagggccctactaaacctggcttctgcctagtatctcaatatccctgtaaaggacagaa

SEQ ID NO: 54170 - DNA, 80 bp, synthetic construct
  misc_feature 1..80: note = Artificially Synthesized Probe
  source 1..80: mol_type = other DNA
gaccttctaggagtctgagtgcccttgaaatgagtctgtctttgaatccaggtattttgtgtgtctgtgcacatttgttt

SEQ ID NO: 54171 - DNA, 80 bp, synthetic construct
  misc_feature 1..80: note = Artificially Synthesized Probe
  source 1..80: mol_type = other DNA
ggtaagatagaactttccgaaagatgctcttctcctccactttcctacagtagagtcctttcagtctgaaagcaagaatt

SEQ ID NO: 54172 - DNA, 80 bp, synthetic construct; identical to SEQ ID NO: 25058
  misc_feature 1..80: note = Artificially Synthesized Probe
  source 1..80: mol_type = other DNA

SEQ ID NO: 54173 - DNA, 80 bp, synthetic construct
  misc_feature 1..80: note = Artificially Synthesized Probe
  source 1..80: mol_type = other DNA
tctcccagccttctttgtgcccttccgcaattttttctcacgggctccccccaataaaatcctcgtacatttaatctcct

SEQ ID NO: 54174 - DNA, 80 bp, synthetic construct; identical to SEQ ID NO: 25021
  misc_feature 1..80: note = Artificially Synthesized Probe
  source 1..80: mol_type = other DNA

SEQ ID NO: 54175 - DNA, 80 bp, synthetic construct
  misc_feature 1..80: note = Artificially Synthesized Probe
  source 1..80: mol_type = other DNA
ttagcgcaggaaaataactcatagctagaaggaaaacaatgatttgcactcaagacggtggatatgatactaacctttgt

SEQ ID NO: 54176 - DNA, 80 bp, synthetic construct
  misc_feature 1..80: note = Artificially Synthesized Probe
  source 1..80: mol_type = other DNA
gagtttgctccacaatcctgtagtttagaaaactgttggcagtattttcttcatccctgtcatgtgcagtaagggtcccg

SEQ ID NO: 54177 - DNA, 80 bp, synthetic construct; identical to SEQ ID NO: 25059
  misc_feature 1..80: note = Artificially Synthesized Probe
  source 1..80: mol_type = other DNA

SEQ ID NO: 54178 - DNA, 80 bp, synthetic construct
  misc_feature 1..80: note = Artificially Synthesized Probe
  source 1..80: mol_type = other DNA
aaggataccagtcatactggattagggcccactgtaaggacattttactttcattacctcttttaaaaccttatctccaa

SEQ ID NO: 54179 - DNA, 80 bp, synthetic construct
  misc_feature 1..80: note = Artificially Synthesized Probe
  source 1..80: mol_type = other DNA
ttcatgtctaccagaacctgagcatgggactcatttgcaaataagaccttcacagatgtcactagttaaggctctggaga

SEQ ID NO: 54180 - DNA, 80 bp, synthetic construct
  misc_feature 1..80: note = Artificially Synthesized Probe
  source 1..80: mol_type = other DNA
gataggctgccacaagtagccagggaacaccagatgccaacagaagccggaagaggcaaggaaagattctccccttgaga

SEQ ID NO: 54181 - DNA, 80 bp, synthetic construct; identical to SEQ ID NO: 25060
  misc_feature 1..80: note = Artificially Synthesized Probe
  source 1..80: mol_type = other DNA

SEQ ID NO: 54182 - DNA, 80 bp, synthetic construct
  misc_feature 1..80: note = Artificially Synthesized Probe
  source 1..80: mol_type = other DNA
tcagtgaaataccaaaggagtcaaggatgaaggggacacaggatggaatcagaaaaaacataaatggaatccaggcagtt

SEQ ID NO: 54183 - DNA, 80 bp, synthetic construct
  misc_feature 1..80: note = Artificially Synthesized Probe
  source 1..80: mol_type = other DNA
ctactctgggaggtgggaattgtaggtctctttatatgtagcaagaatcccacgtaggagctcaaacttgaattcatccc

SEQ ID NO: 54184 - DNA, 80 bp, synthetic construct
  misc_feature 1..80: note = Artificially Synthesized Probe
  source 1..80: mol_type = other DNA
gctgcatgcagggaccatcggaatgaataggacagaagagaatatgtttctagtgcatatggcatgcatatgcccttgca

SEQ ID NO: 54185 - DNA, 80 bp, synthetic construct
  misc_feature 1..80: note = Artificially Synthesized Probe
  source 1..80: mol_type = other DNA
tagaaatttatactaaatatagtcaattatcatttgtagcacttatgctctataaagttgccccaaacactgaattaatg

SEQ ID NO: 54186 - DNA, 80 bp, synthetic construct
  misc_feature 1..80: note = Artificially Synthesized Probe
  source 1..80: mol_type = other DNA
ggcaccatgaggactgctggcatcagaggacacccctcgctgggagcagaggaccttgtggatcagtcggaagtgaaagg

SEQ ID NO: 54187 - DNA, 80 bp, synthetic construct; identical to SEQ ID NO: 25061
  misc_feature 1..80: note = Artificially Synthesized Probe
  source 1..80: mol_type = other DNA

SEQ ID NO: 54188 - DNA, 80 bp, synthetic construct
  misc_feature 1..80: note = Artificially Synthesized Probe
  source 1..80: mol_type = other DNA
tctcaagtaggtgagattacaggcatgcaccaccacacctgggtaatttttgcagtttttttttttttttttagtagaga

SEQ ID NO: 54189 - DNA, 80 bp, synthetic construct
  misc_feature 1..80: note = Artificially Synthesized Probe
  source 1..80: mol_type = other DNA
tcagtattttatcaaggttttatttgtgaatatttccacctactcatgtcctatcagctaagctagacagtaagtcccca

SEQ ID NO: 54190 - DNA, 80 bp, synthetic construct
  misc_feature 1..80: note = Artificially Synthesized Probe
  source 1..80: mol_type = other DNA
cctttagagaggcaaatagcaagctgagccccttcaaaatttattctaccaacaatgacttcttcagtctcagaaaacca

SEQ ID NO: 54191 - DNA, 80 bp, synthetic construct
  misc_feature 1..80: note = Artificially Synthesized Probe
  source 1..80: mol_type = other DNA
ttgtttctaatggcaaaagtgatgggatcgcttccaagattaggtcatagaaagactgatgcctgtcctttcctgctctg

SEQ ID NO: 54192 - DNA, 80 bp, synthetic construct; identical to SEQ ID NO: 25062
  misc_feature 1..80: note = Artificially Synthesized Probe
  source 1..80: mol_type = other DNA

SEQ ID NO: 54193 - DNA, 80 bp, synthetic construct
  misc_feature 1..80: note = Artificially Synthesized Probe
  source 1..80: mol_type = other DNA
aaaaatgaaacagagaggacctgcacagaacacagtgacacagaacacactgacaaaaggcagcccacacgacacctgat

SEQ ID NO: 54194 - DNA, 80 bp, synthetic construct
  misc_feature 1..80: note = Artificially Synthesized Probe
  source 1..80: mol_type = other DNA
aagggcagtgaagctctagaaatgatagtcgtgaggctgctacacttggaagcctctgaaaggtacacagcacaacagaa

SEQ ID NO: 54195 - DNA, 80 bp, synthetic construct
  misc_feature 1..80: note = Artificially Synthesized Probe
  source 1..80: mol_type = other DNA
cttatttaacatatattgttcattctaacatttaactcacatctaacagcactagaacttcctgaacaaagcttatcaaa

SEQ ID NO: 54196 - DNA, 80 bp, synthetic construct
  misc_feature 1..80: note = Artificially Synthesized Probe
  source 1..80: mol_type = other DNA
ggacacagtaaaagaaaacatagcaagacaaagcaaaaatgataaaaatagatgggatttgacttcatctagcagcctct

SEQ ID NO: 54197 - DNA, 80 bp, synthetic construct; identical to SEQ ID NO: 25063
  misc_feature 1..80: note = Artificially Synthesized Probe
  source 1..80: mol_type = other DNA

SEQ ID NO: 54198 - DNA, 80 bp, synthetic construct
  misc_feature 1..80: note = Artificially Synthesized Probe
  source 1..80: mol_type = other DNA
tggaagacatggattactgactcccagtaaggtctcctgctcaccttttacccagcagaggagagaaatggagggcagtt

SEQ ID NO: 54199 - DNA, 80 bp, synthetic construct
  misc_feature 1..80: note = Artificially Synthesized Probe
  source 1..80: mol_type = other DNA
tgcaactgcataaaaaacatactacaacaggaaagtcagagttaaggcaagactcacccaccaccctctgtcaaaagcag

SEQ ID NO: 54200 - DNA, 80 bp, synthetic construct; identical to SEQ ID NO: 25064
  misc_feature 1..80: note = Artificially Synthesized Probe
  source 1..80: mol_type = other DNA

SEQ ID NO: 54201 - DNA, 80 bp, synthetic construct
  misc_feature 1..80: note = Artificially Synthesized Probe
  source 1..80: mol_type = other DNA
gtgaggaaagctgtatttggactgagagaactggaaaggaaataattttctagttctcaatttgaaatctctgacaacct

SEQ ID NO: 54202 - DNA, 80 bp, synthetic construct
  misc_feature 1..80: note = Artificially Synthesized Probe
  source 1..80: mol_type = other DNA
gctgctttcttttggaagtctgactgtgaaagctttctatccacgaaccatccatttaagaaacaaaatgtactttgtgg

SEQ ID NO: 54203 - DNA, 80 bp, synthetic construct
  misc_feature 1..80: note = Artificially Synthesized Probe
  source 1..80: mol_type = other DNA
ctcagagacttcagggatgagaataactgccaactcctagggttgtttgtaaacaacctggcaaaaataaaaaataaaca

SEQ ID NO: 54204 - DNA, 80 bp, synthetic construct
  misc_feature 1..80: note = Artificially Synthesized Probe
  source 1..80: mol_type = other DNA
tctattttataatgaagaaactagggcacaaaaaatttaagcgacttgcccaaggtcctactgctagttgaaatttccac

SEQ ID NO: 54205 - DNA, 80 bp, synthetic construct; identical to SEQ ID NO: 25065
  misc_feature 1..80: note = Artificially Synthesized Probe
  source 1..80: mol_type = other DNA

SEQ ID NO: 54206 - DNA, 80 bp, synthetic construct
  misc_feature 1..80: note = Artificially Synthesized Probe
  source 1..80: mol_type = other DNA
ttttatcatgggtcatcttttaggtttgaccctgtgtggttttttttaatactttgtgcacatgtaccctagaacttaat

SEQ ID NO: 54207 - DNA, 80 bp, synthetic construct
  misc_feature 1..80: note = Artificially Synthesized Probe
  source 1..80: mol_type = other DNA
gaattttcccttggcagccccaaggcaactaagcatgagttctttgcagcatttaccaatccctttgggagtaacctgaa

SEQ ID NO: 54208 - DNA, 80 bp, synthetic construct
  misc_feature 1..80: note = Artificially Synthesized Probe
  source 1..80: mol_type = other DNA
ataaatgtccctgggcccatcccaataaatatgatggaataggccattccagggccccttaacaatagtagcattaaaaa

SEQ ID NO: 54209 - DNA, 80 bp, synthetic construct; identical to SEQ ID NO: 25066
  misc_feature 1..80: note = Artificially Synthesized Probe
  source 1..80: mol_type = other DNA

SEQ ID NO: 54210 - DNA, 80 bp, synthetic construct
  misc_feature 1..80: note = Artificially Synthesized Probe
  source 1..80: mol_type = other DNA
ggagaggcacacacaggagatagagtgccaggggtgagggagtttccaaggggaaaggttccctactatgatccttttac

SEQ ID NO: 54211 - DNA, 80 bp, synthetic construct
  misc_feature 1..80: note = Artificially Synthesized Probe
  source 1..80: mol_type = other DNA
tgccatatcccacactgctaacagggaacaacaaacatcactgctgtctacttttaaggtgagggtgagtgaagttctct

SEQ ID NO: 54212 - DNA, 80 bp, synthetic construct
  misc_feature 1..80: note = Artificially Synthesized Probe
  source 1..80: mol_type = other DNA
gtgagttctcactctgagttcacatgagacctggtgcttaaatgtgtgtggcacctcccacctaactctcttgctcccat

SEQ ID NO: 54213 - DNA, 80 bp, synthetic construct; identical to SEQ ID NO: 25067
  misc_feature 1..80: note = Artificially Synthesized Probe
  source 1..80: mol_type = other DNA

SEQ ID NO: 54214 - DNA, 80 bp, synthetic construct
  misc_feature 1..80: note = Artificially Synthesized Probe
  source 1..80: mol_type = other DNA
ttgatggggtgaggatcagttgagttttccaccatctccacaggttttggtgctttccaaatattctctgtcactatgat

SEQ ID NO: 54215 - DNA, 80 bp, synthetic construct
  misc_feature 1..80: note = Artificially Synthesized Probe
  source 1..80: mol_type = other DNA
gattcttagcaggattcaattcctgagatcctgtgagaagtaggggagaagggaataggaagtgtctctggaagagacag

SEQ ID NO: 54216 - DNA, 80 bp, synthetic construct
  misc_feature 1..80: note = Artificially Synthesized Probe
  source 1..80: mol_type = other DNA
tgggagtggccggatcatccaggtctgtggcattgacatacaagaagggctttcctgtttaacaagacgtacccagaaaa

SEQ ID NO: 54217 - DNA, 80 bp, synthetic construct; identical to SEQ ID NO: 25022
  misc_feature 1..80: note = Artificially Synthesized Probe
  source 1..80: mol_type = other DNA

SEQ ID NO: 54218 - DNA, 80 bp, synthetic construct; identical to SEQ ID NO: 25068
  misc_feature 1..80: note = Artificially Synthesized Probe
  source 1..80: mol_type = other DNA

SEQ ID NO: 54219 - DNA, 80 bp, synthetic construct
  misc_feature 1..80: note = Artificially Synthesized Probe
  source 1..80: mol_type = other DNA
ttcctctcttgtccaactgcatatctgtgtgaggctaattttccttcatatatttcaaccaaactagcacatggcaagag

SEQ ID NO: 54220 - DNA, 80 bp, synthetic construct
  misc_feature 1..80: note = Artificially Synthesized Probe
  source 1..80: mol_type = other DNA
attaataattttttaaaatttctaatatagtaaatgttgatagatataaccagtgatgtactagagacagctcatgagac

SEQ ID NO: 54221 - DNA, 80 bp, synthetic construct
  misc_feature 1..80: note = Artificially Synthesized Probe
  source 1..80: mol_type = other DNA
accactggatataacccacctgtctaaaagttctctggagtcctcagtaaattttaagagaatatacaagtcctgaaacc

SEQ ID NO: 54222 - DNA, 80 bp, synthetic construct; identical to SEQ ID NO: 25069
  misc_feature 1..80: note = Artificially Synthesized Probe
  source 1..80: mol_type = other DNA

SEQ ID NO: 54223 - DNA, 80 bp, synthetic construct
  misc_feature 1..80: note = Artificially Synthesized Probe
  source 1..80: mol_type = other DNA
tgaagtctaatattcatttatgttgtgtgcaactgttaggaggtgatgctccttcctaggtgcctgctggacacactcac

SEQ ID NO: 54224 - DNA, 80 bp, synthetic construct
  misc_feature 1..80: note = Artificially Synthesized Probe
  source 1..80: mol_type = other DNA
aagatacaggggagtaagcttacctttctagagtgttctagagctctgaggtatcttagagatcaccctagaaaagcgtt

SEQ ID NO: 54225 - DNA, 80 bp, synthetic construct
  misc_feature 1..80: note = Artificially Synthesized Probe
  source 1..80: mol_type = other DNA
cctggcaaactattattttttgtagagacaggatctcactttgttgcccaggctggtctcaaactcccaggctgttctca

SEQ ID NO: 54226 - DNA, 80 bp, synthetic construct; identical to SEQ ID NO: 25070
  misc_feature 1..80: note = Artificially Synthesized Probe
  source 1..80: mol_type = other DNA

SEQ ID NO: 54227 - DNA, 80 bp, synthetic construct
  misc_feature 1..80: note = Artificially Synthesized Probe
  source 1..80: mol_type = other DNA
cccctgcctgttacctgggcgagagttctgccttactgagccttcgtactttgactggagaaacgtgggtcgattgtcgt

SEQ ID NO: 54228 - DNA, 80 bp, synthetic construct
  misc_feature 1..80: note = Artificially Synthesized Probe
  source 1..80: mol_type = other DNA
agaaccaatggcctggtgactgtaggagagaaagaactcacaaaaggccaaattgggaaatgctaaaacagggattgtat

SEQ ID NO: 54229 - DNA, 80 bp, synthetic construct
  misc_feature 1..80: note = Artificially Synthesized Probe
  source 1..80: mol_type = other DNA
acaataaacatacgtgtgcacgtgtctttatagtagcatggtttataatcctttgggtatatacccagtaatggaattgc

SEQ ID NO: 54230 - DNA, 80 bp, synthetic construct
  misc_feature 1..80: note = Artificially Synthesized Probe
  source 1..80: mol_type = other DNA
tcagcctgcaaggcctgcagcagaagtaccagacagaaagcttttatctcactcttttttccatagtaggctctctgact

SEQ ID NO: 54231 - DNA, 80 bp, synthetic construct; identical to SEQ ID NO: 25071
  misc_feature 1..80: note = Artificially Synthesized Probe
  source 1..80: mol_type = other DNA

SEQ ID NO: 54232 - DNA, 80 bp, synthetic construct
  misc_feature 1..80: note = Artificially Synthesized Probe
  source 1..80: mol_type = other DNA
gaggattgcaaagcgtcccattaatgtaaggaaagctgtaactggattctgtgcaaggaaggaaggtgccagccatactt

SEQ ID NO: 54233 - DNA, 80 bp, synthetic construct
  misc_feature 1..80: note = Artificially Synthesized Probe
  source 1..80: mol_type = other DNA
agttcaaaagtcacagcaggaggattggccttaaactggggaaaaagcaaaaaacagattaagttgtaagggaaaaaaca

SEQ ID NO: 54234 - DNA, 80 bp, synthetic construct
  misc_feature 1..80: note = Artificially Synthesized Probe
  source 1..80: mol_type = other DNA
actattattcaatacattgacaaaagtcattgatgctttaaattatagctggggttaaaagagactttttggtaatatct

SEQ ID NO: 54235 - DNA, 80 bp, synthetic construct; identical to SEQ ID NO: 25072
  misc_feature 1..80: note = Artificially Synthesized Probe
  source 1..80: mol_type = other DNA

SEQ ID NO: 54236 - DNA, 80 bp, synthetic construct
  misc_feature 1..80: note = Artificially Synthesized Probe
  source 1..80: mol_type = other DNA
aatccttttggaaataacttgaggcataaaatgtttgtaccctttgatagcaaacattactatacataatttaccctaag

SEQ ID NO: 54237 - DNA, 80 bp, synthetic construct
  misc_feature 1..80: note = Artificially Synthesized Probe
  source 1..80: mol_type = other DNA
aattatgaagaaacataagaaacaatgatgtaaagtaacagaagtaaatttgagagtaaatctagactgttatggtacca

SEQ ID NO: 54238 - DNA, 80 bp, synthetic construct
  misc_feature 1..80: note = Artificially Synthesized Probe
  source 1..80: mol_type = other DNA
agaaaaagacctggacatcagtgagaaaggtggagtaagggcctacagaaaactgctcctccataaaagcaatgagaaca

SEQ ID NO: 54239 - DNA, 80 bp, synthetic construct; identical to SEQ ID NO: 25073
  misc_feature 1..80: note = Artificially Synthesized Probe
  source 1..80: mol_type = other DNA

SEQ ID NO: 54240 - DNA, 80 bp, synthetic construct
  misc_feature 1..80: note = Artificially Synthesized Probe
  source 1..80: mol_type = other DNA
cttctaactggtgtgagatggtatctcattgtggttttgatttgcatttctctgatgaccagtgatgatcatgttgatgt

SEQ ID NO: 54241 - DNA, 80 bp, synthetic construct
  misc_feature 1..80: note = Artificially Synthesized Probe
  source 1..80: mol_type = other DNA
caaaacacttaaaagggaaagctgggaaatgagatgtccataaggggctttgaaaatctctaatatattcctggcaatct

SEQ ID NO: 54242 - DNA, 80 bp, synthetic construct
  misc_feature 1..80: note = Artificially Synthesized Probe
  source 1..80: mol_type = other DNA
caacatgcacacagtgccccttggtaaacaccaggagacttactggcttaaggcatttaaggaactctctatctagtcat

SEQ ID NO: 54243 - DNA, 80 bp, synthetic construct
  misc_feature 1..80: note = Artificially Synthesized Probe
  source 1..80: mol_type = other DNA
cattatttaaaatgtttggttttcaacaaattatgaaatgtacaaaaatattaaaaagtcaatagaaactgtccctgagg

SEQ ID NO: 54244 - DNA, 80 bp, synthetic construct; identical to SEQ ID NO: 25074
  misc_feature 1..80: note = Artificially Synthesized Probe
  source 1..80: mol_type = other DNA

SEQ ID NO: 54245 - DNA, 80 bp, synthetic construct
  misc_feature 1..80: note = Artificially Synthesized Probe
  source 1..80: mol_type = other DNA
agacagaatgacccaaaacttcacaaatttaagaaaaacatgaatctatatatccaacaatcactatgaactccaaatag

SEQ ID NO: 54246 - DNA, 80 bp, synthetic construct
  misc_feature 1..80: note = Artificially Synthesized Probe
  source 1..80: mol_type = other DNA
ctaaaagaggccgggtgcagtggctcatgcctgtaatcccagcactttgggaggctgaggtgggcagtcacgagattagg

SEQ ID NO: 54247 - DNA, 80 bp, synthetic construct
  misc_feature 1..80: note = Artificially Synthesized Probe
  source 1..80: mol_type = other DNA
attgtgccactgcattccagcctggaggacagagtgagattcccagagtgagactccgtctcgaacaaaaacaagcaaac

SEQ ID NO: 54248 - DNA, 80 bp, synthetic construct
  misc_feature 1..80: note = Artificially Synthesized Probe
  source 1..80: mol_type = other DNA
gagacaaaatgggatattctataatgatataagggtcaatccatcaagaaaccatagcaattataaacatatatgcacct

SEQ ID NO: 54249 - DNA, 80 bp, synthetic construct; identical to SEQ ID NO: 25075
  misc_feature 1..80: note = Artificially Synthesized Probe
  source 1..80: mol_type = other DNA

SEQ ID NO: 54250 - DNA, 80 bp, synthetic construct
  misc_feature 1..80: note = Artificially Synthesized Probe
  source 1..80: mol_type = other DNA
ttagaaaatactttgatgtaaatgaaaatgaaacacagcatgccaaatcttatgggatgcagataaagcagtacttagag

SEQ ID NO: 54251 - DNA, 80 bp, synthetic construct
  misc_feature 1..80: note = Artificially Synthesized Probe
  source 1..80: mol_type = other DNA
tctgtatgttgcctgttcactctgatggtagtttcttttgctgtgcagaagctctttagtttaattagatcccatttgtc

SEQ ID NO: 54252 - DNA, 80 bp, synthetic construct
  misc_feature 1..80: note = Artificially Synthesized Probe
  source 1..80: mol_type = other DNA
tggagaatataagagcacaggagaaaagtcaacaaaaccagagttgattatttgaaaagatccacaaaagtgacaaactt

SEQ ID NO: 54253 - DNA, 80 bp, synthetic construct
  misc_feature 1..80: note = Artificially Synthesized Probe
  source 1..80: mol_type = other DNA
ttttcccacaaattagacaacctagatcaaatggacaaatttctagacagacaaaaactactaaaactgattcaagaaca

SEQ ID NO: 54254 - DNA, 80 bp, synthetic construct; identical to SEQ ID NO: 25076
  misc_feature 1..80: note = Artificially Synthesized Probe
  source 1..80: mol_type = other DNA

SEQ ID NO: 54255 - DNA, 80 bp, synthetic construct
  misc_feature 1..80: note = Artificially Synthesized Probe
  source 1..80: mol_type = other DNA
gtatcccatattgatagaatcaaggataaaaaccacatatttcaatagaggcagcaaatcatttgacaaaatccgtcatc

SEQ ID NO: 54256 - DNA, 80 bp, synthetic construct
  misc_feature 1..80: note = Artificially Synthesized Probe
  source 1..80: mol_type = other DNA
cacttctatttaacattgtactagagattctagcaaggggaattaggcaagaacaagaaataaaaggcataaagattgga

SEQ ID NO: 54257 - DNA, 80 bp, synthetic construct
  misc_feature 1..80: note = Artificially Synthesized Probe
  source 1..80: mol_type = other DNA
tagcaacccaaaaatgatatttttaaaattccatttacaaccacaacaaaaagaataacatatctcagaataaacttaag

SEQ ID NO: 54258 - DNA, 80 bp, synthetic construct; identical to SEQ ID NO: 25077
  misc_feature 1..80: note = Artificially Synthesized Probe
  source 1..80: mol_type = other DNA

SEQ ID NO: 54259 - DNA, 80 bp, synthetic construct
  misc_feature 1..80: note = Artificially Synthesized Probe
  source 1..80: mol_type = other DNA
tgggaggccagaaacaattcaattgatttctgatgaggatgctaaattcagtgggggaaagaatggtgttttcaataaat

SEQ ID NO: 54260 - DNA, 80 bp, synthetic construct
  misc_feature 1..80: note = Artificially Synthesized Probe
  source 1..80: mol_type = other DNA
gaatgaggaaatggtttcttagatatgacatcaaaagtacaaataacaataacaatataaattggacttcatcgaaattc

SEQ ID NO: 54261 - DNA, 80 bp, synthetic construct
  misc_feature 1..80: note = Artificially Synthesized Probe
  source 1..80: mol_type = other DNA
aaagtaggcaaaggatttgaatagacatctctcccaagaagatatataaatagtcaattgccccatgaaaaaatactcaa

SEQ ID NO: 54262 - DNA, 80 bp, synthetic construct; identical to SEQ ID NO: 25023
  misc_feature 1..80: note = Artificially Synthesized Probe
  source 1..80: mol_type = other DNA

SEQ ID NO: 54263 - DNA, 80 bp, synthetic construct; identical to SEQ ID NO: 25078
  misc_feature 1..80: note = Artificially Synthesized Probe
  source 1..80: mol_type = other DNA

SEQ ID NO: 54264 - DNA, 80 bp, synthetic construct
  misc_feature 1..80: note = Artificially Synthesized Probe
  source 1..80: mol_type = other DNA
tccatcaattgacacatggatatccaaaatgtgatatatccagatgatggaatatcactcagtcataaaaaggaatggag

SEQ ID NO: 54265 - DNA, 80 bp, synthetic construct
  misc_feature 1..80: note = Artificially Synthesized Probe
  source 1..80: mol_type = other DNA
tgaggggagtggaggctggagagtgactattaataggcataggatttctctggaggctgatggaaatgttctgtaattag

SEQ ID NO: 54266 - DNA, 80 bp, synthetic construct
  misc_feature 1..80: note = Artificially Synthesized Probe
  source 1..80: mol_type = other DNA
agctggcactagttgaaaatccacaatgaaagaagtgtatggtggttcagttcattttatttttgaggacatattaaaaa

SEQ ID NO: 54267 - DNA, 80 bp, synthetic construct; identical to SEQ ID NO: 25079
  misc_feature 1..80: note = Artificially Synthesized Probe
  source 1..80: mol_type = other DNA

SEQ ID NO: 54268 - DNA, 80 bp, synthetic construct
  misc_feature 1..80: note = Artificially Synthesized Probe
  source 1..80: mol_type = other DNA
gaaacattcaaccatgataaccaggctatcatttcctgctaagaagggataactttgcagcatgactaacagaaaaacta

SEQ ID NO: 54269 - DNA, 80 bp, synthetic construct
  misc_feature 1..80: note = Artificially Synthesized Probe
  source 1..80: mol_type = other DNA
attgtcttcaatggagtgtggacctgtactcacagaacacctactctattttgaccttgggtcttttcatacagaaatct

SEQ ID NO: 54270 - DNA, 80 bp, synthetic construct; identical to SEQ ID NO: 25080
  misc_feature 1..80: note = Artificially Synthesized Probe
  source 1..80: mol_type = other DNA

SEQ ID NO: 54271 - DNA, 80 bp, synthetic construct
  misc_feature 1..80: note = Artificially Synthesized Probe
  source 1..80: mol_type = other DNA
agcagttgagataactcaccacagacaggtatctatgtcatatccaagcactctattggcacctatataaggaagtctcc

SEQ ID NO: 54272 - DNA, 80 bp, synthetic construct
  misc_feature 1..80: note = Artificially Synthesized Probe
  source 1..80: mol_type = other DNA
acccagtcaagcaagccagagacctaagagttgtccttctttctgttccctcatcccctgtgctcattcagaaacataaa

SEQ ID NO: 54273 - DNA, 80 bp, synthetic construct
  misc_feature 1..80: note = Artificially Synthesized Probe
  source 1..80: mol_type = other DNA
aagtcaggtagtgtgacacctccagcattgttctttttgcttaggattgtcttggcaatgcgggctcttttttggttcca

SEQ ID NO: 54274 - DNA, 80 bp, synthetic construct
  misc_feature 1..80: note = Artificially Synthesized Probe
  source 1..80: mol_type = other DNA
atcctattcatagaggtagagccctcatgatctaatcacccaccaaagaccctaactcttgatattattacattggagat

SEQ ID NO: 54275 - DNA, 80 bp, synthetic construct
  misc_feature 1..80: note = Artificially Synthesized Probe
  source 1..80: mol_type = other DNA
acacagtaagcttctacagcacaaatctagttacggttttccttgttgaaaccctccagcagcaccctgcagcctgctat

SEQ ID NO: 54276 - DNA, 80 bp, synthetic construct; identical to SEQ ID NO: 25081
  misc_feature 1..80: note = Artificially Synthesized Probe
  source 1..80: mol_type = other DNA

SEQ ID NO: 54277 - DNA, 80 bp, synthetic construct
  misc_feature 1..80: note = Artificially Synthesized Probe
  source 1..80: mol_type = other DNA
tgtcatggaaaaatgaaaaatctctctaatgtctatagcacatgaaatatctaagtaggtgggtgcagtggttcatgcct

SEQ ID NO: 54278 - DNA, 80 bp, synthetic construct
  misc_feature 1..80: note = Artificially Synthesized Probe
  source 1..80: mol_type = other DNA
ataaacaaataaaaatcagtcactctttcttagtttaccctctgccccctccacatcccaccagcctcccatgagaagct

SEQ ID NO: 54279 - DNA, 80 bp, synthetic construct
  misc_feature 1..80: note = Artificially Synthesized Probe
  source 1..80: mol_type = other DNA
agtagtcactccgtacatggttaataaaagaaagtctgtgagaaaaagtaagtaattcaactctgtgtgagcccctgcca

SEQ ID NO: 54280 - DNA, 80 bp, synthetic construct; identical to SEQ ID NO: 25082
  misc_feature 1..80: note = Artificially Synthesized Probe
  source 1..80: mol_type = other DNA

SEQ ID NO: 54281 - DNA, 80 bp, synthetic construct
  misc_feature 1..80: note = Artificially Synthesized Probe
  source 1..80: mol_type = other DNA
ccctcccttcctcaccaagttaattcccatcaacctccagctctcaacacattcactgcttcttcaggccctgacttccc

SEQ ID NO: 54282 - DNA, 80 bp, synthetic construct
  misc_feature 1..80: note = Artificially Synthesized Probe
  source 1..80: mol_type = other DNA
ggggaactgtccagcacaatacagttgtcccttggcattggtgggggctcattcctggacccacgcagataccaaaatcc

SEQ ID NO: 54283 - DNA, 80 bp, synthetic construct
  misc_feature 1..80: note = Artificially Synthesized Probe
  source 1..80: mol_type = other DNA
tttttattgtttttcccaaatatatttgattctttgttggttgaatttgctgatgcatgaacccacagatacagagggcc

SEQ ID NO: 54284 - DNA, 80 bp, synthetic construct; identical to SEQ ID NO: 25083
  misc_feature 1..80: note = Artificially Synthesized Probe
  source 1..80: mol_type = other DNA

SEQ ID NO: 54285 - DNA, 80 bp, synthetic construct
  misc_feature 1..80: note = Artificially Synthesized Probe
  source 1..80: mol_type = other DNA
agtcctctggccagaaagctcattctagcactgactccagagaagccgtatcttccagtacttgaagcagcaagctcatt

SEQ ID NO: 54286 - DNA, 80 bp, synthetic construct
  misc_feature 1..80: note = Artificially Synthesized Probe
  source 1..80: mol_type = other DNA
tccgttacttcgttgagcagtggtttatagttctccttgaagaggtccttcacatcccttgtaagttggattcctaggta

SEQ ID NO: 54287 - DNA, 80 bp, synthetic construct
  misc_feature 1..80: note = Artificially Synthesized Probe
  source 1..80: mol_type = other DNA
tacaattcttatgatactgaggccactcatctctctgtttaacttagcttctgaaatcattcttgataatgagaatgcca

SEQ ID NO: 54288 - DNA, 80 bp, synthetic construct
  misc_feature 1..80: note = Artificially Synthesized Probe
  source 1..80: mol_type = other DNA
gggtccactaaacttcccctcttggccatatccagttgcctgttaaaaaagaaagagaaaattagcatcttgtatgaagt

SEQ ID NO: 54289 - DNA, 80 bp, synthetic construct; identical to SEQ ID NO: 25084
  misc_feature 1..80: note = Artificially Synthesized Probe
  source 1..80: mol_type = other DNA

SEQ ID NO: 54290 - DNA, 80 bp, synthetic construct
  misc_feature 1..80: note = Artificially Synthesized Probe
  source 1..80: mol_type = other DNA
ccctccactctttttattttataaagacatttacagcagattgccagcactctagtgttttgaatttataagggggagaa

SEQ ID NO: 54291 - DNA, 80 bp, synthetic construct
  misc_feature 1..80: note = Artificially Synthesized Probe
  source 1..80: mol_type = other DNA
aaatgtttactttaagcagtagccccacaatggttccaaaatccaaagaccctaaacttgaaagctaagcaggctctgca

SEQ ID NO: 54292 - DNA, 80 bp, synthetic construct
  misc_feature 1..80: note = Artificially Synthesized Probe
  source 1..80: mol_type = other DNA
actctggcagaaagttactattgttacccttgtttaacaggtgatgacactaagacccaaagaggttaaattatttgccc

SEQ ID NO: 54293 - DNA, 80 bp, synthetic construct
  misc_feature 1..80: note = Artificially Synthesized Probe
  source 1..80: mol_type = other DNA
attcccagtctcagaacatggggagcatcactgtagccctcaccacaacagcacctctgaaggcagatggagtgggcacc

SEQ ID NO: 54294 - DNA, 80 bp, synthetic construct; identical to SEQ ID NO: 25085
  misc_feature 1..80: note = Artificially Synthesized Probe
  source 1..80: mol_type = other DNA

SEQ ID NO: 54295 - DNA, 80 bp, synthetic construct
  misc_feature 1..80: note = Artificially Synthesized Probe
  source 1..80: mol_type = other DNA
tccctcagtctggggaaccttgactaagttggatgctggatgtctggcaaaaaagcaataatgaatgagaacacaggggc

SEQ ID NO: 54296 - DNA, 80 bp, synthetic construct
  misc_feature 1..80: note = Artificially Synthesized Probe
  source 1..80: mol_type = other DNA
gcccagttctggttcatgaaatgagaggggaagtccactggcagtggtcaagcttccatattcctgattttaaaaaaaag

SEQ ID NO: 54297 - DNA, 80 bp, synthetic construct
  misc_feature 1..80: note = Artificially Synthesized Probe
  source 1..80: mol_type = other DNA
tagggttttctaaatatacaatcatgtcatgtgcaaacagggacaatttgacttcctcttttcctaattgaatacccttt

SEQ ID NO: 54298 - DNA, 80 bp, synthetic construct
  misc_feature 1..80: note = Artificially Synthesized Probe
  source 1..80: mol_type = other DNA
tgctaaacctgccctggattgcctacttcagacttcttgttatctgaggaaaataaacccctatttatttaaaatgctct

SEQ ID NO: 54299 - DNA, 80 bp, synthetic construct; identical to SEQ ID NO: 25086
  misc_feature 1..80: note = Artificially Synthesized Probe
  source 1..80: mol_type = other DNA

SEQ ID NO: 54300 - DNA, 80 bp, synthetic construct
  misc_feature 1..80: note = Artificially Synthesized Probe
  source 1..80: mol_type = other DNA
cttaactcacaaagtaatgttgccagacttctagcccatctcctcctttctaagtttatcttcctttgggaggtcttcat

SEQ ID NO: 54301 - DNA, 80 bp, synthetic construct
  misc_feature 1..80: note = Artificially Synthesized Probe
  source 1..80: mol_type = other DNA
gtgctttctgtggagctgctgcttatcagctttgcactcatgtcagcaagcagtctttcagttagtcacaccagtgaaaa

SEQ ID NO: 54302 - DNA, 80 bp, synthetic construct; identical to SEQ ID NO: 25087
  misc_feature 1..80: note = Artificially Synthesized Probe
  source 1..80: mol_type = other DNA

SEQ ID NO: 54303 - DNA, 80 bp, synthetic construct
  misc_feature 1..80: note = Artificially Synthesized Probe
  source 1..80: mol_type = other DNA
catcttttatgtggcagtaatgggacttgatcaccacaagacatcatttcttctgaccaatgctatgaagaaagtatctc

SEQ ID NO: 54304 - DNA, 80 bp, synthetic construct
  misc_feature 1..80: note = Artificially Synthesized Probe
  source 1..80: mol_type = other DNA
ccatcaagagctcagtgcagtgattatgtagtatttgtaccaaactcatcttccttctggaaggcccaggcataactcca

SEQ ID NO: 54305 - DNA, 80 bp, synthetic construct
  misc_feature 1..80: note = Artificially Synthesized Probe
  source 1..80: mol_type = other DNA
aagatctactcgcagtctggagtaaattagtgcttctgttgaataaagccctatgcagaaggcaagattcttcaagcaaa

SEQ ID NO: 54306 - DNA, 80 bp, synthetic construct; identical to SEQ ID NO: 25088
  misc_feature 1..80: note = Artificially Synthesized Probe
  source 1..80: mol_type = other DNA

SEQ ID NO: 54307 - DNA, 80 bp, synthetic construct
  misc_feature 1..80: note = Artificially Synthesized Probe
  source 1..80: mol_type = other DNA
ttcatggaggtcagagtccatgtggacgtacacactgaacacttaaaatgctgtagtaattatagtagctaatgtttatt

SEQ ID NO: 54308 - DNA, 80 bp, synthetic construct
  misc_feature 1..80: note = Artificially Synthesized Probe
  source 1..80: mol_type = other DNA
aggttcaaagcttaggtaactcaccaaattcttatcactggtagtggaggcaccgagtttgaatccatgtctgaatttgt

SEQ ID NO: 54309 - DNA, 80 bp, synthetic construct
  misc_feature 1..80: note = Artificially Synthesized Probe
  source 1..80: mol_type = other DNA
ctcttattattttgagatatgttccatcaatacctactttattgagagtttttagcatgaagggctgaattttgtcaaag

SEQ ID NO: 54310 - DNA, 80 bp, synthetic construct
  misc_feature 1..80: note = Artificially Synthesized Probe
  source 1..80: mol_type = other DNA
agatttcccccgggaggaaggctctgatagttttcaagtttcattcaatttcacactgtcactatgtgagctctagggta

SEQ ID NO: 54311 - DNA, 80 bp, synthetic construct; identical to SEQ ID NO: 25089
  misc_feature 1..80: note = Artificially Synthesized Probe
  source 1..80: mol_type = other DNA

SEQ ID NO: 54312 - DNA, 80 bp, synthetic construct
  misc_feature 1..80: note = Artificially Synthesized Probe
  source 1..80: mol_type = other DNA
caaccagaaaattccaaacccttgatgagaagaaaagtatagagcagagcaaggctgaaaatagagaaaatgcttttctt

SEQ ID NO: 54313 - DNA, 80 bp, synthetic construct
  misc_feature 1..80: note = Artificially Synthesized Probe
  source 1..80: mol_type = other DNA
ttgttttcaacattacccataactggtgttggcttttaagagctggaaagaaaatacattccctagtcgagggcagacat

SEQ ID NO: 54314 - DNA, 80 bp, synthetic construct
  misc_feature 1..80: note = Artificially Synthesized Probe
  source 1..80: mol_type = other DNA
aatagagaagaacaccctcttctcttaccaaataaagcataagaagacacagggagtgaagatgggcctgaagtatcata

SEQ ID NO: 54315 - DNA, 80 bp, synthetic construct; identical to SEQ ID NO: 25090
  misc_feature 1..80: note = Artificially Synthesized Probe
  source 1..80: mol_type = other DNA

SEQ ID NO: 54316 - DNA, 80 bp, synthetic construct
  misc_feature 1..80: note = Artificially Synthesized Probe
  source 1..80: mol_type = other DNA
cacctcctgggttcaagcagttctcccaccttagcttcccaagtagctgggattacaaatgcccatcaccacgcctggct

SEQ ID NO: 54317 - DNA, 80 bp, synthetic construct
  misc_feature 1..80: note = Artificially Synthesized Probe
  source 1..80: mol_type = other DNA
ggagaagatgtattttggcagattccaggataactaaacattttgattcaaagccacaaacatatgagattccgcaagtg

SEQ ID NO: 54318 - DNA, 80 bp, synthetic construct
  misc_feature 1..80: note = Artificially Synthesized Probe
  source 1..80: mol_type = other DNA
tgtctcctgtccgatattatttttcccttcctccttaaggcttcccatttcacagagattgtgactttcactatgagaca

SEQ ID NO: 54319 - DNA, 80 bp, synthetic construct
  misc_feature 1..80: note = Artificially Synthesized Probe
  source 1..80: mol_type = other DNA
ctggagtgcagtggcacgatctcagcttattgcaagctccgcctcccaggtttacaccattctcctgcctcagcctccca

SEQ ID NO: 54320 - DNA, 80 bp, synthetic construct; identical to SEQ ID NO: 25024
  misc_feature 1..80: note = Artificially Synthesized Probe
  source 1..80: mol_type = other DNA

SEQ ID NO: 54321 - DNA, 80 bp, synthetic construct; identical to SEQ ID NO: 25091
  misc_feature 1..80: note = Artificially Synthesized Probe
  source 1..80: mol_type = other DNA

SEQ ID NO: 54322 - DNA, 80 bp, synthetic construct
  misc_feature 1..80: note = Artificially Synthesized Probe
  source 1..80: mol_type = other DNA
cttatatttgaactttaaagggtaaaaatgctatttcattttagcctcaccaatgttctgggagataaagaaacaatcct

SEQ ID NO: 54323 - DNA, 80 bp, synthetic construct
  misc_feature 1..80: note = Artificially Synthesized Probe
  source 1..80: mol_type = other DNA
agacccccatctctactaaaaacacaaaaattagccaggtgggtgactcattgcctgtaatcccagctacttgtgataca

SEQ ID NO: 54324 - DNA, 80 bp, synthetic construct
  misc_feature 1..80: note = Artificially Synthesized Probe
  source 1..80: mol_type = other DNA
ctgcagacatagataagcaagctggaagtttccacaggtgaatgccagcagctcggccaataggaaaaggctatctgggg

SEQ ID NO: 54325 - DNA, 80 bp, synthetic construct; identical to SEQ ID NO: 25092
  misc_feature 1..80: note = Artificially Synthesized Probe
  source 1..80: mol_type = other DNA

SEQ ID NO: 54326 - DNA, 80 bp, synthetic construct
  misc_feature 1..80: note = Artificially Synthesized Probe
  source 1..80: mol_type = other DNA
cccagacaatgatgccacttcacctgggaggctgaggtgggaggatcacttgagcccaggaggcagaggttgcagccagc

SEQ ID NO: 54327 - DNA, 80 bp, synthetic construct
  misc_feature 1..80: note = Artificially Synthesized Probe
  source 1..80: mol_type = other DNA
ctctatagctatgtggctatggatatactacttcatctttcggtgccttagtctcctcacatggaaaacacatagccatt

SEQ ID NO: 54328 - DNA, 80 bp, synthetic construct
  misc_feature 1..80: note = Artificially Synthesized Probe
  source 1..80: mol_type = other DNA
cagaagtggcagtaggtgcctgtagtcccagctacttgggaggctgaggcaggagaattgcttgaacctggaaggcagag

SEQ ID NO: 54329 - DNA, 80 bp, synthetic construct; identical to SEQ ID NO: 25093
  misc_feature 1..80: note = Artificially Synthesized Probe
  source 1..80: mol_type = other DNA

SEQ ID NO: 54330 - DNA, 80 bp, synthetic construct
  misc_feature 1..80: note = Artificially Synthesized Probe
  source 1..80: mol_type = other DNA
atgctatataaattaagcaacttgccctgaaattccacaactattttaaggaaaagctaggattaaaacccttcaggact

SEQ ID NO: 54331 - DNA, 80 bp, synthetic construct
  misc_feature 1..80: note = Artificially Synthesized Probe
  source 1..80: mol_type = other DNA
agagtacttatttggtttggaaacacatagaaacaagtaacaacctcagattctagcatattgcaagatgatattatcaa

SEQ ID NO: 54332 - DNA, 80 bp, synthetic construct
  misc_feature 1..80: note = Artificially Synthesized Probe
  source 1..80: mol_type = other DNA
acttttttttgttggtaggctattaattattgcctcaatttcagagcctgttattggtctattcagagattcaacttctt

SEQ ID NO: 54333 - DNA, 80 bp, synthetic construct; identical to SEQ ID NO: 25094
  misc_feature 1..80: note = Artificially Synthesized Probe
  source 1..80: mol_type = other DNA

SEQ ID NO: 54334 - DNA, 80 bp, synthetic construct
  misc_feature 1..80: note = Artificially Synthesized Probe
  source 1..80: mol_type = other DNA
aatggacaatggatatttgcttaatgaggttggatggagatgtttcctcatttctgcttctcacatcttaccatctaagt

SEQ ID NO: 54335 - DNA, 80 bp, synthetic construct
  misc_feature 1..80: note = Artificially Synthesized Probe
  source 1..80: mol_type = other DNA
aaaccctacttccttcatgaaatcttccttgatttccagccagtctcttcctctcagagccagttctgattgatatatat

SEQ ID NO: 54336 - DNA, 80 bp, synthetic construct
  misc_feature 1..80: note = Artificially Synthesized Probe
  source 1..80: mol_type = other DNA
tatcaggtctcttcatactatcccttgcatatatcaagccatcatcagatgttgggtaaattctaaaacatttatgatta

SEQ ID NO: 54337 - DNA, 80 bp, synthetic construct
  misc_feature 1..80: note = Artificially Synthesized Probe
  source 1..80: mol_type = other DNA
tgaaaagagttgtttctcctttgaatacactaacagatttctgctcagtaaataacccagaactggtcgaactagatcat

SEQ ID NO: 54338 - DNA, 80 bp, synthetic construct; identical to SEQ ID NO: 25095
  misc_feature 1..80: note = Artificially Synthesized Probe
  source 1..80: mol_type = other DNA

SEQ ID NO: 54339 - DNA, 80 bp, synthetic construct
  misc_feature 1..80: note = Artificially Synthesized Probe
  source 1..80: mol_type = other DNA
ataaagcagggataataataataatacctaccttcgagagttaagagattcagcgagttaatatttggaatactgttggc

SEQ ID NO: 54340 - DNA, 80 bp, synthetic construct
  misc_feature 1..80: note = Artificially Synthesized Probe
  source 1..80: mol_type = other DNA
ggcaaagcctttacccgaatgattcaaggcaaactacactagtgctaggattatgtcaaaagaggactttggtctctcaa

SEQ ID NO: 54341 - DNA, 80 bp, synthetic construct; identical to SEQ ID NO: 25096
  misc_feature 1..80: note = Artificially Synthesized Probe
  source 1..80: mol_type = other DNA

SEQ ID NO: 54342 - DNA, 80 bp, synthetic construct
  misc_feature 1..80: note = Artificially Synthesized Probe
  source 1..80: mol_type = other DNA
ttacaaaaaaaggagttttgaaaagaaggcctcggttcccaaactgtggctgcccctcacccaatgggcaccaccatgac

SEQ ID NO: 54343 - DNA, 80 bp, synthetic construct
  misc_feature 1..80: note = Artificially Synthesized Probe
  source 1..80: mol_type = other DNA
tctatttgattcttctctcttttcttctttattagtcttgctagcagtctatcaattttgttgatcttttcaaaaaacca

SEQ ID NO: 54344 - DNA, 80 bp, synthetic construct
  misc_feature 1..80: note = Artificially Synthesized Probe
  source 1..80: mol_type = other DNA
aaaggcagcaaacattgactgaaaacaatttgctgcatgcaccgataagacttggtggtgaaaaactatcttgctgattt

SEQ ID NO: 54345 - DNA, 80 bp, synthetic construct
  misc_feature 1..80: note = Artificially Synthesized Probe
  source 1..80: mol_type = other DNA
acaccaagtatcatttaatccactacagatctttccaaaatgttgaaaaggttttttccccctactttgcagctgctctt

SEQ ID NO: 54346 - DNA, 80 bp, synthetic construct
  misc_feature 1..80: note = Artificially Synthesized Probe
  source 1..80: mol_type = other DNA
tgcttcaccttaggaatcttcccttttttaaatcaatccaaatgctatgggtagaattgtgtctccctccccctcaaaaa

SEQ ID NO: 54347 - DNA, 80 bp, synthetic construct; identical to SEQ ID NO: 25097
  misc_feature 1..80: note = Artificially Synthesized Probe
  source 1..80: mol_type = other DNA

SEQ ID NO: 54348 - DNA, 80 bp, synthetic construct
  misc_feature 1..80: note = Artificially Synthesized Probe
  source 1..80: mol_type = other DNA
caaatgaagaccccatggaacttttgtttagcctgtgctgctgtcccaggacagaggtggcctcacagggggctctgctc

SEQ ID NO: 54349 - DNA, 80 bp, synthetic construct
  misc_feature 1..80: note = Artificially Synthesized Probe
  source 1..80: mol_type = other DNA
acataattaggttcttcttaagaaatttagaacaccaatttgtgaggataaattccattcaccagggcacacacagattg

SEQ ID NO: 54350 - DNA, 80 bp, synthetic construct; identical to SEQ ID NO: 25098
  misc_feature 1..80: note = Artificially Synthesized Probe
  source 1..80: mol_type = other DNA

SEQ ID NO: 54351 - DNA, 80 bp, synthetic construct
  misc_feature 1..80: note = Artificially Synthesized Probe
  source 1..80: mol_type = other DNA
acccggctaatttttgtatttttaatggagacggaggtttcgccatgttggccaggttggtctcgaactcctggcctcaa

SEQ ID NO: 54352 - DNA, 80 bp, synthetic construct
  misc_feature 1..80: note = Artificially Synthesized Probe
  source 1..80: mol_type = other DNA
aagctactgcccagctgctccaggaaaaccaccctcctgccttggtggcaccaagggaggatgagcagaatggtctcgag

SEQ ID NO: 54353 - DNA, 80 bp, synthetic construct
  misc_feature 1..80: note = Artificially Synthesized Probe
  source 1..80: mol_type = other DNA
ggttgcgagattcttttcaatcttgggtttagcagctaagtacctcctctcgtacatggcctttctggaatacatagcag

SEQ ID NO: 54354 - DNA, 80 bp, synthetic construct; identical to SEQ ID NO: 25099
  misc_feature 1..80: note = Artificially Synthesized Probe
  source 1..80: mol_type = other DNA

SEQ ID NO: 54355 - DNA, 80 bp, synthetic construct
  misc_feature 1..80: note = Artificially Synthesized Probe
  source 1..80: mol_type = other DNA
gatctttcctgctttctcatgtgggcatttaatgctataaatttccctctacacactgctttaaatgtgtcccagagatt

SEQ ID NO: 54356 - DNA, 80 bp, synthetic construct
  misc_feature 1..80: note = Artificially Synthesized Probe
  source 1..80: mol_type = other DNA
actaaggctgagccatgaagcttcaaagaacaaagaagttgcagaaggagagagctacagaatttgttttcaaatatcct

SEQ ID NO: 54357 - DNA, 80 bp, synthetic construct
  misc_feature 1..80: note = Artificially Synthesized Probe
  source 1..80: mol_type = other DNA
gaaaatctcgcccaaaccatttttcatcgattaatgttcagatctgccacgcccatctttttggtctggctcacagatct

SEQ ID NO: 54358 - DNA, 80 bp, synthetic construct
  misc_feature 1..80: note = Artificially Synthesized Probe
  source 1..80: mol_type = other DNA
ggtataaatctgggcttctgcctcacacttcaaacagattactccacatggggagggaatgggcagctggatgatttgtt

SEQ ID NO: 54359 - DNA, 80 bp, synthetic construct; identical to SEQ ID NO: 25100
  misc_feature 1..80: note = Artificially Synthesized Probe
  source 1..80: mol_type = other DNA

SEQ ID NO: 54360 - DNA, 80 bp, synthetic construct
  misc_feature 1..80: note = Artificially Synthesized Probe
  source 1..80: mol_type = other DNA
agacgtgccatggtggtttgctgcacccatcaacccgtcatttaggttttagccccacatgcattagggatttgtcctaa

SEQ ID NO: 54361 - DNA, 80 bp, synthetic construct
  misc_feature 1..80: note = Artificially Synthesized Probe
  source 1..80: mol_type = other DNA
tcatccatgtccctgaaaaggacatgaaatcattcttttttatggctgcatagtattccatggtgtatatgtgccacatt

SEQ ID NO: 54362 - DNA, 80 bp, synthetic construct
  misc_feature 1..80: note = Artificially Synthesized Probe
  source 1..80: mol_type = other DNA
ttcttattaaagaaaagaataacaagttccaagaaatatttgagagaggtgtcatgttgttcctggttggcgtttgttcc

SEQ ID NO: 54363 - DNA, 80 bp, synthetic construct
  misc_feature 1..80: note = Artificially Synthesized Probe
  source 1..80: mol_type = other DNA
ggagccactgacctagggacaacagtgactgtcccaccagggcacttgcctgatgttgtaacccatttatacctgaggtt

SEQ ID NO: 54364 - DNA, 80 bp, synthetic construct; identical to SEQ ID NO: 25101
  misc_feature 1..80: note = Artificially Synthesized Probe
  source 1..80: mol_type = other DNA

SEQ ID NO: 54365 - DNA, 80 bp, synthetic construct
  misc_feature 1..80: note = Artificially Synthesized Probe
  source 1..80: mol_type = other DNA
acatcctggccttagaaattcagtaggaagtaaatctaaattaggttccatcccataggatttagacactgaaggatcga

SEQ ID NO: 54366 - DNA, 80 bp, synthetic construct; identical to SEQ ID NO: 25025
  misc_feature 1..80: note = Artificially Synthesized Probe
  source 1..80: mol_type = other DNA

SEQ ID NO: 54367 - DNA, 80 bp, synthetic construct
  misc_feature 1..80: note = Artificially Synthesized Probe
  source 1..80: mol_type = other DNA
actgggatgggtaggagaggaagggaaaataaatttaattctgcttaataaaaggtgccagaccacgatgaaatctcatt

SEQ ID NO: 54368 - DNA, 80 bp, synthetic construct
  misc_feature 1..80: note = Artificially Synthesized Probe
  source 1..80: mol_type = other DNA
gagcgcttgaggaagtggtgtgaatgcaggggccaagcaccaagccactctgctagatggcctcttggtgaggaagagaa

SEQ ID NO: 54369 - DNA, 80 bp, synthetic construct; identical to SEQ ID NO: 25102
  misc_feature 1..80: note = Artificially Synthesized Probe
  source 1..80: mol_type = other DNA

SEQ ID NO: 54370 - DNA, 80 bp, synthetic construct
  misc_feature 1..80: note = Artificially Synthesized Probe
  source 1..80: mol_type = other DNA
gtgtgtctttctttggataatcaacgagcagttacagaacaactagccccattctaaatctgataccagagatttctgaa

SEQ ID NO: 54371 - DNA, 80 bp, synthetic construct
  misc_feature 1..80: note = Artificially Synthesized Probe
  source 1..80: mol_type = other DNA
ttctagacattttttttgacaatggaacgagaagtagagtttctgccaggatatattttgcacatcatccagattttttt

SEQ ID NO: 54372 - DNA, 80 bp, synthetic construct; identical to SEQ ID NO: 25103
  misc_feature 1..80: note = Artificially Synthesized Probe
  source 1..80: mol_type = other DNA

SEQ ID NO: 54373 - DNA, 80 bp, synthetic construct
  misc_feature 1..80: note = Artificially Synthesized Probe
  source 1..80: mol_type = other DNA
ggatgccccacctgcacctcacccaaagacttatatgggaaccatgagaggggctttaaaatgctatatatatagcaaaa

SEQ ID NO: 54374 - DNA, 80 bp, synthetic construct
  misc_feature 1..80: note = Artificially Synthesized Probe
  source 1..80: mol_type = other DNA
ctacttgaactttctcatggaacagagcgctaacattcactggatgtgtaccatgcaccaagcaacatagtaagctcttt

SEQ ID NO: 54375 - DNA, 80 bp, synthetic construct
  misc_feature 1..80: note = Artificially Synthesized Probe
  source 1..80: mol_type = other DNA
tctcagtaaaggactcgctttgtttcctggtgagagctgaatagcattcatcttcctttcatctaaacatgtgttttttc

SEQ ID NO: 54376 - DNA, 80 bp, synthetic construct; identical to SEQ ID NO: 25104
  misc_feature 1..80: note = Artificially Synthesized Probe
  source 1..80: mol_type = other DNA

SEQ ID NO: 54377 - DNA, 80 bp, synthetic construct
  misc_feature 1..80: note = Artificially Synthesized Probe
  source 1..80: mol_type = other DNA
caggtctgtctgtcttcaattcttattctagtacttttacaaaaagacttttcttcttctctgcatgttccctcccttgc

SEQ ID NO: 54378 - DNA, 80 bp, synthetic construct
  misc_feature 1..80: note = Artificially Synthesized Probe
  source 1..80: mol_type = other DNA
ttgacagtggggtgttaaagtctcccatgattattgtgtgggagtctaagtctttgtaggtctctaaggacttgctttat

SEQ ID NO: 54379 - DNA, 80 bp, synthetic construct
  misc_feature 1..80: note = Artificially Synthesized Probe
  source 1..80: mol_type = other DNA
aatggatgtgatacttgtttaaacatcagagaactcaatttcccctttaattccactgccaagcttgatttcactgcagc

SEQ ID NO: 54380 - DNA, 80 bp, synthetic construct
  misc_feature 1..80: note = Artificially Synthesized Probe
  source 1..80: mol_type = other DNA
gcccacctcaaggaacaaatttgtcaagcaactttttaagtgccctccccctccatctactttgtccttctggaataaat

SEQ ID NO: 54381 - DNA, 80 bp, synthetic construct
  misc_feature 1..80: note = Artificially Synthesized Probe
  source 1..80: mol_type = other DNA
ctcccttcagcttcagtcaaacattaaccattaacattttttattgctcttcgagagccactgggtatcataaaaagtgt

SEQ ID NO: 54382 - DNA, 80 bp, synthetic construct; identical to SEQ ID NO: 25105
  misc_feature 1..80: note = Artificially Synthesized Probe
  source 1..80: mol_type = other DNA

SEQ ID NO: 54383 - DNA, 80 bp, synthetic construct
  misc_feature 1..80: note = Artificially Synthesized Probe
  source 1..80: mol_type = other DNA
tcccttccaaagtctgcaagaaacaaccgatagcaaatttcccccaaacacaaaccaagtccttttttcccccccacaat

SEQ ID NO: 54384 - DNA, 80 bp, synthetic construct
  misc_feature 1..80: note = Artificially Synthesized Probe
  source 1..80: mol_type = other DNA
aaggtgagcatcaatgtcatgtctgtgtctggtgtgttacacttggccctgtttctgtggaccttctcatgttcatttct

SEQ ID NO: 54385 - DNA, 80 bp, synthetic construct
  misc_feature 1..80: note = Artificially Synthesized Probe
  source 1..80: mol_type = other DNA
ctcatttatcctgaggaccctgcaagtgaaaccatctagttgcatgccagctgttaacatccttggtggactggtgggtt

SEQ ID NO: 54386 - DNA, 80 bp, synthetic construct; identical to SEQ ID NO: 25106
  misc_feature 1..80: note = Artificially Synthesized Probe
  source 1..80: mol_type = other DNA

SEQ ID NO: 54387 - DNA, 80 bp, synthetic construct
  misc_feature 1..80: note = Artificially Synthesized Probe
  source 1..80: mol_type = other DNA
caaagtagattccagtttatagacagaaaatggggacacagagaggttttatttcttgtctaagtcacacagcctttgac

SEQ ID NO: 54388 - DNA, 80 bp, synthetic construct
  misc_feature 1..80: note = Artificially Synthesized Probe
  source 1..80: mol_type = other DNA
gagaggttttatttcttgtctaagtcacacagcctttgactacagaatcgggactgcaaccctgttctgattcaaatccc

SEQ ID NO: 54389 - DNA, 80 bp, synthetic construct
  misc_feature 1..80: note = Artificially Synthesized Probe
  source 1..80: mol_type = other DNA
tgtacatcacttgctatctctagcccccagcttccagctcaaagaattaggttaattaaacactgaaaatgcctaaacca

SEQ ID NO: 54390 - DNA, 80 bp, synthetic construct
  misc_feature 1..80: note = Artificially Synthesized Probe
  source 1..80: mol_type = other DNA
ttttttgctttccatttgcttggtagatcttcctccatccttttattttgagtctatgtgtttctctgcacgtgagatgg

SEQ ID NO: 54391 - DNA, 80 bp, synthetic construct; identical to SEQ ID NO: 25107
  misc_feature 1..80: note = Artificially Synthesized Probe
  source 1..80: mol_type = other DNA

SEQ ID NO: 54392 - DNA, 80 bp, synthetic construct
  misc_feature 1..80: note = Artificially Synthesized Probe
  source 1..80: mol_type = other DNA
ggtcaggagtttgagaccagcctgtccaacatggtgaaacctcatctctactaaaaatgcaaaaattagccaggtgtggt

SEQ ID NO: 54393 - DNA, 80 bp, synthetic construct
  misc_feature 1..80: note = Artificially Synthesized Probe
  source 1..80: mol_type = other DNA
aactgaacaagtgaaaggacttgggctaatgctttcaactcacagcttcatggtggtgaaaacatttcaacgcttttgtc

SEQ ID NO: 54394 - DNA, 80 bp, synthetic construct
  misc_feature 1..80: note = Artificially Synthesized Probe
  source 1..80: mol_type = other DNA
catgtgaacccaggaggcggaggttgcagtgagctgggatcacaccactgtactccagcctgggcgacagagcaagactc

SEQ ID NO: 54395 - DNA, 80 bp, synthetic construct
  misc_feature 1..80: note = Artificially Synthesized Probe
  source 1..80: mol_type = other DNA
tttctaatatttatattcttttttattttattttatttattttttgagatggagtcttgatgtccccaaggctggagtgc

SEQ ID NO: 54396 - DNA, 80 bp, synthetic construct
  misc_feature 1..80: note = Artificially Synthesized Probe
  source 1..80: mol_type = other DNA
atttttagtagagacggggtttaaccatgttggccagtctggtcttgagctcctgacctcaggtgatctgcctgccttgg

SEQ ID NO: 54397 - DNA, 80 bp, synthetic construct; identical to SEQ ID NO: 25108
  misc_feature 1..80: note = Artificially Synthesized Probe
  source 1..80: mol_type = other DNA

SEQ ID NO: 54398 - DNA, 80 bp, synthetic construct
  misc_feature 1..80: note = Artificially Synthesized Probe
  source 1..80: mol_type = other DNA
tttgaaccccctgaaacctagagttcacagtttttgttccacatttatttagtggaatgaagtgaaactaattttctgct

SEQ ID NO: 54399 - DNA, 80 bp, synthetic construct
  misc_feature 1..80: note = Artificially Synthesized Probe
  source 1..80: mol_type = other DNA
gtgcagtggtgcgatctcggctcaccgcagccttggcccttcaggctcaagccatcctcccacctaagcctcccaagtag

SEQ ID NO: 54400 - DNA, 80 bp, synthetic construct
  misc_feature 1..80: note = Artificially Synthesized Probe
  source 1..80: mol_type = other DNA
tacttctgagtttgggtttggggtttttgtttggaggcttctctgttgttgagttttttttttttggcagttttccaaac

SEQ ID NO: 54401 - DNA, 80 bp, synthetic construct; identical to SEQ ID NO: 25109
  misc_feature 1..80: note = Artificially Synthesized Probe
  source 1..80: mol_type = other DNA

SEQ ID NO: 54402 - DNA, 80 bp, synthetic construct
  misc_feature 1..80: note = Artificially Synthesized Probe
  source 1..80: mol_type = other DNA
tgatatagtttcttcctagcatcgatggtctttacaatttggcatgtttttgcagtggctggtactggttgttcctttcc

SEQ ID NO: 54403 - DNA, 80 bp, synthetic construct
  misc_feature 1..80: note = Artificially Synthesized Probe
  source 1..80: mol_type = other DNA
aagtattcacatcatcagttgtacattggacaaatgccttccaggtctttccaaactgaagttcactaaaactggggctt

SEQ ID NO: 54404 - DNA, 80 bp, synthetic construct
  misc_feature 1..80: note = Artificially Synthesized Probe
  source 1..80: mol_type = other DNA
ccaccacaccagctaattttaaaattttttgtagagataggttctatgttgctcaggctgctcttgaactcctgagctca

SEQ ID NO: 54405 - DNA, 80 bp, synthetic construct; identical to SEQ ID NO: 25110
  misc_feature 1..80: note = Artificially Synthesized Probe
  source 1..80: mol_type = other DNA

SEQ ID NO: 54406 - DNA, 80 bp, synthetic construct
  misc_feature 1..80: note = Artificially Synthesized Probe
  source 1..80: mol_type = other DNA
tatctctgtctcttatcagatttcacctaacaagcttttgctcccatccagctcatgctcagatcacagtgtctggcttc

SEQ ID NO: 54407 - DNA, 80 bp, synthetic construct
  misc_feature 1..80: note = Artificially Synthesized Probe
  source 1..80: mol_type = other DNA
ccaatactctgattttccttccacctcttgagctagtcccttgcagtcctacttgtgactcatccaactccttgggccca

SEQ ID NO: 54408 - DNA, 80 bp, synthetic construct
  misc_feature 1..80: note = Artificially Synthesized Probe
  source 1..80: mol_type = other DNA
ccatgtgcacaacaaactccacacagccatagtgaactgtactgttttaattctccaaaacatacgcctcctagaacact

SEQ ID NO: 54409 - DNA, 80 bp, synthetic construct; identical to SEQ ID NO: 25111
  misc_feature 1..80: note = Artificially Synthesized Probe
  source 1..80: mol_type = other DNA

SEQ ID NO: 54410 - DNA, 80 bp, synthetic construct
  misc_feature 1..80: note = Artificially Synthesized Probe
  source 1..80: mol_type = other DNA
agggctgaaactataaaattctaagaagaaagcaggggtaaatctttatggccttggattaggaaatgatgtcttagcta

SEQ ID NO: 54411 - DNA, 80 bp, synthetic construct
  misc_feature 1..80: note = Artificially Synthesized Probe
  source 1..80: mol_type = other DNA
tgtatctagaagatataaacaactcttacagcaacccaatcaaaaaataaaggatctgaatagaaattttttaaaagata

SEQ ID NO: 54412 - DNA, 80 bp, synthetic construct
  misc_feature 1..80: note = Artificially Synthesized Probe
  source 1..80: mol_type = other DNA
tgtggagaaattagaatcctcatatgcttctggtgggaatgtaaaataacacaaccactttggtaaacagtctgggagtt

SEQ ID NO: 54413 - DNA, 80 bp, synthetic construct; identical to SEQ ID NO: 25026
  misc_feature 1..80: note = Artificially Synthesized Probe
  source 1..80: mol_type = other DNA

SEQ ID NO: 54414 - DNA, 80 bp, synthetic construct
  misc_feature 1..80: note = Artificially Synthesized Probe
  source 1..80: mol_type = other DNA
caactgatggataaaatgtggtatccatatgatagaatatttgtctatccatataatagaatattcatataaaaagatat

SEQ ID NO: 54415 - DNA, 80 bp, synthetic construct; identical to SEQ ID NO: 25112
  misc_feature 1..80: note = Artificially Synthesized Probe
  source 1..80: mol_type = other DNA

SEQ ID NO: 54416 - DNA, 80 bp, synthetic construct
  misc_feature 1..80: note = Artificially Synthesized Probe
  source 1..80: mol_type = other DNA
tgaactgacataaatatacaaaacataggctaaacattttcagttacctcggtctaggcccttcagatcattttgttcta

SEQ ID NO: 54417 - DNA, 80 bp, synthetic construct
  misc_feature 1..80: note = Artificially Synthesized Probe
  source 1..80: mol_type = other DNA
aaatgtgaataagaacatttcagtacacaaagattatctttgccctggataaagtagaaaatgacaatgtgggcataatg

SEQ ID NO: 54418 - DNA, 80 bp, synthetic construct
  misc_feature 1..80: note = Artificially Synthesized Probe
  source 1..80: mol_type = other DNA
ctcaggattacattgggcctggtctcaggaacaatccaggagtttctggaaaagccatgttatcttcaaactagaatttt

SEQ ID NO: 54419 - DNA, 80 bp, synthetic construct
  misc_feature 1..80: note = Artificially Synthesized Probe
  source 1..80: mol_type = other DNA
gaagccctgcttgggagagaccatctggctctatcaatgagcctcagccagcgtcagatcccttctaaggaggcctggga

SEQ ID NO: 54420 - DNA, 80 bp, synthetic construct; identical to SEQ ID NO: 25113
  misc_feature 1..80: note = Artificially Synthesized Probe
  source 1..80: mol_type = other DNA

SEQ ID NO: 54421 - DNA, 80 bp, synthetic construct
  misc_feature 1..80: note = Artificially Synthesized Probe
  source 1..80: mol_type = other DNA
ccactcctcttctttatctctaaagagaggtttttctcagtacaaataagtttttagtacaggggttctcaacgctggcc

SEQ ID NO: 54422 - DNA, 80 bp, synthetic construct
  misc_feature 1..80: note = Artificially Synthesized Probe
  source 1..80: mol_type = other DNA
accctctaccaagcaattttgctctgcatctcaatcttcacagcaacacgggaaggtatttttactactttacaaataaa

SEQ ID NO: 54423 - DNA, 80 bp, synthetic construct; identical to SEQ ID NO: 25114
  misc_feature 1..80: note = Artificially Synthesized Probe
  source 1..80: mol_type = other DNA

SEQ ID NO: 54424 - DNA, 80 bp, synthetic construct
  misc_feature 1..80: note = Artificially Synthesized Probe
  source 1..80: mol_type = other DNA
ctagattggggaagttctcctggataatatcctgaagagtgttttccaacttggtttcattctccccgtcactttcaggt

SEQ ID NO: 54425 - DNA, 80 bp, synthetic construct
  misc_feature 1..80: note = Artificially Synthesized Probe
  source 1..80: mol_type = other DNA
tgcatgcatcacgaagttctcctgccatggttttcagctctatcaggtcatttaaggtcttctctacactgtttattcta

SEQ ID NO: 54426 - DNA, 80 bp, synthetic construct; identical to SEQ ID NO: 25027
  misc_feature 1..80: note = Artificially Synthesized Probe
  source 1..80: mol_type = other DNA

SEQ ID NO: 54427 - DNA, 80 bp, synthetic construct
  misc_feature 1..80: note = Artificially Synthesized Probe
  source 1..80: mol_type = other DNA
gtttgcctgggtatcaccagtggaggctgcagaacagcaaatattgcagaacagcaaatattgctgcctgatccttcctc

SEQ ID NO: 54428 - DNA, 80 bp, synthetic construct
  misc_feature 1..80: note = Artificially Synthesized Probe
  source 1..80: mol_type = other DNA
agaggctgatgctcaccatggggcgcctgcaactggttgtgttgggcctcacctgctgctgggcagtggcgagtgccgcg

SEQ ID NO: 54429 - DNA, 80 bp, synthetic construct
  misc_feature 1..80: note = Artificially Synthesized Probe
  source 1..80: mol_type = other DNA
ctccacactccctggccctgggaccgggaggtttgggcagtggtcctgggctcctgactcaaaggagaggtcaccttctt

SEQ ID NO: 54430 - DNA, 80 bp, synthetic construct
  misc_feature 1..80: note = Artificially Synthesized Probe
  source 1..80: mol_type = other DNA
gcccacgatgcctgcatgtgttgcttctggttcctttcctccagttccaaccgccgcactctcccacaccagtgtgacag

SEQ ID NO: 54431 - DNA, 80 bp, synthetic construct; identical to SEQ ID NO: 25116
  misc_feature 1..80: note = Artificially Synthesized Probe
  source 1..80: mol_type = other DNA

SEQ ID NO: 54432 - DNA, 80 bp, synthetic construct
  misc_feature 1..80: note = Artificially Synthesized Probe
  source 1..80: mol_type = other DNA
accagcagggggctcaggaactgtggggacttgggcatggggccatcgactttgtgcccagccagctaggccctgtgcag

SEQ ID NO: 54433 - DNA, 80 bp, synthetic construct
  misc_feature 1..80: note = Artificially Synthesized Probe
  source 1..80: mol_type = other DNA
gctgttgctcgtcttccacatggggaaactgaggatcggagtcaaagctgggcggccatagccagaacccaaacctccat

SEQ ID NO: 54434 - DNA, 80 bp, synthetic construct
  misc_feature 1..80: note = Artificially Synthesized Probe
  source 1..80: mol_type = other DNA
tgtgcagagctgtcctgctttgaagctgtctttgcctctgggcacgcggagtcggcttgccttgccccctccggattcag

SEQ ID NO: 54435 - DNA, 80 bp, synthetic construct
  misc_feature 1..80: note = Artificially Synthesized Probe
  source 1..80: mol_type = other DNA
gaacacaggatgcccaattccatttgaatttcagataaactgccaagaactgctgtgtaagtatgtcccatgcaatattt

SEQ ID NO: 54436 - DNA, 80 bp, synthetic construct
  misc_feature 1..80: note = Artificially Synthesized Probe
  source 1..80: mol_type = other DNA
aggccctggaaaatcctcagccacatcctggctggcaaggtgggagtgggtggtgccggactggccctgcggcggggcgg

SEQ ID NO: 54437 - DNA, 80 bp, synthetic construct; identical to SEQ ID NO: 25117
  misc_feature 1..80: note = Artificially Synthesized Probe
  source 1..80: mol_type = other DNA

SEQ ID NO: 54438 - DNA, 80 bp, synthetic construct
  misc_feature 1..80: note = Artificially Synthesized Probe
  source 1..80: mol_type = other DNA
gccaggcggggcgtctggggtcaccagccgctcccccatctcagtctcccgggacctgcccgttatgatctggatctatg

SEQ ID NO: 54439 - DNA, 80 bp, synthetic construct
  misc_feature 1..80: note = Artificially Synthesized Probe
  source 1..80: mol_type = other DNA
ccaatctgccaggtgcgtgggtgccttcggccctgaggtggggcgaccagcatgctgagcccagcagggagattttcctc

SEQ ID NO: 54440 - DNA, 80 bp, synthetic construct; identical to SEQ ID NO: 25118
  misc_feature 1..80: note = Artificially Synthesized Probe
  source 1..80: mol_type = other DNA

SEQ ID NO: 54441 - DNA, 80 bp, synthetic construct
  misc_feature 1..80: note = Artificially Synthesized Probe
  source 1..80: mol_type = other DNA
aaaatacaaaattagccaggcgtggtggcgcttgcctgtaatcccagctactcgggaggctgaggcaggagaatcgcttg

SEQ ID NO: 54442 - DNA, 80 bp, synthetic construct
  misc_feature 1..80: note = Artificially Synthesized Probe
  source 1..80: mol_type = other DNA
gcagaggtggaaggatcgcttgagcccaggggttcaaagctgcagtgagccgtggtcgtgccactgcactccagcctggg

SEQ ID NO: 54443 - DNA, 80 bp, synthetic construct
  misc_feature 1..80: note = Artificially Synthesized Probe
  source 1..80: mol_type = other DNA
tggcaggacacagacaggagggactggggcaggggcaggagaggtgcatgggcctgaccatcctgcccccgacaaacacc

SEQ ID NO: 54444 - DNA, 80 bp, synthetic construct; identical to SEQ ID NO: 25119
  misc_feature 1..80: note = Artificially Synthesized Probe
  source 1..80: mol_type = other DNA

SEQ ID NO: 54445 - DNA, 80 bp, synthetic construct
  misc_feature 1..80: note = Artificially Synthesized Probe
  source 1..80: mol_type = other DNA
tctactaaaaatacaaatattaatcgggcgtggtggtgggtgcctgtaatcccagctactcgggaggctgaggcaggaga

SEQ ID NO: 54446 - DNA, 80 bp, synthetic construct
  misc_feature 1..80: note = Artificially Synthesized Probe
  source 1..80: mol_type = other DNA
caacaacatcacgctcttcggggagtctgctggaggtgccagcgtctctctgcaggtctcgggatccctgtggggagggc

SEQ ID NO: 54447 - DNA, 80 bp, synthetic construct
  misc_feature 1..80: note = Artificially Synthesized Probe
  source 1..80: mol_type = other DNA
cccctacaacaagggcctcatccggcgagccatcagccagagcggcgtggccctgagtccctgggtcatccagaaaaacc

SEQ ID NO: 54448 - DNA, 80 bp, synthetic construct
  misc_feature 1..80: note = Artificially Synthesized Probe
  source 1..80: mol_type = other DNA
ttctgcccccaggtggctgagaaggtgggttgccctgtgggtgatgccgccaggatggcccagtgtctgaaggttactga

SEQ ID NO: 54449 - DNA, 80 bp, synthetic construct
  misc_feature 1..80: note = Artificially Synthesized Probe
  source 1..80: mol_type = other DNA
cggtcttgtcctgtcaccaactagctggtgtctcccctcgaaggccccagctgtaagggagagggggtgccgtttcttct

SEQ ID NO: 54450 - DNA, 80 bp, synthetic construct; identical to SEQ ID NO: 25120
  misc_feature 1..80: note = Artificially Synthesized Probe
  source 1..80: mol_type = other DNA

SEQ ID NO: 54451 - DNA, 80 bp, synthetic construct
  misc_feature 1..80: note = Artificially Synthesized Probe
  source 1..80: mol_type = other DNA
gcagtcatttgcatataattttagggagactcatagacctcagaccaagagcctttgtgctagatgaccgttcattcatt

SEQ ID NO: 54452 - DNA, 80 bp, synthetic construct
  misc_feature 1..80: note = Artificially Synthesized Probe
  source 1..80: mol_type = other DNA
tcactcattcttctatggcaacatgccatgaagccaagtcatctgcacgtttacctgacatgagctcaactgcacgggct

SEQ ID NO: 54453 - DNA, 80 bp, synthetic construct; identical to SEQ ID NO: 25121
  misc_feature 1..80: note = Artificially Synthesized Probe
  source 1..80: mol_type = other DNA

SEQ ID NO: 54454 - DNA, 80 bp, synthetic construct
  misc_feature 1..80: note = Artificially Synthesized Probe
  source 1..80: mol_type = other DNA
tggcacctcgtgggtcgaggccggggatgctctaaacatcctacagggcacaggatgcccctgatggtgcagaatcaacc

SEQ ID NO: 54455 - DNA, 80 bp, synthetic construct; identical to SEQ ID NO: 25115
  misc_feature 1..80: note = Artificially Synthesized Probe
  source 1..80: mol_type = other DNA

SEQ ID NO: 54456 - DNA, 80 bp, synthetic construct
  misc_feature 1..80: note = Artificially Synthesized Probe
  source 1..80: mol_type = other DNA
tcgtccctgtcattgatggagacttcatccccgctgacccgatcaacctgtacgccaacgccgccgacatcgactatata

SEQ ID NO: 54457 - DNA, 80 bp, synthetic construct
  misc_feature 1..80: note = Artificially Synthesized Probe
  source 1..80: mol_type = other DNA
ggaggaggaaggcattgagtggaggactgggagtgaggaagttagcaccggtcggggtgagtatgcacacaccttcctgt

SEQ ID NO: 54458 - DNA, 80 bp, synthetic construct
  misc_feature 1..80: note = Artificially Synthesized Probe
  source 1..80: mol_type = other DNA
agaataagaagaagactgtggtggactttgagaccgatgtcctcttcctggtgcccaccgagattgccctagcccagcac

SEQ ID NO: 54459 - DNA, 80 bp, synthetic construct; identical to SEQ ID NO: 25122
  misc_feature 1..80: note = Artificially Synthesized Probe
  source 1..80: mol_type = other DNA

SEQ ID NO: 54460 - DNA, 80 bp, synthetic construct
  misc_feature 1..80: note = Artificially Synthesized Probe
  source 1..80: mol_type = other DNA
atttcagcccaccaccacattaaaaatcttcatgtaataatagccaattataataaaaaataaggccagacacagtagct

SEQ ID NO: 54461 - DNA, 80 bp, synthetic construct
  misc_feature 1..80: note = Artificially Synthesized Probe
  source 1..80: mol_type = other DNA
gaggctgaggtagcagaattgattgacccagggaggtggaggttgcagtgagccgagattacgccactgcactccagcag

SEQ ID NO: 54462 - DNA, 80 bp, synthetic construct; identical to SEQ ID NO: 25123
  misc_feature 1..80: note = Artificially Synthesized Probe
  source 1..80: mol_type = other DNA

SEQ ID NO: 54463 - DNA, 80 bp, synthetic construct
  misc_feature 1..80: note = Artificially Synthesized Probe
  source 1..80: mol_type = other DNA
tgaattccccagacacttccctgcccactgcccgggacctccctccaagtccggtctctgggctgatcggtccccagtga

SEQ ID NO: 54464 - DNA, 80 bp, synthetic construct
  misc_feature 1..80: note = Artificially Synthesized Probe
  source 1..80: mol_type = other DNA
cgggctaccggccccaagacaggacagtctctaaggccatgatcgcctactggaccaactttgccaaaacagggtaagac

SEQ ID NO: 54465 - DNA, 80 bp, synthetic construct
  misc_feature 1..80: note = Artificially Synthesized Probe
  source 1..80: mol_type = other DNA
caagcccatgcacgtgcacagccagtgcccagtatgcagtgaggggcatggtgcccagggccagctcagagggcggggat

SEQ ID NO: 54466 - DNA, 80 bp, synthetic construct
  misc_feature 1..80: note = Artificially Synthesized Probe
  source 1..80: mol_type = other DNA
ctccagaaagagagccggcaggcaggagctctctcgaggcatccataaattctaccctctctgcctgtgaaggagaagcc

SEQ ID NO: 54467 - DNA, 80 bp, synthetic construct; identical to SEQ ID NO: 25124
  misc_feature 1..80: note = Artificially Synthesized Probe
  source 1..80: mol_type = other DNA

SEQ ID NO: 54468 - DNA, 80 bp, synthetic construct
  misc_feature 1..80: note = Artificially Synthesized Probe
  source 1..80: mol_type = other DNA
ccccccgtgccgcccacgggtgactccggggccccccccgtgccgcccacgggtgactccggggccccccccgtgccgcc

SEQ ID NO: 54469 - DNA, 80 bp, synthetic construct
  misc_feature 1..80: note = Artificially Synthesized Probe
  source 1..80: mol_type = other DNA
ccgcccacgggtgactccggcgccccccccgtgccgcccacgggtgactccggggccccccccgtgacccccacgggtga

SEQ ID NO: 54470 - DNA, 80 bp, synthetic construct
  misc_feature 1..80: note = Artificially Synthesized Probe
  source 1..80: mol_type = other DNA
ccttggtatcaagaggccacaagagtgggaccccaggggctcccctcccatcttgagctcttcctgaataaagcctcata

SEQ ID NO: 54471 - DNA, 80 bp, synthetic construct
  misc_feature 1..80: note = Artificially Synthesized Probe
  source 1..80: mol_type = other DNA
ccaccccccagccaggtctcatagagggaattgttcttcaggctcggaggggcctgcctgtcactgcgcccccgacccta

SEQ ID NO: 54472 - DNA, 80 bp, synthetic construct
  misc_feature 1..80: note = Artificially Synthesized Probe
  source 1..80: mol_type = other DNA
gaactgtgatttaaatgtgttgaaaataaatatcccaagccaagataacagcggactcttgcttggcttctcccagacac

SEQ ID NO: 54473 - DNA, 80 bp, synthetic construct
  misc_feature 1..80: note = Artificially Synthesized Probe
  source 1..80: mol_type = other DNA
cctgatagtttgtttcacatccctaacaagcagggtttacctgagcaaacacacttggctggaggctgattttactgcct

SEQ ID NO: 54474 - DNA, 80 bp, synthetic construct
  misc_feature 1..80: note = Artificially Synthesized Probe
  source 1..80: mol_type = other DNA
cccacttcaccggccgctactgcgagcatgaccagaggcgcaggtgggcacaggggtgcgcggggtggggacgggggtgg

SEQ ID NO: 54475 - DNA, 80 bp, synthetic construct
  misc_feature 1..80: note = Artificially Synthesized Probe
  source 1..80: mol_type = other DNA
cgcaggagtgggcgccgggcgaggggcgcgcgggccaccgcattgatgcaggtccccgtcttctcagtgaatgcggcgcc

SEQ ID NO: 54476 - DNA, 80 bp, synthetic construct
  misc_feature 1..80: note = Artificially Synthesized Probe
  source 1..80: mol_type = other DNA
tcaccctccataccgatccacagtgcatcttccagtgccaggccacatagcatttagcaaagtagatcgattcatcattg

SEQ ID NO: 54477 - DNA, 80 bp, synthetic construct
  misc_feature 1..80: note = Artificially Synthesized Probe
  source 1..80: mol_type = other DNA
ttcctggaaactgatcttcaatgcactaagagaaggagactctcaaaccaaaaatgacctggaggcaccatgtcaggtaa

SEQ ID NO: 54478 - DNA, 80 bp, synthetic construct
  misc_feature 1..80: note = Artificially Synthesized Probe
  source 1..80: mol_type = other DNA
aatcggagaggaagctgggagacaagttagctgcgtaaatctcaggtggtttccctgcactaggccagcaccatctgctc

SEQ ID NO: 54479 - DNA, 80 bp, synthetic construct
  misc_feature 1..80: note = Artificially Synthesized Probe
  source 1..80: mol_type = other DNA
cccaggcctgggtgggctggtggtgcagtgtccagaggcacacctgatgaagccaaggcccctgatccactctcctgccc

SEQ ID NO: 54480 - DNA, 80 bp, synthetic construct; identical to SEQ ID NO: 25137
  misc_feature 1..80: note = Artificially Synthesized Probe
  source 1..80: mol_type = other DNA

SEQ ID NO: 54481 - DNA, 80 bp, synthetic construct
  misc_feature 1..80: note = Artificially Synthesized Probe
  source 1..80: mol_type = other DNA
attttcccaaagcaccccctcttctatgtgtgctccttttgctgggcctctgcctctgaagtcaccagctgctcctctat

SEQ ID NO: 54482 - DNA, 80 bp, synthetic construct; identical to SEQ ID NO: 25128
  misc_feature 1..80: note = Artificially Synthesized Probe
  source 1..80: mol_type = other DNA

SEQ ID NO: 54483 - DNA, 80 bp, synthetic construct
  misc_feature 1..80: note = Artificially Synthesized Probe
  source 1..80: mol_type = other DNA
ttacagtgatgctggtgatggctgtgctgatggtggttatgatgacttgaagtttgacaacagtgatgatagatggaaca

SEQ ID NO: 54484 - DNA, 80 bp, synthetic construct; identical to SEQ ID NO: 25136
  misc_feature 1..80: note = Artificially Synthesized Probe
  source 1..80: mol_type = other DNA

SEQ ID NO: 54485 - DNA, 80 bp, synthetic construct
  misc_feature 1..80: note = Artificially Synthesized Probe
  source 1..80: mol_type = other DNA
ttattttttatttttagtagagacggggtttaaccatgttagccaggatggtctcgatctcctgaccttgtgatccgccc

SEQ ID NO: 54486 - DNA, 80 bp, synthetic construct
  misc_feature 1..80: note = Artificially Synthesized Probe
  source 1..80: mol_type = other DNA
gccaggagttcgagaacagcctgggcaatatagcaagacctgtctctacaaaaaattagccaggtgtggtgacgagcacc

SEQ ID NO: 54487 - DNA, 80 bp, synthetic construct
  misc_feature 1..80: note = Artificially Synthesized Probe
  source 1..80: mol_type = other DNA
tgaagatttttttatagtgttgtatagaatatagaaaatttggtcatgttccaaagccaacagcacagtaatagataagt

SEQ ID NO: 54488 - DNA, 80 bp, synthetic construct
  misc_feature 1..80: note = Artificially Synthesized Probe
  source 1..80: mol_type = other DNA
gattgccttattcattataattattttacataattttatatttatatataatgatggcattgtatttttatgtgtatgtg

SEQ ID NO: 54489 - DNA, 80 bp, synthetic construct
  misc_feature 1..80: note = Artificially Synthesized Probe
  source 1..80: mol_type = other DNA
aaaagcttccatgtagcagggacttttgcgcagtcctgagctagccaggatctccttgttagtctaagggggtggttctt

SEQ ID NO: 54490 - DNA, 80 bp, synthetic construct
  misc_feature 1..80: note = Artificially Synthesized Probe
  source 1..80: mol_type = other DNA
agactcacctcactgctgcaaactcatttttaaacatgccattctggcaaaaacccaccaaccaaccaacaagcaaacaa

SEQ ID NO: 54491 - DNA, 80 bp, synthetic construct
  misc_feature 1..80: note = Artificially Synthesized Probe
  source 1..80: mol_type = other DNA
ctgacccctttctcacctgaatagcttcacatgctgtgagcgcctgtcttagcaccagcttctctggagcctcgtctgag

SEQ ID NO: 54492 - DNA, 80 bp, synthetic construct; identical to SEQ ID NO: 25130
  misc_feature 1..80: note = Artificially Synthesized Probe
  source 1..80: mol_type = other DNA

SEQ ID NO: 54493 - DNA, 80 bp, synthetic construct; identical to SEQ ID NO: 25134
  misc_feature 1..80: note = Artificially Synthesized Probe
  source 1..80: mol_type = other DNA

SEQ ID NO: 54494 - DNA, 80 bp, synthetic construct
  misc_feature 1..80: note = Artificially Synthesized Probe
  source 1..80: mol_type = other DNA
tcccatggggcgcggcgccactcacagggctaggcctcctcagaacagcagccagactttggatggctgcaccctcctgc

SEQ ID NO: 54495 - DNA, 80 bp, synthetic construct
  misc_feature 1..80: note = Artificially Synthesized Probe
  source 1..80: mol_type = other DNA
ctgaaaggtcacgggccaaatgaaaaagacggaagggctgttgttcgttccccctttaaacacagtactgtaattctcct

SEQ ID NO: 54496 - DNA, 80 bp, synthetic construct
  misc_feature 1..80: note = Artificially Synthesized Probe
  source 1..80: mol_type = other DNA
gcactctctcaaaccgagccggaacactttatttcatacatctccggtttctctgtttttccagacccgaaagacttcct

SEQ ID NO: 54497 - DNA, 80 bp, synthetic construct
  misc_feature 1..80: note = Artificially Synthesized Probe
  source 1..80: mol_type = other DNA
ccgggacttgggcatcgcctttaattttctatgttgtaaataatagatgtgtttagtttaccgtaagctgaagcactggg

SEQ ID NO: 54498 - DNA, 80 bp, synthetic construct
  misc_feature 1..80: note = Artificially Synthesized Probe
  source 1..80: mol_type = other DNA
ccgccaccttcccctgacagttagcaccttcctttcacaacatctcccttaagggggaagcgtctgctgtggaacccacc

SEQ ID NO: 54499 - DNA, 80 bp, synthetic construct
  misc_feature 1..80: note = Artificially Synthesized Probe
  source 1..80: mol_type = other DNA
gtttctcaatcattatcagtctcacattttcaatattttttaaaggctatcaaagagagaaacataacggcggtagagag

SEQ ID NO: 54500 - DNA, 80 bp, synthetic construct
  misc_feature 1..80: note = Artificially Synthesized Probe
  source 1..80: mol_type = other DNA
gacaccacaaaggcttggccatgcggaatgtgccctcaagagcacacacttcgggtagaaggcacttgcattgagctctt

SEQ ID NO: 54501 - DNA, 80 bp, synthetic construct
  misc_feature 1..80: note = Artificially Synthesized Probe
  source 1..80: mol_type = other DNA
gcattttcaatcttttcaactattggctatgaaaatatgaatttaacgtaacattcaaatgagtattaaagaaaaataaa

SEQ ID NO: 54502 - DNA, 80 bp, synthetic construct
  misc_feature 1..80: note = Artificially Synthesized Probe
  source 1..80: mol_type = other DNA
aaaatccggggcgtcatctcagtctgcggactcagagtttaggacctgagaatatgtaggataaattcaggataaaatcc

SEQ ID NO: 54503 - DNA, 80 bp, synthetic construct
  misc_feature 1..80: note = Artificially Synthesized Probe
  source 1..80: mol_type = other DNA
tgaagttctactttatttttctttaatactcatttgaatgttacgttaaattcatattttcatagccaatagttgaaaag

SEQ ID NO: 54504 - DNA, 80 bp, synthetic construct
  misc_feature 1..80: note = Artificially Synthesized Probe
  source 1..80: mol_type = other DNA
agagggaagcctctaaatgtttgtagaactcggagagctgaaggagaattacagtactgtgtttaaagggggaacgaaga

SEQ ID NO: 54505 - DNA, 80 bp, synthetic construct
  misc_feature 1..80: note = Artificially Synthesized Probe
  source 1..80: mol_type = other DNA
gagtgctcgaaatatttctttgacgagggacagctgatagagcaggagggtgcagccatccaaagtctggctgctgttct

SEQ ID NO: 54506 - DNA, 80 bp, synthetic construct
  misc_feature 1..80: note = Artificially Synthesized Probe
  source 1..80: mol_type = other DNA
tccctgagccttggtctttgtgtagctgggaccccagcccagaacagcggaatgggaatctctggagtggtggggctggg

SEQ ID NO: 54507 - DNA, 80 bp, synthetic construct
  misc_feature 1..80: note = Artificially Synthesized Probe
  source 1..80: mol_type = other DNA
atgcaagtgccctctacccgaagtgtgtgctcttgagggcacattccgcatggccaagcctttgtggtgtcgccgggcct

SEQ ID NO: 54508 - DNA, 80 bp, synthetic construct
  misc_feature 1..80: note = Artificially Synthesized Probe
  source 1..80: mol_type = other DNA
ctccccggggccactgagcaaaggccagccacctccctgccccctgaccaggcctgccctgccctctgctatacctccag

SEQ ID NO: 54509 - DNA, 80 bp, synthetic construct
  misc_feature 1..80: note = Artificially Synthesized Probe
  source 1..80: mol_type = other DNA
cctccccatagcaccccccaccttgggagagaggattgttccaggggtgccagaatccccaaacaggaatgctaacgtct

SEQ ID NO: 54510 - DNA, 80 bp, synthetic construct
  misc_feature 1..80: note = Artificially Synthesized Probe
  source 1..80: mol_type = other DNA
cagagtcagctggtgccaggacctgtgagagccattccaatggcatcccagaggtctgtagactgggtctggcccacgga

SEQ ID NO: 54511 - DNA, 80 bp, synthetic construct; identical to SEQ ID NO: 25135
  misc_feature 1..80: note = Artificially Synthesized Probe
  source 1..80: mol_type = other DNA

SEQ ID NO: 54512 - DNA, 80 bp, synthetic construct
  misc_feature 1..80: note = Artificially Synthesized Probe
  source 1..80: mol_type = other DNA
cctgcagcagccatgcttttgtagcaacatattctatcttccacatactcttcaaaaccatcataatctcccattaaagg

SEQ ID NO: 54513 - DNA, 80 bp, synthetic construct; identical to SEQ ID NO: 25129
  misc_feature 1..80: note = Artificially Synthesized Probe
  source 1..80: mol_type = other DNA

SEQ ID NO: 54514 - DNA, 80 bp, synthetic construct
  misc_feature 1..80: note = Artificially Synthesized Probe
  source 1..80: mol_type = other DNA
tcatattgataattactcttatagaaagagtacaagaatgggccgggcacggtggctcacgcctgtaatcccagcacttt

SEQ ID NO: 54515 - DNA, 80 bp, synthetic construct
  misc_feature 1..80: note = Artificially Synthesized Probe
  source 1..80: mol_type = other DNA
atggcatgaaccctggaggtggagcttgcagtgagccgagactgcgccactgcaccccagcccgggcgacagagtgagac

SEQ ID NO: 54516 - DNA, 80 bp, synthetic construct
  misc_feature 1..80: note = Artificially Synthesized Probe
  source 1..80: mol_type = other DNA
atataaagtgcctgaaatacactgagggctcctctcatgctgtaacacccagaagagcttgccctattgcaatggcacct

SEQ ID NO: 54517 - DNA, 80 bp, synthetic construct
  misc_feature 1..80: note = Artificially Synthesized Probe
  source 1..80: mol_type = other DNA
tgactctgaaggatgactgcactattttgtctagctttgatgaacagaggccacattttcagagccattatcattgtcct

SEQ ID NO: 54518 - DNA, 80 bp, synthetic construct
  misc_feature 1..80: note = Artificially Synthesized Probe
  source 1..80: mol_type = other DNA
ctgtgattctgatgcctgtccatgaaatctgtgtcctcctgtctctagggcatagaggagcagctggtgacttcagaggc

SEQ ID NO: 54519 - DNA, 80 bp, synthetic construct
  misc_feature 1..80: note = Artificially Synthesized Probe
  source 1..80: mol_type = other DNA
cacagcagacgcttcccccttaagggagatgttgtgaaaggaaggtgctaactgtcaggggaaggtggcggtgccaggct

SEQ ID NO: 54520 - DNA, 80 bp, synthetic construct
  misc_feature 1..80: note = Artificially Synthesized Probe
  source 1..80: mol_type = other DNA
agagtgtcccttgactgctggtcctaccagggagagaagagaggacaggaaggtgaaggagagctaagcatgcattgtgt

SEQ ID NO: 54521 - DNA, 80 bp, synthetic construct
  misc_feature 1..80: note = Artificially Synthesized Probe
  source 1..80: mol_type = other DNA
ggtgcccagggctgactgaagtggagggagggggcaggagagtggatcaggggccttggcttcatcaggtgtgcctctgg

SEQ ID NO: 54522 - DNA, 80 bp, synthetic construct
  misc_feature 1..80: note = Artificially Synthesized Probe
  source 1..80: mol_type = other DNA
tcctgcctgtgtccctgctggtcccacagctgagcagatggtgctggcctagtgcagggaaaccacctgagatttacgca

SEQ ID NO: 54523 - DNA, 80 bp, synthetic construct; identical to SEQ ID NO: 25127
  misc_feature 1..80: note = Artificially Synthesized Probe
  source 1..80: mol_type = other DNA

SEQ ID NO: 54524 - DNA, 80 bp, synthetic construct; identical to SEQ ID NO: 25138
  misc_feature 1..80: note = Artificially Synthesized Probe
  source 1..80: mol_type = other DNA

SEQ ID NO: 54525 - DNA, 80 bp, synthetic construct
  misc_feature 1..80: note = Artificially Synthesized Probe
  source 1..80: mol_type = other DNA
cccacccccgtccccaccccgcgcacccctgtgcccacctgcgcctctggtcatgctcgcagtagcggccggtgaagtgg

SEQ ID NO: 54526 - DNA, 80 bp, synthetic construct
  misc_feature 1..80: note = Artificially Synthesized Probe
  source 1..80: mol_type = other DNA
gaggcagtaaaatcagcctccagccaagtgtgtttgctcaggtaaaccctgcttgttagggatgtgaaacaaactatcag

SEQ ID NO: 54527 - DNA, 80 bp, synthetic construct; identical to SEQ ID NO: 25126
  misc_feature 1..80: note = Artificially Synthesized Probe
  source 1..80: mol_type = other DNA

SEQ ID NO: 54528 - DNA, 80 bp, synthetic construct; identical to SEQ ID NO: 25125
  misc_feature 1..80: note = Artificially Synthesized Probe
  source 1..80: mol_type = other DNA

SEQ ID NO: 54529 - DNA, 80 bp, synthetic construct
  misc_feature 1..80: note = Artificially Synthesized Probe
  source 1..80: mol_type = other DNA
ttggtgacttcctctctaccgccgttatgtttctctctttgatagcctttaaaaaatattgaaaatgtgagactgataat

SEQ ID NO: 54530 - DNA, 80 bp, synthetic construct; identical to SEQ ID NO: 25133
  misc_feature 1..80: note = Artificially Synthesized Probe
  source 1..80: mol_type = other DNA

SEQ ID NO: 54531 - DNA, 80 bp, synthetic construct
  misc_feature 1..80: note = Artificially Synthesized Probe
  source 1..80: mol_type = other DNA
aagcagaaattcacatacacataaaaatacaatgccatcattatatataaatataaaattatgtaaaataattataatga

SEQ ID NO: 54532 - DNA, 80 bp, synthetic construct
  misc_feature 1..80: note = Artificially Synthesized Probe
  source 1..80: mol_type = other DNA
gacctctgtccttacctgacatggtgcctccaggtcatttttggtttgagagtctccttctcttagtgcattgaagatca

SEQ ID NO: 54533 - DNA, 80 bp, synthetic construct; identical to SEQ ID NO: 25140
  misc_feature 1..80: note = Artificially Synthesized Probe
  source 1..80: mol_type = other DNA

SEQ ID NO: 54534 - DNA, 80 bp, synthetic construct; identical to SEQ ID NO: 25131
  misc_feature 1..80: note = Artificially Synthesized Probe
  source 1..80: mol_type = other DNA

SEQ ID NO: 54535 - DNA, 80 bp, synthetic construct
  misc_feature 1..80: note = Artificially Synthesized Probe
  source 1..80: mol_type = other DNA
cagcaggctgtcaggctcacagaggcccgagggtctcccagcgacttgtcgactctggtgtgagtctggcaggaggtaac

SEQ ID NO: 54536 - DNA, 80 bp, synthetic construct
  misc_feature 1..80: note = Artificially Synthesized Probe
  source 1..80: mol_type = other DNA
ggcgccgccccgtggtcggatcctgggcggcagagaggccgaggcgcacgcgcggccctacatggcgtcggtgcagctga

SEQ ID NO: 54537 - DNA, 80 bp, synthetic construct; identical to SEQ ID NO: 25142
  misc_feature 1..80: note = Artificially Synthesized Probe
  source 1..80: mol_type = other DNA

SEQ ID NO: 54538 - DNA, 80 bp, synthetic construct
  misc_feature 1..80: note = Artificially Synthesized Probe
  source 1..80: mol_type = other DNA
tcgacctctcctgctgcatggggaccccgccccacaacccccacaccctcaccccgggtctagcctcgacctctcttgct

SEQ ID NO: 54539 - DNA, 80 bp, synthetic construct
  misc_feature 1..80: note = Artificially Synthesized Probe
  source 1..80: mol_type = other DNA
tgcaccctcaccccgggtccagcctcgacctctcctgctgcatggggaccccgccctacaacccccgcaccctcaccccg

SEQ ID NO: 54540 - DNA, 80 bp, synthetic construct
  misc_feature 1..80: note = Artificially Synthesized Probe
  source 1..80: mol_type = other DNA
gcctaaatctctcctgctgcactgagacccacgcccctgccctgatgcccacctcccccgtcccgtctccccgagcctag

SEQ ID NO: 54541 - DNA, 80 bp, synthetic construct
  misc_feature 1..80: note = Artificially Synthesized Probe
  source 1..80: mol_type = other DNA
tctcagccacagcggcttcaccatgcacagctgggagcgcctggcagttctggtcctcctaggagcggccgcctgcggtg

SEQ ID NO: 54542 - DNA, 80 bp, synthetic construct; identical to SEQ ID NO: 25143
  misc_feature 1..80: note = Artificially Synthesized Probe
  source 1..80: mol_type = other DNA

SEQ ID NO: 54543 - DNA, 80 bp, synthetic construct
  misc_feature 1..80: note = Artificially Synthesized Probe
  source 1..80: mol_type = other DNA
gcggggggcaagtaggaacagggcccagggaaggggcggggcgcgtagggggcgggaactggaagatgggcggagcatga

SEQ ID NO: 54544 - DNA, 80 bp, synthetic construct
  misc_feature 1..80: note = Artificially Synthesized Probe
  source 1..80: mol_type = other DNA
atgtggaaggacctgtgggttagggtgggaatagggggcggggctcgaggagggggcggagtccagtaatagcgggactg

SEQ ID NO: 54545 - DNA, 80 bp, synthetic construct
  misc_feature 1..80: note = Artificially Synthesized Probe
  source 1..80: mol_type = other DNA
aggggcggggcatggggacggggcggggcaggtggaaggggcgggaacctctgaaggggcagggctggtgcggagcggga

SEQ ID NO: 54546 - DNA, 80 bp, synthetic construct; identical to SEQ ID NO: 25144
  misc_feature 1..80: note = Artificially Synthesized Probe
  source 1..80: mol_type = other DNA

SEQ ID NO: 54547 - DNA, 80 bp, synthetic construct
  misc_feature 1..80: note = Artificially Synthesized Probe
  source 1..80: mol_type = other DNA
cgggagggatgagcgagcattgtggggcgggagcggcagccaggtgagggggtctaacacgtgaggccggggtgggcgcg

SEQ ID NO: 54548 - DNA, 80 bp, synthetic construct
  misc_feature 1..80: note = Artificially Synthesized Probe
  source 1..80: mol_type = other DNA
atcgacagcgtcctggcctagggtgccggggcctgaaggtcagggtcacccaagcaacaaagtcccgagcaatgaagtca

SEQ ID NO: 54549 - DNA, 80 bp, synthetic construct
  misc_feature 1..80: note = Artificially Synthesized Probe
  source 1..80: mol_type = other DNA
gggcaattggcgggcatggaggtgggtgcttgtagttccagctactcaggaggctgaggtgggaggatgacttgaacgca

SEQ ID NO: 54550 - DNA, 80 bp, synthetic construct
  misc_feature 1..80: note = Artificially Synthesized Probe
  source 1..80: mol_type = other DNA
gcggatcatttgaggtcaggagttcctgatcagcctgaccaacatggtgaaaccccgtgtctactaaaaatacaaaaaaa

SEQ ID NO: 54551 - DNA, 80 bp, synthetic construct; identical to SEQ ID NO: 25141
  misc_feature 1..80: note = Artificially Synthesized Probe
  source 1..80: mol_type = other DNA

SEQ ID NO: 54552 - DNA, 80 bp, synthetic construct; identical to SEQ ID NO: 25145
  misc_feature 1..80: note = Artificially Synthesized Probe
  source 1..80: mol_type = other DNA

SEQ ID NO: 54553 - DNA, 80 bp, synthetic construct
  misc_feature 1..80: note = Artificially Synthesized Probe
  source 1..80: mol_type = other DNA
gtgagcgtcttctgtgtgcaaggctgtgggctgagactcaggtgcacagaaacccttcgaggccgtgttcctatgaccca

SEQ ID NO: 54554 - DNA, 80 bp, synthetic construct
  misc_feature 1..80: note = Artificially Synthesized Probe
  source 1..80: mol_type = other DNA
gacgagcagcggcacctgcttgctggaggccctggacctcaggtcacccttcttggcaaggccagggaggacacctgagg

SEQ ID NO: 54555 - DNA, 80 bp, synthetic construct
  misc_feature 1..80: note = Artificially Synthesized Probe
  source 1..80: mol_type = other DNA
cctggccaacacggtgaaatcccatctccactaaaaatacaaaaaaattagccgggcgtggtggcggatgcctgtagtcc

SEQ ID NO: 54556 - DNA, 80 bp, synthetic construct; identical to SEQ ID NO: 25146
  misc_feature 1..80: note = Artificially Synthesized Probe
  source 1..80: mol_type = other DNA

SEQ ID NO: 54557 - DNA, 80 bp, synthetic construct
  misc_feature 1..80: note = Artificially Synthesized Probe
  source 1..80: mol_type = other DNA
tgcagtgagtggagatcacaccactacactgcagcctgggtgacagagcgagattccatctcaaaaaaaaaaaaaagact

SEQ ID NO: 54558 - DNA, 80 bp, synthetic construct
  misc_feature 1..80: note = Artificially Synthesized Probe
  source 1..80: mol_type = other DNA
cgggcacggtaagacacatctaagccccagccctgctcttaggaatttggtaaatactgcactgcacggaagggggccca

SEQ ID NO: 54559 - DNA, 80 bp, synthetic construct
  misc_feature 1..80: note = Artificially Synthesized Probe
  source 1..80: mol_type = other DNA
tcaagcgattctcctgcctcagcctcccgagtagctgggattacaggcatgcgccaccacgcccggctaattttgcattt

SEQ ID NO: 54560 - DNA, 80 bp, synthetic construct; identical to SEQ ID NO: 25147
  misc_feature 1..80: note = Artificially Synthesized Probe
  source 1..80: mol_type = other DNA

SEQ ID NO: 54561 - DNA, 80 bp, synthetic construct
  misc_feature 1..80: note = Artificially Synthesized Probe
  source 1..80: mol_type = other DNA
caccacatagtcctctgagttgagacgcggtccagtctccgcactgccatatatatggcctctgtttcctcatctgtatc

SEQ ID NO: 54562 - DNA, 80 bp, synthetic construct
  misc_feature 1..80: note = Artificially Synthesized Probe
  source 1..80: mol_type = other DNA
ctgcctgcctcgcccaccccactgtacctgagtgaggtagaagctcatgacagccagcttgtgacagtggtctgacagac

SEQ ID NO: 54563 - DNA, 80 bp, synthetic construct
  misc_feature 1..80: note = Artificially Synthesized Probe
  source 1..80: mol_type = other DNA
tatctgagtttgcaacgctgaggggccccaagacggaaacgggattcttttttttctttctttttttttttgatagggag

SEQ ID NO: 54564 - DNA, 80 bp, synthetic construct; identical to SEQ ID NO: 25148
  misc_feature 1..80: note = Artificially Synthesized Probe
  source 1..80: mol_type = other DNA

SEQ ID NO: 54565 - DNA, 80 bp, synthetic construct
  misc_feature 1..80: note = Artificially Synthesized Probe
  source 1..80: mol_type = other DNA
tgcacccctcgccagcgctcccatgtcctccccgtccacccgccgcgggcctgcacccctcgccagcgctcccatctcct

SEQ ID NO: 54566 - DNA, 80 bp, synthetic construct
  misc_feature 1..80: note = Artificially Synthesized Probe
  source 1..80: mol_type = other DNA
cctctccgtccacccactgcgggcccgcacccctcgccagcgctcccatctcctctccgtccacccactgcgggcccgca

SEQ ID NO: 54567 - DNA, 80 bp, synthetic construct
  misc_feature 1..80: note = Artificially Synthesized Probe
  source 1..80: mol_type = other DNA
cccacacatgctgagtgactgggggagatggaggcccacacactcctgagctcgagaggaggtcgcaggagtggggccgg

SEQ ID NO: 54568 - DNA, 80 bp, synthetic construct
  misc_feature 1..80: note = Artificially Synthesized Probe
  source 1..80: mol_type = other DNA
tcagccaggtgacggggtgcctgagctcccgcctcgcgagccggcactgggcactcaccccaccctcgctgccctcccca

SEQ ID NO: 54569 - DNA, 80 bp, synthetic construct; identical to SEQ ID NO: 25149
  misc_feature 1..80: note = Artificially Synthesized Probe
  source 1..80: mol_type = other DNA

SEQ ID NO: 54570 - DNA, 80 bp, synthetic construct
  misc_feature 1..80: note = Artificially Synthesized Probe
  source 1..80: mol_type = other DNA
tgtgtcctgtccccactgctcactttggatacccccagactcggcatccactaggtgccccataaatgctgaaggattta

SEQ ID NO: 54571 - DNA, 80 bp, synthetic construct
  misc_feature 1..80: note = Artificially Synthesized Probe
  source 1..80: mol_type = other DNA
ggtttcaccatattggccaggctggtcttgaactcctgacctcatgatctgcacccccccctccccccccgcccccgcgc

SEQ ID NO: 54572 - DNA, 80 bp, synthetic construct
  misc_feature 1..80: note = Artificially Synthesized Probe
  source 1..80: mol_type = other DNA
agtacactgaaattcaaagtcatgctcataactgttaatgaaagcagattcaaagcaacaccaccaccactgaagtattt

SEQ ID NO: 54573 - DNA, 80 bp, synthetic construct; identical to SEQ ID NO: 25160
  misc_feature 1..80: note = Artificially Synthesized Probe
  source 1..80: mol_type = other DNA

SEQ ID NO: 54574 - DNA, 80 bp, synthetic construct
  misc_feature 1..80: note = Artificially Synthesized Probe
  source 1..80: mol_type = other DNA
tcatacttttccattttataattcctacgggatttttaagaaccatcatcaatttcaaaacccgtgtcctcttagtgtta

SEQ ID NO: 54575 - DNA, 80 bp, synthetic construct
  misc_feature 1..80: note = Artificially Synthesized Probe
  source 1..80: mol_type = other DNA
aaaagaacttaaatatattactttcagtttaaaggattaaaatttcttccaggactcatttcttttaccagaaatcacaa

SEQ ID NO: 54576 - DNA, 80 bp, synthetic construct
  misc_feature 1..80: note = Artificially Synthesized Probe
  source 1..80: mol_type = other DNA
cattacttcattcccgttgtcagtatatgctccagcttcatcagttgagtaccaatgccagaacttgtatcaacttgagg

SEQ ID NO: 54577 - DNA, 80 bp, synthetic construct; identical to SEQ ID NO: 25161
  misc_feature 1..80: note = Artificially Synthesized Probe
  source 1..80: mol_type = other DNA

SEQ ID NO: 54578 - DNA, 80 bp, synthetic construct
  misc_feature 1..80: note = Artificially Synthesized Probe
  source 1..80: mol_type = other DNA
cctgtagtcccagctagtcgggagtctgaggcaggaaaatggcgggaacccgggaggcggagcttgcagtgagccgagtt

SEQ ID NO: 54579 - DNA, 80 bp, synthetic construct; identical to SEQ ID NO: 25151
  misc_feature 1..80: note = Artificially Synthesized Probe
  source 1..80: mol_type = other DNA

SEQ ID NO: 54580 - DNA, 80 bp, synthetic construct
  misc_feature 1..80: note = Artificially Synthesized Probe
  source 1..80: mol_type = other DNA
atttatgctacaatgattaccacaaattaattagcacattcttcatcacctatgcttagcattgggtgtaggtgggtgtg

SEQ ID NO: 54581 - DNA, 80 bp, synthetic construct
  misc_feature 1..80: note = Artificially Synthesized Probe
  source 1..80: mol_type = other DNA
gtactctttgaccaatatcttaatcaaacaaaagcagcaatgataagttctaaaatgcagggatcctaaaatgacaactg

SEQ ID NO: 54582 - DNA, 80 bp, synthetic construct
  misc_feature 1..80: note = Artificially Synthesized Probe
  source 1..80: mol_type = other DNA
accatcatataacattctacttgaaaacctgaaagtctatgaagatttgcatactacttaatgttttatgtttactgttt

SEQ ID NO: 54583 - DNA, 80 bp, synthetic construct; identical to SEQ ID NO: 25162
  misc_feature 1..80: note = Artificially Synthesized Probe
  source 1..80: mol_type = other DNA

SEQ ID NO: 54584 - DNA, 80 bp, synthetic construct
  misc_feature 1..80: note = Artificially Synthesized Probe
  source 1..80: mol_type = other DNA
ccatattaaaacttggaaaactaactgttgtgtccagttcataaaatgtttgtggcaagaaattagatgcaatttttcag

SEQ ID NO: 54585 - DNA, 80 bp, synthetic construct
  misc_feature 1..80: note = Artificially Synthesized Probe
  source 1..80: mol_type = other DNA
ggtaatgagatataagtaattacaatttatcaatacataaatgcaccaaaaatgatatcaatacattaatgcaccagaac

SEQ ID NO: 54586 - DNA, 80 bp, synthetic construct; identical to SEQ ID NO: 25163
  misc_feature 1..80: note = Artificially Synthesized Probe
  source 1..80: mol_type = other DNA

SEQ ID NO: 54587 - DNA, 80 bp, synthetic construct
  misc_feature 1..80: note = Artificially Synthesized Probe
  source 1..80: mol_type = other DNA
ctacctttaacatatatcactttggaaacaaaagtacaatttattttaaaataatgatgtctaacaagcaaggcggtgca

SEQ ID NO: 54588 - DNA, 80 bp, synthetic construct
  misc_feature 1..80: note = Artificially Synthesized Probe
  source 1..80: mol_type = other DNA
tttgattaggaacattttaaactcataaaggaggtgaagccattatgtgaaaaataaagatatcaataatacaacacaaa

SEQ ID NO: 54589 - DNA, 80 bp, synthetic construct
  misc_feature 1..80: note = Artificially Synthesized Probe
  source 1..80: mol_type = other DNA
ttagcaacttatgttgatagaaatgttaacacttaggaatatatgtttattcctaaattgttttagtacatttgggccac

SEQ ID NO: 54590 - DNA, 80 bp, synthetic construct; identical to SEQ ID NO: 25164
  misc_feature 1..80: note = Artificially Synthesized Probe
  source 1..80: mol_type = other DNA

SEQ ID NO: 54591 - DNA, 80 bp, synthetic construct
  misc_feature 1..80: note = Artificially Synthesized Probe
  source 1..80: mol_type = other DNA
accacgcctggcccttgaaattcgttttattttgttttcacttttagtgctgagttgtaatcacaggagtgtgattgtat

SEQ ID NO: 54592 - DNA, 80 bp, synthetic construct
  misc_feature 1..80: note = Artificially Synthesized Probe
  source 1..80: mol_type = other DNA
agcaggggggctatactaacattaactaaaattgaatttcaagtcaaatctgtaaaaagaaacaaggaaggccattatac

SEQ ID NO: 54593 - DNA, 80 bp, synthetic construct
  misc_feature 1..80: note = Artificially Synthesized Probe
  source 1..80: mol_type = other DNA
atggatagacagtctatacagaaatcaataaaaacattggacttgagctctatgttagaccaaatggacctatcagacct

SEQ ID NO: 54594 - DNA, 80 bp, synthetic construct
  misc_feature 1..80: note = Artificially Synthesized Probe
  source 1..80: mol_type = other DNA
tagaaaacaatagcagaagaaatgttaggaaattcacaaatacatggaaattaaacaacatgatcctgaacaaccaatgg

SEQ ID NO: 54595 - DNA, 80 bp, synthetic construct; identical to SEQ ID NO: 25165
  misc_feature 1..80: note = Artificially Synthesized Probe
  source 1..80: mol_type = other DNA

SEQ ID NO: 54596 - DNA, 80 bp, synthetic construct
  misc_feature 1..80: note = Artificially Synthesized Probe
  source 1..80: mol_type = other DNA
aactgatagcacagaaatacaaaaaaacagaagagaccgctataaacagttatatgccaacatataactgttggataacc

SEQ ID NO: 54597 - DNA, 80 bp, synthetic construct
  misc_feature 1..80: note = Artificially Synthesized Probe
  source 1..80: mol_type = other DNA
aaactcgtggcttcatgacagatggaatcctaccaaacatttaaagaatcaatcctaatccttcccaaattctgtcaaaa

SEQ ID NO: 54598 - DNA, 80 bp, synthetic construct
  misc_feature 1..80: note = Artificially Synthesized Probe
  source 1..80: mol_type = other DNA
ccaaagtgaacacaacacattaaaagaatcactcgccataatgaaaggggatgtatatctgggatgtaaagatagtatac

SEQ ID NO: 54599 - DNA, 80 bp, synthetic construct
  misc_feature 1..80: note = Artificially Synthesized Probe
  source 1..80: mol_type = other DNA
ccccaagacaataaaggctacatatcacaagctcacatttaacattatactcaagagtgaaaagttgaaacatttttgtc

SEQ ID NO: 54600 - DNA, 80 bp, synthetic construct; identical to SEQ ID NO: 25166
  misc_feature 1..80: note = Artificially Synthesized Probe
  source 1..80: mol_type = other DNA

SEQ ID NO: 54601 - DNA, 80 bp, synthetic construct
  misc_feature 1..80: note = Artificially Synthesized Probe
  source 1..80: mol_type = other DNA
acactgaaaactataaaatattgatgaaagaattgaagaaaacacaaataaatgaaaagatgtcctgtcttcaaggatca

SEQ ID NO: 54602 - DNA, 80 bp, synthetic construct
  misc_feature 1..80: note = Artificially Synthesized Probe
  source 1..80: mol_type = other DNA
acaattcctaaccctcctcccaccaaaaaaaagttcaagcttcaatccagtctctgggagaaacttcagtgaaattctat

SEQ ID NO: 54603 - DNA, 80 bp, synthetic construct
  misc_feature 1..80: note = Artificially Synthesized Probe
  source 1..80: mol_type = other DNA
aaaaggaagagacagcacactatcatgctctctggtttcaaattacactacaaatctataataatcagaacagtttagtc

SEQ ID NO: 54604 - DNA, 80 bp, synthetic construct
  misc_feature 1..80: note = Artificially Synthesized Probe
  source 1..80: mol_type = other DNA
cacacttttgaaaacagtgatacaagccatttagtccatccctaaagactcgatggttctgggactatatccatgttaag

SEQ ID NO: 54605 - DNA, 80 bp, synthetic construct; identical to SEQ ID NO: 25167
  misc_feature 1..80: note = Artificially Synthesized Probe
  source 1..80: mol_type = other DNA

SEQ ID NO: 54606 - DNA, 80 bp, synthetic construct
  misc_feature 1..80: note = Artificially Synthesized Probe
  source 1..80: mol_type = other DNA
cggaccacttccacctttggtatgccattgctttgattatgttttgtattcaggatcatactgataaactcatgtttcag

SEQ ID NO: 54607 - DNA, 80 bp, synthetic construct
  misc_feature 1..80: note = Artificially Synthesized Probe
  source 1..80: mol_type = other DNA
gaggtcaggagatcgagactatcctggctaacacggtgaaaccccgtctctactaaaaataaaaaaaaaatctgcgggcg

SEQ ID NO: 54608 - DNA, 80 bp, synthetic construct
  misc_feature 1..80: note = Artificially Synthesized Probe
  source 1..80: mol_type = other DNA
tttatcaagcactatgttgtgcttcatgtagcaaagaagctggaagaaaatgacaaccctaaccacacctcactgcaact

SEQ ID NO: 54609 - DNA, 80 bp, synthetic construct; identical to SEQ ID NO: 25152
  misc_feature 1..80: note = Artificially Synthesized Probe
  source 1..80: mol_type = other DNA

SEQ ID NO: 54610 - DNA, 80 bp, synthetic construct
  misc_feature 1..80: note = Artificially Synthesized Probe
  source 1..80: mol_type = other DNA
gtatgcttacatatttttaaatgaataaatggatgaaaatattttaaatgagttataatattaatctattttatggaaat

SEQ ID NO: 54611 - DNA, 80 bp, synthetic construct
  misc_feature 1..80: note = Artificially Synthesized Probe
  source 1..80: mol_type = other DNA
aaaaacggcagacttgtatagggcttttaccatgaatagggtgtgcaggactgaaagttactctcagtaagtcattacat

SEQ ID NO: 54612 - DNA, 80 bp, synthetic construct
  misc_feature 1..80: note = Artificially Synthesized Probe
  source 1..80: mol_type = other DNA
agttcttcagtgctaattactgagcttttgatgcacccaggatagactaaatttattttaaacttttcttcgataataaa

SEQ ID NO: 54613 - DNA, 80 bp, synthetic construct
  misc_feature 1..80: note = Artificially Synthesized Probe
  source 1..80: mol_type = other DNA
tacttatttatttactttttaaacctttttgttaaaaacagacacaaacacacacattaacctcggcctacaaagagtca

SEQ ID NO: 54614 - DNA, 80 bp, synthetic construct
  misc_feature 1..80: note = Artificially Synthesized Probe
  source 1..80: mol_type = other DNA
ttttacagttaatttttttaatcaatagaagaagttaactataaaatactaataacaattatactatatgaaatacatta

SEQ ID NO: 54615 - DNA, 80 bp, synthetic construct; identical to SEQ ID NO: 25153
  misc_feature 1..80: note = Artificially Synthesized Probe
  source 1..80: mol_type = other DNA

SEQ ID NO: 54616 - DNA, 80 bp, synthetic construct
  misc_feature 1..80: note = Artificially Synthesized Probe
  source 1..80: mol_type = other DNA
ctacttttgaaattggtggttgtgtaaaggaggcttgcaagaagacattaacactcctagctagcaccattgcagatatg

SEQ ID NO: 54617 - DNA, 80 bp, synthetic construct
  misc_feature 1..80: note = Artificially Synthesized Probe
  source 1..80: mol_type = other DNA
aggagtgaaggataattgaaagagttatggtaggttaatactatcaagacgggagtctttccctcaacacctttaccaaa

SEQ ID NO: 54618 - DNA, 80 bp, synthetic construct
  misc_feature 1..80: note = Artificially Synthesized Probe
  source 1..80: mol_type = other DNA
gtcagcttaatttctgcacacatctttcaaataaggtgaaaaataaaattatttcttatgcagcagtactatattgcaaa

SEQ ID NO: 54619 - DNA, 80 bp, synthetic construct; identical to SEQ ID NO: 25154
  misc_feature 1..80: note = Artificially Synthesized Probe
  source 1..80: mol_type = other DNA

SEQ ID NO: 54620 - DNA, 80 bp, synthetic construct
  misc_feature 1..80: note = Artificially Synthesized Probe
  source 1..80: mol_type = other DNA
atgtatttatacatatatacagtagtcctttagcatcctcaaggaattggttccaggacgctacccacccccagcagata

SEQ ID NO: 54621 - DNA, 80 bp, synthetic construct
  misc_feature 1..80: note = Artificially Synthesized Probe
  source 1..80: mol_type = other DNA
ggcatgatctccgctcactgcaacctccccctcctgggttcaagtgattcttctgcctcagcctcccaggtagctgggat

SEQ ID NO: 54622 - DNA, 80 bp, synthetic construct; identical to SEQ ID NO: 25150
  misc_feature 1..80: note = Artificially Synthesized Probe
  source 1..80: mol_type = other DNA

SEQ ID NO: 54623 - DNA, 80 bp, synthetic construct
  misc_feature 1..80: note = Artificially Synthesized Probe
  source 1..80: mol_type = other DNA
ccacactcagccctctcatacaatttaaggaatctctagagtatttataatacctaatacaatgtaaatgctgtaaaaat

SEQ ID NO: 54624 - DNA, 80 bp, synthetic construct
  misc_feature 1..80: note = Artificially Synthesized Probe
  source 1..80: mol_type = other DNA
atatatgtgcgtgtgtgtgtgtgttcacaagtataaatatataaatacaaatatacaaatacatatttgtatatacaaca

SEQ ID NO: 54625 - DNA, 80 bp, synthetic construct; identical to SEQ ID NO: 25155
  misc_feature 1..80: note = Artificially Synthesized Probe
  source 1..80: mol_type = other DNA

SEQ ID NO: 54626 - DNA, 80 bp, synthetic construct
  misc_feature 1..80: note = Artificially Synthesized Probe
  source 1..80: mol_type = other DNA
tcactccaaaatataaattttatattcattaacaattacctcctcaaatagtcatgtactcctagttagtgatgcttttc

SEQ ID NO: 54627 - DNA, 80 bp, synthetic construct
  misc_feature 1..80: note = Artificially Synthesized Probe
  source 1..80: mol_type = other DNA
gtgattttccaaaaataaaccatggaattctatatgatgaagaaaaatataagccattttcccaggttcctacaggggaa

SEQ ID NO: 54628 - DNA, 80 bp, synthetic construct
  misc_feature 1..80: note = Artificially Synthesized Probe
  source 1..80: mol_type = other DNA
agagaaggatatgccagacaagatcataaggtcttgataatcacagggacagtgaccaaagaagctggaaagatgggaga

SEQ ID NO: 54629 - DNA, 80 bp, synthetic construct
  misc_feature 1..80: note = Artificially Synthesized Probe
  source 1..80: mol_type = other DNA
tactaatattcatttcgcagcagcctgatcaaagttttccttttaaatgtcatttttatacatattctgttttgaattta

SEQ ID NO: 54630 - DNA, 80 bp, synthetic construct; identical to SEQ ID NO: 25156
  misc_feature 1..80: note = Artificially Synthesized Probe
  source 1..80: mol_type = other DNA

SEQ ID NO: 54631 - DNA, 80 bp, synthetic construct
  misc_feature 1..80: note = Artificially Synthesized Probe
  source 1..80: mol_type = other DNA
gtagcatgagttaacttcttttgaaagtgtttatatttgatttcagctttgaaagctttcctttttaattttttttgttc

SEQ ID NO: 54632 - DNA, 80 bp, synthetic construct
  misc_feature 1..80: note = Artificially Synthesized Probe
  source 1..80: mol_type = other DNA
aacagggtttcaccatgttggccaggcaggtctcgaactcctggcctcaagtgatccactcgcctcagcctcccaaagcg

SEQ ID NO: 54633 - DNA, 80 bp, synthetic construct
  misc_feature 1..80: note = Artificially Synthesized Probe
  source 1..80: mol_type = other DNA
actgtcaagaaattgcttcttctgagctcttaaatgttgagaatgaagtaatgtatcacctctttattaatactacaaac

SEQ ID NO: 54634 - DNA, 80 bp, synthetic construct
  misc_feature 1..80: note = Artificially Synthesized Probe
  source 1..80: mol_type = other DNA
tgaatcttcaggacaaacacatctggaaggtgatactgtgcaaattatttgcaacacaggatacagacttcaaaacaatg

SEQ ID NO: 54635 - DNA, 80 bp, synthetic construct; identical to SEQ ID NO: 25157
  misc_feature 1..80: note = Artificially Synthesized Probe
  source 1..80: mol_type = other DNA

SEQ ID NO: 54636 - DNA, 80 bp, synthetic construct
  misc_feature 1..80: note = Artificially Synthesized Probe
  source 1..80: mol_type = other DNA
atctgttttaccaacccctccagggaattctatgcacacttctgtgtgagaagcattgctatagtctattatcactacac

SEQ ID NO: 54637 - DNA, 80 bp, synthetic construct
  misc_feature 1..80: note = Artificially Synthesized Probe
  source 1..80: mol_type = other DNA
tcttcttctctactaacttgggtaattttcaaaatgtgtttttaaatctttgcttattcactaagaaaatgcctatttgt

SEQ ID NO: 54638 - DNA, 80 bp, synthetic construct; identical to SEQ ID NO: 25158
  misc_feature 1..80: note = Artificially Synthesized Probe
  source 1..80: mol_type = other DNA

SEQ ID NO: 54639 - DNA, 80 bp, synthetic construct
  misc_feature 1..80: note = Artificially Synthesized Probe
  source 1..80: mol_type = other DNA
gtattagttgatttgctactcaaaatgaacactaggtggaaccacttcttttttttctactcagacacttcctgtgtgaa

SEQ ID NO: 54640 - DNA, 80 bp, synthetic construct
  misc_feature 1..80: note = Artificially Synthesized Probe
  source 1..80: mol_type = other DNA
ggaaactggacagaaccacctcaatgcaaaggtagagtattatatttcttttaacattttgggggagtatagcagggtta

SEQ ID NO: 54641 - DNA, 80 bp, synthetic construct
  misc_feature 1..80: note = Artificially Synthesized Probe
  source 1..80: mol_type = other DNA
ttaaaagagttggaacctgaaaaacaatactttttaagcatcacaacacttagttccttctcaggaatacgtgtaataaa

SEQ ID NO: 54642 - DNA, 80 bp, synthetic construct
  misc_feature 1..80: note = Artificially Synthesized Probe
  source 1..80: mol_type = other DNA
aaaagaagtccgagcacatagtcctgggtcattctaataaatagagatggagtaagggaaaccagaaaaggaaattgtat

SEQ ID NO: 54643 - DNA, 80 bp, synthetic construct; identical to SEQ ID NO: 25159
  misc_feature 1..80: note = Artificially Synthesized Probe
  source 1..80: mol_type = other DNA

SEQ ID NO: 54644 - DNA, 80 bp, synthetic construct
  misc_feature 1..80: note = Artificially Synthesized Probe
  source 1..80: mol_type = other DNA
accctttgatttccaaaaagtttttactttactgtttggctgtttcctaatgtttccagacctttgaacttttatttgaa

SEQ ID NO: 54645 - DNA, 80 bp, synthetic construct
  misc_feature 1..80: note = Artificially Synthesized Probe
  source 1..80: mol_type = other DNA
agttgttgctctagctaatactatatatatgtaataatatattactgtctactggcactgacatttaaatcaacaactgg

SEQ ID NO: 54646 - DNA, 80 bp, synthetic construct
  misc_feature 1..80: note = Artificially Synthesized Probe
  source 1..80: mol_type = other DNA
aagatatcgtgttatattgactcctctttttatccattatatcgttctattttttcaggatcctgaagtctcaagctctt

SEQ ID NO: 54647 - DNA, 80 bp, synthetic construct
  misc_feature 1..80: note = Artificially Synthesized Probe
  source 1..80: mol_type = other DNA
acagttctttgaacacttgaaaactgtgccacatggttatagatgaaaaacttaccatcatttgaattgttgatcccctc

SEQ ID NO: 54648 - DNA, 80 bp, synthetic construct
  misc_feature 1..80: note = Artificially Synthesized Probe
  source 1..80: mol_type = other DNA
tgaaagatttcaaaccccaaacagtgcaactgaaacttttgtattagcatactactgagaatatctaacatgttgttact

SEQ ID NO: 54649 - DNA, 80 bp, synthetic construct; identical to SEQ ID NO: 25178
  misc_feature 1..80: note = Artificially Synthesized Probe
  source 1..80: mol_type = other DNA

SEQ ID NO: 54650 - DNA, 80 bp, synthetic construct
  misc_feature 1..80: note = Artificially Synthesized Probe
  source 1..80: mol_type = other DNA
tctgggttgaaaattcttctctttaagaatgttgaatattggcccccactctcttctggcttgtagagtttctgctgaga

SEQ ID NO: 54651 - DNA, 80 bp, synthetic construct
  misc_feature 1..80: note = Artificially Synthesized Probe
  source 1..80: mol_type = other DNA
ttctctgtatttcctgaatctgaatgttggcctgccttgctagattggggaagttctcctggataatatcctgcagagtg

SEQ ID NO: 54652 - DNA, 80 bp, synthetic construct
  misc_feature 1..80: note = Artificially Synthesized Probe
  source 1..80: mol_type = other DNA
ttcatttcatcttccatcactgataccctttcttccagatgatcacatcggctcctgaggcttctgtattcttcacgtag

SEQ ID NO: 54653 - DNA, 80 bp, synthetic construct
  misc_feature 1..80: note = Artificially Synthesized Probe
  source 1..80: mol_type = other DNA
tgtctgaagccttcttttctcaactcgtcaaagtcattctccgtccagctttgttccgttgctggtgaggaactttgttc

SEQ ID NO: 54654 - DNA, 80 bp, synthetic construct; identical to SEQ ID NO: 25179
  misc_feature 1..80: note = Artificially Synthesized Probe
  source 1..80: mol_type = other DNA

SEQ ID NO: 54655 - DNA, 80 bp, synthetic construct
  misc_feature 1..80: note = Artificially Synthesized Probe
  source 1..80: mol_type = other DNA
atgatttgctagttttatttgttgcgcaaaatcaaacttgatctgtgccaaaatggaaaaaaaaaggaatttcaccagtt

SEQ ID NO: 54656 - DNA, 80 bp, synthetic construct
  misc_feature 1..80: note = Artificially Synthesized Probe
  source 1..80: mol_type = other DNA
tggggtcagcgaccaacttgaggaggcagtctgcccgttctcagatctccagctgcgtgctgggagaaccactgctctct

SEQ ID NO: 54657 - DNA, 80 bp, synthetic construct
  misc_feature 1..80: note = Artificially Synthesized Probe
  source 1..80: mol_type = other DNA
ctttgtttacctaagcaagcctgggcaatggcaggcccccctcccccagcctcgctgccgccttgcagtttgatctcaga

SEQ ID NO: 54658 - DNA, 80 bp, synthetic construct
  misc_feature 1..80: note = Artificially Synthesized Probe
  source 1..80: mol_type = other DNA
acccctttctttgactaggaaagggaactccctgaccccttgtgcctcccaagtgaggcaatgccttcccctgctttggc

SEQ ID NO: 54659 - DNA, 80 bp, synthetic construct; identical to SEQ ID NO: 25180
  misc_feature 1..80: note = Artificially Synthesized Probe
  source 1..80: mol_type = other DNA

SEQ ID NO: 54660 - DNA, 80 bp, synthetic construct
  misc_feature 1..80: note = Artificially Synthesized Probe
  source 1..80: mol_type = other DNA
ctcaacaatagcctaagcccctgaaagaaaagtccctttttctcctgccataagcaccaactctatcattaatccaccta

SEQ ID NO: 54661 - DNA, 80 bp, synthetic construct
  misc_feature 1..80: note = Artificially Synthesized Probe
  source 1..80: mol_type = other DNA
tattataaatatgcatcatctttaacatgatttctttttctttcagatagtaaaattggtccatttacatttgtttttga

SEQ ID NO: 54662 - DNA, 80 bp, synthetic construct
  misc_feature 1..80: note = Artificially Synthesized Probe
  source 1..80: mol_type = other DNA
agaacttatttttgctatcttgcttgctttcttttttctgcttacatttccacatgcctctcaaacaccacgtctatatg

SEQ ID NO: 54663 - DNA, 80 bp, synthetic construct; identical to SEQ ID NO: 25181
  misc_feature 1..80: note = Artificially Synthesized Probe
  source 1..80: mol_type = other DNA

SEQ ID NO: 54664 - DNA, 80 bp, synthetic construct
  misc_feature 1..80: note = Artificially Synthesized Probe
  source 1..80: mol_type = other DNA
ttttgctgttttcaattcattaacaaatgtttcattgtttcgccatattgccatgtttttacttgttccctcctataaaa

SEQ ID NO: 54665 - DNA, 80 bp, synthetic construct
  misc_feature 1..80: note = Artificially Synthesized Probe
  source 1..80: mol_type = other DNA
gatatgcaacagcagatggaaattcttcaggatcaattacatgtttgcaaaatggatggtcagcacaaccaatttgcatt

SEQ ID NO: 54666 - DNA, 80 bp, synthetic construct; identical to SEQ ID NO: 25169
  misc_feature 1..80: note = Artificially Synthesized Probe
  source 1..80: mol_type = other DNA

SEQ ID NO: 54667 - DNA, 80 bp, synthetic construct; identical to SEQ ID NO: 25182
  misc_feature 1..80: note = Artificially Synthesized Probe
  source 1..80: mol_type = other DNA

SEQ ID NO: 54668 - DNA, 80 bp, synthetic construct
  misc_feature 1..80: note = Artificially Synthesized Probe
  source 1..80: mol_type = other DNA
aaagttgtacatgtcgggggagaaatgagtgcttaattctgaatttctgctagcgtcaggagaatcagaccttaataatt

SEQ ID NO: 54669 - DNA, 80 bp, synthetic construct
  misc_feature 1..80: note = Artificially Synthesized Probe
  source 1..80: mol_type = other DNA
ttctctgaacgtgctcgacctttacttagtatgataaagagaatgcataatgaacaaaggaaatctttcagtggcaaaag

SEQ ID NO: 54670 - DNA, 80 bp, synthetic construct
  misc_feature 1..80: note = Artificially Synthesized Probe
  source 1..80: mol_type = other DNA
agataatatggaaccttgatacataatacaacatggaagactctcaaaaatattaagctaagagagaaaaaagatacact

SEQ ID NO: 54671 - DNA, 80 bp, synthetic construct
  misc_feature 1..80: note = Artificially Synthesized Probe
  source 1..80: mol_type = other DNA
atctactttaaaacttgtgaaataaaagacaggatgcttcataaattttatagaacttatatccaattaatataattttt

SEQ ID NO: 54672 - DNA, 80 bp, synthetic construct; identical to SEQ ID NO: 25183
  misc_feature 1..80: note = Artificially Synthesized Probe
  source 1..80: mol_type = other DNA

SEQ ID NO: 54673 - DNA, 80 bp, synthetic construct
  misc_feature 1..80: note = Artificially Synthesized Probe
  source 1..80: mol_type = other DNA
cagatgtcttcctaagaaatcaaataagatacagttaagagtatataaaaagctttatttagaaagtttccaataagact

SEQ ID NO: 54674 - DNA, 80 bp, synthetic construct
  misc_feature 1..80: note = Artificially Synthesized Probe
  source 1..80: mol_type = other DNA
tatgaacttcagggttctaattatgtaacatgtagtaatggagagtggtcggaaccaccaagatgcatacgtaagttctt

SEQ ID NO: 54675 - DNA, 80 bp, synthetic construct
  misc_feature 1..80: note = Artificially Synthesized Probe
  source 1..80: mol_type = other DNA
taagtgtataagcttggaaaattccatgtaaacaatgaccaagtttcttttttaaaacaggaatgtcggcctggggtggt

SEQ ID NO: 54676 - DNA, 80 bp, synthetic construct
  misc_feature 1..80: note = Artificially Synthesized Probe
  source 1..80: mol_type = other DNA
attcagtagcattggctcaactgcatcccgccaaaattcatttgttaaagtccaaattcccaatacctgagaatgtgact

SEQ ID NO: 54677 - DNA, 80 bp, synthetic construct
  misc_feature 1..80: note = Artificially Synthesized Probe
  source 1..80: mol_type = other DNA
ggagggtgaggcaggagaatcatttgaacccgggaggcagaggttgcagtgagtggagattgcaccattgccctccagcc

SEQ ID NO: 54678 - DNA, 80 bp, synthetic construct; identical to SEQ ID NO: 25184
  misc_feature 1..80: note = Artificially Synthesized Probe
  source 1..80: mol_type = other DNA

SEQ ID NO: 54679 - DNA, 80 bp, synthetic construct
  misc_feature 1..80: note = Artificially Synthesized Probe
  source 1..80: mol_type = other DNA
tacttatattttatcagtattcctagcaagcaacaaagaaattaacgaaacttcagccatttccataacccattgctttt

SEQ ID NO: 54680 - DNA, 80 bp, synthetic construct
  misc_feature 1..80: note = Artificially Synthesized Probe
  source 1..80: mol_type = other DNA
caatgattatggcaacaacaagaaaacctaaaagaaaatttgccacaagtttctactagcctatgaggtagagccctggg

SEQ ID NO: 54681 - DNA, 80 bp, synthetic construct; identical to SEQ ID NO: 25185
  misc_feature 1..80: note = Artificially Synthesized Probe
  source 1..80: mol_type = other DNA

SEQ ID NO: 54682 - DNA, 80 bp, synthetic construct
  misc_feature 1..80: note = Artificially Synthesized Probe
  source 1..80: mol_type = other DNA
taggtttcagagataaattctgagtcttaaatttgattgactgaggagatggacactcctaagatgggtttcacagcaaa

SEQ ID NO: 54683 - DNA, 80 bp, synthetic construct
  misc_feature 1..80: note = Artificially Synthesized Probe
  source 1..80: mol_type = other DNA
cttatggaaaagattacatatacatatggcatattaaagcaatgaggaaaattttcccaggcagcaggaaactttagaaa

SEQ ID NO: 54684 - DNA, 80 bp, synthetic construct
  misc_feature 1..80: note = Artificially Synthesized Probe
  source 1..80: mol_type = other DNA
tacttgaaagatgtattaaaatatgattggggaaatttctaaagaaatgctaatgctaataagggctaaactagaatgca

SEQ ID NO: 54685 - DNA, 80 bp, synthetic construct
  misc_feature 1..80: note = Artificially Synthesized Probe
  source 1..80: mol_type = other DNA
acatttacctatggaacaaacctgcacatcctgcacatgtaccctggaacttaaaaaaaaaattataaatttttttacaa

SEQ ID NO: 54686 - DNA, 80 bp, synthetic construct; identical to SEQ ID NO: 25186
  misc_feature 1..80: note = Artificially Synthesized Probe
  source 1..80: mol_type = other DNA

SEQ ID NO: 54687 - DNA, 80 bp, synthetic construct
  misc_feature 1..80: note = Artificially Synthesized Probe
  source 1..80: mol_type = other DNA
aaccatttacaaggcaaaggaggaggtctcagaagcatccaatcctgttgacagctatatctcaaactagtagcctccag

SEQ ID NO: 54688 - DNA, 80 bp, synthetic construct
  misc_feature 1..80: note = Artificially Synthesized Probe
  source 1..80: mol_type = other DNA
gtcgaatgggggaaaggaggataagtaaccatgactccaatggaacatgttagcataatcctttttgatatgaagtcact

SEQ ID NO: 54689 - DNA, 80 bp, synthetic construct
  misc_feature 1..80: note = Artificially Synthesized Probe
  source 1..80: mol_type = other DNA
aagttaataactattaactatttggattattttataattttattttatcctaaactactcattaggatgcattttatttg

SEQ ID NO: 54690 - DNA, 80 bp, synthetic construct; identical to SEQ ID NO: 25187
  misc_feature 1..80: note = Artificially Synthesized Probe
  source 1..80: mol_type = other DNA

SEQ ID NO: 54691 - DNA, 80 bp, synthetic construct
  misc_feature 1..80: note = Artificially Synthesized Probe
  source 1..80: mol_type = other DNA
gcaacttaatatattctcaaaaatatattaaaacaaactaaattattgcttatgcttgtactaaaataataaaaactact

SEQ ID NO: 54692 - DNA, 80 bp, synthetic construct
  misc_feature 1..80: note = Artificially Synthesized Probe
  source 1..80: mol_type = other DNA
aaattgtaagtgaagataaacacactatagtattcccttattgtagccatggtcctctagatgcagttaaccaaataggg

SEQ ID NO: 54693 - DNA, 80 bp, synthetic construct
  misc_feature 1..80: note = Artificially Synthesized Probe
  source 1..80: mol_type = other DNA
acacagccagaagtgcattaaatgtatatattaacttgggcaatgttgacactttaggatgctgaagccaggtgcagtgg

SEQ ID NO: 54694 - DNA, 80 bp, synthetic construct
  misc_feature 1..80: note = Artificially Synthesized Probe
  source 1..80: mol_type = other DNA
tgggagaatcactttaaccagtggggcagaggttgaactgagccaagatagtgccactgcactccagcctgggcaataga

SEQ ID NO: 54695 - DNA, 80 bp, synthetic construct; identical to SEQ ID NO: 25188
  misc_feature 1..80: note = Artificially Synthesized Probe
  source 1..80: mol_type = other DNA

SEQ ID NO: 54696 - DNA, 80 bp, synthetic construct
  misc_feature 1..80: note = Artificially Synthesized Probe
  source 1..80: mol_type = other DNA
gcatgaacttgtataatgatctagtcctgtacagaatgagaaatattaattgctagactgagaatgttttggtggctaaa

SEQ ID NO: 54697 - DNA, 80 bp, synthetic construct
  misc_feature 1..80: note = Artificially Synthesized Probe
  source 1..80: mol_type = other DNA
tttcaaaaataattgctgatatggtttggctgtgtcccacccaattttcaccttgaattatataatcaccatgcatcaaa

SEQ ID NO: 54698 - DNA, 80 bp, synthetic construct
  misc_feature 1..80: note = Artificially Synthesized Probe
  source 1..80: mol_type = other DNA
tatacccaccaacacagattttagagggtattcatcagaattgggtaattatatcttgggtgtattgtccttgctgattt

SEQ ID NO: 54699 - DNA, 80 bp, synthetic construct; identical to SEQ ID NO: 25189
  misc_feature 1..80: note = Artificially Synthesized Probe
  source 1..80: mol_type = other DNA

SEQ ID NO: 54700 - DNA, 80 bp, synthetic construct
  misc_feature 1..80: note = Artificially Synthesized Probe
  source 1..80: mol_type = other DNA
aaagaggatttattcactatgctagtagaagtgacatattttgtgagagtataacagaaattaattttataaaaaattat

SEQ ID NO: 54701 - DNA, 80 bp, synthetic construct
  misc_feature 1..80: note = Artificially Synthesized Probe
  source 1..80: mol_type = other DNA
tgatgtttcagttctgaacaataaaatcagcacaccaattcttttggaagccacgctatttgaaagataaacttgacaga

SEQ ID NO: 54702 - DNA, 80 bp, synthetic construct; identical to SEQ ID NO: 25170
  misc_feature 1..80: note = Artificially Synthesized Probe
  source 1..80: mol_type = other DNA

SEQ ID NO: 54703 - DNA, 80 bp, synthetic construct
  misc_feature 1..80: note = Artificially Synthesized Probe
  source 1..80: mol_type = other DNA
acttttcctactacagaccaagttccaataatttccctatgaaattccagtgccttttagtgggagaaacgattttcaga

SEQ ID NO: 54704 - DNA, 80 bp, synthetic construct
  misc_feature 1..80: note = Artificially Synthesized Probe
  source 1..80: mol_type = other DNA
ccaacatgatggaacgctgtctctactaacaattcaaaaaattagccggagtggcggcacacacctgcaatcccagctac

SEQ ID NO: 54705 - DNA, 80 bp, synthetic construct; identical to SEQ ID NO: 25171
  misc_feature 1..80: note = Artificially Synthesized Probe
  source 1..80: mol_type = other DNA

SEQ ID NO: 54706 - DNA, 80 bp, synthetic construct
  misc_feature 1..80: note = Artificially Synthesized Probe
  source 1..80: mol_type = other DNA
tctgcacactaaagctgttgtgccgctagcctccttcccgttctctctgatttatgatgattcaaacttaaagatttttc

SEQ ID NO: 54707 - DNA, 80 bp, synthetic construct
  misc_feature 1..80: note = Artificially Synthesized Probe
  source 1..80: mol_type = other DNA
atatatttgaacattcgtgtatgcacctatttttttatgtcaataatatatctcatccgatacatgaattctaactatgg

SEQ ID NO: 54708 - DNA, 80 bp, synthetic construct
  misc_feature 1..80: note = Artificially Synthesized Probe
  source 1..80: mol_type = other DNA
tgtgcaccctgaactgacagctttagcataacttggtatagttctagataagctcagttcaaattaatgttgataaaacc

SEQ ID NO: 54709 - DNA, 80 bp, synthetic construct; identical to SEQ ID NO: 25172
  misc_feature 1..80: note = Artificially Synthesized Probe
  source 1..80: mol_type = other DNA

SEQ ID NO: 54710 - DNA, 80 bp, synthetic construct
  misc_feature 1..80: note = Artificially Synthesized Probe
  source 1..80: mol_type = other DNA
tgatgaacattttgagactccttcaggaagttactgggattacattcattgcacacaaaatgggtggtcaccagcagtac

SEQ ID NO: 54711 - DNA, 80 bp, synthetic construct; identical to SEQ ID NO: 25168
  misc_feature 1..80: note = Artificially Synthesized Probe
  source 1..80: mol_type = other DNA

SEQ ID NO: 54712 - DNA, 80 bp, synthetic construct
  misc_feature 1..80: note = Artificially Synthesized Probe
  source 1..80: mol_type = other DNA
tatgaggagttcttgaaaatcatatgaaaaataaatatagagactttatgagaatatctatatagtttatacatatttta

SEQ ID NO: 54713 - DNA, 80 bp, synthetic construct
  misc_feature 1..80: note = Artificially Synthesized Probe
  source 1..80: mol_type = other DNA
atttatgtttctcatttactttatttatttatcattgctatgtccttaggaaaatgttattttccttatttggaaaatgg

SEQ ID NO: 54714 - DNA, 80 bp, synthetic construct; identical to SEQ ID NO: 25173
  misc_feature 1..80: note = Artificially Synthesized Probe
  source 1..80: mol_type = other DNA

SEQ ID NO: 54715 - DNA, 80 bp, synthetic construct
  misc_feature 1..80: note = Artificially Synthesized Probe
  source 1..80: mol_type = other DNA
acttgttggctaaataaagtcatattgaagcggcattaatgtctcgggtaaatacccgaggttcgtcatcttgcaccaag

SEQ ID NO: 54716 - DNA, 80 bp, synthetic construct
  misc_feature 1..80: note = Artificially Synthesized Probe
  source 1..80: mol_type = other DNA
acaagttgagtggctataaaatggtatagcattgtaatgtaaatttgcatttcttttactaccagctggatttagaatac

SEQ ID NO: 54717 - DNA, 80 bp, synthetic construct
  misc_feature 1..80: note = Artificially Synthesized Probe
  source 1..80: mol_type = other DNA
caaatgcattctctttgtggctagtattgttctttccttttttctgcattatgaacaagttgctcattttactaaataat

SEQ ID NO: 54718 - DNA, 80 bp, synthetic construct; identical to SEQ ID NO: 25174
  misc_feature 1..80: note = Artificially Synthesized Probe
  source 1..80: mol_type = other DNA

SEQ ID NO: 54719 - DNA, 80 bp, synthetic construct
  misc_feature 1..80: note = Artificially Synthesized Probe
  source 1..80: mol_type = other DNA
tgcatagaattccatggtgtatatgtgccacattttcttaatccagtctatcattgttggacatttgggttggttccaag

SEQ ID NO: 54720 - DNA, 80 bp, synthetic construct
  misc_feature 1..80: note = Artificially Synthesized Probe
  source 1..80: mol_type = other DNA
ctgtcttccacaatggttgaactagtttacagtcccaccaatggtgtaaaagtgttcctatttcttcacatcctctccag

SEQ ID NO: 54721 - DNA, 80 bp, synthetic construct
  misc_feature 1..80: note = Artificially Synthesized Probe
  source 1..80: mol_type = other DNA
aagcatctgttcatgtcctttgcccactttttgatggggttgtttgtttttttcttgtaaatttgtttgagttcattgta

SEQ ID NO: 54722 - DNA, 80 bp, synthetic construct
  misc_feature 1..80: note = Artificially Synthesized Probe
  source 1..80: mol_type = other DNA
aatgaaaaaatagaatataaacttacattggaaagatagtaagttttgattggcatttctgagttcactagcaaatgttc

SEQ ID NO: 54723 - DNA, 80 bp, synthetic construct; identical to SEQ ID NO: 25175
  misc_feature 1..80: note = Artificially Synthesized Probe
  source 1..80: mol_type = other DNA

SEQ ID NO: 54724 - DNA, 80 bp, synthetic construct
  misc_feature 1..80: note = Artificially Synthesized Probe
  source 1..80: mol_type = other DNA
cccattacttgtttttctcaggtttgtcaaagatcagatagttgtagatatgcagcgttatttctgagggctctgttctg

SEQ ID NO: 54725 - DNA, 80 bp, synthetic construct
  misc_feature 1..80: note = Artificially Synthesized Probe
  source 1..80: mol_type = other DNA
ttccatatgaactttaaagtacttttttccactttggtgaagaaagtcattggtagcttgatggggatggcattgaatct

SEQ ID NO: 54726 - DNA, 80 bp, synthetic construct
  misc_feature 1..80: note = Artificially Synthesized Probe
  source 1..80: mol_type = other DNA
cctaggtattttattctctttgaagcaattgtgaatgggagttcactcatgatttggctctctgtttgtctgttattggt

SEQ ID NO: 54727 - DNA, 80 bp, synthetic construct; identical to SEQ ID NO: 25176
  misc_feature 1..80: note = Artificially Synthesized Probe
  source 1..80: mol_type = other DNA

SEQ ID NO: 54728 - DNA, 80 bp, synthetic construct
  misc_feature 1..80: note = Artificially Synthesized Probe
  source 1..80: mol_type = other DNA
atgaagcgttgttgaattttgtcaaaggccttttctgcatctattgagataatcatgtggtttttgtctttggttctgtc

SEQ ID NO: 54729 - DNA, 80 bp, synthetic construct
  misc_feature 1..80: note = Artificially Synthesized Probe
  source 1..80: mol_type = other DNA
aatcaaggatattggtctaaaattatcttttttggttgtgtctctgcctggctttggtatcaggatgatgctggcctcat

SEQ ID NO: 54730 - DNA, 80 bp, synthetic construct
  misc_feature 1..80: note = Artificially Synthesized Probe
  source 1..80: mol_type = other DNA
ccacaatttcagagcctgttattggtctattcagagattcaacttcttcctggtttagtcttgggagagtgtatgtgtca

SEQ ID NO: 54731 - DNA, 80 bp, synthetic construct; identical to SEQ ID NO: 25177
  misc_feature 1..80: note = Artificially Synthesized Probe
  source 1..80: mol_type = other DNA

SEQ ID NO: 54732 - DNA, 80 bp, synthetic construct
  misc_feature 1..80: note = Artificially Synthesized Probe
  source 1..80: mol_type = other DNA
gcagtggaaccacatgggtcaaaaatcatggacaatcaagggtgtgtgtccattaatgaagaatacaaattttgtaatta

SEQ ID NO: 54733 - DNA, 80 bp, synthetic construct
  misc_feature 1..80: note = Artificially Synthesized Probe
  source 1..80: mol_type = other DNA
ttagtgctataaatttccctctacacactgctttgaatgtgtcccatagattctggtatgttgtgtctttgttctcgttg

SEQ ID NO: 54734 - DNA, 80 bp, synthetic construct
  misc_feature 1..80: note = Artificially Synthesized Probe
  source 1..80: mol_type = other DNA
cagtttgttataatttctgttcttttacatttgctgaggagagctttacttccaactatgtggtcaattttggaattggt

SEQ ID NO: 54735 - DNA, 80 bp, synthetic construct
  misc_feature 1..80: note = Artificially Synthesized Probe
  source 1..80: mol_type = other DNA
tggtgtgttaaagtctcccattattattgtgtgggagtctaagtctctttgtaggtcactccagacttgctttatgaatc

SEQ ID NO: 54736 - DNA, 80 bp, synthetic construct
  misc_feature 1..80: note = Artificially Synthesized Probe
  source 1..80: mol_type = other DNA
ctgcctttttttgttttccatttgcttggtagatcttcctccatccttttattttgagcctatgtgtgtctctgcacatg

SEQ ID NO: 54737 - DNA, 80 bp, synthetic construct; identical to SEQ ID NO: 25190
  misc_feature 1..80: note = Artificially Synthesized Probe
  source 1..80: mol_type = other DNA

SEQ ID NO: 54738 - DNA, 80 bp, synthetic construct
  misc_feature 1..80: note = Artificially Synthesized Probe
  source 1..80: mol_type = other DNA
tggaatatatgtgcatgtaattatatcagcaaactacatagtgaagtcagggagacagattagagagataggaagagtgg

SEQ ID NO: 54739 - DNA, 80 bp, synthetic construct
  misc_feature 1..80: note = Artificially Synthesized Probe
  source 1..80: mol_type = other DNA
gagaggtacaaaggaaagggattagaacagagaattagttagaggatggggagataatacaagggagagatagccaggca

SEQ ID NO: 54740 - DNA, 80 bp, synthetic construct
  misc_feature 1..80: note = Artificially Synthesized Probe
  source 1..80: mol_type = other DNA
aaatataagggataagtagagagatcatgagagaaaggaacatagagggacacagatgcaagaacagggaaagagaaggg

SEQ ID NO: 54741 - DNA, 80 bp, synthetic construct
  misc_feature 1..80: note = Artificially Synthesized Probe
  source 1..80: mol_type = other DNA
tctttcaataggatatgaacaaatatcatagtaattctcaaagaatattgctatttttaatcaatggagtatacaacata

SEQ ID NO: 54742 - DNA, 80 bp, synthetic construct; identical to SEQ ID NO: 25299
  misc_feature 1..80: note = Artificially Synthesized Probe
  source 1..80: mol_type = other DNA

SEQ ID NO: 54743 - DNA, 80 bp, synthetic construct
  misc_feature 1..80: note = Artificially Synthesized Probe
  source 1..80: mol_type = other DNA
aggtacaggggtagagaatattaggtggtcatcttgataatcatttgtgttatgttaatgcactccaaagtggacttgtt

SEQ ID NO: 54744 - DNA, 80 bp, synthetic construct
  misc_feature 1..80: note = Artificially Synthesized Probe
  source 1..80: mol_type = other DNA
aaacacttactggaacctgagataatacaataagtcgaattgctaaaaagagaccccatggatcacaggtctgacctaat

SEQ ID NO: 54745 - DNA, 80 bp, synthetic construct
  misc_feature 1..80: note = Artificially Synthesized Probe
  source 1..80: mol_type = other DNA
actggacccacaggaaatctctaggtgacatgtgcagtttacattccttgctcaataggagtatttaggtaattaaaatc

SEQ ID NO: 54746 - DNA, 80 bp, synthetic construct; identical to SEQ ID NO: 25300
  misc_feature 1..80: note = Artificially Synthesized Probe
  source 1..80: mol_type = other DNA

SEQ ID NO: 54747 - DNA, 80 bp, synthetic construct
  misc_feature 1..80: note = Artificially Synthesized Probe
  source 1..80: mol_type = other DNA
ggcagatgccatatctcagcattgctgttcttgaaaacggcttgaaaatgacaccgatcataatgatggcactgtcttta

SEQ ID NO: 54748 - DNA, 80 bp, synthetic construct
  misc_feature 1..80: note = Artificially Synthesized Probe
  source 1..80: mol_type = other DNA
gatgatgaacacaaaatcaacaccagagataatgtgcctaaacccttaaataacttgtgtgacacagaacaagtatctca

SEQ ID NO: 54749 - DNA, 80 bp, synthetic construct
  misc_feature 1..80: note = Artificially Synthesized Probe
  source 1..80: mol_type = other DNA
tgccagacattatctgacgtgaaatgaaagagaattcctggtttccgtgagtttttagtcttagagaagacacagtcacg

SEQ ID NO: 54750 - DNA, 80 bp, synthetic construct
  misc_feature 1..80: note = Artificially Synthesized Probe
  source 1..80: mol_type = other DNA
tgaaggatgagtgaacacttactgggtaaataacaagatgaaagactttaggggaagagaatgagatgggctaagttagc

SEQ ID NO: 54751 - DNA, 80 bp, synthetic construct
  misc_feature 1..80: note = Artificially Synthesized Probe
  source 1..80: mol_type = other DNA
aattactatgttccaggtacaatattaggtacacatttttaatattcatgacagattaggaggatgtaacatcttgattt

SEQ ID NO: 54752 - DNA, 80 bp, synthetic construct; identical to SEQ ID NO: 25301
  misc_feature 1..80: note = Artificially Synthesized Probe
  source 1..80: mol_type = other DNA

SEQ ID NO: 54753 - DNA, 80 bp, synthetic construct
  misc_feature 1..80: note = Artificially Synthesized Probe
  source 1..80: mol_type = other DNA
ctcccttgaaggttttagtaggagaatgaaaggatcagtattgggtttcagaaagataaattgcttaccaattgatggaa

SEQ ID NO: 54754 - DNA, 80 bp, synthetic construct
  misc_feature 1..80: note = Artificially Synthesized Probe
  source 1..80: mol_type = other DNA
aactaataagacttgctgtgaccattgaggggacccaagatatcagtttgaatcactacagtgagcagtgaggctactta

SEQ ID NO: 54755 - DNA, 80 bp, synthetic construct; identical to SEQ ID NO: 25302
  misc_feature 1..80: note = Artificially Synthesized Probe
  source 1..80: mol_type = other DNA

SEQ ID NO: 54756 - DNA, 80 bp, synthetic construct
  misc_feature 1..80: note = Artificially Synthesized Probe
  source 1..80: mol_type = other DNA
ctttggcaatgacgacatgatgatgagcaaagcctgaatgtttcttactctcctgagtttattgtctagtaagagacaag

SEQ ID NO: 54757 - DNA, 80 bp, synthetic construct
  misc_feature 1..80: note = Artificially Synthesized Probe
  source 1..80: mol_type = other DNA
tatgaaaggtttccgaagaaagtgcagctgtgttaagacctgaaggataagagttgccatctaggcaaaaggtgatgaaa

SEQ ID NO: 54758 - DNA, 80 bp, synthetic construct
  misc_feature 1..80: note = Artificially Synthesized Probe
  source 1..80: mol_type = other DNA
ccagagcactcagaatttgcagaataataaggattttgatccatgttctgagtaatgacatgccattgaaggtttccatt

SEQ ID NO: 54759 - DNA, 80 bp, synthetic construct; identical to SEQ ID NO: 25201
  misc_feature 1..80: note = Artificially Synthesized Probe
  source 1..80: mol_type = other DNA

SEQ ID NO: 54760 - DNA, 80 bp, synthetic construct
  misc_feature 1..80: note = Artificially Synthesized Probe
  source 1..80: mol_type = other DNA
acctcatcaagttctttccataggattttcttcatgcacaaatatgcatggctggcttagtctgcagaccacatttttgg

SEQ ID NO: 54761 - DNA, 80 bp, synthetic construct; identical to SEQ ID NO: 25303
  misc_feature 1..80: note = Artificially Synthesized Probe
  source 1..80: mol_type = other DNA

SEQ ID NO: 54762 - DNA, 80 bp, synthetic construct
  misc_feature 1..80: note = Artificially Synthesized Probe
  source 1..80: mol_type = other DNA
tacttctaaagagatgcggcattgccatatagtagttacattgtgcaattactacatggaaattacttgctgtcttgtag

SEQ ID NO: 54763 - DNA, 80 bp, synthetic construct
  misc_feature 1..80: note = Artificially Synthesized Probe
  source 1..80: mol_type = other DNA
tatccctccccagcaccgcaccgccaacaggccctggtgtgtgatgttcccctccctttatccatgtgttctccttgttc

SEQ ID NO: 54764 - DNA, 80 bp, synthetic construct
  misc_feature 1..80: note = Artificially Synthesized Probe
  source 1..80: mol_type = other DNA
ttcttaatccagtctatcactgatggacatttgggttggttccaagtctttgctattgtgaattgtgccacaataaacat

SEQ ID NO: 54765 - DNA, 80 bp, synthetic construct; identical to SEQ ID NO: 25304
  misc_feature 1..80: note = Artificially Synthesized Probe
  source 1..80: mol_type = other DNA

SEQ ID NO: 54766 - DNA, 80 bp, synthetic construct
  misc_feature 1..80: note = Artificially Synthesized Probe
  source 1..80: mol_type = other DNA
gtaaatttgtttaagttctttgtagattctggataggtcttcgtcagatggataaattgcaaaaattttctcccaatctg

SEQ ID NO: 54767 - DNA, 80 bp, synthetic construct
  misc_feature 1..80: note = Artificially Synthesized Probe
  source 1..80: mol_type = other DNA
gttttcttctagagtttttatggtctaggtcttacgtttaagtctttgacctatcttgagttgatttttgtgtaaggtgt

SEQ ID NO: 54768 - DNA, 80 bp, synthetic construct
  misc_feature 1..80: note = Artificially Synthesized Probe
  source 1..80: mol_type = other DNA
tccactggtctatatatctgttttggtaccagtaccatgctgttttggttactgtagacttgtagtgtagtttgaagtta

SEQ ID NO: 54769 - DNA, 80 bp, synthetic construct; identical to SEQ ID NO: 25305
  misc_feature 1..80: note = Artificially Synthesized Probe
  source 1..80: mol_type = other DNA

SEQ ID NO: 54770 - DNA, 80 bp, synthetic construct
  misc_feature 1..80: note = Artificially Synthesized Probe
  source 1..80: mol_type = other DNA
ttgcacgttgattttgtatcctgaggctttgctgaagttgcttatcagcttaaggagattttgggctgagaagatggggt

SEQ ID NO: 54771 - DNA, 80 bp, synthetic construct
  misc_feature 1..80: note = Artificially Synthesized Probe
  source 1..80: mol_type = other DNA
tgtaaaatgcatctgatgacatagtggagaattcatgcatttgattaaaatttaaagatgtaaagaatgcttaaggcatc

SEQ ID NO: 54772 - DNA, 80 bp, synthetic construct
  misc_feature 1..80: note = Artificially Synthesized Probe
  source 1..80: mol_type = other DNA
tcaaagggaatgcttccagtttttgcccattcagtatgatattggttgtgggtttgccataaatagctcttattattttg

SEQ ID NO: 54773 - DNA, 80 bp, synthetic construct; identical to SEQ ID NO: 25306
  misc_feature 1..80: note = Artificially Synthesized Probe
  source 1..80: mol_type = other DNA

SEQ ID NO: 54774 - DNA, 80 bp, synthetic construct
  misc_feature 1..80: note = Artificially Synthesized Probe
  source 1..80: mol_type = other DNA
gttgtttggaatagtttcagaaggaatggtaccagctcttctttgtacctctggtagaatacggctgtgaatccatctgg

SEQ ID NO: 54775 - DNA, 80 bp, synthetic construct
  misc_feature 1..80: note = Artificially Synthesized Probe
  source 1..80: mol_type = other DNA
agaggtgtttatagtatcctctgatggtagtttgtatttctgtgggattggtggtgatatcccctttatcattttttact

SEQ ID NO: 54776 - DNA, 80 bp, synthetic construct
  misc_feature 1..80: note = Artificially Synthesized Probe
  source 1..80: mol_type = other DNA
catgtcttttgctagcttttgaatttgtttgctgtttcttctctagttcttttaattgtgatgttagggtgtcaatttta

SEQ ID NO: 54777 - DNA, 80 bp, synthetic construct
  misc_feature 1..80: note = Artificially Synthesized Probe
  source 1..80: mol_type = other DNA
taaactttatttcgtttttgactgtcaggcatgttgaattcaaattgcatgccaaaccataacatttaggaaaacatcat

SEQ ID NO: 54778 - DNA, 80 bp, synthetic construct; identical to SEQ ID NO: 25307
  misc_feature 1..80: note = Artificially Synthesized Probe
  source 1..80: mol_type = other DNA

SEQ ID NO: 54779 - DNA, 80 bp, synthetic construct
  misc_feature 1..80: note = Artificially Synthesized Probe
  source 1..80: mol_type = other DNA
ctttcacagtttctccttcagtaatcctttttccaaactgaatttcgagtgcctagtaacttgtgatttttctaggaaaa

SEQ ID NO: 54780 - DNA, 80 bp, synthetic construct
  misc_feature 1..80: note = Artificially Synthesized Probe
  source 1..80: mol_type = other DNA
tctggaagtgttcatatcttaaatgttttctggcagggatggggagaagagggttgtataatcttcaaatttttactgaa

SEQ ID NO: 54781 - DNA, 80 bp, synthetic construct
  misc_feature 1..80: note = Artificially Synthesized Probe
  source 1..80: mol_type = other DNA
tatttaagtaaactgcacattatatccagaaaattgaatctaactggttatcatgcaaatgaagaaggtaatcagttcaa

SEQ ID NO: 54782 - DNA, 80 bp, synthetic construct
  misc_feature 1..80: note = Artificially Synthesized Probe
  source 1..80: mol_type = other DNA
tctgagtgaatggataaagatagccaaaacaagcctgtttaaatttgaccttgaccccattttcttcgtgacctctagca

SEQ ID NO: 54783 - DNA, 80 bp, synthetic construct; identical to SEQ ID NO: 25308
  misc_feature 1..80: note = Artificially Synthesized Probe
  source 1..80: mol_type = other DNA

SEQ ID NO: 54784 - DNA, 80 bp, synthetic construct
  misc_feature 1..80: note = Artificially Synthesized Probe
  source 1..80: mol_type = other DNA
catttaaacaaccactgggatgtgattatgccccaaatctctctgattatagttggtttgctttattatattccacttga

SEQ ID NO: 54785 - DNA, 80 bp, synthetic construct
  misc_feature 1..80: note = Artificially Synthesized Probe
  source 1..80: mol_type = other DNA
tgacaaaaaaaataatgcaaaaaataaacagttatgaaacagtatagagataaaaaaatcaaaggtgagatatcccaaac

SEQ ID NO: 54786 - DNA, 80 bp, synthetic construct
  misc_feature 1..80: note = Artificially Synthesized Probe
  source 1..80: mol_type = other DNA
atcatattcaagtaccaactgttggaattcgtactttaaatacaacctgagaaatggccttaggttaaggctaatggtgt

SEQ ID NO: 54787 - DNA, 80 bp, synthetic construct; identical to SEQ ID NO: 25309
  misc_feature 1..80: note = Artificially Synthesized Probe
  source 1..80: mol_type = other DNA

SEQ ID NO: 54788 - DNA, 80 bp, synthetic construct
  misc_feature 1..80: note = Artificially Synthesized Probe
  source 1..80: mol_type = other DNA
agcttgatggagtcccagctgttaaacctttgaggcattgtgacagaaatctgcaagaaagcttcactagaggcagatga

SEQ ID NO: 54789 - DNA, 80 bp, synthetic construct
  misc_feature 1..80: note = Artificially Synthesized Probe
  source 1..80: mol_type = other DNA
ggggctcccttgattttttaatatcctattcactcaaggatgcttgtgtctgagcaaacatttctagcaaatccaccaat

SEQ ID NO: 54790 - DNA, 80 bp, synthetic construct
  misc_feature 1..80: note = Artificially Synthesized Probe
  source 1..80: mol_type = other DNA
tttgtttaagaccttttgaatattgactgactatacttatggggtacattaaaattcagtagcctctacattaccacaca

SEQ ID NO: 54791 - DNA, 80 bp, synthetic construct; identical to SEQ ID NO: 25310
  misc_feature 1..80: note = Artificially Synthesized Probe
  source 1..80: mol_type = other DNA

SEQ ID NO: 54792 - DNA, 80 bp, synthetic construct
  misc_feature 1..80: note = Artificially Synthesized Probe
  source 1..80: mol_type = other DNA
cattcgttcatccagaaggatttattatgtgtatttcctatattctaggcaagcgcaaaaataatgaataggatctggca

SEQ ID NO: 54793 - DNA, 80 bp, synthetic construct
  misc_feature 1..80: note = Artificially Synthesized Probe
  source 1..80: mol_type = other DNA
atgcacacttctgagtcaagttcaaataaattggatttgaccttaaccactgtcccctcaaaaaaagggctggcagtcat

SEQ ID NO: 54794 - DNA, 80 bp, synthetic construct
  misc_feature 1..80: note = Artificially Synthesized Probe
  source 1..80: mol_type = other DNA
caatttgattaacacaaaaaactggagaagtagattaaaaccatccaaaacattgggagatatagatagacagctgatag

SEQ ID NO: 54795 - DNA, 80 bp, synthetic construct; identical to SEQ ID NO: 25311
  misc_feature 1..80: note = Artificially Synthesized Probe
  source 1..80: mol_type = other DNA

SEQ ID NO: 54796 - DNA, 80 bp, synthetic construct
  misc_feature 1..80: note = Artificially Synthesized Probe
  source 1..80: mol_type = other DNA
cattatatttttttctgaatttgttctggatcgttttttgtttaaaatctcttcctcctcaggagtccgctgggccccct

SEQ ID NO: 54797 - DNA, 80 bp, synthetic construct
  misc_feature 1..80: note = Artificially Synthesized Probe
  source 1..80: mol_type = other DNA
tcagcgaccctcgttttgcgagtgcaacactcccagccacagaagttcccgggtccagcctcagagcccagtatttccca

SEQ ID NO: 54798 - DNA, 80 bp, synthetic construct
  misc_feature 1..80: note = Artificially Synthesized Probe
  source 1..80: mol_type = other DNA
tgctgcttgtgccagttgtcgtgagagatgcccggtgctgggcgctggttggaaagaaaaacttaggtatatattttctt

SEQ ID NO: 54799 - DNA, 80 bp, synthetic construct; identical to SEQ ID NO: 25312
  misc_feature 1..80: note = Artificially Synthesized Probe
  source 1..80: mol_type = other DNA

SEQ ID NO: 54800 - DNA, 80 bp, synthetic construct
  misc_feature 1..80: note = Artificially Synthesized Probe
  source 1..80: mol_type = other DNA
gtttctcaaagtgctaggaatacaagcatgaggcactgcacttgatcctatgtttttctaattagttttctacttttaaa

SEQ ID NO: 54801 - DNA, 80 bp, synthetic construct
  misc_feature 1..80: note = Artificially Synthesized Probe
  source 1..80: mol_type = other DNA
gcctcatttcttttttgaaaattcctgccatggtactgatcaatgttgatatatatgtgaaaaaaataaagaggagacaa

SEQ ID NO: 54802 - DNA, 80 bp, synthetic construct
  misc_feature 1..80: note = Artificially Synthesized Probe
  source 1..80: mol_type = other DNA
agtgagacccctatctctataattttttttttaattagctgcatgtggtggcggatgcctatagtatcccagctactaga

SEQ ID NO: 54803 - DNA, 80 bp, synthetic construct
  misc_feature 1..80: note = Artificially Synthesized Probe
  source 1..80: mol_type = other DNA
tttttgaagttgattttttgttatagcttagaaatctgtcatatattattattgcttcctctcacatattgcagtttttc

SEQ ID NO: 54804 - DNA, 80 bp, synthetic construct; identical to SEQ ID NO: 25313
  misc_feature 1..80: note = Artificially Synthesized Probe
  source 1..80: mol_type = other DNA

SEQ ID NO: 54805 - DNA, 80 bp, synthetic construct
  misc_feature 1..80: note = Artificially Synthesized Probe
  source 1..80: mol_type = other DNA
cccagtggcagttggaggattaatgagctaatatttataaagtgctttgaagataaaggtgccagctattattattacta

SEQ ID NO: 54806 - DNA, 80 bp, synthetic construct
  misc_feature 1..80: note = Artificially Synthesized Probe
  source 1..80: mol_type = other DNA
ttagaatcaaacagtatctggtgttttcaaattggcctgttcacttaatgtgcctttaggtttccttcacctcttttcat

SEQ ID NO: 54807 - DNA, 80 bp, synthetic construct
  misc_feature 1..80: note = Artificially Synthesized Probe
  source 1..80: mol_type = other DNA
aagttttcaactcctttgggtaaaaaccaaagagttcaatggctggatcacatgtgagagtttgtttagttttgggggaa

SEQ ID NO: 54808 - DNA, 80 bp, synthetic construct
  misc_feature 1..80: note = Artificially Synthesized Probe
  source 1..80: mol_type = other DNA
ctgtcacagtgagggtttgcacttttcaggtagggctgttcttccttgggcaggactgtgctgagccctgcaggtcgttt

SEQ ID NO: 54809 - DNA, 80 bp, synthetic construct; identical to SEQ ID NO: 25314
  misc_feature 1..80: note = Artificially Synthesized Probe
  source 1..80: mol_type = other DNA

SEQ ID NO: 54810 - DNA, 80 bp, synthetic construct
  misc_feature 1..80: note = Artificially Synthesized Probe
  source 1..80: mol_type = other DNA
cttaatgttgggattattctccatccctgtagtcaaatgaccatgaatttccgtaattttctttcttagtctccactgtg

SEQ ID NO: 54811 - DNA, 80 bp, synthetic construct
  misc_feature 1..80: note = Artificially Synthesized Probe
  source 1..80: mol_type = other DNA
atttgctatttaaataaatgatattattaatgatattagtttatcccacatcattattaactaaagctgacattttccca

SEQ ID NO: 54812 - DNA, 80 bp, synthetic construct
  misc_feature 1..80: note = Artificially Synthesized Probe
  source 1..80: mol_type = other DNA
gtgttatgagacatgaaagagtgtttgaatggatatggctataatgcacagtgtttcctttgttttcagagtaaaagcca

SEQ ID NO: 54813 - DNA, 80 bp, synthetic construct; identical to SEQ ID NO: 25315
  misc_feature 1..80: note = Artificially Synthesized Probe
  source 1..80: mol_type = other DNA

SEQ ID NO: 54814 - DNA, 80 bp, synthetic construct
  misc_feature 1..80: note = Artificially Synthesized Probe
  source 1..80: mol_type = other DNA
ttccgagttatagcactgtctcagactattatacaaatccattgagttatttttaaaactataatttggatgccagtgtc

SEQ ID NO: 54815 - DNA, 80 bp, synthetic construct
  misc_feature 1..80: note = Artificially Synthesized Probe
  source 1..80: mol_type = other DNA
ggaatgtcaacgtagcatgcttttttttcccttcttttttggctgtgtgcattccatgttgtcaatgaaaatggcagatg

SEQ ID NO: 54816 - DNA, 80 bp, synthetic construct; identical to SEQ ID NO: 25202
  misc_feature 1..80: note = Artificially Synthesized Probe
  source 1..80: mol_type = other DNA

SEQ ID NO: 54817 - DNA, 80 bp, synthetic construct
  misc_feature 1..80: note = Artificially Synthesized Probe
  source 1..80: mol_type = other DNA
aaaaatgtcaaggatttttaaaaatcactaaaataaaatgtgctatgtcaaaccagctgcctttctaagctgctttttgc

SEQ ID NO: 54818 - DNA, 80 bp, synthetic construct; identical to SEQ ID NO: 25316
  misc_feature 1..80: note = Artificially Synthesized Probe
  source 1..80: mol_type = other DNA

SEQ ID NO: 54819 - DNA, 80 bp, synthetic construct
  misc_feature 1..80: note = Artificially Synthesized Probe
  source 1..80: mol_type = other DNA
ttgttgcctttctatgctttattattggaatttaaacagtctccagtggaaacataatgcaaagttggtgaattaaggat

SEQ ID NO: 54820 - DNA, 80 bp, synthetic construct
  misc_feature 1..80: note = Artificially Synthesized Probe
  source 1..80: mol_type = other DNA
ttaaactaaatatgcagaacatacacactgatgtttaaagaaaccccacattttctcatcttgttccaatagaagaggtg

SEQ ID NO: 54821 - DNA, 80 bp, synthetic construct
  misc_feature 1..80: note = Artificially Synthesized Probe
  source 1..80: mol_type = other DNA
gactgaataaacattaaaaatgtttccattaggaaaatgttaaaatgcacccccaatagaaagattagcataacctcccc

SEQ ID NO: 54822 - DNA, 80 bp, synthetic construct; identical to SEQ ID NO: 25317
  misc_feature 1..80: note = Artificially Synthesized Probe
  source 1..80: mol_type = other DNA

SEQ ID NO: 54823 - DNA, 80 bp, synthetic construct
  misc_feature 1..80: note = Artificially Synthesized Probe
  source 1..80: mol_type = other DNA
ttatcttccaacagggtagtgcaggcttctttttaaaatagctgagcagagttttcagagacagagagaaagaggaaaaa

SEQ ID NO: 54824 - DNA, 80 bp, synthetic construct
  misc_feature 1..80: note = Artificially Synthesized Probe
  source 1..80: mol_type = other DNA
caatctactacactctcacacttttggggagagtattttatatcaatcaatatcatttcaccactatatactttagagaa

SEQ ID NO: 54825 - DNA, 80 bp, synthetic construct; identical to SEQ ID NO: 25318
  misc_feature 1..80: note = Artificially Synthesized Probe
  source 1..80: mol_type = other DNA

SEQ ID NO: 54826 - DNA, 80 bp, synthetic construct
  misc_feature 1..80: note = Artificially Synthesized Probe
  source 1..80: mol_type = other DNA
caagtagaatggacaaagacttagccatctctctcctccatttctcaaggaataatatgaatttaaattaagggagcaag

SEQ ID NO: 54827 - DNA, 80 bp, synthetic construct
  misc_feature 1..80: note = Artificially Synthesized Probe
  source 1..80: mol_type = other DNA
tatggtaccattaatgaaactggtttatttgggtggttttatgtgtgtacctgcgtgagggtggggttcacaactaactc

SEQ ID NO: 54828 - DNA, 80 bp, synthetic construct
  misc_feature 1..80: note = Artificially Synthesized Probe
  source 1..80: mol_type = other DNA
tatttcctttttgttgtgttggaagttgccctaggaggtacgcacgcttgtccatgttaaactaatgtcttgaaatcagt

SEQ ID NO: 54829 - DNA, 80 bp, synthetic construct
  misc_feature 1..80: note = Artificially Synthesized Probe
  source 1..80: mol_type = other DNA
gcagaggtttaataggcaaaagaaagagaaagaaagataaaggaaaacaactctctctctagtgagagagaggggcttcc

SEQ ID NO: 54830 - DNA, 80 bp, synthetic construct
  misc_feature 1..80: note = Artificially Synthesized Probe
  source 1..80: mol_type = other DNA
ttatgtgaatgggctttccagttgaccggtgccatcttgtctgctccttactgtacatgtggctgggaagggaagatgga

SEQ ID NO: 54831 - DNA, 80 bp, synthetic construct; identical to SEQ ID NO: 25319
  misc_feature 1..80: note = Artificially Synthesized Probe
  source 1..80: mol_type = other DNA

SEQ ID NO: 54832 - DNA, 80 bp, synthetic construct
  misc_feature 1..80: note = Artificially Synthesized Probe
  source 1..80: mol_type = other DNA
gttgatatcattaatataagctatcagacatcagcttcatgtgacttaacttcaaaaatattttagtaagagtatgactg

SEQ ID NO: 54833 - DNA, 80 bp, synthetic construct; identical to SEQ ID NO: 25191
  misc_feature 1..80: note = Artificially Synthesized Probe
  source 1..80: mol_type = other DNA

SEQ ID NO: 54834 - DNA, 80 bp, synthetic construct
  misc_feature 1..80: note = Artificially Synthesized Probe
  source 1..80: mol_type = other DNA
ttgtcttagtgccagctccatcctgagtttcaacaattgctattatctttgaggtctagcatgaggcattaaatgccatt

SEQ ID NO: 54835 - DNA, 80 bp, synthetic construct; identical to SEQ ID NO: 25320
  misc_feature 1..80: note = Artificially Synthesized Probe
  source 1..80: mol_type = other DNA

SEQ ID NO: 54836 - DNA, 80 bp, synthetic construct
  misc_feature 1..80: note = Artificially Synthesized Probe
  source 1..80: mol_type = other DNA
aattagtatctataagctactttactaaaattagagaccagtgaacttactgccctaagtcaagagattaatggaaattg

SEQ ID NO: 54837 - DNA, 80 bp, synthetic construct
  misc_feature 1..80: note = Artificially Synthesized Probe
  source 1..80: mol_type = other DNA
gctccttacaaataaaaggcaactcataaaacacatacatgagatgctcttaaagccatcagcattgaaaactaatggaa

SEQ ID NO: 54838 - DNA, 80 bp, synthetic construct
  misc_feature 1..80: note = Artificially Synthesized Probe
  source 1..80: mol_type = other DNA
ataatagctacatggtttaatgtctcccaactttgtacaaatacgtaggactcaccttttgtagttaaggcagtattttg

SEQ ID NO: 54839 - DNA, 80 bp, synthetic construct; identical to SEQ ID NO: 25321
  misc_feature 1..80: note = Artificially Synthesized Probe
  source 1..80: mol_type = other DNA

SEQ ID NO: 54840 - DNA, 80 bp, synthetic construct
  misc_feature 1..80: note = Artificially Synthesized Probe
  source 1..80: mol_type = other DNA
gatctatatagatgtcctaaaatatcagatggtacagggtagtgtaaatatttctcacgtattgccaaaacaatgcttat

SEQ ID NO: 54841 - DNA, 80 bp, synthetic construct
  misc_feature 1..80: note = Artificially Synthesized Probe
  source 1..80: mol_type = other DNA
actactttaaattttaccaatcggtacatatatacaaaagatacaggtctataatatcttaagatgcaatttaaagtgaa

SEQ ID NO: 54842 - DNA, 80 bp, synthetic construct
  misc_feature 1..80: note = Artificially Synthesized Probe
  source 1..80: mol_type = other DNA
ggagcaaattattgtattattacctgcaagaatacatgatagacaatgtataaacaatgtttagacatctattaacacaa

SEQ ID NO: 54843 - DNA, 80 bp, synthetic construct
  misc_feature 1..80: note = Artificially Synthesized Probe
  source 1..80: mol_type = other DNA
ttcagttaaaatggtggcctttattcttttgttctttattatttctttcctctatcttgctggaactatccatcttctat

SEQ ID NO: 54844 - DNA, 80 bp, synthetic construct; identical to SEQ ID NO: 25322
  misc_feature 1..80: note = Artificially Synthesized Probe
  source 1..80: mol_type = other DNA

SEQ ID NO: 54845 - DNA, 80 bp, synthetic construct
  misc_feature 1..80: note = Artificially Synthesized Probe
  source 1..80: mol_type = other DNA
atagaatattatggacataaagataagaataatagaataattgtggactactagatgggggagggtaagaaggagtgagg

SEQ ID NO: 54846 - DNA, 80 bp, synthetic construct
  misc_feature 1..80: note = Artificially Synthesized Probe
  source 1..80: mol_type = other DNA
gtgtataatatcataccttccaagtaaaacttcctctgacttaggattttttggaatagtctgtggtttacaatagagta

SEQ ID NO: 54847 - DNA, 80 bp, synthetic construct
  misc_feature 1..80: note = Artificially Synthesized Probe
  source 1..80: mol_type = other DNA
tgtgaactaacatgttattctgtttgtgtttttagtttccaggttaactaaggtctcagctgtaaaccaaaagtgagagg

SEQ ID NO: 54848 - DNA, 80 bp, synthetic construct; identical to SEQ ID NO: 25323
  misc_feature 1..80: note = Artificially Synthesized Probe
  source 1..80: mol_type = other DNA

SEQ ID NO: 54849 - DNA, 80 bp, synthetic construct
  misc_feature 1..80: note = Artificially Synthesized Probe
  source 1..80: mol_type = other DNA
tatctaaaagttgaacaaaagaagcctcaaagcaacctagatctctttcttggcaaaaattcactaaaatgtaaacactt

SEQ ID NO: 54850 - DNA, 80 bp, synthetic construct
  misc_feature 1..80: note = Artificially Synthesized Probe
  source 1..80: mol_type = other DNA
atctatctttttcgttttgtgggtggctgatacatgactgctgtaattattttgcaacccaggcttttagttccttatgc

SEQ ID NO: 54851 - DNA, 80 bp, synthetic construct
  misc_feature 1..80: note = Artificially Synthesized Probe
  source 1..80: mol_type = other DNA
gaattggatgaactttgtattctttttcaaaatgattatatttaagaatgaaaacaatgaattagcaaaacaataagcca

SEQ ID NO: 54852 - DNA, 80 bp, synthetic construct
  misc_feature 1..80: note = Artificially Synthesized Probe
  source 1..80: mol_type = other DNA
atcagtttgaacgaaccatggtaattaatagttaaaaaaatagatcagcatcagcaggacatggtgacacatgactgtag

SEQ ID NO: 54853 - DNA, 80 bp, synthetic construct; identical to SEQ ID NO: 25324
  misc_feature 1..80: note = Artificially Synthesized Probe
  source 1..80: mol_type = other DNA

SEQ ID NO: 54854 - DNA, 80 bp, synthetic construct
  misc_feature 1..80: note = Artificially Synthesized Probe
  source 1..80: mol_type = other DNA
aattctagagaaataatcttgagctcataaaatttaatacatcttagaaaagtgttgggacttaactaaaacgttgcttt

SEQ ID NO: 54855 - DNA, 80 bp, synthetic construct
  misc_feature 1..80: note = Artificially Synthesized Probe
  source 1..80: mol_type = other DNA
tattatgcactttggaaagaactgaaattgtagttccatccccccaggtagaaatcccttctctattatttttaacagat

SEQ ID NO: 54856 - DNA, 80 bp, synthetic construct
  misc_feature 1..80: note = Artificially Synthesized Probe
  source 1..80: mol_type = other DNA
cgggagtctaaagtaccttcatctttagtgaattcttttgctttgagtatgcagtagcaagttaagagcaagcttcttgg

SEQ ID NO: 54857 - DNA, 80 bp, synthetic construct; identical to SEQ ID NO: 25325
  misc_feature 1..80: note = Artificially Synthesized Probe
  source 1..80: mol_type = other DNA

SEQ ID NO: 54858 - DNA, 80 bp, synthetic construct
  misc_feature 1..80: note = Artificially Synthesized Probe
  source 1..80: mol_type = other DNA
ggatttataatgtagaatatatattcttataaacacccaaaggttattagctccgttccccaaataattagttattgctg

SEQ ID NO: 54859 - DNA, 80 bp, synthetic construct
  misc_feature 1..80: note = Artificially Synthesized Probe
  source 1..80: mol_type = other DNA
caagtcctgctctacacagaaatagtagtagtcagaaacaaagtaaatgtgaatgaaaatacagacattttgcatgttgg

SEQ ID NO: 54860 - DNA, 80 bp, synthetic construct
  misc_feature 1..80: note = Artificially Synthesized Probe
  source 1..80: mol_type = other DNA
aattagagtttggaaaggcatttagtttttattctactctggctgtcaatgctcaaaatgtggtttccagaattcttggg

SEQ ID NO: 54861 - DNA, 80 bp, synthetic construct; identical to SEQ ID NO: 25203
  misc_feature 1..80: note = Artificially Synthesized Probe
  source 1..80: mol_type = other DNA

SEQ ID NO: 54862 - DNA, 80 bp, synthetic construct
  misc_feature 1..80: note = Artificially Synthesized Probe
  source 1..80: mol_type = other DNA
gaggcttgaggtcaggagttcaagaccagcctggcaaatgtaatgagacctcatctctaaattatatatatatataaaat

SEQ ID NO: 54863 - DNA, 80 bp, synthetic construct; identical to SEQ ID NO: 25326
  misc_feature 1..80: note = Artificially Synthesized Probe
  source 1..80: mol_type = other DNA

SEQ ID NO: 54864 - DNA, 80 bp, synthetic construct
  misc_feature 1..80: note = Artificially Synthesized Probe
  source 1..80: mol_type = other DNA
ttatgacaatctctatttcttaattgcatcattgcttgagtcctgagctggacatcatctttactttaaagttatgactg

SEQ ID NO: 54865 - DNA, 80 bp, synthetic construct
  misc_feature 1..80: note = Artificially Synthesized Probe
  source 1..80: mol_type = other DNA
gttcaagaaaacattagaattgtggaggacatgtattgtccactgtaagcttgagagcttcccgatacttaatactgctg

SEQ ID NO: 54866 - DNA, 80 bp, synthetic construct
  misc_feature 1..80: note = Artificially Synthesized Probe
  source 1..80: mol_type = other DNA
ttaatggtacacagtatgaaaagttgattgatagggtttagatttcacatttcaatgaatgtttaaaaaactacacttgt

SEQ ID NO: 54867 - DNA, 80 bp, synthetic construct; identical to SEQ ID NO: 25327
  misc_feature 1..80: note = Artificially Synthesized Probe
  source 1..80: mol_type = other DNA

SEQ ID NO: 54868 - DNA, 80 bp, synthetic construct
  misc_feature 1..80: note = Artificially Synthesized Probe
  source 1..80: mol_type = other DNA
ataatatttaaaggttttcataaaatatgtgatttactttaacattgaattattttaaataaattcataagtaaacattt

SEQ ID NO: 54869 - DNA, 80 bp, synthetic construct
  misc_feature 1..80: note = Artificially Synthesized Probe
  source 1..80: mol_type = other DNA
aatccttaatattacaaatgagaaaacagagagtggttcagggcctggtccaatgtcacaggttttagggcctcatttgc

SEQ ID NO: 54870 - DNA, 80 bp, synthetic construct
  misc_feature 1..80: note = Artificially Synthesized Probe
  source 1..80: mol_type = other DNA
actaaaactgggatgtctccttttgaaaaatattgagtgctcatcagcagtagatctttacacacttcatgatctatgtt

SEQ ID NO: 54871 - DNA, 80 bp, synthetic construct; identical to SEQ ID NO: 25328
  misc_feature 1..80: note = Artificially Synthesized Probe
  source 1..80: mol_type = other DNA

SEQ ID NO: 54872 - DNA, 80 bp, synthetic construct
  misc_feature 1..80: note = Artificially Synthesized Probe
  source 1..80: mol_type = other DNA
ttttgtcattattatacttcaagttttagggtacatgtgcacaacgtgcaggtttgttacatatgtatacatgtgccatg

SEQ ID NO: 54873 - DNA, 80 bp, synthetic construct
  misc_feature 1..80: note = Artificially Synthesized Probe
  source 1..80: mol_type = other DNA
cccactccctactttttaaaattgtgtttgtcttgtagattacttatcaaacactaacagagtttgtcacaagaggaggg

SEQ ID NO: 54874 - DNA, 80 bp, synthetic construct
  misc_feature 1..80: note = Artificially Synthesized Probe
  source 1..80: mol_type = other DNA
gaaaaggttataaaatgaaaacataaatgaggaataacaaacactaaacaagcccatgaaagaacatttattacccaaaa

SEQ ID NO: 54875 - DNA, 80 bp, synthetic construct
  misc_feature 1..80: note = Artificially Synthesized Probe
  source 1..80: mol_type = other DNA
gatatttacaatttacccagagtaattaccacttgtgtccatgcctggaaatttatcataaatcagtaattcaaaaaagg

SEQ ID NO: 54876 - DNA, 80 bp, synthetic construct; identical to SEQ ID NO: 25329
  misc_feature 1..80: note = Artificially Synthesized Probe
  source 1..80: mol_type = other DNA

SEQ ID NO: 54877 - DNA, 80 bp, synthetic construct
  misc_feature 1..80: note = Artificially Synthesized Probe
  source 1..80: mol_type = other DNA
gatggcagtgaagtgtattccttagaagtaagtacatgttgcaaagagagagtgagatttattctgattttcacttttgt

SEQ ID NO: 54878 - DNA, 80 bp, synthetic construct
  misc_feature 1..80: note = Artificially Synthesized Probe
  source 1..80: mol_type = other DNA
tcccttcgatgagtattttcaaattgaatgtgaagctaaaggaaatccagaaccaacgtgagtattgtttcaaacgaagt

SEQ ID NO: 54879 - DNA, 80 bp, synthetic construct; identical to SEQ ID NO: 25330
  misc_feature 1..80: note = Artificially Synthesized Probe
  source 1..80: mol_type = other DNA

SEQ ID NO: 54880 - DNA, 80 bp, synthetic construct
  misc_feature 1..80: note = Artificially Synthesized Probe
  source 1..80: mol_type = other DNA
aggttgttacttgattttttttaagttgtcatagaaatattgtcatctcaggtggcagagtactattgcatgatatacta

SEQ ID NO: 54881 - DNA, 80 bp, synthetic construct
  misc_feature 1..80: note = Artificially Synthesized Probe
  source 1..80: mol_type = other DNA
tggaagtgagaagggagaggctgtgggaagaattcccaatattaaaactctacgtgattctaaaatggaaagcaaagcta

SEQ ID NO: 54882 - DNA, 80 bp, synthetic construct
  misc_feature 1..80: note = Artificially Synthesized Probe
  source 1..80: mol_type = other DNA
ttctatgtttaaccaaatggaatatattcaatcaaaatatgtaagtatggatagaattacaatggaattaaggataattt

SEQ ID NO: 54883 - DNA, 80 bp, synthetic construct; identical to SEQ ID NO: 25331
  misc_feature 1..80: note = Artificially Synthesized Probe
  source 1..80: mol_type = other DNA

SEQ ID NO: 54884 - DNA, 80 bp, synthetic construct
  misc_feature 1..80: note = Artificially Synthesized Probe
  source 1..80: mol_type = other DNA
tttacaagcaatgcactaataatgatccaaggtaggtgccgttgtttacagataggattttgtattgcccattccaagtt

SEQ ID NO: 54885 - DNA, 80 bp, synthetic construct
  misc_feature 1..80: note = Artificially Synthesized Probe
  source 1..80: mol_type = other DNA
tctatcagactgataaagatttaaagagacttcttaatgtcattgttcatagaactgacactctagcatactggggtggg

SEQ ID NO: 54886 - DNA, 80 bp, synthetic construct
  misc_feature 1..80: note = Artificially Synthesized Probe
  source 1..80: mol_type = other DNA
tttggacaagtaccaaagaataaatatatagggttgtttctcacaatattgttcataaaaggaaaaacattgaaatggtt

SEQ ID NO: 54887 - DNA, 80 bp, synthetic construct
  misc_feature 1..80: note = Artificially Synthesized Probe
  source 1..80: mol_type = other DNA
agcaagtgtaataatactgggcttatctgttttgggattttgagtgagttccttacacacacaaatacatgaacagaaat

SEQ ID NO: 54888 - DNA, 80 bp, synthetic construct
  misc_feature 1..80: note = Artificially Synthesized Probe
  source 1..80: mol_type = other DNA
ttcttctgagacccttatttatatcctgttatattccattaagtatatactttttatcataaaatgtcttggttttgtca

SEQ ID NO: 54889 - DNA, 80 bp, synthetic construct; identical to SEQ ID NO: 25332
  misc_feature 1..80: note = Artificially Synthesized Probe
  source 1..80: mol_type = other DNA

SEQ ID NO: 54890 - DNA, 80 bp, synthetic construct
  misc_feature 1..80: note = Artificially Synthesized Probe
  source 1..80: mol_type = other DNA
ggaaaaatttcctccaggtcttgatacttaaaatcggatgaccttagaaaacaacataatttgactctgtttcagtaacc

SEQ ID NO: 54891 - DNA, 80 bp, synthetic construct
  misc_feature 1..80: note = Artificially Synthesized Probe
  source 1..80: mol_type = other DNA
aaacataaagttattccccgataaagcaatttactgtgggcctggcaactctttcatgcagccttcttgctgatcacagc

SEQ ID NO: 54892 - DNA, 80 bp, synthetic construct; identical to SEQ ID NO: 25333
  misc_feature 1..80: note = Artificially Synthesized Probe
  source 1..80: mol_type = other DNA

SEQ ID NO: 54893 - DNA, 80 bp, synthetic construct
  misc_feature 1..80: note = Artificially Synthesized Probe
  source 1..80: mol_type = other DNA
ctttattcatagcttatttgccctatgtgcatgggatatccatgaccaccttttatattttatcacgttttccccctgtt

SEQ ID NO: 54894 - DNA, 80 bp, synthetic construct
  misc_feature 1..80: note = Artificially Synthesized Probe
  source 1..80: mol_type = other DNA
gtatttcaaagaaagtcctaggacttgcaaaatatgaacacttgattctgggggtgcagaatggccacaaacttcagaaa

SEQ ID NO: 54895 - DNA, 80 bp, synthetic construct
  misc_feature 1..80: note = Artificially Synthesized Probe
  source 1..80: mol_type = other DNA
agaaaatagtattatcacacaatgtggttgatgcagggaagaaaaaataaaggagagaaaaaaagtaagacaagcagaaa

SEQ ID NO: 54896 - DNA, 80 bp, synthetic construct
  misc_feature 1..80: note = Artificially Synthesized Probe
  source 1..80: mol_type = other DNA
acctcaatagatatgtgttttgcatatgagattcttggggtatctgtagggatatacacaagctgtttgttattaggaag

SEQ ID NO: 54897 - DNA, 80 bp, synthetic construct; identical to SEQ ID NO: 25334
  misc_feature 1..80: note = Artificially Synthesized Probe
  source 1..80: mol_type = other DNA

SEQ ID NO: 54898 - DNA, 80 bp, synthetic construct
  misc_feature 1..80: note = Artificially Synthesized Probe
  source 1..80: mol_type = other DNA
ttgctcactcaagcagagaaaaacatcagtgagcatatagaagatttaaagaatacaatcacaagctccatctaatgaaa

SEQ ID NO: 54899 - DNA, 80 bp, synthetic construct
  misc_feature 1..80: note = Artificially Synthesized Probe
  source 1..80: mol_type = other DNA
aaaactaagaaatacatttctaagtgagtcttaggtcaagtaccaaatggtaaggaaaatagaatatattttgaagtgat

SEQ ID NO: 54900 - DNA, 80 bp, synthetic construct
  misc_feature 1..80: note = Artificially Synthesized Probe
  source 1..80: mol_type = other DNA
taatttaaggcaacagaataaactggagtgaagggagaaaatagtataaaagcagaaaataaattcaacaatgtggtatg

SEQ ID NO: 54901 - DNA, 80 bp, synthetic construct
  misc_feature 1..80: note = Artificially Synthesized Probe
  source 1..80: mol_type = other DNA
agtttagtttttgtttctgtttgtgaaatgtgaccagctggttcaaaaatatctttgaggaacaaagggcaaacttcagt

SEQ ID NO: 54902 - DNA, 80 bp, synthetic construct; identical to SEQ ID NO: 25335
  misc_feature 1..80: note = Artificially Synthesized Probe
  source 1..80: mol_type = other DNA

SEQ ID NO: 54903 - DNA, 80 bp, synthetic construct
  misc_feature 1..80: note = Artificially Synthesized Probe
  source 1..80: mol_type = other DNA
ggctgaacagtgaaaggaaaaaatgttttaaaaagtgagactatttgaacaatacgtttatcaccagggtcattaataca

SEQ ID NO: 54904 - DNA, 80 bp, synthetic construct
  misc_feature 1..80: note = Artificially Synthesized Probe
  source 1..80: mol_type = other DNA
gttcaagtgatcctcccatctcagccttctgagtaactaggactacaggcgagtgctaccgtgcctggccaatttttatt

SEQ ID NO: 54905 - DNA, 80 bp, synthetic construct; identical to SEQ ID NO: 25336
  misc_feature 1..80: note = Artificially Synthesized Probe
  source 1..80: mol_type = other DNA

SEQ ID NO: 54906 - DNA, 80 bp, synthetic construct
  misc_feature 1..80: note = Artificially Synthesized Probe
  source 1..80: mol_type = other DNA
agtggcaacatatataaacttgaacctcagactggagggccaataaaaatgtgaaaatgtgttcaacctctttagttacc

SEQ ID NO: 54907 - DNA, 80 bp, synthetic construct
  misc_feature 1..80: note = Artificially Synthesized Probe
  source 1..80: mol_type = other DNA
cactactgatgacagtccagtttactgcgtgatctttggaaaacattttctaatcccctccttcgttgaagatgctctta

SEQ ID NO: 54908 - DNA, 80 bp, synthetic construct; identical to SEQ ID NO: 25204
  misc_feature 1..80: note = Artificially Synthesized Probe
  source 1..80: mol_type = other DNA

SEQ ID NO: 54909 - DNA, 80 bp, synthetic construct
  misc_feature 1..80: note = Artificially Synthesized Probe
  source 1..80: mol_type = other DNA
ccactcaaagtagaatggatcaatgcattgtgctctattcataccaaaaatactattcaatagtaaataaaacgtcaaga

SEQ ID NO: 54910 - DNA, 80 bp, synthetic construct; identical to SEQ ID NO: 25337
  misc_feature 1..80: note = Artificially Synthesized Probe
  source 1..80: mol_type = other DNA

SEQ ID NO: 54911 - DNA, 80 bp, synthetic construct
  misc_feature 1..80: note = Artificially Synthesized Probe
  source 1..80: mol_type = other DNA
tgacatgtcaacctgaaaattgttctcaggagtttggatttgaattgactttcagtaggaaatgtccatgaattctggat

SEQ ID NO: 54912 - DNA, 80 bp, synthetic construct
  misc_feature 1..80: note = Artificially Synthesized Probe
  source 1..80: mol_type = other DNA
tgctatggagacacaaaggaaaaggcagcagctagatctattgcaaagaaaggagcggcagaatttggtttaagattctg

SEQ ID NO: 54913 - DNA, 80 bp, synthetic construct
  misc_feature 1..80: note = Artificially Synthesized Probe
  source 1..80: mol_type = other DNA
tttttattttttttttttgctgctgctgcagaaaagagcaaaataaattaggtttcttatgcatcatttccagcctctcc

SEQ ID NO: 54914 - DNA, 80 bp, synthetic construct
  misc_feature 1..80: note = Artificially Synthesized Probe
  source 1..80: mol_type = other DNA
gattgatagaaactttgtgattcaaatgttacagtttctacttctcaatctcctgttaacaaacagaaacctttgtatac

SEQ ID NO: 54915 - DNA, 80 bp, synthetic construct; identical to SEQ ID NO: 25338
  misc_feature 1..80: note = Artificially Synthesized Probe
  source 1..80: mol_type = other DNA

SEQ ID NO: 54916 - DNA, 80 bp, synthetic construct
  misc_feature 1..80: note = Artificially Synthesized Probe
  source 1..80: mol_type = other DNA
actcacacttcagtgcacagattagatttctccacttagcattcctggcctattccagcctagataatttttttcctttt

SEQ ID NO: 54917 - DNA, 80 bp, synthetic construct
  misc_feature 1..80: note = Artificially Synthesized Probe
  source 1..80: mol_type = other DNA
ctgggactacaggcatgtaccaccatgcccacctataaacatcttttttgaagtataatttacatatcataaattttact

SEQ ID NO: 54918 - DNA, 80 bp, synthetic construct
  misc_feature 1..80: note = Artificially Synthesized Probe
  source 1..80: mol_type = other DNA
tgccccaccaatgacttttttagtaatttttttagtgaagtatcattataatgtagtattaaaacatttccatcaccaca

SEQ ID NO: 54919 - DNA, 80 bp, synthetic construct
  misc_feature 1..80: note = Artificially Synthesized Probe
  source 1..80: mol_type = other DNA
gtccttccagaaatgtcactggacttttcacacagtgactcagggctttaaaaatctaacttggaaacttaaaggctagt

SEQ ID NO: 54920 - DNA, 80 bp, synthetic construct; identical to SEQ ID NO: 25339
  misc_feature 1..80: note = Artificially Synthesized Probe
  source 1..80: mol_type = other DNA

SEQ ID NO: 54921 - DNA, 80 bp, synthetic construct
  misc_feature 1..80: note = Artificially Synthesized Probe
  source 1..80: mol_type = other DNA
aggatccttaagaatgagaaaaaatatcagacagactgtcatatccttcccgttctgcattgccttgtagatgtcacaag

SEQ ID NO: 54922 - DNA, 80 bp, synthetic construct
  misc_feature 1..80: note = Artificially Synthesized Probe
  source 1..80: mol_type = other DNA
agaaatattcatgcactaggtttctacatttgtgttaacatacttcctcagattcctcaggacaatttccttaagataaa

SEQ ID NO: 54923 - DNA, 80 bp, synthetic construct
  misc_feature 1..80: note = Artificially Synthesized Probe
  source 1..80: mol_type = other DNA
tttactctgattcaccaaagtatgtgaatgcctgtaatgaaatgggctgaactgggtgtccttccttagcatgaattcat

SEQ ID NO: 54924 - DNA, 80 bp, synthetic construct; identical to SEQ ID NO: 25340
  misc_feature 1..80: note = Artificially Synthesized Probe
  source 1..80: mol_type = other DNA

SEQ ID NO: 54925 - DNA, 80 bp, synthetic construct
  misc_feature 1..80: note = Artificially Synthesized Probe
  source 1..80: mol_type = other DNA
tcaataaacacatcatatgttctacatgaaatgaacaaatgaacaggattttcttccttctgtccttctacctcctctga

SEQ ID NO: 54926 - DNA, 80 bp, synthetic construct
  misc_feature 1..80: note = Artificially Synthesized Probe
  source 1..80: mol_type = other DNA
cgtttggctgtaccatgcaaagtgaaaatatttgaggagtagccaagatgtattgaataatttttaagtgcttgctccta

SEQ ID NO: 54927 - DNA, 80 bp, synthetic construct
  misc_feature 1..80: note = Artificially Synthesized Probe
  source 1..80: mol_type = other DNA
cttcagtgtttatggataatctgatgctacagtgttgtctgtactttgagactcaggtaacacatgctacagatgagcaa

SEQ ID NO: 54928 - DNA, 80 bp, synthetic construct; identical to SEQ ID NO: 25341
  misc_feature 1..80: note = Artificially Synthesized Probe
  source 1..80: mol_type = other DNA

SEQ ID NO: 54929 - DNA, 80 bp, synthetic construct
  misc_feature 1..80: note = Artificially Synthesized Probe
  source 1..80: mol_type = other DNA
cattcactcaccatgtgactgcttacaaagagggaaaaaatatggagccctctgttccaagggaacactcctttccccct

SEQ ID NO: 54930 - DNA, 80 bp, synthetic construct
  misc_feature 1..80: note = Artificially Synthesized Probe
  source 1..80: mol_type = other DNA
ctggtgaggtgtttgaggagcctagagagatgaattcaaaggattctaagacaccaaaggaaaacaaaatgagatacaga

SEQ ID NO: 54931 - DNA, 80 bp, synthetic construct
  misc_feature 1..80: note = Artificially Synthesized Probe
  source 1..80: mol_type = other DNA
ttgaaataattgggatgatgagttttcaaaactcattgacagcatctgaagtcatagagctcctgcaaattttgtatctg

SEQ ID NO: 54932 - DNA, 80 bp, synthetic construct; identical to SEQ ID NO: 25342
  misc_feature 1..80: note = Artificially Synthesized Probe
  source 1..80: mol_type = other DNA

SEQ ID NO: 54933 - DNA, 80 bp, synthetic construct
  misc_feature 1..80: note = Artificially Synthesized Probe
  source 1..80: mol_type = other DNA
tggcacaatctctgctcactgcaagctccgcctcccgggttcccgccattctcctgcctcagcctcccgagtagctggga

SEQ ID NO: 54934 - DNA, 80 bp, synthetic construct
  misc_feature 1..80: note = Artificially Synthesized Probe
  source 1..80: mol_type = other DNA
gtatgtctcccaatgctatccctcccctctccccccaccccacaacaggccccggtgtgtgatgtcccccttcctatgtc

SEQ ID NO: 54935 - DNA, 80 bp, synthetic construct
  misc_feature 1..80: note = Artificially Synthesized Probe
  source 1..80: mol_type = other DNA
gtgtatatgtgccacattttcttaatccagtctatcattgttggttccaggacatttgggttggttgcaggtctttacta

SEQ ID NO: 54936 - DNA, 80 bp, synthetic construct
  misc_feature 1..80: note = Artificially Synthesized Probe
  source 1..80: mol_type = other DNA
cagtttacagtcccaccaacagtttgaaagtgttcctatttctccacatcctctccagcacctttttttggcatttttag

SEQ ID NO: 54937 - DNA, 80 bp, synthetic construct; identical to SEQ ID NO: 25343
  misc_feature 1..80: note = Artificially Synthesized Probe
  source 1..80: mol_type = other DNA

SEQ ID NO: 54938 - DNA, 80 bp, synthetic construct
  misc_feature 1..80: note = Artificially Synthesized Probe
  source 1..80: mol_type = other DNA
taaatgccactggttggatttatttttaaatggagtcatttctttatctgaattgaggtagacttcatgttagctgctgt

SEQ ID NO: 54939 - DNA, 80 bp, synthetic construct
  misc_feature 1..80: note = Artificially Synthesized Probe
  source 1..80: mol_type = other DNA
tgatgtataagtatgcgtccctgttttccaatattcattttgtatttagttaaaagctgttctgaagatttatggcacgc

SEQ ID NO: 54940 - DNA, 80 bp, synthetic construct
  misc_feature 1..80: note = Artificially Synthesized Probe
  source 1..80: mol_type = other DNA
attctttagcagggtgggcttttcggatgcttttctcctctgatctatttaggtttatccttactcttttccatttatct

SEQ ID NO: 54941 - DNA, 80 bp, synthetic construct; identical to SEQ ID NO: 25344
  misc_feature 1..80: note = Artificially Synthesized Probe
  source 1..80: mol_type = other DNA

SEQ ID NO: 54942 - DNA, 80 bp, synthetic construct
  misc_feature 1..80: note = Artificially Synthesized Probe
  source 1..80: mol_type = other DNA
cctttccattttctaatccatattttatttcctctgctgcctcttgtatctgagtatagatagattcaccaactacccaa

SEQ ID NO: 54943 - DNA, 80 bp, synthetic construct
  misc_feature 1..80: note = Artificially Synthesized Probe
  source 1..80: mol_type = other DNA
gtctataaggtgtactttctgcaaaatgttttccatagcatttgatgtcaatcaaagccgaggctttaccaaatagctgg

SEQ ID NO: 54944 - DNA, 80 bp, synthetic construct
  misc_feature 1..80: note = Artificially Synthesized Probe
  source 1..80: mol_type = other DNA
aaaaatgtttccagagactttctaaaaggaatcttatagaacgagttgagcaagaggaaacccactaaaggactgtcaca

SEQ ID NO: 54945 - DNA, 80 bp, synthetic construct
  misc_feature 1..80: note = Artificially Synthesized Probe
  source 1..80: mol_type = other DNA
gcaaattccctcaacctctaaaggcatggatgggggttgaggggctataggacaaatatataggaagtgcacaaagcttc

SEQ ID NO: 54946 - DNA, 80 bp, synthetic construct; identical to SEQ ID NO: 25345
  misc_feature 1..80: note = Artificially Synthesized Probe
  source 1..80: mol_type = other DNA

SEQ ID NO: 54947 - DNA, 80 bp, synthetic construct
  misc_feature 1..80: note = Artificially Synthesized Probe
  source 1..80: mol_type = other DNA
taagaaattgactccagtgtggggaggaaacaataggttgaaatattgacaagtctcatttcctacatcaattccatttc

SEQ ID NO: 54948 - DNA, 80 bp, synthetic construct
  misc_feature 1..80: note = Artificially Synthesized Probe
  source 1..80: mol_type = other DNA
aatcacattcaaggccttcccaataaagcgagagatagagaatatgcaaccgcccaaagtgaaatcagtgtttggagaaa

SEQ ID NO: 54949 - DNA, 80 bp, synthetic construct
  misc_feature 1..80: note = Artificially Synthesized Probe
  source 1..80: mol_type = other DNA
tgtgtaaagatgcacaccagtttcttaatagtatttaactctgaaggggagatgtaagaaccaggatctgtagcatagaa

SEQ ID NO: 54950 - DNA, 80 bp, synthetic construct; identical to SEQ ID NO: 25205
  misc_feature 1..80: note = Artificially Synthesized Probe
  source 1..80: mol_type = other DNA

SEQ ID NO: 54951 - DNA, 80 bp, synthetic construct
  misc_feature 1..80: note = Artificially Synthesized Probe
  source 1..80: mol_type = other DNA
cggcagggctgggtggcccggcagagagggcgccccaggttcagcccctcctcgaagggcgccggcgtccagtcccgctc

SEQ ID NO: 54952 - DNA, 80 bp, synthetic construct; identical to SEQ ID NO: 25346
  misc_feature 1..80: note = Artificially Synthesized Probe
  source 1..80: mol_type = other DNA

SEQ ID NO: 54953 - DNA, 80 bp, synthetic construct
  misc_feature 1..80: note = Artificially Synthesized Probe
  source 1..80: mol_type = other DNA
ctatatttcaaacagtgcacttacctttggaatatagatcatgtgaaagctgaggatggcatgggtttgtgttgctagct

SEQ ID NO: 54954 - DNA, 80 bp, synthetic construct
  misc_feature 1..80: note = Artificially Synthesized Probe
  source 1..80: mol_type = other DNA
ctacatgttttctcattgtgaaccatagagaaaaatgctatttgcacagcactcagaagaaagcaaatgaagctactctt

SEQ ID NO: 54955 - DNA, 80 bp, synthetic construct; identical to SEQ ID NO: 25347
  misc_feature 1..80: note = Artificially Synthesized Probe
  source 1..80: mol_type = other DNA

SEQ ID NO: 54956 - DNA, 80 bp, synthetic construct
  misc_feature 1..80: note = Artificially Synthesized Probe
  source 1..80: mol_type = other DNA
caggaaaaaccaaatgaaataataatgtaaaagaaaatgaaaaaggaagatgaagcacagtaagggacaattgccctttt

SEQ ID NO: 54957 - DNA, 80 bp, synthetic construct
  misc_feature 1..80: note = Artificially Synthesized Probe
  source 1..80: mol_type = other DNA
actgttgctttgctgcatttccaagattaaggactattgtacagaaaatgccaatgaaactaacagttaacagttgtaag

SEQ ID NO: 54958 - DNA, 80 bp, synthetic construct
  misc_feature 1..80: note = Artificially Synthesized Probe
  source 1..80: mol_type = other DNA
cacggtagctctgtctctcacagccaggaaatcacatctcaattcacaggacaaatgtatttcatctgacatctgcagga

SEQ ID NO: 54959 - DNA, 80 bp, synthetic construct
  misc_feature 1..80: note = Artificially Synthesized Probe
  source 1..80: mol_type = other DNA
aaacttacttgaatcaccctttcccgacttgattctgtggaggccagcctgggttcccaaatgggaagagtaattagagg

SEQ ID NO: 54960 - DNA, 80 bp, synthetic construct; identical to SEQ ID NO: 25348
  misc_feature 1..80: note = Artificially Synthesized Probe
  source 1..80: mol_type = other DNA

SEQ ID NO: 54961 - DNA, 80 bp, synthetic construct
  misc_feature 1..80: note = Artificially Synthesized Probe
  source 1..80: mol_type = other DNA
cgtttttttatttcagtaaagcatgctaatgactcaagttcatccacagaaattggttccaagggtaagttgaacccatg

SEQ ID NO: 54962 - DNA, 80 bp, synthetic construct
  misc_feature 1..80: note = Artificially Synthesized Probe
  source 1..80: mol_type = other DNA
tagagctttcttgagctgcttattcctctccaaattctctctgaaagtggatgaagaactgctgccatgtctggtgtggg

SEQ ID NO: 54963 - DNA, 80 bp, synthetic construct
  misc_feature 1..80: note = Artificially Synthesized Probe
  source 1..80: mol_type = other DNA
gatttttataaatatataactgtataaatataatgaaatacttatatataatgcattgaatagacagatagagatattta

SEQ ID NO: 54964 - DNA, 80 bp, synthetic construct
  misc_feature 1..80: note = Artificially Synthesized Probe
  source 1..80: mol_type = other DNA
tttgacatgcaactgtacattgtggctttctgagaaaaaaacagtttgtagcatttttcaagttcatgtgtctgcgtgat

SEQ ID NO: 54965 - DNA, 80 bp, synthetic construct; identical to SEQ ID NO: 25349
  misc_feature 1..80: note = Artificially Synthesized Probe
  source 1..80: mol_type = other DNA

SEQ ID NO: 54966 - DNA, 80 bp, synthetic construct
  misc_feature 1..80: note = Artificially Synthesized Probe
  source 1..80: mol_type = other DNA
ttcaaaaaataaacacgaagtatagaagactgtctactgctaaagtccctttgaagatggaagtcttctaatttgccatt

SEQ ID NO: 54967 - DNA, 80 bp, synthetic construct
  misc_feature 1..80: note = Artificially Synthesized Probe
  source 1..80: mol_type = other DNA
tgtctaccacagccttcctcagtgagaatttctgagtgcaggagtgaggaagctgtttttagcagaaacctcgttaaatt

SEQ ID NO: 54968 - DNA, 80 bp, synthetic construct
  misc_feature 1..80: note = Artificially Synthesized Probe
  source 1..80: mol_type = other DNA
agtgctacgctcagtaaaaacatatgagggacaacccatgcttcatggtaagagagaagaggagtctatttaaatggaaa

SEQ ID NO: 54969 - DNA, 80 bp, synthetic construct; identical to SEQ ID NO: 25350
  misc_feature 1..80: note = Artificially Synthesized Probe
  source 1..80: mol_type = other DNA

SEQ ID NO: 54970 - DNA, 80 bp, synthetic construct
  misc_feature 1..80: note = Artificially Synthesized Probe
  source 1..80: mol_type = other DNA
attatttccttaaaaaaattaaattctgccgggcactgcagatattctgctcaggactgttattccaggtacttaagagg

SEQ ID NO: 54971 - DNA, 80 bp, synthetic construct
  misc_feature 1..80: note = Artificially Synthesized Probe
  source 1..80: mol_type = other DNA
tatatctctggaggaagtaatttgtacttcactctacagacttcaggcagtaacaggctcataaaattagatctctctgt

SEQ ID NO: 54972 - DNA, 80 bp, synthetic construct
  misc_feature 1..80: note = Artificially Synthesized Probe
  source 1..80: mol_type = other DNA
ttctacctctgaagcattatcccatccttctgacaaacatgagtagatgttttcccctcacagtcttgccaaaaagcact

SEQ ID NO: 54973 - DNA, 80 bp, synthetic construct; identical to SEQ ID NO: 25351
  misc_feature 1..80: note = Artificially Synthesized Probe
  source 1..80: mol_type = other DNA

SEQ ID NO: 54974 - DNA, 80 bp, synthetic construct
  misc_feature 1..80: note = Artificially Synthesized Probe
  source 1..80: mol_type = other DNA
tgctggagtgcagaggcgcgatctcagctcactgcaacctctgcctcctgggttcaagcgattctcctgcctcagcctcc

SEQ ID NO: 54975 - DNA, 80 bp, synthetic construct
  misc_feature 1..80: note = Artificially Synthesized Probe
  source 1..80: mol_type = other DNA
ccaccgggcccagcccgcaatgcacctttttaaatcctccaagaaaaccctaaaggacctcacttggtcacctcttaaaa

SEQ ID NO: 54976 - DNA, 80 bp, synthetic construct
  misc_feature 1..80: note = Artificially Synthesized Probe
  source 1..80: mol_type = other DNA
cattgaggataccttgggaaaatgcattccagcttcctagcacctgggattactcatttgaaatataatctgttcgtaag

SEQ ID NO: 54977 - DNA, 80 bp, synthetic construct; identical to SEQ ID NO: 25352
  misc_feature 1..80: note = Artificially Synthesized Probe
  source 1..80: mol_type = other DNA

SEQ ID NO: 54978 - DNA, 80 bp, synthetic construct
  misc_feature 1..80: note = Artificially Synthesized Probe
  source 1..80: mol_type = other DNA
cctgctctactggttgtatttgtacatgtttacagtggtagaaattacattcttgcagagttcatcactgtattgagttg

SEQ ID NO: 54979 - DNA, 80 bp, synthetic construct
  misc_feature 1..80: note = Artificially Synthesized Probe
  source 1..80: mol_type = other DNA
agagtggatgaaaatatatgttgttgtgaggacatgaaaattcttgatgcgctgtcctaagacttttcacctgaagtagt

SEQ ID NO: 54980 - DNA, 80 bp, synthetic construct
  misc_feature 1..80: note = Artificially Synthesized Probe
  source 1..80: mol_type = other DNA
attaaagtattgtactattattttgtgtcaagcactatatttgggtctttgaaaactagtctaattgtctaatacatttt

SEQ ID NO: 54981 - DNA, 80 bp, synthetic construct; identical to SEQ ID NO: 25353
  misc_feature 1..80: note = Artificially Synthesized Probe
  source 1..80: mol_type = other DNA

SEQ ID NO: 54982 - DNA, 80 bp, synthetic construct
  misc_feature 1..80: note = Artificially Synthesized Probe
  source 1..80: mol_type = other DNA
gcaatatattttccctcaaaacacattgcttaaatgctgttagtaaatgttatttaaatttaaaaaaaggcaggaggtat

SEQ ID NO: 54983 - DNA, 80 bp, synthetic construct
  misc_feature 1..80: note = Artificially Synthesized Probe
  source 1..80: mol_type = other DNA
aagactagggagtccgggagatcttgctgaaagtgagttacttgctctaataaaggatggactcttgaaaaaatcctgtt

SEQ ID NO: 54984 - DNA, 80 bp, synthetic construct
  misc_feature 1..80: note = Artificially Synthesized Probe
  source 1..80: mol_type = other DNA
aatttgatacttgcagtaactagctatttaagcaagataggtatcagtcctctttagcgaagttcagtggaaccaatgga

SEQ ID NO: 54985 - DNA, 80 bp, synthetic construct
  misc_feature 1..80: note = Artificially Synthesized Probe
  source 1..80: mol_type = other DNA
catcattaccatttcctacacaagcgtgccatgtgctcttagcctggtaaaatataagattattattccaggctgcacag

SEQ ID NO: 54986 - DNA, 80 bp, synthetic construct
  misc_feature 1..80: note = Artificially Synthesized Probe
  source 1..80: mol_type = other DNA
tcaaggaattgctcaattattacatagtaactaatgggcaatttgacaggaagcatatattctaagactatagagttagg

SEQ ID NO: 54987 - DNA, 80 bp, synthetic construct; identical to SEQ ID NO: 25354
  misc_feature 1..80: note = Artificially Synthesized Probe
  source 1..80: mol_type = other DNA

SEQ ID NO: 54988 - DNA, 80 bp, synthetic construct
  misc_feature 1..80: note = Artificially Synthesized Probe
  source 1..80: mol_type = other DNA
atagaacctgactggggaagagaaagagacagtcatccttcatttagaaccaaccctttatgctttccacataattttta

SEQ ID NO: 54989 - DNA, 80 bp, synthetic construct
  misc_feature 1..80: note = Artificially Synthesized Probe
  source 1..80: mol_type = other DNA
ttgttttgtctttactttcctgtttgttttgactgggtgagctaatcttttgaaagcgctaagcaagggaagatttggtt

SEQ ID NO: 54990 - DNA, 80 bp, synthetic construct; identical to SEQ ID NO: 25355
  misc_feature 1..80: note = Artificially Synthesized Probe
  source 1..80: mol_type = other DNA

SEQ ID NO: 54991 - DNA, 80 bp, synthetic construct
  misc_feature 1..80: note = Artificially Synthesized Probe
  source 1..80: mol_type = other DNA
tacatgtagttagcccttgtaatagaggagagagaagacttccaaggagacagaccactggaggaactttcagtgaaaga

SEQ ID NO: 54992 - DNA, 80 bp, synthetic construct
  misc_feature 1..80: note = Artificially Synthesized Probe
  source 1..80: mol_type = other DNA
aaatgtttatttatttaactattttttgcaggccaactccacaggttgattggaacaaaattggtggtgacttaccaaag

SEQ ID NO: 54993 - DNA, 80 bp, synthetic construct
  misc_feature 1..80: note = Artificially Synthesized Probe
  source 1..80: mol_type = other DNA
cacgttatagtagaaggtacctttcccatgttggtctatttctctgcttttcaaaaaagtaactgtatacatgtagtagg

SEQ ID NO: 54994 - DNA, 80 bp, synthetic construct
  misc_feature 1..80: note = Artificially Synthesized Probe
  source 1..80: mol_type = other DNA
gattaaacacagacagtttacatgatttattcaaatagtcattaaagctagtctcctaaattatttttattgtaatacac

SEQ ID NO: 54995 - DNA, 80 bp, synthetic construct; identical to SEQ ID NO: 25206
  misc_feature 1..80: note = Artificially Synthesized Probe
  source 1..80: mol_type = other DNA

SEQ ID NO: 54996 - DNA, 80 bp, synthetic construct; identical to SEQ ID NO: 25356
  misc_feature 1..80: note = Artificially Synthesized Probe
  source 1..80: mol_type = other DNA

SEQ ID NO: 54997 - DNA, 80 bp, synthetic construct
  misc_feature 1..80: note = Artificially Synthesized Probe
  source 1..80: mol_type = other DNA
taggcaaagatgataccatttaaatgtggaatgtagttattagtgctgtgactggctgatgtgaagtttgtctagtcctc

SEQ ID NO: 54998 - DNA, 80 bp, synthetic construct
  misc_feature 1..80: note = Artificially Synthesized Probe
  source 1..80: mol_type = other DNA
gtgcagtgtaagcttagctactgaaaggaattattctttttagactacaatttagtgaactagtgctctaggcacccatt

SEQ ID NO: 54999 - DNA, 80 bp, synthetic construct
  misc_feature 1..80: note = Artificially Synthesized Probe
  source 1..80: mol_type = other DNA
aataacactgcatttccaagccttctccataatgcatattattatttaaggtaggaagaatagaaaaccgaagttgagaa

SEQ ID NO: 55000 - DNA, 80 bp, synthetic construct; identical to SEQ ID NO: 25357
  misc_feature 1..80: note = Artificially Synthesized Probe
  source 1..80: mol_type = other DNA

SEQ ID NO: 55001 - DNA, 80 bp, synthetic construct
  misc_feature 1..80: note = Artificially Synthesized Probe
  source 1..80: mol_type = other DNA
ttgcaagggttgcaaaaaacgaaatcaaagatgtaacattaattatgcaatttaaaatgttgactataggactccaaagg

SEQ ID NO: 55002 - DNA, 80 bp, synthetic construct
  misc_feature 1..80: note = Artificially Synthesized Probe
  source 1..80: mol_type = other DNA
cctatacacatgaaaaacaaattgagcttaagaagtctttacttttttttctaaagtgtggaggtaataaataaaaactt

SEQ ID NO: 55003 - DNA, 80 bp, synthetic construct; identical to SEQ ID NO: 25358
  misc_feature 1..80: note = Artificially Synthesized Probe
  source 1..80: mol_type = other DNA

SEQ ID NO: 55004 - DNA, 80 bp, synthetic construct
  misc_feature 1..80: note = Artificially Synthesized Probe
  source 1..80: mol_type = other DNA
atatgattaattacacattcaataaaaagagatatattatagtgacatctaaaacagtctacatccagaaatcaaaatat

SEQ ID NO: 55005 - DNA, 80 bp, synthetic construct
  misc_feature 1..80: note = Artificially Synthesized Probe
  source 1..80: mol_type = other DNA
tgcattttcaaaggttgtcataaaatcaaatgcaactcagtcattaatatacttgagaaatccttgttttcaaataacaa

SEQ ID NO: 55006 - DNA, 80 bp, synthetic construct
  misc_feature 1..80: note = Artificially Synthesized Probe
  source 1..80: mol_type = other DNA
ttttttcctagtgataaacatctctatttagcttgcttaatatatagtcccaatgttcagacatttgcatctgtttccag

SEQ ID NO: 55007 - DNA, 80 bp, synthetic construct
  misc_feature 1..80: note = Artificially Synthesized Probe
  source 1..80: mol_type = other DNA
tgctttagccatttaccatttcctatactctatgtatgtcctttgtctgcttttacactaccataaagcctgcttcaact

SEQ ID NO: 55008 - DNA, 80 bp, synthetic construct
  misc_feature 1..80: note = Artificially Synthesized Probe
  source 1..80: mol_type = other DNA
gggtttctatgaggatggtatttttcctcagaatttttggttttaaggctcaagaagcagctgtttctgagcagaacaag

SEQ ID NO: 55009 - DNA, 80 bp, synthetic construct; identical to SEQ ID NO: 25359
  misc_feature 1..80: note = Artificially Synthesized Probe
  source 1..80: mol_type = other DNA

SEQ ID NO: 55010 - DNA, 80 bp, synthetic construct
  misc_feature 1..80: note = Artificially Synthesized Probe
  source 1..80: mol_type = other DNA
tctccaaagctcagccctctgtctgtaagatgaaaggattggatgacgtgataatttggaacctctttcagtaatactaa

SEQ ID NO: 55011 - DNA, 80 bp, synthetic construct
  misc_feature 1..80: note = Artificially Synthesized Probe
  source 1..80: mol_type = other DNA
gttcatggaatatttttctctaacttacagatatttagttttatattggttgtattaaaataaccagaaaaaaagtaagg

SEQ ID NO: 55012 - DNA, 80 bp, synthetic construct; identical to SEQ ID NO: 25360
  misc_feature 1..80: note = Artificially Synthesized Probe
  source 1..80: mol_type = other DNA

SEQ ID NO: 55013 - DNA, 80 bp, synthetic construct
  misc_feature 1..80: note = Artificially Synthesized Probe
  source 1..80: mol_type = other DNA
ggggaaataaccaaactacacttgatgggagttgctacctgcaggttttgtgcaattttctctgaaatcaaattatccaa

SEQ ID NO: 55014 - DNA, 80 bp, synthetic construct
  misc_feature 1..80: note = Artificially Synthesized Probe
  source 1..80: mol_type = other DNA
aaagatacaggtaattttaaggtatattttgctgcattgttttgactgcagaaagctaaacactgcttttgggcttctct

SEQ ID NO: 55015 - DNA, 80 bp, synthetic construct
  misc_feature 1..80: note = Artificially Synthesized Probe
  source 1..80: mol_type = other DNA
ttttagatgccatgctgcagcttgaaaataacctgtagtgagctctaaataaactcaccatctgcttattcttccctcat

SEQ ID NO: 55016 - DNA, 80 bp, synthetic construct
  misc_feature 1..80: note = Artificially Synthesized Probe
  source 1..80: mol_type = other DNA
actcttctccactaagatctacatgtcaccgctaaaatcccctttcttgcttgtcactttgaccatgatgtcacttactt

SEQ ID NO: 55017 - DNA, 80 bp, synthetic construct
  misc_feature 1..80: note = Artificially Synthesized Probe
  source 1..80: mol_type = other DNA
tgctttgcagagcaagtttaccaaaaagagctactatgaaaccctttgtggtgtctgccctctgctggtgcaaagtagaa

SEQ ID NO: 55018 - DNA, 80 bp, synthetic construct; identical to SEQ ID NO: 25361
  misc_feature 1..80: note = Artificially Synthesized Probe
  source 1..80: mol_type = other DNA

SEQ ID NO: 55019 - DNA, 80 bp, synthetic construct
  misc_feature 1..80: note = Artificially Synthesized Probe
  source 1..80: mol_type = other DNA
tttatactgcctgtgccctcttataaattatatataagaataaagatttttaatttttaaaaagaaaattgaatgagaaa

SEQ ID NO: 55020 - DNA, 80 bp, synthetic construct
  misc_feature 1..80: note = Artificially Synthesized Probe
  source 1..80: mol_type = other DNA
tctgatcaccctctggtcccgcttgtctccatgatttgaaagcatcctcagggaaaaggaggcatcccaagtctgaacat

SEQ ID NO: 55021 - DNA, 80 bp, synthetic construct
  misc_feature 1..80: note = Artificially Synthesized Probe
  source 1..80: mol_type = other DNA
gagctccaaggagtccccaaatcttccactggaacctagagctcagattattttggatgtccttgttcaggaagaaggat

SEQ ID NO: 55022 - DNA, 80 bp, synthetic construct; identical to SEQ ID NO: 25362
  misc_feature 1..80: note = Artificially Synthesized Probe
  source 1..80: mol_type = other DNA

SEQ ID NO: 55023 - DNA, 80 bp, synthetic construct
  misc_feature 1..80: note = Artificially Synthesized Probe
  source 1..80: mol_type = other DNA
tgcgtgacggggagtatcactgaccctcttcaaacccatttcttcatcagtaaattgggataaaaataacactgactcac

SEQ ID NO: 55024 - DNA, 80 bp, synthetic construct
  misc_feature 1..80: note = Artificially Synthesized Probe
  source 1..80: mol_type = other DNA
ggatttttctcttcatctctttagggaacagaataaaaaatgaaaaataataatgaggttttgggtagacgaagggaaat

SEQ ID NO: 55025 - DNA, 80 bp, synthetic construct
  misc_feature 1..80: note = Artificially Synthesized Probe
  source 1..80: mol_type = other DNA
aggtgctattattcatatttaactgattcgttcattcaataatatttatggggtactttctatgttcccggcactggact

SEQ ID NO: 55026 - DNA, 80 bp, synthetic construct; identical to SEQ ID NO: 25363
  misc_feature 1..80: note = Artificially Synthesized Probe
  source 1..80: mol_type = other DNA

SEQ ID NO: 55027 - DNA, 80 bp, synthetic construct; identical to SEQ ID NO: 25207
  misc_feature 1..80: note = Artificially Synthesized Probe
  source 1..80: mol_type = other DNA

SEQ ID NO: 55028 - DNA, 80 bp, synthetic construct
  misc_feature 1..80: note = Artificially Synthesized Probe
  source 1..80: mol_type = other DNA
ccttgggattttgagaatacactaggcagctcttggagaattttaagcagaagagtgacacaatctaatttacattttta

SEQ ID NO: 55029 - DNA, 80 bp, synthetic construct
  misc_feature 1..80: note = Artificially Synthesized Probe
  source 1..80: mol_type = other DNA
tttattttgaaattgagccaataggtttgttaatggatgaggaggtcaaggctgaaaataaacttatgcgagaccacaca

SEQ ID NO: 55030 - DNA, 80 bp, synthetic construct
  misc_feature 1..80: note = Artificially Synthesized Probe
  source 1..80: mol_type = other DNA
aggctgggatatttgatgacagagtgttggctagaggatttgaaacctctttaagcttattttagttttagaggttatat

SEQ ID NO: 55031 - DNA, 80 bp, synthetic construct; identical to SEQ ID NO: 25364
  misc_feature 1..80: note = Artificially Synthesized Probe
  source 1..80: mol_type = other DNA

SEQ ID NO: 55032 - DNA, 80 bp, synthetic construct
  misc_feature 1..80: note = Artificially Synthesized Probe
  source 1..80: mol_type = other DNA
ctgggagcttctgttagcctttgtcaatacacaacaatttccatacccatgccaacaggcagatttaagcaatgtttaat

SEQ ID NO: 55033 - DNA, 80 bp, synthetic construct
  misc_feature 1..80: note = Artificially Synthesized Probe
  source 1..80: mol_type = other DNA
agtgggattagagactcagtgctttgcagcattcctaaagagtttagcctttaaaaacttggaagagctactcatcttgc

SEQ ID NO: 55034 - DNA, 80 bp, synthetic construct; identical to SEQ ID NO: 25365
  misc_feature 1..80: note = Artificially Synthesized Probe
  source 1..80: mol_type = other DNA

SEQ ID NO: 55035 - DNA, 80 bp, synthetic construct
  misc_feature 1..80: note = Artificially Synthesized Probe
  source 1..80: mol_type = other DNA
tttgtgattacattgagcccacttgggtcatccagatgtaggaaataattttcctacctcaatgtccttaatcttaatca

SEQ ID NO: 55036 - DNA, 80 bp, synthetic construct
  misc_feature 1..80: note = Artificially Synthesized Probe
  source 1..80: mol_type = other DNA
gttacccaacctaacattttaagtcattccaataagtatttactggctggattttctctggtagctgctctttgggcagt

SEQ ID NO: 55037 - DNA, 80 bp, synthetic construct
  misc_feature 1..80: note = Artificially Synthesized Probe
  source 1..80: mol_type = other DNA
gtcattatctcgtataatggagagacaatcagaaaagtagaattcgattgattattaatcttgtaatgtcctttaaacta

SEQ ID NO: 55038 - DNA, 80 bp, synthetic construct
  misc_feature 1..80: note = Artificially Synthesized Probe
  source 1..80: mol_type = other DNA
gatatagataaagatatacacatacatagtatcatagcaagggcagggcttttagagtcagaaaagtggccaaatgttgt

SEQ ID NO: 55039 - DNA, 80 bp, synthetic construct
  misc_feature 1..80: note = Artificially Synthesized Probe
  source 1..80: mol_type = other DNA
gcaaacaatgaaaagtaagagcaaacgttactatgatgaaagcaacttgaagtcattgcattttaggtagatatttgtgc

SEQ ID NO: 55040 - DNA, 80 bp, synthetic construct; identical to SEQ ID NO: 25366
  misc_feature 1..80: note = Artificially Synthesized Probe
  source 1..80: mol_type = other DNA

SEQ ID NO: 55041 - DNA, 80 bp, synthetic construct
  misc_feature 1..80: note = Artificially Synthesized Probe
  source 1..80: mol_type = other DNA
cctgacttcaagtgatccatctgcctcagcctcccaaagtgctgggattacaggtatgagccaccatgcccagcctcatg

SEQ ID NO: 55042 - DNA, 80 bp, synthetic construct
  misc_feature 1..80: note = Artificially Synthesized Probe
  source 1..80: mol_type = other DNA
aaatagtgaagcaaggcaaatgaaatcaatggtgcagatcagaaaactgtagagaggcagagaactgaaacgggaacaaa

SEQ ID NO: 55043 - DNA, 80 bp, synthetic construct
  misc_feature 1..80: note = Artificially Synthesized Probe
  source 1..80: mol_type = other DNA
gtgccatgagtataggtatggaaattctgggaggtccagatgagcagatattttgttgctaaatattaacttgaaagata

SEQ ID NO: 55044 - DNA, 80 bp, synthetic construct; identical to SEQ ID NO: 25367
  misc_feature 1..80: note = Artificially Synthesized Probe
  source 1..80: mol_type = other DNA

SEQ ID NO: 55045 - DNA, 80 bp, synthetic construct
  misc_feature 1..80: note = Artificially Synthesized Probe
  source 1..80: mol_type = other DNA
tcagaagtgtattaactcttgacacataatatatggagggaaaaatcaaactacttttcaccatacatttgagttttaga

SEQ ID NO: 55046 - DNA, 80 bp, synthetic construct
  misc_feature 1..80: note = Artificially Synthesized Probe
  source 1..80: mol_type = other DNA
tatcccgccccccctccccccaccccacaacagtccccagagtgtgatgttccccttcctgtgtccatgtgatctcattg

SEQ ID NO: 55047 - DNA, 80 bp, synthetic construct; identical to SEQ ID NO: 25368
  misc_feature 1..80: note = Artificially Synthesized Probe
  source 1..80: mol_type = other DNA

SEQ ID NO: 55048 - DNA, 80 bp, synthetic construct
  misc_feature 1..80: note = Artificially Synthesized Probe
  source 1..80: mol_type = other DNA
aagaattgaaaaataattcacagagaattgattcccatgatgcgttcacctatgtcctgctcagaacacatctaggatca

SEQ ID NO: 55049 - DNA, 80 bp, synthetic construct
  misc_feature 1..80: note = Artificially Synthesized Probe
  source 1..80: mol_type = other DNA
acaaaaatcaattcaagatggattaaagacttaaacgttagacctaaaaccataaaaaccctagaagaaaacctaggcat

SEQ ID NO: 55050 - DNA, 80 bp, synthetic construct
  misc_feature 1..80: note = Artificially Synthesized Probe
  source 1..80: mol_type = other DNA
gagaaaatttttgcaacctactcatctgacaaagggctaatatccagaatctacaatgaactcaaacaaatttacaagaa

SEQ ID NO: 55051 - DNA, 80 bp, synthetic construct
  misc_feature 1..80: note = Artificially Synthesized Probe
  source 1..80: mol_type = other DNA
ttttcaaatagatgtccgtccattgatacaaaccaaagatggagaaaattacgctacagtggttgggtacagtgctttct

SEQ ID NO: 55052 - DNA, 80 bp, synthetic construct; identical to SEQ ID NO: 25369
  misc_feature 1..80: note = Artificially Synthesized Probe
  source 1..80: mol_type = other DNA

SEQ ID NO: 55053 - DNA, 80 bp, synthetic construct
  misc_feature 1..80: note = Artificially Synthesized Probe
  source 1..80: mol_type = other DNA
gtagttttggtttttcattatgaggtaccacaaggtcatgttttactctattgttgttgttttgggattatctaaatgat

SEQ ID NO: 55054 - DNA, 80 bp, synthetic construct
  misc_feature 1..80: note = Artificially Synthesized Probe
  source 1..80: mol_type = other DNA
gttcttgaataattttgtcattggtctgtagggcagtgtgagatgagtgaccccaggtcataaatttatagggtcagata

SEQ ID NO: 55055 - DNA, 80 bp, synthetic construct
  misc_feature 1..80: note = Artificially Synthesized Probe
  source 1..80: mol_type = other DNA
cagcctagtccctgtcctgtatgatcctacatggaccgcatccacagcttatccttaaaaaaaaaaaagaaactcaagca

SEQ ID NO: 55056 - DNA, 80 bp, synthetic construct; identical to SEQ ID NO: 25370
  misc_feature 1..80: note = Artificially Synthesized Probe
  source 1..80: mol_type = other DNA

SEQ ID NO: 55057 - DNA, 80 bp, synthetic construct
  misc_feature 1..80: note = Artificially Synthesized Probe
  source 1..80: mol_type = other DNA
tatacaatcttggtccattttgagaaaaatatgaaacccactggaacatttcatgaggttttctgagctattgaaagggg

SEQ ID NO: 55058 - DNA, 80 bp, synthetic construct
  misc_feature 1..80: note = Artificially Synthesized Probe
  source 1..80: mol_type = other DNA
tcaacagaaccaccgaagaagatgctgggtcttactcatgttgggtagaaaatgctataggaaaaactgcagtcacagcc

SEQ ID NO: 55059 - DNA, 80 bp, synthetic construct
  misc_feature 1..80: note = Artificially Synthesized Probe
  source 1..80: mol_type = other DNA
atctaaaagattattgcaagaactacagggtatgcccatgatatgtgcacagcttcatcctattttaagaggcagccagg

SEQ ID NO: 55060 - DNA, 80 bp, synthetic construct
  misc_feature 1..80: note = Artificially Synthesized Probe
  source 1..80: mol_type = other DNA
ccaagatgaaatagatagactttctggcctgaagttgcttactgttaccactgaatatatgcccataaaatattaaaata

SEQ ID NO: 55061 - DNA, 80 bp, synthetic construct
  misc_feature 1..80: note = Artificially Synthesized Probe
  source 1..80: mol_type = other DNA
tgactgaggcatgacagaatgaggagggtttttgatcctctttttgagtcataaacagctttgtattattccttctcact

SEQ ID NO: 55062 - DNA, 80 bp, synthetic construct; identical to SEQ ID NO: 25371
  misc_feature 1..80: note = Artificially Synthesized Probe
  source 1..80: mol_type = other DNA

SEQ ID NO: 55063 - DNA, 80 bp, synthetic construct
  misc_feature 1..80: note = Artificially Synthesized Probe
  source 1..80: mol_type = other DNA
tatagcatttgtctctttctgtgccctgagtaaatcagtgtgccagccccacagactatatttttaaagcactcaaatac

SEQ ID NO: 55064 - DNA, 80 bp, synthetic construct
  misc_feature 1..80: note = Artificially Synthesized Probe
  source 1..80: mol_type = other DNA
taaacctatatcaaggttaagcaactcagctaggtgtaaggagcgtgaagcctcgaatccaaatggaactttgcactcct

SEQ ID NO: 55065 - DNA, 80 bp, synthetic construct; identical to SEQ ID NO: 25372
  misc_feature 1..80: note = Artificially Synthesized Probe
  source 1..80: mol_type = other DNA

SEQ ID NO: 55066 - DNA, 80 bp, synthetic construct
  misc_feature 1..80: note = Artificially Synthesized Probe
  source 1..80: mol_type = other DNA
tcccgggacgcccacgtggcttcgaattccagctccaccatcactgtgatgcgtcactctggactaggcatttaactacg

SEQ ID NO: 55067 - DNA, 80 bp, synthetic construct
  misc_feature 1..80: note = Artificially Synthesized Probe
  source 1..80: mol_type = other DNA
ataaagttgttataattataaaatgccacaatgaatatgcattacttagcagagccctgatagagaagtgtttattaaat

SEQ ID NO: 55068 - DNA, 80 bp, synthetic construct
  misc_feature 1..80: note = Artificially Synthesized Probe
  source 1..80: mol_type = other DNA
cttgagaaaaatgtacatagccaatatcagagtataattatagaattggaggtcagcttgtgcagttggtctctgggagg

SEQ ID NO: 55069 - DNA, 80 bp, synthetic construct
  misc_feature 1..80: note = Artificially Synthesized Probe
  source 1..80: mol_type = other DNA
tatttttgtttcaaactatcactccctgtaattcattcaaaaggagacttaacactatgtattgaatgcctacggtgtac

SEQ ID NO: 55070 - DNA, 80 bp, synthetic construct
  misc_feature 1..80: note = Artificially Synthesized Probe
  source 1..80: mol_type = other DNA
cctaacagaaaatcaaatatctttcccttttcctttacagtgctttgattatatatccagaagcacttgaaggagaaatt

SEQ ID NO: 55071 - DNA, 80 bp, synthetic construct; identical to SEQ ID NO: 25373
  misc_feature 1..80: note = Artificially Synthesized Probe
  source 1..80: mol_type = other DNA

SEQ ID NO: 55072 - DNA, 80 bp, synthetic construct
  misc_feature 1..80: note = Artificially Synthesized Probe
  source 1..80: mol_type = other DNA
tccagcttgtgcactgttaaaagtcattaggaaagaggtagaatttggaaagcaaagaagagattgcattgcaaagaaga

SEQ ID NO: 55073 - DNA, 80 bp, synthetic construct
  misc_feature 1..80: note = Artificially Synthesized Probe
  source 1..80: mol_type = other DNA
cacagtttgaagttgtcctggagtaaagatggagaagcctttgaaattaatggcacagaagatggcaggtaggtaaacta

SEQ ID NO: 55074 - DNA, 80 bp, synthetic construct
  misc_feature 1..80: note = Artificially Synthesized Probe
  source 1..80: mol_type = other DNA
atcacttgaggtcaggagttcgagactagcctgaccaacacggtgaaaccccgtctccactaaaaatacaaaaattagcc

SEQ ID NO: 55075 - DNA, 80 bp, synthetic construct
  misc_feature 1..80: note = Artificially Synthesized Probe
  source 1..80: mol_type = other DNA
tcttaaagcattcatacagaaacaaaaacaaaaactgagtaatatttctgtcttcaagtcacttcactctgctatcatat

SEQ ID NO: 55076 - DNA, 80 bp, synthetic construct; identical to SEQ ID NO: 25374
  misc_feature 1..80: note = Artificially Synthesized Probe
  source 1..80: mol_type = other DNA

SEQ ID NO: 55077 - DNA, 80 bp, synthetic construct
  misc_feature 1..80: note = Artificially Synthesized Probe
  source 1..80: mol_type = other DNA
ttcaatctcacatgagtttatttaactcactagcaaaacctaaatcatatctgggattcttcctgccagagagtactgag

SEQ ID NO: 55078 - DNA, 80 bp, synthetic construct
  misc_feature 1..80: note = Artificially Synthesized Probe
  source 1..80: mol_type = other DNA
ttgaaaatatgagaaagtcagcttcgcgtccttttgcattgttactaagtaagggttaaaacttaaccatcttggagcca

SEQ ID NO: 55079 - DNA, 80 bp, synthetic construct; identical to SEQ ID NO: 25375
  misc_feature 1..80: note = Artificially Synthesized Probe
  source 1..80: mol_type = other DNA

SEQ ID NO: 55080 - DNA, 80 bp, synthetic construct
  misc_feature 1..80: note = Artificially Synthesized Probe
  source 1..80: mol_type = other DNA
tgtactgctaatttcttcatttttttccttatgacaaatttctttttttaatttttgtttttctttacatcttcattaaa

SEQ ID NO: 55081 - DNA, 80 bp, synthetic construct
  misc_feature 1..80: note = Artificially Synthesized Probe
  source 1..80: mol_type = other DNA
ttctcattgttcttctcccacatgtttgctgatgatgatggcttccagcttcatccatgtccctgaaaaggacatgatct

SEQ ID NO: 55082 - DNA, 80 bp, synthetic construct
  misc_feature 1..80: note = Artificially Synthesized Probe
  source 1..80: mol_type = other DNA
tatatattctgttgggtatataccaagtaatgtgattgctgggtcaaatggtatttctggttctagatccttgaggaatc

SEQ ID NO: 55083 - DNA, 80 bp, synthetic construct
  misc_feature 1..80: note = Artificially Synthesized Probe
  source 1..80: mol_type = other DNA
ttgcatctctctgatgatcggtcatgttgagctttttttcatatgtttgttggccatgtaaatgtcttcttttgagaagt

SEQ ID NO: 55084 - DNA, 80 bp, synthetic construct; identical to SEQ ID NO: 25208
  misc_feature 1..80: note = Artificially Synthesized Probe
  source 1..80: mol_type = other DNA

SEQ ID NO: 55085 - DNA, 80 bp, synthetic construct; identical to SEQ ID NO: 25376
  misc_feature 1..80: note = Artificially Synthesized Probe
  source 1..80: mol_type = other DNA

SEQ ID NO: 55086 - DNA, 80 bp, synthetic construct
  misc_feature 1..80: note = Artificially Synthesized Probe
  source 1..80: mol_type = other DNA
acatggctagccagttttcccagcaccatttgttgaataggagatcctttccccagcgcttcgatttgtcagttttgtca

SEQ ID NO: 55087 - DNA, 80 bp, synthetic construct
  misc_feature 1..80: note = Artificially Synthesized Probe
  source 1..80: mol_type = other DNA
ttttgcttaggattgttttgtctatatggggtcttctttgattccatatgaaatttaaagtagttttttttctaattctg

SEQ ID NO: 55088 - DNA, 80 bp, synthetic construct; identical to SEQ ID NO: 25377
  misc_feature 1..80: note = Artificially Synthesized Probe
  source 1..80: mol_type = other DNA

SEQ ID NO: 55089 - DNA, 80 bp, synthetic construct
  misc_feature 1..80: note = Artificially Synthesized Probe
  source 1..80: mol_type = other DNA
aatcatgtcatctgcaaacagacaatttgacttcctctcttcctatatgaataccctttatttttttcttttgcctgatg

SEQ ID NO: 55090 - DNA, 80 bp, synthetic construct
  misc_feature 1..80: note = Artificially Synthesized Probe
  source 1..80: mol_type = other DNA
ttccatcaataactagttaattgacagtttttaacatgaaggaatgatgaattttatcaaaggccttttctgcatctatt

SEQ ID NO: 55091 - DNA, 80 bp, synthetic construct
  misc_feature 1..80: note = Artificially Synthesized Probe
  source 1..80: mol_type = other DNA
tattgaggatttttgcatcaatgttcatcagtgatgttggcctgaatgttcctttttttgtgtgtctcttcctggttttg

SEQ ID NO: 55092 - DNA, 80 bp, synthetic construct; identical to SEQ ID NO: 25378
  misc_feature 1..80: note = Artificially Synthesized Probe
  source 1..80: mol_type = other DNA

SEQ ID NO: 55093 - DNA, 80 bp, synthetic construct
  misc_feature 1..80: note = Artificially Synthesized Probe
  source 1..80: mol_type = other DNA
ttcttctttatcagtctagctagtcatctatctattttgttaattttttcaaaaaaaaaaaaccagctcctggattcatt

SEQ ID NO: 55094 - DNA, 80 bp, synthetic construct
  misc_feature 1..80: note = Artificially Synthesized Probe
  source 1..80: mol_type = other DNA
ctgatgtgggcatttagtgctataaatttccctcttaacactgctttagctgtgtcccacagactctgatacattgtgtc

SEQ ID NO: 55095 - DNA, 80 bp, synthetic construct
  misc_feature 1..80: note = Artificially Synthesized Probe
  source 1..80: mol_type = other DNA
aagaaattagctgatcccagcagaaaaacagagctccttccttacttttcagctgcgttaatttcttctctacgtttcag

SEQ ID NO: 55096 - DNA, 80 bp, synthetic construct
  misc_feature 1..80: note = Artificially Synthesized Probe
  source 1..80: mol_type = other DNA
cggtttgttataatttacggttttttgtatttgctgaggagtgttttacttcaaattatgtggtgggttttagaataagg

SEQ ID NO: 55097 - DNA, 80 bp, synthetic construct; identical to SEQ ID NO: 25379
  misc_feature 1..80: note = Artificially Synthesized Probe
  source 1..80: mol_type = other DNA

SEQ ID NO: 55098 - DNA, 80 bp, synthetic construct
  misc_feature 1..80: note = Artificially Synthesized Probe
  source 1..80: mol_type = other DNA
catttgcttggtaaattttcctccatccctttattttgaatctatgtgtgtctttgcatgtgagatgggtctcctgaata

SEQ ID NO: 55099 - DNA, 80 bp, synthetic construct
  misc_feature 1..80: note = Artificially Synthesized Probe
  source 1..80: mol_type = other DNA
ttcttcatcatgtcattggtctttatattttggtgtgtttttgcatgactggttctggtttttcctttccatatttagtg

SEQ ID NO: 55100 - DNA, 80 bp, synthetic construct
  misc_feature 1..80: note = Artificially Synthesized Probe
  source 1..80: mol_type = other DNA
ttggcctccactctcttctggcttgtagagtttcttctgagaggtccaccgttagtctgatgggtttccctttgtaggtg

SEQ ID NO: 55101 - DNA, 80 bp, synthetic construct; identical to SEQ ID NO: 25380
  misc_feature 1..80: note = Artificially Synthesized Probe
  source 1..80: mol_type = other DNA

SEQ ID NO: 55102 - DNA, 80 bp, synthetic construct
  misc_feature 1..80: note = Artificially Synthesized Probe
  source 1..80: mol_type = other DNA
tacttgtgtatgcttcatgaagttctcctgctgtgtttttcagctccatcaggtcatttatattcctctctgaaatggtt

SEQ ID NO: 55103 - DNA, 80 bp, synthetic construct
  misc_feature 1..80: note = Artificially Synthesized Probe
  source 1..80: mol_type = other DNA
ttggtggagagacattgtgatcactgggaggagaggggtttttagcattttttttgttgattctttctcatcttcataaa

SEQ ID NO: 55104 - DNA, 80 bp, synthetic construct
  misc_feature 1..80: note = Artificially Synthesized Probe
  source 1..80: mol_type = other DNA
gtccacttcagtccctattcatctggttcacgcctatgcctggagatgtcactcaaggaggctggagaacagccaagatg

SEQ ID NO: 55105 - DNA, 80 bp, synthetic construct
  misc_feature 1..80: note = Artificially Synthesized Probe
  source 1..80: mol_type = other DNA
tggtggaggggatgtgcttcactagggggaaaccgacttgtctgggctgcctggattcctcagaactaccaggaggagac

SEQ ID NO: 55106 - DNA, 80 bp, synthetic construct
  misc_feature 1..80: note = Artificially Synthesized Probe
  source 1..80: mol_type = other DNA
ttttaactcttgtattcatgtaaccttcctacatttttcaagtgaaaatatttcctacattttttaagagacatcagtgt

SEQ ID NO: 55107 - DNA, 80 bp, synthetic construct; identical to SEQ ID NO: 25381
  misc_feature 1..80: note = Artificially Synthesized Probe
  source 1..80: mol_type = other DNA

SEQ ID NO: 55108 - DNA, 80 bp, synthetic construct
  misc_feature 1..80: note = Artificially Synthesized Probe
  source 1..80: mol_type = other DNA
taggaagcaggcagctgcagctgtggggctggccgcccctccaccaggagctcggtaggcttaagcagattccagctgaa

SEQ ID NO: 55109 - DNA, 80 bp, synthetic construct
  misc_feature 1..80: note = Artificially Synthesized Probe
  source 1..80: mol_type = other DNA
ctgccccgtgcggctctcaggtggaccactgcaccacactgttcttccctcctctccgcggatcatgccagcctcctagt

SEQ ID NO: 55110 - DNA, 80 bp, synthetic construct; identical to SEQ ID NO: 25382
  misc_feature 1..80: note = Artificially Synthesized Probe
  source 1..80: mol_type = other DNA

SEQ ID NO: 55111 - DNA, 80 bp, synthetic construct
  misc_feature 1..80: note = Artificially Synthesized Probe
  source 1..80: mol_type = other DNA
taattatatacctctaaaggctacgctttgcaatacagatctccagcctcaggttaggtctccgctgatctgccaactgc

SEQ ID NO: 55112 - DNA, 80 bp, synthetic construct
  misc_feature 1..80: note = Artificially Synthesized Probe
  source 1..80: mol_type = other DNA
ccttttcatgtgacccagttttacagttcctgcaggatcccagagctgacactgaaatgaacctctggctatctgagtgg

SEQ ID NO: 55113 - DNA, 80 bp, synthetic construct
  misc_feature 1..80: note = Artificially Synthesized Probe
  source 1..80: mol_type = other DNA
gcagggagtagaagtcacaggtatctgctaattttctacaaagccatatcagtaacctcatacttcttaccttctgctga

SEQ ID NO: 55114 - DNA, 80 bp, synthetic construct; identical to SEQ ID NO: 25383
  misc_feature 1..80: note = Artificially Synthesized Probe
  source 1..80: mol_type = other DNA

SEQ ID NO: 55115 - DNA, 80 bp, synthetic construct
  misc_feature 1..80: note = Artificially Synthesized Probe
  source 1..80: mol_type = other DNA
aatggagcatggctatgaaaccatttttagaatttatatcgtgcttaacaaaggtaatggggactgttcatgactgtagg

SEQ ID NO: 55116 - DNA, 80 bp, synthetic construct
  misc_feature 1..80: note = Artificially Synthesized Probe
  source 1..80: mol_type = other DNA
gtggcaaattaatgagggaaggggagaagttgaagatgcaaagatgaagatgcagtcatagtgaaaggtctctttctaac

SEQ ID NO: 55117 - DNA, 80 bp, synthetic construct
  misc_feature 1..80: note = Artificially Synthesized Probe
  source 1..80: mol_type = other DNA
ttaattagtagtagatgtccttacttctgatagcccttacataatgtatccctctctatgagtgctgtagatttttcact

SEQ ID NO: 55118 - DNA, 80 bp, synthetic construct
  misc_feature 1..80: note = Artificially Synthesized Probe
  source 1..80: mol_type = other DNA
ttgattaatattattagtaacactctctgagcacatactctgccaggctgtatgcactaatcactttatgtgctttacct

SEQ ID NO: 55119 - DNA, 80 bp, synthetic construct
  misc_feature 1..80: note = Artificially Synthesized Probe
  source 1..80: mol_type = other DNA
tcagggaaacacggatattactcagctgaacagggtaagacaacaatggctgctgacatggattagggactagcagactg

SEQ ID NO: 55120 - DNA, 80 bp, synthetic construct; identical to SEQ ID NO: 25384
  misc_feature 1..80: note = Artificially Synthesized Probe
  source 1..80: mol_type = other DNA

SEQ ID NO: 55121 - DNA, 80 bp, synthetic construct
  misc_feature 1..80: note = Artificially Synthesized Probe
  source 1..80: mol_type = other DNA
aaatgtactgatttggaacctggactgaggctggaacacgacatttttaataagttctttaggtataccatacctaccac

SEQ ID NO: 55122 - DNA, 80 bp, synthetic construct
  misc_feature 1..80: note = Artificially Synthesized Probe
  source 1..80: mol_type = other DNA
caagatttcagctactatgggccctcgtgcagggcacagaagtcctatttcaagaggttattaaagtatattctttcatc

SEQ ID NO: 55123 - DNA, 80 bp, synthetic construct; identical to SEQ ID NO: 25385
  misc_feature 1..80: note = Artificially Synthesized Probe
  source 1..80: mol_type = other DNA

SEQ ID NO: 55124 - DNA, 80 bp, synthetic construct
  misc_feature 1..80: note = Artificially Synthesized Probe
  source 1..80: mol_type = other DNA
tacggaacttgaaaaatactttaatagttatctcaacaatggtacggggtaaaaggtgaagtttataaagaagcagtttt

SEQ ID NO: 55125 - DNA, 80 bp, synthetic construct
  misc_feature 1..80: note = Artificially Synthesized Probe
  source 1..80: mol_type = other DNA
ctatctgatcttaatgtgcattgtacttgggagtggaggggcggagaaaagagaaacttgtgaaaaactgagattatccg

SEQ ID NO: 55126 - DNA, 80 bp, synthetic construct
  misc_feature 1..80: note = Artificially Synthesized Probe
  source 1..80: mol_type = other DNA
caaatatatcttggccattgtgaggtatgatgcactctttaaacatgccaggcaacatacagttccatcactgacccatg

SEQ ID NO: 55127 - DNA, 80 bp, synthetic construct
  misc_feature 1..80: note = Artificially Synthesized Probe
  source 1..80: mol_type = other DNA
ctttatctccaggtttcaactgtggcattctctaatcaaatttgcattgcataaagtcatctttcactcttagattgttt

SEQ ID NO: 55128 - DNA, 80 bp, synthetic construct; identical to SEQ ID NO: 25386
  misc_feature 1..80: note = Artificially Synthesized Probe
  source 1..80: mol_type = other DNA

SEQ ID NO: 55129 - DNA, 80 bp, synthetic construct; identical to SEQ ID NO: 25209
  misc_feature 1..80: note = Artificially Synthesized Probe
  source 1..80: mol_type = other DNA

SEQ ID NO: 55130 - DNA, 80 bp, synthetic construct
  misc_feature 1..80: note = Artificially Synthesized Probe
  source 1..80: mol_type = other DNA
aatgcttaattttttttccctacatgtgttaatttgccaatagcagtgggaggtaagtgatgctatccgcagaaagaaaa

SEQ ID NO: 55131 - DNA, 80 bp, synthetic construct
  misc_feature 1..80: note = Artificially Synthesized Probe
  source 1..80: mol_type = other DNA
cccagggttccaggaaggatggagaggaacttccagcattctacaaaggaatgtctttgatttttgtcgttgttgttgtt

SEQ ID NO: 55132 - DNA, 80 bp, synthetic construct
  misc_feature 1..80: note = Artificially Synthesized Probe
  source 1..80: mol_type = other DNA
ccttccagattcactctctaccagctctttgacctagaaaggttgcttttaaggacaacatcagcaaaccactttccttc

SEQ ID NO: 55133 - DNA, 80 bp, synthetic construct; identical to SEQ ID NO: 25387
  misc_feature 1..80: note = Artificially Synthesized Probe
  source 1..80: mol_type = other DNA

SEQ ID NO: 55134 - DNA, 80 bp, synthetic construct
  misc_feature 1..80: note = Artificially Synthesized Probe
  source 1..80: mol_type = other DNA
tttatcatatgtctacattaatcactgttatcaacagacctttgtgtctttagcactccagctgttggggccacctgtta

SEQ ID NO: 55135 - DNA, 80 bp, synthetic construct
  misc_feature 1..80: note = Artificially Synthesized Probe
  source 1..80: mol_type = other DNA
gtctcgggcgaaacaaatggccatcaaggttgggttctaaaataaaagaacagtttccacttacagaaggtatggacttg

SEQ ID NO: 55136 - DNA, 80 bp, synthetic construct; identical to SEQ ID NO: 25388
  misc_feature 1..80: note = Artificially Synthesized Probe
  source 1..80: mol_type = other DNA

SEQ ID NO: 55137 - DNA, 80 bp, synthetic construct
  misc_feature 1..80: note = Artificially Synthesized Probe
  source 1..80: mol_type = other DNA
tgcgattaggctgccatttttggaactattaatttttttaattctacataaattttacctacgattatatgtactggtta

SEQ ID NO: 55138 - DNA, 80 bp, synthetic construct
  misc_feature 1..80: note = Artificially Synthesized Probe
  source 1..80: mol_type = other DNA
acgaggtttctaaaagactatgttttaccccctggaaaacaattttttaaagtacatacttgaccccctttaatcaaaag

SEQ ID NO: 55139 - DNA, 80 bp, synthetic construct
  misc_feature 1..80: note = Artificially Synthesized Probe
  source 1..80: mol_type = other DNA
tgaagagatactatgttgaagagattcccatgttgattgcagcattatttacaatagccaagatatagaatcaacctaag

SEQ ID NO: 55140 - DNA, 80 bp, synthetic construct
  misc_feature 1..80: note = Artificially Synthesized Probe
  source 1..80: mol_type = other DNA
aatcagtggactcagtaaatactgaagagaaaccaaagtcctctgagctcagagattctgaaacctgttgaagaattaac

SEQ ID NO: 55141 - DNA, 80 bp, synthetic construct
  misc_feature 1..80: note = Artificially Synthesized Probe
  source 1..80: mol_type = other DNA
aagaaagagcccattgaaaggctacattagataatatcttccttttctcttctgctaaaagataaaagtcctccaatgct

SEQ ID NO: 55142 - DNA, 80 bp, synthetic construct; identical to SEQ ID NO: 25389
  misc_feature 1..80: note = Artificially Synthesized Probe
  source 1..80: mol_type = other DNA

SEQ ID NO: 55143 - DNA, 80 bp, synthetic construct
  misc_feature 1..80: note = Artificially Synthesized Probe
  source 1..80: mol_type = other DNA
ttttcactgatttatttagttataaaacatttatgtgtgaggcactgtgggcaatgcaaagcttaataaaatatgacccc

SEQ ID NO: 55144 - DNA, 80 bp, synthetic construct
  misc_feature 1..80: note = Artificially Synthesized Probe
  source 1..80: mol_type = other DNA
ccagaaatagggcctaggaattttcattgttattaactactcctaaaagaattctgatgtccctggtcaaggataacccc

SEQ ID NO: 55145 - DNA, 80 bp, synthetic construct
  misc_feature 1..80: note = Artificially Synthesized Probe
  source 1..80: mol_type = other DNA
catgggcccagaaaagaagggtttttatggaaccaaactggggtccaccaacccagtgcagtaagaccaggtatctatac

SEQ ID NO: 55146 - DNA, 80 bp, synthetic construct; identical to SEQ ID NO: 25390
  misc_feature 1..80: note = Artificially Synthesized Probe
  source 1..80: mol_type = other DNA

SEQ ID NO: 55147 - DNA, 80 bp, synthetic construct
  misc_feature 1..80: note = Artificially Synthesized Probe
  source 1..80: mol_type = other DNA
aactcagacttcagtttccccttatctgaggtctccatgccagcaaagttatttggtgagagtctgggttccagaaaaac

SEQ ID NO: 55148 - DNA, 80 bp, synthetic construct
  misc_feature 1..80: note = Artificially Synthesized Probe
  source 1..80: mol_type = other DNA
ccttgaaactccacctttcccttccatatgtggggtggggggcgggggtgcttcccaggtccctaagagggtggtacctc

SEQ ID NO: 55149 - DNA, 80 bp, synthetic construct; identical to SEQ ID NO: 25391
  misc_feature 1..80: note = Artificially Synthesized Probe
  source 1..80: mol_type = other DNA

SEQ ID NO: 55150 - DNA, 80 bp, synthetic construct
  misc_feature 1..80: note = Artificially Synthesized Probe
  source 1..80: mol_type = other DNA
cacgttctcactcatttgtggagtctgaaaaagctgatgtcacaaaagtacagagttattagtgactccggaatgtatca

SEQ ID NO: 55151 - DNA, 80 bp, synthetic construct
  misc_feature 1..80: note = Artificially Synthesized Probe
  source 1..80: mol_type = other DNA
tattttttccctgtttatactaccagagtatattgttgaatttgaaggaaacaaagaagagcctggaaggtgggaggaac

SEQ ID NO: 55152 - DNA, 80 bp, synthetic construct
  misc_feature 1..80: note = Artificially Synthesized Probe
  source 1..80: mol_type = other DNA
accatcatgaaacaccaccagcaggtatgcaggttctcacatcaggtttctaacaaaatatttgtttgtccccatctttg

SEQ ID NO: 55153 - DNA, 80 bp, synthetic construct
  misc_feature 1..80: note = Artificially Synthesized Probe
  source 1..80: mol_type = other DNA
atacgagttcgataaaagcaggaaattaggggagtgacatatgaaaaaaaaacattactttcagtaattttgtgatggct

SEQ ID NO: 55154 - DNA, 80 bp, synthetic construct
  misc_feature 1..80: note = Artificially Synthesized Probe
  source 1..80: mol_type = other DNA
gctaaaatttgtattactgaattgttattgatcatcaatgtggtcatagcatgatattttatttttccttggctaaaata

SEQ ID NO: 55155 - DNA, 80 bp, synthetic construct; identical to SEQ ID NO: 25392
  misc_feature 1..80: note = Artificially Synthesized Probe
  source 1..80: mol_type = other DNA

SEQ ID NO: 55156 - DNA, 80 bp, synthetic construct
  misc_feature 1..80: note = Artificially Synthesized Probe
  source 1..80: mol_type = other DNA
catatactaaaccatctactctccactggataataattatttcactccaagaagactgttttactcttttaaataaaata

SEQ ID NO: 55157 - DNA, 80 bp, synthetic construct
  misc_feature 1..80: note = Artificially Synthesized Probe
  source 1..80: mol_type = other DNA
tttttcagctccagataggaatccacaaaacataagggttcaagcctctcaacccaaggaaatgattataaagtgggagg

SEQ ID NO: 55158 - DNA, 80 bp, synthetic construct
  misc_feature 1..80: note = Artificially Synthesized Probe
  source 1..80: mol_type = other DNA
gtgattaaaatgatgttatgaaatcgagtttaacactggtcaacaatttagggaagattatacagattgatttagttgta

SEQ ID NO: 55159 - DNA, 80 bp, synthetic construct; identical to SEQ ID NO: 25393
  misc_feature 1..80: note = Artificially Synthesized Probe
  source 1..80: mol_type = other DNA

SEQ ID NO: 55160 - DNA, 80 bp, synthetic construct; identical to SEQ ID NO: 25210
  misc_feature 1..80: note = Artificially Synthesized Probe
  source 1..80: mol_type = other DNA

SEQ ID NO: 55161 - DNA, 80 bp, synthetic construct
  misc_feature 1..80: note = Artificially Synthesized Probe
  source 1..80: mol_type = other DNA
tcctttacatatctcggttaaatgttattaaatagacttcaccatttgaattttgcataaaaatgcccatctacccagat

SEQ ID NO: 55162 - DNA, 80 bp, synthetic construct
  misc_feature 1..80: note = Artificially Synthesized Probe
  source 1..80: mol_type = other DNA
aatttataaaattttgtgtaaacatagaacatttttaatgtatgctgaaatatactaatttatttccacaattcattcca

SEQ ID NO: 55163 - DNA, 80 bp, synthetic construct
  misc_feature 1..80: note = Artificially Synthesized Probe
  source 1..80: mol_type = other DNA
tgaaattaagttttacaagtttaagatgtggaaaactttttttaaaatggtaatacatagaaatgaaatatattcaataa

SEQ ID NO: 55164 - DNA, 80 bp, synthetic construct; identical to SEQ ID NO: 25394
  misc_feature 1..80: note = Artificially Synthesized Probe
  source 1..80: mol_type = other DNA

SEQ ID NO: 55165 - DNA, 80 bp, synthetic construct
  misc_feature 1..80: note = Artificially Synthesized Probe
  source 1..80: mol_type = other DNA
ggaaaaaaggccagaaatcttcagtctttttgactgctcctctcactcataagtcattttttattaccccaaagatacac

SEQ ID NO: 55166 - DNA, 80 bp, synthetic construct
  misc_feature 1..80: note = Artificially Synthesized Probe
  source 1..80: mol_type = other DNA
tgaaactgcatctctactaaaaatataaaaattagccaggtgtggtggcacatacctgtaatccctgctacttgggaggc

SEQ ID NO: 55167 - DNA, 80 bp, synthetic construct
  misc_feature 1..80: note = Artificially Synthesized Probe
  source 1..80: mol_type = other DNA
agtaattaattgactagaggaaggaagtagtcacaggatttggatctaggctgacagttacattcccaatatgtcccatg

SEQ ID NO: 55168 - DNA, 80 bp, synthetic construct; identical to SEQ ID NO: 25395
  misc_feature 1..80: note = Artificially Synthesized Probe
  source 1..80: mol_type = other DNA

SEQ ID NO: 55169 - DNA, 80 bp, synthetic construct
  misc_feature 1..80: note = Artificially Synthesized Probe
  source 1..80: mol_type = other DNA
ggtagaactaggctttttagttagcattaccttcagacattcacttctcatatattaagtcggtcatgactcactcatat

SEQ ID NO: 55170 - DNA, 80 bp, synthetic construct
  misc_feature 1..80: note = Artificially Synthesized Probe
  source 1..80: mol_type = other DNA
ataacacatttcaaacttaaaggacaccaaaagcaaaaccaaaagcccaaaaccccactaatgttgggaagcaggaacat

SEQ ID NO: 55171 - DNA, 80 bp, synthetic construct
  misc_feature 1..80: note = Artificially Synthesized Probe
  source 1..80: mol_type = other DNA
aaaatggctctgtgcattgaagcatctctttcaagagctttacaacctgacttttgggaaagatacattgtatcttttga

SEQ ID NO: 55172 - DNA, 80 bp, synthetic construct
  misc_feature 1..80: note = Artificially Synthesized Probe
  source 1..80: mol_type = other DNA
ataacaatgtattgtattcttgaaaattgttgagagactaggttttaagtgttctcatcataaaaaataagtatatgaag

SEQ ID NO: 55173 - DNA, 80 bp, synthetic construct; identical to SEQ ID NO: 25396
  misc_feature 1..80: note = Artificially Synthesized Probe
  source 1..80: mol_type = other DNA

SEQ ID NO: 55174 - DNA, 80 bp, synthetic construct
  misc_feature 1..80: note = Artificially Synthesized Probe
  source 1..80: mol_type = other DNA
tggctccttttgttctttcttgaagagattatttgggaaatgtctgaggctcagtaggcattgccttcaagtcaaataca

SEQ ID NO: 55175 - DNA, 80 bp, synthetic construct
  misc_feature 1..80: note = Artificially Synthesized Probe
  source 1..80: mol_type = other DNA
aatgaataatattatttgcacacacttattgtcagcagagactgaagaaaactatcattccagattgcagtacggcacta

SEQ ID NO: 55176 - DNA, 80 bp, synthetic construct
  misc_feature 1..80: note = Artificially Synthesized Probe
  source 1..80: mol_type = other DNA
tttttccctcagttagtttagtttattcaccttggaataggaatacacttaaaattattttgctgatatgtcactaccct

SEQ ID NO: 55177 - DNA, 80 bp, synthetic construct
  misc_feature 1..80: note = Artificially Synthesized Probe
  source 1..80: mol_type = other DNA
attaaaatcgtattttaaacttattttatataactgattcatttcaatgcacaatcccattatctttgaaagctaaacag

SEQ ID NO: 55178 - DNA, 80 bp, synthetic construct
  misc_feature 1..80: note = Artificially Synthesized Probe
  source 1..80: mol_type = other DNA
acctgaggttgggagttcaagaccagcctgaccaacatggagaaaccctgtctctactaaaaatacaaaattagccgggc

SEQ ID NO: 55179 - DNA, 80 bp, synthetic construct
  misc_feature 1..80: note = Artificially Synthesized Probe
  source 1..80: mol_type = other DNA
gaaacgaaaaaaaaagttattcctccaaatatttctatggagaaaaataaagtgggtaagggtgacattttttcttaaag

SEQ ID NO: 55180 - DNA, 80 bp, synthetic construct
  misc_feature 1..80: note = Artificially Synthesized Probe
  source 1..80: mol_type = other DNA
agaagaaaaatggagaaggatagaaccaggtgcaagaaagagttctcttcaaaaagccatgggagaatcccattcacaac

SEQ ID NO: 55181 - DNA, 80 bp, synthetic construct
  misc_feature 1..80: note = Artificially Synthesized Probe
  source 1..80: mol_type = other DNA
atttgccaactgcaagcctaaaccattggaaattggcataatgaatgttctgagtgagaatatatatgttattaggaata

SEQ ID NO: 55182 - DNA, 80 bp, synthetic construct
  misc_feature 1..80: note = Artificially Synthesized Probe
  source 1..80: mol_type = other DNA
tgtcgttgatgccattactgttagttaatcctcagtttaattacatatggtgcattttcatttctctgcattttcattga

SEQ ID NO: 55183 - DNA, 80 bp, synthetic construct
  misc_feature 1..80: note = Artificially Synthesized Probe
  source 1..80: mol_type = other DNA
aatccaggcatctgattgtaggcttctcgttacttggggagttaagggattaattttcatacttaagctcatatgatgac

SEQ ID NO: 55184 - DNA, 80 bp, synthetic construct; identical to SEQ ID NO: 25397
  misc_feature 1..80: note = Artificially Synthesized Probe
  source 1..80: mol_type = other DNA

SEQ ID NO: 55185 - DNA, 80 bp, synthetic construct
  misc_feature 1..80: note = Artificially Synthesized Probe
  source 1..80: mol_type = other DNA
cagtgactctctattctggagaagactgtaagtgatgcacctaaaactgctaagcacgtcagtaactgttgctttcaaat

SEQ ID NO: 55186 - DNA, 80 bp, synthetic construct
  misc_feature 1..80: note = Artificially Synthesized Probe
  source 1..80: mol_type = other DNA
cagttgatcgtatagagtaccaaggaagtatgttgaaagttttcattttattcagtttcctataaagctctttctacatt

SEQ ID NO: 55187 - DNA, 80 bp, synthetic construct; identical to SEQ ID NO: 25398
  misc_feature 1..80: note = Artificially Synthesized Probe
  source 1..80: mol_type = other DNA

SEQ ID NO: 55188 - DNA, 80 bp, synthetic construct
  misc_feature 1..80: note = Artificially Synthesized Probe
  source 1..80: mol_type = other DNA
cctttccagcatctaaaggaataatttgatccaaaaatagaaaaggttcagaatgagaaatagccaactcattactcacc

SEQ ID NO: 55189 - DNA, 80 bp, synthetic construct
  misc_feature 1..80: note = Artificially Synthesized Probe
  source 1..80: mol_type = other DNA
tagaacagagataataatatcctcttcacagggttgtatgaaccaatttaggtaagtcccttagaacagtgcctgacaca

SEQ ID NO: 55190 - DNA, 80 bp, synthetic construct
  misc_feature 1..80: note = Artificially Synthesized Probe
  source 1..80: mol_type = other DNA
ttgtttctcagtgtgatacagtctgtcctcttctttgggaaatctatttgggctgataaacttatctatcatgagaaact

SEQ ID NO: 55191 - DNA, 80 bp, synthetic construct; identical to SEQ ID NO: 25399
  misc_feature 1..80: note = Artificially Synthesized Probe
  source 1..80: mol_type = other DNA

SEQ ID NO: 55192 - DNA, 80 bp, synthetic construct
  misc_feature 1..80: note = Artificially Synthesized Probe
  source 1..80: mol_type = other DNA
aaacaaaaagtctgttggatggaagaacacatcccaaagaagtgaacattctaagattttcaggacaaagaaactctgga

SEQ ID NO: 55193 - DNA, 80 bp, synthetic construct
  misc_feature 1..80: note = Artificially Synthesized Probe
  source 1..80: mol_type = other DNA
ataatgatgtagagtcatgtcaaaaatggaggtgatccatggccatattaaacattcttccttatggccaggcacagtgg

SEQ ID NO: 55194 - DNA, 80 bp, synthetic construct
  misc_feature 1..80: note = Artificially Synthesized Probe
  source 1..80: mol_type = other DNA
gtgctatgggggatattgtcttactggtatttgcagtttgggctcaaaaaaccagaaactatatctttaagggtgtttaa

SEQ ID NO: 55195 - DNA, 80 bp, synthetic construct
  misc_feature 1..80: note = Artificially Synthesized Probe
  source 1..80: mol_type = other DNA
cgggaggctgaggcaggagaatcacttgaacccgggaggcggaggttgcaatgagccaagattgggctactgcattccat

SEQ ID NO: 55196 - DNA, 80 bp, synthetic construct
  misc_feature 1..80: note = Artificially Synthesized Probe
  source 1..80: mol_type = other DNA
gtttatttttggtcttgtgttttctagtacctgaacagccaacttttctaaaggtcatcaaagttgataaagacactgcc

SEQ ID NO: 55197 - DNA, 80 bp, synthetic construct; identical to SEQ ID NO: 25400
  misc_feature 1..80: note = Artificially Synthesized Probe
  source 1..80: mol_type = other DNA

SEQ ID NO: 55198 - DNA, 80 bp, synthetic construct
  misc_feature 1..80: note = Artificially Synthesized Probe
  source 1..80: mol_type = other DNA
agcctacaaaggctaaatgtttaccgtctggccctttaatgaaaggtttgcttacctgttttagaaaaaaagcagtgtgc

SEQ ID NO: 55199 - DNA, 80 bp, synthetic construct
  misc_feature 1..80: note = Artificially Synthesized Probe
  source 1..80: mol_type = other DNA
tacctcttctgcctcagatatatgctcccagactcaatcctaaatatgcttgtgtttatccaatgtctatgggttgctca

SEQ ID NO: 55200 - DNA, 80 bp, synthetic construct
  misc_feature 1..80: note = Artificially Synthesized Probe
  source 1..80: mol_type = other DNA
gtcaagtttaagcatcatctcaaaatggaaattcggggattgacattatagaaaattttatcaacaacccatcatgaaaa

SEQ ID NO: 55201 - DNA, 80 bp, synthetic construct; identical to SEQ ID NO: 25401
  misc_feature 1..80: note = Artificially Synthesized Probe
  source 1..80: mol_type = other DNA

SEQ ID NO: 55202 - DNA, 80 bp, synthetic construct
  misc_feature 1..80: note = Artificially Synthesized Probe
  source 1..80: mol_type = other DNA
tggatcacgaggtcaggagatcgagaccatcctggctaacacggtgaaaccccgtctctattaaaaatacaaaaaattat

SEQ ID NO: 55203 - DNA, 80 bp, synthetic construct
  misc_feature 1..80: note = Artificially Synthesized Probe
  source 1..80: mol_type = other DNA
gtgttaagaatgcaaagcaagatcagtccaattctagatgttgagctcttaaccttatattagtcgatgaactggttttc

SEQ ID NO: 55204 - DNA, 80 bp, synthetic construct
  misc_feature 1..80: note = Artificially Synthesized Probe
  source 1..80: mol_type = other DNA
caagttcttagaatatagaagttgaaatattaacaattgtaatgattattgaactgcttgatatgtgtattttaaaataa

SEQ ID NO: 55205 - DNA, 80 bp, synthetic construct
  misc_feature 1..80: note = Artificially Synthesized Probe
  source 1..80: mol_type = other DNA
gagagttaattctgaaacgttgtaccagaatacttttatgaatgaaagactagcctttgaaccctaggagagtcaactct

SEQ ID NO: 55206 - DNA, 80 bp, synthetic construct; identical to SEQ ID NO: 25402
  misc_feature 1..80: note = Artificially Synthesized Probe
  source 1..80: mol_type = other DNA

SEQ ID NO: 55207 - DNA, 80 bp, synthetic construct
  misc_feature 1..80: note = Artificially Synthesized Probe
  source 1..80: mol_type = other DNA
ttgccactaacagctgcactatcttgggtgtatttcatctcttggactattgttacagtaatcttataatactccatact

SEQ ID NO: 55208 - DNA, 80 bp, synthetic construct
  misc_feature 1..80: note = Artificially Synthesized Probe
  source 1..80: mol_type = other DNA
gagtagctatttggtgccacatgttaaactagaaaccatagaagacacaaataaattatcatctcaattattcttccaaa

SEQ ID NO: 55209 - DNA, 80 bp, synthetic construct
  misc_feature 1..80: note = Artificially Synthesized Probe
  source 1..80: mol_type = other DNA
atcccagtctgcaaatttagagacccaagatgggagcaaagggcttattcttgcgagacctcagttttgtcatatatgat

SEQ ID NO: 55210 - DNA, 80 bp, synthetic construct
  misc_feature 1..80: note = Artificially Synthesized Probe
  source 1..80: mol_type = other DNA
tttagtaaatgacacctacgagattggagaattaaatgatattaacattacaactccatcaaagcccagctggcacctct

SEQ ID NO: 55211 - DNA, 80 bp, synthetic construct; identical to SEQ ID NO: 25403
  misc_feature 1..80: note = Artificially Synthesized Probe
  source 1..80: mol_type = other DNA

SEQ ID NO: 55212 - DNA, 80 bp, synthetic construct
  misc_feature 1..80: note = Artificially Synthesized Probe
  source 1..80: mol_type = other DNA
gtttggaaagttcacactgactcaatttatggatttctgcgcaataccaatcaaattatagcttagtgtatacaaggtca

SEQ ID NO: 55213 - DNA, 80 bp, synthetic construct
  misc_feature 1..80: note = Artificially Synthesized Probe
  source 1..80: mol_type = other DNA
tgccttcactctatatacattgattcatatgtcaattttgttttactgtctgatgatggatgccaagcaactgtctggga

SEQ ID NO: 55214 - DNA, 80 bp, synthetic construct; identical to SEQ ID NO: 25404
  misc_feature 1..80: note = Artificially Synthesized Probe
  source 1..80: mol_type = other DNA

SEQ ID NO: 55215 - DNA, 80 bp, synthetic construct
  misc_feature 1..80: note = Artificially Synthesized Probe
  source 1..80: mol_type = other DNA
aatctaatactatgtgtcagactgtgttctggatgcttttccaagttgtagattagaaaaacggtagaatcaatgaaaga

SEQ ID NO: 55216 - DNA, 80 bp, synthetic construct; identical to SEQ ID NO: 25211
  misc_feature 1..80: note = Artificially Synthesized Probe
  source 1..80: mol_type = other DNA

SEQ ID NO: 55217 - DNA, 80 bp, synthetic construct
  misc_feature 1..80: note = Artificially Synthesized Probe
  source 1..80: mol_type = other DNA
tattgtgcctactatatctaactaataacaagcttacgtttttctcagattccttaaacatttaaaagccctttatgtgg

SEQ ID NO: 55218 - DNA, 80 bp, synthetic construct
  misc_feature 1..80: note = Artificially Synthesized Probe
  source 1..80: mol_type = other DNA
ggttcttatgtctgaagcattggaactgacatcaagtgtccaatacaaagagaagtcagagtggtagtagtccaaacatg

SEQ ID NO: 55219 - DNA, 80 bp, synthetic construct
  misc_feature 1..80: note = Artificially Synthesized Probe
  source 1..80: mol_type = other DNA
ttctagtatatatgttgcgaaatttgggcttggttgcattcgtgcttgagaaattgtttttggaggatgaaagtgctgtt

SEQ ID NO: 55220 - DNA, 80 bp, synthetic construct; identical to SEQ ID NO: 25405
  misc_feature 1..80: note = Artificially Synthesized Probe
  source 1..80: mol_type = other DNA

SEQ ID NO: 55221 - DNA, 80 bp, synthetic construct
  misc_feature 1..80: note = Artificially Synthesized Probe
  source 1..80: mol_type = other DNA
cctatatagctcatttcaaggtcatttggcatttgttcaaaaaataggatttgattgacaagtatttttctctgattgtt

SEQ ID NO: 55222 - DNA, 80 bp, synthetic construct
  misc_feature 1..80: note = Artificially Synthesized Probe
  source 1..80: mol_type = other DNA
tgtttttcaaggtcaaaattaattgcactctgtttcaatgacgcttaatcttgaaggctttgctcatataattggcctta

SEQ ID NO: 55223 - DNA, 80 bp, synthetic construct
  misc_feature 1..80: note = Artificially Synthesized Probe
  source 1..80: mol_type = other DNA
tattttatatcattgttaacattttctgggttatgtttattatattgagttgattcccagcaaagctgtggatcacatgc

SEQ ID NO: 55224 - DNA, 80 bp, synthetic construct; identical to SEQ ID NO: 25406
  misc_feature 1..80: note = Artificially Synthesized Probe
  source 1..80: mol_type = other DNA

SEQ ID NO: 55225 - DNA, 80 bp, synthetic construct
  misc_feature 1..80: note = Artificially Synthesized Probe
  source 1..80: mol_type = other DNA
tataaggttatgtgctgtcaattataagtcaaaaggccatattcagtttcgcattaggtttgcgaaaatccaaattgcac

SEQ ID NO: 55226 - DNA, 80 bp, synthetic construct
  misc_feature 1..80: note = Artificially Synthesized Probe
  source 1..80: mol_type = other DNA
tgatctcctggtaattcaaaaactatctgagaaaatatggtataagtgactttcttattcacctctaacaacaatatttt

SEQ ID NO: 55227 - DNA, 80 bp, synthetic construct; identical to SEQ ID NO: 25407
  misc_feature 1..80: note = Artificially Synthesized Probe
  source 1..80: mol_type = other DNA

SEQ ID NO: 55228 - DNA, 80 bp, synthetic construct
  misc_feature 1..80: note = Artificially Synthesized Probe
  source 1..80: mol_type = other DNA
aaggcagcataagatattaaatcacctggaattagttatgtgccatttcagcaaccttttgtgctcagtctgctacaagc

SEQ ID NO: 55229 - DNA, 80 bp, synthetic construct
  misc_feature 1..80: note = Artificially Synthesized Probe
  source 1..80: mol_type = other DNA
accatcctttattttgtttttactagagttgttgcctaaaaatatctcctgctaattaacatatcttaataacacaaact

SEQ ID NO: 55230 - DNA, 80 bp, synthetic construct
  misc_feature 1..80: note = Artificially Synthesized Probe
  source 1..80: mol_type = other DNA
actcgaagaagtccctttttaaataaagaaggaaagatttaccagtattctcccattaacatgtccttcaaattgcattc

SEQ ID NO: 55231 - DNA, 80 bp, synthetic construct
  misc_feature 1..80: note = Artificially Synthesized Probe
  source 1..80: mol_type = other DNA
tcaaggctggtttattggactgatgtgtgcgattgctcttctcacactactattattaactgtttgctttgtgaagagga

SEQ ID NO: 55232 - DNA, 80 bp, synthetic construct; identical to SEQ ID NO: 25408
  misc_feature 1..80: note = Artificially Synthesized Probe
  source 1..80: mol_type = other DNA

SEQ ID NO: 55233 - DNA, 80 bp, synthetic construct
  misc_feature 1..80: note = Artificially Synthesized Probe
  source 1..80: mol_type = other DNA
tactcggaaggctgagacaggagaatcacttgaacccgggaggtggagtttgcagtgagctgagatcatgccactgtact

SEQ ID NO: 55234 - DNA, 80 bp, synthetic construct
  misc_feature 1..80: note = Artificially Synthesized Probe
  source 1..80: mol_type = other DNA
tttaagaagtgacccatgtatagcacgcctctctctatgcatgacatacatgactcatatttttcgcactagtgcattct

SEQ ID NO: 55235 - DNA, 80 bp, synthetic construct
  misc_feature 1..80: note = Artificially Synthesized Probe
  source 1..80: mol_type = other DNA
atttcattcaactcccgaatttgttttgtctttttcagatatacatattgtatcaagatgatgattattactagtattgc

SEQ ID NO: 55236 - DNA, 80 bp, synthetic construct
  misc_feature 1..80: note = Artificially Synthesized Probe
  source 1..80: mol_type = other DNA
tttctaggtttttgtaaaatgacatgcataatttatggagttatgcgtttcacttttttctctgaagactgaatgattat

SEQ ID NO: 55237 - DNA, 80 bp, synthetic construct; identical to SEQ ID NO: 25409
  misc_feature 1..80: note = Artificially Synthesized Probe
  source 1..80: mol_type = other DNA

SEQ ID NO: 55238 - DNA, 80 bp, synthetic construct
  misc_feature 1..80: note = Artificially Synthesized Probe
  source 1..80: mol_type = other DNA
ggaggcagaggttgcagtgagccgagatcacgcctctgcactccagcctgggcgacagagtgagactgtctcaaaaaaag

SEQ ID NO: 55239 - DNA, 80 bp, synthetic construct
  misc_feature 1..80: note = Artificially Synthesized Probe
  source 1..80: mol_type = other DNA
aagaacaataacagaaaaaaaattacccatggggttgcagctgtgctcccagatacaaaacagggaaagaaaacaggtct

SEQ ID NO: 55240 - DNA, 80 bp, synthetic construct
  misc_feature 1..80: note = Artificially Synthesized Probe
  source 1..80: mol_type = other DNA
ctcatctctttgcaacttctgcctcccaggctcaggtgatcctccaacctcagctcctcgtgtagctgggactacaggtg

SEQ ID NO: 55241 - DNA, 80 bp, synthetic construct
  misc_feature 1..80: note = Artificially Synthesized Probe
  source 1..80: mol_type = other DNA
gactttttaaattcaatttagtttaatgacacagatctaataggtgtctatgacatcttcaaaaagttcagatagtaaaa

SEQ ID NO: 55242 - DNA, 80 bp, synthetic construct; identical to SEQ ID NO: 25410
  misc_feature 1..80: note = Artificially Synthesized Probe
  source 1..80: mol_type = other DNA

SEQ ID NO: 55243 - DNA, 80 bp, synthetic construct
  misc_feature 1..80: note = Artificially Synthesized Probe
  source 1..80: mol_type = other DNA
ggtgaatacaggtaaacataaggttctgttgtaaaataaaacacatattcatcatgttgaaagcttaagtgaacaaaaag

SEQ ID NO: 55244 - DNA, 80 bp, synthetic construct
  misc_feature 1..80: note = Artificially Synthesized Probe
  source 1..80: mol_type = other DNA
cacttttcttgaagctctgtgcctaacacaaagaatatctatttggggtagctaaaacatctatagcatggccattatga

SEQ ID NO: 55245 - DNA, 80 bp, synthetic construct
  misc_feature 1..80: note = Artificially Synthesized Probe
  source 1..80: mol_type = other DNA
ataaaagagcacaaaagagagtaactgtttctgcccaggtaggattttggaaaaagaatcatccataagagataagctaa

SEQ ID NO: 55246 - DNA, 80 bp, synthetic construct; identical to SEQ ID NO: 25411
  misc_feature 1..80: note = Artificially Synthesized Probe
  source 1..80: mol_type = other DNA

SEQ ID NO: 55247 - DNA, 80 bp, synthetic construct
  misc_feature 1..80: note = Artificially Synthesized Probe
  source 1..80: mol_type = other DNA
agctaattggtagacatttgggcttacctgtacctccattttgtggtatacttatttttctgtattctacttagtcaata

SEQ ID NO: 55248 - DNA, 80 bp, synthetic construct; identical to SEQ ID NO: 25212
  misc_feature 1..80: note = Artificially Synthesized Probe
  source 1..80: mol_type = other DNA

SEQ ID NO: 55249 - DNA, 80 bp, synthetic construct
  misc_feature 1..80: note = Artificially Synthesized Probe
  source 1..80: mol_type = other DNA
ctcataacaataaccaccaatactcaacagcttaaaacaataaacatttattatttcaatgtcctcataattcaggaatc

SEQ ID NO: 55250 - DNA, 80 bp, synthetic construct; identical to SEQ ID NO: 25412
  misc_feature 1..80: note = Artificially Synthesized Probe
  source 1..80: mol_type = other DNA

SEQ ID NO: 55251 - DNA, 80 bp, synthetic construct
  misc_feature 1..80: note = Artificially Synthesized Probe
  source 1..80: mol_type = other DNA
ctcaaaggaagaggattatacaagatacaaattccatgaggcaatgatcattaaggacctgcaacaacttttcaaaagct

SEQ ID NO: 55252 - DNA, 80 bp, synthetic construct
  misc_feature 1..80: note = Artificially Synthesized Probe
  source 1..80: mol_type = other DNA
agctcaattttacaggcaagaaaacaaaaacaatgccttgtctaaaaacccatttccccacaccctgctgctcctttata

SEQ ID NO: 55253 - DNA, 80 bp, synthetic construct
  misc_feature 1..80: note = Artificially Synthesized Probe
  source 1..80: mol_type = other DNA
attatcccaggagacacttttataagatgctgtgcccttgcataagtcctcattcttctagcttctgataatcatccctt

SEQ ID NO: 55254 - DNA, 80 bp, synthetic construct
  misc_feature 1..80: note = Artificially Synthesized Probe
  source 1..80: mol_type = other DNA
cttactttagaaaggattatctgagaaggtgcctttcacgctgagccagaaagggaagaaggcaaacaggaaaagagcca

SEQ ID NO: 55255 - DNA, 80 bp, synthetic construct
  misc_feature 1..80: note = Artificially Synthesized Probe
  source 1..80: mol_type = other DNA
agcctgtgttatgctgctgtcaaaacaactccaaaagcattttctttctcaagttatgtgtcccacagagattgcccttt

SEQ ID NO: 55256 - DNA, 80 bp, synthetic construct; identical to SEQ ID NO: 25413
  misc_feature 1..80: note = Artificially Synthesized Probe
  source 1..80: mol_type = other DNA

SEQ ID NO: 55257 - DNA, 80 bp, synthetic construct
  misc_feature 1..80: note = Artificially Synthesized Probe
  source 1..80: mol_type = other DNA
agatcataccatttgataagcatttcactaatggatttgcttctgttcatgaataaaacacctaccataaatatagtata

SEQ ID NO: 55258 - DNA, 80 bp, synthetic construct
  misc_feature 1..80: note = Artificially Synthesized Probe
  source 1..80: mol_type = other DNA
aaaaagaacattttatcaggatataagagaatcaaaaggatcagaagtaaaggcagaagatcaagacttggaggccagga

SEQ ID NO: 55259 - DNA, 80 bp, synthetic construct
  misc_feature 1..80: note = Artificially Synthesized Probe
  source 1..80: mol_type = other DNA
acagttcaggattctgagaagcctaagagcaaagtgccagcattttcaatgtctggtgaacgctcactttctgggtgaca

SEQ ID NO: 55260 - DNA, 80 bp, synthetic construct; identical to SEQ ID NO: 25414
  misc_feature 1..80: note = Artificially Synthesized Probe
  source 1..80: mol_type = other DNA

SEQ ID NO: 55261 - DNA, 80 bp, synthetic construct
  misc_feature 1..80: note = Artificially Synthesized Probe
  source 1..80: mol_type = other DNA
tgcttatgactttgtagacatgtgtttacagacttcgtaaacttggtaaacatttgtggtagtatcatgtgggctttact

SEQ ID NO: 55262 - DNA, 80 bp, synthetic construct
  misc_feature 1..80: note = Artificially Synthesized Probe
  source 1..80: mol_type = other DNA
tcggtcccttaatagggatatgcagcctactgaaagtgctgacagcttagtcgaatacggagagggagaccatggtctct

SEQ ID NO: 55263 - DNA, 80 bp, synthetic construct
  misc_feature 1..80: note = Artificially Synthesized Probe
  source 1..80: mol_type = other DNA
tcaaaggagcaagaactttcatataggaatagaaacatgctggccgaagatttcatccagaagtcaacatcctgcaatta

SEQ ID NO: 55264 - DNA, 80 bp, synthetic construct; identical to SEQ ID NO: 25415
  misc_feature 1..80: note = Artificially Synthesized Probe
  source 1..80: mol_type = other DNA

SEQ ID NO: 55265 - DNA, 80 bp, synthetic construct
  misc_feature 1..80: note = Artificially Synthesized Probe
  source 1..80: mol_type = other DNA
aaagtcttaggtgaacaatcaactagtatttgttgagctcctatttgcccagagatggtcatatttaaacagaagtatac

SEQ ID NO: 55266 - DNA, 80 bp, synthetic construct
  misc_feature 1..80: note = Artificially Synthesized Probe
  source 1..80: mol_type = other DNA
cttgtaggtcatggacaacaatatggatttaagtgcagtataggaacttcaaaggaattccaacagttaagctagttgat

SEQ ID NO: 55267 - DNA, 80 bp, synthetic construct
  misc_feature 1..80: note = Artificially Synthesized Probe
  source 1..80: mol_type = other DNA
tcagaaggttgttttatacgagaacaggcagaaagtgcccattgttcaggattctaatagctacatctacttaatatctt

SEQ ID NO: 55268 - DNA, 80 bp, synthetic construct
  misc_feature 1..80: note = Artificially Synthesized Probe
  source 1..80: mol_type = other DNA
tttgtacagctagaatatattagtaagatactgtttttcgtcattccagagctacaactaataacacgaggttccaaagc

SEQ ID NO: 55269 - DNA, 80 bp, synthetic construct; identical to SEQ ID NO: 25416
  misc_feature 1..80: note = Artificially Synthesized Probe
  source 1..80: mol_type = other DNA

SEQ ID NO: 55270 - DNA, 80 bp, synthetic construct
  misc_feature 1..80: note = Artificially Synthesized Probe
  source 1..80: mol_type = other DNA
tacatgaacatgttttagaaacaatatggaggatgatgcatacatgtcggtcaagttcagcgctcgacattttatggaaa

SEQ ID NO: 55271 - DNA, 80 bp, synthetic construct
  misc_feature 1..80: note = Artificially Synthesized Probe
  source 1..80: mol_type = other DNA
ataatagtcagcgcaggaatgcacatggaatatctacttgtccttttgaacctcacgagtcatccagaatgtatagacag

SEQ ID NO: 55272 - DNA, 80 bp, synthetic construct; identical to SEQ ID NO: 25417
  misc_feature 1..80: note = Artificially Synthesized Probe
  source 1..80: mol_type = other DNA

SEQ ID NO: 55273 - DNA, 80 bp, synthetic construct
  misc_feature 1..80: note = Artificially Synthesized Probe
  source 1..80: mol_type = other DNA
caaatactgaaatattagctcttcctacacttcgtgttcccctttagctgcctgaaaatcaagattgctcctgctcagat

SEQ ID NO: 55274 - DNA, 80 bp, synthetic construct
  misc_feature 1..80: note = Artificially Synthesized Probe
  source 1..80: mol_type = other DNA
caatactatttggcaactactgggactcttcagcacaaaaggaatagatctatgattgaccctgattttaattgtgaaat

SEQ ID NO: 55275 - DNA, 80 bp, synthetic construct
  misc_feature 1..80: note = Artificially Synthesized Probe
  source 1..80: mol_type = other DNA
ctcgtgataagtcaacagccaatatttaaaactttgttcgttactggctttaccctaactttctctagtctactgtcaat

SEQ ID NO: 55276 - DNA, 80 bp, synthetic construct
  misc_feature 1..80: note = Artificially Synthesized Probe
  source 1..80: mol_type = other DNA
aaactctctcaactctaaagtgctaataataatctcagttaccttatctttgtcacagggtgttcttttttatgaagaaa

SEQ ID NO: 55277 - DNA, 80 bp, synthetic construct; identical to SEQ ID NO: 25418
  misc_feature 1..80: note = Artificially Synthesized Probe
  source 1..80: mol_type = other DNA

SEQ ID NO: 55278 - DNA, 80 bp, synthetic construct
  misc_feature 1..80: note = Artificially Synthesized Probe
  source 1..80: mol_type = other DNA
tatgagcaaggctgttttattattttatttattgtacttctattaagatgatatgggtgctttgggggctgttgtaaatt

SEQ ID NO: 55279 - DNA, 80 bp, synthetic construct; identical to SEQ ID NO: 25192
  misc_feature 1..80: note = Artificially Synthesized Probe
  source 1..80: mol_type = other DNA

SEQ ID NO: 55280 - DNA, 80 bp, synthetic construct
  misc_feature 1..80: note = Artificially Synthesized Probe
  source 1..80: mol_type = other DNA
tttcctattttatactcatggaagagataagctaaagaggggacaataatgagaaatgttggtgtgcttttctaagcatt

SEQ ID NO: 55281 - DNA, 80 bp, synthetic construct
  misc_feature 1..80: note = Artificially Synthesized Probe
  source 1..80: mol_type = other DNA
ctagtgttcctatagtgaaataagtagggttcagccaaagctttctttgttttgtaccttaaattgttcgattacgtcat

SEQ ID NO: 55282 - DNA, 80 bp, synthetic construct; identical to SEQ ID NO: 25419
  misc_feature 1..80: note = Artificially Synthesized Probe
  source 1..80: mol_type = other DNA

SEQ ID NO: 55283 - DNA, 80 bp, synthetic construct; identical to SEQ ID NO: 25213
  misc_feature 1..80: note = Artificially Synthesized Probe
  source 1..80: mol_type = other DNA

SEQ ID NO: 55284 - DNA, 80 bp, synthetic construct
  misc_feature 1..80: note = Artificially Synthesized Probe
  source 1..80: mol_type = other DNA
cctcaagtcagtagagaagatgttacccacatcctcttttccaaagaaggaatcatttgatcattgaaaggtttactgaa

SEQ ID NO: 55285 - DNA, 80 bp, synthetic construct
  misc_feature 1..80: note = Artificially Synthesized Probe
  source 1..80: mol_type = other DNA
ttgtgatataaagaatgacataaagaacaaaataatacttttttaaatttatgaggaaaaagacaacagaaaggaaaaat

SEQ ID NO: 55286 - DNA, 80 bp, synthetic construct
  misc_feature 1..80: note = Artificially Synthesized Probe
  source 1..80: mol_type = other DNA
cgaggtcaggagatcgagaccgtcctggctaacacggtgaaaccccgtcagtaaataaaaaatacaaaaaaattagctgg

SEQ ID NO: 55287 - DNA, 80 bp, synthetic construct; identical to SEQ ID NO: 25214
  misc_feature 1..80: note = Artificially Synthesized Probe
  source 1..80: mol_type = other DNA

SEQ ID NO: 55288 - DNA, 80 bp, synthetic construct
  misc_feature 1..80: note = Artificially Synthesized Probe
  source 1..80: mol_type = other DNA
gcaaagacataaaatcaacctaaatgcccatcaatgacatcaataacagactggataaaggaaatgtagtacatatgcac

SEQ ID NO: 55289 - DNA, 80 bp, synthetic construct
  misc_feature 1..80: note = Artificially Synthesized Probe
  source 1..80: mol_type = other DNA
gaaaacatgaacacttagaggagaacaacacacactggggcctacttgaaggtggagggtgggaggagggagaggatcag

SEQ ID NO: 55290 - DNA, 80 bp, synthetic construct
  misc_feature 1..80: note = Artificially Synthesized Probe
  source 1..80: mol_type = other DNA
aaaatacatactaagatagacaacctcatgaatagtcaggggaatgcacattgaaatcacagtgaaacaattgttcatct

SEQ ID NO: 55291 - DNA, 80 bp, synthetic construct; identical to SEQ ID NO: 25215
  misc_feature 1..80: note = Artificially Synthesized Probe
  source 1..80: mol_type = other DNA

SEQ ID NO: 55292 - DNA, 80 bp, synthetic construct
  misc_feature 1..80: note = Artificially Synthesized Probe
  source 1..80: mol_type = other DNA
gagtggtggtatgcacctgtagttccagctactcaggaggctgaggtggaaggatctcttgagcctggaaattcgaggct

SEQ ID NO: 55293 - DNA, 80 bp, synthetic construct
  misc_feature 1..80: note = Artificially Synthesized Probe
  source 1..80: mol_type = other DNA
ataccctggctttccattttatggccttaagtgctgcagtggatttacctttagtaatggcagaacgtagtgtataatca

SEQ ID NO: 55294 - DNA, 80 bp, synthetic construct
  misc_feature 1..80: note = Artificially Synthesized Probe
  source 1..80: mol_type = other DNA
accacagatatcaaagaagtcctcacattcaaaggattttacacctatgcatgtagaatgctataattgcacctgtgagt

SEQ ID NO: 55295 - DNA, 80 bp, synthetic construct
  misc_feature 1..80: note = Artificially Synthesized Probe
  source 1..80: mol_type = other DNA
gggagaaggcgcccgaggggaggcgccggacagatcgcgtttcggaggcggcgcaggtgtgtcaggggtgggggtccgct

SEQ ID NO: 55296 - DNA, 80 bp, synthetic construct
  misc_feature 1..80: note = Artificially Synthesized Probe
  source 1..80: mol_type = other DNA
gagtggacagtggcataacctccttttagaggaggaatttcacatcagctagtaaagttgaacatgttttaacccacacc

SEQ ID NO: 55297 - DNA, 80 bp, synthetic construct; identical to SEQ ID NO: 25216
  misc_feature 1..80: note = Artificially Synthesized Probe
  source 1..80: mol_type = other DNA

SEQ ID NO: 55298 - DNA, 80 bp, synthetic construct
  misc_feature 1..80: note = Artificially Synthesized Probe
  source 1..80: mol_type = other DNA
aaatattttacagaatttgactcttttcattgacactaatcatcattgtaaaattaagactatagtaatcagtgcatttt

SEQ ID NO: 55299 - DNA, 80 bp, synthetic construct
  misc_feature 1..80: note = Artificially Synthesized Probe
  source 1..80: mol_type = other DNA
cttttaatatcatggtccttgtgaaagaccagacaaaaagtcaacccagttagttccttaaaagaggaaaagtagaggga

SEQ ID NO: 55300 - DNA, 80 bp, synthetic construct
  misc_feature 1..80: note = Artificially Synthesized Probe
  source 1..80: mol_type = other DNA
tttagtattaagttaacaagaacatagatgctacacctaaacttatccaagatattaatccattgtgccttagtacttta

SEQ ID NO: 55301 - DNA, 80 bp, synthetic construct
  misc_feature 1..80: note = Artificially Synthesized Probe
  source 1..80: mol_type = other DNA
ataaaggcagcatatattttgtatgaactaaaaagaagtacaaaatattggtccccaaaattaaaatgtaagttcttaac

SEQ ID NO: 55302 - DNA, 80 bp, synthetic construct; identical to SEQ ID NO: 25217
  misc_feature 1..80: note = Artificially Synthesized Probe
  source 1..80: mol_type = other DNA

SEQ ID NO: 55303 - DNA, 80 bp, synthetic construct
  misc_feature 1..80: note = Artificially Synthesized Probe
  source 1..80: mol_type = other DNA
gagtgattacctaattacccaatcaaacccaaacacttatataacctcctttcagaagagcgggggtagatgggaaatat

SEQ ID NO: 55304 - DNA, 80 bp, synthetic construct
  misc_feature 1..80: note = Artificially Synthesized Probe
  source 1..80: mol_type = other DNA
attttgtagaaaggctgtgccagttctgaatacattctttcactcctgtcttgaaatagataatgagataacagggaagg

SEQ ID NO: 55305 - DNA, 80 bp, synthetic construct
  misc_feature 1..80: note = Artificially Synthesized Probe
  source 1..80: mol_type = other DNA
tcccagattgttatctgttgcatgtagacttacggatccttttcttcaaagaaacggctatagatatttattgattcctc

SEQ ID NO: 55306 - DNA, 80 bp, synthetic construct; identical to SEQ ID NO: 25218
  misc_feature 1..80: note = Artificially Synthesized Probe
  source 1..80: mol_type = other DNA

SEQ ID NO: 55307 - DNA, 80 bp, synthetic construct
  misc_feature 1..80: note = Artificially Synthesized Probe
  source 1..80: mol_type = other DNA
actaggacacgaacatctttggggttattattttaatcagttgctccaccctttaaactcttttctggttgatatatcca

SEQ ID NO: 55308 - DNA, 80 bp, synthetic construct
  misc_feature 1..80: note = Artificially Synthesized Probe
  source 1..80: mol_type = other DNA
gatgacttttgtgtgaggactataccatcttttattcttggagtaatttactattcagaatgtggtcagttttggcacgt

SEQ ID NO: 55309 - DNA, 80 bp, synthetic construct
  misc_feature 1..80: note = Artificially Synthesized Probe
  source 1..80: mol_type = other DNA
atattagatccatgtgaactatcaaaaattgtattataattgtccaacaggttcttcttgcccactgcatggatagggca

SEQ ID NO: 55310 - DNA, 80 bp, synthetic construct
  misc_feature 1..80: note = Artificially Synthesized Probe
  source 1..80: mol_type = other DNA
gggaaatgctgataggttggggcagggatgaaatcataggggtcaaagctgtcttcttacatgaagtcacttcttgggtg

SEQ ID NO: 55311 - DNA, 80 bp, synthetic construct; identical to SEQ ID NO: 25219
  misc_feature 1..80: note = Artificially Synthesized Probe
  source 1..80: mol_type = other DNA

SEQ ID NO: 55312 - DNA, 80 bp, synthetic construct
  misc_feature 1..80: note = Artificially Synthesized Probe
  source 1..80: mol_type = other DNA
aaggacagcttggagttgagaagcaagatggagtcagctatgtcagatttctctttgatatagtttgaatatatatctcc

SEQ ID NO: 55313 - DNA, 80 bp, synthetic construct
  misc_feature 1..80: note = Artificially Synthesized Probe
  source 1..80: mol_type = other DNA
cccaactaagtctctctctagcttctccttccaccatatggtgtgcctgctccaactttgccttctaccacgagtaaaaa

SEQ ID NO: 55314 - DNA, 80 bp, synthetic construct; identical to SEQ ID NO: 25220
  misc_feature 1..80: note = Artificially Synthesized Probe
  source 1..80: mol_type = other DNA

SEQ ID NO: 55315 - DNA, 80 bp, synthetic construct
  misc_feature 1..80: note = Artificially Synthesized Probe
  source 1..80: mol_type = other DNA
cgcctgtaatcccagctactcaggaggccgggcgggagaacacttgaactcaggaggcagaggctgcagtaagccaagat

SEQ ID NO: 55316 - DNA, 80 bp, synthetic construct
  misc_feature 1..80: note = Artificially Synthesized Probe
  source 1..80: mol_type = other DNA
atcatttgattattaaaatataggcatttcttggtgaacttgaggcaagtaaagcctgacagatgtcaccatcacaaaga

SEQ ID NO: 55317 - DNA, 80 bp, synthetic construct
  misc_feature 1..80: note = Artificially Synthesized Probe
  source 1..80: mol_type = other DNA
gttatgtttagaaataattatgagcaactcagaatgatctccaccctcagagagtgtacagtctacctcagtatgtagat

SEQ ID NO: 55318 - DNA, 80 bp, synthetic construct
  misc_feature 1..80: note = Artificially Synthesized Probe
  source 1..80: mol_type = other DNA
acattttgaagtttgaaaatgcatacaaattagagagacatccaataaggtaggacttgggttaatgtttactttcctca

SEQ ID NO: 55319 - DNA, 80 bp, synthetic construct; identical to SEQ ID NO: 25221
  misc_feature 1..80: note = Artificially Synthesized Probe
  source 1..80: mol_type = other DNA

SEQ ID NO: 55320 - DNA, 80 bp, synthetic construct
  misc_feature 1..80: note = Artificially Synthesized Probe
  source 1..80: mol_type = other DNA
aaattcaaaaaattagccaggtgtggtggcaggcacctgtagtcccagctactcggggggctgaggcaggagaatcactt

SEQ ID NO: 55321 - DNA, 80 bp, synthetic construct
  misc_feature 1..80: note = Artificially Synthesized Probe
  source 1..80: mol_type = other DNA
ctcagctcactgcaacctccaccgtcaggttcaagtgattctcgtgcctcagcctcctgagtagctgggactacaggcat

SEQ ID NO: 55322 - DNA, 80 bp, synthetic construct
  misc_feature 1..80: note = Artificially Synthesized Probe
  source 1..80: mol_type = other DNA
aggctgaaaattctgtattctattatatattatataatagaatattttatatatatatacttatatattatataatatat

SEQ ID NO: 55323 - DNA, 80 bp, synthetic construct
  misc_feature 1..80: note = Artificially Synthesized Probe
  source 1..80: mol_type = other DNA
gcctcccgagtggctgggattacaagcgcacaccacgcccagctaattcttgtatttttagtagagacagggtttcacca

SEQ ID NO: 55324 - DNA, 80 bp, synthetic construct; identical to SEQ ID NO: 25222
  misc_feature 1..80: note = Artificially Synthesized Probe
  source 1..80: mol_type = other DNA

SEQ ID NO: 55325 - DNA, 80 bp, synthetic construct
  misc_feature 1..80: note = Artificially Synthesized Probe
  source 1..80: mol_type = other DNA
tatgcttgataaaaaagtagcagttgttgatttcaacaggtttaagaagcgtaaatgttgtccacctcttctttccatcc

SEQ ID NO: 55326 - DNA, 80 bp, synthetic construct
  misc_feature 1..80: note = Artificially Synthesized Probe
  source 1..80: mol_type = other DNA
tcttattctagtgaaggaaatccaaagttggggtctagaatacaaatacacctgtgtgcaagctccagtgatgccagttc

SEQ ID NO: 55327 - DNA, 80 bp, synthetic construct
  misc_feature 1..80: note = Artificially Synthesized Probe
  source 1..80: mol_type = other DNA
gaacaaatacaaaaggcatgcatagaaatcaaaagtgattaaaaatagtctgaattctggagacaatagcatgtgtggac

SEQ ID NO: 55328 - DNA, 80 bp, synthetic construct
  misc_feature 1..80: note = Artificially Synthesized Probe
  source 1..80: mol_type = other DNA
aagggtaacgatcaagactgatttaagattcttgtatttttaaccgataaaagaaaattaagtaatagttggggaactac

SEQ ID NO: 55329 - DNA, 80 bp, synthetic construct; identical to SEQ ID NO: 25223
  misc_feature 1..80: note = Artificially Synthesized Probe
  source 1..80: mol_type = other DNA

SEQ ID NO: 55330 - DNA, 80 bp, synthetic construct
  misc_feature 1..80: note = Artificially Synthesized Probe
  source 1..80: mol_type = other DNA
tctatccatcacccattcatctactcatttattttggcatacagcttttcgatagaggcaaacactgcctaatggaattg

SEQ ID NO: 55331 - DNA, 80 bp, synthetic construct
  misc_feature 1..80: note = Artificially Synthesized Probe
  source 1..80: mol_type = other DNA
aattaagtgtgcaatgaaaacacaggggaatgtttgaagaatcttttatcttttacccaggtgatgtgcttttcgacagg

SEQ ID NO: 55332 - DNA, 80 bp, synthetic construct
  misc_feature 1..80: note = Artificially Synthesized Probe
  source 1..80: mol_type = other DNA
tattaagtgttcaaggggatccctgcacatggatgaagtcatgtttgcatacactcagtgtaaatatgtgtacacacaca

SEQ ID NO: 55333 - DNA, 80 bp, synthetic construct; identical to SEQ ID NO: 25224
  misc_feature 1..80: note = Artificially Synthesized Probe
  source 1..80: mol_type = other DNA

SEQ ID NO: 55334 - DNA, 80 bp, synthetic construct
  misc_feature 1..80: note = Artificially Synthesized Probe
  source 1..80: mol_type = other DNA
tggtggatttgaccatatgtgtatcagatgtaaaaagtattgtccactaagtggagtaaaaaatgatcttttacagaagg

SEQ ID NO: 55335 - DNA, 80 bp, synthetic construct
  misc_feature 1..80: note = Artificially Synthesized Probe
  source 1..80: mol_type = other DNA
gcacagtgaacactgatttttgcattagccccatgtgttgtttccaaggggactctgctttctattttaaggtggtgtta

SEQ ID NO: 55336 - DNA, 80 bp, synthetic construct; identical to SEQ ID NO: 25225
  misc_feature 1..80: note = Artificially Synthesized Probe
  source 1..80: mol_type = other DNA

SEQ ID NO: 55337 - DNA, 80 bp, synthetic construct
  misc_feature 1..80: note = Artificially Synthesized Probe
  source 1..80: mol_type = other DNA
tttccagaaatacttgtgtattcggaagaattagaggaaggaaacttttgtttgaattttccacataatagcttagttca

SEQ ID NO: 55338 - DNA, 80 bp, synthetic construct; identical to SEQ ID NO: 25193
  misc_feature 1..80: note = Artificially Synthesized Probe
  source 1..80: mol_type = other DNA

SEQ ID NO: 55339 - DNA, 80 bp, synthetic construct
  misc_feature 1..80: note = Artificially Synthesized Probe
  source 1..80: mol_type = other DNA
taaattctttttgccttgaacttgaaaatcaattatctgtctgtgccccaccacctcttccctcatctcagccttcacga

SEQ ID NO: 55340 - DNA, 80 bp, synthetic construct
  misc_feature 1..80: note = Artificially Synthesized Probe
  source 1..80: mol_type = other DNA
aagtgggtacttaaaatgtgtcctgagtgacaaactggcccccactggaagaactctttaaaacactctgttaccagagc

SEQ ID NO: 55341 - DNA, 80 bp, synthetic construct; identical to SEQ ID NO: 25226
  misc_feature 1..80: note = Artificially Synthesized Probe
  source 1..80: mol_type = other DNA

SEQ ID NO: 55342 - DNA, 80 bp, synthetic construct
  misc_feature 1..80: note = Artificially Synthesized Probe
  source 1..80: mol_type = other DNA
ggttacaatattgttacagaaggactagaattagaatcacaatacttgggtgccacacttgacctttgtcacttgttatg

SEQ ID NO: 55343 - DNA, 80 bp, synthetic construct
  misc_feature 1..80: note = Artificially Synthesized Probe
  source 1..80: mol_type = other DNA
tattgtggtaaaatgtagactcttatattcttataggcagattgcaataaaactctactaagcaattacactagatttta

SEQ ID NO: 55344 - DNA, 80 bp, synthetic construct
  misc_feature 1..80: note = Artificially Synthesized Probe
  source 1..80: mol_type = other DNA
catgaaggcacgtgcatatttatggagaaagaatccttagctttccccagatgctcacatgtgtttgtgatcctaatggg

SEQ ID NO: 55345 - DNA, 80 bp, synthetic construct
  misc_feature 1..80: note = Artificially Synthesized Probe
  source 1..80: mol_type = other DNA
cggttttgtctaacaggaattttgtgcagtaaaatatctacctttcaaattccctgggaggagaaagacaatgcatactg

SEQ ID NO: 55346 - DNA, 80 bp, synthetic construct; identical to SEQ ID NO: 25227
  misc_feature 1..80: note = Artificially Synthesized Probe
  source 1..80: mol_type = other DNA

SEQ ID NO: 55347 - DNA, 80 bp, synthetic construct
  misc_feature 1..80: note = Artificially Synthesized Probe
  source 1..80: mol_type = other DNA
tttcttccttttttttttttttttttttgagatggagtctcattctgtcacccaggctggagtgcagtggcacaatcctg

SEQ ID NO: 55348 - DNA, 80 bp, synthetic construct; identical to SEQ ID NO: 33027
  misc_feature 1..80: note = Artificially Synthesized Probe
  source 1..80: mol_type = other DNA

SEQ ID NO: 55349 - DNA, 80 bp, synthetic construct
  misc_feature 1..80: note = Artificially Synthesized Probe
  source 1..80: mol_type = other DNA
agagacaaatggtaagagtaggaaaacatgacagattgggaggtgttgagttctgaatttggggacctaattgaaatgca

SEQ ID NO: 55350 - DNA, 80 bp, synthetic construct; identical to SEQ ID NO: 25228
  misc_feature 1..80: note = Artificially Synthesized Probe
  source 1..80: mol_type = other DNA

SEQ ID NO: 55351 - DNA, 80 bp, synthetic construct
  misc_feature 1..80: note = Artificially Synthesized Probe
  source 1..80: mol_type = other DNA
acaactgtttttgtatatcggtgtgtttgtgcactgtccctggagctctttgtactaagttatttttatttcattttcat

SEQ ID NO: 55352 - DNA, 80 bp, synthetic construct
  misc_feature 1..80: note = Artificially Synthesized Probe
  source 1..80: mol_type = other DNA
tgcccctttgtaacagttttaggttttttaaagagtcattagagtcacttatttatgctctgctgattagctatttattt

SEQ ID NO: 55353 - DNA, 80 bp, synthetic construct
  misc_feature 1..80: note = Artificially Synthesized Probe
  source 1..80: mol_type = other DNA
aatgaatcagaggttgttagctccagttaaaaaaaaaatgaagaaagagaccttcagagaggttggctaaatggcttgct

SEQ ID NO: 55354 - DNA, 80 bp, synthetic construct
  misc_feature 1..80: note = Artificially Synthesized Probe
  source 1..80: mol_type = other DNA
acttaaaatttgttctctaagtttagagctggactcaaaccattactggcaaaatcaatctggtcctttctttcctcctt

SEQ ID NO: 55355 - DNA, 80 bp, synthetic construct; identical to SEQ ID NO: 25229
  misc_feature 1..80: note = Artificially Synthesized Probe
  source 1..80: mol_type = other DNA

SEQ ID NO: 55356 - DNA, 80 bp, synthetic construct
  misc_feature 1..80: note = Artificially Synthesized Probe
  source 1..80: mol_type = other DNA
ccaaccccaacaggaatgccattctttcatttgtagcttgctaaactgggtcacttacctaaccaaataactatgtggct

SEQ ID NO: 55357 - DNA, 80 bp, synthetic construct
  misc_feature 1..80: note = Artificially Synthesized Probe
  source 1..80: mol_type = other DNA
cttcccataaacaatggtagcaagttgatgtttttctttctaatgttatttctcatgtagacattgatacatagtatttt

SEQ ID NO: 55358 - DNA, 80 bp, synthetic construct
  misc_feature 1..80: note = Artificially Synthesized Probe
  source 1..80: mol_type = other DNA
tttctctattattgggcacttaggttgtcacccaaattttattgttataaattacactcagtaaagatttttccattggt

SEQ ID NO: 55359 - DNA, 80 bp, synthetic construct; identical to SEQ ID NO: 25230
  misc_feature 1..80: note = Artificially Synthesized Probe
  source 1..80: mol_type = other DNA

SEQ ID NO: 55360 - DNA, 80 bp, synthetic construct
  misc_feature 1..80: note = Artificially Synthesized Probe
  source 1..80: mol_type = other DNA
aacaaaactcccacaattatccaccttaaccaattgctgtctcctacaaatcctttccaaccagacttcatgggtagaaa

SEQ ID NO: 55361 - DNA, 80 bp, synthetic construct
  misc_feature 1..80: note = Artificially Synthesized Probe
  source 1..80: mol_type = other DNA
ctaattcagtcggaagagaatgcaattattatggtcatttacatacaatatgctaagttaacacagctaatgagtgaaag

SEQ ID NO: 55362 - DNA, 80 bp, synthetic construct
  misc_feature 1..80: note = Artificially Synthesized Probe
  source 1..80: mol_type = other DNA
gaaaattagtgatatttaaaggaaaacagaaagtttagctcttggtttgctttgggagaggacgggactctgaagccccc

SEQ ID NO: 55363 - DNA, 80 bp, synthetic construct; identical to SEQ ID NO: 25231
  misc_feature 1..80: note = Artificially Synthesized Probe
  source 1..80: mol_type = other DNA

SEQ ID NO: 55364 - DNA, 80 bp, synthetic construct; identical to SEQ ID NO: 26799
  misc_feature 1..80: note = Artificially Synthesized Probe
  source 1..80: mol_type = other DNA

SEQ ID NO: 55365 - DNA, 80 bp, synthetic construct
  misc_feature 1..80: note = Artificially Synthesized Probe
  source 1..80: mol_type = other DNA
acctatggcaatatttaaggttatcaaaattataaagctccatcctggagaaatggtcatgtgacattaggcaatatgta

SEQ ID NO: 55366 - DNA, 80 bp, synthetic construct
  misc_feature 1..80: note = Artificially Synthesized Probe
  source 1..80: mol_type = other DNA
attatcattaccaaagaagcttgacattggtattaacttgcccacaattaactggtgtgatcaggcattagttcaaggtg

SEQ ID NO: 55367 - DNA, 80 bp, synthetic construct
  misc_feature 1..80: note = Artificially Synthesized Probe
  source 1..80: mol_type = other DNA
ggtcctatttgagatctaaaagattatctatttgacttattcttaacttacaacattgacatttttgcttattgctttca

SEQ ID NO: 55368 - DNA, 80 bp, synthetic construct; identical to SEQ ID NO: 25232
  misc_feature 1..80: note = Artificially Synthesized Probe
  source 1..80: mol_type = other DNA

SEQ ID NO: 55369 - DNA, 80 bp, synthetic construct
  misc_feature 1..80: note = Artificially Synthesized Probe
  source 1..80: mol_type = other DNA
ctatagctggtttcccaggagctttgtcatatccacattcgactgcagaaaaaaaacaggagttaactaactttcccaaa

SEQ ID NO: 55370 - DNA, 80 bp, synthetic construct
  misc_feature 1..80: note = Artificially Synthesized Probe
  source 1..80: mol_type = other DNA
atagggaagggaagtgttcttgagaatgtgtcttggttctccatgatgttcttggacagtagcaatgaaatgcatatcct

SEQ ID NO: 55371 - DNA, 80 bp, synthetic construct
  misc_feature 1..80: note = Artificially Synthesized Probe
  source 1..80: mol_type = other DNA
ttgtaacaggccaaggttgtagaaaacattatactgacattttctgtggcccttaacattttatttcagtctatctattc

SEQ ID NO: 55372 - DNA, 80 bp, synthetic construct; identical to SEQ ID NO: 25194
  misc_feature 1..80: note = Artificially Synthesized Probe
  source 1..80: mol_type = other DNA

SEQ ID NO: 55373 - DNA, 80 bp, synthetic construct; identical to SEQ ID NO: 25233
  misc_feature 1..80: note = Artificially Synthesized Probe
  source 1..80: mol_type = other DNA

SEQ ID NO: 55374 - DNA, 80 bp, synthetic construct
  misc_feature 1..80: note = Artificially Synthesized Probe
  source 1..80: mol_type = other DNA
atggtttggctctgtgttctcacctaaatcttatctcaaattgtaatccccatgtgttgggggaaggacctggtgggagg

SEQ ID NO: 55375 - DNA, 80 bp, synthetic construct
  misc_feature 1..80: note = Artificially Synthesized Probe
  source 1..80: mol_type = other DNA
atgattgtaagtctcctgaggcttcccaagccatgcagaactgtgagtcaattaaacctcttttctttataaattaccca

SEQ ID NO: 55376 - DNA, 80 bp, synthetic construct; identical to SEQ ID NO: 25234
  misc_feature 1..80: note = Artificially Synthesized Probe
  source 1..80: mol_type = other DNA

SEQ ID NO: 55377 - DNA, 80 bp, synthetic construct
  misc_feature 1..80: note = Artificially Synthesized Probe
  source 1..80: mol_type = other DNA
tcacatatgatgtttagtggagagtcaatatctgtgatttagtaaagaaatggtaaaactcgtgatcagaaataggggct

SEQ ID NO: 55378 - DNA, 80 bp, synthetic construct
  misc_feature 1..80: note = Artificially Synthesized Probe
  source 1..80: mol_type = other DNA
agacatattgaagaatttctgtctgtgtgttcatttttgcagtactagtagcttataacctagggaatattatgtgcctc

SEQ ID NO: 55379 - DNA, 80 bp, synthetic construct
  misc_feature 1..80: note = Artificially Synthesized Probe
  source 1..80: mol_type = other DNA
tttcttaagaatattgacctaaatattgactaaaagctgaggtgctcacagccttttctagcaatttaaaaaatcactca

SEQ ID NO: 55380 - DNA, 80 bp, synthetic construct; identical to SEQ ID NO: 25235
  misc_feature 1..80: note = Artificially Synthesized Probe
  source 1..80: mol_type = other DNA

SEQ ID NO: 55381 - DNA, 80 bp, synthetic construct
  misc_feature 1..80: note = Artificially Synthesized Probe
  source 1..80: mol_type = other DNA
cagcctagctaacatggtgaaaccccgtctctactaaaaatacaaaaaaaaaaaaaatagctggatgtggtggcgggtgt

SEQ ID NO: 55382 - DNA, 80 bp, synthetic construct
  misc_feature 1..80: note = Artificially Synthesized Probe
  source 1..80: mol_type = other DNA
gctttctcattagcaccacgtagagaataatgaattaacacatccctttgatcaaaaaggatttaagtttatcttctgag

SEQ ID NO: 55383 - DNA, 80 bp, synthetic construct
  misc_feature 1..80: note = Artificially Synthesized Probe
  source 1..80: mol_type = other DNA
ttttttgtcttgtgagaataaggcatgtagctgctcacacatgtagcttatatagcagctgtcaaggttcatatgctacc

SEQ ID NO: 55384 - DNA, 80 bp, synthetic construct
  misc_feature 1..80: note = Artificially Synthesized Probe
  source 1..80: mol_type = other DNA
atcacagagcaccggctagatctcagcctagtgctaagcaatttttgcatgttagtaccattcctccaagccattctgca

SEQ ID NO: 55385 - DNA, 80 bp, synthetic construct; identical to SEQ ID NO: 25236
  misc_feature 1..80: note = Artificially Synthesized Probe
  source 1..80: mol_type = other DNA

SEQ ID NO: 55386 - DNA, 80 bp, synthetic construct
  misc_feature 1..80: note = Artificially Synthesized Probe
  source 1..80: mol_type = other DNA
tatttggttgcgtaagttcttttatgctgatttgtgagattttggtgcactcattacccaagcagtatacaatgaaccca

SEQ ID NO: 55387 - DNA, 80 bp, synthetic construct
  misc_feature 1..80: note = Artificially Synthesized Probe
  source 1..80: mol_type = other DNA
ctccagctccatccagggtgctgtgaatgcggttaatttcctcctttcatggctgagtagtattccatcatatatattta

SEQ ID NO: 55388 - DNA, 80 bp, synthetic construct
  misc_feature 1..80: note = Artificially Synthesized Probe
  source 1..80: mol_type = other DNA
tcaaatggtagagctacttttagttctgtaaggaatctccgtactgttttccatagtggttgtgctagttgacattctca

SEQ ID NO: 55389 - DNA, 80 bp, synthetic construct
  misc_feature 1..80: note = Artificially Synthesized Probe
  source 1..80: mol_type = other DNA
cttatgtttgttggccatatgtatatcttcttttgagaattgtctattcatgtccttagcccactttatgatgggatttt

SEQ ID NO: 55390 - DNA, 80 bp, synthetic construct; identical to SEQ ID NO: 25237
  misc_feature 1..80: note = Artificially Synthesized Probe
  source 1..80: mol_type = other DNA

SEQ ID NO: 55391 - DNA, 80 bp, synthetic construct
  misc_feature 1..80: note = Artificially Synthesized Probe
  source 1..80: mol_type = other DNA
agtagagctgtggttgcttggcaacctgacattattctgccatttctggtatatttatccagtaaactagaaaattctgt

SEQ ID NO: 55392 - DNA, 80 bp, synthetic construct
  misc_feature 1..80: note = Artificially Synthesized Probe
  source 1..80: mol_type = other DNA
acatgtggcttgcgaattatcgcagcatcatttgttaaatagggtgttctttcccccactttatgtttttgtttgctttg

SEQ ID NO: 55393 - DNA, 80 bp, synthetic construct
  misc_feature 1..80: note = Artificially Synthesized Probe
  source 1..80: mol_type = other DNA
acattggtacaactaatatatgcccttatggaactcaagatttcttatgttaaatacagaataaaggaagtaggaatatt

SEQ ID NO: 55394 - DNA, 80 bp, synthetic construct; identical to SEQ ID NO: 25238
  misc_feature 1..80: note = Artificially Synthesized Probe
  source 1..80: mol_type = other DNA

SEQ ID NO: 55395 - DNA, 80 bp, synthetic construct
  misc_feature 1..80: note = Artificially Synthesized Probe
  source 1..80: mol_type = other DNA
tactgtatcttgctcttcagcaagtgctgtttctccttccagtatacttctctctggtttttttttttactttgcctcaa

SEQ ID NO: 55396 - DNA, 80 bp, synthetic construct
  misc_feature 1..80: note = Artificially Synthesized Probe
  source 1..80: mol_type = other DNA
ctccattcttgttttacatttggtgggtatatttatttgtatctcttaagtaaaagaaactaagggactttgaaaaaaaa

SEQ ID NO: 55397 - DNA, 80 bp, synthetic construct
  misc_feature 1..80: note = Artificially Synthesized Probe
  source 1..80: mol_type = other DNA
agtagtgtattgtgtatatacccttatctaatagtgtttgagtctatccctccactatatgtatatcctaaattgtacag

SEQ ID NO: 55398 - DNA, 80 bp, synthetic construct; identical to SEQ ID NO: 25239
  misc_feature 1..80: note = Artificially Synthesized Probe
  source 1..80: mol_type = other DNA

SEQ ID NO: 55399 - DNA, 80 bp, synthetic construct
  misc_feature 1..80: note = Artificially Synthesized Probe
  source 1..80: mol_type = other DNA
tgggaggctgaggcaggagaatggcttgaaccagggaggcagagcttgcagtgagccgagattgtgccactgcactccag

SEQ ID NO: 55400 - DNA, 80 bp, synthetic construct
  misc_feature 1..80: note = Artificially Synthesized Probe
  source 1..80: mol_type = other DNA
ggaacttacatacatgattaatgtgaatgccttctgaaccaaagctgaaggaagcagatgagagctctgtgggcgtaggc

SEQ ID NO: 55401 - DNA, 80 bp, synthetic construct
  misc_feature 1..80: note = Artificially Synthesized Probe
  source 1..80: mol_type = other DNA
aagggacatattccgttttcaattttaaggcattttcctgaaatgttgacttcactttcacataatttattcctagtgaa

SEQ ID NO: 55402 - DNA, 80 bp, synthetic construct
  misc_feature 1..80: note = Artificially Synthesized Probe
  source 1..80: mol_type = other DNA
gacccattgggaagagccacctgaggtggcttcatgacatgatggattttgaagagatgtcttagacagatctaatgtta

SEQ ID NO: 55403 - DNA, 80 bp, synthetic construct
  misc_feature 1..80: note = Artificially Synthesized Probe
  source 1..80: mol_type = other DNA
tgcattatttcttttccccactgagagactgtcgtaacacacataggatgctggacacagcaacatgggagccaggttct

SEQ ID NO: 55404 - DNA, 80 bp, synthetic construct; identical to SEQ ID NO: 25240
  misc_feature 1..80: note = Artificially Synthesized Probe
  source 1..80: mol_type = other DNA

SEQ ID NO: 55405 - DNA, 80 bp, synthetic construct
  misc_feature 1..80: note = Artificially Synthesized Probe
  source 1..80: mol_type = other DNA
acagagtggaaatgagctgtttgaatttttcagccatccttccttttcttagggccaaagatgtagttttataaatctcc

SEQ ID NO: 55406 - DNA, 80 bp, synthetic construct
  misc_feature 1..80: note = Artificially Synthesized Probe
  source 1..80: mol_type = other DNA
atgttcatgggatggcattcaaaaacaagcttaagcaatctttctgagattgggagccaatccttgagacacctgggaat

SEQ ID NO: 55407 - DNA, 80 bp, synthetic construct; identical to SEQ ID NO: 25241
  misc_feature 1..80: note = Artificially Synthesized Probe
  source 1..80: mol_type = other DNA

SEQ ID NO: 55408 - DNA, 80 bp, synthetic construct
  misc_feature 1..80: note = Artificially Synthesized Probe
  source 1..80: mol_type = other DNA
ttttgttccttgacagaaattcgcaggaccccttttttagcaacagagcaatactatagcttaggtatttgagtggaaat

SEQ ID NO: 55409 - DNA, 80 bp, synthetic construct
  misc_feature 1..80: note = Artificially Synthesized Probe
  source 1..80: mol_type = other DNA
actgcaaacaaatcatagtggaactaaggggaacttaatttactggtaagagtattttccttaatcagttgttttatgca

SEQ ID NO: 55410 - DNA, 80 bp, synthetic construct
  misc_feature 1..80: note = Artificially Synthesized Probe
  source 1..80: mol_type = other DNA
cgcccccttttcacgccccgcccccggtggccgaggccggattcggacagctcggggtcagtcgacggagcacaccgggc

SEQ ID NO: 55411 - DNA, 80 bp, synthetic construct
  misc_feature 1..80: note = Artificially Synthesized Probe
  source 1..80: mol_type = other DNA
aattgctggtttatttttgaaagagcaaaacccttaccttaaagttatttttcttgttggctgacctgttggcatatttg

SEQ ID NO: 55412 - DNA, 80 bp, synthetic construct; identical to SEQ ID NO: 25242
  misc_feature 1..80: note = Artificially Synthesized Probe
  source 1..80: mol_type = other DNA

SEQ ID NO: 55413 - DNA, 80 bp, synthetic construct
  misc_feature 1..80: note = Artificially Synthesized Probe
  source 1..80: mol_type = other DNA
gctaattgaactgacagtttggtacatttagggtgggtataaatatctgaatcaaatgatgctggcagatgatgataaga

SEQ ID NO: 55414 - DNA, 80 bp, synthetic construct
  misc_feature 1..80: note = Artificially Synthesized Probe
  source 1..80: mol_type = other DNA
gaataatagttgtaactgcctacaggtgcagcctaaattagattattacgataatgaatattagcactgggtttggtcca

SEQ ID NO: 55415 - DNA, 80 bp, synthetic construct
  misc_feature 1..80: note = Artificially Synthesized Probe
  source 1..80: mol_type = other DNA
ttcttactttctcaggagcacattatgtcaccaagagaatatgcactccagaagaaataagatattacttggtgcatgaa

SEQ ID NO: 55416 - DNA, 80 bp, synthetic construct
  misc_feature 1..80: note = Artificially Synthesized Probe
  source 1..80: mol_type = other DNA
accaagaataagtctatgaagaaactctctgtgctttgaaaaacatttgatctcttctctcatccactggagtggttttg

SEQ ID NO: 55417 - DNA, 80 bp, synthetic construct
  misc_feature 1..80: note = Artificially Synthesized Probe
  source 1..80: mol_type = other DNA
ttctaatatccttagagaaaactcttcccaaaacctgattaatcaattcctttgatgatgattgtgtgggatacatttat

SEQ ID NO: 55418 - DNA, 80 bp, synthetic construct; identical to SEQ ID NO: 25243
  misc_feature 1..80: note = Artificially Synthesized Probe
  source 1..80: mol_type = other DNA

SEQ ID NO: 55419 - DNA, 80 bp, synthetic construct
  misc_feature 1..80: note = Artificially Synthesized Probe
  source 1..80: mol_type = other DNA
gtggaatcgtagtcataaaacacccatacccacacccacacacaaacacgcatttacctaatcttcatttttcttttcag

SEQ ID NO: 55420 - DNA, 80 bp, synthetic construct
  misc_feature 1..80: note = Artificially Synthesized Probe
  source 1..80: mol_type = other DNA
tacaggtttcaacacccaaatttatctgaacttagggcacaataagcagtttaactgttagaaatcttatgagattgagt

SEQ ID NO: 55421 - DNA, 80 bp, synthetic construct
  misc_feature 1..80: note = Artificially Synthesized Probe
  source 1..80: mol_type = other DNA
acatgtgctgtgtggtcaccttgggtaatgtgccgagactgcttgatggtacttatctctacacactgcatctcatactg

SEQ ID NO: 55422 - DNA, 80 bp, synthetic construct; identical to SEQ ID NO: 25244
  misc_feature 1..80: note = Artificially Synthesized Probe
  source 1..80: mol_type = other DNA

SEQ ID NO: 55423 - DNA, 80 bp, synthetic construct
  misc_feature 1..80: note = Artificially Synthesized Probe
  source 1..80: mol_type = other DNA
ctcatgaacacatctttgagagcagagttcaagttaaatttttattttcatcattacctctgagaacacaatctggggca

SEQ ID NO: 55424 - DNA, 80 bp, synthetic construct; identical to SEQ ID NO: 25195
  misc_feature 1..80: note = Artificially Synthesized Probe
  source 1..80: mol_type = other DNA

SEQ ID NO: 55425 - DNA, 80 bp, synthetic construct
  misc_feature 1..80: note = Artificially Synthesized Probe
  source 1..80: mol_type = other DNA
agagtttccatttacacttaaacatggttactgatgcgtcttaatgttgccttaactatcaggtttctgatagccccaca

SEQ ID NO: 55426 - DNA, 80 bp, synthetic construct
  misc_feature 1..80: note = Artificially Synthesized Probe
  source 1..80: mol_type = other DNA
tgcataaataatcgaagttgtatgctcttcagcaatgatgctaccccatatcctttttttttctttcccatgatatgagg

SEQ ID NO: 55427 - DNA, 80 bp, synthetic construct; identical to SEQ ID NO: 25245
  misc_feature 1..80: note = Artificially Synthesized Probe
  source 1..80: mol_type = other DNA

SEQ ID NO: 55428 - DNA, 80 bp, synthetic construct
  misc_feature 1..80: note = Artificially Synthesized Probe
  source 1..80: mol_type = other DNA
ttttaagtcactaggaaaatgacatctcaaaatcaaaagattatagaatgagcactatatgaagaattacattttaaagc

SEQ ID NO: 55429 - DNA, 80 bp, synthetic construct
  misc_feature 1..80: note = Artificially Synthesized Probe
  source 1..80: mol_type = other DNA
atcaaggtaataaatgtatttattacttccaaaagtttcctctgtccctctgtttttgtttgtaagattttaataggctc

SEQ ID NO: 55430 - DNA, 80 bp, synthetic construct
  misc_feature 1..80: note = Artificially Synthesized Probe
  source 1..80: mol_type = other DNA
tactgaaacccagcaaaacttgggtgatctctttcataagcagacacttttaatcttatattgacatttaaaaggactgt

SEQ ID NO: 55431 - DNA, 80 bp, synthetic construct; identical to SEQ ID NO: 25246
  misc_feature 1..80: note = Artificially Synthesized Probe
  source 1..80: mol_type = other DNA

SEQ ID NO: 55432 - DNA, 80 bp, synthetic construct
  misc_feature 1..80: note = Artificially Synthesized Probe
  source 1..80: mol_type = other DNA
agtctgtcataattgacttgcagtggaaggaagcctcatgcacaaagatcaaagattagtgacttcacatttaccacaac

SEQ ID NO: 55433 - DNA, 80 bp, synthetic construct
  misc_feature 1..80: note = Artificially Synthesized Probe
  source 1..80: mol_type = other DNA
gagttctaccttcgaaagagtgagaaactggcactattggcttaagtaacttatttgcaaacaggcattattaggcagtg

SEQ ID NO: 55434 - DNA, 80 bp, synthetic construct
  misc_feature 1..80: note = Artificially Synthesized Probe
  source 1..80: mol_type = other DNA
tttaagttggtcacagactttggtccatggtaacatactaattgttaacttcctgttaaccagttatatcaagccttatg

SEQ ID NO: 55435 - DNA, 80 bp, synthetic construct; identical to SEQ ID NO: 25247
  misc_feature 1..80: note = Artificially Synthesized Probe
  source 1..80: mol_type = other DNA

SEQ ID NO: 55436 - DNA, 80 bp, synthetic construct
  misc_feature 1..80: note = Artificially Synthesized Probe
  source 1..80: mol_type = other DNA
tgcaggtgtgtggcattggcttagtcatgttgacctctctaagactagtttcttctttagaaacggggaaatagccatac

SEQ ID NO: 55437 - DNA, 80 bp, synthetic construct
  misc_feature 1..80: note = Artificially Synthesized Probe
  source 1..80: mol_type = other DNA
tcctgcctcagcctcccaaattgctgggattacaagccacaaattttatttgatattagtaatttaatttttacatgcgg

SEQ ID NO: 55438 - DNA, 80 bp, synthetic construct
  misc_feature 1..80: note = Artificially Synthesized Probe
  source 1..80: mol_type = other DNA
caaacctagtggaagattagggttatttttagtaagatttgtctgtgcagatctatctcagtactgagtttctatctcca

SEQ ID NO: 55439 - DNA, 80 bp, synthetic construct
  misc_feature 1..80: note = Artificially Synthesized Probe
  source 1..80: mol_type = other DNA
aagtggcatattttggggtgtcatattctgatctctttcagttcctatttattatattctcctgtcattatgctttgtat

SEQ ID NO: 55440 - DNA, 80 bp, synthetic construct; identical to SEQ ID NO: 25248
  misc_feature 1..80: note = Artificially Synthesized Probe
  source 1..80: mol_type = other DNA

SEQ ID NO: 55441 - DNA, 80 bp, synthetic construct
  misc_feature 1..80: note = Artificially Synthesized Probe
  source 1..80: mol_type = other DNA
agactagaaggatccatttgattgggaactttattagaatgctttcatttttcttgagatagatgtggaatccatctgtg

SEQ ID NO: 55442 - DNA, 80 bp, synthetic construct
  misc_feature 1..80: note = Artificially Synthesized Probe
  source 1..80: mol_type = other DNA
cctgaggctgctaatccgtaaagtgggctcataatccttatctcagataatcatctcaactactgtttgttatcagtgtc

SEQ ID NO: 55443 - DNA, 80 bp, synthetic construct; identical to SEQ ID NO: 25249
  misc_feature 1..80: note = Artificially Synthesized Probe
  source 1..80: mol_type = other DNA

SEQ ID NO: 55444 - DNA, 80 bp, synthetic construct
  misc_feature 1..80: note = Artificially Synthesized Probe
  source 1..80: mol_type = other DNA
aaagtgtttcagtgggatgtttaatttcccattatggttggtttctcaaatcattccttttgtaattgtcacatttttac

SEQ ID NO: 55445 - DNA, 80 bp, synthetic construct
  misc_feature 1..80: note = Artificially Synthesized Probe
  source 1..80: mol_type = other DNA
aatgaacaaagatagagggacagagcgtatgtgtgtgtgtatccctgtgtatgtgaataactgtgagccatgatcaatgg

SEQ ID NO: 55446 - DNA, 80 bp, synthetic construct
  misc_feature 1..80: note = Artificially Synthesized Probe
  source 1..80: mol_type = other DNA
caccacaaacttagagaccaccagaaatttgtgttacttgtttcttataaaatatagaataatcttttgaagattcttgt

SEQ ID NO: 55447 - DNA, 80 bp, synthetic construct
  misc_feature 1..80: note = Artificially Synthesized Probe
  source 1..80: mol_type = other DNA
gcctgcttctgattatatttatgttaaacatttaatctttctttgtagagccacagatttaagaaagcatccagatatat

SEQ ID NO: 55448 - DNA, 80 bp, synthetic construct; identical to SEQ ID NO: 25250
  misc_feature 1..80: note = Artificially Synthesized Probe
  source 1..80: mol_type = other DNA

SEQ ID NO: 55449 - DNA, 80 bp, synthetic construct
  misc_feature 1..80: note = Artificially Synthesized Probe
  source 1..80: mol_type = other DNA
aatggtattttattttcatttacccttccatttgtttcttataatatttcccattttgttagcctatgtatagatacgct

SEQ ID NO: 55450 - DNA, 80 bp, synthetic construct
  misc_feature 1..80: note = Artificially Synthesized Probe
  source 1..80: mol_type = other DNA
ttggagaggtgatttaagtgggcttgaatttgaccttccatacttactagtaatgtgtgcttttacaagttacttaatct

SEQ ID NO: 55451 - DNA, 80 bp, synthetic construct
  misc_feature 1..80: note = Artificially Synthesized Probe
  source 1..80: mol_type = other DNA
atctcgttatgaaccaattatgctcccttagcaccatagttatagaggatgggacagttaatgcgagttaggttgtttag

SEQ ID NO: 55452 - DNA, 80 bp, synthetic construct
  misc_feature 1..80: note = Artificially Synthesized Probe
  source 1..80: mol_type = other DNA
taccttttctgtagtttttgtatgcgggccaataaagttccataacttgttagtttagcttagtttgatttgggttcctg

SEQ ID NO: 55453 - DNA, 80 bp, synthetic construct; identical to SEQ ID NO: 25251
  misc_feature 1..80: note = Artificially Synthesized Probe
  source 1..80: mol_type = other DNA

SEQ ID NO: 55454 - DNA, 80 bp, synthetic construct
  misc_feature 1..80: note = Artificially Synthesized Probe
  source 1..80: mol_type = other DNA
tgatgatattatctccattttacgaatgcacaaatggagggacaaagagctaaagtcaaattggtggcctcctggttctc

SEQ ID NO: 55455 - DNA, 80 bp, synthetic construct; identical to SEQ ID NO: 25196
  misc_feature 1..80: note = Artificially Synthesized Probe
  source 1..80: mol_type = other DNA

SEQ ID NO: 55456 - DNA, 80 bp, synthetic construct
  misc_feature 1..80: note = Artificially Synthesized Probe
  source 1..80: mol_type = other DNA
atgcctataaaggcccaacaccatcagctcagctctggacaactcctgcttccgaacacccctttcccataaattgatct

SEQ ID NO: 55457 - DNA, 80 bp, synthetic construct; identical to SEQ ID NO: 25252
  misc_feature 1..80: note = Artificially Synthesized Probe
  source 1..80: mol_type = other DNA

SEQ ID NO: 55458 - DNA, 80 bp, synthetic construct
  misc_feature 1..80: note = Artificially Synthesized Probe
  source 1..80: mol_type = other DNA
cagcatctggtgagggccttctcgatgcttccttcagagtggaggtagccatgcctcacatattggaaagtggaaaggca

SEQ ID NO: 55459 - DNA, 80 bp, synthetic construct
  misc_feature 1..80: note = Artificially Synthesized Probe
  source 1..80: mol_type = other DNA
atgcattcaaaccctaccatcatgcaaagaagccaaagttatatttcctattgtccctaccctttcctcagataccagga

SEQ ID NO: 55460 - DNA, 80 bp, synthetic construct
  misc_feature 1..80: note = Artificially Synthesized Probe
  source 1..80: mol_type = other DNA
taattacagtctcaaacagtggttgcattctggcaaaacgatgttttgagttagagttgttatgcagttagtcagttgtt

SEQ ID NO: 55461 - DNA, 80 bp, synthetic construct; identical to SEQ ID NO: 25253
  misc_feature 1..80: note = Artificially Synthesized Probe
  source 1..80: mol_type = other DNA

SEQ ID NO: 55462 - DNA, 80 bp, synthetic construct
  misc_feature 1..80: note = Artificially Synthesized Probe
  source 1..80: mol_type = other DNA
aagataaatggatcatctgtgtacttcaagctttattttcttgcatagttttttcctagtatttcctgacaacctagaac

SEQ ID NO: 55463 - DNA, 80 bp, synthetic construct
  misc_feature 1..80: note = Artificially Synthesized Probe
  source 1..80: mol_type = other DNA
caactagggttgtgaaccatcggttttttacactatctaaaaggaaggtgtctgtggattgaggatatttcttaccttgc

SEQ ID NO: 55464 - DNA, 80 bp, synthetic construct
  misc_feature 1..80: note = Artificially Synthesized Probe
  source 1..80: mol_type = other DNA
tgagttctgcttagagctaaacatattctaagcgaagtaaggaggtttcatgcttctgtgtatgcataagtgtgcctgac

SEQ ID NO: 55465 - DNA, 80 bp, synthetic construct
  misc_feature 1..80: note = Artificially Synthesized Probe
  source 1..80: mol_type = other DNA
ctcctccttttgagtgatgtacagctattgcaccactctaagtggtaacttaacacagaataaatatgaatagaattatc

SEQ ID NO: 55466 - DNA, 80 bp, synthetic construct
  misc_feature 1..80: note = Artificially Synthesized Probe
  source 1..80: mol_type = other DNA
aaatgctctggcaaacttctgaggtttttcttactaatcttcttggtttaaatagcactttattctctgaagatctcaaa

SEQ ID NO: 55467 - DNA, 80 bp, synthetic construct; identical to SEQ ID NO: 25254
  misc_feature 1..80: note = Artificially Synthesized Probe
  source 1..80: mol_type = other DNA

SEQ ID NO: 55468 - DNA, 80 bp, synthetic construct
  misc_feature 1..80: note = Artificially Synthesized Probe
  source 1..80: mol_type = other DNA
gctaaatatgtttttggatgactgagtgatggcatgatttgaatcagacaacattattttaccagccttggaatctgggc

SEQ ID NO: 55469 - DNA, 80 bp, synthetic construct
  misc_feature 1..80: note = Artificially Synthesized Probe
  source 1..80: mol_type = other DNA
taaagttttgtccacctgtgtatctttagtggtatggcttcatgtcacctcaaatatggaggcattagctttgtttagtt

SEQ ID NO: 55470 - DNA, 80 bp, synthetic construct; identical to SEQ ID NO: 25255
  misc_feature 1..80: note = Artificially Synthesized Probe
  source 1..80: mol_type = other DNA

SEQ ID NO: 55471 - DNA, 80 bp, synthetic construct
  misc_feature 1..80: note = Artificially Synthesized Probe
  source 1..80: mol_type = other DNA
ggattacaggtgcctgccaccatgcctggctaattttgcatttttagtagagatggggtttcaccatgctgaccaggctg

SEQ ID NO: 55472 - DNA, 80 bp, synthetic construct
  misc_feature 1..80: note = Artificially Synthesized Probe
  source 1..80: mol_type = other DNA
gagattcagcttgccacaggtctatttaaaattgtttttatttcaattcatgtattttttatgtaaagtagtgttgattt

SEQ ID NO: 55473 - DNA, 80 bp, synthetic construct
  misc_feature 1..80: note = Artificially Synthesized Probe
  source 1..80: mol_type = other DNA
tgtctcatcttgaaggagaagatggaatctggagattgcagcttgaatggctccggaagaggcagcatgttcggtggatt

SEQ ID NO: 55474 - DNA, 80 bp, synthetic construct
  misc_feature 1..80: note = Artificially Synthesized Probe
  source 1..80: mol_type = other DNA
ctgtccaggcagaagcaacatgacctctggtttgaaaggcctctcagattaagagagaatattgtgtcttggggaaatca

SEQ ID NO: 55475 - DNA, 80 bp, synthetic construct; identical to SEQ ID NO: 25256
  misc_feature 1..80: note = Artificially Synthesized Probe
  source 1..80: mol_type = other DNA

SEQ ID NO: 55476 - DNA, 80 bp, synthetic construct
  misc_feature 1..80: note = Artificially Synthesized Probe
  source 1..80: mol_type = other DNA
tttccatcttcggaccttgcctctgaataagctcagcttgtctgaatcagttttaaatagaagcatttacacttggatac

SEQ ID NO: 55477 - DNA, 80 bp, synthetic construct
  misc_feature 1..80: note = Artificially Synthesized Probe
  source 1..80: mol_type = other DNA
cagataacaagattcctgtgactttggggttttgaatatttctctgttttgcctgcagacttccaatgaggtagggagag

SEQ ID NO: 55478 - DNA, 80 bp, synthetic construct
  misc_feature 1..80: note = Artificially Synthesized Probe
  source 1..80: mol_type = other DNA
attgttattaactaagtcccctttttttttttataaagaaggtactacaattatcacacacctttattttaaacgtatgg

SEQ ID NO: 55479 - DNA, 80 bp, synthetic construct
  misc_feature 1..80: note = Artificially Synthesized Probe
  source 1..80: mol_type = other DNA
catgcatgtcttttttttagagagagaatttcaccacatttcaggctggctttgaactcctgggctcaagtgatctgccc

SEQ ID NO: 55480 - DNA, 80 bp, synthetic construct; identical to SEQ ID NO: 25257
  misc_feature 1..80: note = Artificially Synthesized Probe
  source 1..80: mol_type = other DNA

SEQ ID NO: 55481 - DNA, 80 bp, synthetic construct
  misc_feature 1..80: note = Artificially Synthesized Probe
  source 1..80: mol_type = other DNA
tgtcccattgcttgttatctcatccaccattccttgctatctgctttaccctgctttattatttttttcatagctcttat

SEQ ID NO: 55482 - DNA, 80 bp, synthetic construct
  misc_feature 1..80: note = Artificially Synthesized Probe
  source 1..80: mol_type = other DNA
taagtaaaaggctaacttgggatgtgattgcatattcagatttttgggtcccaagctgggcctacagaattagaatttct

SEQ ID NO: 55483 - DNA, 80 bp, synthetic construct; identical to SEQ ID NO: 25258
  misc_feature 1..80: note = Artificially Synthesized Probe
  source 1..80: mol_type = other DNA

SEQ ID NO: 55484 - DNA, 80 bp, synthetic construct
  misc_feature 1..80: note = Artificially Synthesized Probe
  source 1..80: mol_type = other DNA
gtggcgcggacctgtaatgccagttactcaggaggctgaggcaagagaatcacttgaacccaggaggtggaggttgcagt

SEQ ID NO: 55485 - DNA, 80 bp, synthetic construct
  misc_feature 1..80: note = Artificially Synthesized Probe
  source 1..80: mol_type = other DNA
tgctgactgtatattttaagtcaactgcatattactggccaactggagatcactatctattaagacataaaatttgctat

SEQ ID NO: 55486 - DNA, 80 bp, synthetic construct
  misc_feature 1..80: note = Artificially Synthesized Probe
  source 1..80: mol_type = other DNA
agcttaccaaacaagacccaggtagagcatttcaaaaagctaccaaattgacacagctggggtgtagtttgggaaatttg

SEQ ID NO: 55487 - DNA, 80 bp, synthetic construct
  misc_feature 1..80: note = Artificially Synthesized Probe
  source 1..80: mol_type = other DNA
ttaaatgagattattttttctcagacttttccacaaggcgtcagcagctctgtaaccaccagattgtcagaaattagcct

SEQ ID NO: 55488 - DNA, 80 bp, synthetic construct; identical to SEQ ID NO: 25259
  misc_feature 1..80: note = Artificially Synthesized Probe
  source 1..80: mol_type = other DNA

SEQ ID NO: 55489 - DNA, 80 bp, synthetic construct
  misc_feature 1..80: note = Artificially Synthesized Probe
  source 1..80: mol_type = other DNA
tggactttgaacaccgcttgtataaatatttcatttggcccaaagaatgtttaagacaaatttcagccaacatttaaata

SEQ ID NO: 55490 - DNA, 80 bp, synthetic construct
  misc_feature 1..80: note = Artificially Synthesized Probe
  source 1..80: mol_type = other DNA
tttacctccaagtaaagtacttggtcttttttaaaaaagaaggaagaagagcaaaatagagggagggaagaagagaggga

SEQ ID NO: 55491 - DNA, 80 bp, synthetic construct
  misc_feature 1..80: note = Artificially Synthesized Probe
  source 1..80: mol_type = other DNA
aggccagttgctacttaaaagtaagcattgggctgaggttaagaaatcatattctatctttaaattttatattcactacc

SEQ ID NO: 55492 - DNA, 80 bp, synthetic construct; identical to SEQ ID NO: 25260
  misc_feature 1..80: note = Artificially Synthesized Probe
  source 1..80: mol_type = other DNA

SEQ ID NO: 55493 - DNA, 80 bp, synthetic construct
  misc_feature 1..80: note = Artificially Synthesized Probe
  source 1..80: mol_type = other DNA
tcgagtttgggaatttttagcagcttgagtatatttaagcccagatctacacagtactcacagggcaggattcacacgtt

SEQ ID NO: 55494 - DNA, 80 bp, synthetic construct
  misc_feature 1..80: note = Artificially Synthesized Probe
  source 1..80: mol_type = other DNA
caggattcacacgtttaagcctagatctacacagtactcacagggcaggattcacacgtttaagcctagatctacacagt

SEQ ID NO: 55495 - DNA, 80 bp, synthetic construct
  misc_feature 1..80: note = Artificially Synthesized Probe
  source 1..80: mol_type = other DNA
taagcctagatctacacagtactcacagggcaggattcacacgtttaagcccagatctacacagtactcacagggcagga

SEQ ID NO: 55496 - DNA, 80 bp, synthetic construct; identical to SEQ ID NO: 25261
  misc_feature 1..80: note = Artificially Synthesized Probe
  source 1..80: mol_type = other DNA

SEQ ID NO: 55497 - DNA, 80 bp, synthetic construct
  misc_feature 1..80: note = Artificially Synthesized Probe
  source 1..80: mol_type = other DNA
aatgtttaagacatgggagttcattcaagccttcaaagacatcactgtgcaaactaatcaaaacacacctgtgagtttgg

SEQ ID NO: 55498 - DNA, 80 bp, synthetic construct
  misc_feature 1..80: note = Artificially Synthesized Probe
  source 1..80: mol_type = other DNA
cttcaagtgctatgcaaagtgagggaaatttggagagtagattcttctgaagatttctctgctaaataagttgcactcaa

SEQ ID NO: 55499 - DNA, 80 bp, synthetic construct
  misc_feature 1..80: note = Artificially Synthesized Probe
  source 1..80: mol_type = other DNA
taggtacattaagagttgcagctcttagagtagttaatccggaaaaagaaaaaaaaaagccaaagtgcttgctgaacatt

SEQ ID NO: 55500 - DNA, 80 bp, synthetic construct; identical to SEQ ID NO: 25262
  misc_feature 1..80: note = Artificially Synthesized Probe
  source 1..80: mol_type = other DNA

SEQ ID NO: 55501 - DNA, 80 bp, synthetic construct
  misc_feature 1..80: note = Artificially Synthesized Probe
  source 1..80: mol_type = other DNA
catggcttcctctcaccttcactttgttcctttcttttatatagatcctactccaaagaggtaattaagggaccttaaag

SEQ ID NO: 55502 - DNA, 80 bp, synthetic construct
  misc_feature 1..80: note = Artificially Synthesized Probe
  source 1..80: mol_type = other DNA
cttttagatttttatagctcttcgaactcagagaacattcaccacatctatattggcctagggaatgttgaaagaatgat

SEQ ID NO: 55503 - DNA, 80 bp, synthetic construct
  misc_feature 1..80: note = Artificially Synthesized Probe
  source 1..80: mol_type = other DNA
tctgcttatctaagacggatagtattgatggactgcactatcacagtcttagacttgcagaaatgccttggagttttttg

SEQ ID NO: 55504 - DNA, 80 bp, synthetic construct
  misc_feature 1..80: note = Artificially Synthesized Probe
  source 1..80: mol_type = other DNA
tatttctctacgcacttttaaagcaagcccacacagtaaatgatattgttcataacccctgcctttattgctttcttccc

SEQ ID NO: 55505 - DNA, 80 bp, synthetic construct; identical to SEQ ID NO: 25263
  misc_feature 1..80: note = Artificially Synthesized Probe
  source 1..80: mol_type = other DNA

SEQ ID NO: 55506 - DNA, 80 bp, synthetic construct
  misc_feature 1..80: note = Artificially Synthesized Probe
  source 1..80: mol_type = other DNA
atccttggtcttttaacaaaggacatctgactaataaaatagtcttagagttgtaggagaaatgtgtcattctggacaac

SEQ ID NO: 55507 - DNA, 80 bp, synthetic construct
  misc_feature 1..80: note = Artificially Synthesized Probe
  source 1..80: mol_type = other DNA
aagaactacaggagagccacagccctctgaagtagtaatttttgtaaatttgcgaataatgatgttacatcacgtcactg

SEQ ID NO: 55508 - DNA, 80 bp, synthetic construct
  misc_feature 1..80: note = Artificially Synthesized Probe
  source 1..80: mol_type = other DNA
cagagacaaactgctaaggttcacattcttgcttccattatttgctagctgcatgaacttagccaaatttctcaacattt

SEQ ID NO: 55509 - DNA, 80 bp, synthetic construct
  misc_feature 1..80: note = Artificially Synthesized Probe
  source 1..80: mol_type = other DNA
tattttcatatctcttactgatcactgtaactcaaataattgtgctgtcttattattcttagtttgcaagtgaaaaactg

SEQ ID NO: 55510 - DNA, 80 bp, synthetic construct; identical to SEQ ID NO: 25264
  misc_feature 1..80: note = Artificially Synthesized Probe
  source 1..80: mol_type = other DNA

SEQ ID NO: 55511 - DNA, 80 bp, synthetic construct
  misc_feature 1..80: note = Artificially Synthesized Probe
  source 1..80: mol_type = other DNA
tttgaacttccaccaaaaataacaagccgtctaataaacaaaccatcccatgcacagagaaagaaatggatggttggggc

SEQ ID NO: 55512 - DNA, 80 bp, synthetic construct; identical to SEQ ID NO: 25197
  misc_feature 1..80: note = Artificially Synthesized Probe
  source 1..80: mol_type = other DNA

SEQ ID NO: 55513 - DNA, 80 bp, synthetic construct
  misc_feature 1..80: note = Artificially Synthesized Probe
  source 1..80: mol_type = other DNA
gttgtacagtatcctcagttaagcatgtataccaggagaaggatccatctttcttgcactttgaaggatttggtaactta

SEQ ID NO: 55514 - DNA, 80 bp, synthetic construct
  misc_feature 1..80: note = Artificially Synthesized Probe
  source 1..80: mol_type = other DNA
atttctttaacaaggaaagcgatacaatttctacatgggaaggatgcattggaagcaacctggttagaagggggctgggg

SEQ ID NO: 55515 - DNA, 80 bp, synthetic construct; identical to SEQ ID NO: 25265
  misc_feature 1..80: note = Artificially Synthesized Probe
  source 1..80: mol_type = other DNA

SEQ ID NO: 55516 - DNA, 80 bp, synthetic construct
  misc_feature 1..80: note = Artificially Synthesized Probe
  source 1..80: mol_type = other DNA
tgctctccagattagcaaggcagcacttccaatgttcagtggagggcactttaagatgcaattatttacacttcatgttg

SEQ ID NO: 55517 - DNA, 80 bp, synthetic construct
  misc_feature 1..80: note = Artificially Synthesized Probe
  source 1..80: mol_type = other DNA
tgatcacaaatcacgtgtcagcacctccataacatttacctgcataatttgtccttattattttttatgttgatgaatct

SEQ ID NO: 55518 - DNA, 80 bp, synthetic construct; identical to SEQ ID NO: 25266
  misc_feature 1..80: note = Artificially Synthesized Probe
  source 1..80: mol_type = other DNA

SEQ ID NO: 55519 - DNA, 80 bp, synthetic construct
  misc_feature 1..80: note = Artificially Synthesized Probe
  source 1..80: mol_type = other DNA
tactgcattcacttcctttgaaatgttagtattaagaagttttctagtagctgttctcttaaaattacgaggatttttga

SEQ ID NO: 55520 - DNA, 80 bp, synthetic construct
  misc_feature 1..80: note = Artificially Synthesized Probe
  source 1..80: mol_type = other DNA
aacacctaattaaaccgtgtgtgtatttcaaacgtgaggctaggttctcattgatgctctccactaaattgttgcatgaa

SEQ ID NO: 55521 - DNA, 80 bp, synthetic construct
  misc_feature 1..80: note = Artificially Synthesized Probe
  source 1..80: mol_type = other DNA
taccatagaaatgcatttgccttgatatcgtcatttttagcaatgagtttgatcagctttgtgttgatgatcaattctaa

SEQ ID NO: 55522 - DNA, 80 bp, synthetic construct; identical to SEQ ID NO: 25267
  misc_feature 1..80: note = Artificially Synthesized Probe
  source 1..80: mol_type = other DNA

SEQ ID NO: 55523 - DNA, 80 bp, synthetic construct
  misc_feature 1..80: note = Artificially Synthesized Probe
  source 1..80: mol_type = other DNA
tactaaaaaatacaaaaattacccaggcacagtggtgggcacctgtaatcccagctacttgggaggccgaggcagcagaa

SEQ ID NO: 55524 - DNA, 80 bp, synthetic construct
  misc_feature 1..80: note = Artificially Synthesized Probe
  source 1..80: mol_type = other DNA
tggaacgtgagtagtggggaaggggaaagctagaattgacaaaaacagtacaaaatagggaatcattaagtttgtattca

SEQ ID NO: 55525 - DNA, 80 bp, synthetic construct
  misc_feature 1..80: note = Artificially Synthesized Probe
  source 1..80: mol_type = other DNA
ttggattagatttcctacttcagttaatacaggtttcttctttccctcaatattattgcacatgccataaatatatcttg

SEQ ID NO: 55526 - DNA, 80 bp, synthetic construct
  misc_feature 1..80: note = Artificially Synthesized Probe
  source 1..80: mol_type = other DNA
ggtctgggggtcagtcccggcctctgtctcccaccgcgcccctcgctcccctggacaccgcctggtgtgtggggctcaga

SEQ ID NO: 55527 - DNA, 80 bp, synthetic construct
  misc_feature 1..80: note = Artificially Synthesized Probe
  source 1..80: mol_type = other DNA
tctcttccagtattcgagaatacagggttaaaggcagagctcaatcagatggcaaaatattggctttgtttacacttccc

SEQ ID NO: 55528 - DNA, 80 bp, synthetic construct; identical to SEQ ID NO: 25268
  misc_feature 1..80: note = Artificially Synthesized Probe
  source 1..80: mol_type = other DNA

SEQ ID NO: 55529 - DNA, 80 bp, synthetic construct
  misc_feature 1..80: note = Artificially Synthesized Probe
  source 1..80: mol_type = other DNA
aaagaaggagacttgcaaatgttccctgtttagttaactgaatcagtaatgaacttccgaatctgtttctgtgccaatgt

SEQ ID NO: 55530 - DNA, 80 bp, synthetic construct
  misc_feature 1..80: note = Artificially Synthesized Probe
  source 1..80: mol_type = other DNA
caggctggagtgcaatggtatgatcttggctcagtgcaacctctgcctcctgggttcaagcgattctcctgcctcagcct

SEQ ID NO: 55531 - DNA, 80 bp, synthetic construct
  misc_feature 1..80: note = Artificially Synthesized Probe
  source 1..80: mol_type = other DNA
gagccaccacactcagccaaaacagacccagtattaagcagctgggcttgagctgttgctggtacctcatctaagggggt

SEQ ID NO: 55532 - DNA, 80 bp, synthetic construct; identical to SEQ ID NO: 25269
  misc_feature 1..80: note = Artificially Synthesized Probe
  source 1..80: mol_type = other DNA

SEQ ID NO: 55533 - DNA, 80 bp, synthetic construct
  misc_feature 1..80: note = Artificially Synthesized Probe
  source 1..80: mol_type = other DNA
ccaatgagggtctttgataaaccagttacagctggattagagaactctatgaggcttcacatgttatttttcctgaattt

SEQ ID NO: 55534 - DNA, 80 bp, synthetic construct
  misc_feature 1..80: note = Artificially Synthesized Probe
  source 1..80: mol_type = other DNA
gaatgagccttgccttgtttttgaagtttccgttgaaccaagctgatgagacatctacctgttgttctagttactgttag

SEQ ID NO: 55535 - DNA, 80 bp, synthetic construct
  misc_feature 1..80: note = Artificially Synthesized Probe
  source 1..80: mol_type = other DNA
tgggctggctgctcaccacagctttcccacatggctcgtagtggacgtctgctgccaactgggagctcagctggagctgt

SEQ ID NO: 55536 - DNA, 80 bp, synthetic construct
  misc_feature 1..80: note = Artificially Synthesized Probe
  source 1..80: mol_type = other DNA
ctgacatagcagagagaataatgtaaaagatgtattccagcttctatggtaatggttggcatttttagcagaggttcctc

SEQ ID NO: 55537 - DNA, 80 bp, synthetic construct
  misc_feature 1..80: note = Artificially Synthesized Probe
  source 1..80: mol_type = other DNA
gcctgaattcaaggagagaggtataagcctcatctctcaatgggaagttgtcaaagagtttgtggacatgttttaaatct

SEQ ID NO: 55538 - DNA, 80 bp, synthetic construct; identical to SEQ ID NO: 25270
  misc_feature 1..80: note = Artificially Synthesized Probe
  source 1..80: mol_type = other DNA

SEQ ID NO: 55539 - DNA, 80 bp, synthetic construct
  misc_feature 1..80: note = Artificially Synthesized Probe
  source 1..80: mol_type = other DNA
tatatagtagctcttattatttactcatattacatgaggtatccaaagagaatttctcgcaagatataatgaagaagatt

SEQ ID NO: 55540 - DNA, 80 bp, synthetic construct
  misc_feature 1..80: note = Artificially Synthesized Probe
  source 1..80: mol_type = other DNA
gaaaaatagattcagagaaaccacagagagaggaaggggaaatcaaagtgaacattgatgaatgtgggtaaggatattgt

SEQ ID NO: 55541 - DNA, 80 bp, synthetic construct
  misc_feature 1..80: note = Artificially Synthesized Probe
  source 1..80: mol_type = other DNA
actcttttgataggtgctgactgtaaaatcatatggtagacattttctgcaatgtagcatgatttaatagaattgggaaa

SEQ ID NO: 55542 - DNA, 80 bp, synthetic construct; identical to SEQ ID NO: 25271
  misc_feature 1..80: note = Artificially Synthesized Probe
  source 1..80: mol_type = other DNA

SEQ ID NO: 55543 - DNA, 80 bp, synthetic construct
  misc_feature 1..80: note = Artificially Synthesized Probe
  source 1..80: mol_type = other DNA
ctgcattcttaacaagagactatgttttcgttctttggaaatgggaagataattaagacccatattctgtcctcaggtag

SEQ ID NO: 55544 - DNA, 80 bp, synthetic construct
  misc_feature 1..80: note = Artificially Synthesized Probe
  source 1..80: mol_type = other DNA
atagttcaaagcagcaatggacgtattttgtattgaaaattccaaagatgatcataaagatgactccttggcacttgctc

SEQ ID NO: 55545 - DNA, 80 bp, synthetic construct; identical to SEQ ID NO: 25272
  misc_feature 1..80: note = Artificially Synthesized Probe
  source 1..80: mol_type = other DNA

SEQ ID NO: 55546 - DNA, 80 bp, synthetic construct
  misc_feature 1..80: note = Artificially Synthesized Probe
  source 1..80: mol_type = other DNA
agcttggtagtatttcacaaacagtgaggaggtgggagtaaattcagcactttatgaagttttgtgcattcttcagtgtt

SEQ ID NO: 55547 - DNA, 80 bp, synthetic construct; identical to SEQ ID NO: 25198
  misc_feature 1..80: note = Artificially Synthesized Probe
  source 1..80: mol_type = other DNA

SEQ ID NO: 55548 - DNA, 80 bp, synthetic construct
  misc_feature 1..80: note = Artificially Synthesized Probe
  source 1..80: mol_type = other DNA
cctggaccaaaggagagttccttacccaagaacctgaatcaatatgttttagtttagctatgtttttccacaagctctta

SEQ ID NO: 55549 - DNA, 80 bp, synthetic construct
  misc_feature 1..80: note = Artificially Synthesized Probe
  source 1..80: mol_type = other DNA
tatattcacgttctttttctattctctctcattttttctgtgcaaggccaaatgtaaatgtcacgaaattatcagaatct

SEQ ID NO: 55550 - DNA, 80 bp, synthetic construct
  misc_feature 1..80: note = Artificially Synthesized Probe
  source 1..80: mol_type = other DNA
tctactagatgtgtttcctaactgctccaatctactcttgcctatactgtaatgttccatgctgtaaccagataattctt

SEQ ID NO: 55551 - DNA, 80 bp, synthetic construct; identical to SEQ ID NO: 25273
  misc_feature 1..80: note = Artificially Synthesized Probe
  source 1..80: mol_type = other DNA

SEQ ID NO: 55552 - DNA, 80 bp, synthetic construct
  misc_feature 1..80: note = Artificially Synthesized Probe
  source 1..80: mol_type = other DNA
gcagatctagacagagtaccacatgcaatttctggtcaccctaaaacattatacatgcacacacagtgcatacacacata

SEQ ID NO: 55553 - DNA, 80 bp, synthetic construct
  misc_feature 1..80: note = Artificially Synthesized Probe
  source 1..80: mol_type = other DNA
tctttaaacagcagaatacatatacccactgttcagattagctaaatggggaaataactgcttttcaaggttattaaccc

SEQ ID NO: 55554 - DNA, 80 bp, synthetic construct
  misc_feature 1..80: note = Artificially Synthesized Probe
  source 1..80: mol_type = other DNA
cagcatacagtgtgatgctcaaagtgtaaacaggataatttttaccattttcaggagcatctaagtcatctacagttgga

SEQ ID NO: 55555 - DNA, 80 bp, synthetic construct; identical to SEQ ID NO: 25274
  misc_feature 1..80: note = Artificially Synthesized Probe
  source 1..80: mol_type = other DNA

SEQ ID NO: 55556 - DNA, 80 bp, synthetic construct
  misc_feature 1..80: note = Artificially Synthesized Probe
  source 1..80: mol_type = other DNA
tcattcttgaaacagcctgtgggttagggatattctacctatttactagtgatgaaactgccccttaaaggaatgggtga

SEQ ID NO: 55557 - DNA, 80 bp, synthetic construct
  misc_feature 1..80: note = Artificially Synthesized Probe
  source 1..80: mol_type = other DNA
gtcagactgagaaaagaaaccactcatttgcaggacagtagcaaacatcttacttgcattccagttgtgtatgggttctt

SEQ ID NO: 55558 - DNA, 80 bp, synthetic construct; identical to SEQ ID NO: 25275
  misc_feature 1..80: note = Artificially Synthesized Probe
  source 1..80: mol_type = other DNA

SEQ ID NO: 55559 - DNA, 80 bp, synthetic construct
  misc_feature 1..80: note = Artificially Synthesized Probe
  source 1..80: mol_type = other DNA
atgggatgccttacatattggttatgttcaaaagaaataacacgtctcatgtgcaaaaggttcagggggaagataaatac

SEQ ID NO: 55560 - DNA, 80 bp, synthetic construct
  misc_feature 1..80: note = Artificially Synthesized Probe
  source 1..80: mol_type = other DNA
tagtgcaaagataaacttacataaaaaaactagtataaaatttaaatattattagcaatcatgattaaggatattattaa

SEQ ID NO: 55561 - DNA, 80 bp, synthetic construct
  misc_feature 1..80: note = Artificially Synthesized Probe
  source 1..80: mol_type = other DNA
agatatgttgaactctaaagtcgaaattattattgtttatattattcttttaaaaattaagataaatattatatattcat

SEQ ID NO: 55562 - DNA, 80 bp, synthetic construct
  misc_feature 1..80: note = Artificially Synthesized Probe
  source 1..80: mol_type = other DNA
tatatcaaatgaatcaacttgagctttgaaggttgggattgtcacaacattaagagtgttataacctttcttctcagaca

SEQ ID NO: 55563 - DNA, 80 bp, synthetic construct; identical to SEQ ID NO: 25276
  misc_feature 1..80: note = Artificially Synthesized Probe
  source 1..80: mol_type = other DNA

SEQ ID NO: 55564 - DNA, 80 bp, synthetic construct
  misc_feature 1..80: note = Artificially Synthesized Probe
  source 1..80: mol_type = other DNA
agtcccagctactcaggaggctgaggcaggagaatagcgtgaacctggaagtcggaggttgcagagagccgagatcatgc

SEQ ID NO: 55565 - DNA, 80 bp, synthetic construct
  misc_feature 1..80: note = Artificially Synthesized Probe
  source 1..80: mol_type = other DNA
aatgatctcatctgaaaattggagataatgattgtacctgcctcataggattattattattaagattaaatgaattactg

SEQ ID NO: 55566 - DNA, 80 bp, synthetic construct
  misc_feature 1..80: note = Artificially Synthesized Probe
  source 1..80: mol_type = other DNA
aaagtgctaagatgttctcagtgctagaattatataatagtagccacatcctggaaccataaaggcattcttaaggaagt

SEQ ID NO: 55567 - DNA, 80 bp, synthetic construct
  misc_feature 1..80: note = Artificially Synthesized Probe
  source 1..80: mol_type = other DNA
ttttctctttctcttctctaccacattcatttccatgttacttttatccttttcagaatgaccaattgcttccgttttaa

SEQ ID NO: 55568 - DNA, 80 bp, synthetic construct; identical to SEQ ID NO: 25277
  misc_feature 1..80: note = Artificially Synthesized Probe
  source 1..80: mol_type = other DNA

SEQ ID NO: 55569 - DNA, 80 bp, synthetic construct
  misc_feature 1..80: note = Artificially Synthesized Probe
  source 1..80: mol_type = other DNA
ggtatttgtattttattttactaggcaggaatgtggagtgtgtttgtgagcttgtgcatgtgagctggaaggaagtgtgg

SEQ ID NO: 55570 - DNA, 80 bp, synthetic construct
  misc_feature 1..80: note = Artificially Synthesized Probe
  source 1..80: mol_type = other DNA
ataacatagtgaacaaaaagaaacaggttgttagcccattttatagatgaaaaaaactaatgcaaggtcaagtagttagc

SEQ ID NO: 55571 - DNA, 80 bp, synthetic construct
  misc_feature 1..80: note = Artificially Synthesized Probe
  source 1..80: mol_type = other DNA
ttttgcttgctgtctgtgtatttgaccactgccttttatgattttaacctttccagacattctctttggggtcggttttc

SEQ ID NO: 55572 - DNA, 80 bp, synthetic construct; identical to SEQ ID NO: 25278
  misc_feature 1..80: note = Artificially Synthesized Probe
  source 1..80: mol_type = other DNA

SEQ ID NO: 55573 - DNA, 80 bp, synthetic construct
  misc_feature 1..80: note = Artificially Synthesized Probe
  source 1..80: mol_type = other DNA
cttcatgactggcataaaattaacctgttttcctgtttgatgcgctgcttttttttgcttatccgtaaaaaggatgagaa

SEQ ID NO: 55574 - DNA, 80 bp, synthetic construct
  misc_feature 1..80: note = Artificially Synthesized Probe
  source 1..80: mol_type = other DNA
ggtggtattttatgaatttctgaatggcagtctgcacatctcacacaggaagcaacgttttagtttctgaactctgtcaa

SEQ ID NO: 55575 - DNA, 80 bp, synthetic construct
  misc_feature 1..80: note = Artificially Synthesized Probe
  source 1..80: mol_type = other DNA
cttagtattctaatggggacgcacgaaaaagggacccacagaaaaacaatattcagaatgatgccggatattcagtgtct

SEQ ID NO: 55576 - DNA, 80 bp, synthetic construct
  misc_feature 1..80: note = Artificially Synthesized Probe
  source 1..80: mol_type = other DNA
aaatagtaaaagttttttgatcaaatgatttctcaatagagaaagtatccggtttcttgcatcatttttcttttcttttc

SEQ ID NO: 55577 - DNA, 80 bp, synthetic construct; identical to SEQ ID NO: 25279
  misc_feature 1..80: note = Artificially Synthesized Probe
  source 1..80: mol_type = other DNA

SEQ ID NO: 55578 - DNA, 80 bp, synthetic construct
  misc_feature 1..80: note = Artificially Synthesized Probe
  source 1..80: mol_type = other DNA
gttggaatgattgaaggagcagagcaaaaagctgaactgaaacaatggagggaggaaagatagtaccagagacaatgaga

SEQ ID NO: 55579 - DNA, 80 bp, synthetic construct
  misc_feature 1..80: note = Artificially Synthesized Probe
  source 1..80: mol_type = other DNA
agaagtcacttgaaaatgtgttaatgcctttacttgacaagcatttattttttcatcctgggtataaaaccactgtagga

SEQ ID NO: 55580 - DNA, 80 bp, synthetic construct
  misc_feature 1..80: note = Artificially Synthesized Probe
  source 1..80: mol_type = other DNA
ttttctttctttctttctttttttttttttttggagatagggtctggctctgttgcccaggctggagcgctggagtacag

SEQ ID NO: 55581 - DNA, 80 bp, synthetic construct
  misc_feature 1..80: note = Artificially Synthesized Probe
  source 1..80: mol_type = other DNA
agataagtattttggaggcatggatcttcaggtgaagtgtcatgtaatatctttgctaagtcgggataaaaataaaattt

SEQ ID NO: 55582 - DNA, 80 bp, synthetic construct; identical to SEQ ID NO: 25280
  misc_feature 1..80: note = Artificially Synthesized Probe
  source 1..80: mol_type = other DNA

SEQ ID NO: 55583 - DNA, 80 bp, synthetic construct
  misc_feature 1..80: note = Artificially Synthesized Probe
  source 1..80: mol_type = other DNA
ttactggtaaagctgaattcagaactgcttctggtaattttactgtatcaagcaggccctgagaaagacaacctggaact

SEQ ID NO: 55584 - DNA, 80 bp, synthetic construct
  misc_feature 1..80: note = Artificially Synthesized Probe
  source 1..80: mol_type = other DNA
ccaccaacaaaatacctttttctctgagaaggagtcagtgaagggtagagatgaaataggaaaaatttggttggttgggt

SEQ ID NO: 55585 - DNA, 80 bp, synthetic construct
  misc_feature 1..80: note = Artificially Synthesized Probe
  source 1..80: mol_type = other DNA
cacacacgcacacacaacaactgtttgctacaggatttctaattaatgatatcacattttctaacccagtaattcccaac

SEQ ID NO: 55586 - DNA, 80 bp, synthetic construct; identical to SEQ ID NO: 25281
  misc_feature 1..80: note = Artificially Synthesized Probe
  source 1..80: mol_type = other DNA

SEQ ID NO: 55587 - DNA, 80 bp, synthetic construct
  misc_feature 1..80: note = Artificially Synthesized Probe
  source 1..80: mol_type = other DNA
gctatcctctggttccttatttgccttcaccactatgatttactattggtaaagttgtggtcatgtcggttctcctggac

SEQ ID NO: 55588 - DNA, 80 bp, synthetic construct
  misc_feature 1..80: note = Artificially Synthesized Probe
  source 1..80: mol_type = other DNA
ggaatgcagtggcacaatctcagcttactgcaacctctgtctcctgggttcaagcgattctcatgcctcagccccccaaa

SEQ ID NO: 55589 - DNA, 80 bp, synthetic construct; identical to SEQ ID NO: 25282
  misc_feature 1..80: note = Artificially Synthesized Probe
  source 1..80: mol_type = other DNA

SEQ ID NO: 55590 - DNA, 80 bp, synthetic construct
  misc_feature 1..80: note = Artificially Synthesized Probe
  source 1..80: mol_type = other DNA
atgtctttgcttttttattccttcatatctgccttgtttttcattaaataaatattgtctggcatgccattttattacct

SEQ ID NO: 55591 - DNA, 80 bp, synthetic construct
  misc_feature 1..80: note = Artificially Synthesized Probe
  source 1..80: mol_type = other DNA
tgctctaatatgtacctgttacttctttcctccttggctgttattgtcatacaaattacttttatactgtgtaagcccat

SEQ ID NO: 55592 - DNA, 80 bp, synthetic construct
  misc_feature 1..80: note = Artificially Synthesized Probe
  source 1..80: mol_type = other DNA
ggtttcaaactcctggccttaggtgattctcccacctgcccctctcaaagtactgggattacaggcatgagccaccttac

SEQ ID NO: 55593 - DNA, 80 bp, synthetic construct
  misc_feature 1..80: note = Artificially Synthesized Probe
  source 1..80: mol_type = other DNA
agcttgaaggatccttaacatttttggcagtgcaggactgctagtaagaaattatctcagtttctgtttatccaagaatg

SEQ ID NO: 55594 - DNA, 80 bp, synthetic construct; identical to SEQ ID NO: 25283
  misc_feature 1..80: note = Artificially Synthesized Probe
  source 1..80: mol_type = other DNA

SEQ ID NO: 55595 - DNA, 80 bp, synthetic construct
  misc_feature 1..80: note = Artificially Synthesized Probe
  source 1..80: mol_type = other DNA
aaaagccctgcttttggggcatctggtggttttctaacagctcctgctctgattgtttccttgtattccagttttctgcc

SEQ ID NO: 55596 - DNA, 80 bp, synthetic construct
  misc_feature 1..80: note = Artificially Synthesized Probe
  source 1..80: mol_type = other DNA
atagccattctcttcacgaatatcattagcattcaatgcagaaattagcctgcagtcttcccctaatgtttgcatgtatc

SEQ ID NO: 55597 - DNA, 80 bp, synthetic construct
  misc_feature 1..80: note = Artificially Synthesized Probe
  source 1..80: mol_type = other DNA
tatctatgaagtacttattcatccatccttttattcattagtctagccagtcaactatctattcatctatctgtctgtct

SEQ ID NO: 55598 - DNA, 80 bp, synthetic construct; identical to SEQ ID NO: 25284
  misc_feature 1..80: note = Artificially Synthesized Probe
  source 1..80: mol_type = other DNA

SEQ ID NO: 55599 - DNA, 80 bp, synthetic construct
  misc_feature 1..80: note = Artificially Synthesized Probe
  source 1..80: mol_type = other DNA
tagtagggaatttatcagatgaatgaatgcatttacatatgtattttccagatagtcacactctccctcactgattcatc

SEQ ID NO: 55600 - DNA, 80 bp, synthetic construct
  misc_feature 1..80: note = Artificially Synthesized Probe
  source 1..80: mol_type = other DNA
aataagtgttttgtttacaataaggcaggaagttataagggaaagacaggggggctgcatgagattagtggacaaggaag

SEQ ID NO: 55601 - DNA, 80 bp, synthetic construct
  misc_feature 1..80: note = Artificially Synthesized Probe
  source 1..80: mol_type = other DNA
ctctacccatatttgtgaaaaacaccagattgtttgtgtggaagccactgggaactgttccaaaccgtgtgagaagtctg

SEQ ID NO: 55602 - DNA, 80 bp, synthetic construct; identical to SEQ ID NO: 25285
  misc_feature 1..80: note = Artificially Synthesized Probe
  source 1..80: mol_type = other DNA

SEQ ID NO: 55603 - DNA, 80 bp, synthetic construct; identical to SEQ ID NO: 25199
  misc_feature 1..80: note = Artificially Synthesized Probe
  source 1..80: mol_type = other DNA

SEQ ID NO: 55604 - DNA, 80 bp, synthetic construct
  misc_feature 1..80: note = Artificially Synthesized Probe
  source 1..80: mol_type = other DNA
atgcaattaagtacaaaattctgcagaatctattatatcgttgtttgacgaatcaaataatgtattctgcatttttattc

SEQ ID NO: 55605 - DNA, 80 bp, synthetic construct
  misc_feature 1..80: note = Artificially Synthesized Probe
  source 1..80: mol_type = other DNA
agaataagtttcattatcacctttcaccttttatgctagatgctggatcaagtcaaaactggaattgcaagtcaaacatc

SEQ ID NO: 55606 - DNA, 80 bp, synthetic construct
  misc_feature 1..80: note = Artificially Synthesized Probe
  source 1..80: mol_type = other DNA
tagtgtcaccagaggagccaatgtatatttttatactgcaattaagcaattgagtacaaaattcagtacagtcagtggga

SEQ ID NO: 55607 - DNA, 80 bp, synthetic construct
  misc_feature 1..80: note = Artificially Synthesized Probe
  source 1..80: mol_type = other DNA
ctacgtagactctacctcagtttactcaattttaaaattgagatcataattcttgtcttctagaatatttgtgaggattg

SEQ ID NO: 55608 - DNA, 80 bp, synthetic construct; identical to SEQ ID NO: 25286
  misc_feature 1..80: note = Artificially Synthesized Probe
  source 1..80: mol_type = other DNA

SEQ ID NO: 55609 - DNA, 80 bp, synthetic construct
  misc_feature 1..80: note = Artificially Synthesized Probe
  source 1..80: mol_type = other DNA
aaagtttattacccccattttcataattctgattccaagttagagatccccttccaagataggctccatagcctcctgtg

SEQ ID NO: 55610 - DNA, 80 bp, synthetic construct
  misc_feature 1..80: note = Artificially Synthesized Probe
  source 1..80: mol_type = other DNA
gtccatagagtaaagtgaaagcaagtttattaagaaagtagggctgggcatggtggctcatgcctgtaatcccagcactt

SEQ ID NO: 55611 - DNA, 80 bp, synthetic construct
  misc_feature 1..80: note = Artificially Synthesized Probe
  source 1..80: mol_type = other DNA
ttgaacttagtaggcgtaggttgcagtgagccgagattgcgccattgcactccagcctgggtgacagagtgagactttgt

SEQ ID NO: 55612 - DNA, 80 bp, synthetic construct; identical to SEQ ID NO: 25287
  misc_feature 1..80: note = Artificially Synthesized Probe
  source 1..80: mol_type = other DNA

SEQ ID NO: 55613 - DNA, 80 bp, synthetic construct
  misc_feature 1..80: note = Artificially Synthesized Probe
  source 1..80: mol_type = other DNA
tgacctgtatcttgtgccaacctcctatctcatcctctgacttagaatacccatccttctgggaatgcagcccagtaggt

SEQ ID NO: 55614 - DNA, 80 bp, synthetic construct
  misc_feature 1..80: note = Artificially Synthesized Probe
  source 1..80: mol_type = other DNA
ttattatgtgttttgcaatctccacatcagtgatttgaggaaagtactattataacacccaatgtaagctgggcgatgca

SEQ ID NO: 55615 - DNA, 80 bp, synthetic construct
  misc_feature 1..80: note = Artificially Synthesized Probe
  source 1..80: mol_type = other DNA
agaatgtaaattctagtaggtcagtgaagaaatctgtcttgttcaccactccctctctagacaatagctctgtgccaggt

SEQ ID NO: 55616 - DNA, 80 bp, synthetic construct; identical to SEQ ID NO: 25288
  misc_feature 1..80: note = Artificially Synthesized Probe
  source 1..80: mol_type = other DNA

SEQ ID NO: 55617 - DNA, 80 bp, synthetic construct
  misc_feature 1..80: note = Artificially Synthesized Probe
  source 1..80: mol_type = other DNA
ccttcaagcatcaaatataccaaaaaaatgatcatttttgttatggtagcagatagatacattgctccactggtgtcttt

SEQ ID NO: 55618 - DNA, 80 bp, synthetic construct
  misc_feature 1..80: note = Artificially Synthesized Probe
  source 1..80: mol_type = other DNA
gctaagttttttgtatttttagtagagatggggttttaccctgttggccaggctggtctcaaactcctgacctcgggcaa

SEQ ID NO: 55619 - DNA, 80 bp, synthetic construct
  misc_feature 1..80: note = Artificially Synthesized Probe
  source 1..80: mol_type = other DNA
agtttatacattaagtacaattagtgcatttttcaccagaaagttggtcactactttaagattttaccttcattttcatt

SEQ ID NO: 55620 - DNA, 80 bp, synthetic construct
  misc_feature 1..80: note = Artificially Synthesized Probe
  source 1..80: mol_type = other DNA
caactggttacagtttgctactaatgtacaatatatccagaaggtaattagcaactggttacagtttgctactaatgagg

SEQ ID NO: 55621 - DNA, 80 bp, synthetic construct; identical to SEQ ID NO: 25289
  misc_feature 1..80: note = Artificially Synthesized Probe
  source 1..80: mol_type = other DNA

SEQ ID NO: 55622 - DNA, 80 bp, synthetic construct
  misc_feature 1..80: note = Artificially Synthesized Probe
  source 1..80: mol_type = other DNA
ctatttagtgttattagatgaagactttatcatttttttccatcatgcctttggttttgtgagcttcttttttgttttta

SEQ ID NO: 55623 - DNA, 80 bp, synthetic construct
  misc_feature 1..80: note = Artificially Synthesized Probe
  source 1..80: mol_type = other DNA
agagaaatgaataatatcttggcatcacttactttgctttaatttcttagttttactcctttaatgtaacaactgttttt

SEQ ID NO: 55624 - DNA, 80 bp, synthetic construct
  misc_feature 1..80: note = Artificially Synthesized Probe
  source 1..80: mol_type = other DNA
ttgaaattatttgctttattccctgttgtggattaagatgagtgattttattctgaaaatattaggttgttgtaaaagta

SEQ ID NO: 55625 - DNA, 80 bp, synthetic construct; identical to SEQ ID NO: 25290
  misc_feature 1..80: note = Artificially Synthesized Probe
  source 1..80: mol_type = other DNA

SEQ ID NO: 55626 - DNA, 80 bp, synthetic construct
  misc_feature 1..80: note = Artificially Synthesized Probe
  source 1..80: mol_type = other DNA
tgtccatccaaacttacctgttctgtgtcccattatccatttgtggaaaagtagacataaaggaatcctactgaggtatt

SEQ ID NO: 55627 - DNA, 80 bp, synthetic construct
  misc_feature 1..80: note = Artificially Synthesized Probe
  source 1..80: mol_type = other DNA
tgtatgctcattaatacatttacttaatacatattgatgctcatgtgctttcgagcatcaaatataccaaaaaaatgatc

SEQ ID NO: 55628 - DNA, 80 bp, synthetic construct
  misc_feature 1..80: note = Artificially Synthesized Probe
  source 1..80: mol_type = other DNA
tcatagccaatagcaccgtaactcacccctcattgaagcttgttcaacacagtttttttctctgtaaggcatgttatagc

SEQ ID NO: 55629 - DNA, 80 bp, synthetic construct; identical to SEQ ID NO: 25291
  misc_feature 1..80: note = Artificially Synthesized Probe
  source 1..80: mol_type = other DNA

SEQ ID NO: 55630 - DNA, 80 bp, synthetic construct
  misc_feature 1..80: note = Artificially Synthesized Probe
  source 1..80: mol_type = other DNA
ttagaaaagagaaaatgagctccttttagtcatcagaagccaatgaaagacctgggtttagtattttcttccatctcttg

SEQ ID NO: 55631 - DNA, 80 bp, synthetic construct
  misc_feature 1..80: note = Artificially Synthesized Probe
  source 1..80: mol_type = other DNA
cccctttcctcatttggaactttatggaattgctgagaacatcagatggcaataaggtgattggagctgtaatcacacac

SEQ ID NO: 55632 - DNA, 80 bp, synthetic construct
  misc_feature 1..80: note = Artificially Synthesized Probe
  source 1..80: mol_type = other DNA
aatgtaccactgcactccagcttgggcaatagaatgagactctgtctcaaaaaaaaaaaaaagaaagaaagaaaaagaaa

SEQ ID NO: 55633 - DNA, 80 bp, synthetic construct; identical to SEQ ID NO: 25292
  misc_feature 1..80: note = Artificially Synthesized Probe
  source 1..80: mol_type = other DNA

SEQ ID NO: 55634 - DNA, 80 bp, synthetic construct
  misc_feature 1..80: note = Artificially Synthesized Probe
  source 1..80: mol_type = other DNA
catatatattagcattactatatttccttattattgcaaatgtattctacccaggtcttttcatcattgtagtcacttaa

SEQ ID NO: 55635 - DNA, 80 bp, synthetic construct
  misc_feature 1..80: note = Artificially Synthesized Probe
  source 1..80: mol_type = other DNA
gatgtccagtataaagaagcctgatcactctggccttacttggctttccaataatagtatttttaggatcactgatataa

SEQ ID NO: 55636 - DNA, 80 bp, synthetic construct
  misc_feature 1..80: note = Artificially Synthesized Probe
  source 1..80: mol_type = other DNA
tgcactggtagactcagaagtgtttggtttatacttgttcaaaatgattgtcagcagatgtaatgagccttggaccagtc

SEQ ID NO: 55637 - DNA, 80 bp, synthetic construct; identical to SEQ ID NO: 25293
  misc_feature 1..80: note = Artificially Synthesized Probe
  source 1..80: mol_type = other DNA

SEQ ID NO: 55638 - DNA, 80 bp, synthetic construct
  misc_feature 1..80: note = Artificially Synthesized Probe
  source 1..80: mol_type = other DNA
tgaaacttcgtctctactaaaaatacaaaaattagctgggcatgatggcatgcctgtaatcccagctactcaggaggctg

SEQ ID NO: 55639 - DNA, 80 bp, synthetic construct
  misc_feature 1..80: note = Artificially Synthesized Probe
  source 1..80: mol_type = other DNA
ttcattacagatgcattaagtcaaaactgccaaaggctgtgttgtttctgcaaacagggcaactactgcttgaatggggc

SEQ ID NO: 55640 - DNA, 80 bp, synthetic construct
  misc_feature 1..80: note = Artificially Synthesized Probe
  source 1..80: mol_type = other DNA
ttgttatattggaaacagtgtctacaagaccactggtggaaattaatatagccaatataattagtaagttggattcacca

SEQ ID NO: 55641 - DNA, 80 bp, synthetic construct
  misc_feature 1..80: note = Artificially Synthesized Probe
  source 1..80: mol_type = other DNA
cgctcagcttctggggaagccacagggagcttttactcatggtggaaggtgaagcggaagcaggcacgtcacatggccag

SEQ ID NO: 55642 - DNA, 80 bp, synthetic construct
  misc_feature 1..80: note = Artificially Synthesized Probe
  source 1..80: mol_type = other DNA
gctccacctccccagaccgccgaggggcgagagggcgcgccgggggccgtggttgccatggctcctggtagcggagcccg

SEQ ID NO: 55643 - DNA, 80 bp, synthetic construct; identical to SEQ ID NO: 25294
  misc_feature 1..80: note = Artificially Synthesized Probe
  source 1..80: mol_type = other DNA

SEQ ID NO: 55644 - DNA, 80 bp, synthetic construct
  misc_feature 1..80: note = Artificially Synthesized Probe
  source 1..80: mol_type = other DNA
tataaaaatcaagtctttcctttaaataataaatgatttatgcattcattcaaatttagaatgctgaggaataaactaca

SEQ ID NO: 55645 - DNA, 80 bp, synthetic construct
  misc_feature 1..80: note = Artificially Synthesized Probe
  source 1..80: mol_type = other DNA
tggcaggtgcctgtagtcccagctactctggaggctgtagcacaagaatcgcttcaaccggggaggtgaaggttgcagtg

SEQ ID NO: 55646 - DNA, 80 bp, synthetic construct
  misc_feature 1..80: note = Artificially Synthesized Probe
  source 1..80: mol_type = other DNA
agaaatcaaagacccagcgtcatacgttctaatgtttgataagatactacccagtttcctgcaactttcacttttgttct

SEQ ID NO: 55647 - DNA, 80 bp, synthetic construct
  misc_feature 1..80: note = Artificially Synthesized Probe
  source 1..80: mol_type = other DNA
gcctctggggttcaagcaattctcctgcctcagcctcctgagtagctgggattacaggcagttgccaccacacccagcta

SEQ ID NO: 55648 - DNA, 80 bp, synthetic construct; identical to SEQ ID NO: 25295
  misc_feature 1..80: note = Artificially Synthesized Probe
  source 1..80: mol_type = other DNA

SEQ ID NO: 55649 - DNA, 80 bp, synthetic construct
  misc_feature 1..80: note = Artificially Synthesized Probe
  source 1..80: mol_type = other DNA
taggtacgtacatacctacatacgtactagaatcaagggggttgtttctgagttcattgagttaacgaggaaggtaaatt

SEQ ID NO: 55650 - DNA, 80 bp, synthetic construct; identical to SEQ ID NO: 25200
  misc_feature 1..80: note = Artificially Synthesized Probe
  source 1..80: mol_type = other DNA

SEQ ID NO: 55651 - DNA, 80 bp, synthetic construct
  misc_feature 1..80: note = Artificially Synthesized Probe
  source 1..80: mol_type = other DNA
gtcttaaaacggtaaccacaaacaggttataccaagatccctcacaatgtgtgttgtctgagagaaaaatcttatcattt

SEQ ID NO: 55652 - DNA, 80 bp, synthetic construct; identical to SEQ ID NO: 25296
  misc_feature 1..80: note = Artificially Synthesized Probe
  source 1..80: mol_type = other DNA

SEQ ID NO: 55653 - DNA, 80 bp, synthetic construct
  misc_feature 1..80: note = Artificially Synthesized Probe
  source 1..80: mol_type = other DNA
tgaaattatacttattaaaatggtaataatttgtagagagattaaactttgttttcttgccctccctttctccttctcct

SEQ ID NO: 55654 - DNA, 80 bp, synthetic construct
  misc_feature 1..80: note = Artificially Synthesized Probe
  source 1..80: mol_type = other DNA
ttcttcagagggcctgttagagtgataaaaggcaaaattattttctttacacgaacagtcacagaaccaaaaaggccaag

SEQ ID NO: 55655 - DNA, 80 bp, synthetic construct
  misc_feature 1..80: note = Artificially Synthesized Probe
  source 1..80: mol_type = other DNA
caatcatcagagcaacaacaaacaaaggcacattaaaaagtaacatgaaatgatgttaagaaagaggtcatggatgcaaa

SEQ ID NO: 55656 - DNA, 80 bp, synthetic construct
  misc_feature 1..80: note = Artificially Synthesized Probe
  source 1..80: mol_type = other DNA
gggaagtgtcctaatgacaattaaacacaattttctaagcacaggaagaggactgataaagtcaagcaatggctgtggct

SEQ ID NO: 55657 - DNA, 80 bp, synthetic construct; identical to SEQ ID NO: 25297
  misc_feature 1..80: note = Artificially Synthesized Probe
  source 1..80: mol_type = other DNA

SEQ ID NO: 55658 - DNA, 80 bp, synthetic construct
  misc_feature 1..80: note = Artificially Synthesized Probe
  source 1..80: mol_type = other DNA
cgtacgcacttagtagatacttgcctttcctctacattggtgattattcctggcctatcattcagttaagacctatcctc

SEQ ID NO: 55659 - DNA, 80 bp, synthetic construct
  misc_feature 1..80: note = Artificially Synthesized Probe
  source 1..80: mol_type = other DNA
ctaatggtctgactcttcctgtaccagaccctgggcatcattatatgtacaaatgaaacttcactctcattatcattgtt

SEQ ID NO: 55660 - DNA, 80 bp, synthetic construct
  misc_feature 1..80: note = Artificially Synthesized Probe
  source 1..80: mol_type = other DNA
ataaatcctgtcgcctttctctcatgcttttttttcttccctttgtaatcacttctttattatttgtcactgacctcttc

SEQ ID NO: 55661 - DNA, 80 bp, synthetic construct; identical to SEQ ID NO: 25298
  misc_feature 1..80: note = Artificially Synthesized Probe
  source 1..80: mol_type = other DNA

SEQ ID NO: 55662 - DNA, 80 bp, synthetic construct
  misc_feature 1..80: note = Artificially Synthesized Probe
  source 1..80: mol_type = other DNA
agaagaaaagacagctgggcccaggggaccactaccacctggacgcggagaccggtagtggccccgaatgcctggctgca

SEQ ID NO: 55663 - DNA, 80 bp, synthetic construct
  misc_feature 1..80: note = Artificially Synthesized Probe
  source 1..80: mol_type = other DNA
caagttcagaatgttggaaatgcaaagaaggaaaacaatgaaggcaatgcactcatctctgtgctctggacgccctcagt

SEQ ID NO: 55664 - DNA, 80 bp, synthetic construct
  misc_feature 1..80: note = Artificially Synthesized Probe
  source 1..80: mol_type = other DNA
ggcacagtggctcatgcctgcaataccagcacttttggaggccaaggcaggtgggtcacttgaggataagagttcgagac

SEQ ID NO: 55665 - DNA, 80 bp, synthetic construct
  misc_feature 1..80: note = Artificially Synthesized Probe
  source 1..80: mol_type = other DNA
tgtgcactccagcctgggcgacagagcaagactccgtctcaaaaaacaaacaaacaaacaaacaaacaaacaaaatatat

SEQ ID NO: 55666 - DNA, 80 bp, synthetic construct; identical to SEQ ID NO: 25431
  misc_feature 1..80: note = Artificially Synthesized Probe
  source 1..80: mol_type = other DNA

SEQ ID NO: 55667 - DNA, 80 bp, synthetic construct
  misc_feature 1..80: note = Artificially Synthesized Probe
  source 1..80: mol_type = other DNA
agggaaggcgtgaagcctgtgggcgtgcatcctgggcggcgagagatggcaccagctggaggaggaagctgcctgctctg

SEQ ID NO: 55668 - DNA, 80 bp, synthetic construct
  misc_feature 1..80: note = Artificially Synthesized Probe
  source 1..80: mol_type = other DNA
aggtgggtgagggggctggggcctccccatggtgcagacccccatcctggggtgcaggcagaccccaagctccacccctc

SEQ ID NO: 55669 - DNA, 80 bp, synthetic construct
  misc_feature 1..80: note = Artificially Synthesized Probe
  source 1..80: mol_type = other DNA
aggaaactcatttcaggctacccccaagtcataacacagaactccaggtaaaaacacacctgaaagtgttatctcgagag

SEQ ID NO: 55670 - DNA, 80 bp, synthetic construct
  misc_feature 1..80: note = Artificially Synthesized Probe
  source 1..80: mol_type = other DNA
accaggtagccctggccaccagcacctcaaggaaacagggcctctggcaacccatctggaatcacagacaccctggtatc

SEQ ID NO: 55671 - DNA, 80 bp, synthetic construct; identical to SEQ ID NO: 25432
  misc_feature 1..80: note = Artificially Synthesized Probe
  source 1..80: mol_type = other DNA

SEQ ID NO: 55672 - DNA, 80 bp, synthetic construct
  misc_feature 1..80: note = Artificially Synthesized Probe
  source 1..80: mol_type = other DNA
aacagcaactgacaggcccaccgtgatgggaaaacatcccaaagctgcatacggtagctccggcacatcactcctgccca

SEQ ID NO: 55673 - DNA, 80 bp, synthetic construct
  misc_feature 1..80: note = Artificially Synthesized Probe
  source 1..80: mol_type = other DNA
tcaaatgatctcaaagaatgagtccacacagcggaacaccaaggcctaatgcccaagttgtcttttttttttttcttttc

SEQ ID NO: 55674 - DNA, 80 bp, synthetic construct
  misc_feature 1..80: note = Artificially Synthesized Probe
  source 1..80: mol_type = other DNA
ctaatttttttgtgtgtttttagtagagatggggtttcactgtggtctccatctcctgaccttgtgatccaccccacctc

SEQ ID NO: 55675 - DNA, 80 bp, synthetic construct; identical to SEQ ID NO: 25433
  misc_feature 1..80: note = Artificially Synthesized Probe
  source 1..80: mol_type = other DNA

SEQ ID NO: 55676 - DNA, 80 bp, synthetic construct
  misc_feature 1..80: note = Artificially Synthesized Probe
  source 1..80: mol_type = other DNA
acactatttctttcatggctttcatggatgaccctaaggatctgcctccacttagcctcagataagaaaagagctaatat

SEQ ID NO: 55677 - DNA, 80 bp, synthetic construct
  misc_feature 1..80: note = Artificially Synthesized Probe
  source 1..80: mol_type = other DNA
taccttcaactggaacagggtatctgcaaagaaagagggaattaatggtttgaggattgggaatgggacgttacacttct

SEQ ID NO: 55678 - DNA, 80 bp, synthetic construct; identical to SEQ ID NO: 25434
  misc_feature 1..80: note = Artificially Synthesized Probe
  source 1..80: mol_type = other DNA

SEQ ID NO: 55679 - DNA, 80 bp, synthetic construct; identical to SEQ ID NO: 25421
  misc_feature 1..80: note = Artificially Synthesized Probe
  source 1..80: mol_type = other DNA

SEQ ID NO: 55680 - DNA, 80 bp, synthetic construct
  misc_feature 1..80: note = Artificially Synthesized Probe
  source 1..80: mol_type = other DNA
ggtttgaggccagcctgggccaatttaaaagttcagtacttgacagtttactttttacagactctttctcctcaaaggta

SEQ ID NO: 55681 - DNA, 80 bp, synthetic construct
  misc_feature 1..80: note = Artificially Synthesized Probe
  source 1..80: mol_type = other DNA
tagtcagacctcatctctattagaaaaatatatatttttttgccgggtgcggtggctcacgcctgtaatcccagcacttt

SEQ ID NO: 55682 - DNA, 80 bp, synthetic construct
  misc_feature 1..80: note = Artificially Synthesized Probe
  source 1..80: mol_type = other DNA
gagaatggcgtgaacccgggaggcagagcttgcagtgagccgagattgcgccactgcactccagcctgggcaacagtgca

SEQ ID NO: 55683 - DNA, 80 bp, synthetic construct; identical to SEQ ID NO: 25435
  misc_feature 1..80: note = Artificially Synthesized Probe
  source 1..80: mol_type = other DNA

SEQ ID NO: 55684 - DNA, 80 bp, synthetic construct
  misc_feature 1..80: note = Artificially Synthesized Probe
  source 1..80: mol_type = other DNA
cacccaactcactgtgggatgctggccaaaccgccctcctcatctcagctttccctcacctcagctttccctcacctcag

SEQ ID NO: 55685 - DNA, 80 bp, synthetic construct
  misc_feature 1..80: note = Artificially Synthesized Probe
  source 1..80: mol_type = other DNA
ctgaggaaatctgacatgggcttgagagaagtcccctcaaaagagttgagtgagctgtggagtgaaaagccacaattttt

SEQ ID NO: 55686 - DNA, 80 bp, synthetic construct
  misc_feature 1..80: note = Artificially Synthesized Probe
  source 1..80: mol_type = other DNA
aggcccagctaatttttgtatttttagaagagacggggtttcaccatgttggccaggctggtctcaaactcctgacctca

SEQ ID NO: 55687 - DNA, 80 bp, synthetic construct; identical to SEQ ID NO: 25436
  misc_feature 1..80: note = Artificially Synthesized Probe
  source 1..80: mol_type = other DNA

SEQ ID NO: 55688 - DNA, 80 bp, synthetic construct
  misc_feature 1..80: note = Artificially Synthesized Probe
  source 1..80: mol_type = other DNA
attctcctgcctcagcctcccgagtagctgggactacaggcacccgccaccacgcctggctaatatttttgtatttctag

SEQ ID NO: 55689 - DNA, 80 bp, synthetic construct
  misc_feature 1..80: note = Artificially Synthesized Probe
  source 1..80: mol_type = other DNA
accagcccaacgatgtttcagcaaacataggacttcattttgccagattcttcctgttctttggtatccctgagcacaca

SEQ ID NO: 55690 - DNA, 80 bp, synthetic construct
  misc_feature 1..80: note = Artificially Synthesized Probe
  source 1..80: mol_type = other DNA
ctcagcctcctgagtagttggtattacaggcatgcaccaccacgcctggctaattttatatttttagtagagacggggtt

SEQ ID NO: 55691 - DNA, 80 bp, synthetic construct
  misc_feature 1..80: note = Artificially Synthesized Probe
  source 1..80: mol_type = other DNA
ctttctgtctgagtccttctgatttgcagtgatgctgtttggggcagggggtgcaactgtcactttttctggtgccctct

SEQ ID NO: 55692 - DNA, 80 bp, synthetic construct; identical to SEQ ID NO: 25437
  misc_feature 1..80: note = Artificially Synthesized Probe
  source 1..80: mol_type = other DNA

SEQ ID NO: 55693 - DNA, 80 bp, synthetic construct
  misc_feature 1..80: note = Artificially Synthesized Probe
  source 1..80: mol_type = other DNA
agaaggggtcccgggtcggtggtagaggccctggggaaggggttccgggtcggggatcgagggtcgaggcccgggaaaag

SEQ ID NO: 55694 - DNA, 80 bp, synthetic construct
  misc_feature 1..80: note = Artificially Synthesized Probe
  source 1..80: mol_type = other DNA
ggtcccaggtcggtggtcgaggccctggggatggggtcccgggggatcgacggtcgaggcccgagctctcctgagtcctg

SEQ ID NO: 55695 - DNA, 80 bp, synthetic construct
  misc_feature 1..80: note = Artificially Synthesized Probe
  source 1..80: mol_type = other DNA
ggtcccggcggcgatcgaaccgaccaagctgcacccggcggggacttccggggtcgccgccccacttccggtcgcacggg

SEQ ID NO: 55696 - DNA, 80 bp, synthetic construct
  misc_feature 1..80: note = Artificially Synthesized Probe
  source 1..80: mol_type = other DNA
attctgaaattcatttgtgcacaaatgagcagaaaggcagtgtgccaaagccaaattttcagagaagctacaaacgaggg

SEQ ID NO: 55697 - DNA, 80 bp, synthetic construct
  misc_feature 1..80: note = Artificially Synthesized Probe
  source 1..80: mol_type = other DNA
tctggttggtttttttgagacagggtctcactttctcacccaggctggcgtgcggtggtgtcatcctaactcactgtagc

SEQ ID NO: 55698 - DNA, 80 bp, synthetic construct
  misc_feature 1..80: note = Artificially Synthesized Probe
  source 1..80: mol_type = other DNA
tggagtgctgggattacaggcgtgagccaccacgcccagcctccagatcctggttttctaaataccattccccactcgaa

SEQ ID NO: 55699 - DNA, 80 bp, synthetic construct
  misc_feature 1..80: note = Artificially Synthesized Probe
  source 1..80: mol_type = other DNA
acgccattatttcttctatgcatttcaaagactttagtactttcactaattctgctactgctgtctagaaggcagagcca

SEQ ID NO: 55700 - DNA, 80 bp, synthetic construct; identical to SEQ ID NO: 25422
  misc_feature 1..80: note = Artificially Synthesized Probe
  source 1..80: mol_type = other DNA

SEQ ID NO: 55701 - DNA, 80 bp, synthetic construct
  misc_feature 1..80: note = Artificially Synthesized Probe
  source 1..80: mol_type = other DNA
tacggccaggcacaggtgctcacgcctgtaatcccagcactttgggaggctgaggcagagggatcaccagagggcaggag

SEQ ID NO: 55702 - DNA, 80 bp, synthetic construct
  misc_feature 1..80: note = Artificially Synthesized Probe
  source 1..80: mol_type = other DNA
agccaagatggtgccactgcactctagcgtgggcaacagagcaagactctgtctcaaaaataataaaaagggaaaatgct

SEQ ID NO: 55703 - DNA, 80 bp, synthetic construct
  misc_feature 1..80: note = Artificially Synthesized Probe
  source 1..80: mol_type = other DNA
ctgaggagcattctgcaaaatagcagccagcaggtttcaaaccattcaggtcatgaagaaaaccggggaaccctcccaga

SEQ ID NO: 55704 - DNA, 80 bp, synthetic construct; identical to SEQ ID NO: 25423
  misc_feature 1..80: note = Artificially Synthesized Probe
  source 1..80: mol_type = other DNA

SEQ ID NO: 55705 - DNA, 80 bp, synthetic construct
  misc_feature 1..80: note = Artificially Synthesized Probe
  source 1..80: mol_type = other DNA
aaagtttccagggatccatttgtttatttacaacagcattctaggagaaaggtgaatgggcccctctcctcagtgcccaa

SEQ ID NO: 55706 - DNA, 80 bp, synthetic construct
  misc_feature 1..80: note = Artificially Synthesized Probe
  source 1..80: mol_type = other DNA
ccaacactagcccctccctgggggctcccaagttctgaaaagaaaaccaaacgcagtgagcccacgtcagggtctccacg

SEQ ID NO: 55707 - DNA, 80 bp, synthetic construct; identical to SEQ ID NO: 25424
  misc_feature 1..80: note = Artificially Synthesized Probe
  source 1..80: mol_type = other DNA

SEQ ID NO: 55708 - DNA, 80 bp, synthetic construct
  misc_feature 1..80: note = Artificially Synthesized Probe
  source 1..80: mol_type = other DNA
cagatcttccacaagagatggtggagcagagtcttttctaacgcgcccccggggaaagggagattccctttccggctctg

SEQ ID NO: 55709 - DNA, 80 bp, synthetic construct
  misc_feature 1..80: note = Artificially Synthesized Probe
  source 1..80: mol_type = other DNA
ctgggaaggcattggggtgtggtcggggaaggcacccagttgtttacagatggtagagggtgacacaggcagcatcgtca

SEQ ID NO: 55710 - DNA, 80 bp, synthetic construct
  misc_feature 1..80: note = Artificially Synthesized Probe
  source 1..80: mol_type = other DNA
ccagaggcagcagctgagtgaggatgaagactgcagggtgggcacacttgaatgtggatctgagtgacggttctgtcccc

SEQ ID NO: 55711 - DNA, 80 bp, synthetic construct
  misc_feature 1..80: note = Artificially Synthesized Probe
  source 1..80: mol_type = other DNA
gcacctgacatcccccagcacacatagacctgtggtgcctccttgggctatgtctgtccacatggtgggacctcctgccc

SEQ ID NO: 55712 - DNA, 80 bp, synthetic construct; identical to SEQ ID NO: 25425
  misc_feature 1..80: note = Artificially Synthesized Probe
  source 1..80: mol_type = other DNA

SEQ ID NO: 55713 - DNA, 80 bp, synthetic construct
  misc_feature 1..80: note = Artificially Synthesized Probe
  source 1..80: mol_type = other DNA
ggcggtgcacaccggcggggcacggctagttcctcaaggcggccaacctggaaaccaacaacaggactcgggtcagggca

SEQ ID NO: 55714 - DNA, 80 bp, synthetic construct
  misc_feature 1..80: note = Artificially Synthesized Probe
  source 1..80: mol_type = other DNA
aagtgtactgcagacgtgtgtaaacgccatgcctgacacacactcaagcccccacgccagccggagcaggacggggcagc

SEQ ID NO: 55715 - DNA, 80 bp, synthetic construct
  misc_feature 1..80: note = Artificially Synthesized Probe
  source 1..80: mol_type = other DNA
cacagcgtttcggggaccgaccctacctccgtgacagctggtcctcctggctgcgcacagagctctcgcccacggcagag

SEQ ID NO: 55716 - DNA, 80 bp, synthetic construct; identical to SEQ ID NO: 25426
  misc_feature 1..80: note = Artificially Synthesized Probe
  source 1..80: mol_type = other DNA

SEQ ID NO: 55717 - DNA, 80 bp, synthetic construct
  misc_feature 1..80: note = Artificially Synthesized Probe
  source 1..80: mol_type = other DNA
cttgtctgccatccgagcctccccacaaggagccaggtgcctgcaggaggcccccgccgccctgcccaccctacctgtca

SEQ ID NO: 55718 - DNA, 80 bp, synthetic construct
  misc_feature 1..80: note = Artificially Synthesized Probe
  source 1..80: mol_type = other DNA
ggggccacataccgatgtatggacgtccaggttctgcacctgctgctcgaacctgtccatcactgaggagaccttctgca

SEQ ID NO: 55719 - DNA, 80 bp, synthetic construct
  misc_feature 1..80: note = Artificially Synthesized Probe
  source 1..80: mol_type = other DNA
ttgtcctaggttataattgtagagcaaggattattataatattggaataaagagtaatgccacaaactgatgattagtaa

SEQ ID NO: 55720 - DNA, 80 bp, synthetic construct
  misc_feature 1..80: note = Artificially Synthesized Probe
  source 1..80: mol_type = other DNA
agctggggcaccccaaccctgacccacaaaaccccaactctgggctgagccatcatctgggtcctatggaaagaccacca

SEQ ID NO: 55721 - DNA, 80 bp, synthetic construct
  misc_feature 1..80: note = Artificially Synthesized Probe
  source 1..80: mol_type = other DNA
cccagcgcggggtcggtggagaaaaggccgccgacgtggggacccagcgcggggtcggtggagaaaaggccgccgacgtg

SEQ ID NO: 55722 - DNA, 80 bp, synthetic construct
  misc_feature 1..80: note = Artificially Synthesized Probe
  source 1..80: mol_type = other DNA
gaaaaggccgccgacgtggacacccagcgcggggtcggtggagaaaaggccgccgacgtggggacccagcgcggggtcgg

SEQ ID NO: 55723 - DNA, 80 bp, synthetic construct; identical to SEQ ID NO: 25427
  misc_feature 1..80: note = Artificially Synthesized Probe
  source 1..80: mol_type = other DNA

SEQ ID NO: 55724 - DNA, 80 bp, synthetic construct
  misc_feature 1..80: note = Artificially Synthesized Probe
  source 1..80: mol_type = other DNA
gagaaaaggccgccgacgtggagacccagcgcggggtcggtggagaaaaggccgccgacgtggggacccagcgcggggtc

SEQ ID NO: 55725 - DNA, 80 bp, synthetic construct
  misc_feature 1..80: note = Artificially Synthesized Probe
  source 1..80: mol_type = other DNA
cttgtgggagttgccaagaccgaggcctggccaggtacagtgacagtgagtggttcacgcctataattccagcactttgg

SEQ ID NO: 55726 - DNA, 80 bp, synthetic construct; identical to SEQ ID NO: 25428
  misc_feature 1..80: note = Artificially Synthesized Probe
  source 1..80: mol_type = other DNA

SEQ ID NO: 55727 - DNA, 80 bp, synthetic construct
  misc_feature 1..80: note = Artificially Synthesized Probe
  source 1..80: mol_type = other DNA
atatatttaaaaaaaaaaaagcccaagtcttatcaagaggtccttcctggggcatcagtgcaagctcagggtgcagcctc

SEQ ID NO: 55728 - DNA, 80 bp, synthetic construct
  misc_feature 1..80: note = Artificially Synthesized Probe
  source 1..80: mol_type = other DNA
actctgagctgccccagatccagaccgcagagcccattcctgcttcagccagcgaacgccacccatccagcaccagggcc

SEQ ID NO: 55729 - DNA, 80 bp, synthetic construct; identical to SEQ ID NO: 25429
  misc_feature 1..80: note = Artificially Synthesized Probe
  source 1..80: mol_type = other DNA

SEQ ID NO: 55730 - DNA, 80 bp, synthetic construct; identical to SEQ ID NO: 25420
  misc_feature 1..80: note = Artificially Synthesized Probe
  source 1..80: mol_type = other DNA

SEQ ID NO: 55731 - DNA, 80 bp, synthetic construct
  misc_feature 1..80: note = Artificially Synthesized Probe
  source 1..80: mol_type = other DNA
gcccgccaccatgcctggctaatttttttgtatttttagtagagatggggtttcaccgtgttagccaggatggcctcgat

SEQ ID NO: 55732 - DNA, 80 bp, synthetic construct
  misc_feature 1..80: note = Artificially Synthesized Probe
  source 1..80: mol_type = other DNA
cccagcccagccccccaagcaggcttctgcttccccccgcacccctccagcactccactgggcacgggacacagcgggtg

SEQ ID NO: 55733 - DNA, 80 bp, synthetic construct
  misc_feature 1..80: note = Artificially Synthesized Probe
  source 1..80: mol_type = other DNA
tttttttctttttttggagatggaatctcgctctgtggcccaggatggagtgcagcagtgtgatctcggctcactgcaac

SEQ ID NO: 55734 - DNA, 80 bp, synthetic construct; identical to SEQ ID NO: 25430
  misc_feature 1..80: note = Artificially Synthesized Probe
  source 1..80: mol_type = other DNA

SEQ ID NO: 55735 - DNA, 80 bp, synthetic construct
  misc_feature 1..80: note = Artificially Synthesized Probe
  source 1..80: mol_type = other DNA
actaaaaatacaaaaattagccaggtgtggtggcgcatgcttgtaatcccagctacccaggaggttgaggcaggagaatc

SEQ ID NO: 55736 - DNA, 80 bp, synthetic construct
  misc_feature 1..80: note = Artificially Synthesized Probe
  source 1..80: mol_type = other DNA
acggtgcgttttattcattgaagtctgtgcacacactgggagcacattccagggcttggcagacattgcctgcagaagcc

SEQ ID NO: 55737 - DNA, 80 bp, synthetic construct
  misc_feature 1..80: note = Artificially Synthesized Probe
  source 1..80: mol_type = other DNA
gtccggagagagcctcggtgacaatcccagccccaaagagaaaactggggtcaccccactacatcccacaggccatggtg

SEQ ID NO: 55738 - DNA, 80 bp, synthetic construct
  misc_feature 1..80: note = Artificially Synthesized Probe
  source 1..80: mol_type = other DNA
cctggaggggctgtggtcctgggggggctgcggtcctggggggactgcagtcctagggggctgtggtcctagagggggct

SEQ ID NO: 55739 - DNA, 80 bp, synthetic construct
  misc_feature 1..80: note = Artificially Synthesized Probe
  source 1..80: mol_type = other DNA
ggctatggtcctagagggggctgtggtcctggaggggctgtggttctagggggctgtgaccctcgggggggctgtggttc

SEQ ID NO: 55740 - DNA, 80 bp, synthetic construct; identical to SEQ ID NO: 25448
  misc_feature 1..80: note = Artificially Synthesized Probe
  source 1..80: mol_type = other DNA

SEQ ID NO: 55741 - DNA, 80 bp, synthetic construct
  misc_feature 1..80: note = Artificially Synthesized Probe
  source 1..80: mol_type = other DNA
tgtagtcctggggggctgtggtcctagggggctgtggtcctgggggggagctgctgtcctaggggtgttgtagtcctagg

SEQ ID NO: 55742 - DNA, 80 bp, synthetic construct
  misc_feature 1..80: note = Artificially Synthesized Probe
  source 1..80: mol_type = other DNA
ccactgaagagcatgcatctcaccatatgtaaattttaccttaattaataaaaacagcactggacgcaaatacgccaaca

SEQ ID NO: 55743 - DNA, 80 bp, synthetic construct
  misc_feature 1..80: note = Artificially Synthesized Probe
  source 1..80: mol_type = other DNA
ctgtggtcctgggggagctgtgaacctggtgggggctgcagtctttggagggccgtggtcctggtgaggctgtggaagtg

SEQ ID NO: 55744 - DNA, 80 bp, synthetic construct; identical to SEQ ID NO: 25449
  misc_feature 1..80: note = Artificially Synthesized Probe
  source 1..80: mol_type = other DNA

SEQ ID NO: 55745 - DNA, 80 bp, synthetic construct
  misc_feature 1..80: note = Artificially Synthesized Probe
  source 1..80: mol_type = other DNA
ttaattaataaaaacagcactggacgcaaatacgccaacattgttgtcaaggttaatttggcgtggtgggaatatggtgc

SEQ ID NO: 55746 - DNA, 80 bp, synthetic construct
  misc_feature 1..80: note = Artificially Synthesized Probe
  source 1..80: mol_type = other DNA
tcccgctgccattactggaatcaattgagttggaagaggagcccaatcgttcttaatcatacagcagggtttgtaggtca

SEQ ID NO: 55747 - DNA, 80 bp, synthetic construct
  misc_feature 1..80: note = Artificially Synthesized Probe
  source 1..80: mol_type = other DNA
cgctggctgccgggcgcagggccctcggcacagatctgcaggaaggacaagttagaggacagcagcctccggaggccacc

SEQ ID NO: 55748 - DNA, 80 bp, synthetic construct; identical to SEQ ID NO: 25450
  misc_feature 1..80: note = Artificially Synthesized Probe
  source 1..80: mol_type = other DNA

SEQ ID NO: 55749 - DNA, 80 bp, synthetic construct
  misc_feature 1..80: note = Artificially Synthesized Probe
  source 1..80: mol_type = other DNA
tttatttggattttttttttgagcctcaaaaaaaaaaagaaagggaaaggggtcttcccccaggcaagcggccacccccg

SEQ ID NO: 55750 - DNA, 80 bp, synthetic construct
  misc_feature 1..80: note = Artificially Synthesized Probe
  source 1..80: mol_type = other DNA
gacactgtgtccaggtgccatagccactctcaggcccctccggctctgacgctccagtgctgagacccagggatgccctc

SEQ ID NO: 55751 - DNA, 80 bp, synthetic construct
  misc_feature 1..80: note = Artificially Synthesized Probe
  source 1..80: mol_type = other DNA
gggcaggccctggccactcctgcccaccaaggccctgtagaggactcacttgttgtagaggactcacttgttgtagagga

SEQ ID NO: 55752 - DNA, 80 bp, synthetic construct
  misc_feature 1..80: note = Artificially Synthesized Probe
  source 1..80: mol_type = other DNA
cagggccagggtggggcaggggcagggccagggcagggcagcagggtgaggggtgtgagggagggcaggggcgggacagg

SEQ ID NO: 55753 - DNA, 80 bp, synthetic construct; identical to SEQ ID NO: 25451
  misc_feature 1..80: note = Artificially Synthesized Probe
  source 1..80: mol_type = other DNA

SEQ ID NO: 55754 - DNA, 80 bp, synthetic construct
  misc_feature 1..80: note = Artificially Synthesized Probe
  source 1..80: mol_type = other DNA
caaacatctccagcaggaaactggagaggagtcggcggcctcacaggcttccccagctaaggacaggtgtggcgggcatg

SEQ ID NO: 55755 - DNA, 80 bp, synthetic construct
  misc_feature 1..80: note = Artificially Synthesized Probe
  source 1..80: mol_type = other DNA
tcatgacctgagcaggtgggacctgtcactcaaggtcactgtgtgcagctgggccactcaccccagccccttccgaccca

SEQ ID NO: 55756 - DNA, 80 bp, synthetic construct
  misc_feature 1..80: note = Artificially Synthesized Probe
  source 1..80: mol_type = other DNA
attcccacaggaccacgtctccacggaccgtgtccccacaggaccacgtctccacaggaccacattcccacaggaccaca

SEQ ID NO: 55757 - DNA, 80 bp, synthetic construct
  misc_feature 1..80: note = Artificially Synthesized Probe
  source 1..80: mol_type = other DNA
gacctcatcccgtgtgtctgaggaagctccagggtcctcagaaccagcttcacgtggccaggcctggccctcctgcccag

SEQ ID NO: 55758 - DNA, 80 bp, synthetic construct; identical to SEQ ID NO: 25452
  misc_feature 1..80: note = Artificially Synthesized Probe
  source 1..80: mol_type = other DNA

SEQ ID NO: 55759 - DNA, 80 bp, synthetic construct
  misc_feature 1..80: note = Artificially Synthesized Probe
  source 1..80: mol_type = other DNA
gcagctgggtccacttatgcaatgtggatcgggcttcttacatctgaaatctgcgtctctatccctcctctgagaccagt

SEQ ID NO: 55760 - DNA, 80 bp, synthetic construct
  misc_feature 1..80: note = Artificially Synthesized Probe
  source 1..80: mol_type = other DNA
caggagcgtcagcacccacgtgtgcatgttcgtgtaagtccttagtcggctgcagggtggagagaggggtgggcagctct

SEQ ID NO: 55761 - DNA, 80 bp, synthetic construct
  misc_feature 1..80: note = Artificially Synthesized Probe
  source 1..80: mol_type = other DNA
gcctctgccagctatcactttgcagccgtgtttgcaaacctcagcaggcttgccaagcctgtgcaacccgcattgtcttc

SEQ ID NO: 55762 - DNA, 80 bp, synthetic construct; identical to SEQ ID NO: 25453
  misc_feature 1..80: note = Artificially Synthesized Probe
  source 1..80: mol_type = other DNA

SEQ ID NO: 55763 - DNA, 80 bp, synthetic construct
  misc_feature 1..80: note = Artificially Synthesized Probe
  source 1..80: mol_type = other DNA
acaaatgcctccccatgtgggggtgccctccctggaccagcgagctgggatttggcagcagggctggagctggcggactt

SEQ ID NO: 55764 - DNA, 80 bp, synthetic construct
  misc_feature 1..80: note = Artificially Synthesized Probe
  source 1..80: mol_type = other DNA
tcaccccatttggagtggctgagcctggctgggaaacgtggaaatgtctctgctgccccttacccggcccctccagggcc

SEQ ID NO: 55765 - DNA, 80 bp, synthetic construct
  misc_feature 1..80: note = Artificially Synthesized Probe
  source 1..80: mol_type = other DNA
gcctggctggaccagtaggcttcctcccagcagccttcttgggccccccaccagaaagaacatatcttcagacaaacaga

SEQ ID NO: 55766 - DNA, 80 bp, synthetic construct; identical to SEQ ID NO: 25454
  misc_feature 1..80: note = Artificially Synthesized Probe
  source 1..80: mol_type = other DNA

SEQ ID NO: 55767 - DNA, 80 bp, synthetic construct
  misc_feature 1..80: note = Artificially Synthesized Probe
  source 1..80: mol_type = other DNA
ggccggacactcacagccacggggagtgttgatggctgtgtcccctctgcccacccagacccctgtgctccttgcagggc

SEQ ID NO: 55768 - DNA, 80 bp, synthetic construct
  misc_feature 1..80: note = Artificially Synthesized Probe
  source 1..80: mol_type = other DNA
tgttgtaaccggagaagagtttcttcaggagccgctcctcggcgtgggcccgggtctccacatggctgctggctgcgggg

SEQ ID NO: 55769 - DNA, 80 bp, synthetic construct
  misc_feature 1..80: note = Artificially Synthesized Probe
  source 1..80: mol_type = other DNA
tctgtgtgtgtgtgtgtgccgggcgtgtgctgtgtgtgtgtgtgtgtgtgtgtgtgtgtgtgccgggcgtggcgtgcgct

SEQ ID NO: 55770 - DNA, 80 bp, synthetic construct; identical to SEQ ID NO: 25439
  misc_feature 1..80: note = Artificially Synthesized Probe
  source 1..80: mol_type = other DNA

SEQ ID NO: 55771 - DNA, 80 bp, synthetic construct; identical to SEQ ID NO: 25455
  misc_feature 1..80: note = Artificially Synthesized Probe
  source 1..80: mol_type = other DNA

SEQ ID NO: 55772 - DNA, 80 bp, synthetic construct
  misc_feature 1..80: note = Artificially Synthesized Probe
  source 1..80: mol_type = other DNA
cccctccgcaccccagcctgcccgtgctgttgggcagacccagaacgcccctgatgagtcgctctggaggagcacagccc

SEQ ID NO: 55773 - DNA, 80 bp, synthetic construct
  misc_feature 1..80: note = Artificially Synthesized Probe
  source 1..80: mol_type = other DNA
aggggtcagttctacacccctgggagccttgactcccagcccagagtccccacccgcgaccttgtccttcctgcagaaaa

SEQ ID NO: 55774 - DNA, 80 bp, synthetic construct
  misc_feature 1..80: note = Artificially Synthesized Probe
  source 1..80: mol_type = other DNA
cacctctgctcaagttcgagcttttggggccagccctgaaatagcagcggaaccccccacaccccgcggaaagccccttt

SEQ ID NO: 55775 - DNA, 80 bp, synthetic construct; identical to SEQ ID NO: 25456
  misc_feature 1..80: note = Artificially Synthesized Probe
  source 1..80: mol_type = other DNA

SEQ ID NO: 55776 - DNA, 80 bp, synthetic construct
  misc_feature 1..80: note = Artificially Synthesized Probe
  source 1..80: mol_type = other DNA
gcttcggccgccgggcccggttcgtcttctcctgtggggcgcggtgcggcggcggcgcggcagggagcgccgggctgtgg

SEQ ID NO: 55777 - DNA, 80 bp, synthetic construct
  misc_feature 1..80: note = Artificially Synthesized Probe
  source 1..80: mol_type = other DNA
cccagggggacggggaggctgcgctgggccccgggcgggggtaaagtttccttgttctcctggggttcgagacgtgcctg

SEQ ID NO: 55778 - DNA, 80 bp, synthetic construct
  misc_feature 1..80: note = Artificially Synthesized Probe
  source 1..80: mol_type = other DNA
atctgggttactccatcgcgccagccggtgtctgcagcctgaaaatcgcgtctctggtcttgttccccagcgagccgttc

SEQ ID NO: 55779 - DNA, 80 bp, synthetic construct; identical to SEQ ID NO: 25457
  misc_feature 1..80: note = Artificially Synthesized Probe
  source 1..80: mol_type = other DNA

SEQ ID NO: 55780 - DNA, 80 bp, synthetic construct
  misc_feature 1..80: note = Artificially Synthesized Probe
  source 1..80: mol_type = other DNA
ggtcgggcgagggggctccgtcaggagttccctgcagcaaccccctctccagcacaggcctctggagccctacagctcct

SEQ ID NO: 55781 - DNA, 80 bp, synthetic construct
  misc_feature 1..80: note = Artificially Synthesized Probe
  source 1..80: mol_type = other DNA
ttattcattctgctctcaggcacctcctgacgagaccctggcccaggagagctcggctcggggacagaggaatgagactc

SEQ ID NO: 55782 - DNA, 80 bp, synthetic construct
  misc_feature 1..80: note = Artificially Synthesized Probe
  source 1..80: mol_type = other DNA
ctttgggacgggcaggagctcttcctcactggccagagctgtctgtccgctctgtgggcagtgcctacaattagagcttt

SEQ ID NO: 55783 - DNA, 80 bp, synthetic construct
  misc_feature 1..80: note = Artificially Synthesized Probe
  source 1..80: mol_type = other DNA
aggtggcctcttcaattgtccctacgttaccaaagagataacacaggtgcggagaggccgagcgacttgccgaagctcac

SEQ ID NO: 55784 - DNA, 80 bp, synthetic construct
  misc_feature 1..80: note = Artificially Synthesized Probe
  source 1..80: mol_type = other DNA
tgtctgccacccaccctgctgacggctctccctcagaccaccctgcagatccaaccctcgatggtttcaagggcctgttt

SEQ ID NO: 55785 - DNA, 80 bp, synthetic construct; identical to SEQ ID NO: 25458
  misc_feature 1..80: note = Artificially Synthesized Probe
  source 1..80: mol_type = other DNA

SEQ ID NO: 55786 - DNA, 80 bp, synthetic construct
  misc_feature 1..80: note = Artificially Synthesized Probe
  source 1..80: mol_type = other DNA
ggtgaaaggactcagccactttagaaatccgaagccgcctctgctccaggggacacctaacccagcagtcccacagcagc

SEQ ID NO: 55787 - DNA, 80 bp, synthetic construct
  misc_feature 1..80: note = Artificially Synthesized Probe
  source 1..80: mol_type = other DNA
ccaccttggtgagaagcccctgcctgtggtgtcgcagagcaaatgccattggcagagccaaatccacattcttttgtgag

SEQ ID NO: 55788 - DNA, 80 bp, synthetic construct
  misc_feature 1..80: note = Artificially Synthesized Probe
  source 1..80: mol_type = other DNA
aaccaaagacctctttgggaagaggacacccctgctcctgcacttgggctcatggtttccccctggacttgttaaaatcg

SEQ ID NO: 55789 - DNA, 80 bp, synthetic construct
  misc_feature 1..80: note = Artificially Synthesized Probe
  source 1..80: mol_type = other DNA
ggtgaggcctccaaatctgtggcttccaccagccattgctggcagctctgatgcaggcggccccagagtgcccggagaaa

SEQ ID NO: 55790 - DNA, 80 bp, synthetic construct; identical to SEQ ID NO: 25459
  misc_feature 1..80: note = Artificially Synthesized Probe
  source 1..80: mol_type = other DNA

SEQ ID NO: 55791 - DNA, 80 bp, synthetic construct
  misc_feature 1..80: note = Artificially Synthesized Probe
  source 1..80: mol_type = other DNA
ccgagtgcacacgctcacacacatctgtccaacctcactggctttccctttggatttgctaatgcagcaagattaatcag

SEQ ID NO: 55792 - DNA, 80 bp, synthetic construct
  misc_feature 1..80: note = Artificially Synthesized Probe
  source 1..80: mol_type = other DNA
aaactctggattcaaagtccagtgagaccagatttgggggcacagcttttctgtggcctgagccgccctagggggcttgc

SEQ ID NO: 55793 - DNA, 80 bp, synthetic construct
  misc_feature 1..80: note = Artificially Synthesized Probe
  source 1..80: mol_type = other DNA
ccttggaatcatggaggggtggggcagcctgtgcccatcccaaggggaagtgtgcccctggggacactggggggctgccg

SEQ ID NO: 55794 - DNA, 80 bp, synthetic construct; identical to SEQ ID NO: 25460
  misc_feature 1..80: note = Artificially Synthesized Probe
  source 1..80: mol_type = other DNA

SEQ ID NO: 55795 - DNA, 80 bp, synthetic construct
  misc_feature 1..80: note = Artificially Synthesized Probe
  source 1..80: mol_type = other DNA
ggcctccccctcctgcagctgggcctcgcccatccctaccgtgctctgtggaaactctgtcccacccagcacccctgaga

SEQ ID NO: 55796 - DNA, 80 bp, synthetic construct
  misc_feature 1..80: note = Artificially Synthesized Probe
  source 1..80: mol_type = other DNA
caggcgaagcctggctcttgggccacagtgaccacgtggacagatggacggatgcctgtccaagggctaagggagggttg

SEQ ID NO: 55797 - DNA, 80 bp, synthetic construct
  misc_feature 1..80: note = Artificially Synthesized Probe
  source 1..80: mol_type = other DNA
ccacattgacttccctgtcatccaccaggacgggcggagagtaactctgtcctgtagcctccgtgagtctgggaaggcct

SEQ ID NO: 55798 - DNA, 80 bp, synthetic construct; identical to SEQ ID NO: 25461
  misc_feature 1..80: note = Artificially Synthesized Probe
  source 1..80: mol_type = other DNA

SEQ ID NO: 55799 - DNA, 80 bp, synthetic construct
  misc_feature 1..80: note = Artificially Synthesized Probe
  source 1..80: mol_type = other DNA
tccccaggcctggctccctgcccccggctgtgctctcaactccctgccctcggctgcgctcccagctccctgccctctcc

SEQ ID NO: 55800 - DNA, 80 bp, synthetic construct
  misc_feature 1..80: note = Artificially Synthesized Probe
  source 1..80: mol_type = other DNA
aacagagagtgctttccctcgggctgagagaagagatctttgagcccctgtctttgtccgttttgttcagcacaggtttt

SEQ ID NO: 55801 - DNA, 80 bp, synthetic construct
  misc_feature 1..80: note = Artificially Synthesized Probe
  source 1..80: mol_type = other DNA
gtgatagtgggagacggaaaggttggctgagaggcctgattccttccacgcatcacaacctgaaaatcgccaaaggtctt

SEQ ID NO: 55802 - DNA, 80 bp, synthetic construct
  misc_feature 1..80: note = Artificially Synthesized Probe
  source 1..80: mol_type = other DNA
gtcaggacctggggccacagtcaaggtcggggcctggggtcgcggtcaaggtcggggcctggggtcccggtcaaggtcgg

SEQ ID NO: 55803 - DNA, 80 bp, synthetic construct; identical to SEQ ID NO: 25462
  misc_feature 1..80: note = Artificially Synthesized Probe
  source 1..80: mol_type = other DNA

SEQ ID NO: 55804 - DNA, 80 bp, synthetic construct
  misc_feature 1..80: note = Artificially Synthesized Probe
  source 1..80: mol_type = other DNA
ctctctgctgagtagttaattcactataagcacgctccagaggaagtctccagcctcttagtgaaactgcagcgatgaat

SEQ ID NO: 55805 - DNA, 80 bp, synthetic construct
  misc_feature 1..80: note = Artificially Synthesized Probe
  source 1..80: mol_type = other DNA
ggctccctgactcccatgaggcttctcagggacttcctgccccgagggtcccagcatctcccaggtggaggtcctcaagg

SEQ ID NO: 55806 - DNA, 80 bp, synthetic construct
  misc_feature 1..80: note = Artificially Synthesized Probe
  source 1..80: mol_type = other DNA
tcagctgtggggacagtgctggccccgagtcactgggccgttgtgaggatggagagggggtcgtgcaggctcctgggtcc

SEQ ID NO: 55807 - DNA, 80 bp, synthetic construct
  misc_feature 1..80: note = Artificially Synthesized Probe
  source 1..80: mol_type = other DNA
tcggttcacaccacatcaggggccgggaatcccactcagggtttagccctaggctccccccagcacccccctcccaatcc

SEQ ID NO: 55808 - DNA, 80 bp, synthetic construct; identical to SEQ ID NO: 25463
  misc_feature 1..80: note = Artificially Synthesized Probe
  source 1..80: mol_type = other DNA

SEQ ID NO: 55809 - DNA, 80 bp, synthetic construct
  misc_feature 1..80: note = Artificially Synthesized Probe
  source 1..80: mol_type = other DNA
aggtcaccttgccctctcccgtgttccccagccagacccccagtagagaggagacccctgcagttgtggatgtggctttc

SEQ ID NO: 55810 - DNA, 80 bp, synthetic construct
  misc_feature 1..80: note = Artificially Synthesized Probe
  source 1..80: mol_type = other DNA
ctgccctctggctgcccctcctccctagggcatgtaccccgagcccacctcagcctccccgggcatatcagggccccact

SEQ ID NO: 55811 - DNA, 80 bp, synthetic construct
  misc_feature 1..80: note = Artificially Synthesized Probe
  source 1..80: mol_type = other DNA
tttgagagcagggctgtctctaaccgagggagggtgctgcaaactccagaaggcccccgtcccagggaacagcgggggga

SEQ ID NO: 55812 - DNA, 80 bp, synthetic construct; identical to SEQ ID NO: 25464
  misc_feature 1..80: note = Artificially Synthesized Probe
  source 1..80: mol_type = other DNA

SEQ ID NO: 55813 - DNA, 80 bp, synthetic construct
  misc_feature 1..80: note = Artificially Synthesized Probe
  source 1..80: mol_type = other DNA
ctgcaggcctggaggcacaaagcagggatcattttcctgtgtgtacacgggatgtgtgtacatgggatgtgtgtgtgtgg

SEQ ID NO: 55814 - DNA, 80 bp, synthetic construct
  misc_feature 1..80: note = Artificially Synthesized Probe
  source 1..80: mol_type = other DNA
gactgtttcatgagatgtatatgtatacagggtgtgtgtgtgcaggtggtacatgcttcatgagatgtgccgtgtgtatg

SEQ ID NO: 55815 - DNA, 80 bp, synthetic construct
  misc_feature 1..80: note = Artificially Synthesized Probe
  source 1..80: mol_type = other DNA
ttttcacaagcatgagtgtgacagtcacctgctgacaggcggcctcaccctctgctcaccctgcccacccggacccaggg

SEQ ID NO: 55816 - DNA, 80 bp, synthetic construct
  misc_feature 1..80: note = Artificially Synthesized Probe
  source 1..80: mol_type = other DNA
ccggggaatcacaacacagaagtaccccaggggctgaagccactaggcccccgtggagccctggccacctgccagagccc

SEQ ID NO: 55817 - DNA, 80 bp, synthetic construct; identical to SEQ ID NO: 25465
  misc_feature 1..80: note = Artificially Synthesized Probe
  source 1..80: mol_type = other DNA

SEQ ID NO: 55818 - DNA, 80 bp, synthetic construct
  misc_feature 1..80: note = Artificially Synthesized Probe
  source 1..80: mol_type = other DNA
ggtggggaacttgcagcctgcaactcgggcacctcttgtaatgtcgggaaaccggggcaccgctcagtcacacgtggccg

SEQ ID NO: 55819 - DNA, 80 bp, synthetic construct
  misc_feature 1..80: note = Artificially Synthesized Probe
  source 1..80: mol_type = other DNA
ctgccctccccagcactcaagtcaagaccaagaccacacctcagccaacccctcctcattcccagccccacccaccctcc

SEQ ID NO: 55820 - DNA, 80 bp, synthetic construct
  misc_feature 1..80: note = Artificially Synthesized Probe
  source 1..80: mol_type = other DNA
agccaggcctgggtgaaggtgcctttgggaggaggtggaggagtgtaacgattgggacccagctggacaggtccctgtga

SEQ ID NO: 55821 - DNA, 80 bp, synthetic construct; identical to SEQ ID NO: 25466
  misc_feature 1..80: note = Artificially Synthesized Probe
  source 1..80: mol_type = other DNA

SEQ ID NO: 55822 - DNA, 80 bp, synthetic construct
  misc_feature 1..80: note = Artificially Synthesized Probe
  source 1..80: mol_type = other DNA
gagttctgtcaaccagtgccgtttccttatcaacaaggacatgtctacaaatagctcatcacgtctccaatccagaagtg

SEQ ID NO: 55823 - DNA, 80 bp, synthetic construct
  misc_feature 1..80: note = Artificially Synthesized Probe
  source 1..80: mol_type = other DNA
atctggaattaaaccaacgagcttcccctcatgggctgcactcacttgactttcagctcctctccaaatcgttctcttcc

SEQ ID NO: 55824 - DNA, 80 bp, synthetic construct; identical to SEQ ID NO: 25467
  misc_feature 1..80: note = Artificially Synthesized Probe
  source 1..80: mol_type = other DNA

SEQ ID NO: 55825 - DNA, 80 bp, synthetic construct
  misc_feature 1..80: note = Artificially Synthesized Probe
  source 1..80: mol_type = other DNA
tgcgtgccctgtgctggcgcaaggcagctcttccgtgcctccgtggtgcctgcggtgaggctgcctgggacccccctgta

SEQ ID NO: 55826 - DNA, 80 bp, synthetic construct
  misc_feature 1..80: note = Artificially Synthesized Probe
  source 1..80: mol_type = other DNA
aagtgtggcagggttgggcgcagccacctatgagcccctgaacctccccaggccgtcggatctcacttcagagtggcctg

SEQ ID NO: 55827 - DNA, 80 bp, synthetic construct; identical to SEQ ID NO: 25440
  misc_feature 1..80: note = Artificially Synthesized Probe
  source 1..80: mol_type = other DNA

SEQ ID NO: 55828 - DNA, 80 bp, synthetic construct
  misc_feature 1..80: note = Artificially Synthesized Probe
  source 1..80: mol_type = other DNA
acacccttgttttgaggtgcagagaccaaagttgagacctggccatgcagcaggtctgcagggacctcagagcccagggc

SEQ ID NO: 55829 - DNA, 80 bp, synthetic construct
  misc_feature 1..80: note = Artificially Synthesized Probe
  source 1..80: mol_type = other DNA
cccagccccattaaacgcccagggccactgtcctgtccccagccccattaaatgcccagggccactgtcctgtccccagc

SEQ ID NO: 55830 - DNA, 80 bp, synthetic construct; identical to SEQ ID NO: 25468
  misc_feature 1..80: note = Artificially Synthesized Probe
  source 1..80: mol_type = other DNA

SEQ ID NO: 55831 - DNA, 80 bp, synthetic construct
  misc_feature 1..80: note = Artificially Synthesized Probe
  source 1..80: mol_type = other DNA
accctgtcttctctcttgcaggtgtgtggttggttctagaagatgctgagcccccccccgcgcactcgtccccacctgcc

SEQ ID NO: 55832 - DNA, 80 bp, synthetic construct
  misc_feature 1..80: note = Artificially Synthesized Probe
  source 1..80: mol_type = other DNA
gggccgcacctgccttggccactccagacccgccacccagtgcagacccaccacctagggcagcgcctccacccagggca

SEQ ID NO: 55833 - DNA, 80 bp, synthetic construct; identical to SEQ ID NO: 25469
  misc_feature 1..80: note = Artificially Synthesized Probe
  source 1..80: mol_type = other DNA

SEQ ID NO: 55834 - DNA, 80 bp, synthetic construct
  misc_feature 1..80: note = Artificially Synthesized Probe
  source 1..80: mol_type = other DNA
tctttgatttcagcgcctggtctggacagcaggaggaagagctcagagacagcttcctccagtgtctcggggtgcagccg

SEQ ID NO: 55835 - DNA, 80 bp, synthetic construct
  misc_feature 1..80: note = Artificially Synthesized Probe
  source 1..80: mol_type = other DNA
agacgtgggccgtcgcccctgctcctgctggaacgtgcagcccagagcccccacaagcacctcgtgctgcctccctcttt

SEQ ID NO: 55836 - DNA, 80 bp, synthetic construct
  misc_feature 1..80: note = Artificially Synthesized Probe
  source 1..80: mol_type = other DNA
agtttcctccacctacatgagccccgactttctcatccgtagagtgggacgaacaacgcccagtgctcagtgtgatatta

SEQ ID NO: 55837 - DNA, 80 bp, synthetic construct
  misc_feature 1..80: note = Artificially Synthesized Probe
  source 1..80: mol_type = other DNA
acactgccggggactcgggtaggaagaagcccagggctgaaggtcaaggccactgcaacgccccgggctcaggggagagt

SEQ ID NO: 55838 - DNA, 80 bp, synthetic construct
  misc_feature 1..80: note = Artificially Synthesized Probe
  source 1..80: mol_type = other DNA
tcccttcaagggccccttggggcggtcgggaccatcaccagatctgctgagagactgggaggagtgagttccatctgcag

SEQ ID NO: 55839 - DNA, 80 bp, synthetic construct; identical to SEQ ID NO: 25470
  misc_feature 1..80: note = Artificially Synthesized Probe
  source 1..80: mol_type = other DNA

SEQ ID NO: 55840 - DNA, 80 bp, synthetic construct
  misc_feature 1..80: note = Artificially Synthesized Probe
  source 1..80: mol_type = other DNA
aaacttccggttaatgaacaacctccacactggggaaactgctaattaaggtggctgcactttggcttctggcttagtta

SEQ ID NO: 55841 - DNA, 80 bp, synthetic construct
  misc_feature 1..80: note = Artificially Synthesized Probe
  source 1..80: mol_type = other DNA
tacttcccctcaaagagatgcacgattttaacaggctctctgtgcaagccatactggctggatgcaacctctagggagga

SEQ ID NO: 55842 - DNA, 80 bp, synthetic construct
  misc_feature 1..80: note = Artificially Synthesized Probe
  source 1..80: mol_type = other DNA
atctcagcagcacatgacaagggcataaggtcacggcttccctagcccccaggatgcgtcccagggttggacagggctca

SEQ ID NO: 55843 - DNA, 80 bp, synthetic construct
  misc_feature 1..80: note = Artificially Synthesized Probe
  source 1..80: mol_type = other DNA
tctgtcaggtggcgtttctaaccttgttctatccacagaactcgtcttcaaaaaaagtttacatgacagaaccatttaga

SEQ ID NO: 55844 - DNA, 80 bp, synthetic construct; identical to SEQ ID NO: 25471
  misc_feature 1..80: note = Artificially Synthesized Probe
  source 1..80: mol_type = other DNA

SEQ ID NO: 55845 - DNA, 80 bp, synthetic construct
  misc_feature 1..80: note = Artificially Synthesized Probe
  source 1..80: mol_type = other DNA
accccacttcccaccagcattgcaccccaccggccaccagctctgcaccccacccctaccatccctgcatcccagcagcc

SEQ ID NO: 55846 - DNA, 80 bp, synthetic construct
  misc_feature 1..80: note = Artificially Synthesized Probe
  source 1..80: mol_type = other DNA
cagcagccctgcaccccaccccccatgagccctgcaccccacaccccaccagctctgcaccccacaccccaccagctctg

SEQ ID NO: 55847 - DNA, 80 bp, synthetic construct
  misc_feature 1..80: note = Artificially Synthesized Probe
  source 1..80: mol_type = other DNA
gcacccccaccaaccctgcaaccccatcacccctgtatcctccagtcagccctgtatcccaccccaccacccccacaccc

SEQ ID NO: 55848 - DNA, 80 bp, synthetic construct; identical to SEQ ID NO: 25472
  misc_feature 1..80: note = Artificially Synthesized Probe
  source 1..80: mol_type = other DNA

SEQ ID NO: 55849 - DNA, 80 bp, synthetic construct
  misc_feature 1..80: note = Artificially Synthesized Probe
  source 1..80: mol_type = other DNA
gctgcagaggaagccgggggtgcccggggatgcccctccctcctcactgctttcccacaccagagtgggggtgttgaggt

SEQ ID NO: 55850 - DNA, 80 bp, synthetic construct
  misc_feature 1..80: note = Artificially Synthesized Probe
  source 1..80: mol_type = other DNA
cctggaagagaggttcctgttttcacccttgactcacagttcagaggccaagcaaacaaagtgcctgtggcaggtgcatc

SEQ ID NO: 55851 - DNA, 80 bp, synthetic construct
  misc_feature 1..80: note = Artificially Synthesized Probe
  source 1..80: mol_type = other DNA
gtcttacagcagacacagaacaggaaggaaaatttggcaaacgtgtggccccacagagtccagggagaagccagcccggc

SEQ ID NO: 55852 - DNA, 80 bp, synthetic construct
  misc_feature 1..80: note = Artificially Synthesized Probe
  source 1..80: mol_type = other DNA
ctcaacctggggatgccaggggcacagctctgcccccagccactctggtagaagggccgctgaggagctccaccagggga

SEQ ID NO: 55853 - DNA, 80 bp, synthetic construct
  misc_feature 1..80: note = Artificially Synthesized Probe
  source 1..80: mol_type = other DNA
ccctccttggggggtggggacagagggagcccccatttggctcatctggggagctcagttctttggcccttggtctgggg

SEQ ID NO: 55854 - DNA, 80 bp, synthetic construct; identical to SEQ ID NO: 25473
  misc_feature 1..80: note = Artificially Synthesized Probe
  source 1..80: mol_type = other DNA

SEQ ID NO: 55855 - DNA, 80 bp, synthetic construct
  misc_feature 1..80: note = Artificially Synthesized Probe
  source 1..80: mol_type = other DNA
tcatgaggccgtgagctctttgaaggcacggccttgacttgaatcattcacagggtgcagagtggacgggtgaaccatga

SEQ ID NO: 55856 - DNA, 80 bp, synthetic construct
  misc_feature 1..80: note = Artificially Synthesized Probe
  source 1..80: mol_type = other DNA
atgctggcccgagacaggacgcccctcctggggagacggagctctgcagacgggaaaagccagctgcccccctgcacacc

SEQ ID NO: 55857 - DNA, 80 bp, synthetic construct
  misc_feature 1..80: note = Artificially Synthesized Probe
  source 1..80: mol_type = other DNA
aggataatgggggcgtggggagggcttctgagcccccgtgctgagcagcaacaccaaccctcccagtgctggtgagaatt

SEQ ID NO: 55858 - DNA, 80 bp, synthetic construct; identical to SEQ ID NO: 25474
  misc_feature 1..80: note = Artificially Synthesized Probe
  source 1..80: mol_type = other DNA

SEQ ID NO: 55859 - DNA, 80 bp, synthetic construct
  misc_feature 1..80: note = Artificially Synthesized Probe
  source 1..80: mol_type = other DNA
gatgaccatggccacgtacttccagtcctccttcacctgcaagcacagacgccgtcactccagcacggcccggccgccgc

SEQ ID NO: 55860 - DNA, 80 bp, synthetic construct; identical to SEQ ID NO: 25441
  misc_feature 1..80: note = Artificially Synthesized Probe
  source 1..80: mol_type = other DNA

SEQ ID NO: 55861 - DNA, 80 bp, synthetic construct
  misc_feature 1..80: note = Artificially Synthesized Probe
  source 1..80: mol_type = other DNA
gcccggtgggcgcacagagggcggacgaaagcagcacacatggagcccgcagagctgccgccatctgcagtctctcactc

SEQ ID NO: 55862 - DNA, 80 bp, synthetic construct
  misc_feature 1..80: note = Artificially Synthesized Probe
  source 1..80: mol_type = other DNA
gcagaggcctagggagggcagaggcagtggcctggtcaggcctggagtcgggaagccactctcgagacagccgctgtgtg

SEQ ID NO: 55863 - DNA, 80 bp, synthetic construct
  misc_feature 1..80: note = Artificially Synthesized Probe
  source 1..80: mol_type = other DNA
gaaggggctgggaagccctggccagggccttcactggggcctcccctgggaaggagggggcaggatggcgcaagcagccg

SEQ ID NO: 55864 - DNA, 80 bp, synthetic construct
  misc_feature 1..80: note = Artificially Synthesized Probe
  source 1..80: mol_type = other DNA
agggatgggagggatgtgccgcgggggcctgggcacactgtggggacagtgccgcctcctgctctgattgtttatagcaa

SEQ ID NO: 55865 - DNA, 80 bp, synthetic construct; identical to SEQ ID NO: 25442
  misc_feature 1..80: note = Artificially Synthesized Probe
  source 1..80: mol_type = other DNA

SEQ ID NO: 55866 - DNA, 80 bp, synthetic construct
  misc_feature 1..80: note = Artificially Synthesized Probe
  source 1..80: mol_type = other DNA
aaatgcatctgaccccacggtggcacagcccgggcacagctgcctctcgcttcaagagctggcagcaaagcaggatcccg

SEQ ID NO: 55867 - DNA, 80 bp, synthetic construct
  misc_feature 1..80: note = Artificially Synthesized Probe
  source 1..80: mol_type = other DNA
agtgggggcaggcaccagatgcgtccgaataaaccatcgaggatggcgctctggggtcctggcagaggtggccccttcag

SEQ ID NO: 55868 - DNA, 80 bp, synthetic construct; identical to SEQ ID NO: 25443
  misc_feature 1..80: note = Artificially Synthesized Probe
  source 1..80: mol_type = other DNA

SEQ ID NO: 55869 - DNA, 80 bp, synthetic construct
  misc_feature 1..80: note = Artificially Synthesized Probe
  source 1..80: mol_type = other DNA
gcctggcgctggagggtgagggtaggtgggctggccccgggccccggggggccttagccgtgggaccagcgttctgcccc

SEQ ID NO: 55870 - DNA, 80 bp, synthetic construct
  misc_feature 1..80: note = Artificially Synthesized Probe
  source 1..80: mol_type = other DNA
gaggcccgcggggcaggcacaggcgcactctggagaaagggccttggcagtgcctcgttgcgttctggggacttggccat

SEQ ID NO: 55871 - DNA, 80 bp, synthetic construct
  misc_feature 1..80: note = Artificially Synthesized Probe
  source 1..80: mol_type = other DNA
cctgggacctgcggccacatagcaggcttgggaagaggctgctgcagcaggggccacgccctgcaccccaaagcgaagca

SEQ ID NO: 55872 - DNA, 80 bp, synthetic construct
  misc_feature 1..80: note = Artificially Synthesized Probe
  source 1..80: mol_type = other DNA
accgcccgggtcagggccggcgacaggggcaggtgcgggggcggcgctttggtgctgcgggtcttgaccgtggcgctcgg

SEQ ID NO: 55873 - DNA, 80 bp, synthetic construct; identical to SEQ ID NO: 25444
  misc_feature 1..80: note = Artificially Synthesized Probe
  source 1..80: mol_type = other DNA

SEQ ID NO: 55874 - DNA, 80 bp, synthetic construct; identical to SEQ ID NO: 25438
  misc_feature 1..80: note = Artificially Synthesized Probe
  source 1..80: mol_type = other DNA

SEQ ID NO: 55875 - DNA, 80 bp, synthetic construct
  misc_feature 1..80: note = Artificially Synthesized Probe
  source 1..80: mol_type = other DNA
aaggacggtgagggcgggtgcaggctctgggtgccgctcgtggcagggggctccccttctggctcgggccagaagcgcgg

SEQ ID NO: 55876 - DNA, 80 bp, synthetic construct
  misc_feature 1..80: note = Artificially Synthesized Probe
  source 1..80: mol_type = other DNA
agcacgaagaccgtgatgacgatggacagggtgacgaagatcatggtgaacagcaggtactcgccgatgagtgggatgac

SEQ ID NO: 55877 - DNA, 80 bp, synthetic construct
  misc_feature 1..80: note = Artificially Synthesized Probe
  source 1..80: mol_type = other DNA
atggtgtagaagagcggcagccgccggatgacgaaggcataggtgatgtccgggtagatctcggcacagcactcgtactt

SEQ ID NO: 55878 - DNA, 80 bp, synthetic construct
  misc_feature 1..80: note = Artificially Synthesized Probe
  source 1..80: mol_type = other DNA
aagaaggtgacgtcgatgctgcaggagctcttgtaaatggccgggggagtccactgcacccgcccgtcatggaacaggtg

SEQ ID NO: 55879 - DNA, 80 bp, synthetic construct; identical to SEQ ID NO: 25445
  misc_feature 1..80: note = Artificially Synthesized Probe
  source 1..80: mol_type = other DNA

SEQ ID NO: 55880 - DNA, 80 bp, synthetic construct
  misc_feature 1..80: note = Artificially Synthesized Probe
  source 1..80: mol_type = other DNA
gttcagagaacgggaagggacctacgagtgcctgacacacataatcactgctgctggtgattacccttatccatgagtgg

SEQ ID NO: 55881 - DNA, 80 bp, synthetic construct
  misc_feature 1..80: note = Artificially Synthesized Probe
  source 1..80: mol_type = other DNA
tgaggacaccaggggccacagaggcaaggacaggtgttctggccacccagggccaatgcagtggggctgcatacgcactg

SEQ ID NO: 55882 - DNA, 80 bp, synthetic construct
  misc_feature 1..80: note = Artificially Synthesized Probe
  source 1..80: mol_type = other DNA
ccctggttccatagacagcggctggctgggtgggacgcactgcaggagcacattcagggctgaggcagccaggctcacgg

SEQ ID NO: 55883 - DNA, 80 bp, synthetic construct
  misc_feature 1..80: note = Artificially Synthesized Probe
  source 1..80: mol_type = other DNA
cactgctcacaattaaaaacgaaggaacagacagcaaggagctacggacacacacaacagcacggatgaagctctaagtc

SEQ ID NO: 55884 - DNA, 80 bp, synthetic construct; identical to SEQ ID NO: 25446
  misc_feature 1..80: note = Artificially Synthesized Probe
  source 1..80: mol_type = other DNA

SEQ ID NO: 55885 - DNA, 80 bp, synthetic construct
  misc_feature 1..80: note = Artificially Synthesized Probe
  source 1..80: mol_type = other DNA
ccaggtcgtggagacctggccccccacggtctcagtcggtgctgagcctctgcccccctgaactggtcctgagccaacac

SEQ ID NO: 55886 - DNA, 80 bp, synthetic construct
  misc_feature 1..80: note = Artificially Synthesized Probe
  source 1..80: mol_type = other DNA
caagtttgctccctctccccagcccatctctccaaaaaccaacgccctccaccttctgaggcacaaattaaaagattctc

SEQ ID NO: 55887 - DNA, 80 bp, synthetic construct
  misc_feature 1..80: note = Artificially Synthesized Probe
  source 1..80: mol_type = other DNA
tcccccagcccccaggtcccacagcacccctgggctgcatcactgctgctccctgccccgcccacccctggctccagccg

SEQ ID NO: 55888 - DNA, 80 bp, synthetic construct; identical to SEQ ID NO: 25447
  misc_feature 1..80: note = Artificially Synthesized Probe
  source 1..80: mol_type = other DNA

SEQ ID NO: 55889 - DNA, 80 bp, synthetic construct; identical to SEQ ID NO: 25475
  misc_feature 1..80: note = Artificially Synthesized Probe
  source 1..80: mol_type = other DNA

SEQ ID NO: 55890 - DNA, 80 bp, synthetic construct; identical to SEQ ID NO: 25485
  misc_feature 1..80: note = Artificially Synthesized Probe
  source 1..80: mol_type = other DNA

SEQ ID NO: 55891 - DNA, 80 bp, synthetic construct
  misc_feature 1..80: note = Artificially Synthesized Probe
  source 1..80: mol_type = other DNA
gtcccacatgttcccgtggtaaatgctcagaacaaaattcagggtgaacgtggagatcatggaagcaaagaactgcggca

SEQ ID NO: 55892 - DNA, 80 bp, synthetic construct
  misc_feature 1..80: note = Artificially Synthesized Probe
  source 1..80: mol_type = other DNA
ggcaaggagcggcccagccctctctggacttgccagtggagagcaagaggggaaggtggggcagggctgggttcccggct

SEQ ID NO: 55893 - DNA, 80 bp, synthetic construct
  misc_feature 1..80: note = Artificially Synthesized Probe
  source 1..80: mol_type = other DNA
gtggaccccatggtgggaaatgagagcgcagcatgcaccctgatcaggaggcagccatcagcaggaacttacgatcctcc

SEQ ID NO: 55894 - DNA, 80 bp, synthetic construct
  misc_feature 1..80: note = Artificially Synthesized Probe
  source 1..80: mol_type = other DNA
gaagctaatggggtgggccccagccacacagagagggaccctgagggaggtctgagggctggacccaagtacactgccgg

SEQ ID NO: 55895 - DNA, 80 bp, synthetic construct; identical to SEQ ID NO: 25486
  misc_feature 1..80: note = Artificially Synthesized Probe
  source 1..80: mol_type = other DNA

SEQ ID NO: 55896 - DNA, 80 bp, synthetic construct
  misc_feature 1..80: note = Artificially Synthesized Probe
  source 1..80: mol_type = other DNA
agggtcagcaccaccaccggcagcccagggaaacacgcaaacacccagccaggagctccactttccagcgcacgcaagat

SEQ ID NO: 55897 - DNA, 80 bp, synthetic construct
  misc_feature 1..80: note = Artificially Synthesized Probe
  source 1..80: mol_type = other DNA
acctgaggtcgggagtttgagaccagcccggccaacatggcaaaaccccatctctactaaaaatacaaaaaacttagcca

SEQ ID NO: 55898 - DNA, 80 bp, synthetic construct; identical to SEQ ID NO: 25487
  misc_feature 1..80: note = Artificially Synthesized Probe
  source 1..80: mol_type = other DNA

SEQ ID NO: 55899 - DNA, 80 bp, synthetic construct; identical to SEQ ID NO: 25476
  misc_feature 1..80: note = Artificially Synthesized Probe
  source 1..80: mol_type = other DNA

SEQ ID NO: 55900 - DNA, 80 bp, synthetic construct
  misc_feature 1..80: note = Artificially Synthesized Probe
  source 1..80: mol_type = other DNA
tgtgcccgctggctctgggagccacccgccaggctgtcctcagatggggctggggctctcggcctgggggtgctgaggga

SEQ ID NO: 55901 - DNA, 80 bp, synthetic construct
  misc_feature 1..80: note = Artificially Synthesized Probe
  source 1..80: mol_type = other DNA
tggagaccagaaggaccggtgctcagagacacgcgtgacgcggcccttcctggagaccagaaggaccgatgctcagagac

SEQ ID NO: 55902 - DNA, 80 bp, synthetic construct
  misc_feature 1..80: note = Artificially Synthesized Probe
  source 1..80: mol_type = other DNA
cggcccttcctggagaccagaaggaccggtgctcagagacacacatgggcgtggcggccctcgcgggcccggcggcctca

SEQ ID NO: 55903 - DNA, 80 bp, synthetic construct
  misc_feature 1..80: note = Artificially Synthesized Probe
  source 1..80: mol_type = other DNA
cgtaaaacagcacacacagccccgatcaggcagagtggctgggacacggggcctccgggagggggccagcacccccaggc

SEQ ID NO: 55904 - DNA, 80 bp, synthetic construct; identical to SEQ ID NO: 25488
  misc_feature 1..80: note = Artificially Synthesized Probe
  source 1..80: mol_type = other DNA

SEQ ID NO: 55905 - DNA, 80 bp, synthetic construct
  misc_feature 1..80: note = Artificially Synthesized Probe
  source 1..80: mol_type = other DNA
acacaagggcgctgagtgtgtgggggaggactgtatgttaaagatgccgagcaaactcaaccctcagccaacaaaagtta

SEQ ID NO: 55906 - DNA, 80 bp, synthetic construct
  misc_feature 1..80: note = Artificially Synthesized Probe
  source 1..80: mol_type = other DNA
gggagctttcgccagaggggacacactggtcccgctccttggccacggggaccaggccccggaagcacccccagggggca

SEQ ID NO: 55907 - DNA, 80 bp, synthetic construct
  misc_feature 1..80: note = Artificially Synthesized Probe
  source 1..80: mol_type = other DNA
tccagaaccagatgctctgataacaccaagtgtaaatgaccatgaggcaaactgaaagcgggaaactgctacacgcccac

SEQ ID NO: 55908 - DNA, 80 bp, synthetic construct; identical to SEQ ID NO: 25489
  misc_feature 1..80: note = Artificially Synthesized Probe
  source 1..80: mol_type = other DNA

SEQ ID NO: 55909 - DNA, 80 bp, synthetic construct
  misc_feature 1..80: note = Artificially Synthesized Probe
  source 1..80: mol_type = other DNA
cgttgaggaagcacttgatctgggggattccgctgccagcagccaccggctgaaagaggggaagcacggctgagtgggtc

SEQ ID NO: 55910 - DNA, 80 bp, synthetic construct
  misc_feature 1..80: note = Artificially Synthesized Probe
  source 1..80: mol_type = other DNA
agaaacctagacgaggagagtggaggctgggcctgcgcaaggaggcgccaaggggggagaccactgcccacaacagggtc

SEQ ID NO: 55911 - DNA, 80 bp, synthetic construct; identical to SEQ ID NO: 25490
  misc_feature 1..80: note = Artificially Synthesized Probe
  source 1..80: mol_type = other DNA

SEQ ID NO: 55912 - DNA, 80 bp, synthetic construct
  misc_feature 1..80: note = Artificially Synthesized Probe
  source 1..80: mol_type = other DNA
ggaaggggagctcagcacacacttcggggccccagggaaggggagagcggcacacacgtcggggcctcagggaaggggag

SEQ ID NO: 55913 - DNA, 80 bp, synthetic construct
  misc_feature 1..80: note = Artificially Synthesized Probe
  source 1..80: mol_type = other DNA
cccagggaaggggagctcagcacacatgtcggggcctcagggaaggggagagcagcacacacgtcggggcctcagggaag

SEQ ID NO: 55914 - DNA, 80 bp, synthetic construct
  misc_feature 1..80: note = Artificially Synthesized Probe
  source 1..80: mol_type = other DNA
aggacgtggtggaggcggaggtggagatggaaggaggggagggcagagtgaggagatggaaggaggggcggagtggggtg

SEQ ID NO: 55915 - DNA, 80 bp, synthetic construct
  misc_feature 1..80: note = Artificially Synthesized Probe
  source 1..80: mol_type = other DNA
ctgcaggggttcccgcccattcaccaagacccccaatccttcatggggtccgccatagctgcggcatcctgccacccacc

SEQ ID NO: 55916 - DNA, 80 bp, synthetic construct
  misc_feature 1..80: note = Artificially Synthesized Probe
  source 1..80: mol_type = other DNA
cagacctcagccctgccccacagaccagcctggcagatgccaccctgctgggtggagccatgatgttcactggacatccc

SEQ ID NO: 55917 - DNA, 80 bp, synthetic construct; identical to SEQ ID NO: 25491
  misc_feature 1..80: note = Artificially Synthesized Probe
  source 1..80: mol_type = other DNA

SEQ ID NO: 55918 - DNA, 80 bp, synthetic construct
  misc_feature 1..80: note = Artificially Synthesized Probe
  source 1..80: mol_type = other DNA
ccagaccgcctgcaggccccgggattatgaagggcccagtgtgcacggtgcgctgagtcccacaaaggacagtttctggc

SEQ ID NO: 55919 - DNA, 80 bp, synthetic construct
  misc_feature 1..80: note = Artificially Synthesized Probe
  source 1..80: mol_type = other DNA
aaccagacgaaccacaggcctcagaggcggagtcagaggaggagggaggaggtgcgtcacctcaccccggcagaagagca

SEQ ID NO: 55920 - DNA, 80 bp, synthetic construct
  misc_feature 1..80: note = Artificially Synthesized Probe
  source 1..80: mol_type = other DNA
tcagcaccgaacccacgctctgggtgcgggcacaggggaccgggagtgggctggcagggggcagaggccgggtctcaggg

SEQ ID NO: 55921 - DNA, 80 bp, synthetic construct; identical to SEQ ID NO: 25492
  misc_feature 1..80: note = Artificially Synthesized Probe
  source 1..80: mol_type = other DNA

SEQ ID NO: 55922 - DNA, 80 bp, synthetic construct
  misc_feature 1..80: note = Artificially Synthesized Probe
  source 1..80: mol_type = other DNA
cagggctgggcctcacgtctgggccagcgagagctcctccaagcctctctttcccaggcggtacctggcgaggtccttcc

SEQ ID NO: 55923 - DNA, 80 bp, synthetic construct
  misc_feature 1..80: note = Artificially Synthesized Probe
  source 1..80: mol_type = other DNA
ggaggctgaggcaggagaatcgcttgaacccgggatgcagaggttgcagtgagccgagattgcgccgttgcactccagcc

SEQ ID NO: 55924 - DNA, 80 bp, synthetic construct
  misc_feature 1..80: note = Artificially Synthesized Probe
  source 1..80: mol_type = other DNA
agtttaacatccaaaaatcaatccatgaggccgggtgcggtggctcacacctgtaatcccagcactctgggaggcagagg

SEQ ID NO: 55925 - DNA, 80 bp, synthetic construct
  misc_feature 1..80: note = Artificially Synthesized Probe
  source 1..80: mol_type = other DNA
tccgccttccaggttaaagccattctcctgcctcagcctcccaagtagctgggattacaggtgtgcaccaccacgcctgg

SEQ ID NO: 55926 - DNA, 80 bp, synthetic construct; identical to SEQ ID NO: 25493
  misc_feature 1..80: note = Artificially Synthesized Probe
  source 1..80: mol_type = other DNA

SEQ ID NO: 55927 - DNA, 80 bp, synthetic construct
  misc_feature 1..80: note = Artificially Synthesized Probe
  source 1..80: mol_type = other DNA
ctgcttgaggccaggagtttgtgatcagcctgggcaacatagtaagactccatctctacaaaatattagctgagtatggt

SEQ ID NO: 55928 - DNA, 80 bp, synthetic construct
  misc_feature 1..80: note = Artificially Synthesized Probe
  source 1..80: mol_type = other DNA
accacatccaaaaattaactcaaaagggatgaaagacctaaaactgtaaaattcttaggaaaaaacgggtcagtcgtcat

SEQ ID NO: 55929 - DNA, 80 bp, synthetic construct
  misc_feature 1..80: note = Artificially Synthesized Probe
  source 1..80: mol_type = other DNA
agcctgagagatggagttcagcctgggccacacagtgagacctcatctcaaagaatagtaataattaatttttttagaca

SEQ ID NO: 55930 - DNA, 80 bp, synthetic construct
  misc_feature 1..80: note = Artificially Synthesized Probe
  source 1..80: mol_type = other DNA
ttttttgtagagacagggtctcactgtgttgtctaggctgatctccaaatcctgggctgcagccttggtttcccaaagtg

SEQ ID NO: 55931 - DNA, 80 bp, synthetic construct; identical to SEQ ID NO: 25494
  misc_feature 1..80: note = Artificially Synthesized Probe
  source 1..80: mol_type = other DNA

SEQ ID NO: 55932 - DNA, 80 bp, synthetic construct
  misc_feature 1..80: note = Artificially Synthesized Probe
  source 1..80: mol_type = other DNA
acaaaagacaccactgagaaagtgaacagaaaacccactgaacgggagaaaacttctataaatcatgtattggatgagag

SEQ ID NO: 55933 - DNA, 80 bp, synthetic construct
  misc_feature 1..80: note = Artificially Synthesized Probe
  source 1..80: mol_type = other DNA
ggggaggggtgcagccatggggcatgggccgactcggtgctgggtcctgtgcttccgtgtcccctgccgggagctgagag

SEQ ID NO: 55934 - DNA, 80 bp, synthetic construct
  misc_feature 1..80: note = Artificially Synthesized Probe
  source 1..80: mol_type = other DNA
ccttctctcccaactcctgcccctcccaaagctgacaccagagcaaaggctttgaagtccaaaaaggcagtgccgaaggc

SEQ ID NO: 55935 - DNA, 80 bp, synthetic construct; identical to SEQ ID NO: 25495
  misc_feature 1..80: note = Artificially Synthesized Probe
  source 1..80: mol_type = other DNA

SEQ ID NO: 55936 - DNA, 80 bp, synthetic construct
  misc_feature 1..80: note = Artificially Synthesized Probe
  source 1..80: mol_type = other DNA
ggagatgcccccgaggggaaggaagacgagcacgctgccgctgagctcaggactcccagggcagccactggcacgggaac

SEQ ID NO: 55937 - DNA, 80 bp, synthetic construct
  misc_feature 1..80: note = Artificially Synthesized Probe
  source 1..80: mol_type = other DNA
cgccctgcactcctccgtctgagagcacttctgcccagctgcctctgctcacttggcgtcagggaccatgtccccccaag

SEQ ID NO: 55938 - DNA, 80 bp, synthetic construct
  misc_feature 1..80: note = Artificially Synthesized Probe
  source 1..80: mol_type = other DNA
tgctcatatgtccgactcggaaaagcgcagaacgtggtgactaaaagcagaagagaaatcatgagggcgctcaggcgtcg

SEQ ID NO: 55939 - DNA, 80 bp, synthetic construct
  misc_feature 1..80: note = Artificially Synthesized Probe
  source 1..80: mol_type = other DNA
tgcccctcggcctgtcagcgacacgtccagcccgagtccagggcgcaagctccctgctctagactgaaagcgaggcacct

SEQ ID NO: 55940 - DNA, 80 bp, synthetic construct; identical to SEQ ID NO: 25496
  misc_feature 1..80: note = Artificially Synthesized Probe
  source 1..80: mol_type = other DNA

SEQ ID NO: 55941 - DNA, 80 bp, synthetic construct
  misc_feature 1..80: note = Artificially Synthesized Probe
  source 1..80: mol_type = other DNA
ctcctttccccaaagagatcctttggagacgactccaatttccactatctcctgaatctttagcaacatctggggacatg

SEQ ID NO: 55942 - DNA, 80 bp, synthetic construct
  misc_feature 1..80: note = Artificially Synthesized Probe
  source 1..80: mol_type = other DNA
tgggagcagccctcccggcccccaacgccgtcccctcctcatccccccatctctccctccaccttcctcaggctcggcct

SEQ ID NO: 55943 - DNA, 80 bp, synthetic construct; identical to SEQ ID NO: 25497
  misc_feature 1..80: note = Artificially Synthesized Probe
  source 1..80: mol_type = other DNA

SEQ ID NO: 55944 - DNA, 80 bp, synthetic construct
  misc_feature 1..80: note = Artificially Synthesized Probe
  source 1..80: mol_type = other DNA
cacagctgtcagtgcccgcccacacagcagaggcaggcgggaccctcacccaagctggctccctgcaccccccaccacgg

SEQ ID NO: 55945 - DNA, 80 bp, synthetic construct
  misc_feature 1..80: note = Artificially Synthesized Probe
  source 1..80: mol_type = other DNA
ggccaggagttcgagaccagctgggccaacatggcgaaaccccatctctactaaaaatacaaaaagtaggcgggctactt

SEQ ID NO: 55946 - DNA, 80 bp, synthetic construct
  misc_feature 1..80: note = Artificially Synthesized Probe
  source 1..80: mol_type = other DNA
cctccagggaccccttccccaaccatcgtcctgttaccagccaccgtcgcccttgctgtacaccccccgtgttgatgacc

SEQ ID NO: 55947 - DNA, 80 bp, synthetic construct
  misc_feature 1..80: note = Artificially Synthesized Probe
  source 1..80: mol_type = other DNA
aggtgtctgccgtggcatctccacgcccaggggagagtgtgggaggggctagagtgcacaggtcctgctggacacaaccc

SEQ ID NO: 55948 - DNA, 80 bp, synthetic construct
  misc_feature 1..80: note = Artificially Synthesized Probe
  source 1..80: mol_type = other DNA
cagtggcctggccagctgcccactccctcttgctcacactcacatcaaagcccctggactccaggtctcaccaccagaaa

SEQ ID NO: 55949 - DNA, 80 bp, synthetic construct; identical to SEQ ID NO: 25498
  misc_feature 1..80: note = Artificially Synthesized Probe
  source 1..80: mol_type = other DNA

SEQ ID NO: 55950 - DNA, 80 bp, synthetic construct
  misc_feature 1..80: note = Artificially Synthesized Probe
  source 1..80: mol_type = other DNA
aaggcatggtggcgtgtacctgtggcccaaactactcaggaggctgaggcaagaggatcgcttgagcctgggaagtcgag

SEQ ID NO: 55951 - DNA, 80 bp, synthetic construct
  misc_feature 1..80: note = Artificially Synthesized Probe
  source 1..80: mol_type = other DNA
caccacgacagcactgtcccacagcagcaggcagagccgcacatgcattcaggccaaggtgaaggctgccggtgcagtat

SEQ ID NO: 55952 - DNA, 80 bp, synthetic construct; identical to SEQ ID NO: 25499
  misc_feature 1..80: note = Artificially Synthesized Probe
  source 1..80: mol_type = other DNA

SEQ ID NO: 55953 - DNA, 80 bp, synthetic construct
  misc_feature 1..80: note = Artificially Synthesized Probe
  source 1..80: mol_type = other DNA
gccggacgggaggcgaggtcatcagggttgggagtgggtgggactagaaagatgggtctgaaaatagcctgcaccccctt

SEQ ID NO: 55954 - DNA, 80 bp, synthetic construct
  misc_feature 1..80: note = Artificially Synthesized Probe
  source 1..80: mol_type = other DNA
gtcaaaaaagggctgggcacagtggctcacgcctgtaatcccagcgctttcggaggccaaggcgggcagatcacccgagg

SEQ ID NO: 55955 - DNA, 80 bp, synthetic construct; identical to SEQ ID NO: 25477
  misc_feature 1..80: note = Artificially Synthesized Probe
  source 1..80: mol_type = other DNA

SEQ ID NO: 55956 - DNA, 80 bp, synthetic construct
  misc_feature 1..80: note = Artificially Synthesized Probe
  source 1..80: mol_type = other DNA
cggggacgaggaagaggatgtggctggtgccctgggtggccgcagccgctgtctttcacgcctttctcactccacacggt

SEQ ID NO: 55957 - DNA, 80 bp, synthetic construct
  misc_feature 1..80: note = Artificially Synthesized Probe
  source 1..80: mol_type = other DNA
gaggttgcagtgagccgagatcctgccactgtattccagcctgggcaacagagcaagaccctgtctcaaataaataaata

SEQ ID NO: 55958 - DNA, 80 bp, synthetic construct
  misc_feature 1..80: note = Artificially Synthesized Probe
  source 1..80: mol_type = other DNA
attcagaatacataaaaaaactcagggtcaggggaggtggctcacgtctgtcatcccagcactttgggaggctgaggcgg

SEQ ID NO: 55959 - DNA, 80 bp, synthetic construct; identical to SEQ ID NO: 25500
  misc_feature 1..80: note = Artificially Synthesized Probe
  source 1..80: mol_type = other DNA

SEQ ID NO: 55960 - DNA, 80 bp, synthetic construct
  misc_feature 1..80: note = Artificially Synthesized Probe
  source 1..80: mol_type = other DNA
cgcaatggaataattcagccataaagaggaatgaccaccgacccgtgctgcagcacgacgggccggaggacactgtgccc

SEQ ID NO: 55961 - DNA, 80 bp, synthetic construct
  misc_feature 1..80: note = Artificially Synthesized Probe
  source 1..80: mol_type = other DNA
gttgtgtaacactaagagcgtgctcaaccctactgactgcactcacggatgattaaacggtcattaaacaaaatgttttt

SEQ ID NO: 55962 - DNA, 80 bp, synthetic construct; identical to SEQ ID NO: 25501
  misc_feature 1..80: note = Artificially Synthesized Probe
  source 1..80: mol_type = other DNA

SEQ ID NO: 55963 - DNA, 80 bp, synthetic construct
  misc_feature 1..80: note = Artificially Synthesized Probe
  source 1..80: mol_type = other DNA
cctaaagcaagacagacactgaacagcaatgctggagggcagggaagggcaggggacagcaggggaaccctcccaggctg

SEQ ID NO: 55964 - DNA, 80 bp, synthetic construct
  misc_feature 1..80: note = Artificially Synthesized Probe
  source 1..80: mol_type = other DNA
aggacacagtcccacactaacccagacccctgccctgccaaggtcttatgtggagtgtcccaacatgagttcccagggat

SEQ ID NO: 55965 - DNA, 80 bp, synthetic construct
  misc_feature 1..80: note = Artificially Synthesized Probe
  source 1..80: mol_type = other DNA
gagcagtgactggcttggtcaattcaccactacaccacacaaagcaagaccggcctgagaacaggaacagcaacccacag

SEQ ID NO: 55966 - DNA, 80 bp, synthetic construct
  misc_feature 1..80: note = Artificially Synthesized Probe
  source 1..80: mol_type = other DNA
gcaacgacaccaccagccaacctgaaaatcctgcaacaaaccctaaagagcctggaggcagctaggaccagttctcatgt

SEQ ID NO: 55967 - DNA, 80 bp, synthetic construct
  misc_feature 1..80: note = Artificially Synthesized Probe
  source 1..80: mol_type = other DNA
cagagccctgtgtcaggcacccaggcagcacccccggggcccccacccgcccaatggcccggagcctggcacgcaccttg

SEQ ID NO: 55968 - DNA, 80 bp, synthetic construct; identical to SEQ ID NO: 25502
  misc_feature 1..80: note = Artificially Synthesized Probe
  source 1..80: mol_type = other DNA

SEQ ID NO: 55969 - DNA, 80 bp, synthetic construct
  misc_feature 1..80: note = Artificially Synthesized Probe
  source 1..80: mol_type = other DNA
ctcacgtttcttcagagcgtagtttgtgacaggcaccgtgctcagcgctatgcatgcgttaactttttcgcagacgggaa

SEQ ID NO: 55970 - DNA, 80 bp, synthetic construct
  misc_feature 1..80: note = Artificially Synthesized Probe
  source 1..80: mol_type = other DNA
tagcttcccatgggctcccctagagatgagccaaattcaaagcctgttcatgtgcgcagcagggctgacctccaggctcc

SEQ ID NO: 55971 - DNA, 80 bp, synthetic construct; identical to SEQ ID NO: 25503
  misc_feature 1..80: note = Artificially Synthesized Probe
  source 1..80: mol_type = other DNA

SEQ ID NO: 55972 - DNA, 80 bp, synthetic construct
  misc_feature 1..80: note = Artificially Synthesized Probe
  source 1..80: mol_type = other DNA
tcctgcctcagcctcctgactagctaggattacaggcgctcaccactatactcggctaatttttctatttttagtagaca

SEQ ID NO: 55973 - DNA, 80 bp, synthetic construct
  misc_feature 1..80: note = Artificially Synthesized Probe
  source 1..80: mol_type = other DNA
tcaactcttctatttgcaaagacagacaggaaaccccaagcacattcagtcccaagagaaactcaaattcaacctccatc

SEQ ID NO: 55974 - DNA, 80 bp, synthetic construct
  misc_feature 1..80: note = Artificially Synthesized Probe
  source 1..80: mol_type = other DNA
cacattcagtcccaagagaaactcaaattcaacctccatcaaggttcctaatctttacctttcagcccttaaagttgggt

SEQ ID NO: 55975 - DNA, 80 bp, synthetic construct
  misc_feature 1..80: note = Artificially Synthesized Probe
  source 1..80: mol_type = other DNA
aaggttcctaatctttacctttcagcccttaaagttgggtttattccttctaccttgtgaacttcagatttctttaatta

SEQ ID NO: 55976 - DNA, 80 bp, synthetic construct
  misc_feature 1..80: note = Artificially Synthesized Probe
  source 1..80: mol_type = other DNA
tgggactacagatgcatatcaccacacctggctaattttgtttttttttttttgagacagggtttcactattttgcccag

SEQ ID NO: 55977 - DNA, 80 bp, synthetic construct; identical to SEQ ID NO: 25504
  misc_feature 1..80: note = Artificially Synthesized Probe
  source 1..80: mol_type = other DNA

SEQ ID NO: 55978 - DNA, 80 bp, synthetic construct
  misc_feature 1..80: note = Artificially Synthesized Probe
  source 1..80: mol_type = other DNA
tatcagcaaaaggcagactatgaccttctttgtctggtgcgtttctaaggaattgggaaaacctaaatgtaggttctatg

SEQ ID NO: 55979 - DNA, 80 bp, synthetic construct
  misc_feature 1..80: note = Artificially Synthesized Probe
  source 1..80: mol_type = other DNA
gagtagctgggactacaggcgcccgccaccacgcctggctaattttttgtatttttagtagagacggggtttcaccatat

SEQ ID NO: 55980 - DNA, 80 bp, synthetic construct
  misc_feature 1..80: note = Artificially Synthesized Probe
  source 1..80: mol_type = other DNA
aactgcaaagcagattaagacccatcaacaaaacggtccattaactcaaaagtaacacaatacggccaggcgcagtggct

SEQ ID NO: 55981 - DNA, 80 bp, synthetic construct
  misc_feature 1..80: note = Artificially Synthesized Probe
  source 1..80: mol_type = other DNA
tctgggcatgggccccgtgtcggtggctacctgctcacaccagcctcgccatggcatcccacacgcacaatgccacggga

SEQ ID NO: 55982 - DNA, 80 bp, synthetic construct
  misc_feature 1..80: note = Artificially Synthesized Probe
  source 1..80: mol_type = other DNA
gaggctgaggcaggagagtcacttaaactcgggaggtgggggttgcagtgagccgagatcgcgccattgcactccagcct

SEQ ID NO: 55983 - DNA, 80 bp, synthetic construct; identical to SEQ ID NO: 25505
  misc_feature 1..80: note = Artificially Synthesized Probe
  source 1..80: mol_type = other DNA

SEQ ID NO: 55984 - DNA, 80 bp, synthetic construct
  misc_feature 1..80: note = Artificially Synthesized Probe
  source 1..80: mol_type = other DNA
aaaacgcaaacaaaattagttgctcgtgtaggatgacaatttttaaaagtcacctgaacagaaagccacttgcacccctt

SEQ ID NO: 55985 - DNA, 80 bp, synthetic construct
  misc_feature 1..80: note = Artificially Synthesized Probe
  source 1..80: mol_type = other DNA
aggcgcccccgccagcccggccccgccgaggagccccggggcgcgttcccgagtccaccgcgcctcggtcgcctccagga

SEQ ID NO: 55986 - DNA, 80 bp, synthetic construct; identical to SEQ ID NO: 25506
  misc_feature 1..80: note = Artificially Synthesized Probe
  source 1..80: mol_type = other DNA

SEQ ID NO: 55987 - DNA, 80 bp, synthetic construct
  misc_feature 1..80: note = Artificially Synthesized Probe
  source 1..80: mol_type = other DNA
cgccgcggagcgacaccggccgggaagcgccggctgcccccgtgtttgttctcgtgacccgcgccggcggccacgtgacg

SEQ ID NO: 55988 - DNA, 80 bp, synthetic construct
  misc_feature 1..80: note = Artificially Synthesized Probe
  source 1..80: mol_type = other DNA
gtggccgagctgtgtgtcctgtcagggcctcctgacaaagtcacggcccccagtgccacggctctcagcccagcctgggt

SEQ ID NO: 55989 - DNA, 80 bp, synthetic construct; identical to SEQ ID NO: 25478
  misc_feature 1..80: note = Artificially Synthesized Probe
  source 1..80: mol_type = other DNA

SEQ ID NO: 55990 - DNA, 80 bp, synthetic construct
  misc_feature 1..80: note = Artificially Synthesized Probe
  source 1..80: mol_type = other DNA
tacctctgcgggctggtgaggtgtgaagccgctggacaggaaacgcggggctgcctggagcccgcaagccgtgcaccctg

SEQ ID NO: 55991 - DNA, 80 bp, synthetic construct
  misc_feature 1..80: note = Artificially Synthesized Probe
  source 1..80: mol_type = other DNA
cgggaacacagggcttgaggagtccacacccacccctggagccccgagcctacccctgggagcccagaggccgcccccag

SEQ ID NO: 55992 - DNA, 80 bp, synthetic construct; identical to SEQ ID NO: 25479
  misc_feature 1..80: note = Artificially Synthesized Probe
  source 1..80: mol_type = other DNA

SEQ ID NO: 55993 - DNA, 80 bp, synthetic construct
  misc_feature 1..80: note = Artificially Synthesized Probe
  source 1..80: mol_type = other DNA
caagagctgggacatacccagctgggcagcagctcccatcagggcgtatttgccggggtccgcccagatctgtgggaggt

SEQ ID NO: 55994 - DNA, 80 bp, synthetic construct
  misc_feature 1..80: note = Artificially Synthesized Probe
  source 1..80: mol_type = other DNA
gctgcatccttggcctgaaccaggcgctcagcacccgagcaacaggggagtggcaggcatggaggatgcagagggcacag

SEQ ID NO: 55995 - DNA, 80 bp, synthetic construct
  misc_feature 1..80: note = Artificially Synthesized Probe
  source 1..80: mol_type = other DNA
gtttccattctgggatgacggaacattctagaagtggtagtgacggccgcactgcctcgtgaacgtgagaaacgccgctg

SEQ ID NO: 55996 - DNA, 80 bp, synthetic construct
  misc_feature 1..80: note = Artificially Synthesized Probe
  source 1..80: mol_type = other DNA
ggtggcgtcagctcccggggaggccccactccctggggaggaaatacacggcagggggccgcacccagccccccacggag

SEQ ID NO: 55997 - DNA, 80 bp, synthetic construct; identical to SEQ ID NO: 25480
  misc_feature 1..80: note = Artificially Synthesized Probe
  source 1..80: mol_type = other DNA

SEQ ID NO: 55998 - DNA, 80 bp, synthetic construct
  misc_feature 1..80: note = Artificially Synthesized Probe
  source 1..80: mol_type = other DNA
agtctagaaacagctctgcagcagcccacaatcacctctgcttttcatcacattctcaagaataaggacacgagcctccg

SEQ ID NO: 55999 - DNA, 80 bp, synthetic construct
  misc_feature 1..80: note = Artificially Synthesized Probe
  source 1..80: mol_type = other DNA
acttctgctccggcccgcgatgccgcaagacctggctcagctgcagggccccacagcctcccctccggccccactcaccg

SEQ ID NO: 56000 - DNA, 80 bp, synthetic construct
  misc_feature 1..80: note = Artificially Synthesized Probe
  source 1..80: mol_type = other DNA
gtaggagcctaggagagaagaggggctgacggggcctccacgactcccgcctccgcaggactgccctgccccgctgccca

SEQ ID NO: 56001 - DNA, 80 bp, synthetic construct
  misc_feature 1..80: note = Artificially Synthesized Probe
  source 1..80: mol_type = other DNA
gccagcagaagcaggagccgcgtccagcggggcggcccagctgggtctagcagcgccaggtctacactccatgggtgtgc

SEQ ID NO: 56002 - DNA, 80 bp, synthetic construct; identical to SEQ ID NO: 25481
  misc_feature 1..80: note = Artificially Synthesized Probe
  source 1..80: mol_type = other DNA

SEQ ID NO: 56003 - DNA, 80 bp, synthetic construct
  misc_feature 1..80: note = Artificially Synthesized Probe
  source 1..80: mol_type = other DNA
ttttttgcaaagacagagtctcgctaagttgcccaggctggtcttaacctcctaggctcaagtgatcctcctgccttggt

SEQ ID NO: 56004 - DNA, 80 bp, synthetic construct
  misc_feature 1..80: note = Artificially Synthesized Probe
  source 1..80: mol_type = other DNA
acacctggcgggtcgtggaagaggctcaccacgctcttctccggggtgttgaagaaggccgcagccatggagttgtactc

SEQ ID NO: 56005 - DNA, 80 bp, synthetic construct; identical to SEQ ID NO: 25482
  misc_feature 1..80: note = Artificially Synthesized Probe
  source 1..80: mol_type = other DNA

SEQ ID NO: 56006 - DNA, 80 bp, synthetic construct
  misc_feature 1..80: note = Artificially Synthesized Probe
  source 1..80: mol_type = other DNA
cctgggctccagcagcacagggggtgttatccacggggctggagcagagtgtagcaaggctggtcaaccccatggccccg

SEQ ID NO: 56007 - DNA, 80 bp, synthetic construct
  misc_feature 1..80: note = Artificially Synthesized Probe
  source 1..80: mol_type = other DNA
tagctgcctgtgctgggccaggtgtcctctgaggccggcaggagtctggcccccgctgcacctgcgcttggtggctggca

SEQ ID NO: 56008 - DNA, 80 bp, synthetic construct
  misc_feature 1..80: note = Artificially Synthesized Probe
  source 1..80: mol_type = other DNA
tagtgctttccagggcaaccgtgtcacagtgcagatggacgcacggacggcggtgagccgtgagcgccaggcacaggtcc

SEQ ID NO: 56009 - DNA, 80 bp, synthetic construct
  misc_feature 1..80: note = Artificially Synthesized Probe
  source 1..80: mol_type = other DNA
ctggcctcctctgagatctgggtggacaggactaaccctctttgagacacgccagcccatgcgcttctggaactcggcgg

SEQ ID NO: 56010 - DNA, 80 bp, synthetic construct; identical to SEQ ID NO: 25483
  misc_feature 1..80: note = Artificially Synthesized Probe
  source 1..80: mol_type = other DNA

SEQ ID NO: 56011 - DNA, 80 bp, synthetic construct
  misc_feature 1..80: note = Artificially Synthesized Probe
  source 1..80: mol_type = other DNA
gtgcagtgctgcgatcttggctcactgcaacctccacctcccaggttcaagcaattgtcttgcctcagcctcccgagtag

SEQ ID NO: 56012 - DNA, 80 bp, synthetic construct
  misc_feature 1..80: note = Artificially Synthesized Probe
  source 1..80: mol_type = other DNA
caccgcgcccggccaggcctgtgtttaatcatcaatcaggcacccaaatgtcctggggtcgtcctcttccctggggtaaa

SEQ ID NO: 56013 - DNA, 80 bp, synthetic construct
  misc_feature 1..80: note = Artificially Synthesized Probe
  source 1..80: mol_type = other DNA
tgaaggttgggcatgcctcgcccaggcccgatcccacgcagggcctcacttcctacccaggggccgtcctccaggagccc

SEQ ID NO: 56014 - DNA, 80 bp, synthetic construct; identical to SEQ ID NO: 25484
  misc_feature 1..80: note = Artificially Synthesized Probe
  source 1..80: mol_type = other DNA

SEQ ID NO: 56015 - DNA, 80 bp, synthetic construct
  misc_feature 1..80: note = Artificially Synthesized Probe
  source 1..80: mol_type = other DNA
gggtcctggtaagatgcttcctccacatcatcacaccctgagggctgggggagctgtttctcaaaggctctgccttcctt

SEQ ID NO: 56016 - DNA, 80 bp, synthetic construct
  misc_feature 1..80: note = Artificially Synthesized Probe
  source 1..80: mol_type = other DNA
tactgcccatggaagaatctggaggcccccgggtggccctgggatgagggcaggctccagggagccacagcctccagtcc

SEQ ID NO: 56017 - DNA, 80 bp, synthetic construct
  misc_feature 1..80: note = Artificially Synthesized Probe
  source 1..80: mol_type = other DNA
agggaaaaggcccacagctcctttctgctgaaactcaaggaccaccatcttaagagagctgtccccacagagagccttcc

SEQ ID NO: 56018 - DNA, 80 bp, synthetic construct
  misc_feature 1..80: note = Artificially Synthesized Probe
  source 1..80: mol_type = other DNA
gggggaccaaggcagggctgggcatggggctcagggccttggaggtttttctcagctctcaacatcacagcacagggccc

SEQ ID NO: 56019 - DNA, 80 bp, synthetic construct
  misc_feature 1..80: note = Artificially Synthesized Probe
  source 1..80: mol_type = other DNA
ccgtggtcccccagtttcctgcgcacagagccgccctatcgatggcacggagagtctccccagcccaggccccaggctac

SEQ ID NO: 56020 - DNA, 80 bp, synthetic construct
  misc_feature 1..80: note = Artificially Synthesized Probe
  source 1..80: mol_type = other DNA
tgttccctcccggagccgggccgctggctccgctggctccgctggctccgcgggcgctcagctcggctcggccgcggggc

SEQ ID NO: 56021 - DNA, 80 bp, synthetic construct; identical to SEQ ID NO: 25615
  misc_feature 1..80: note = Artificially Synthesized Probe
  source 1..80: mol_type = other DNA

SEQ ID NO: 56022 - DNA, 80 bp, synthetic construct
  misc_feature 1..80: note = Artificially Synthesized Probe
  source 1..80: mol_type = other DNA
ctactaaaaatacagaaattagctgggtgtagtggtgtgtgcctgtagtcccagctactcaggaggctggggcatgagaa

SEQ ID NO: 56023 - DNA, 80 bp, synthetic construct
  misc_feature 1..80: note = Artificially Synthesized Probe
  source 1..80: mol_type = other DNA
ctagctacttgggaggctgaggcaggatgatctcttgagcccaggagttcgaggctgcagtcagctatggcataccactg

SEQ ID NO: 56024 - DNA, 80 bp, synthetic construct
  misc_feature 1..80: note = Artificially Synthesized Probe
  source 1..80: mol_type = other DNA
agaaagaaagaaaggattaatgcctccccaaaatgtttggtctcagggacccctttaaactcctaaaaattattgaggat

SEQ ID NO: 56025 - DNA, 80 bp, synthetic construct
  misc_feature 1..80: note = Artificially Synthesized Probe
  source 1..80: mol_type = other DNA
ttgagccaaggactttgagaccagcctgggcaacatggcaaaacccctctctaccaaaaacacaaaatttagctgggcat

SEQ ID NO: 56026 - DNA, 80 bp, synthetic construct; identical to SEQ ID NO: 25616
  misc_feature 1..80: note = Artificially Synthesized Probe
  source 1..80: mol_type = other DNA

SEQ ID NO: 56027 - DNA, 80 bp, synthetic construct
  misc_feature 1..80: note = Artificially Synthesized Probe
  source 1..80: mol_type = other DNA
acaaaacattagccaggcgtgttggcaggcacctgtaatcccagctactcgggaggctgaggcaggagaatctcttgaac

SEQ ID NO: 56028 - DNA, 80 bp, synthetic construct
  misc_feature 1..80: note = Artificially Synthesized Probe
  source 1..80: mol_type = other DNA
gggccgcttatgccactcagggaccaggcctgaacctcagtgggctcagcctcttccccagcccttgcctgcaggagaag

SEQ ID NO: 56029 - DNA, 80 bp, synthetic construct
  misc_feature 1..80: note = Artificially Synthesized Probe
  source 1..80: mol_type = other DNA
tattggggcttaataggagaaactagattctggcatctttttccatgttccatctttgcaatttgctcttttggttgaac

SEQ ID NO: 56030 - DNA, 80 bp, synthetic construct; identical to SEQ ID NO: 25617
  misc_feature 1..80: note = Artificially Synthesized Probe
  source 1..80: mol_type = other DNA

SEQ ID NO: 56031 - DNA, 80 bp, synthetic construct
  misc_feature 1..80: note = Artificially Synthesized Probe
  source 1..80: mol_type = other DNA
gagcttgagaccagcctggtcaacatggcgaaaccccgtctctactaaaaatacaaaaattagccaggcatggtggcaca

SEQ ID NO: 56032 - DNA, 80 bp, synthetic construct
  misc_feature 1..80: note = Artificially Synthesized Probe
  source 1..80: mol_type = other DNA
ttaaagaaaataaaaatcaaatgttacagaaaagccagatttctccacattcccttaaaaaatgggaagatctggcatgg

SEQ ID NO: 56033 - DNA, 80 bp, synthetic construct
  misc_feature 1..80: note = Artificially Synthesized Probe
  source 1..80: mol_type = other DNA
ctgtaatcccagcactttgggaggccgaggcaggcagatcacgaggtcaggagatcgagaccatcctgcctaacacgatg

SEQ ID NO: 56034 - DNA, 80 bp, synthetic construct; identical to SEQ ID NO: 25618
  misc_feature 1..80: note = Artificially Synthesized Probe
  source 1..80: mol_type = other DNA

SEQ ID NO: 56035 - DNA, 80 bp, synthetic construct
  misc_feature 1..80: note = Artificially Synthesized Probe
  source 1..80: mol_type = other DNA
ataagtaaaaggctgagtgtggtggctgctcacgcctgtaatcccagcactttgggaggccgaggcaggtagatcacctg

SEQ ID NO: 56036 - DNA, 80 bp, synthetic construct
  misc_feature 1..80: note = Artificially Synthesized Probe
  source 1..80: mol_type = other DNA
cgtgccattgcactccagcctgggcaacaagagtgaaactctgtctcaaaaataataatagtaataaacacaattttaaa

SEQ ID NO: 56037 - DNA, 80 bp, synthetic construct
  misc_feature 1..80: note = Artificially Synthesized Probe
  source 1..80: mol_type = other DNA
ccccagcccctgtaagcatttgctttttttttttttttttttgagacggagtcttactctgttgcccaggctgcagtaca

SEQ ID NO: 56038 - DNA, 80 bp, synthetic construct
  misc_feature 1..80: note = Artificially Synthesized Probe
  source 1..80: mol_type = other DNA
tcctaacctcaagtgatctgcctgcctctgcctcccaaagtgctgggagtacaggcatgagccaccgcactgggcccagc

SEQ ID NO: 56039 - DNA, 80 bp, synthetic construct
  misc_feature 1..80: note = Artificially Synthesized Probe
  source 1..80: mol_type = other DNA
cctcagcctcccaagtagctagattacaggcatgtgcccccatgcccggctaattttgtatttttagtagagacagggtt

SEQ ID NO: 56040 - DNA, 80 bp, synthetic construct; identical to SEQ ID NO: 25619
  misc_feature 1..80: note = Artificially Synthesized Probe
  source 1..80: mol_type = other DNA

SEQ ID NO: 56041 - DNA, 80 bp, synthetic construct
  misc_feature 1..80: note = Artificially Synthesized Probe
  source 1..80: mol_type = other DNA
attaagagttgctctagctacatttgctacaaatctaacacctttctagaaactgtagccctgcccaggaaggaaacaga

SEQ ID NO: 56042 - DNA, 80 bp, synthetic construct
  misc_feature 1..80: note = Artificially Synthesized Probe
  source 1..80: mol_type = other DNA
tcccctgtctcccatcctaagtggaaaagttattattggtgccctgcctggtctcactttctccgaggaagctttccgcc

SEQ ID NO: 56043 - DNA, 80 bp, synthetic construct; identical to SEQ ID NO: 25620
  misc_feature 1..80: note = Artificially Synthesized Probe
  source 1..80: mol_type = other DNA

SEQ ID NO: 56044 - DNA, 80 bp, synthetic construct
  misc_feature 1..80: note = Artificially Synthesized Probe
  source 1..80: mol_type = other DNA
ggctaattttgtatttttagtatagatagggtttctccatgttggtcaggctggtctcaaactcccgacctcaggtgatc

SEQ ID NO: 56045 - DNA, 80 bp, synthetic construct
  misc_feature 1..80: note = Artificially Synthesized Probe
  source 1..80: mol_type = other DNA
aagaagaaatgccatctcctttccttctatacagattaggagttgctctagctacatttgctacaaatctaacacctttc

SEQ ID NO: 56046 - DNA, 80 bp, synthetic construct
  misc_feature 1..80: note = Artificially Synthesized Probe
  source 1..80: mol_type = other DNA
tgtctcccatcctaagtggaaaagttattcttggtgccctgcctggtctcaccttctccgaggaagctttctgccctgtc

SEQ ID NO: 56047 - DNA, 80 bp, synthetic construct
  misc_feature 1..80: note = Artificially Synthesized Probe
  source 1..80: mol_type = other DNA
gcctccttccatccttcagttctcatcagttatgagattcctcccttctaggataccttctttttcttcttctttttttt

SEQ ID NO: 56048 - DNA, 80 bp, synthetic construct; identical to SEQ ID NO: 25621
  misc_feature 1..80: note = Artificially Synthesized Probe
  source 1..80: mol_type = other DNA

SEQ ID NO: 56049 - DNA, 80 bp, synthetic construct
  misc_feature 1..80: note = Artificially Synthesized Probe
  source 1..80: mol_type = other DNA
ataagccaccatgcctggccagagataccttctttttggccagtttgctaagtccagttcattcttcagggcttagcaca

SEQ ID NO: 56050 - DNA, 80 bp, synthetic construct
  misc_feature 1..80: note = Artificially Synthesized Probe
  source 1..80: mol_type = other DNA
gtcacatccatcaaacagcagattaaagtagcagagatttccttttcttacataacaagaaatctggaggtagctgtgac

SEQ ID NO: 56051 - DNA, 80 bp, synthetic construct
  misc_feature 1..80: note = Artificially Synthesized Probe
  source 1..80: mol_type = other DNA
tctcagctcactgcaacctccgcctcctgggttcaagcgatcctcctgcctcagcctccctggtagctgggaattcaggt

SEQ ID NO: 56052 - DNA, 80 bp, synthetic construct
  misc_feature 1..80: note = Artificially Synthesized Probe
  source 1..80: mol_type = other DNA
tgaaagtccagccatcacatcatacatcatagcagaaaggaggaggaaagggaagggagctgtgccagcagatttccact

SEQ ID NO: 56053 - DNA, 80 bp, synthetic construct; identical to SEQ ID NO: 25622
  misc_feature 1..80: note = Artificially Synthesized Probe
  source 1..80: mol_type = other DNA

SEQ ID NO: 56054 - DNA, 80 bp, synthetic construct
  misc_feature 1..80: note = Artificially Synthesized Probe
  source 1..80: mol_type = other DNA
ggcgacatagcaagaccctgtctctattttttaaaaatagataaaatgtcttgcctcatgagatttcttgggtaaatgtt

SEQ ID NO: 56055 - DNA, 80 bp, synthetic construct
  misc_feature 1..80: note = Artificially Synthesized Probe
  source 1..80: mol_type = other DNA
ccaggtccaagtgattctcctgcctcagctgcccgagtacctgggattacaggcacttaccaccacgactggctaatttt

SEQ ID NO: 56056 - DNA, 80 bp, synthetic construct; identical to SEQ ID NO: 25623
  misc_feature 1..80: note = Artificially Synthesized Probe
  source 1..80: mol_type = other DNA

SEQ ID NO: 56057 - DNA, 80 bp, synthetic construct
  misc_feature 1..80: note = Artificially Synthesized Probe
  source 1..80: mol_type = other DNA
tctgtgcccgcctcacccccaggagcctgaacgaactgcgggtgttgctgctggaggccaatcgtcactccccagggccg

SEQ ID NO: 56058 - DNA, 80 bp, synthetic construct
  misc_feature 1..80: note = Artificially Synthesized Probe
  source 1..80: mol_type = other DNA
gccttgctgtcaggccatggagactggagacctcctggaatgaccccagggacagctgagtcatggtgaggatttgaaat

SEQ ID NO: 56059 - DNA, 80 bp, synthetic construct
  misc_feature 1..80: note = Artificially Synthesized Probe
  source 1..80: mol_type = other DNA
gaggcaggatgagccaatacaggtaaagagctccctgttcagaggagtaatcaaccacaagccagttccttgctcagggt

SEQ ID NO: 56060 - DNA, 80 bp, synthetic construct
  misc_feature 1..80: note = Artificially Synthesized Probe
  source 1..80: mol_type = other DNA
tctcagctcactgtaagctctgcctccctggttcacaccattctcctgcctcagcctcccaagtagctgggactacaggc

SEQ ID NO: 56061 - DNA, 80 bp, synthetic construct; identical to SEQ ID NO: 25624
  misc_feature 1..80: note = Artificially Synthesized Probe
  source 1..80: mol_type = other DNA

SEQ ID NO: 56062 - DNA, 80 bp, synthetic construct
  misc_feature 1..80: note = Artificially Synthesized Probe
  source 1..80: mol_type = other DNA
aacatggcgaaaccccatctctgctaaaaatacaaaaattagccgggcatggtggagtgtgcctgtaatcccagctactt

SEQ ID NO: 56063 - DNA, 80 bp, synthetic construct; identical to SEQ ID NO: 25518
  misc_feature 1..80: note = Artificially Synthesized Probe
  source 1..80: mol_type = other DNA

SEQ ID NO: 56064 - DNA, 80 bp, synthetic construct
  misc_feature 1..80: note = Artificially Synthesized Probe
  source 1..80: mol_type = other DNA
taaagaaaccaccccatccccatcccatcctcctgtgatgagcactcaggacaagcctgagcctggtgaacgtcacgata

SEQ ID NO: 56065 - DNA, 80 bp, synthetic construct
  misc_feature 1..80: note = Artificially Synthesized Probe
  source 1..80: mol_type = other DNA
gagggcctcagcgccaccgaccccctatatccgggagtaggcccttggccctcagggttccgggataaagagcatcactc

SEQ ID NO: 56066 - DNA, 80 bp, synthetic construct; identical to SEQ ID NO: 25625
  misc_feature 1..80: note = Artificially Synthesized Probe
  source 1..80: mol_type = other DNA

SEQ ID NO: 56067 - DNA, 80 bp, synthetic construct
  misc_feature 1..80: note = Artificially Synthesized Probe
  source 1..80: mol_type = other DNA
tcagagcaggcaggactgggcagtgctgaaggatggagtttgtgcaggagcgaggaggctggcgggccttggggcaggta

SEQ ID NO: 56068 - DNA, 80 bp, synthetic construct
  misc_feature 1..80: note = Artificially Synthesized Probe
  source 1..80: mol_type = other DNA
gttcgagaccagcctggacctcataacaagaccgcatctctacaaaaaaagttaaaaattagccaagtgtggttgcatgc

SEQ ID NO: 56069 - DNA, 80 bp, synthetic construct
  misc_feature 1..80: note = Artificially Synthesized Probe
  source 1..80: mol_type = other DNA
ctctgtcgcccaggctggagtgcagtggcatgatcttggctcactgcaacctccacctcccgggttcaagcgattctcct

SEQ ID NO: 56070 - DNA, 80 bp, synthetic construct; identical to SEQ ID NO: 25626
  misc_feature 1..80: note = Artificially Synthesized Probe
  source 1..80: mol_type = other DNA

SEQ ID NO: 56071 - DNA, 80 bp, synthetic construct
  misc_feature 1..80: note = Artificially Synthesized Probe
  source 1..80: mol_type = other DNA
aggcaggagaatggcatgaacccgggaggcggagcttgcagagacccaagatcgcgccactgcactccagcctaggtgat

SEQ ID NO: 56072 - DNA, 80 bp, synthetic construct
  misc_feature 1..80: note = Artificially Synthesized Probe
  source 1..80: mol_type = other DNA
tttcctgcctagagttgagacgcccaccaacacacacacgcacactcatgtactcttccactctcctgccacttccagga

SEQ ID NO: 56073 - DNA, 80 bp, synthetic construct
  misc_feature 1..80: note = Artificially Synthesized Probe
  source 1..80: mol_type = other DNA
aggagctgccctgacaaggcccaggtgagccgcggctgacagggcccaccaggaggcaagccacggggcagtgtcctcgg

SEQ ID NO: 56074 - DNA, 80 bp, synthetic construct
  misc_feature 1..80: note = Artificially Synthesized Probe
  source 1..80: mol_type = other DNA
tgcaaactccgcctcccaggttcacgccattctcctgcctcagcctcccaagtagctgggactaccggcgcccgccacca

SEQ ID NO: 56075 - DNA, 80 bp, synthetic construct; identical to SEQ ID NO: 25627
  misc_feature 1..80: note = Artificially Synthesized Probe
  source 1..80: mol_type = other DNA

SEQ ID NO: 56076 - DNA, 80 bp, synthetic construct
  misc_feature 1..80: note = Artificially Synthesized Probe
  source 1..80: mol_type = other DNA
tcctgggaaccctagtctgaaagggaaggcatctctgtcccgggaaccttgatctgaagagggaggcagctctgtcccgg

SEQ ID NO: 56077 - DNA, 80 bp, synthetic construct
  misc_feature 1..80: note = Artificially Synthesized Probe
  source 1..80: mol_type = other DNA
aggggagggagccctgccctctggaacccccagttcaaggggcacatggctttgccctgaggagcttagactaagaagga

SEQ ID NO: 56078 - DNA, 80 bp, synthetic construct
  misc_feature 1..80: note = Artificially Synthesized Probe
  source 1..80: mol_type = other DNA
ctaactcttccagaccatcggcaattccggttctgcaaacggcatccaccagcaggacaaagctcagaaacaagaggtga

SEQ ID NO: 56079 - DNA, 80 bp, synthetic construct; identical to SEQ ID NO: 25628
  misc_feature 1..80: note = Artificially Synthesized Probe
  source 1..80: mol_type = other DNA

SEQ ID NO: 56080 - DNA, 80 bp, synthetic construct
  misc_feature 1..80: note = Artificially Synthesized Probe
  source 1..80: mol_type = other DNA
gacaatatagcgagaccctctctctattaaaaaaaaaaaattttaaaaaggctgggcacagtggctcatgtctgtaatcc

SEQ ID NO: 56081 - DNA, 80 bp, synthetic construct
  misc_feature 1..80: note = Artificially Synthesized Probe
  source 1..80: mol_type = other DNA
aaaaaaaaattagctgggcgtggtggcgggcacctgtagttccagctactctggaggctgaggcaggataatggcatgaa

SEQ ID NO: 56082 - DNA, 80 bp, synthetic construct
  misc_feature 1..80: note = Artificially Synthesized Probe
  source 1..80: mol_type = other DNA
gaagctgaggcaggagaatcgcttgaacctggcaggtggaggttgcagtgagccgagatcgcaccattgcactccagcct

SEQ ID NO: 56083 - DNA, 80 bp, synthetic construct; identical to SEQ ID NO: 25629
  misc_feature 1..80: note = Artificially Synthesized Probe
  source 1..80: mol_type = other DNA

SEQ ID NO: 56084 - DNA, 80 bp, synthetic construct
  misc_feature 1..80: note = Artificially Synthesized Probe
  source 1..80: mol_type = other DNA
ttttgtcctcctggccttgttctcctggccaccctgcgagacacatggggtcatcccagttcacagatgtgaaaactgtc

SEQ ID NO: 56085 - DNA, 80 bp, synthetic construct
  misc_feature 1..80: note = Artificially Synthesized Probe
  source 1..80: mol_type = other DNA
gatggctgagtggcattccgtggtagacatataccgcattttctttatccagtcctcccttgacggacacatatgttgat

SEQ ID NO: 56086 - DNA, 80 bp, synthetic construct
  misc_feature 1..80: note = Artificially Synthesized Probe
  source 1..80: mol_type = other DNA
gcctgtagtcccagctactcgggaggctgaggcaggagaatcgcttgaacccgggaggcagaggttgcagtgagccaaga

SEQ ID NO: 56087 - DNA, 80 bp, synthetic construct
  misc_feature 1..80: note = Artificially Synthesized Probe
  source 1..80: mol_type = other DNA
aggccgaggtgggtggatcatgaggtcaggagatcaagaccatcctggtcaacatggtgaaaccccatctctactaaaaa

SEQ ID NO: 56088 - DNA, 80 bp, synthetic construct; identical to SEQ ID NO: 25630
  misc_feature 1..80: note = Artificially Synthesized Probe
  source 1..80: mol_type = other DNA

SEQ ID NO: 56089 - DNA, 80 bp, synthetic construct
  misc_feature 1..80: note = Artificially Synthesized Probe
  source 1..80: mol_type = other DNA
tgatgatgccctttactctctctaggacaagcactgatcctgaggggatactgtggagcagcccagtccacaccagagcc

SEQ ID NO: 56090 - DNA, 80 bp, synthetic construct
  misc_feature 1..80: note = Artificially Synthesized Probe
  source 1..80: mol_type = other DNA
gagagtgtgaacggtacagccccggcctgacccggggaccttcagcctggacacccggcagcttctggagtttgtcagtg

SEQ ID NO: 56091 - DNA, 80 bp, synthetic construct
  misc_feature 1..80: note = Artificially Synthesized Probe
  source 1..80: mol_type = other DNA
gggggagcatccagtctttaagagccaagtgggggccccttttccgaagccacttccaggccaaggcagtcgccagggct

SEQ ID NO: 56092 - DNA, 80 bp, synthetic construct; identical to SEQ ID NO: 25631
  misc_feature 1..80: note = Artificially Synthesized Probe
  source 1..80: mol_type = other DNA

SEQ ID NO: 56093 - DNA, 80 bp, synthetic construct
  misc_feature 1..80: note = Artificially Synthesized Probe
  source 1..80: mol_type = other DNA
tccaaaatatctgcatccacctggagatgcagctaagtgggtccttatgtacacaccacgttcacacacacacagaggga

SEQ ID NO: 56094 - DNA, 80 bp, synthetic construct
  misc_feature 1..80: note = Artificially Synthesized Probe
  source 1..80: mol_type = other DNA
agatactgcaaacgttcctacagcctagaggtgcgtatacacacccaagtacacgcagccaggcattcaggggtgtgttt

SEQ ID NO: 56095 - DNA, 80 bp, synthetic construct
  misc_feature 1..80: note = Artificially Synthesized Probe
  source 1..80: mol_type = other DNA
tgccatcttcccctcaagcctgctaagttatcccaggcctgtgcgtggtggaaaaagccagccttggccctgcagcctcc

SEQ ID NO: 56096 - DNA, 80 bp, synthetic construct; identical to SEQ ID NO: 25632
  misc_feature 1..80: note = Artificially Synthesized Probe
  source 1..80: mol_type = other DNA

SEQ ID NO: 56097 - DNA, 80 bp, synthetic construct; identical to SEQ ID NO: 25519
  misc_feature 1..80: note = Artificially Synthesized Probe
  source 1..80: mol_type = other DNA

SEQ ID NO: 56098 - DNA, 80 bp, synthetic construct
  misc_feature 1..80: note = Artificially Synthesized Probe
  source 1..80: mol_type = other DNA
tagaagcgatgctttagtggcctaacccagggtcaaatacagctctttctagcaaaatcaggcagctctgccccatcggt

SEQ ID NO: 56099 - DNA, 80 bp, synthetic construct
  misc_feature 1..80: note = Artificially Synthesized Probe
  source 1..80: mol_type = other DNA
ccgggtgtggctcagccatgtcccctccccaggtccttcattcacccctcccctccccacagtggaattgttgaagtgtg

SEQ ID NO: 56100 - DNA, 80 bp, synthetic construct
  misc_feature 1..80: note = Artificially Synthesized Probe
  source 1..80: mol_type = other DNA
ccgacttctttcacttgagattgtaattgcaaggtccttacacatcattgcatgcagttggcattcattcattctcattg

SEQ ID NO: 56101 - DNA, 80 bp, synthetic construct
  misc_feature 1..80: note = Artificially Synthesized Probe
  source 1..80: mol_type = other DNA
cacatcattgcatgcagttggcattcattcattctcattgctgtatgttattctattgtgtgaacaaaccacaacttatt

SEQ ID NO: 56102 - DNA, 80 bp, synthetic construct
  misc_feature 1..80: note = Artificially Synthesized Probe
  source 1..80: mol_type = other DNA
ctcacttctgggtgagaagtgggggtctgggatgagggggtctgccgtcactcttgcgcgatgcctgagggaggtgggtg

SEQ ID NO: 56103 - DNA, 80 bp, synthetic construct
  misc_feature 1..80: note = Artificially Synthesized Probe
  source 1..80: mol_type = other DNA
gccacaatgcccggctaattttttttttttttgtatttttggtagagacggggtttcaccatgttggccaggctggtctc

SEQ ID NO: 56104 - DNA, 80 bp, synthetic construct
  misc_feature 1..80: note = Artificially Synthesized Probe
  source 1..80: mol_type = other DNA
gcgtgatctcggctcactgcagcctctatctcctgggctcaagtgatcctcctgcctcagcctcccaagtagctaggatt

SEQ ID NO: 56105 - DNA, 80 bp, synthetic construct; identical to SEQ ID NO: 25520
  misc_feature 1..80: note = Artificially Synthesized Probe
  source 1..80: mol_type = other DNA

SEQ ID NO: 56106 - DNA, 80 bp, synthetic construct
  misc_feature 1..80: note = Artificially Synthesized Probe
  source 1..80: mol_type = other DNA
gtcacccaggctggagtgcaatggcgcgatatcagctcactgcaacctccgcctccctggttcaagcgattctcctgcct

SEQ ID NO: 56107 - DNA, 80 bp, synthetic construct
  misc_feature 1..80: note = Artificially Synthesized Probe
  source 1..80: mol_type = other DNA
gatgcctcctctaaaactgaggaaccacagccctgagctcggacatagtgagaaaggtagcatgtgggaccggaacccag

SEQ ID NO: 56108 - DNA, 80 bp, synthetic construct
  misc_feature 1..80: note = Artificially Synthesized Probe
  source 1..80: mol_type = other DNA
cagtttcatctccctccctcctgtttgaagccacgtgggcttgtggagcctgggttccagccctggatctgctgtgatgc

SEQ ID NO: 56109 - DNA, 80 bp, synthetic construct
  misc_feature 1..80: note = Artificially Synthesized Probe
  source 1..80: mol_type = other DNA
gcctgcacagctggggctgcagctccccgcaggcctggcagagaagactgaccaagtatgggtggagacagcagtacaga

SEQ ID NO: 56110 - DNA, 80 bp, synthetic construct; identical to SEQ ID NO: 25521
  misc_feature 1..80: note = Artificially Synthesized Probe
  source 1..80: mol_type = other DNA

SEQ ID NO: 56111 - DNA, 80 bp, synthetic construct
  misc_feature 1..80: note = Artificially Synthesized Probe
  source 1..80: mol_type = other DNA
tcatgctcagagaagggctcaccattggctcagaaagcctggcctggcagtgagcattttggggtcctctctgttggggg

SEQ ID NO: 56112 - DNA, 80 bp, synthetic construct
  misc_feature 1..80: note = Artificially Synthesized Probe
  source 1..80: mol_type = other DNA
acctgaggtcaggagttcgagaccagcctggccaacatggtgaaaccccgtctctactaaaaatacaaaaattagccagt

SEQ ID NO: 56113 - DNA, 80 bp, synthetic construct
  misc_feature 1..80: note = Artificially Synthesized Probe
  source 1..80: mol_type = other DNA
gacagcagcctcggtgtccccaaaaagtgcagccccgggggttgatgagtgcattagtggggaagctgggggcatagagg

SEQ ID NO: 56114 - DNA, 80 bp, synthetic construct; identical to SEQ ID NO: 25522
  misc_feature 1..80: note = Artificially Synthesized Probe
  source 1..80: mol_type = other DNA

SEQ ID NO: 56115 - DNA, 80 bp, synthetic construct
  misc_feature 1..80: note = Artificially Synthesized Probe
  source 1..80: mol_type = other DNA
taataggaggtgaggtctcactgtgttgtccaggctggtctcgaactcctggcctcaaatgatcttgccttggcatccca

SEQ ID NO: 56116 - DNA, 80 bp, synthetic construct
  misc_feature 1..80: note = Artificially Synthesized Probe
  source 1..80: mol_type = other DNA
gcctggccaacatagtgaaacctcatctctacaaaaatacaaaaattagctgggcatgatggcagatgcctgtaatccca

SEQ ID NO: 56117 - DNA, 80 bp, synthetic construct
  misc_feature 1..80: note = Artificially Synthesized Probe
  source 1..80: mol_type = other DNA
tttaagaaatctgttagatattcaaaggagtagacaggatacattgaacacccatgtgcaccccatagggctaggaaaca

SEQ ID NO: 56118 - DNA, 80 bp, synthetic construct
  misc_feature 1..80: note = Artificially Synthesized Probe
  source 1..80: mol_type = other DNA
gcatacacctgtggtcccaactactcgggaggctaaggaaggaggatcacttgagcccaggagttcaaggctacagtgag

SEQ ID NO: 56119 - DNA, 80 bp, synthetic construct; identical to SEQ ID NO: 25523
  misc_feature 1..80: note = Artificially Synthesized Probe
  source 1..80: mol_type = other DNA

SEQ ID NO: 56120 - DNA, 80 bp, synthetic construct
  misc_feature 1..80: note = Artificially Synthesized Probe
  source 1..80: mol_type = other DNA
acagcagctctctgtctctcagctggtgggttgtgcagcctggcctcccccgcaaaggctggtcccattcctgcccacct

SEQ ID NO: 56121 - DNA, 80 bp, synthetic construct
  misc_feature 1..80: note = Artificially Synthesized Probe
  source 1..80: mol_type = other DNA
cgcccaggctggagtgcaatggcaccatctcagctcactgcaatctctgcctcctgggttcaagtgattctcctgcctca

SEQ ID NO: 56122 - DNA, 80 bp, synthetic construct; identical to SEQ ID NO: 25524
  misc_feature 1..80: note = Artificially Synthesized Probe
  source 1..80: mol_type = other DNA

SEQ ID NO: 56123 - DNA, 80 bp, synthetic construct; identical to SEQ ID NO: 25508
  misc_feature 1..80: note = Artificially Synthesized Probe
  source 1..80: mol_type = other DNA

SEQ ID NO: 56124 - DNA, 80 bp, synthetic construct
  misc_feature 1..80: note = Artificially Synthesized Probe
  source 1..80: mol_type = other DNA
cctgcctgtctctcatactctctagatcccctgctgccttccagccccaccagatccttgggtgttgggtggacctggca

SEQ ID NO: 56125 - DNA, 80 bp, synthetic construct
  misc_feature 1..80: note = Artificially Synthesized Probe
  source 1..80: mol_type = other DNA
tctggggcctgattgtggggactgcgggttacacctcaggaagtgtgggcatgagcaccccagctgctgggacccccgag

SEQ ID NO: 56126 - DNA, 80 bp, synthetic construct
  misc_feature 1..80: note = Artificially Synthesized Probe
  source 1..80: mol_type = other DNA
gctggcccgccaaaccaagatgggctttccactgctctatttggcacccgtccccctccgccggggccctgattggcaga

SEQ ID NO: 56127 - DNA, 80 bp, synthetic construct
  misc_feature 1..80: note = Artificially Synthesized Probe
  source 1..80: mol_type = other DNA
cctccagagagtagtgacagtccccttcccgagcagccgggcatactcctggggtgtcttctctgcctcactcccaggag

SEQ ID NO: 56128 - DNA, 80 bp, synthetic construct; identical to SEQ ID NO: 25525
  misc_feature 1..80: note = Artificially Synthesized Probe
  source 1..80: mol_type = other DNA

SEQ ID NO: 56129 - DNA, 80 bp, synthetic construct
  misc_feature 1..80: note = Artificially Synthesized Probe
  source 1..80: mol_type = other DNA
ttggtttcctttgtgagccgtggcaggcggacgctgtccccagaggccagggggctcacaaatgttattccagggctggg

SEQ ID NO: 56130 - DNA, 80 bp, synthetic construct
  misc_feature 1..80: note = Artificially Synthesized Probe
  source 1..80: mol_type = other DNA
cacattcgtgcaatgcctggtagacagtaggttcgtttttttgtttttggttttgttttgtttgagtgtcgatctgtcgc

SEQ ID NO: 56131 - DNA, 80 bp, synthetic construct
  misc_feature 1..80: note = Artificially Synthesized Probe
  source 1..80: mol_type = other DNA
tctgttggccaggctggtctcaaactcctgaccttgtgatctgcccgcctcagcctcccaaagttctgggattacaggca

SEQ ID NO: 56132 - DNA, 80 bp, synthetic construct; identical to SEQ ID NO: 25526
  misc_feature 1..80: note = Artificially Synthesized Probe
  source 1..80: mol_type = other DNA

SEQ ID NO: 56133 - DNA, 80 bp, synthetic construct
  misc_feature 1..80: note = Artificially Synthesized Probe
  source 1..80: mol_type = other DNA
gaagtgaagcaggtgggagaaaagacacaggtggcctctgggaggtgggacagtgtcaggcgggtggtaaggactgcagg

SEQ ID NO: 56134 - DNA, 80 bp, synthetic construct
  misc_feature 1..80: note = Artificially Synthesized Probe
  source 1..80: mol_type = other DNA
agcaccgtgcaggctgggaaggtggtgcctggaattctgcactcagagcccaaagtcccagcagggggaatttactccaa

SEQ ID NO: 56135 - DNA, 80 bp, synthetic construct
  misc_feature 1..80: note = Artificially Synthesized Probe
  source 1..80: mol_type = other DNA
atgtcctaaggaggtgagaatggtgtcctggacttctcacctcttgggtaagtatcattcattcattcattcataatcta

SEQ ID NO: 56136 - DNA, 80 bp, synthetic construct
  misc_feature 1..80: note = Artificially Synthesized Probe
  source 1..80: mol_type = other DNA
gtgccaccacgcccagctaatttttgtatttttagtagagacagggtttcaccacgttggccgggctggtctcaaactcc

SEQ ID NO: 56137 - DNA, 80 bp, synthetic construct; identical to SEQ ID NO: 25527
  misc_feature 1..80: note = Artificially Synthesized Probe
  source 1..80: mol_type = other DNA

SEQ ID NO: 56138 - DNA, 80 bp, synthetic construct
  misc_feature 1..80: note = Artificially Synthesized Probe
  source 1..80: mol_type = other DNA
gtgctgggattacaggtataagccactatgcccggcctctcccatcttaagtgtatggtttgggcccagcatagtggctc

SEQ ID NO: 56139 - DNA, 80 bp, synthetic construct
  misc_feature 1..80: note = Artificially Synthesized Probe
  source 1..80: mol_type = other DNA
accacaccccagttttaggacatttctactacccagaaagttctctgtgcccatttgcagccaatctgtgtttccaggcc

SEQ ID NO: 56140 - DNA, 80 bp, synthetic construct
  misc_feature 1..80: note = Artificially Synthesized Probe
  source 1..80: mol_type = other DNA
ctttgggaggctgaggcgggtggatcacctgaggtcaggagttcgaaaccagcctggtcaacatagtgaaaccctgtctc

SEQ ID NO: 56141 - DNA, 80 bp, synthetic construct; identical to SEQ ID NO: 25528
  misc_feature 1..80: note = Artificially Synthesized Probe
  source 1..80: mol_type = other DNA

SEQ ID NO: 56142 - DNA, 80 bp, synthetic construct
  misc_feature 1..80: note = Artificially Synthesized Probe
  source 1..80: mol_type = other DNA
tgatggcgcatgcctgtagtcccctactggggaggctgaggtgggaggattctttgagcccaggaggtcgaggctgcagt

SEQ ID NO: 56143 - DNA, 80 bp, synthetic construct
  misc_feature 1..80: note = Artificially Synthesized Probe
  source 1..80: mol_type = other DNA
tttggcaacatagtgagactccagctgcaaaaaataaaaagttagctgggcatggtagcactcgcctttggtcccagcta

SEQ ID NO: 56144 - DNA, 80 bp, synthetic construct; identical to SEQ ID NO: 25529
  misc_feature 1..80: note = Artificially Synthesized Probe
  source 1..80: mol_type = other DNA

SEQ ID NO: 56145 - DNA, 80 bp, synthetic construct
  misc_feature 1..80: note = Artificially Synthesized Probe
  source 1..80: mol_type = other DNA
attgggatccttatggtatctggcttttagggttgttaggagaactgtgtgccctgtgacagagtagatgtcctataagt

SEQ ID NO: 56146 - DNA, 80 bp, synthetic construct
  misc_feature 1..80: note = Artificially Synthesized Probe
  source 1..80: mol_type = other DNA
agcgattcttgtgcctcagccttccaggtagttgggaccacaggcacacgccaccatgccctgctaattgtttttggatt

SEQ ID NO: 56147 - DNA, 80 bp, synthetic construct
  misc_feature 1..80: note = Artificially Synthesized Probe
  source 1..80: mol_type = other DNA
tcattgcaagctctgccccctgggttcacgccattctcctgcctcagcctcccgagtagctgggactacaggtgtctgcc

SEQ ID NO: 56148 - DNA, 80 bp, synthetic construct
  misc_feature 1..80: note = Artificially Synthesized Probe
  source 1..80: mol_type = other DNA
ttttaagaaactgcccaactgttttccgaagtgattgtaccattttttatttccaccaacactacgagcatttcagttgt

SEQ ID NO: 56149 - DNA, 80 bp, synthetic construct; identical to SEQ ID NO: 25530
  misc_feature 1..80: note = Artificially Synthesized Probe
  source 1..80: mol_type = other DNA

SEQ ID NO: 56150 - DNA, 80 bp, synthetic construct
  misc_feature 1..80: note = Artificially Synthesized Probe
  source 1..80: mol_type = other DNA
catggtagggtgcacctgtagtcctagctatccaggaggctgagacgggaggattgcttgagcccaggagttggaggctg

SEQ ID NO: 56151 - DNA, 80 bp, synthetic construct
  misc_feature 1..80: note = Artificially Synthesized Probe
  source 1..80: mol_type = other DNA
gaggcaggtggatcatttgaggtcaagagttcaagaccagcctggccaacatggtgaaacaccatctctactaaaaatac

SEQ ID NO: 56152 - DNA, 80 bp, synthetic construct
  misc_feature 1..80: note = Artificially Synthesized Probe
  source 1..80: mol_type = other DNA
aataaaataatgaaagtttgttattagatacgatttataactgttttctctgtgggagggattttgggcagagaagaggc

SEQ ID NO: 56153 - DNA, 80 bp, synthetic construct; identical to SEQ ID NO: 25531
  misc_feature 1..80: note = Artificially Synthesized Probe
  source 1..80: mol_type = other DNA

SEQ ID NO: 56154 - DNA, 80 bp, synthetic construct
  misc_feature 1..80: note = Artificially Synthesized Probe
  source 1..80: mol_type = other DNA
attcccggggcaccaggggcgttggaatgttggatttagcagccctgagggccagggctggcaggcatgcccagtgctct

SEQ ID NO: 56155 - DNA, 80 bp, synthetic construct
  misc_feature 1..80: note = Artificially Synthesized Probe
  source 1..80: mol_type = other DNA
cattcctgacgcgagcattgtgggttggcatctgtattcatcagaatttttttggaaatgcaaatgacattgtccctcaa

SEQ ID NO: 56156 - DNA, 80 bp, synthetic construct; identical to SEQ ID NO: 25509
  misc_feature 1..80: note = Artificially Synthesized Probe
  source 1..80: mol_type = other DNA

SEQ ID NO: 56157 - DNA, 80 bp, synthetic construct
  misc_feature 1..80: note = Artificially Synthesized Probe
  source 1..80: mol_type = other DNA
atagtgagaccctgtctctacaaaaaacttgtaaacttagccggggcaggggatggtggtggtggcatgcacctgtggtc

SEQ ID NO: 56158 - DNA, 80 bp, synthetic construct
  misc_feature 1..80: note = Artificially Synthesized Probe
  source 1..80: mol_type = other DNA
acatggtgaaaccccgtctctactaaaaaatataaaaaattagccaggtatggtggcaggtgcctgtaatcccagttact

SEQ ID NO: 56159 - DNA, 80 bp, synthetic construct
  misc_feature 1..80: note = Artificially Synthesized Probe
  source 1..80: mol_type = other DNA
cccccagcgcgcccgggcccgagaggaggaggccggggctctccgggcctcccgccgcttagcctgatgctggaaggacg

SEQ ID NO: 56160 - DNA, 80 bp, synthetic construct; identical to SEQ ID NO: 25532
  misc_feature 1..80: note = Artificially Synthesized Probe
  source 1..80: mol_type = other DNA

SEQ ID NO: 56161 - DNA, 80 bp, synthetic construct
  misc_feature 1..80: note = Artificially Synthesized Probe
  source 1..80: mol_type = other DNA
atggccaggcctgcattatgcatcccctctaggagtgggaatcgggtcaacccacataagtcatatgaaccaaggatggg

SEQ ID NO: 56162 - DNA, 80 bp, synthetic construct
  misc_feature 1..80: note = Artificially Synthesized Probe
  source 1..80: mol_type = other DNA
gggcgcctgtagtctgacttactcagaggctgaggcagaagaattgcttgaaaccaggagatggaggttgcagtgatcca

SEQ ID NO: 56163 - DNA, 80 bp, synthetic construct
  misc_feature 1..80: note = Artificially Synthesized Probe
  source 1..80: mol_type = other DNA
accagcctggccaacatagtgaaaccccacatctacaaaaaatacaaaaattagccaggcatggtggcagatatctgtag

SEQ ID NO: 56164 - DNA, 80 bp, synthetic construct; identical to SEQ ID NO: 25533
  misc_feature 1..80: note = Artificially Synthesized Probe
  source 1..80: mol_type = other DNA

SEQ ID NO: 56165 - DNA, 80 bp, synthetic construct
  misc_feature 1..80: note = Artificially Synthesized Probe
  source 1..80: mol_type = other DNA
gagatggggcctggctcatggtgagccttctggaaacattgggtgcaggaaagtttgtgagtataggatagtggggaaga

SEQ ID NO: 56166 - DNA, 80 bp, synthetic construct
  misc_feature 1..80: note = Artificially Synthesized Probe
  source 1..80: mol_type = other DNA
ccttttgtaaagcgctggtgctcctataagctcttctgtgcttcatcataaggacacaaagctggccgggcgtggtggct

SEQ ID NO: 56167 - DNA, 80 bp, synthetic construct
  misc_feature 1..80: note = Artificially Synthesized Probe
  source 1..80: mol_type = other DNA
aggctgaggcaggagaatggcttgaacctgggaggtggaggttgcagtgagccgagatgctgtcactgcgctctagcctg

SEQ ID NO: 56168 - DNA, 80 bp, synthetic construct; identical to SEQ ID NO: 25534
  misc_feature 1..80: note = Artificially Synthesized Probe
  source 1..80: mol_type = other DNA

SEQ ID NO: 56169 - DNA, 80 bp, synthetic construct
  misc_feature 1..80: note = Artificially Synthesized Probe
  source 1..80: mol_type = other DNA
cctcctgggttcaagcaattctgcctcagcctcccaagtagttgggattacaggcatgtgccaccatgtccggctaattt

SEQ ID NO: 56170 - DNA, 80 bp, synthetic construct
  misc_feature 1..80: note = Artificially Synthesized Probe
  source 1..80: mol_type = other DNA
cctcctcctcctgggttcaagtgattctcctgcctcagcctcctgagtagctgggattacaggtgcccgccaacatgccc

SEQ ID NO: 56171 - DNA, 80 bp, synthetic construct
  misc_feature 1..80: note = Artificially Synthesized Probe
  source 1..80: mol_type = other DNA
ttttaaattctgggatacatgtgcaggatgtgcaggtttgttacataggtaaacgtgtgccatggtggtttgctgcacct

SEQ ID NO: 56172 - DNA, 80 bp, synthetic construct; identical to SEQ ID NO: 25535
  misc_feature 1..80: note = Artificially Synthesized Probe
  source 1..80: mol_type = other DNA

SEQ ID NO: 56173 - DNA, 80 bp, synthetic construct
  misc_feature 1..80: note = Artificially Synthesized Probe
  source 1..80: mol_type = other DNA
gtagctgggactacaggcatgcgccaccacgcctggctaattttttattttttattttctgtagcgacaaagtcttgcta

SEQ ID NO: 56174 - DNA, 80 bp, synthetic construct
  misc_feature 1..80: note = Artificially Synthesized Probe
  source 1..80: mol_type = other DNA
agtgcagcagcgtgacctcggcttactgcaaccaccgcctcctgggttcaagtgattcttgtgcctcaacctcccgagta

SEQ ID NO: 56175 - DNA, 80 bp, synthetic construct
  misc_feature 1..80: note = Artificially Synthesized Probe
  source 1..80: mol_type = other DNA
gcacctggccccttttagggcttttaatgaccatagtcagcatgcagctcacgctttgaaaaggttttactctgtcaccc

SEQ ID NO: 56176 - DNA, 80 bp, synthetic construct; identical to SEQ ID NO: 25536
  misc_feature 1..80: note = Artificially Synthesized Probe
  source 1..80: mol_type = other DNA

SEQ ID NO: 56177 - DNA, 80 bp, synthetic construct
  misc_feature 1..80: note = Artificially Synthesized Probe
  source 1..80: mol_type = other DNA
gcggcaacgggagcagtgagctgataggttaaatcgggtgttgcctcgtccagcccacctcaggagggatgtgtgttgct

SEQ ID NO: 56178 - DNA, 80 bp, synthetic construct
  misc_feature 1..80: note = Artificially Synthesized Probe
  source 1..80: mol_type = other DNA
cccccggccgtggggggaagcactccagccccatgggccggacatctactgggtcagcttcatcctcggcggcggtggcc

SEQ ID NO: 56179 - DNA, 80 bp, synthetic construct
  misc_feature 1..80: note = Artificially Synthesized Probe
  source 1..80: mol_type = other DNA
atcaacactgggaggttggcagaggtttccccagggaggggacatgggcgctgaggtctggagggtgaataggtgattca

SEQ ID NO: 56180 - DNA, 80 bp, synthetic construct
  misc_feature 1..80: note = Artificially Synthesized Probe
  source 1..80: mol_type = other DNA
cctccacttccatacacaggggagggaagctgcatttgtgaccctcagattccctgctcattggttcttgtgagaacttc

SEQ ID NO: 56181 - DNA, 80 bp, synthetic construct
  misc_feature 1..80: note = Artificially Synthesized Probe
  source 1..80: mol_type = other DNA
gccaggcgtggtggcaggtgcctgtaatcccagctactcgagaggctgagagaggagaatcgcctgggcaacagagtgag

SEQ ID NO: 56182 - DNA, 80 bp, synthetic construct; identical to SEQ ID NO: 25537
  misc_feature 1..80: note = Artificially Synthesized Probe
  source 1..80: mol_type = other DNA

SEQ ID NO: 56183 - DNA, 80 bp, synthetic construct
  misc_feature 1..80: note = Artificially Synthesized Probe
  source 1..80: mol_type = other DNA
cacttgaggtcaggagttcaagaccagcctgggcaacatgggaaaaccctgtctctgctaaaaatacaaaaattagtcgg

SEQ ID NO: 56184 - DNA, 80 bp, synthetic construct
  misc_feature 1..80: note = Artificially Synthesized Probe
  source 1..80: mol_type = other DNA
tttgttacttatcactttgataaatgatgctgtgatgaacatctttgtgcacaaagcctggctttgatgatactccagcc

SEQ ID NO: 56185 - DNA, 80 bp, synthetic construct; identical to SEQ ID NO: 25538
  misc_feature 1..80: note = Artificially Synthesized Probe
  source 1..80: mol_type = other DNA

SEQ ID NO: 56186 - DNA, 80 bp, synthetic construct
  misc_feature 1..80: note = Artificially Synthesized Probe
  source 1..80: mol_type = other DNA
atttgttaagaaagaaaaaggccggggacggtggctcatgcctgtaatcccagcactatgggaggccaacactggaggat

SEQ ID NO: 56187 - DNA, 80 bp, synthetic construct
  misc_feature 1..80: note = Artificially Synthesized Probe
  source 1..80: mol_type = other DNA
gagccgagctcatgccactgtactccagcctgggcaacagaacaagactctgtcaaaaaataaaataaaataaagaaaga

SEQ ID NO: 56188 - DNA, 80 bp, synthetic construct
  misc_feature 1..80: note = Artificially Synthesized Probe
  source 1..80: mol_type = other DNA
gtgcctgtagtcccaagtactcaggagggtgaggcaggaggattgcttgagcccaggggttggaggctgcagtgagccat

SEQ ID NO: 56189 - DNA, 80 bp, synthetic construct; identical to SEQ ID NO: 25539
  misc_feature 1..80: note = Artificially Synthesized Probe
  source 1..80: mol_type = other DNA

SEQ ID NO: 56190 - DNA, 80 bp, synthetic construct
  misc_feature 1..80: note = Artificially Synthesized Probe
  source 1..80: mol_type = other DNA
ggcaatagagtgagattccatctcaaaaaaaaaaaaaaaaaaaaagaaagaaaaaggaaaaagagcagtgggggccgggc

SEQ ID NO: 56191 - DNA, 80 bp, synthetic construct
  misc_feature 1..80: note = Artificially Synthesized Probe
  source 1..80: mol_type = other DNA
ttctcctgcctcagcttctcgaatagctgggactacaggcccatgccaccaagactggctaattttttgtagttttagta

SEQ ID NO: 56192 - DNA, 80 bp, synthetic construct
  misc_feature 1..80: note = Artificially Synthesized Probe
  source 1..80: mol_type = other DNA
cttggcagcctgaagtaggagatccgcttgagcccaggaggtcgaggctgcggtgagttttgatcacaccactgcactcc

SEQ ID NO: 56193 - DNA, 80 bp, synthetic construct
  misc_feature 1..80: note = Artificially Synthesized Probe
  source 1..80: mol_type = other DNA
ccagtgaggaggctgtggttatccgggggagggaagggctcattaccatgcgtgggcaatcagggaagacttcctggaag

SEQ ID NO: 56194 - DNA, 80 bp, synthetic construct
  misc_feature 1..80: note = Artificially Synthesized Probe
  source 1..80: mol_type = other DNA
aacctaatggctagagaagggcacccgcccagcccaaccctggggctggggcatggcgtgcagcgagagagtcttattga

SEQ ID NO: 56195 - DNA, 80 bp, synthetic construct; identical to SEQ ID NO: 25540
  misc_feature 1..80: note = Artificially Synthesized Probe
  source 1..80: mol_type = other DNA

SEQ ID NO: 56196 - DNA, 80 bp, synthetic construct
  misc_feature 1..80: note = Artificially Synthesized Probe
  source 1..80: mol_type = other DNA
gattctaacagagctgagcatttcctattgccgacattggcagttcctgagttttagccattgtcatgttgcagcgcaat

SEQ ID NO: 56197 - DNA, 80 bp, synthetic construct
  misc_feature 1..80: note = Artificially Synthesized Probe
  source 1..80: mol_type = other DNA
tgattctctgtctcagcctcccaagtagctgggattacaggcgcccgccaccacgccaggctaattttttgtatttttag

SEQ ID NO: 56198 - DNA, 80 bp, synthetic construct; identical to SEQ ID NO: 25541
  misc_feature 1..80: note = Artificially Synthesized Probe
  source 1..80: mol_type = other DNA

SEQ ID NO: 56199 - DNA, 80 bp, synthetic construct
  misc_feature 1..80: note = Artificially Synthesized Probe
  source 1..80: mol_type = other DNA
cacgatctcagctgattgcaacctctgcctcctgggttcaagcgattcttctgcctcagcctcctgagtagctgggacta

SEQ ID NO: 56200 - DNA, 80 bp, synthetic construct
  misc_feature 1..80: note = Artificially Synthesized Probe
  source 1..80: mol_type = other DNA
ccattttttaatcttttttttttaagagacaggatcttggccaggtgctcatgcctgtaatcccagccctttgggaggcc

SEQ ID NO: 56201 - DNA, 80 bp, synthetic construct
  misc_feature 1..80: note = Artificially Synthesized Probe
  source 1..80: mol_type = other DNA
caccactgcactccagcctgggcaacagagtgagactccgtctcaaaaaacaaacagacaggagacaggatctcattata

SEQ ID NO: 56202 - DNA, 80 bp, synthetic construct; identical to SEQ ID NO: 25510
  misc_feature 1..80: note = Artificially Synthesized Probe
  source 1..80: mol_type = other DNA

SEQ ID NO: 56203 - DNA, 80 bp, synthetic construct
  misc_feature 1..80: note = Artificially Synthesized Probe
  source 1..80: mol_type = other DNA
ccaggctcaagtgcagtggcgcgatcttggctcactgcaaccttcgactccctggttcaggcgattctcctgcttcagcc

SEQ ID NO: 56204 - DNA, 80 bp, synthetic construct; identical to SEQ ID NO: 25542
  misc_feature 1..80: note = Artificially Synthesized Probe
  source 1..80: mol_type = other DNA

SEQ ID NO: 56205 - DNA, 80 bp, synthetic construct
  misc_feature 1..80: note = Artificially Synthesized Probe
  source 1..80: mol_type = other DNA
aggcaggtgccaccatgcctggctaacttgtaaattttttgtagaaacggagtcttgcatttgttgtcctcattggtcat

SEQ ID NO: 56206 - DNA, 80 bp, synthetic construct
  misc_feature 1..80: note = Artificially Synthesized Probe
  source 1..80: mol_type = other DNA
atcttggctcactgcaacctccacctcctgggttcaagcaattctcctgcctcagcctcctgagtagctgggattacagg

SEQ ID NO: 56207 - DNA, 80 bp, synthetic construct
  misc_feature 1..80: note = Artificially Synthesized Probe
  source 1..80: mol_type = other DNA
tagatgtcttatgttcagatgtacaaacacttcccctcgtgttacagttgccttcagcattgagtactgtaacatgctaa

SEQ ID NO: 56208 - DNA, 80 bp, synthetic construct; identical to SEQ ID NO: 25543
  misc_feature 1..80: note = Artificially Synthesized Probe
  source 1..80: mol_type = other DNA

SEQ ID NO: 56209 - DNA, 80 bp, synthetic construct
  misc_feature 1..80: note = Artificially Synthesized Probe
  source 1..80: mol_type = other DNA
aagcgattcttctgcctcagcctcccaagtagctgggattacaggtggccgtcaccatgcccggctaattttgtattttt

SEQ ID NO: 56210 - DNA, 80 bp, synthetic construct
  misc_feature 1..80: note = Artificially Synthesized Probe
  source 1..80: mol_type = other DNA
caattatgattctgccttctcagacacctatcccttttgctcaggtgcaaagtccaaacacgctatctagcttttagggt

SEQ ID NO: 56211 - DNA, 80 bp, synthetic construct
  misc_feature 1..80: note = Artificially Synthesized Probe
  source 1..80: mol_type = other DNA
acaagttgttttaaacagctagattgtgcattctactttttctcatcttattgcatcctatgggaagcacctccctgtgc

SEQ ID NO: 56212 - DNA, 80 bp, synthetic construct
  misc_feature 1..80: note = Artificially Synthesized Probe
  source 1..80: mol_type = other DNA
gctgtcccagagagagaaagtgtccctccgagaatccccaattgacaggggagccacaccttgtgcctgaccttggagat

SEQ ID NO: 56213 - DNA, 80 bp, synthetic construct; identical to SEQ ID NO: 25544
  misc_feature 1..80: note = Artificially Synthesized Probe
  source 1..80: mol_type = other DNA

SEQ ID NO: 56214 - DNA, 80 bp, synthetic construct
  misc_feature 1..80: note = Artificially Synthesized Probe
  source 1..80: mol_type = other DNA
tcagaggctgggaccctgggcagtgggcagctcgagatgtgtgtggcagaggccggggcctggcagtggtttgtggggag

SEQ ID NO: 56215 - DNA, 80 bp, synthetic construct
  misc_feature 1..80: note = Artificially Synthesized Probe
  source 1..80: mol_type = other DNA
cacacagggagcagcatttgagggggacctttgagagggtctctcacgctaggaggtggtgcagggctacaagggagagg

SEQ ID NO: 56216 - DNA, 80 bp, synthetic construct; identical to SEQ ID NO: 25545
  misc_feature 1..80: note = Artificially Synthesized Probe
  source 1..80: mol_type = other DNA

SEQ ID NO: 56217 - DNA, 80 bp, synthetic construct
  misc_feature 1..80: note = Artificially Synthesized Probe
  source 1..80: mol_type = other DNA
tgaatcctcgtctctactaaaaatacaaaaattagctgggcgtggtggcacacatctgtaatcccaggtacttgggaggc

SEQ ID NO: 56218 - DNA, 80 bp, synthetic construct
  misc_feature 1..80: note = Artificially Synthesized Probe
  source 1..80: mol_type = other DNA
gatgggactgatgagcacaggggccaaccatgtgccattgttttcattttaaagatgagaccattggctgggtatggtgg

SEQ ID NO: 56219 - DNA, 80 bp, synthetic construct
  misc_feature 1..80: note = Artificially Synthesized Probe
  source 1..80: mol_type = other DNA
caggaggctgaggcaggagaatggcttgaacctggaaggcagaggttgtagtgagccaagtttacaccattgcactccag

SEQ ID NO: 56220 - DNA, 80 bp, synthetic construct
  misc_feature 1..80: note = Artificially Synthesized Probe
  source 1..80: mol_type = other DNA
gtccagtatcagccccacacatttggctcatgccccagacaggtggatgggaggaggacatacctgttcccattaggttg

SEQ ID NO: 56221 - DNA, 80 bp, synthetic construct; identical to SEQ ID NO: 25546
  misc_feature 1..80: note = Artificially Synthesized Probe
  source 1..80: mol_type = other DNA

SEQ ID NO: 56222 - DNA, 80 bp, synthetic construct
  misc_feature 1..80: note = Artificially Synthesized Probe
  source 1..80: mol_type = other DNA
ggtgccctccgatcccatacctttgggattattttgttgcaaggaacaggaacctgcttcaattaggttaagtgaaaagg

SEQ ID NO: 56223 - DNA, 80 bp, synthetic construct
  misc_feature 1..80: note = Artificially Synthesized Probe
  source 1..80: mol_type = other DNA
tttttgagtacagacggggtttcaccatattggccaggctggtcttgaactcctgacctcgtgatccgcctgcctcggcc

SEQ ID NO: 56224 - DNA, 80 bp, synthetic construct
  misc_feature 1..80: note = Artificially Synthesized Probe
  source 1..80: mol_type = other DNA
gtgggaatgtaaaatggtacagctgcttcaggaaagtttggcagttcttcaaagtttgttttgttttttgagagagagtc

SEQ ID NO: 56225 - DNA, 80 bp, synthetic construct
  misc_feature 1..80: note = Artificially Synthesized Probe
  source 1..80: mol_type = other DNA
ggggtttcaccatcttggccaggctggtctcgaactcctgatctcaagtgatccacctgcctcggcctcccaaactgctg

SEQ ID NO: 56226 - DNA, 80 bp, synthetic construct; identical to SEQ ID NO: 25547
  misc_feature 1..80: note = Artificially Synthesized Probe
  source 1..80: mol_type = other DNA

SEQ ID NO: 56227 - DNA, 80 bp, synthetic construct
  misc_feature 1..80: note = Artificially Synthesized Probe
  source 1..80: mol_type = other DNA
cgatctgacggggcgggggtccggctgccagcacctgtctgcctgcctggtggcctggccacgggcttctccatggggag

SEQ ID NO: 56228 - DNA, 80 bp, synthetic construct
  misc_feature 1..80: note = Artificially Synthesized Probe
  source 1..80: mol_type = other DNA
cctgggattcaggacggtgtgggctgctggagggaggaacccttctttagggctggatgctgcagaggctgggcctgggg

SEQ ID NO: 56229 - DNA, 80 bp, synthetic construct; identical to SEQ ID NO: 25548
  misc_feature 1..80: note = Artificially Synthesized Probe
  source 1..80: mol_type = other DNA

SEQ ID NO: 56230 - DNA, 80 bp, synthetic construct
  misc_feature 1..80: note = Artificially Synthesized Probe
  source 1..80: mol_type = other DNA
ggagttggtgtgagtccacctcctggggctcatgttctgggggtgtgcagacatgcaccccagttagcctgggagtcagg

SEQ ID NO: 56231 - DNA, 80 bp, synthetic construct
  misc_feature 1..80: note = Artificially Synthesized Probe
  source 1..80: mol_type = other DNA
gaaggatggagctttgcctgaaacagcctgcttgatgcctgtggtattggtaaaatgcctttttttcttttcttttattt

SEQ ID NO: 56232 - DNA, 80 bp, synthetic construct
  misc_feature 1..80: note = Artificially Synthesized Probe
  source 1..80: mol_type = other DNA
ctaatttttgtattattatttatatatatatatatttttgagacagagtctcattctgtcgcccaggctggagtgcagtg

SEQ ID NO: 56233 - DNA, 80 bp, synthetic construct
  misc_feature 1..80: note = Artificially Synthesized Probe
  source 1..80: mol_type = other DNA
cttctcctttcccctacaggctccgtctccttgggttgtgagtgtggctgtgttgaatggggctgtagcctgagtccacg

SEQ ID NO: 56234 - DNA, 80 bp, synthetic construct
  misc_feature 1..80: note = Artificially Synthesized Probe
  source 1..80: mol_type = other DNA
ttttttttttttttttagtagagacgaggtttcactgtgttagccaggattgtctcgatctcctgacctcgtgatccgcc

SEQ ID NO: 56235 - DNA, 80 bp, synthetic construct; identical to SEQ ID NO: 25549
  misc_feature 1..80: note = Artificially Synthesized Probe
  source 1..80: mol_type = other DNA

SEQ ID NO: 56236 - DNA, 80 bp, synthetic construct
  misc_feature 1..80: note = Artificially Synthesized Probe
  source 1..80: mol_type = other DNA
tgtttgttttcataatacctaggaacagcctgtggagctatgttctgtggaacatttaagaaggaaccagatcctagcag

SEQ ID NO: 56237 - DNA, 80 bp, synthetic construct
  misc_feature 1..80: note = Artificially Synthesized Probe
  source 1..80: mol_type = other DNA
ggctgagttcatcacacattcacttcatcacatgtcaacattgtgggtccctgcaaggtccctcttggttattttattta

SEQ ID NO: 56238 - DNA, 80 bp, synthetic construct
  misc_feature 1..80: note = Artificially Synthesized Probe
  source 1..80: mol_type = other DNA
accacactgactaatttttgtagttttagtagagacggggtttcgccatgttggtcaggctggtctcgaactcctggcct

SEQ ID NO: 56239 - DNA, 80 bp, synthetic construct; identical to SEQ ID NO: 25550
  misc_feature 1..80: note = Artificially Synthesized Probe
  source 1..80: mol_type = other DNA

SEQ ID NO: 56240 - DNA, 80 bp, synthetic construct
  misc_feature 1..80: note = Artificially Synthesized Probe
  source 1..80: mol_type = other DNA
atgccttgctaatttttgtatttttagtagagatggggtttcgccatgttggccaggctggtctcgagcttctgacctca

SEQ ID NO: 56241 - DNA, 80 bp, synthetic construct
  misc_feature 1..80: note = Artificially Synthesized Probe
  source 1..80: mol_type = other DNA
aactctgctgtgtcaccaagaatcacatcataaacactgtcctacataacctggacaaataatgttttaaaggttgctta

SEQ ID NO: 56242 - DNA, 80 bp, synthetic construct; identical to SEQ ID NO: 25551
  misc_feature 1..80: note = Artificially Synthesized Probe
  source 1..80: mol_type = other DNA

SEQ ID NO: 56243 - DNA, 80 bp, synthetic construct
  misc_feature 1..80: note = Artificially Synthesized Probe
  source 1..80: mol_type = other DNA
aaaaattagccaagcatggtggtacacgcctgtaatcccagctactcgggaggctgaggcaggagaatcacttgaaccca

SEQ ID NO: 56244 - DNA, 80 bp, synthetic construct
  misc_feature 1..80: note = Artificially Synthesized Probe
  source 1..80: mol_type = other DNA
agccctgagaaggaggcataaatgaattaggagtgatttcttccgtggaattgctagactgggggaaggatgagccagta

SEQ ID NO: 56245 - DNA, 80 bp, synthetic construct
  misc_feature 1..80: note = Artificially Synthesized Probe
  source 1..80: mol_type = other DNA
tgatgaaggttgtgtgttaggtgaggaccagcaaatctgggcattcagggagttcatgagctgatgggggaggcagaccc

SEQ ID NO: 56246 - DNA, 80 bp, synthetic construct
  misc_feature 1..80: note = Artificially Synthesized Probe
  source 1..80: mol_type = other DNA
ggtgtaaggtcctggaggaggcaggtcttgatcctgactgaggtgagcaagaggggatcaatttgtttctttctttcttt

SEQ ID NO: 56247 - DNA, 80 bp, synthetic construct
  misc_feature 1..80: note = Artificially Synthesized Probe
  source 1..80: mol_type = other DNA
gcctcctgagtagctgggactttagatgcctgccaccacacccagctaattttgtgttttttaagtagagacggggtttc

SEQ ID NO: 56248 - DNA, 80 bp, synthetic construct; identical to SEQ ID NO: 25552
  misc_feature 1..80: note = Artificially Synthesized Probe
  source 1..80: mol_type = other DNA

SEQ ID NO: 56249 - DNA, 80 bp, synthetic construct
  misc_feature 1..80: note = Artificially Synthesized Probe
  source 1..80: mol_type = other DNA
caagtgattctcctgcctcagcctctcgagtagctgggattacaggtgcccgccaccatgccaggccaatttttgtattt

SEQ ID NO: 56250 - DNA, 80 bp, synthetic construct
  misc_feature 1..80: note = Artificially Synthesized Probe
  source 1..80: mol_type = other DNA
ggctggattgcagtggtgggatcatgcctcactgcagcctagaattctcttttttttttttttttttttagagatggggt

SEQ ID NO: 56251 - DNA, 80 bp, synthetic construct
  misc_feature 1..80: note = Artificially Synthesized Probe
  source 1..80: mol_type = other DNA
ggagccagctctgtaactttcctggggcaagaggtcgtgggaaatacccacacccacatcattcgaggtggagccctccc

SEQ ID NO: 56252 - DNA, 80 bp, synthetic construct; identical to SEQ ID NO: 25553
  misc_feature 1..80: note = Artificially Synthesized Probe
  source 1..80: mol_type = other DNA

SEQ ID NO: 56253 - DNA, 80 bp, synthetic construct
  misc_feature 1..80: note = Artificially Synthesized Probe
  source 1..80: mol_type = other DNA
ctttgaacttgaaacttgcagtaaattcctttgtggctcttgtctgggtgggaatcactgtctggggaataaatcaactg

SEQ ID NO: 56254 - DNA, 80 bp, synthetic construct
  misc_feature 1..80: note = Artificially Synthesized Probe
  source 1..80: mol_type = other DNA
tgccaccacgcccagctaattatggtatttttagtagagatggggtttcaccatgttggccaggctggtctcaaactcct

SEQ ID NO: 56255 - DNA, 80 bp, synthetic construct
  misc_feature 1..80: note = Artificially Synthesized Probe
  source 1..80: mol_type = other DNA
agtgcagtgatgagatcatggctcactgcagcctccactccctgggctcaagcaatcctcctgcctcagcctcccgagta

SEQ ID NO: 56256 - DNA, 80 bp, synthetic construct; identical to SEQ ID NO: 25554
  misc_feature 1..80: note = Artificially Synthesized Probe
  source 1..80: mol_type = other DNA

SEQ ID NO: 56257 - DNA, 80 bp, synthetic construct; identical to SEQ ID NO: 25511
  misc_feature 1..80: note = Artificially Synthesized Probe
  source 1..80: mol_type = other DNA

SEQ ID NO: 56258 - DNA, 80 bp, synthetic construct
  misc_feature 1..80: note = Artificially Synthesized Probe
  source 1..80: mol_type = other DNA
cgtaggacatggagaatgtcagcgctggaaaggaccttagctatttctgacctagtcctttgttatgtcatggagaaact

SEQ ID NO: 56259 - DNA, 80 bp, synthetic construct
  misc_feature 1..80: note = Artificially Synthesized Probe
  source 1..80: mol_type = other DNA
gaatttcccatggtttctcaactgcaggaagctgaaaatgtctcagcgtgcatggaatttgatgagcgttttgtccctgt

SEQ ID NO: 56260 - DNA, 80 bp, synthetic construct
  misc_feature 1..80: note = Artificially Synthesized Probe
  source 1..80: mol_type = other DNA
ctgtgacccctgggaggggagggagtcggggagagattacctgagggtccgcctgggcccggacagctggggacaaggac

SEQ ID NO: 56261 - DNA, 80 bp, synthetic construct; identical to SEQ ID NO: 25555
  misc_feature 1..80: note = Artificially Synthesized Probe
  source 1..80: mol_type = other DNA

SEQ ID NO: 56262 - DNA, 80 bp, synthetic construct
  misc_feature 1..80: note = Artificially Synthesized Probe
  source 1..80: mol_type = other DNA
ctaataaaatacaaaaaaaaaaaaaaaatagcctggtgtgctggcacgcacctataatcctggctacactggaggccgag

SEQ ID NO: 56263 - DNA, 80 bp, synthetic construct
  misc_feature 1..80: note = Artificially Synthesized Probe
  source 1..80: mol_type = other DNA
ctcggcctgagtgaccttaccctctgtttccaaatctgcaaggtaaaaatatgatgtattcttataatgaatagcccagc

SEQ ID NO: 56264 - DNA, 80 bp, synthetic construct
  misc_feature 1..80: note = Artificially Synthesized Probe
  source 1..80: mol_type = other DNA
ccctgtccattgaggagcatgcagttggcacttcataaatgcagctgctatcttaattattttattttgttatatttatt

SEQ ID NO: 56265 - DNA, 80 bp, synthetic construct; identical to SEQ ID NO: 25556
  misc_feature 1..80: note = Artificially Synthesized Probe
  source 1..80: mol_type = other DNA

SEQ ID NO: 56266 - DNA, 80 bp, synthetic construct
  misc_feature 1..80: note = Artificially Synthesized Probe
  source 1..80: mol_type = other DNA
tcttttctttctttcttttctttttttttttgatggagtctcactctgtcgcccaggctagagtgcagtgacgcgatctc

SEQ ID NO: 56267 - DNA, 80 bp, synthetic construct
  misc_feature 1..80: note = Artificially Synthesized Probe
  source 1..80: mol_type = other DNA
cagggtttcaccatgttagccaggttggtctcaatctcctgacctcgtgatccgcccgcctcggcctcccaaagtgctgg

SEQ ID NO: 56268 - DNA, 80 bp, synthetic construct
  misc_feature 1..80: note = Artificially Synthesized Probe
  source 1..80: mol_type = other DNA
attctcctgcctcagcctcccaagtagctgggactacaggcatatgccaccacgcctggctaatttttgtattttcagta

SEQ ID NO: 56269 - DNA, 80 bp, synthetic construct
  misc_feature 1..80: note = Artificially Synthesized Probe
  source 1..80: mol_type = other DNA
gttttagtagagatggggtttcaccatgttggccaggctggtttcgaactcctgacctcaagtgatctgcccgccttggc

SEQ ID NO: 56270 - DNA, 80 bp, synthetic construct; identical to SEQ ID NO: 25557
  misc_feature 1..80: note = Artificially Synthesized Probe
  source 1..80: mol_type = other DNA

SEQ ID NO: 56271 - DNA, 80 bp, synthetic construct
  misc_feature 1..80: note = Artificially Synthesized Probe
  source 1..80: mol_type = other DNA
tacctcccaaaacgtggaaattatgggagctacaattcaagatgagatttgggtggggacacagccaaaccaaatcagtc

SEQ ID NO: 56272 - DNA, 80 bp, synthetic construct
  misc_feature 1..80: note = Artificially Synthesized Probe
  source 1..80: mol_type = other DNA
acagagtctcatgcaagcctgtgattactatggttgtttgttttttttgttttttttttttttgtttttttttgttttgt

SEQ ID NO: 56273 - DNA, 80 bp, synthetic construct
  misc_feature 1..80: note = Artificially Synthesized Probe
  source 1..80: mol_type = other DNA
atttttttgtatttttagtagagacggggtttcaccatgtgggccaggctggtcttgaactcctgacttcaggtgatccg

SEQ ID NO: 56274 - DNA, 80 bp, synthetic construct; identical to SEQ ID NO: 25558
  misc_feature 1..80: note = Artificially Synthesized Probe
  source 1..80: mol_type = other DNA

SEQ ID NO: 56275 - DNA, 80 bp, synthetic construct
  misc_feature 1..80: note = Artificially Synthesized Probe
  source 1..80: mol_type = other DNA
gtgggcgggagctggctggggtgtgccccaacttccccgttgcttgtaggagaggagggggcactgcttggggtgccagg

SEQ ID NO: 56276 - DNA, 80 bp, synthetic construct
  misc_feature 1..80: note = Artificially Synthesized Probe
  source 1..80: mol_type = other DNA
gaacgggttcctccctggcccaggacttacagtttccttgagaagtggaaagccattgcttctttttttttttgtctttt

SEQ ID NO: 56277 - DNA, 80 bp, synthetic construct
  misc_feature 1..80: note = Artificially Synthesized Probe
  source 1..80: mol_type = other DNA
ttttagtagagatggggtttcaccatattggtcaggctggtcttgaactcctgatcttaggtgatccgcctgcctcggcc

SEQ ID NO: 56278 - DNA, 80 bp, synthetic construct; identical to SEQ ID NO: 25559
  misc_feature 1..80: note = Artificially Synthesized Probe
  source 1..80: mol_type = other DNA

SEQ ID NO: 56279 - DNA, 80 bp, synthetic construct
  misc_feature 1..80: note = Artificially Synthesized Probe
  source 1..80: mol_type = other DNA
agcaatttgggaagccaaggcgggcggatttcttgaggtcaggagttcgagaccagcctggccgagatggtgaaacccca

SEQ ID NO: 56280 - DNA, 80 bp, synthetic construct
  misc_feature 1..80: note = Artificially Synthesized Probe
  source 1..80: mol_type = other DNA
gccgcagctgctgcccccgagaagccgggccccaaggcggcggaagtgggggatgacttcctgggggactttgtggtggg

SEQ ID NO: 56281 - DNA, 80 bp, synthetic construct
  misc_feature 1..80: note = Artificially Synthesized Probe
  source 1..80: mol_type = other DNA
aatgttaatgaaacgtttcccttctgaatagaaggcagaacaggccagatggtttttattaacgaggcctgaatttagga

SEQ ID NO: 56282 - DNA, 80 bp, synthetic construct
  misc_feature 1..80: note = Artificially Synthesized Probe
  source 1..80: mol_type = other DNA
cagggtatcttcacgcggccctccaagctgacccggcagcccacggccgagggctcggggagtgatgcccactccgtgga

SEQ ID NO: 56283 - DNA, 80 bp, synthetic construct
  misc_feature 1..80: note = Artificially Synthesized Probe
  source 1..80: mol_type = other DNA
gaaaaggacctgcgcctgggggaccgcgtgctggtgagtgcgggcagtactgggctctgggcccagcttcccttccctcc

SEQ ID NO: 56284 - DNA, 80 bp, synthetic construct; identical to SEQ ID NO: 25560
  misc_feature 1..80: note = Artificially Synthesized Probe
  source 1..80: mol_type = other DNA

SEQ ID NO: 56285 - DNA, 80 bp, synthetic construct
  misc_feature 1..80: note = Artificially Synthesized Probe
  source 1..80: mol_type = other DNA
tgtgccaccacgcccggctaatttttgtattttcagtagagacggggtttcaccatgttgaccagactggtcttgaactc

SEQ ID NO: 56286 - DNA, 80 bp, synthetic construct
  misc_feature 1..80: note = Artificially Synthesized Probe
  source 1..80: mol_type = other DNA
cccatacattttggctattattgatattatctattgatccagctcatccacatgcatgtgccaggcatgtactggaaaag

SEQ ID NO: 56287 - DNA, 80 bp, synthetic construct; identical to SEQ ID NO: 25561
  misc_feature 1..80: note = Artificially Synthesized Probe
  source 1..80: mol_type = other DNA

SEQ ID NO: 56288 - DNA, 80 bp, synthetic construct
  misc_feature 1..80: note = Artificially Synthesized Probe
  source 1..80: mol_type = other DNA
aatcatctgaggtcaggagtttgagaccagccttgccaacatggcgaaacaccatctctaccaaaaatacaaaaattagc

SEQ ID NO: 56289 - DNA, 80 bp, synthetic construct
  misc_feature 1..80: note = Artificially Synthesized Probe
  source 1..80: mol_type = other DNA
taacagtggtaatggttataaccccttgcccagggccaggaggtgcagacaccttatcagctacaactcgagtgatcagt

SEQ ID NO: 56290 - DNA, 80 bp, synthetic construct
  misc_feature 1..80: note = Artificially Synthesized Probe
  source 1..80: mol_type = other DNA
gcctttttggtcccttgggatgagagggcggaatttccggctcaccaggaggagcgcctggtttttcagcgtcacccccg

SEQ ID NO: 56291 - DNA, 80 bp, synthetic construct
  misc_feature 1..80: note = Artificially Synthesized Probe
  source 1..80: mol_type = other DNA
tcaggtggatgggacagggctgtgtcttgctgtccagccaggctgtggtggccttgggctaaccctgcacctgggaccac

SEQ ID NO: 56292 - DNA, 80 bp, synthetic construct; identical to SEQ ID NO: 25562
  misc_feature 1..80: note = Artificially Synthesized Probe
  source 1..80: mol_type = other DNA

SEQ ID NO: 56293 - DNA, 80 bp, synthetic construct
  misc_feature 1..80: note = Artificially Synthesized Probe
  source 1..80: mol_type = other DNA
tatcatcctcactttatggatggggaaactgaggctcagggaagtttttgtttgtttgttttttgttttgttttgttttt

SEQ ID NO: 56294 - DNA, 80 bp, synthetic construct
  misc_feature 1..80: note = Artificially Synthesized Probe
  source 1..80: mol_type = other DNA
agagatagggtttcaccatgttggccaggatggtcttgatctcttgacctacccacctcggcctcccaaagtggtgggat

SEQ ID NO: 56295 - DNA, 80 bp, synthetic construct
  misc_feature 1..80: note = Artificially Synthesized Probe
  source 1..80: mol_type = other DNA
gaaacagggtcttgttctgttgcccaggatgaagtgcagtggtgcagtcatagctcactgcagcctcaaacttggactca

SEQ ID NO: 56296 - DNA, 80 bp, synthetic construct; identical to SEQ ID NO: 25563
  misc_feature 1..80: note = Artificially Synthesized Probe
  source 1..80: mol_type = other DNA

SEQ ID NO: 56297 - DNA, 80 bp, synthetic construct
  misc_feature 1..80: note = Artificially Synthesized Probe
  source 1..80: mol_type = other DNA
gaggcctggcatggtggttcacacctgtaatcccagcactttgggaggctgaggcaggtggatcacctgaggtcaggagt

SEQ ID NO: 56298 - DNA, 80 bp, synthetic construct
  misc_feature 1..80: note = Artificially Synthesized Probe
  source 1..80: mol_type = other DNA
cgccattgcactccagcctgggtggcagagcgagactctgtctcaaaaaaaaaacaaaaaaaaagaaactgaaaagagca

SEQ ID NO: 56299 - DNA, 80 bp, synthetic construct
  misc_feature 1..80: note = Artificially Synthesized Probe
  source 1..80: mol_type = other DNA
aaggacatcacacctgctgcttggtggggatgggatcggaggaggcaagagtggagcaggggccgtgtgcggtggctcac

SEQ ID NO: 56300 - DNA, 80 bp, synthetic construct; identical to SEQ ID NO: 25512
  misc_feature 1..80: note = Artificially Synthesized Probe
  source 1..80: mol_type = other DNA

SEQ ID NO: 56301 - DNA, 80 bp, synthetic construct; identical to SEQ ID NO: 25564
  misc_feature 1..80: note = Artificially Synthesized Probe
  source 1..80: mol_type = other DNA

SEQ ID NO: 56302 - DNA, 80 bp, synthetic construct
  misc_feature 1..80: note = Artificially Synthesized Probe
  source 1..80: mol_type = other DNA
gtgacgggcgcctgtaatcccagctactcaggaggttgaggcaggagaattgcttgaactcaggaggcggaggttgcagt

SEQ ID NO: 56303 - DNA, 80 bp, synthetic construct
  misc_feature 1..80: note = Artificially Synthesized Probe
  source 1..80: mol_type = other DNA
tttgggaccgtcactctgctcttcctcctgtggctcccaggaaagccaaccccatccaacaggacctgggcaaacagctt

SEQ ID NO: 56304 - DNA, 80 bp, synthetic construct
  misc_feature 1..80: note = Artificially Synthesized Probe
  source 1..80: mol_type = other DNA
ctgttcagcaaaatggccatggcccagcactcttgttttgctttatgcttttatggagagcattaagagagctgatggca

SEQ ID NO: 56305 - DNA, 80 bp, synthetic construct
  misc_feature 1..80: note = Artificially Synthesized Probe
  source 1..80: mol_type = other DNA
gcatgcctatgctcccagctactggggagactgaggtgggaggatcacttgagctcagggggtcaaggctgcagtgagcc

SEQ ID NO: 56306 - DNA, 80 bp, synthetic construct; identical to SEQ ID NO: 25565
  misc_feature 1..80: note = Artificially Synthesized Probe
  source 1..80: mol_type = other DNA

SEQ ID NO: 56307 - DNA, 80 bp, synthetic construct
  misc_feature 1..80: note = Artificially Synthesized Probe
  source 1..80: mol_type = other DNA
ctgtctgcagggttggcagcagcaagggggctgggctatcttgaccttagcttctcaatctttaagtagattgcatccta

SEQ ID NO: 56308 - DNA, 80 bp, synthetic construct
  misc_feature 1..80: note = Artificially Synthesized Probe
  source 1..80: mol_type = other DNA
ctgcctcaacttctcgagaatctgggactacagatgtgcaccaccatgcctgcctaatttttttaatttttattatttat

SEQ ID NO: 56309 - DNA, 80 bp, synthetic construct
  misc_feature 1..80: note = Artificially Synthesized Probe
  source 1..80: mol_type = other DNA
aggacattcgaggttggaattacagagcagcaggatccaagactgattgtgtagacagagtggcagagacctggtgccag

SEQ ID NO: 56310 - DNA, 80 bp, synthetic construct; identical to SEQ ID NO: 25566
  misc_feature 1..80: note = Artificially Synthesized Probe
  source 1..80: mol_type = other DNA

SEQ ID NO: 56311 - DNA, 80 bp, synthetic construct
  misc_feature 1..80: note = Artificially Synthesized Probe
  source 1..80: mol_type = other DNA
ttgttttgagacagggcctggctctgtcacccaggctggagtgcagtggcgtgatctcggctcactgcagctttgacctc

SEQ ID NO: 56312 - DNA, 80 bp, synthetic construct
  misc_feature 1..80: note = Artificially Synthesized Probe
  source 1..80: mol_type = other DNA
gggagctggatttacttaggcacaatgaggcatacttggggtgtcaagagaaattaacattttatttctttaattttttt

SEQ ID NO: 56313 - DNA, 80 bp, synthetic construct
  misc_feature 1..80: note = Artificially Synthesized Probe
  source 1..80: mol_type = other DNA
tttagtgagacagggtttctccatgttgccaggatggtcttgaactcctggcctcaagtgatccacccacctcagcctct

SEQ ID NO: 56314 - DNA, 80 bp, synthetic construct
  misc_feature 1..80: note = Artificially Synthesized Probe
  source 1..80: mol_type = other DNA
catggggaaacatggggaaaccccgtctctgctaaaggtacaaaaattagccgggcatggtggcaggtgcctataattcc

SEQ ID NO: 56315 - DNA, 80 bp, synthetic construct; identical to SEQ ID NO: 25567
  misc_feature 1..80: note = Artificially Synthesized Probe
  source 1..80: mol_type = other DNA

SEQ ID NO: 56316 - DNA, 80 bp, synthetic construct
  misc_feature 1..80: note = Artificially Synthesized Probe
  source 1..80: mol_type = other DNA
actcatcctcctgagtagttgggactacaggtgtgtgccaccacacccagctaatttcttaatttttttttgtagagagg

SEQ ID NO: 56317 - DNA, 80 bp, synthetic construct
  misc_feature 1..80: note = Artificially Synthesized Probe
  source 1..80: mol_type = other DNA
tttttttaaaagagctagtggtaggggaagaggagaagcaatcagtgtccatccggaaaccctagatgttcagtaactgg

SEQ ID NO: 56318 - DNA, 80 bp, synthetic construct
  misc_feature 1..80: note = Artificially Synthesized Probe
  source 1..80: mol_type = other DNA
gtgggtgaatcacttgaggccaggagttcaagaccagcctggccaacatgacaaaaccccgtctctactaaaaatacaaa

SEQ ID NO: 56319 - DNA, 80 bp, synthetic construct; identical to SEQ ID NO: 25568
  misc_feature 1..80: note = Artificially Synthesized Probe
  source 1..80: mol_type = other DNA

SEQ ID NO: 56320 - DNA, 80 bp, synthetic construct
  misc_feature 1..80: note = Artificially Synthesized Probe
  source 1..80: mol_type = other DNA
gaggctacagtgagccatgaatgcaccactgcactccagcctgggtgacagagggagaccctacctctaaaaacaaaaca

SEQ ID NO: 56321 - DNA, 80 bp, synthetic construct
  misc_feature 1..80: note = Artificially Synthesized Probe
  source 1..80: mol_type = other DNA
attggatagaggggtcccaggcaggagggactgaaaaaggtagatgaagtgaacatgtgtattctttttctttttaagat

SEQ ID NO: 56322 - DNA, 80 bp, synthetic construct
  misc_feature 1..80: note = Artificially Synthesized Probe
  source 1..80: mol_type = other DNA
ttggcctcccaaagtgctaggattataggtgtgagccactgcacccagctggggctgagttttgaagcataggtgggctt

SEQ ID NO: 56323 - DNA, 80 bp, synthetic construct
  misc_feature 1..80: note = Artificially Synthesized Probe
  source 1..80: mol_type = other DNA
tagagatggggtttcactgtgttggccaggctggtctcgatctcctgacctcgtgatctgcccgcctcggcctcccaaag

SEQ ID NO: 56324 - DNA, 80 bp, synthetic construct; identical to SEQ ID NO: 25569
  misc_feature 1..80: note = Artificially Synthesized Probe
  source 1..80: mol_type = other DNA

SEQ ID NO: 56325 - DNA, 80 bp, synthetic construct
  misc_feature 1..80: note = Artificially Synthesized Probe
  source 1..80: mol_type = other DNA
cactttgggaggccaagacgggcggatcacttgaggtcaggagttccagaccagcctggccaacatggtgaaaccccatc

SEQ ID NO: 56326 - DNA, 80 bp, synthetic construct
  misc_feature 1..80: note = Artificially Synthesized Probe
  source 1..80: mol_type = other DNA
aaaaacaaaaacaggagccaaaagagaagaacattagagaacctatttacagaaaagaggaatggagaaaaaggagggga

SEQ ID NO: 56327 - DNA, 80 bp, synthetic construct; identical to SEQ ID NO: 25570
  misc_feature 1..80: note = Artificially Synthesized Probe
  source 1..80: mol_type = other DNA

SEQ ID NO: 56328 - DNA, 80 bp, synthetic construct
  misc_feature 1..80: note = Artificially Synthesized Probe
  source 1..80: mol_type = other DNA
aaaaaaagaatgagagggccgggtgcggtggctcacgcctgtaatcccagcactttgggaggccgaggcaggtgaatcac

SEQ ID NO: 56329 - DNA, 80 bp, synthetic construct
  misc_feature 1..80: note = Artificially Synthesized Probe
  source 1..80: mol_type = other DNA
gtgagccgagattgcaccactgcactccagcctgggcaacagagcgagactctgtctcaaaaaaaaaaaaaaaaaagaat

SEQ ID NO: 56330 - DNA, 80 bp, synthetic construct
  misc_feature 1..80: note = Artificially Synthesized Probe
  source 1..80: mol_type = other DNA
cctcgcctatacaagaaaaaatttaaaaaaatcttgtacaagaatattcatagcaacattattcataatagccaaaaagt

SEQ ID NO: 56331 - DNA, 80 bp, synthetic construct; identical to SEQ ID NO: 25571
  misc_feature 1..80: note = Artificially Synthesized Probe
  source 1..80: mol_type = other DNA

SEQ ID NO: 56332 - DNA, 80 bp, synthetic construct
  misc_feature 1..80: note = Artificially Synthesized Probe
  source 1..80: mol_type = other DNA
gtatgtgtgtgtgtgtgtgtatatatatatatatatatatatatatatatatatatatatgtaaataaaaattaaaaatc

SEQ ID NO: 56333 - DNA, 80 bp, synthetic construct
  misc_feature 1..80: note = Artificially Synthesized Probe
  source 1..80: mol_type = other DNA
ggctcactgcaacctctgcctcacaggttctcctgtcttagcctccggagtacctggcattacaggcgtgcaccaccacg

SEQ ID NO: 56334 - DNA, 80 bp, synthetic construct; identical to SEQ ID NO: 25513
  misc_feature 1..80: note = Artificially Synthesized Probe
  source 1..80: mol_type = other DNA

SEQ ID NO: 56335 - DNA, 80 bp, synthetic construct
  misc_feature 1..80: note = Artificially Synthesized Probe
  source 1..80: mol_type = other DNA
tgaagtgtccagaagagacaaatctgtagcgataggatagaaatagactaagggttgtcaggggctgtcaggaagatgga

SEQ ID NO: 56336 - DNA, 80 bp, synthetic construct; identical to SEQ ID NO: 25572
  misc_feature 1..80: note = Artificially Synthesized Probe
  source 1..80: mol_type = other DNA

SEQ ID NO: 56337 - DNA, 80 bp, synthetic construct
  misc_feature 1..80: note = Artificially Synthesized Probe
  source 1..80: mol_type = other DNA
tgctcaggctggtctcaaagtcctggcctcaagtgatcctcctgcctcagcttcccaaaacactaggattacaggcatga

SEQ ID NO: 56338 - DNA, 80 bp, synthetic construct
  misc_feature 1..80: note = Artificially Synthesized Probe
  source 1..80: mol_type = other DNA
gccaagggttcaagaccaggctgggcaacatagtgagctctcatctctactagaaaatgttcaaaaattagctaggtatc

SEQ ID NO: 56339 - DNA, 80 bp, synthetic construct
  misc_feature 1..80: note = Artificially Synthesized Probe
  source 1..80: mol_type = other DNA
aggaaggaagaaaggaaggaaagggaagggaaggaagggaaggaaaggaaggaagggaaagaaaggaaggaagggaagga

SEQ ID NO: 56340 - DNA, 80 bp, synthetic construct; identical to SEQ ID NO: 25573
  misc_feature 1..80: note = Artificially Synthesized Probe
  source 1..80: mol_type = other DNA

SEQ ID NO: 56341 - DNA, 80 bp, synthetic construct
  misc_feature 1..80: note = Artificially Synthesized Probe
  source 1..80: mol_type = other DNA
gtccaggaggccaaggttgtggtgagccgagatcacgccactgcattccagtgtcaaaaaaaaaaaaaaaaaaaaaagaa

SEQ ID NO: 56342 - DNA, 80 bp, synthetic construct
  misc_feature 1..80: note = Artificially Synthesized Probe
  source 1..80: mol_type = other DNA
gatcacctgaggtcagaagtgcgagaccagcctggccaacatggcgaaaccccgtctctactaaaaatacaaaaattagc

SEQ ID NO: 56343 - DNA, 80 bp, synthetic construct
  misc_feature 1..80: note = Artificially Synthesized Probe
  source 1..80: mol_type = other DNA
ccagaaaggacttgaggtgatttacaaagataaacgcagtataaccagattaaaagtaaatgagaaaattaggccaggca

SEQ ID NO: 56344 - DNA, 80 bp, synthetic construct
  misc_feature 1..80: note = Artificially Synthesized Probe
  source 1..80: mol_type = other DNA
ataaaataaaatacaataacataacctaaaataagtagtaaaccaagaaagaagagtcaggggatccagaaaacaggagc

SEQ ID NO: 56345 - DNA, 80 bp, synthetic construct; identical to SEQ ID NO: 25574
  misc_feature 1..80: note = Artificially Synthesized Probe
  source 1..80: mol_type = other DNA

SEQ ID NO: 56346 - DNA, 80 bp, synthetic construct
  misc_feature 1..80: note = Artificially Synthesized Probe
  source 1..80: mol_type = other DNA
ccgggcatggtggtgcatgcctgtagtctcagctaatcaggaggctgaggcaggagaatcacttgaactcgggaggtgga

SEQ ID NO: 56347 - DNA, 80 bp, synthetic construct
  misc_feature 1..80: note = Artificially Synthesized Probe
  source 1..80: mol_type = other DNA
caatacatcatcctcatctatgagtactatctacttagtcatagtactgcaatcctggagtcagatcaaaatttagatat

SEQ ID NO: 56348 - DNA, 80 bp, synthetic construct
  misc_feature 1..80: note = Artificially Synthesized Probe
  source 1..80: mol_type = other DNA
gctgagacaggaggattgcttgaagcccggagttccagaccagctcaggcaacatatcaagaccctgtgtctacaaaaaa

SEQ ID NO: 56349 - DNA, 80 bp, synthetic construct
  misc_feature 1..80: note = Artificially Synthesized Probe
  source 1..80: mol_type = other DNA
tcctgtgtctacaaaaaattttttaaaaacttagctgggtatggtggcacacacctatagtcccagctactcaggaggct

SEQ ID NO: 56350 - DNA, 80 bp, synthetic construct; identical to SEQ ID NO: 25575
  misc_feature 1..80: note = Artificially Synthesized Probe
  source 1..80: mol_type = other DNA

SEQ ID NO: 56351 - DNA, 80 bp, synthetic construct
  misc_feature 1..80: note = Artificially Synthesized Probe
  source 1..80: mol_type = other DNA
ggctaatttttgtatttatagtagagacggagtttcaccatgttgggcaggctggtcttgaactcctgacctcaggtgat

SEQ ID NO: 56352 - DNA, 80 bp, synthetic construct
  misc_feature 1..80: note = Artificially Synthesized Probe
  source 1..80: mol_type = other DNA
cacacacagcttctaagtgacagagtttgaatgcaggtctgtgtgtctgtcttcaaagcctgtgcccttgcctgtgtcag

SEQ ID NO: 56353 - DNA, 80 bp, synthetic construct
  misc_feature 1..80: note = Artificially Synthesized Probe
  source 1..80: mol_type = other DNA
aaaattagctgggtgtggtcccagctactctggatgctgaggcaggaggatctcttgaacccaggagtttgagtctgcaa

SEQ ID NO: 56354 - DNA, 80 bp, synthetic construct
  misc_feature 1..80: note = Artificially Synthesized Probe
  source 1..80: mol_type = other DNA
agacctgagtctccctgtgtgccgacaggttggcgggacgaagactggcgtggtgcggtacgtgggggagacagactttg

SEQ ID NO: 56355 - DNA, 80 bp, synthetic construct; identical to SEQ ID NO: 25576
  misc_feature 1..80: note = Artificially Synthesized Probe
  source 1..80: mol_type = other DNA

SEQ ID NO: 56356 - DNA, 80 bp, synthetic construct
  misc_feature 1..80: note = Artificially Synthesized Probe
  source 1..80: mol_type = other DNA
ggctgcgtgcagtggctcatgcctgtaatcccagccttttgggaggctgaggcaggtggatcacttgagatcaggtgttc

SEQ ID NO: 56357 - DNA, 80 bp, synthetic construct
  misc_feature 1..80: note = Artificially Synthesized Probe
  source 1..80: mol_type = other DNA
accactgcactccagcctgggtgacagagtgagactctgtctcaaaaaaattagccaggcatggtggcatgcacctgtag

SEQ ID NO: 56358 - DNA, 80 bp, synthetic construct; identical to SEQ ID NO: 25577
  misc_feature 1..80: note = Artificially Synthesized Probe
  source 1..80: mol_type = other DNA

SEQ ID NO: 56359 - DNA, 80 bp, synthetic construct
  misc_feature 1..80: note = Artificially Synthesized Probe
  source 1..80: mol_type = other DNA
ggactaaggtgaggccacctgagtccctgtgcagtccctgtactggagtctgtggttgagacgaggctgtgactgctttg

SEQ ID NO: 56360 - DNA, 80 bp, synthetic construct
  misc_feature 1..80: note = Artificially Synthesized Probe
  source 1..80: mol_type = other DNA
cagtatgaacaaagacctggaggtgggaaaaggcagaatggggcagcggtttcaagtgaatcagaagctggatgggggcc

SEQ ID NO: 56361 - DNA, 80 bp, synthetic construct
  misc_feature 1..80: note = Artificially Synthesized Probe
  source 1..80: mol_type = other DNA
atacaaaaattagctgggcgtagtagcacacacctgtggtttcagctacctgggaggctgaggtgggaggattgcatgag

SEQ ID NO: 56362 - DNA, 80 bp, synthetic construct; identical to SEQ ID NO: 25578
  misc_feature 1..80: note = Artificially Synthesized Probe
  source 1..80: mol_type = other DNA

SEQ ID NO: 56363 - DNA, 80 bp, synthetic construct
  misc_feature 1..80: note = Artificially Synthesized Probe
  source 1..80: mol_type = other DNA
ctggggtctctgaacagtctgtgggagccaagcttagcgggtgttggagcccagcacactggaggaccagtctcagcttt

SEQ ID NO: 56364 - DNA, 80 bp, synthetic construct
  misc_feature 1..80: note = Artificially Synthesized Probe
  source 1..80: mol_type = other DNA
gtattctcattggctgttcacagctgcagagactctcagaccctactcacctatatcctttttttgagagtcctatctct

SEQ ID NO: 56365 - DNA, 80 bp, synthetic construct
  misc_feature 1..80: note = Artificially Synthesized Probe
  source 1..80: mol_type = other DNA
ccctactcacctatatcctttttttgagagtcctatctctccacctggaagatttccaccttggagtgtctttccacatg

SEQ ID NO: 56366 - DNA, 80 bp, synthetic construct
  misc_feature 1..80: note = Artificially Synthesized Probe
  source 1..80: mol_type = other DNA
cattgtccttgtaagaaaaggacatttggacacaggcatgttcagagggaagaccacaggaggaaccagggagaagacag

SEQ ID NO: 56367 - DNA, 80 bp, synthetic construct
  misc_feature 1..80: note = Artificially Synthesized Probe
  source 1..80: mol_type = other DNA
ccacaaagtgatccgtatcggcttcccatctaccagcccagccaaggccaagaagaccaagcgtatggccatgggtgtgt

SEQ ID NO: 56368 - DNA, 80 bp, synthetic construct; identical to SEQ ID NO: 25579
  misc_feature 1..80: note = Artificially Synthesized Probe
  source 1..80: mol_type = other DNA

SEQ ID NO: 56369 - DNA, 80 bp, synthetic construct
  misc_feature 1..80: note = Artificially Synthesized Probe
  source 1..80: mol_type = other DNA
cttggtggctatgggcagagggcattctgtccaaacccaatctaggattggaggttcctcctttcccaggaaaaagtggc

SEQ ID NO: 56370 - DNA, 80 bp, synthetic construct
  misc_feature 1..80: note = Artificially Synthesized Probe
  source 1..80: mol_type = other DNA
acttgggctcccacctgctatgttgctgtagattaggctggacagagccagtctgccctgcagtgcttcagatccctgag

SEQ ID NO: 56371 - DNA, 80 bp, synthetic construct
  misc_feature 1..80: note = Artificially Synthesized Probe
  source 1..80: mol_type = other DNA
aaggccacaagccacatctgcgaggtggagaaggagattgccctgctcaaggcacagcatgagcaggtgagtggcaggtg

SEQ ID NO: 56372 - DNA, 80 bp, synthetic construct; identical to SEQ ID NO: 25580
  misc_feature 1..80: note = Artificially Synthesized Probe
  source 1..80: mol_type = other DNA

SEQ ID NO: 56373 - DNA, 80 bp, synthetic construct
  misc_feature 1..80: note = Artificially Synthesized Probe
  source 1..80: mol_type = other DNA
gttcaagcgattctcctgcctcagcctcttgagtaactgggattacaggcatgtgccaccatgcccagctaatttttgta

SEQ ID NO: 56374 - DNA, 80 bp, synthetic construct
  misc_feature 1..80: note = Artificially Synthesized Probe
  source 1..80: mol_type = other DNA
ttttttttttttttttatgagacagagtctcactctgttccccaggctggagggcagtggtgcaatctcagctcactgca

SEQ ID NO: 56375 - DNA, 80 bp, synthetic construct
  misc_feature 1..80: note = Artificially Synthesized Probe
  source 1..80: mol_type = other DNA
ctgcctgccttggcctcccaaagtgctgggattacaggtgtgagccaccatgcccagccctgcttttttatttttttaaa

SEQ ID NO: 56376 - DNA, 80 bp, synthetic construct; identical to SEQ ID NO: 25581
  misc_feature 1..80: note = Artificially Synthesized Probe
  source 1..80: mol_type = other DNA

SEQ ID NO: 56377 - DNA, 80 bp, synthetic construct
  misc_feature 1..80: note = Artificially Synthesized Probe
  source 1..80: mol_type = other DNA
aactcttgtctttactaaaaatacaaaaattagccagatgtagtggcatgcacctgtaatcccagctactcgggaggctg

SEQ ID NO: 56378 - DNA, 80 bp, synthetic construct
  misc_feature 1..80: note = Artificially Synthesized Probe
  source 1..80: mol_type = other DNA
cctgagtggctgggactataggtgcacgctaccacatccagctaaattttgtatttttttgtggagacggagtcttgcta

SEQ ID NO: 56379 - DNA, 80 bp, synthetic construct
  misc_feature 1..80: note = Artificially Synthesized Probe
  source 1..80: mol_type = other DNA
cattgctgtctatcacaggctttgtccttactgacatctgacgtgactagtcccctgttgtttagattatttcccatttt

SEQ ID NO: 56380 - DNA, 80 bp, synthetic construct
  misc_feature 1..80: note = Artificially Synthesized Probe
  source 1..80: mol_type = other DNA
ctaatttttgtatttttagtagagaaggggtttcaccatgttggacaggctggtcttgaactcctggcctcaagtgatca

SEQ ID NO: 56381 - DNA, 80 bp, synthetic construct
  misc_feature 1..80: note = Artificially Synthesized Probe
  source 1..80: mol_type = other DNA
gaggcagagtctcgctctgtcgcccaggctggagtgcagtagtgtgatcttggctcactgcaagctccgccccccaggtt

SEQ ID NO: 56382 - DNA, 80 bp, synthetic construct; identical to SEQ ID NO: 25582
  misc_feature 1..80: note = Artificially Synthesized Probe
  source 1..80: mol_type = other DNA

SEQ ID NO: 56383 - DNA, 80 bp, synthetic construct
  misc_feature 1..80: note = Artificially Synthesized Probe
  source 1..80: mol_type = other DNA
ccaagttcatggctgtgctttgatggagcacagacaagacagcaggtttgcaagataacaggtcttaggctcttgtgggt

SEQ ID NO: 56384 - DNA, 80 bp, synthetic construct
  misc_feature 1..80: note = Artificially Synthesized Probe
  source 1..80: mol_type = other DNA
cagggaagttggggtgactggggttccaggccctgctccttgcctgtctcccaccacaccaccaacctggaccccatacc

SEQ ID NO: 56385 - DNA, 80 bp, synthetic construct
  misc_feature 1..80: note = Artificially Synthesized Probe
  source 1..80: mol_type = other DNA
caccctcgccctggccctgagtccccttaaggaggatgaggaagagggcaggcttgggaatagcggacccaggttccagt

SEQ ID NO: 56386 - DNA, 80 bp, synthetic construct; identical to SEQ ID NO: 25583
  misc_feature 1..80: note = Artificially Synthesized Probe
  source 1..80: mol_type = other DNA

SEQ ID NO: 56387 - DNA, 80 bp, synthetic construct
  misc_feature 1..80: note = Artificially Synthesized Probe
  source 1..80: mol_type = other DNA
gtagagatggggttttggcacattggccaggctagtctcgaactcctgacctcaggctattcacccgcctcggcctccca

SEQ ID NO: 56388 - DNA, 80 bp, synthetic construct
  misc_feature 1..80: note = Artificially Synthesized Probe
  source 1..80: mol_type = other DNA
cgtgcaccaggaagaaggctgaatgccccacccctccaccatgagccagttcacactcacagtgcgcccctccccaaccc

SEQ ID NO: 56389 - DNA, 80 bp, synthetic construct; identical to SEQ ID NO: 25514
  misc_feature 1..80: note = Artificially Synthesized Probe
  source 1..80: mol_type = other DNA

SEQ ID NO: 56390 - DNA, 80 bp, synthetic construct; identical to SEQ ID NO: 25584
  misc_feature 1..80: note = Artificially Synthesized Probe
  source 1..80: mol_type = other DNA

SEQ ID NO: 56391 - DNA, 80 bp, synthetic construct
  misc_feature 1..80: note = Artificially Synthesized Probe
  source 1..80: mol_type = other DNA
ggtgatccacctgcctcagcctcccaaagtgctgggattacaggcgtgagccaccgcgcccagcctcctttatttttctt

SEQ ID NO: 56392 - DNA, 80 bp, synthetic construct; identical to SEQ ID NO: 25507
  misc_feature 1..80: note = Artificially Synthesized Probe
  source 1..80: mol_type = other DNA

SEQ ID NO: 56393 - DNA, 80 bp, synthetic construct
  misc_feature 1..80: note = Artificially Synthesized Probe
  source 1..80: mol_type = other DNA
tatccattctcattttacacatcaggaaactgaagttaagagaaacagcagccaagggactcctgaaatgccctgtgtcc

SEQ ID NO: 56394 - DNA, 80 bp, synthetic construct
  misc_feature 1..80: note = Artificially Synthesized Probe
  source 1..80: mol_type = other DNA
ctctactaaaaatacaaaaattagctgggcatggtggcaggtgcctgtaatcccagctactcgggaggctgaggcaggag

SEQ ID NO: 56395 - DNA, 80 bp, synthetic construct
  misc_feature 1..80: note = Artificially Synthesized Probe
  source 1..80: mol_type = other DNA
ggggactctggccgacttggtcctgggtcacctccttgtaggacacaaagctgacagtggacagaggtttgccttggcct

SEQ ID NO: 56396 - DNA, 80 bp, synthetic construct; identical to SEQ ID NO: 25585
  misc_feature 1..80: note = Artificially Synthesized Probe
  source 1..80: mol_type = other DNA

SEQ ID NO: 56397 - DNA, 80 bp, synthetic construct
  misc_feature 1..80: note = Artificially Synthesized Probe
  source 1..80: mol_type = other DNA
tgcaacctccacctccaggttcaagcaattctcctgcctcagcctcccaagtagctgggactacaggtgcgcatcaccat

SEQ ID NO: 56398 - DNA, 80 bp, synthetic construct
  misc_feature 1..80: note = Artificially Synthesized Probe
  source 1..80: mol_type = other DNA
ggcaggagccactgtgctcagccacaaacacaaggcatcatggagttttgttcagaaggggcctgggtgcaagtctctgc

SEQ ID NO: 56399 - DNA, 80 bp, synthetic construct
  misc_feature 1..80: note = Artificially Synthesized Probe
  source 1..80: mol_type = other DNA
gagtaagattttgtctcaaaaaaaaaaaaaaaaagagaaaagaaaaagaaaccaaccctgctgataccttggccttggac

SEQ ID NO: 56400 - DNA, 80 bp, synthetic construct
  misc_feature 1..80: note = Artificially Synthesized Probe
  source 1..80: mol_type = other DNA
tggagtgcaatggcacgatctcagctcaccgcaacctctgccttttgggttcaagccattctcctgcctcagcctcctga

SEQ ID NO: 56401 - DNA, 80 bp, synthetic construct; identical to SEQ ID NO: 25586
  misc_feature 1..80: note = Artificially Synthesized Probe
  source 1..80: mol_type = other DNA

SEQ ID NO: 56402 - DNA, 80 bp, synthetic construct
  misc_feature 1..80: note = Artificially Synthesized Probe
  source 1..80: mol_type = other DNA
aacaagatcaacagcaaaggaagcccactttccttctctcctttccttcctccccacaggttgttccttgtggtagtgtc

SEQ ID NO: 56403 - DNA, 80 bp, synthetic construct
  misc_feature 1..80: note = Artificially Synthesized Probe
  source 1..80: mol_type = other DNA
aaaattttttattgaggttgcatgcccagtgatgtatgcctgtaatcccagctactcaggaagctgaggcaggagaattg

SEQ ID NO: 56404 - DNA, 80 bp, synthetic construct; identical to SEQ ID NO: 25587
  misc_feature 1..80: note = Artificially Synthesized Probe
  source 1..80: mol_type = other DNA

SEQ ID NO: 56405 - DNA, 80 bp, synthetic construct
  misc_feature 1..80: note = Artificially Synthesized Probe
  source 1..80: mol_type = other DNA
tgcctctctctgctgttgctcattcggtgaatcccgttgctctgggcaaagccaggtcagccacctctttccctcccctg

SEQ ID NO: 56406 - DNA, 80 bp, synthetic construct
  misc_feature 1..80: note = Artificially Synthesized Probe
  source 1..80: mol_type = other DNA
cccccggggaaggggctgggggggaaaatggggaaggatcaaaggtctgatgtctgaggtgttagtggctcagccccagg

SEQ ID NO: 56407 - DNA, 80 bp, synthetic construct
  misc_feature 1..80: note = Artificially Synthesized Probe
  source 1..80: mol_type = other DNA
tcttggattccaggtaaaattttggctgaaagtagcttgctgagtcacagaatttataggtaggaaaactgaggctcaga

SEQ ID NO: 56408 - DNA, 80 bp, synthetic construct
  misc_feature 1..80: note = Artificially Synthesized Probe
  source 1..80: mol_type = other DNA
gtgcacctgtggtcccagctactcagggaggctgaggctagaggatcgcttgaatctgggagatggaggctgcagtgagc

SEQ ID NO: 56409 - DNA, 80 bp, synthetic construct; identical to SEQ ID NO: 25588
  misc_feature 1..80: note = Artificially Synthesized Probe
  source 1..80: mol_type = other DNA

SEQ ID NO: 56410 - DNA, 80 bp, synthetic construct
  misc_feature 1..80: note = Artificially Synthesized Probe
  source 1..80: mol_type = other DNA
aagcccatccatgtgccccttactcagggtctccttccgatctgtgtctgaggtcaggctcctcctgtctgtttcccact

SEQ ID NO: 56411 - DNA, 80 bp, synthetic construct
  misc_feature 1..80: note = Artificially Synthesized Probe
  source 1..80: mol_type = other DNA
ggtcgcctttctgacacaggtatctgggctcctggcttgctgctttctccttggagtctgtgtcctcagtcagcttgggc

SEQ ID NO: 56412 - DNA, 80 bp, synthetic construct
  misc_feature 1..80: note = Artificially Synthesized Probe
  source 1..80: mol_type = other DNA
ggacagacagtgacagctaagtcagtccaaagggctgcagaattccccatgcaacgttttattgtagcaaactgaattgt

SEQ ID NO: 56413 - DNA, 80 bp, synthetic construct
  misc_feature 1..80: note = Artificially Synthesized Probe
  source 1..80: mol_type = other DNA
tcaagtgatgctttgcctcagcctcccaagtagctaggactacaggcgtgtgccaccacacccagctaatttttgtattt

SEQ ID NO: 56414 - DNA, 80 bp, synthetic construct; identical to SEQ ID NO: 25589
  misc_feature 1..80: note = Artificially Synthesized Probe
  source 1..80: mol_type = other DNA

SEQ ID NO: 56415 - DNA, 80 bp, synthetic construct
  misc_feature 1..80: note = Artificially Synthesized Probe
  source 1..80: mol_type = other DNA
ttcctaatctctgaacattgtcccatccaagggctcagtcccaggtccgttcaccccttgtccacactcaccctgagagc

SEQ ID NO: 56416 - DNA, 80 bp, synthetic construct
  misc_feature 1..80: note = Artificially Synthesized Probe
  source 1..80: mol_type = other DNA
tatcaatttcctggggctgcaataatgcacagccacaaatgtgtggcttaaaacagcacaaacatatgctttcgcagttc

SEQ ID NO: 56417 - DNA, 80 bp, synthetic construct
  misc_feature 1..80: note = Artificially Synthesized Probe
  source 1..80: mol_type = other DNA
tgggcatggtgacgggcgcctctaatcccagctactccggaggctgaggcaggagaatcacttgaaattgggaggcggca

SEQ ID NO: 56418 - DNA, 80 bp, synthetic construct; identical to SEQ ID NO: 25590
  misc_feature 1..80: note = Artificially Synthesized Probe
  source 1..80: mol_type = other DNA

SEQ ID NO: 56419 - DNA, 80 bp, synthetic construct
  misc_feature 1..80: note = Artificially Synthesized Probe
  source 1..80: mol_type = other DNA
atggagtctcgctctgtcacccaggctggagtgcagtggcgcaatctctgctcactgcaagctccccttcccgggttcat

SEQ ID NO: 56420 - DNA, 80 bp, synthetic construct
  misc_feature 1..80: note = Artificially Synthesized Probe
  source 1..80: mol_type = other DNA
actgctgggataacaggcgtgagccaccatgcctggcctattttgtttaatttttatacagatgggttctcactatattg

SEQ ID NO: 56421 - DNA, 80 bp, synthetic construct; identical to SEQ ID NO: 25591
  misc_feature 1..80: note = Artificially Synthesized Probe
  source 1..80: mol_type = other DNA

SEQ ID NO: 56422 - DNA, 80 bp, synthetic construct; identical to SEQ ID NO: 25515
  misc_feature 1..80: note = Artificially Synthesized Probe
  source 1..80: mol_type = other DNA

SEQ ID NO: 56423 - DNA, 80 bp, synthetic construct
  misc_feature 1..80: note = Artificially Synthesized Probe
  source 1..80: mol_type = other DNA
tgcgggcatggtggcacatgcttgtaatccaagcactttgggaagccaaggcgggaggattgattaagcccagaagttcg

SEQ ID NO: 56424 - DNA, 80 bp, synthetic construct
  misc_feature 1..80: note = Artificially Synthesized Probe
  source 1..80: mol_type = other DNA
cactgtactccagcctgggcaacaaagcaagagcaagaccttgtctcaaaaaataaaaaataaaggccgggcgcggtggc

SEQ ID NO: 56425 - DNA, 80 bp, synthetic construct
  misc_feature 1..80: note = Artificially Synthesized Probe
  source 1..80: mol_type = other DNA
gaggctgaggtaggagaatcgcttgaacctgggaggcggaggttgcagtgagccgagatcgcgtcattgcactccagcct

SEQ ID NO: 56426 - DNA, 80 bp, synthetic construct; identical to SEQ ID NO: 25592
  misc_feature 1..80: note = Artificially Synthesized Probe
  source 1..80: mol_type = other DNA

SEQ ID NO: 56427 - DNA, 80 bp, synthetic construct
  misc_feature 1..80: note = Artificially Synthesized Probe
  source 1..80: mol_type = other DNA
atttcagccatgccctgacccagggccccctcccacatcccagacgtcatatggccaaatatttttaaaatgtaaatcag

SEQ ID NO: 56428 - DNA, 80 bp, synthetic construct
  misc_feature 1..80: note = Artificially Synthesized Probe
  source 1..80: mol_type = other DNA
tataatcccagcactttgggaggccaaggcaggtggatcacttgaggtcaggagattcagaccagcctggccaacatggt

SEQ ID NO: 56429 - DNA, 80 bp, synthetic construct
  misc_feature 1..80: note = Artificially Synthesized Probe
  source 1..80: mol_type = other DNA
cagagtgagactctgtctcaaaaataaagtagaaacaaagaaacaaaataaataaaataaaaaatccaccaggcatggta

SEQ ID NO: 56430 - DNA, 80 bp, synthetic construct; identical to SEQ ID NO: 25593
  misc_feature 1..80: note = Artificially Synthesized Probe
  source 1..80: mol_type = other DNA

SEQ ID NO: 56431 - DNA, 80 bp, synthetic construct
  misc_feature 1..80: note = Artificially Synthesized Probe
  source 1..80: mol_type = other DNA
tccactgcactccagcctgagtaacagagcgagactctgcctcaaaaaaaaaaaaaaaaaaaaaaaatccaggcacggtg

SEQ ID NO: 56432 - DNA, 80 bp, synthetic construct
  misc_feature 1..80: note = Artificially Synthesized Probe
  source 1..80: mol_type = other DNA
gaaggctgaggcaggagaatcgcttgaacccaggaggcagaggttgctgagccaggctccctccactgcactccagcctg

SEQ ID NO: 56433 - DNA, 80 bp, synthetic construct
  misc_feature 1..80: note = Artificially Synthesized Probe
  source 1..80: mol_type = other DNA
aaaccgaataagaaaacaaaagcagggccccccctttgagaggaagcctcagcctctgtctacttgaacccctccagtga

SEQ ID NO: 56434 - DNA, 80 bp, synthetic construct
  misc_feature 1..80: note = Artificially Synthesized Probe
  source 1..80: mol_type = other DNA
taaaaatacaaaaaattagccgggcgtggtggcgggcgcctgcagtcccagctactcgggaggctgaggcaggagaatgg

SEQ ID NO: 56435 - DNA, 80 bp, synthetic construct
  misc_feature 1..80: note = Artificially Synthesized Probe
  source 1..80: mol_type = other DNA
ctgagacactagatatcatctaggctctgtagagtgggccagagaagacccccagggcccaaccctcccccccaccacca

SEQ ID NO: 56436 - DNA, 80 bp, synthetic construct; identical to SEQ ID NO: 25594
  misc_feature 1..80: note = Artificially Synthesized Probe
  source 1..80: mol_type = other DNA

SEQ ID NO: 56437 - DNA, 80 bp, synthetic construct
  misc_feature 1..80: note = Artificially Synthesized Probe
  source 1..80: mol_type = other DNA
ctgaggtgggcagatcacctgaggtcagaggttcaagaccagcaaacatggtgaaaccccgtctctactcaaaaatacaa

SEQ ID NO: 56438 - DNA, 80 bp, synthetic construct
  misc_feature 1..80: note = Artificially Synthesized Probe
  source 1..80: mol_type = other DNA
aaaaaaaaaaaaaaaggttgaggggaggagtcctttggagtgggaccgaatgaagttgcccttgaaattgcgaagctgga

SEQ ID NO: 56439 - DNA, 80 bp, synthetic construct
  misc_feature 1..80: note = Artificially Synthesized Probe
  source 1..80: mol_type = other DNA
gtgattttctggaagagacatgctgacttcttgttggcactggaacacactgccaggagggaggcgggggagggagggag

SEQ ID NO: 56440 - DNA, 80 bp, synthetic construct; identical to SEQ ID NO: 25595
  misc_feature 1..80: note = Artificially Synthesized Probe
  source 1..80: mol_type = other DNA

SEQ ID NO: 56441 - DNA, 80 bp, synthetic construct
  misc_feature 1..80: note = Artificially Synthesized Probe
  source 1..80: mol_type = other DNA
tgatgtccgtttacaccttcaccaatagacaagcttccggggttttattacaggtttcacacctagaggctgttttgcta

SEQ ID NO: 56442 - DNA, 80 bp, synthetic construct
  misc_feature 1..80: note = Artificially Synthesized Probe
  source 1..80: mol_type = other DNA
tgcaaaagccagtcttgacaccctgagaatgctggcctttgtcagcagatgaagcagatattgtcgagctgggacaaaag

SEQ ID NO: 56443 - DNA, 80 bp, synthetic construct
  misc_feature 1..80: note = Artificially Synthesized Probe
  source 1..80: mol_type = other DNA
tctctctgtccttcccagagatagctccaagcaggctgggtgaatgtggctatggggtgtgaacaaggcactgtaagaat

SEQ ID NO: 56444 - DNA, 80 bp, synthetic construct; identical to SEQ ID NO: 25596
  misc_feature 1..80: note = Artificially Synthesized Probe
  source 1..80: mol_type = other DNA

SEQ ID NO: 56445 - DNA, 80 bp, synthetic construct
  misc_feature 1..80: note = Artificially Synthesized Probe
  source 1..80: mol_type = other DNA
caagggctgctggttgggggttgggggggacagaaaagcgaggtgcccattgctaccccaagcaggggccagcgagggag

SEQ ID NO: 56446 - DNA, 80 bp, synthetic construct
  misc_feature 1..80: note = Artificially Synthesized Probe
  source 1..80: mol_type = other DNA
agatgacgcctcctctctctctctctctctttctctctctctccggcttcttcttccctgtgcccccctccctgcgtccc

SEQ ID NO: 56447 - DNA, 80 bp, synthetic construct
  misc_feature 1..80: note = Artificially Synthesized Probe
  source 1..80: mol_type = other DNA
cacccgcctggcccgccagccaccttgccctttgatgccccctctggcttctctgtttcattattgactctctttcttta

SEQ ID NO: 56448 - DNA, 80 bp, synthetic construct
  misc_feature 1..80: note = Artificially Synthesized Probe
  source 1..80: mol_type = other DNA
gttcgagaccagcctggccaacatggtgaaaccccatctctactaaaaatataaaaattagctgggcgtggtggctcatg

SEQ ID NO: 56449 - DNA, 80 bp, synthetic construct; identical to SEQ ID NO: 25597
  misc_feature 1..80: note = Artificially Synthesized Probe
  source 1..80: mol_type = other DNA

SEQ ID NO: 56450 - DNA, 80 bp, synthetic construct
  misc_feature 1..80: note = Artificially Synthesized Probe
  source 1..80: mol_type = other DNA
aatgtcctgtctctatgtaggcagacctagaaaccactgatccatgtctcctgtctccccagctgaggaggctggggaga

SEQ ID NO: 56451 - DNA, 80 bp, synthetic construct
  misc_feature 1..80: note = Artificially Synthesized Probe
  source 1..80: mol_type = other DNA
agggagtggaggtgtccccagggaatggtgttataatgggtcctggagccatggaacagctctgcttgtgggtgaggctt

SEQ ID NO: 56452 - DNA, 80 bp, synthetic construct; identical to SEQ ID NO: 25598
  misc_feature 1..80: note = Artificially Synthesized Probe
  source 1..80: mol_type = other DNA

SEQ ID NO: 56453 - DNA, 80 bp, synthetic construct
  misc_feature 1..80: note = Artificially Synthesized Probe
  source 1..80: mol_type = other DNA
ggagccctccaaatgcatcttgatctagggttcaacctgatgaaaacacaaaaacagggctgggtgtggtggctcacacc

SEQ ID NO: 56454 - DNA, 80 bp, synthetic construct
  misc_feature 1..80: note = Artificially Synthesized Probe
  source 1..80: mol_type = other DNA
ttgggaggctgagacaggagaatcatttgaaccggggaggtggaggttgcagtgagccgagatggtgccactacactcca

SEQ ID NO: 56455 - DNA, 80 bp, synthetic construct
  misc_feature 1..80: note = Artificially Synthesized Probe
  source 1..80: mol_type = other DNA
ctttaatgcattcatatattcactaaacatgtatttttgagctcctctatggtctgggtgctgtcctaggtaccgagaac

SEQ ID NO: 56456 - DNA, 80 bp, synthetic construct
  misc_feature 1..80: note = Artificially Synthesized Probe
  source 1..80: mol_type = other DNA
acgtgatcaaggtggttttttggagaatggagcctctaagagttttttgttgaaagatgggtctgggagcaccctcttct

SEQ ID NO: 56457 - DNA, 80 bp, synthetic construct
  misc_feature 1..80: note = Artificially Synthesized Probe
  source 1..80: mol_type = other DNA
ctttaactcagttgggcatggtggctcatgcccatagagtcccagctgcttttgaggctgaggcaggaagattgcttgag

SEQ ID NO: 56458 - DNA, 80 bp, synthetic construct; identical to SEQ ID NO: 25599
  misc_feature 1..80: note = Artificially Synthesized Probe
  source 1..80: mol_type = other DNA

SEQ ID NO: 56459 - DNA, 80 bp, synthetic construct
  misc_feature 1..80: note = Artificially Synthesized Probe
  source 1..80: mol_type = other DNA
aagctgtaacctcaaataggtggtttcttttaaccaccaatttgtccaagccacctaggtagaggagtggcgacagttgg

SEQ ID NO: 56460 - DNA, 80 bp, synthetic construct
  misc_feature 1..80: note = Artificially Synthesized Probe
  source 1..80: mol_type = other DNA
gctggggctggtgccctcgaatggacgccccctacccggcccccaccattgtgccctccttaccttccagccagccagcc

SEQ ID NO: 56461 - DNA, 80 bp, synthetic construct
  misc_feature 1..80: note = Artificially Synthesized Probe
  source 1..80: mol_type = other DNA
agtgcctgttgcactcgggtcccccacctccggaccacccagacgccgccgagatcctgcggctacgggagcggctgctc

SEQ ID NO: 56462 - DNA, 80 bp, synthetic construct; identical to SEQ ID NO: 25600
  misc_feature 1..80: note = Artificially Synthesized Probe
  source 1..80: mol_type = other DNA

SEQ ID NO: 56463 - DNA, 80 bp, synthetic construct
  misc_feature 1..80: note = Artificially Synthesized Probe
  source 1..80: mol_type = other DNA
catgacctggagaccgccatgcacgtgaaggagaaggaggccctgcgagagaagctgcaggaggcccaggaggagctggc

SEQ ID NO: 56464 - DNA, 80 bp, synthetic construct
  misc_feature 1..80: note = Artificially Synthesized Probe
  source 1..80: mol_type = other DNA
ttcctcaaggagcagatctcgctggccgagaagaagatgttggactacgagcggctgcagcgggcagaagcccagggcaa

SEQ ID NO: 56465 - DNA, 80 bp, synthetic construct; identical to SEQ ID NO: 25601
  misc_feature 1..80: note = Artificially Synthesized Probe
  source 1..80: mol_type = other DNA

SEQ ID NO: 56466 - DNA, 80 bp, synthetic construct
  misc_feature 1..80: note = Artificially Synthesized Probe
  source 1..80: mol_type = other DNA
ctgtctcttcttttatttatttacttttttttgagacacagtttcactctgttgcccaggctggagtgcagtagcgtgat

SEQ ID NO: 56467 - DNA, 80 bp, synthetic construct
  misc_feature 1..80: note = Artificially Synthesized Probe
  source 1..80: mol_type = other DNA
atgtcttagggtgcagggctcctaggacccgggacctcagaccctgtgccctggggctggcacagacctgaaggcaagct

SEQ ID NO: 56468 - DNA, 80 bp, synthetic construct
  misc_feature 1..80: note = Artificially Synthesized Probe
  source 1..80: mol_type = other DNA
gggggtggccctaaagaggtcgctgtcaccaatgtcaattttgctccaaatctagaaattccttaagcatctaccccttc

SEQ ID NO: 56469 - DNA, 80 bp, synthetic construct
  misc_feature 1..80: note = Artificially Synthesized Probe
  source 1..80: mol_type = other DNA
ccaggccctatgtgactccatttcaccttaacatccttagattgatactggctccatttcacaggtgagcaaaccaagac

SEQ ID NO: 56470 - DNA, 80 bp, synthetic construct; identical to SEQ ID NO: 25602
  misc_feature 1..80: note = Artificially Synthesized Probe
  source 1..80: mol_type = other DNA

SEQ ID NO: 56471 - DNA, 80 bp, synthetic construct
  misc_feature 1..80: note = Artificially Synthesized Probe
  source 1..80: mol_type = other DNA
tctcctgtatcagcctcccaagtagctgcaattacaggcatgcaccaccacgcccagctaattcttatatttttagtaga

SEQ ID NO: 56472 - DNA, 80 bp, synthetic construct
  misc_feature 1..80: note = Artificially Synthesized Probe
  source 1..80: mol_type = other DNA
ggctggagtgcagtggcatgatcatggctcactacagtctcaacctcccaggcttgagcgagcctcccacttcagccttc

SEQ ID NO: 56473 - DNA, 80 bp, synthetic construct
  misc_feature 1..80: note = Artificially Synthesized Probe
  source 1..80: mol_type = other DNA
ggtactgcacctgaccaccctcatgtatattcaaaccagaatttaggggtgggtgtggtggctcacacctataattccag

SEQ ID NO: 56474 - DNA, 80 bp, synthetic construct
  misc_feature 1..80: note = Artificially Synthesized Probe
  source 1..80: mol_type = other DNA
atcacttgagcccaggtgtttgaggctgcagtgagctatgattgcaccactgcactccagcctgagtgacagtgtgaggc

SEQ ID NO: 56475 - DNA, 80 bp, synthetic construct; identical to SEQ ID NO: 25603
  misc_feature 1..80: note = Artificially Synthesized Probe
  source 1..80: mol_type = other DNA

SEQ ID NO: 56476 - DNA, 80 bp, synthetic construct; identical to SEQ ID NO: 25516
  misc_feature 1..80: note = Artificially Synthesized Probe
  source 1..80: mol_type = other DNA

SEQ ID NO: 56477 - DNA, 80 bp, synthetic construct
  misc_feature 1..80: note = Artificially Synthesized Probe
  source 1..80: mol_type = other DNA
ggcctgaggatgcctcccccagtccctgcccctcattcacaggtgcccttggaccaagaagtagtagtggccccagaaag

SEQ ID NO: 56478 - DNA, 80 bp, synthetic construct
  misc_feature 1..80: note = Artificially Synthesized Probe
  source 1..80: mol_type = other DNA
aaaaaaaaaaaagcccatctcttgattttctgtatacactggggcttagtctaaacgcatatgtccccatgttcagaggt

SEQ ID NO: 56479 - DNA, 80 bp, synthetic construct
  misc_feature 1..80: note = Artificially Synthesized Probe
  source 1..80: mol_type = other DNA
gcaggtggatcacctgaggtcaggagtttgagaccagcctggccaacatggtgaaaacccgtctctactaaaaatacaaa

SEQ ID NO: 56480 - DNA, 80 bp, synthetic construct; identical to SEQ ID NO: 25604
  misc_feature 1..80: note = Artificially Synthesized Probe
  source 1..80: mol_type = other DNA

SEQ ID NO: 56481 - DNA, 80 bp, synthetic construct
  misc_feature 1..80: note = Artificially Synthesized Probe
  source 1..80: mol_type = other DNA
gtgtgagcctcattactgcatcgtatataaattatgatccaaggggcttagttcattacaactaattgagactcaaatgg

SEQ ID NO: 56482 - DNA, 80 bp, synthetic construct
  misc_feature 1..80: note = Artificially Synthesized Probe
  source 1..80: mol_type = other DNA
cctattggttgtgttttgacttttgtcatagtgatgtgtgccaggctgatttttttttttaataggtcttttcttctttg

SEQ ID NO: 56483 - DNA, 80 bp, synthetic construct; identical to SEQ ID NO: 25605
  misc_feature 1..80: note = Artificially Synthesized Probe
  source 1..80: mol_type = other DNA

SEQ ID NO: 56484 - DNA, 80 bp, synthetic construct
  misc_feature 1..80: note = Artificially Synthesized Probe
  source 1..80: mol_type = other DNA
ggtccccctttgtaggagtagggtgtgcaaactgcaggtgtgcttgctgggctggctggggctggggccaaggggcagag

SEQ ID NO: 56485 - DNA, 80 bp, synthetic construct
  misc_feature 1..80: note = Artificially Synthesized Probe
  source 1..80: mol_type = other DNA
tgggtcacattttggtttgcatcatctgccatttggtaagagtcacctcctgtgtgctgtgagctatgtactcctgcaag

SEQ ID NO: 56486 - DNA, 80 bp, synthetic construct
  misc_feature 1..80: note = Artificially Synthesized Probe
  source 1..80: mol_type = other DNA
tattatttgtttggtttatattttatttttatttatttatttagtttatactttacttttatttatttatttattttaga

SEQ ID NO: 56487 - DNA, 80 bp, synthetic construct
  misc_feature 1..80: note = Artificially Synthesized Probe
  source 1..80: mol_type = other DNA
gcatgcaccaccatgcccagctaatttttgtatttttagtagagacggggtttcaccatgttgaccagggtggtctcgat

SEQ ID NO: 56488 - DNA, 80 bp, synthetic construct
  misc_feature 1..80: note = Artificially Synthesized Probe
  source 1..80: mol_type = other DNA
ggcctccgcctcctgggttcaggcgattctcctgcctcagcctcccaagtagctgggactacaggcacgtgccaccacac

SEQ ID NO: 56489 - DNA, 80 bp, synthetic construct; identical to SEQ ID NO: 25606
  misc_feature 1..80: note = Artificially Synthesized Probe
  source 1..80: mol_type = other DNA

SEQ ID NO: 56490 - DNA, 80 bp, synthetic construct
  misc_feature 1..80: note = Artificially Synthesized Probe
  source 1..80: mol_type = other DNA
tggaggtaccattgtgtatttagctggtttccgataacaatcacagattgtttccagtcttggtcagttacaaagatggt

SEQ ID NO: 56491 - DNA, 80 bp, synthetic construct
  misc_feature 1..80: note = Artificially Synthesized Probe
  source 1..80: mol_type = other DNA
tcccatcaacaaaacgtttgatcagactttgtgatctttgccaatctgaaaggtaaaaggtgtaacttcaactcaccttt

SEQ ID NO: 56492 - DNA, 80 bp, synthetic construct
  misc_feature 1..80: note = Artificially Synthesized Probe
  source 1..80: mol_type = other DNA
tagctgggattacaggcatgcaccaccacgcctggctaatttttgtatttttttttttagtagagacggggtttctccat

SEQ ID NO: 56493 - DNA, 80 bp, synthetic construct; identical to SEQ ID NO: 25607
  misc_feature 1..80: note = Artificially Synthesized Probe
  source 1..80: mol_type = other DNA

SEQ ID NO: 56494 - DNA, 80 bp, synthetic construct
  misc_feature 1..80: note = Artificially Synthesized Probe
  source 1..80: mol_type = other DNA
ctttatgtatgacattgcagacattttccccactttgtcatttgcctttttacttttttcttatggtggtgttggccatg

SEQ ID NO: 56495 - DNA, 80 bp, synthetic construct
  misc_feature 1..80: note = Artificially Synthesized Probe
  source 1..80: mol_type = other DNA
tgagaccctgtctctacaaaaaatacccccctccaaaaattagccaggtatggtggcatgcagctatagtcccagatact

SEQ ID NO: 56496 - DNA, 80 bp, synthetic construct; identical to SEQ ID NO: 25608
  misc_feature 1..80: note = Artificially Synthesized Probe
  source 1..80: mol_type = other DNA

SEQ ID NO: 56497 - DNA, 80 bp, synthetic construct
  misc_feature 1..80: note = Artificially Synthesized Probe
  source 1..80: mol_type = other DNA
ttttgttctattccaatgacttgttattctcttcatgtgccaattctataatgttttaattagtcaagctttgtctatgt

SEQ ID NO: 56498 - DNA, 80 bp, synthetic construct
  misc_feature 1..80: note = Artificially Synthesized Probe
  source 1..80: mol_type = other DNA
gcaaacacttcaatggcatttagcgcagtcaacaatgtagtacacccagcacttctatctggtttccaaaacattctcat

SEQ ID NO: 56499 - DNA, 80 bp, synthetic construct
  misc_feature 1..80: note = Artificially Synthesized Probe
  source 1..80: mol_type = other DNA
aaaaaacgtttaagtaaaaaagttgcgcccagtgagaggaagggcattctaggaacccggcatggcacgtgcaaaagcct

SEQ ID NO: 56500 - DNA, 80 bp, synthetic construct
  misc_feature 1..80: note = Artificially Synthesized Probe
  source 1..80: mol_type = other DNA
catcatcccaaaaggagaacccatacccactagcagtgcttctccatcctcctctccccccagcccatcacaaccactaa

SEQ ID NO: 56501 - DNA, 80 bp, synthetic construct
  misc_feature 1..80: note = Artificially Synthesized Probe
  source 1..80: mol_type = other DNA
ggcagagagaatcacttgaacctgggaggcagaggttgcagtgagccaagatcgcgccactgcactcctgcctgggtgac

SEQ ID NO: 56502 - DNA, 80 bp, synthetic construct; identical to SEQ ID NO: 25609
  misc_feature 1..80: note = Artificially Synthesized Probe
  source 1..80: mol_type = other DNA

SEQ ID NO: 56503 - DNA, 80 bp, synthetic construct
  misc_feature 1..80: note = Artificially Synthesized Probe
  source 1..80: mol_type = other DNA
agtagttgggattaaaggtgtgcgccatcacgcctggctaatttttgtatttttagtagagacagggtttcgcaatgttg

SEQ ID NO: 56504 - DNA, 80 bp, synthetic construct
  misc_feature 1..80: note = Artificially Synthesized Probe
  source 1..80: mol_type = other DNA
tgaggaactgccaaactcttgggtattcttgctcatttttataagtgacttagaatcggcacatctagttccaccaaaat

SEQ ID NO: 56505 - DNA, 80 bp, synthetic construct
  misc_feature 1..80: note = Artificially Synthesized Probe
  source 1..80: mol_type = other DNA
catgcctataatcccaacactttgggaggccgaggtgggtggatcacttgaggtcaaaagttcatgtccagcctggcgga

SEQ ID NO: 56506 - DNA, 80 bp, synthetic construct; identical to SEQ ID NO: 25610
  misc_feature 1..80: note = Artificially Synthesized Probe
  source 1..80: mol_type = other DNA

SEQ ID NO: 56507 - DNA, 80 bp, synthetic construct
  misc_feature 1..80: note = Artificially Synthesized Probe
  source 1..80: mol_type = other DNA
ggtgaggcagcagattttctgccctcctcccggggaggggcggcggccgcggaggatgcttggctgaaccttcagggccc

SEQ ID NO: 56508 - DNA, 80 bp, synthetic construct
  misc_feature 1..80: note = Artificially Synthesized Probe
  source 1..80: mol_type = other DNA
cgtgttggtatttttagtggtattacattccctttataaattaacttgcagaaggtggagatgtttctgggtacttggca

SEQ ID NO: 56509 - DNA, 80 bp, synthetic construct
  misc_feature 1..80: note = Artificially Synthesized Probe
  source 1..80: mol_type = other DNA
gtcttcttttttttttttttttttttttgagacagagtttcgctcttgttgcccaggctggagtgcgatggtgcgatctc

SEQ ID NO: 56510 - DNA, 80 bp, synthetic construct
  misc_feature 1..80: note = Artificially Synthesized Probe
  source 1..80: mol_type = other DNA
cctcaggtgatccacctgccttggcctcccaaaatgctgggattataggcatgagccacctcgcccagcctctttttttt

SEQ ID NO: 56511 - DNA, 80 bp, synthetic construct; identical to SEQ ID NO: 25611
  misc_feature 1..80: note = Artificially Synthesized Probe
  source 1..80: mol_type = other DNA

SEQ ID NO: 56512 - DNA, 80 bp, synthetic construct; identical to SEQ ID NO: 25517
  misc_feature 1..80: note = Artificially Synthesized Probe
  source 1..80: mol_type = other DNA

SEQ ID NO: 56513 - DNA, 80 bp, synthetic construct
  misc_feature 1..80: note = Artificially Synthesized Probe
  source 1..80: mol_type = other DNA
ccatggccctacccactgctgctttggtccaggagcattgatgcttctcgtctctcctctctcccctaggcctgcaggac

SEQ ID NO: 56514 - DNA, 80 bp, synthetic construct
  misc_feature 1..80: note = Artificially Synthesized Probe
  source 1..80: mol_type = other DNA
cgtgccattcagctgccaattaagcatggagtgggtcagggcctggcttagggtcccctccccgactctgctttgagaag

SEQ ID NO: 56515 - DNA, 80 bp, synthetic construct
  misc_feature 1..80: note = Artificially Synthesized Probe
  source 1..80: mol_type = other DNA
atgcacctgtaatcccagctactcgggaggctgaggcaggagaatcgcttgaacctggaaggcagagctgccagtgagcc

SEQ ID NO: 56516 - DNA, 80 bp, synthetic construct; identical to SEQ ID NO: 25612
  misc_feature 1..80: note = Artificially Synthesized Probe
  source 1..80: mol_type = other DNA

SEQ ID NO: 56517 - DNA, 80 bp, synthetic construct
  misc_feature 1..80: note = Artificially Synthesized Probe
  source 1..80: mol_type = other DNA
ctgagtagctgggattacaggcgcacaccaccacacccggctaatttttgtatttttttagtagagatggggtttcgcca

SEQ ID NO: 56518 - DNA, 80 bp, synthetic construct
  misc_feature 1..80: note = Artificially Synthesized Probe
  source 1..80: mol_type = other DNA
ctcggaaatggttgccaacctgtcttctgtccatcccccagtacaaggcagaattggccccaaaaaaggtcagtggacct

SEQ ID NO: 56519 - DNA, 80 bp, synthetic construct; identical to SEQ ID NO: 25613
  misc_feature 1..80: note = Artificially Synthesized Probe
  source 1..80: mol_type = other DNA

SEQ ID NO: 56520 - DNA, 80 bp, synthetic construct
  misc_feature 1..80: note = Artificially Synthesized Probe
  source 1..80: mol_type = other DNA
gggcatggtggctcatgcctgtaatcccagcagtttgggaggccgaagcgggtagatcacctgaggtcaggagtttcaga

SEQ ID NO: 56521 - DNA, 80 bp, synthetic construct
  misc_feature 1..80: note = Artificially Synthesized Probe
  source 1..80: mol_type = other DNA
atggcactccagcctggcagcggagtgagactctatcacacacacacacacaaaaacaattagccaggcatggtggtggg

SEQ ID NO: 56522 - DNA, 80 bp, synthetic construct; identical to SEQ ID NO: 25614
  misc_feature 1..80: note = Artificially Synthesized Probe
  source 1..80: mol_type = other DNA

SEQ ID NO: 56523 - DNA, 80 bp, synthetic construct
  misc_feature 1..80: note = Artificially Synthesized Probe
  source 1..80: mol_type = other DNA
taaataaataaataaataaataaataaataaataaaggccctgccttgaaggcttattagtgactgtcctaatccctggg

SEQ ID NO: 56524 - DNA, 80 bp, synthetic construct
  misc_feature 1..80: note = Artificially Synthesized Probe
  source 1..80: mol_type = other DNA
gtgacagagtgagactttgtctccaaaaaaaaaaaaccgccaggtatgatggtgcactcctgtagtcccagctactcagg

SEQ ID NO: 56525 - DNA, 80 bp, synthetic construct
  misc_feature 1..80: note = Artificially Synthesized Probe
  source 1..80: mol_type = other DNA
tcagcgccctgcccaggtctttgcccttgggtgggacagaagctcacgtgttcccaatcctcttcctcccttccctgccg

SEQ ID NO: 56526 - DNA, 80 bp, synthetic construct
  misc_feature 1..80: note = Artificially Synthesized Probe
  source 1..80: mol_type = other DNA
aaggagcggtgaggcggccgtggggccggctgggtcctccctgtggccctggcccttgctcctcttcttgacattagctc

SEQ ID NO: 56527 - DNA, 80 bp, synthetic construct
  misc_feature 1..80: note = Artificially Synthesized Probe
  source 1..80: mol_type = other DNA
tagtaatcggtttgcatagtggtctttaatgttacagagcttgtcttggggaagataaaatgggacattgtgatcttcaa

SEQ ID NO: 56528 - DNA, 80 bp, synthetic construct
  misc_feature 1..80: note = Artificially Synthesized Probe
  source 1..80: mol_type = other DNA
ttatttttagtttttatttttttgagatggagtttcactcttgtcacccaggctggagtgcaatggcgcgatcttggctc

SEQ ID NO: 56529 - DNA, 80 bp, synthetic construct
  misc_feature 1..80: note = Artificially Synthesized Probe
  source 1..80: mol_type = other DNA
gacctcacgtaaagtgctgggatcacagatgtgagccaccacacccagcctatagtttatatatgtaatttaaatataaa

SEQ ID NO: 56530 - DNA, 80 bp, synthetic construct
  misc_feature 1..80: note = Artificially Synthesized Probe
  source 1..80: mol_type = other DNA
ccaaggcgggcagatcacctgaggtcaagagttagagaccagcctggccaacatggtgaaactccatctctactaaaaat

SEQ ID NO: 56531 - DNA, 80 bp, synthetic construct; identical to SEQ ID NO: 25644
  misc_feature 1..80: note = Artificially Synthesized Probe
  source 1..80: mol_type = other DNA

SEQ ID NO: 56532 - DNA, 80 bp, synthetic construct
  misc_feature 1..80: note = Artificially Synthesized Probe
  source 1..80: mol_type = other DNA
gaggcggaggctgcaatgagcatcactacactccagcctgggcaacagagtgaaaccctgtctcaaaaaaagaaaaaaaa

SEQ ID NO: 56533 - DNA, 80 bp, synthetic construct
  misc_feature 1..80: note = Artificially Synthesized Probe
  source 1..80: mol_type = other DNA
cctgcctgtgattccagctagtcgggaggctgaggcaggagaatcgcttgaacttgggaaggcggaggtttcggtgagcc

SEQ ID NO: 56534 - DNA, 80 bp, synthetic construct
  misc_feature 1..80: note = Artificially Synthesized Probe
  source 1..80: mol_type = other DNA
caacctccacctcccaggttcaagcgattctcctgcctcagcctcccaagtagctgggattacaggtgcctgccaccacg

SEQ ID NO: 56535 - DNA, 80 bp, synthetic construct; identical to SEQ ID NO: 25645
  misc_feature 1..80: note = Artificially Synthesized Probe
  source 1..80: mol_type = other DNA

SEQ ID NO: 56536 - DNA, 80 bp, synthetic construct
  misc_feature 1..80: note = Artificially Synthesized Probe
  source 1..80: mol_type = other DNA
actacgaaattgtgagacattaaaatgtgtgagattcatctgagtcgtatgcaaagggaaatttacagctctaaatgctg

SEQ ID NO: 56537 - DNA, 80 bp, synthetic construct; identical to SEQ ID NO: 25634
  misc_feature 1..80: note = Artificially Synthesized Probe
  source 1..80: mol_type = other DNA

SEQ ID NO: 56538 - DNA, 80 bp, synthetic construct
  misc_feature 1..80: note = Artificially Synthesized Probe
  source 1..80: mol_type = other DNA
tactaaaaatacaaaaaaaaaaaaaaaaaaaattagcccgcatgatggctggtgcctataatcccagctacttgggaggc

SEQ ID NO: 56539 - DNA, 80 bp, synthetic construct
  misc_feature 1..80: note = Artificially Synthesized Probe
  source 1..80: mol_type = other DNA
aacgctcatactacaagataaaaaagcctcatgagctcatcatgcaactcatgaaattagaagaagggccatggcataca

SEQ ID NO: 56540 - DNA, 80 bp, synthetic construct; identical to SEQ ID NO: 25646
  misc_feature 1..80: note = Artificially Synthesized Probe
  source 1..80: mol_type = other DNA

SEQ ID NO: 56541 - DNA, 80 bp, synthetic construct
  misc_feature 1..80: note = Artificially Synthesized Probe
  source 1..80: mol_type = other DNA
agaactctcattgcgatgggggtgtaagttgacacagacactttgaagagcagcttggcaaaatctggtgaagttgacga

SEQ ID NO: 56542 - DNA, 80 bp, synthetic construct
  misc_feature 1..80: note = Artificially Synthesized Probe
  source 1..80: mol_type = other DNA
atcaactggaaaatggataaataagttgtaatacagccatacgaaggaataccacaaagtggtgaaaacgtgccaacaat

SEQ ID NO: 56543 - DNA, 80 bp, synthetic construct
  misc_feature 1..80: note = Artificially Synthesized Probe
  source 1..80: mol_type = other DNA
ccaggcatggtggtgtgcgcctgtagtcccacctacttgggaggctgaggcaggagaatcgcttgaacccgggaggcgga

SEQ ID NO: 56544 - DNA, 80 bp, synthetic construct; identical to SEQ ID NO: 25647
  misc_feature 1..80: note = Artificially Synthesized Probe
  source 1..80: mol_type = other DNA

SEQ ID NO: 56545 - DNA, 80 bp, synthetic construct
  misc_feature 1..80: note = Artificially Synthesized Probe
  source 1..80: mol_type = other DNA
aactctgcctcccgagttaaagcgattcttgtgcctcagcctcccgagtagctgggattacaggcacctgccaccatgcc

SEQ ID NO: 56546 - DNA, 80 bp, synthetic construct
  misc_feature 1..80: note = Artificially Synthesized Probe
  source 1..80: mol_type = other DNA
ggttcaaccgattctcatgcctcagcctcccaagtagctgggattacaggcacacaccaccacacctagctaatttttgt

SEQ ID NO: 56547 - DNA, 80 bp, synthetic construct; identical to SEQ ID NO: 25648
  misc_feature 1..80: note = Artificially Synthesized Probe
  source 1..80: mol_type = other DNA

SEQ ID NO: 56548 - DNA, 80 bp, synthetic construct
  misc_feature 1..80: note = Artificially Synthesized Probe
  source 1..80: mol_type = other DNA
gcccaggctggagtgcagtggcatgatctcaactcactgcaacctccaccttccgagttcaagcggttctccggcctcag

SEQ ID NO: 56549 - DNA, 80 bp, synthetic construct
  misc_feature 1..80: note = Artificially Synthesized Probe
  source 1..80: mol_type = other DNA
ccatctctactaaaaatacaaaaattagctgagtgtggtggcgggtgcctgtagtcccagctatttgggaggctgaggca

SEQ ID NO: 56550 - DNA, 80 bp, synthetic construct
  misc_feature 1..80: note = Artificially Synthesized Probe
  source 1..80: mol_type = other DNA
atgagccaccatgcccggcctcaaaaactattaactgaggctgggtacagtggctcacaccagtaatcacggagttctgg

SEQ ID NO: 56551 - DNA, 80 bp, synthetic construct
  misc_feature 1..80: note = Artificially Synthesized Probe
  source 1..80: mol_type = other DNA
aaagctattaattaatgaaatgcacttggatggaaaggggctgtcttgaatactgtagaccccaagtatgagtgtgaggg

SEQ ID NO: 56552 - DNA, 80 bp, synthetic construct; identical to SEQ ID NO: 25649
  misc_feature 1..80: note = Artificially Synthesized Probe
  source 1..80: mol_type = other DNA

SEQ ID NO: 56553 - DNA, 80 bp, synthetic construct
  misc_feature 1..80: note = Artificially Synthesized Probe
  source 1..80: mol_type = other DNA
cccagctactcaggaagctgaggcaggagaatcacttgaacccaggaggcggaggttgcagtgagctgagattgcgccac

SEQ ID NO: 56554 - DNA, 80 bp, synthetic construct
  misc_feature 1..80: note = Artificially Synthesized Probe
  source 1..80: mol_type = other DNA
caacatggtgaaacaccgtctctactaaaaatacaaaaattagctgggtgtggtggcgcacacctgtaatcccagctaac

SEQ ID NO: 56555 - DNA, 80 bp, synthetic construct
  misc_feature 1..80: note = Artificially Synthesized Probe
  source 1..80: mol_type = other DNA
aaatgtcagttcttattacaacccaacgactttaaaatttttaagaggataggtgcttcttgcaatctgcataacccctg

SEQ ID NO: 56556 - DNA, 80 bp, synthetic construct; identical to SEQ ID NO: 25650
  misc_feature 1..80: note = Artificially Synthesized Probe
  source 1..80: mol_type = other DNA

SEQ ID NO: 56557 - DNA, 80 bp, synthetic construct
  misc_feature 1..80: note = Artificially Synthesized Probe
  source 1..80: mol_type = other DNA
attgaaaaacctctcttctaatccaacgccatcattttgccatccagaaaacagtccaagaatggggatataatttgcct

SEQ ID NO: 56558 - DNA, 80 bp, synthetic construct
  misc_feature 1..80: note = Artificially Synthesized Probe
  source 1..80: mol_type = other DNA
cctttgcggtttttttgttttttttgttttttatttttgtttttgaggcagagtcttgctctgttgcccaggctagagtg

SEQ ID NO: 56559 - DNA, 80 bp, synthetic construct
  misc_feature 1..80: note = Artificially Synthesized Probe
  source 1..80: mol_type = other DNA
ggtaacctttgttgagtgttgtcaaggtcacacctgagctcagacagaaaaaggtgccagctcacctctccaccctggtc

SEQ ID NO: 56560 - DNA, 80 bp, synthetic construct
  misc_feature 1..80: note = Artificially Synthesized Probe
  source 1..80: mol_type = other DNA
agaggtaggagtgatgtttccacaagccaaggaatgacagggactgccagaagttgaaagagtcaaggaataattctccc

SEQ ID NO: 56561 - DNA, 80 bp, synthetic construct
  misc_feature 1..80: note = Artificially Synthesized Probe
  source 1..80: mol_type = other DNA
ccttggaaaacaaccccttccagtcaggaaatggctcaccccatgtagaattcagcctagaagagggatgctggggctga

SEQ ID NO: 56562 - DNA, 80 bp, synthetic construct; identical to SEQ ID NO: 25651
  misc_feature 1..80: note = Artificially Synthesized Probe
  source 1..80: mol_type = other DNA

SEQ ID NO: 56563 - DNA, 80 bp, synthetic construct
  misc_feature 1..80: note = Artificially Synthesized Probe
  source 1..80: mol_type = other DNA
cccccgaagttaaagttaaaaaaaaaaaattaaccgtctgtcccaagaaacattaaccatatctaccctccacatatttt

SEQ ID NO: 56564 - DNA, 80 bp, synthetic construct
  misc_feature 1..80: note = Artificially Synthesized Probe
  source 1..80: mol_type = other DNA
tcacataatgcccacctcaaaatgcttaaaggggactcgttttctttgtcctgggctcagactttcaggacacatgtcca

SEQ ID NO: 56565 - DNA, 80 bp, synthetic construct; identical to SEQ ID NO: 25652
  misc_feature 1..80: note = Artificially Synthesized Probe
  source 1..80: mol_type = other DNA

SEQ ID NO: 56566 - DNA, 80 bp, synthetic construct
  misc_feature 1..80: note = Artificially Synthesized Probe
  source 1..80: mol_type = other DNA
tctgaatattaagaatcaccgatgcatgcaaaaacattttgtgacctgatgctgtacagatgtaagagtaaaagagaagc

SEQ ID NO: 56567 - DNA, 80 bp, synthetic construct
  misc_feature 1..80: note = Artificially Synthesized Probe
  source 1..80: mol_type = other DNA
gtctactaaaaatacaaaaattagccaggagtgggggcaggtgcctgtaatcccagctattcgggaggctgaagtacgag

SEQ ID NO: 56568 - DNA, 80 bp, synthetic construct
  misc_feature 1..80: note = Artificially Synthesized Probe
  source 1..80: mol_type = other DNA
aaagaaaaaagtgaaccaccatgaccaagtcctttcttcacctaacaaaaataccactgttcagaaaccatatggcactt

SEQ ID NO: 56569 - DNA, 80 bp, synthetic construct
  misc_feature 1..80: note = Artificially Synthesized Probe
  source 1..80: mol_type = other DNA
aaacttgggacctgagaacctgctcagaaaaggtgtgcctgggggtttttctaacctgaagtgaaagcgtgaagtgaaag

SEQ ID NO: 56570 - DNA, 80 bp, synthetic construct; identical to SEQ ID NO: 25653
  misc_feature 1..80: note = Artificially Synthesized Probe
  source 1..80: mol_type = other DNA

SEQ ID NO: 56571 - DNA, 80 bp, synthetic construct
  misc_feature 1..80: note = Artificially Synthesized Probe
  source 1..80: mol_type = other DNA
tctcatcttcaaagcagttggattgatggaggtgattcccaaggtctcctcgaggaaacttagcatgttggatcacaatg

SEQ ID NO: 56572 - DNA, 80 bp, synthetic construct
  misc_feature 1..80: note = Artificially Synthesized Probe
  source 1..80: mol_type = other DNA
aatctacgatgagttaactttgcagcaatctgatgctacagatagctaatattatccctaatgagcaataatcaagcaga

SEQ ID NO: 56573 - DNA, 80 bp, synthetic construct
  misc_feature 1..80: note = Artificially Synthesized Probe
  source 1..80: mol_type = other DNA
gatacaagtttaccaaattcatgtcactgtacctggtttacagtaggtatctaatcaaaggcaggagatgcttaatagag

SEQ ID NO: 56574 - DNA, 80 bp, synthetic construct
  misc_feature 1..80: note = Artificially Synthesized Probe
  source 1..80: mol_type = other DNA
ggcatggtgcatgtatgtagtcccagctactggggagactgaggcaggagaatcacttgagcccaggaagtcacggctgc

SEQ ID NO: 56575 - DNA, 80 bp, synthetic construct; identical to SEQ ID NO: 25654
  misc_feature 1..80: note = Artificially Synthesized Probe
  source 1..80: mol_type = other DNA

SEQ ID NO: 56576 - DNA, 80 bp, synthetic construct
  misc_feature 1..80: note = Artificially Synthesized Probe
  source 1..80: mol_type = other DNA
acatggtgaaaccccatctctactaaaaatacaaaattagccgggcgtggtggtgcactcttgtaatcccagctactcgg

SEQ ID NO: 56577 - DNA, 80 bp, synthetic construct
  misc_feature 1..80: note = Artificially Synthesized Probe
  source 1..80: mol_type = other DNA
ggctgggcccctgctgcagtgttcagccatggggctttccttccacgtttcttctcttagtccccctctggtcttcttct

SEQ ID NO: 56578 - DNA, 80 bp, synthetic construct
  misc_feature 1..80: note = Artificially Synthesized Probe
  source 1..80: mol_type = other DNA
acccaagtagctgggattataggcgtgagccaccacacctggataattttttgtatttttagtggacacatggtttcacc

SEQ ID NO: 56579 - DNA, 80 bp, synthetic construct; identical to SEQ ID NO: 25655
  misc_feature 1..80: note = Artificially Synthesized Probe
  source 1..80: mol_type = other DNA

SEQ ID NO: 56580 - DNA, 80 bp, synthetic construct
  misc_feature 1..80: note = Artificially Synthesized Probe
  source 1..80: mol_type = other DNA
cctgagttcaggagttcgagaccagcctggccaacatggtgaaaccccacctctactaaaaatacaaaaattggccaagt

SEQ ID NO: 56581 - DNA, 80 bp, synthetic construct
  misc_feature 1..80: note = Artificially Synthesized Probe
  source 1..80: mol_type = other DNA
cccaaatcttacctctttttataactactttgatagcaaaacccacctcctccaagaagcattctctggtctccctttat

SEQ ID NO: 56582 - DNA, 80 bp, synthetic construct; identical to SEQ ID NO: 25656
  misc_feature 1..80: note = Artificially Synthesized Probe
  source 1..80: mol_type = other DNA

SEQ ID NO: 56583 - DNA, 80 bp, synthetic construct
  misc_feature 1..80: note = Artificially Synthesized Probe
  source 1..80: mol_type = other DNA
ctcaccctagtgttcctggcccggagaaccagacttgcagaaagaggttggaaccacaagcagcagccctgaagcagagt

SEQ ID NO: 56584 - DNA, 80 bp, synthetic construct
  misc_feature 1..80: note = Artificially Synthesized Probe
  source 1..80: mol_type = other DNA
agaccttcttattaggttgttgggaaacatgaagtgaaataaggcatttaaaaacacttagccccctgcctggcacatag

SEQ ID NO: 56585 - DNA, 80 bp, synthetic construct
  misc_feature 1..80: note = Artificially Synthesized Probe
  source 1..80: mol_type = other DNA
gatataaggcaaaatatggaagctttcctagaggagagatgaaaagggctggcaaaggagttgtttcctgagtcaattcc

SEQ ID NO: 56586 - DNA, 80 bp, synthetic construct
  misc_feature 1..80: note = Artificially Synthesized Probe
  source 1..80: mol_type = other DNA
gctgccagcaagcccagagctcaatgcagtgtggaagtgcagtcacagggccattcaaggtcggttcttgatttatttat

SEQ ID NO: 56587 - DNA, 80 bp, synthetic construct
  misc_feature 1..80: note = Artificially Synthesized Probe
  source 1..80: mol_type = other DNA
gaggtcaggagttagaaaccagcctggccaacatggtgaaaccctgtctctactaaaactacaaaaattagccaggagta

SEQ ID NO: 56588 - DNA, 80 bp, synthetic construct; identical to SEQ ID NO: 25657
  misc_feature 1..80: note = Artificially Synthesized Probe
  source 1..80: mol_type = other DNA

SEQ ID NO: 56589 - DNA, 80 bp, synthetic construct
  misc_feature 1..80: note = Artificially Synthesized Probe
  source 1..80: mol_type = other DNA
cagagcagagctaaatgatgtctgaggcctctttccactttagtcaaggttaagtgccaaggctttagaaggaaacatca

SEQ ID NO: 56590 - DNA, 80 bp, synthetic construct
  misc_feature 1..80: note = Artificially Synthesized Probe
  source 1..80: mol_type = other DNA
gattggttgcctgattgaactatcaagagtgttggatgtggtggaaagaaaacagtcctgagttcggaatctcaggtgct

SEQ ID NO: 56591 - DNA, 80 bp, synthetic construct; identical to SEQ ID NO: 25658
  misc_feature 1..80: note = Artificially Synthesized Probe
  source 1..80: mol_type = other DNA

SEQ ID NO: 56592 - DNA, 80 bp, synthetic construct
  misc_feature 1..80: note = Artificially Synthesized Probe
  source 1..80: mol_type = other DNA
tagagaccagcccgggtaacatgaaactccatctctacaaaaaatacaaaaattagctgggcatggtgttgtgtgcctgt

SEQ ID NO: 56593 - DNA, 80 bp, synthetic construct
  misc_feature 1..80: note = Artificially Synthesized Probe
  source 1..80: mol_type = other DNA
aattaaaaaaaaaaaaagggactgggcacagtggctcatgcctgtaatcccaatactttgggaggccgaggtgggtggat

SEQ ID NO: 56594 - DNA, 80 bp, synthetic construct; identical to SEQ ID NO: 25635
  misc_feature 1..80: note = Artificially Synthesized Probe
  source 1..80: mol_type = other DNA

SEQ ID NO: 56595 - DNA, 80 bp, synthetic construct
  misc_feature 1..80: note = Artificially Synthesized Probe
  source 1..80: mol_type = other DNA
gcactgagctgagatcatgccattgcactgcagcctgggcaacaaaagtgaaactctgtctcaaaaaaaaaaaatttttt

SEQ ID NO: 56596 - DNA, 80 bp, synthetic construct
  misc_feature 1..80: note = Artificially Synthesized Probe
  source 1..80: mol_type = other DNA
ccatttcctcaaccaaacaacaagggcagttctcagtgatatctaggtcccttttgcacccttgttctcctccctcataa

SEQ ID NO: 56597 - DNA, 80 bp, synthetic construct
  misc_feature 1..80: note = Artificially Synthesized Probe
  source 1..80: mol_type = other DNA
gagaccagcctggccaacaccgtgaaaccccatctgtattataaataataataataaaaaaatcagccaggcaggagaat

SEQ ID NO: 56598 - DNA, 80 bp, synthetic construct; identical to SEQ ID NO: 25659
  misc_feature 1..80: note = Artificially Synthesized Probe
  source 1..80: mol_type = other DNA

SEQ ID NO: 56599 - DNA, 80 bp, synthetic construct
  misc_feature 1..80: note = Artificially Synthesized Probe
  source 1..80: mol_type = other DNA
ggcatggtggcgtgtgcctataatcccagctacttggaggctgaggcaggagaatcgcttgaacccaggaggtggaggtt

SEQ ID NO: 56600 - DNA, 80 bp, synthetic construct
  misc_feature 1..80: note = Artificially Synthesized Probe
  source 1..80: mol_type = other DNA
gagaatggactaataatgcttacattcataacatacttgacaatttacacagcctgggaaggctcacggctattatgtga

SEQ ID NO: 56601 - DNA, 80 bp, synthetic construct
  misc_feature 1..80: note = Artificially Synthesized Probe
  source 1..80: mol_type = other DNA
gcagtggcgtgatctcagctcactgcaacctccaaatcccgggttcaagagattctcctccctcagcctcccgagtagct

SEQ ID NO: 56602 - DNA, 80 bp, synthetic construct; identical to SEQ ID NO: 25660
  misc_feature 1..80: note = Artificially Synthesized Probe
  source 1..80: mol_type = other DNA

SEQ ID NO: 56603 - DNA, 80 bp, synthetic construct
  misc_feature 1..80: note = Artificially Synthesized Probe
  source 1..80: mol_type = other DNA
tttttgtagagatggggtctcactatatcacccaggcttgtctcaaactcctggccttaagtgatcctcccgccttggtc

SEQ ID NO: 56604 - DNA, 80 bp, synthetic construct
  misc_feature 1..80: note = Artificially Synthesized Probe
  source 1..80: mol_type = other DNA
ccaatatctttcattttattccatttgaggtcccaaataattgcattagaattcctctgcaatcttcctgccgccaacaa

SEQ ID NO: 56605 - DNA, 80 bp, synthetic construct
  misc_feature 1..80: note = Artificially Synthesized Probe
  source 1..80: mol_type = other DNA
cgatcttggctctgccaagtactattagctttttgttctcaagtaaagacactcacttcattcatctctttcattcagtt

SEQ ID NO: 56606 - DNA, 80 bp, synthetic construct; identical to SEQ ID NO: 25661
  misc_feature 1..80: note = Artificially Synthesized Probe
  source 1..80: mol_type = other DNA

SEQ ID NO: 56607 - DNA, 80 bp, synthetic construct
  misc_feature 1..80: note = Artificially Synthesized Probe
  source 1..80: mol_type = other DNA
tgtctccactcaagacttttagagatgaaagaacaggaagctgagattgtgccagggagcacctgctagcttgccgtcat

SEQ ID NO: 56608 - DNA, 80 bp, synthetic construct
  misc_feature 1..80: note = Artificially Synthesized Probe
  source 1..80: mol_type = other DNA
ctaggctggaggctggaatacagtggcgagatctcagctcactgcagctgcctccttccagcttcaagcaattttcctgc

SEQ ID NO: 56609 - DNA, 80 bp, synthetic construct
  misc_feature 1..80: note = Artificially Synthesized Probe
  source 1..80: mol_type = other DNA
ccactgcaccctgccaggagtggttttttgatgagatctcaaaaggtccttcaaacatggcagttatgcaattaatcaca

SEQ ID NO: 56610 - DNA, 80 bp, synthetic construct; identical to SEQ ID NO: 25662
  misc_feature 1..80: note = Artificially Synthesized Probe
  source 1..80: mol_type = other DNA

SEQ ID NO: 56611 - DNA, 80 bp, synthetic construct
  misc_feature 1..80: note = Artificially Synthesized Probe
  source 1..80: mol_type = other DNA
ttagtagagacagggtttcactatgttggccaggctggtcttgaactcctgaccttgtgatccacccgccttagcctccc

SEQ ID NO: 56612 - DNA, 80 bp, synthetic construct
  misc_feature 1..80: note = Artificially Synthesized Probe
  source 1..80: mol_type = other DNA
tgttgtggtttaactatgtgaagaaaataaatttgccactctctcctgagtgcttcctttgtggcaggcactgtgaaagg

SEQ ID NO: 56613 - DNA, 80 bp, synthetic construct
  misc_feature 1..80: note = Artificially Synthesized Probe
  source 1..80: mol_type = other DNA
gggttcacgccattctcctgcctcagcctcccaagtagctgggactacaggcacccgccaccatgcctagctattttttt

SEQ ID NO: 56614 - DNA, 80 bp, synthetic construct
  misc_feature 1..80: note = Artificially Synthesized Probe
  source 1..80: mol_type = other DNA
ggctggagtgcagtggtgcaatctcggctcactgcaacctctgcctccagggttcaagcaattctcctgtctcagcctcc

SEQ ID NO: 56615 - DNA, 80 bp, synthetic construct; identical to SEQ ID NO: 25663
  misc_feature 1..80: note = Artificially Synthesized Probe
  source 1..80: mol_type = other DNA

SEQ ID NO: 56616 - DNA, 80 bp, synthetic construct
  misc_feature 1..80: note = Artificially Synthesized Probe
  source 1..80: mol_type = other DNA
caaagtgctgggattcaggcttgagccaccacgcctggccaatttttttttttttttttttttttttttttgagacaaag

SEQ ID NO: 56617 - DNA, 80 bp, synthetic construct
  misc_feature 1..80: note = Artificially Synthesized Probe
  source 1..80: mol_type = other DNA
acggggtttcaccatgttggccaggctggtctccaactcctgacctcaggtgatccaaccacctccacctaccaaagtgc

SEQ ID NO: 56618 - DNA, 80 bp, synthetic construct
  misc_feature 1..80: note = Artificially Synthesized Probe
  source 1..80: mol_type = other DNA
aatgttaccacaaagaaatgcgctgtctcctttatcctccaaactgcccttggagatagactgtctcattttcacgatct

SEQ ID NO: 56619 - DNA, 80 bp, synthetic construct
  misc_feature 1..80: note = Artificially Synthesized Probe
  source 1..80: mol_type = other DNA
gcagcctagatgtgaaaccacctttgcaaaattatgactgagactgtgaaagagatctaacttaactgactccatcttgc

SEQ ID NO: 56620 - DNA, 80 bp, synthetic construct; identical to SEQ ID NO: 25664
  misc_feature 1..80: note = Artificially Synthesized Probe
  source 1..80: mol_type = other DNA

SEQ ID NO: 56621 - DNA, 80 bp, synthetic construct
  misc_feature 1..80: note = Artificially Synthesized Probe
  source 1..80: mol_type = other DNA
agaagaatcacttgaacctggaaggtggagggtgcagtgagctgagattgcgtcactgcactccagcctgggcgacagag

SEQ ID NO: 56622 - DNA, 80 bp, synthetic construct
  misc_feature 1..80: note = Artificially Synthesized Probe
  source 1..80: mol_type = other DNA
agaaagaaagaaaggaaagaaagaaagaaaagaaagaaagaaaggaaggaaggtttaggagtcatgcagctggaggctac

SEQ ID NO: 56623 - DNA, 80 bp, synthetic construct
  misc_feature 1..80: note = Artificially Synthesized Probe
  source 1..80: mol_type = other DNA
cgaccccctgtgatttcatccctggccaatcagcactcctggctcactggctccccgcaaccaaacaaactgtccttaaa

SEQ ID NO: 56624 - DNA, 80 bp, synthetic construct; identical to SEQ ID NO: 25665
  misc_feature 1..80: note = Artificially Synthesized Probe
  source 1..80: mol_type = other DNA

SEQ ID NO: 56625 - DNA, 80 bp, synthetic construct
  misc_feature 1..80: note = Artificially Synthesized Probe
  source 1..80: mol_type = other DNA
gctaccatgcctggcccctgagatctttaaaatcatggagctatattctagctggggtcaatagactgaaatgtcagccc

SEQ ID NO: 56626 - DNA, 80 bp, synthetic construct
  misc_feature 1..80: note = Artificially Synthesized Probe
  source 1..80: mol_type = other DNA
atttttagtagaaatggggtttctccatgttgatcaggctggtcttgaactcccaacctcaggtgaaccgcccgccttgg

SEQ ID NO: 56627 - DNA, 80 bp, synthetic construct
  misc_feature 1..80: note = Artificially Synthesized Probe
  source 1..80: mol_type = other DNA
tttgagtaataggacactagaatggtcgctccaagggagttaaggcttattatttgttttgttcactcccgtatcttaag

SEQ ID NO: 56628 - DNA, 80 bp, synthetic construct
  misc_feature 1..80: note = Artificially Synthesized Probe
  source 1..80: mol_type = other DNA
tattttaagtgactttttgccgattttagatttgaagggaaggtctacagttaagcttggaaccacttagtatccaagag

SEQ ID NO: 56629 - DNA, 80 bp, synthetic construct; identical to SEQ ID NO: 25666
  misc_feature 1..80: note = Artificially Synthesized Probe
  source 1..80: mol_type = other DNA

SEQ ID NO: 56630 - DNA, 80 bp, synthetic construct
  misc_feature 1..80: note = Artificially Synthesized Probe
  source 1..80: mol_type = other DNA
cctttctgcactgcacttgcgtcatcccctcctgcccaaagtagctgaggttgctgccgtccagaacagcactggccatg

SEQ ID NO: 56631 - DNA, 80 bp, synthetic construct
  misc_feature 1..80: note = Artificially Synthesized Probe
  source 1..80: mol_type = other DNA
tcaatcttcacgctgtactcagccttcccagagctggacccacacaggcctagccccgcaataaatacccttctgtccac

SEQ ID NO: 56632 - DNA, 80 bp, synthetic construct; identical to SEQ ID NO: 25667
  misc_feature 1..80: note = Artificially Synthesized Probe
  source 1..80: mol_type = other DNA

SEQ ID NO: 56633 - DNA, 80 bp, synthetic construct
  misc_feature 1..80: note = Artificially Synthesized Probe
  source 1..80: mol_type = other DNA
caacgtctgccggtccatctcacagaagccttgggaccgcagggccatctcggcctgtgcgtcgatgacctcccagcagc

SEQ ID NO: 56634 - DNA, 80 bp, synthetic construct
  misc_feature 1..80: note = Artificially Synthesized Probe
  source 1..80: mol_type = other DNA
ttccagatcgatctcatcactgtacacgtactttaataggatcagaaaggctgcgggctccacgtctggaatgtgaattt

SEQ ID NO: 56635 - DNA, 80 bp, synthetic construct; identical to SEQ ID NO: 25636
  misc_feature 1..80: note = Artificially Synthesized Probe
  source 1..80: mol_type = other DNA

SEQ ID NO: 56636 - DNA, 80 bp, synthetic construct
  misc_feature 1..80: note = Artificially Synthesized Probe
  source 1..80: mol_type = other DNA
cctctcgcgcagcgtgggggaccgcgccatttggggctctccgggtggttgttgccaagtgtgggctgcgcgggcgcggg

SEQ ID NO: 56637 - DNA, 80 bp, synthetic construct
  misc_feature 1..80: note = Artificially Synthesized Probe
  source 1..80: mol_type = other DNA
ccccgccccgcgccctcgcgccgcgccggggcctcgggagcggctctgcaagcaaaagcagggaggtcgggcgctgagcg

SEQ ID NO: 56638 - DNA, 80 bp, synthetic construct; identical to SEQ ID NO: 25668
  misc_feature 1..80: note = Artificially Synthesized Probe
  source 1..80: mol_type = other DNA

SEQ ID NO: 56639 - DNA, 80 bp, synthetic construct
  misc_feature 1..80: note = Artificially Synthesized Probe
  source 1..80: mol_type = other DNA
ccccgcctctacaaataaaaaaaaattagccaggggtagtggttcatgcctgtggtcccaggcacttgggaggctgaggt

SEQ ID NO: 56640 - DNA, 80 bp, synthetic construct
  misc_feature 1..80: note = Artificially Synthesized Probe
  source 1..80: mol_type = other DNA
ctttttaacgtgcgtcagtaagaagggcatgcctaggttaacatatcaaaagtgctcctcatagtatctgtgaaacagcc

SEQ ID NO: 56641 - DNA, 80 bp, synthetic construct
  misc_feature 1..80: note = Artificially Synthesized Probe
  source 1..80: mol_type = other DNA
acggaggcgcaaagatgcagtgacttgtctgaggttgcacaaaagggcagagcccgatgtgaacccaaacctgtgcccag

SEQ ID NO: 56642 - DNA, 80 bp, synthetic construct; identical to SEQ ID NO: 25669
  misc_feature 1..80: note = Artificially Synthesized Probe
  source 1..80: mol_type = other DNA

SEQ ID NO: 56643 - DNA, 80 bp, synthetic construct
  misc_feature 1..80: note = Artificially Synthesized Probe
  source 1..80: mol_type = other DNA
cctgccaccatgcccagccaatttttttgtatttttattagagacaaggcttcaccatgttggccaggctggtctcgaac

SEQ ID NO: 56644 - DNA, 80 bp, synthetic construct
  misc_feature 1..80: note = Artificially Synthesized Probe
  source 1..80: mol_type = other DNA
atattacagcataaatgactgataagcatgtgtggatctctttcaccctgagggtagcctgttactgtgaaatctgtcag

SEQ ID NO: 56645 - DNA, 80 bp, synthetic construct
  misc_feature 1..80: note = Artificially Synthesized Probe
  source 1..80: mol_type = other DNA
cctgatgatgaggacttttcatggtggcttctctctaaagcaggagtaagacagggttaaccacgtggtgaacattctga

SEQ ID NO: 56646 - DNA, 80 bp, synthetic construct
  misc_feature 1..80: note = Artificially Synthesized Probe
  source 1..80: mol_type = other DNA
tgccccaaactgaaggcttgtcatttatctctgaaagaggcaagtcaacaccttaatcctcatcatagcatagtcctcgg

SEQ ID NO: 56647 - DNA, 80 bp, synthetic construct; identical to SEQ ID NO: 25670
  misc_feature 1..80: note = Artificially Synthesized Probe
  source 1..80: mol_type = other DNA

SEQ ID NO: 56648 - DNA, 80 bp, synthetic construct
  misc_feature 1..80: note = Artificially Synthesized Probe
  source 1..80: mol_type = other DNA
aatcgattctcttgcctcagcttcccaagtagctgggattacaggtacccgacaccacgccagctagcttttgtattttt

SEQ ID NO: 56649 - DNA, 80 bp, synthetic construct
  misc_feature 1..80: note = Artificially Synthesized Probe
  source 1..80: mol_type = other DNA
ttatatattctacacaacaaatccatgatgggggactagtatcactcctgttctgtagttggggaaaccagcatcagcag

SEQ ID NO: 56650 - DNA, 80 bp, synthetic construct
  misc_feature 1..80: note = Artificially Synthesized Probe
  source 1..80: mol_type = other DNA
tggggagctgatcctcctgtaagttccttctacctctctctaatagaattaattaaggtgcatttgtgcatctgttggct

SEQ ID NO: 56651 - DNA, 80 bp, synthetic construct; identical to SEQ ID NO: 25671
  misc_feature 1..80: note = Artificially Synthesized Probe
  source 1..80: mol_type = other DNA

SEQ ID NO: 56652 - DNA, 80 bp, synthetic construct
  misc_feature 1..80: note = Artificially Synthesized Probe
  source 1..80: mol_type = other DNA
gactccaggcccacaccactgtacccacctcctgccccttattaaagctgtgttctctcgtgcaaattacgtcgtctcct

SEQ ID NO: 56653 - DNA, 80 bp, synthetic construct
  misc_feature 1..80: note = Artificially Synthesized Probe
  source 1..80: mol_type = other DNA
aaaaggaagtgattttaaataaaatgtactatttacaataagtgtattgtttaaaatttttctctaactttttttttttg

SEQ ID NO: 56654 - DNA, 80 bp, synthetic construct
  misc_feature 1..80: note = Artificially Synthesized Probe
  source 1..80: mol_type = other DNA
ccaattcatacttcttaaaagtaattttatgtttgctatatgataagataaaataggtttcatttagctgggagtggtgg

SEQ ID NO: 56655 - DNA, 80 bp, synthetic construct; identical to SEQ ID NO: 25672
  misc_feature 1..80: note = Artificially Synthesized Probe
  source 1..80: mol_type = other DNA

SEQ ID NO: 56656 - DNA, 80 bp, synthetic construct
  misc_feature 1..80: note = Artificially Synthesized Probe
  source 1..80: mol_type = other DNA
caaggtgggcggatcacctgaggtcaggaattcgggaccagcctggccaacatggtgaaaccctatctctactaaaaata

SEQ ID NO: 56657 - DNA, 80 bp, synthetic construct
  misc_feature 1..80: note = Artificially Synthesized Probe
  source 1..80: mol_type = other DNA
tcattgctgggcctggaggctcgctttggctcctgtggtctctggaggatgcaggcatgaagcctgacctgacttgtact

SEQ ID NO: 56658 - DNA, 80 bp, synthetic construct
  misc_feature 1..80: note = Artificially Synthesized Probe
  source 1..80: mol_type = other DNA
ccttgtctcaaaaaaaaaaaaaaaaaacaagagaaaaaagaagaatcttgaagcaaatctgcagaggagttaacaccatc

SEQ ID NO: 56659 - DNA, 80 bp, synthetic construct
  misc_feature 1..80: note = Artificially Synthesized Probe
  source 1..80: mol_type = other DNA
gccaccacacctggctaatttttgtattttttaagtagagatgaggtttcaccatgttggccaggctggtctcaaactcc

SEQ ID NO: 56660 - DNA, 80 bp, synthetic construct; identical to SEQ ID NO: 25673
  misc_feature 1..80: note = Artificially Synthesized Probe
  source 1..80: mol_type = other DNA

SEQ ID NO: 56661 - DNA, 80 bp, synthetic construct
  misc_feature 1..80: note = Artificially Synthesized Probe
  source 1..80: mol_type = other DNA
aagcaattctcctgcctcagcctcctgagtagctgggattacaggcacatgccactatgcccggctaatttttgtatttt

SEQ ID NO: 56662 - DNA, 80 bp, synthetic construct
  misc_feature 1..80: note = Artificially Synthesized Probe
  source 1..80: mol_type = other DNA
actatcgctttttaaatatttattttatttttgagatagggatcttgctctgtcacccaggctagagtgcagtagcacaa

SEQ ID NO: 56663 - DNA, 80 bp, synthetic construct
  misc_feature 1..80: note = Artificially Synthesized Probe
  source 1..80: mol_type = other DNA
catcaagaccttctaatgatgtgaaccttctggaacatctccctccctagtgggaaaagctggtagaaagtagtgggaag

SEQ ID NO: 56664 - DNA, 80 bp, synthetic construct; identical to SEQ ID NO: 25674
  misc_feature 1..80: note = Artificially Synthesized Probe
  source 1..80: mol_type = other DNA

SEQ ID NO: 56665 - DNA, 80 bp, synthetic construct
  misc_feature 1..80: note = Artificially Synthesized Probe
  source 1..80: mol_type = other DNA
gcctttgactcactgtatgagcaggagatcagagacctcctctctgggcagtggaagcaggtgggggaggggaggagaag

SEQ ID NO: 56666 - DNA, 80 bp, synthetic construct
  misc_feature 1..80: note = Artificially Synthesized Probe
  source 1..80: mol_type = other DNA
ccattaatctggccttgtctgtcattttctctccttggcatttgaggtctttgctgcatggcgtgaggactgagtacatc

SEQ ID NO: 56667 - DNA, 80 bp, synthetic construct
  misc_feature 1..80: note = Artificially Synthesized Probe
  source 1..80: mol_type = other DNA
cccgagacttcagtgtcctcatttatagcttggggagagaaagagaattgcctttacaggaccgaggtgaggattacata

SEQ ID NO: 56668 - DNA, 80 bp, synthetic construct
  misc_feature 1..80: note = Artificially Synthesized Probe
  source 1..80: mol_type = other DNA
gccatattcatatgatatccctccaatttcctccccagcgcaggttctcgggttgtccatgtgatggcatctgaaacgca

SEQ ID NO: 56669 - DNA, 80 bp, synthetic construct; identical to SEQ ID NO: 25637
  misc_feature 1..80: note = Artificially Synthesized Probe
  source 1..80: mol_type = other DNA

SEQ ID NO: 56670 - DNA, 80 bp, synthetic construct; identical to SEQ ID NO: 25675
  misc_feature 1..80: note = Artificially Synthesized Probe
  source 1..80: mol_type = other DNA

SEQ ID NO: 56671 - DNA, 80 bp, synthetic construct
  misc_feature 1..80: note = Artificially Synthesized Probe
  source 1..80: mol_type = other DNA
taatttttttttttttttttttgtagagatagggtctcactatgtttcctagactggtcttgaagtgctgagctcaagct

SEQ ID NO: 56672 - DNA, 80 bp, synthetic construct
  misc_feature 1..80: note = Artificially Synthesized Probe
  source 1..80: mol_type = other DNA
aggaacggtcacagagctcaaatgtgtagtaaatgcttcatcaatcttcgcttaagaaaaaaacaagagcggatcacctg

SEQ ID NO: 56673 - DNA, 80 bp, synthetic construct
  misc_feature 1..80: note = Artificially Synthesized Probe
  source 1..80: mol_type = other DNA
gctgagattacgccattatactccagcctgggcaacaagagcaaaacgctgtctcaaaaaaaaaaaaaaaaaaaaaaaaa

SEQ ID NO: 56674 - DNA, 80 bp, synthetic construct; identical to SEQ ID NO: 25676
  misc_feature 1..80: note = Artificially Synthesized Probe
  source 1..80: mol_type = other DNA

SEQ ID NO: 56675 - DNA, 80 bp, synthetic construct
  misc_feature 1..80: note = Artificially Synthesized Probe
  source 1..80: mol_type = other DNA
cagaagctatttgaagacaacccttcttcctgtcctttcctgagaacctgagcgcagtgagaaggttaggtcacgtgggt

SEQ ID NO: 56676 - DNA, 80 bp, synthetic construct
  misc_feature 1..80: note = Artificially Synthesized Probe
  source 1..80: mol_type = other DNA
atgtcaaaatgagacacagtggtttcaggtcttacaaagaatctggactccaggcatgccagggaagtgggcaaggctgg

SEQ ID NO: 56677 - DNA, 80 bp, synthetic construct; identical to SEQ ID NO: 25677
  misc_feature 1..80: note = Artificially Synthesized Probe
  source 1..80: mol_type = other DNA

SEQ ID NO: 56678 - DNA, 80 bp, synthetic construct
  misc_feature 1..80: note = Artificially Synthesized Probe
  source 1..80: mol_type = other DNA
cagcgcaggttagggggtcactctggtaagccacaaggtggttacagagctggggccaggattattgggactccacctcc

SEQ ID NO: 56679 - DNA, 80 bp, synthetic construct
  misc_feature 1..80: note = Artificially Synthesized Probe
  source 1..80: mol_type = other DNA
agccattcccgagccctgtgctgctgcccgccctgtgcccgcatcagacagttgactcgcaacaagcctgtgagtgacct

SEQ ID NO: 56680 - DNA, 80 bp, synthetic construct
  misc_feature 1..80: note = Artificially Synthesized Probe
  source 1..80: mol_type = other DNA
cagtgatgggcagaggagcggatctctccactccgtagagcatagatgacagggttgaccatggagttgatgaggcacag

SEQ ID NO: 56681 - DNA, 80 bp, synthetic construct
  misc_feature 1..80: note = Artificially Synthesized Probe
  source 1..80: mol_type = other DNA
ttacaccaaagcagacccctggcctcctgagtccagtgtgcccctaacactaccttgtggtctccccatctataaaatga

SEQ ID NO: 56682 - DNA, 80 bp, synthetic construct; identical to SEQ ID NO: 25678
  misc_feature 1..80: note = Artificially Synthesized Probe
  source 1..80: mol_type = other DNA

SEQ ID NO: 56683 - DNA, 80 bp, synthetic construct
  misc_feature 1..80: note = Artificially Synthesized Probe
  source 1..80: mol_type = other DNA
ctttcctgcgactggtcctccacaaccccaggtgtcctgaaatgacatctatcccctgccccagacaggcccacctggct

SEQ ID NO: 56684 - DNA, 80 bp, synthetic construct
  misc_feature 1..80: note = Artificially Synthesized Probe
  source 1..80: mol_type = other DNA
ctactaaaaatacaaaaattagccagacgcagtagtgcacacctgtaatcccaactacacgggaggctgaggcaggagaa

SEQ ID NO: 56685 - DNA, 80 bp, synthetic construct
  misc_feature 1..80: note = Artificially Synthesized Probe
  source 1..80: mol_type = other DNA
actcacggttgtgttgtgggtggctgggcactgggagctgccgggggctgaggagtcccagttgttttctgtcctctccc

SEQ ID NO: 56686 - DNA, 80 bp, synthetic construct
  misc_feature 1..80: note = Artificially Synthesized Probe
  source 1..80: mol_type = other DNA
cctggcacctgcctgtcctggtggccagacaagctggccacatgctgatgggccttccagagaacatgcccataggtgta

SEQ ID NO: 56687 - DNA, 80 bp, synthetic construct
  misc_feature 1..80: note = Artificially Synthesized Probe
  source 1..80: mol_type = other DNA
gtcaccagtgcccttccacgggtgagcagagctttgtaggaaggtggatagcgcaggcagaggtatcggtcaatggcggt

SEQ ID NO: 56688 - DNA, 80 bp, synthetic construct
  misc_feature 1..80: note = Artificially Synthesized Probe
  source 1..80: mol_type = other DNA
aaaattagctgggcatggtggcgggtacctgtaatcccagctacatgggaggctaaggcaggagaactgcttgaacccag

SEQ ID NO: 56689 - DNA, 80 bp, synthetic construct
  misc_feature 1..80: note = Artificially Synthesized Probe
  source 1..80: mol_type = other DNA
atgaacaggtatgagggcttccggcggagttggtgggaggacaggatcagatagagcacagccacgttctccagggcact

SEQ ID NO: 56690 - DNA, 80 bp, synthetic construct; identical to SEQ ID NO: 25638
  misc_feature 1..80: note = Artificially Synthesized Probe
  source 1..80: mol_type = other DNA

SEQ ID NO: 56691 - DNA, 80 bp, synthetic construct
  misc_feature 1..80: note = Artificially Synthesized Probe
  source 1..80: mol_type = other DNA
aagcagaagtgacttgtgagatttttggccttccattttccaaaagactaatcctaagacttccttttgaagcaagggaa

SEQ ID NO: 56692 - DNA, 80 bp, synthetic construct
  misc_feature 1..80: note = Artificially Synthesized Probe
  source 1..80: mol_type = other DNA
aagtaaagtactgaagttttaacaactatttggggatgggatttatgaatttggcttaacatcaagtgatgggaagagaa

SEQ ID NO: 56693 - DNA, 80 bp, synthetic construct
  misc_feature 1..80: note = Artificially Synthesized Probe
  source 1..80: mol_type = other DNA
cctcagcctcccaagtagctgggactacaggcacccaccacacctggctaatttttgtacttttagtagagaccgggttt

SEQ ID NO: 56694 - DNA, 80 bp, synthetic construct; identical to SEQ ID NO: 25639
  misc_feature 1..80: note = Artificially Synthesized Probe
  source 1..80: mol_type = other DNA

SEQ ID NO: 56695 - DNA, 80 bp, synthetic construct
  misc_feature 1..80: note = Artificially Synthesized Probe
  source 1..80: mol_type = other DNA
actccagcctgggcgacagagcaagactctgtctcaaaaaaaaaaaaaaaaaaaagatgaatgtcaataagaagtaactt

SEQ ID NO: 56696 - DNA, 80 bp, synthetic construct
  misc_feature 1..80: note = Artificially Synthesized Probe
  source 1..80: mol_type = other DNA
tttgagttcacaatgcaaaatgcataaggaaacatgagcaagagtcagcagaaacgtcagacagtagaattccactttca

SEQ ID NO: 56697 - DNA, 80 bp, synthetic construct; identical to SEQ ID NO: 25640
  misc_feature 1..80: note = Artificially Synthesized Probe
  source 1..80: mol_type = other DNA

SEQ ID NO: 56698 - DNA, 80 bp, synthetic construct
  misc_feature 1..80: note = Artificially Synthesized Probe
  source 1..80: mol_type = other DNA
agctactcaggaggctgaggcaggagaatggcgtgaacccgggaggcggagcttgcagtgagccgagagccgagatggcg

SEQ ID NO: 56699 - DNA, 80 bp, synthetic construct
  misc_feature 1..80: note = Artificially Synthesized Probe
  source 1..80: mol_type = other DNA
aaatgatttttagaatctagttttattcattcaagaagtatttactcagtgcttgtttgtgccaggcacttgggcatttt

SEQ ID NO: 56700 - DNA, 80 bp, synthetic construct
  misc_feature 1..80: note = Artificially Synthesized Probe
  source 1..80: mol_type = other DNA
agactagcctggctaacatgatgaaaccctgtctctactaaaaatacaaaaattagccgggcacgatggtggacacctgt

SEQ ID NO: 56701 - DNA, 80 bp, synthetic construct
  misc_feature 1..80: note = Artificially Synthesized Probe
  source 1..80: mol_type = other DNA
cacaatgcagaacaaagagataaagtgatggaaaacaagaaagagaagttaagagttatgaaggattgagtaaaaatgtt

SEQ ID NO: 56702 - DNA, 80 bp, synthetic construct
  misc_feature 1..80: note = Artificially Synthesized Probe
  source 1..80: mol_type = other DNA
tattgtctcagctacttgggaggctgaggtgggaggatcacttgagcccagggaggccaaggcttcagtgagccatgatc

SEQ ID NO: 56703 - DNA, 80 bp, synthetic construct; identical to SEQ ID NO: 25641
  misc_feature 1..80: note = Artificially Synthesized Probe
  source 1..80: mol_type = other DNA

SEQ ID NO: 56704 - DNA, 80 bp, synthetic construct
  misc_feature 1..80: note = Artificially Synthesized Probe
  source 1..80: mol_type = other DNA
tcatatagcatacatatcagaataccaaagacaaagaaaaatataaggcagtaagaatgaaaagccaaattacctgtaag

SEQ ID NO: 56705 - DNA, 80 bp, synthetic construct
  misc_feature 1..80: note = Artificially Synthesized Probe
  source 1..80: mol_type = other DNA
ctgaaggaacatctaaagaatgtgcattttagaaggaaattcaacccaaagggaagaaaagaacggcaagaaagaatagt

SEQ ID NO: 56706 - DNA, 80 bp, synthetic construct
  misc_feature 1..80: note = Artificially Synthesized Probe
  source 1..80: mol_type = other DNA
ggtgtgcacctgtagtcccagctactcaggagactgaggcaggagaattgcttgaacctgggaggcagaggttgcagtga

SEQ ID NO: 56707 - DNA, 80 bp, synthetic construct; identical to SEQ ID NO: 25642
  misc_feature 1..80: note = Artificially Synthesized Probe
  source 1..80: mol_type = other DNA

SEQ ID NO: 56708 - DNA, 80 bp, synthetic construct
  misc_feature 1..80: note = Artificially Synthesized Probe
  source 1..80: mol_type = other DNA
aaaattgtgaatgacaaaaatgcaagacaagaaagagatgaatagagttaaagctttatctaggaagtgggtaaagacat

SEQ ID NO: 56709 - DNA, 80 bp, synthetic construct
  misc_feature 1..80: note = Artificially Synthesized Probe
  source 1..80: mol_type = other DNA
gcagtcagggtgatcctttaaaaatataggatcttgtcatttctctgtcccaaaccctgcatagctccctagtccactat

SEQ ID NO: 56710 - DNA, 80 bp, synthetic construct; identical to SEQ ID NO: 25643
  misc_feature 1..80: note = Artificially Synthesized Probe
  source 1..80: mol_type = other DNA

SEQ ID NO: 56711 - DNA, 80 bp, synthetic construct; identical to SEQ ID NO: 25633
  misc_feature 1..80: note = Artificially Synthesized Probe
  source 1..80: mol_type = other DNA

SEQ ID NO: 56712 - DNA, 80 bp, synthetic construct
  misc_feature 1..80: note = Artificially Synthesized Probe
  source 1..80: mol_type = other DNA
ggcgcatactaccatgcccggctaagttttcatatttttagtagagacggggtttcaccgtgttagtcaggctggtcttg

SEQ ID NO: 56713 - DNA, 80 bp, synthetic construct
  misc_feature 1..80: note = Artificially Synthesized Probe
  source 1..80: mol_type = other DNA
gagcgggtgcaccgcggcggaggaggcagcatcccgcggcgctgacggtcctggggagagcatggcgccgaggtgaggcc

SEQ ID NO: 56714 - DNA, 80 bp, synthetic construct; identical to SEQ ID NO: 25785
  misc_feature 1..80: note = Artificially Synthesized Probe
  source 1..80: mol_type = other DNA

SEQ ID NO: 56715 - DNA, 80 bp, synthetic construct
  misc_feature 1..80: note = Artificially Synthesized Probe
  source 1..80: mol_type = other DNA
cccctgcccctcagagacactctcccacggaccccacagggagatatacaggaggccaagatgcggtttccagggtggaa

SEQ ID NO: 56716 - DNA, 80 bp, synthetic construct
  misc_feature 1..80: note = Artificially Synthesized Probe
  source 1..80: mol_type = other DNA
aaagccctgcggcccctgcccagcaccctgaaacgggcattccttccttccgcccctgccccccgccctccccgccaagc

SEQ ID NO: 56717 - DNA, 80 bp, synthetic construct
  misc_feature 1..80: note = Artificially Synthesized Probe
  source 1..80: mol_type = other DNA
agcgctctgtgtgacgggttctggacccgtggaagggccgaagccgcctcctggggcttaaggaaggcgagaggctcagg

SEQ ID NO: 56718 - DNA, 80 bp, synthetic construct; identical to SEQ ID NO: 25786
  misc_feature 1..80: note = Artificially Synthesized Probe
  source 1..80: mol_type = other DNA

SEQ ID NO: 56719 - DNA, 80 bp, synthetic construct
  misc_feature 1..80: note = Artificially Synthesized Probe
  source 1..80: mol_type = other DNA
tgcacacccagggccaccccaggctgcaggctttgtggagacttaaagatgagtcctcggccttcggaatctcctgactc

SEQ ID NO: 56720 - DNA, 80 bp, synthetic construct
  misc_feature 1..80: note = Artificially Synthesized Probe
  source 1..80: mol_type = other DNA
ctggctcctcagacacacctgggattgccccttccaggacaggccagcccctttcctgctttcccaaaatggtctgggtg

SEQ ID NO: 56721 - DNA, 80 bp, synthetic construct
  misc_feature 1..80: note = Artificially Synthesized Probe
  source 1..80: mol_type = other DNA
acacagccctgactcctggagccctcccaccttccaacacacccaccttccttctagagccctcccaccttccctctgga

SEQ ID NO: 56722 - DNA, 80 bp, synthetic construct
  misc_feature 1..80: note = Artificially Synthesized Probe
  source 1..80: mol_type = other DNA
agcagatgctgagctggtgcccactgtgtgccaggtgtgcttgtaggcacccggatgcagccccatcctaactttcaggg

SEQ ID NO: 56723 - DNA, 80 bp, synthetic construct; identical to SEQ ID NO: 25787
  misc_feature 1..80: note = Artificially Synthesized Probe
  source 1..80: mol_type = other DNA

SEQ ID NO: 56724 - DNA, 80 bp, synthetic construct
  misc_feature 1..80: note = Artificially Synthesized Probe
  source 1..80: mol_type = other DNA
gcttggaggggcaggtgctgggcagggagggcaccctcctgtgggctgggagggccaggtgctggggcgggagagtcggg

SEQ ID NO: 56725 - DNA, 80 bp, synthetic construct
  misc_feature 1..80: note = Artificially Synthesized Probe
  source 1..80: mol_type = other DNA
tgctgtcccctgtttgaggaacaacacgtggtcctttggagtcctggagctgaacatgtggctcaccatcagcccctgct

SEQ ID NO: 56726 - DNA, 80 bp, synthetic construct
  misc_feature 1..80: note = Artificially Synthesized Probe
  source 1..80: mol_type = other DNA
ccaaaatccacatcttgtgtctttgccttccctcacccaaagtgccagacacaagaatggatatctctaagagtggtggg

SEQ ID NO: 56727 - DNA, 80 bp, synthetic construct
  misc_feature 1..80: note = Artificially Synthesized Probe
  source 1..80: mol_type = other DNA
ggtgggtggatggaaaggtgggtgagtggataggtaggtagctggggagatggatggatggtggacaggtgggtgagtgt

SEQ ID NO: 56728 - DNA, 80 bp, synthetic construct; identical to SEQ ID NO: 25788
  misc_feature 1..80: note = Artificially Synthesized Probe
  source 1..80: mol_type = other DNA

SEQ ID NO: 56729 - DNA, 80 bp, synthetic construct
  misc_feature 1..80: note = Artificially Synthesized Probe
  source 1..80: mol_type = other DNA
aggggcaggaccatgcgcaggggcggcggagcggggctgtgaatggagccccccttccggaagatggatgcaggtgggaa

SEQ ID NO: 56730 - DNA, 80 bp, synthetic construct
  misc_feature 1..80: note = Artificially Synthesized Probe
  source 1..80: mol_type = other DNA
gtggatggatgggtagaaatattttcgttttcctaagtgttgcgtccagctgctgtcggcccctccttgagtagaggtca

SEQ ID NO: 56731 - DNA, 80 bp, synthetic construct
  misc_feature 1..80: note = Artificially Synthesized Probe
  source 1..80: mol_type = other DNA
ttcattcagccagtcaatagtcatggcccctcctgtgtgccgggtggccatggatattgccctgggtaacacacagcctg

SEQ ID NO: 56732 - DNA, 80 bp, synthetic construct; identical to SEQ ID NO: 25789
  misc_feature 1..80: note = Artificially Synthesized Probe
  source 1..80: mol_type = other DNA

SEQ ID NO: 56733 - DNA, 80 bp, synthetic construct
  misc_feature 1..80: note = Artificially Synthesized Probe
  source 1..80: mol_type = other DNA
cagggcagccccagagtcgggggcgcagctccctgcttgccagttcagagcccagcccctctcacccagcccagaggagg

SEQ ID NO: 56734 - DNA, 80 bp, synthetic construct
  misc_feature 1..80: note = Artificially Synthesized Probe
  source 1..80: mol_type = other DNA
cctggcgggcagatgacatcctggccagcccccctcgcctgcccgagccccagccctaccccggagccccgcaccacagc

SEQ ID NO: 56735 - DNA, 80 bp, synthetic construct
  misc_feature 1..80: note = Artificially Synthesized Probe
  source 1..80: mol_type = other DNA
gggtcccaggcttcggccatgggtgggggtctggcggctcagggccactcagggcggcttggctggccctgggacttgcc

SEQ ID NO: 56736 - DNA, 80 bp, synthetic construct
  misc_feature 1..80: note = Artificially Synthesized Probe
  source 1..80: mol_type = other DNA
cacttgcgcgcctcccgctcagcgcccctcggccgtgcctgtccacacaggtgcggggccggggtggtgcgcccggggcc

SEQ ID NO: 56737 - DNA, 80 bp, synthetic construct; identical to SEQ ID NO: 25790
  misc_feature 1..80: note = Artificially Synthesized Probe
  source 1..80: mol_type = other DNA

SEQ ID NO: 56738 - DNA, 80 bp, synthetic construct
  misc_feature 1..80: note = Artificially Synthesized Probe
  source 1..80: mol_type = other DNA
cctggccttcagagaggtgcgagctctacttttggagaatgaggcaaaggcgcagaagcactcccggaaagtgccatcca

SEQ ID NO: 56739 - DNA, 80 bp, synthetic construct
  misc_feature 1..80: note = Artificially Synthesized Probe
  source 1..80: mol_type = other DNA
ccgggtgggtcacacccctccaggctcaggccaggcctctgcatccctgggcactgccacgtcccccagggcatcccatg

SEQ ID NO: 56740 - DNA, 80 bp, synthetic construct
  misc_feature 1..80: note = Artificially Synthesized Probe
  source 1..80: mol_type = other DNA
cctctgccacagcacccatgtggctttattctgtggccccttttcgtgcactgggctgtggcttctgggtgccccgggga

SEQ ID NO: 56741 - DNA, 80 bp, synthetic construct
  misc_feature 1..80: note = Artificially Synthesized Probe
  source 1..80: mol_type = other DNA
tccctggcaggacatgcccaggggctgcagaaccccaccccccaaaaaaacacacacccacaacaccccacatacacccc

SEQ ID NO: 56742 - DNA, 80 bp, synthetic construct
  misc_feature 1..80: note = Artificially Synthesized Probe
  source 1..80: mol_type = other DNA
gctgggaggctctgttctcaggctctgagggtccgctgaagcccggggcacgcatcttctcctttgacggcaaggacgtc

SEQ ID NO: 56743 - DNA, 80 bp, synthetic construct; identical to SEQ ID NO: 25791
  misc_feature 1..80: note = Artificially Synthesized Probe
  source 1..80: mol_type = other DNA

SEQ ID NO: 56744 - DNA, 80 bp, synthetic construct
  misc_feature 1..80: note = Artificially Synthesized Probe
  source 1..80: mol_type = other DNA
aagggcaacacggagtccgagcatgtgtgcccttaaaatgttgacagaaatttccagggtatctagaagaacgcttcgtc

SEQ ID NO: 56745 - DNA, 80 bp, synthetic construct
  misc_feature 1..80: note = Artificially Synthesized Probe
  source 1..80: mol_type = other DNA
ggagatgcacctgccaagggtctctgacaggagtgctgtgggcagggctgggccccagggaaggcctgaaagccaggagc

SEQ ID NO: 56746 - DNA, 80 bp, synthetic construct; identical to SEQ ID NO: 25792
  misc_feature 1..80: note = Artificially Synthesized Probe
  source 1..80: mol_type = other DNA

SEQ ID NO: 56747 - DNA, 80 bp, synthetic construct
  misc_feature 1..80: note = Artificially Synthesized Probe
  source 1..80: mol_type = other DNA
gtgagacgtggcggacggaggctccctcggccacgggccaggcctcctcgctgctggggggcaggctcctggggcagagt

SEQ ID NO: 56748 - DNA, 80 bp, synthetic construct
  misc_feature 1..80: note = Artificially Synthesized Probe
  source 1..80: mol_type = other DNA
aggacctggctgccatactttcctgtatagttcacgtttcatgtaatcctcaagaaataaaaggaagccaaagagtgtat

SEQ ID NO: 56749 - DNA, 80 bp, synthetic construct
  misc_feature 1..80: note = Artificially Synthesized Probe
  source 1..80: mol_type = other DNA
cctgatcagaccacggctcgatttctccaggatttcctgctttgggaagccgtgctcgccccagcaggtgctgacttcat

SEQ ID NO: 56750 - DNA, 80 bp, synthetic construct
  misc_feature 1..80: note = Artificially Synthesized Probe
  source 1..80: mol_type = other DNA
gcccccgcttatccagaacactgcgtgggccctcggctatctggaatgcctcgccgggcctttcaattatccagaacaca

SEQ ID NO: 56751 - DNA, 80 bp, synthetic construct
  misc_feature 1..80: note = Artificially Synthesized Probe
  source 1..80: mol_type = other DNA
tggggctagggggagccccttctgctcagctctgggccattctccacagcaaccccaggctgaagcaggttcccaagctc

SEQ ID NO: 56752 - DNA, 80 bp, synthetic construct; identical to SEQ ID NO: 25793
  misc_feature 1..80: note = Artificially Synthesized Probe
  source 1..80: mol_type = other DNA

SEQ ID NO: 56753 - DNA, 80 bp, synthetic construct
  misc_feature 1..80: note = Artificially Synthesized Probe
  source 1..80: mol_type = other DNA
cagatgcagggcagtcattggctgtctcctaggaaacccatatccttaccctccttgggactgaaggggaaccccggggt

SEQ ID NO: 56754 - DNA, 80 bp, synthetic construct
  misc_feature 1..80: note = Artificially Synthesized Probe
  source 1..80: mol_type = other DNA
ccaacacgcacctgcctcaggactgcgacgaaaccggtggggctggttctgtaattgtgtgtgatgtgaagccaattcag

SEQ ID NO: 56755 - DNA, 80 bp, synthetic construct; identical to SEQ ID NO: 25690
  misc_feature 1..80: note = Artificially Synthesized Probe
  source 1..80: mol_type = other DNA

SEQ ID NO: 56756 - DNA, 80 bp, synthetic construct
  misc_feature 1..80: note = Artificially Synthesized Probe
  source 1..80: mol_type = other DNA
gtggtgtggggaccgcgaggctccgcactggtgtgggggtggccggggcagggcggtgtttgcttggattcagaaatcca

SEQ ID NO: 56757 - DNA, 80 bp, synthetic construct
  misc_feature 1..80: note = Artificially Synthesized Probe
  source 1..80: mol_type = other DNA
ttccagcttaggctcagcaggtgctaaatattagtcagattggagctgcatgctgactagcacacagtttctagttgaac

SEQ ID NO: 56758 - DNA, 80 bp, synthetic construct
  misc_feature 1..80: note = Artificially Synthesized Probe
  source 1..80: mol_type = other DNA
ctgaattgcaagctggtcttgctctcgagagagtgacagtgctttcagtgtcaggtatgttttcttgttccgtgagtttt

SEQ ID NO: 56759 - DNA, 80 bp, synthetic construct; identical to SEQ ID NO: 25691
  misc_feature 1..80: note = Artificially Synthesized Probe
  source 1..80: mol_type = other DNA

SEQ ID NO: 56760 - DNA, 80 bp, synthetic construct
  misc_feature 1..80: note = Artificially Synthesized Probe
  source 1..80: mol_type = other DNA
agggatgtcgtctggattcctgtaataatttgtttcattgtttccaatcgacttagtcaccaggttaaatagtagcatag

SEQ ID NO: 56761 - DNA, 80 bp, synthetic construct
  misc_feature 1..80: note = Artificially Synthesized Probe
  source 1..80: mol_type = other DNA
cagaccctgctggtttttgtatttcacgtggactcacctcctggcttgtcagggccttgtgggattcttagcctcttaat

SEQ ID NO: 56762 - DNA, 80 bp, synthetic construct
  misc_feature 1..80: note = Artificially Synthesized Probe
  source 1..80: mol_type = other DNA
ttccctgtcctgcggtctgtggcttgctcagtgtcctcaggtgtcctcttccgactcgagggtctcacgggtgcccccgc

SEQ ID NO: 56763 - DNA, 80 bp, synthetic construct
  misc_feature 1..80: note = Artificially Synthesized Probe
  source 1..80: mol_type = other DNA
cgctctcggccgggggatgtggtttggcccaaatcctctgcatccgttgttgtagccactgtggtctgggcagagctggg

SEQ ID NO: 56764 - DNA, 80 bp, synthetic construct; identical to SEQ ID NO: 25692
  misc_feature 1..80: note = Artificially Synthesized Probe
  source 1..80: mol_type = other DNA

SEQ ID NO: 56765 - DNA, 80 bp, synthetic construct
  misc_feature 1..80: note = Artificially Synthesized Probe
  source 1..80: mol_type = other DNA
agctctttgtgggctgcatctgcagattgaggacagcgctgagcggagctggccgggtgctcatccctggtgggggcaga

SEQ ID NO: 56766 - DNA, 80 bp, synthetic construct
  misc_feature 1..80: note = Artificially Synthesized Probe
  source 1..80: mol_type = other DNA
ccttcttggtggtttcccttgctttgtggcaggagctggtggcctgggaacagctgccgggtgtttagatgaattcccgg

SEQ ID NO: 56767 - DNA, 80 bp, synthetic construct
  misc_feature 1..80: note = Artificially Synthesized Probe
  source 1..80: mol_type = other DNA
cttggctcacatctcttcctggggtctcagggaagcggcacctcctcaggggcctcccagccacctcacgtcacttcctg

SEQ ID NO: 56768 - DNA, 80 bp, synthetic construct
  misc_feature 1..80: note = Artificially Synthesized Probe
  source 1..80: mol_type = other DNA
agccagaccccccggacggcttgcaggcagggagatggagaagcaacccctccatggggcagacagtgccatagtcttca

SEQ ID NO: 56769 - DNA, 80 bp, synthetic construct; identical to SEQ ID NO: 25693
  misc_feature 1..80: note = Artificially Synthesized Probe
  source 1..80: mol_type = other DNA

SEQ ID NO: 56770 - DNA, 80 bp, synthetic construct
  misc_feature 1..80: note = Artificially Synthesized Probe
  source 1..80: mol_type = other DNA
ctgtgagctcacgcggctccatccccacagcggcccagggtcactcggggccattaatcaggccgcagagctgccctctg

SEQ ID NO: 56771 - DNA, 80 bp, synthetic construct
  misc_feature 1..80: note = Artificially Synthesized Probe
  source 1..80: mol_type = other DNA
catgatgctgtgtgtagtgatgcgcgatgccgtgtgtggtgacacgatgccgtgtgtggtgacacttaatgtcatgtagt

SEQ ID NO: 56772 - DNA, 80 bp, synthetic construct
  misc_feature 1..80: note = Artificially Synthesized Probe
  source 1..80: mol_type = other DNA
gctgcaaagtggcctggactttatgtcctgccaggtacagtgtttccctcagcagatttatcaggcgttttgggtgtaaa

SEQ ID NO: 56773 - DNA, 80 bp, synthetic construct; identical to SEQ ID NO: 25694
  misc_feature 1..80: note = Artificially Synthesized Probe
  source 1..80: mol_type = other DNA

SEQ ID NO: 56774 - DNA, 80 bp, synthetic construct
  misc_feature 1..80: note = Artificially Synthesized Probe
  source 1..80: mol_type = other DNA
gtggcccggtggacgcaggtagctttgactcaaaacaggaatttgtttccatcctttcatggtcacaaataataaaaagc

SEQ ID NO: 56775 - DNA, 80 bp, synthetic construct
  misc_feature 1..80: note = Artificially Synthesized Probe
  source 1..80: mol_type = other DNA
ccccgacaggagcgtcagggccggtctcctccgagtctcctggcagaggcgttgctgtcgcagctggcactgtgcatggc

SEQ ID NO: 56776 - DNA, 80 bp, synthetic construct
  misc_feature 1..80: note = Artificially Synthesized Probe
  source 1..80: mol_type = other DNA
ggcagcagggagttaacgggagccactgcgaggacactgtgatctcagagctgcgtcatcgctgatggaagaggtgacgt

SEQ ID NO: 56777 - DNA, 80 bp, synthetic construct; identical to SEQ ID NO: 25695
  misc_feature 1..80: note = Artificially Synthesized Probe
  source 1..80: mol_type = other DNA

SEQ ID NO: 56778 - DNA, 80 bp, synthetic construct
  misc_feature 1..80: note = Artificially Synthesized Probe
  source 1..80: mol_type = other DNA
gaggagaaaccacagctctcggctgtgctggggtggggtgaacagtggcggggaaccttggggagctgtggatggcccaa

SEQ ID NO: 56779 - DNA, 80 bp, synthetic construct
  misc_feature 1..80: note = Artificially Synthesized Probe
  source 1..80: mol_type = other DNA
ccacccccaccccacccagccctgcctcgaggtcctgcactggtccctgcccggtaccgggtcagctggtgcctgcctgt

SEQ ID NO: 56780 - DNA, 80 bp, synthetic construct
  misc_feature 1..80: note = Artificially Synthesized Probe
  source 1..80: mol_type = other DNA
ggctggacatgggaggagggccacggtcacgcttgcacggggcagagactcccagaaccacaggcctcaggagagctggg

SEQ ID NO: 56781 - DNA, 80 bp, synthetic construct; identical to SEQ ID NO: 25696
  misc_feature 1..80: note = Artificially Synthesized Probe
  source 1..80: mol_type = other DNA

SEQ ID NO: 56782 - DNA, 80 bp, synthetic construct; identical to SEQ ID NO: 25680
  misc_feature 1..80: note = Artificially Synthesized Probe
  source 1..80: mol_type = other DNA

SEQ ID NO: 56783 - DNA, 80 bp, synthetic construct
  misc_feature 1..80: note = Artificially Synthesized Probe
  source 1..80: mol_type = other DNA
ccgagtggagagaacctttgaacacctcagcacctgaggctcagggccctgtgacaggacacagcccggggtcccccagg

SEQ ID NO: 56784 - DNA, 80 bp, synthetic construct
  misc_feature 1..80: note = Artificially Synthesized Probe
  source 1..80: mol_type = other DNA
cgcacacatggctgtcacacacacaggttcacagacacacaggctcacgcacacacaggttcacatatacacagctcaca

SEQ ID NO: 56785 - DNA, 80 bp, synthetic construct
  misc_feature 1..80: note = Artificially Synthesized Probe
  source 1..80: mol_type = other DNA
ctcagggaccctggcacacccgcttgctctctgtctgtagaggggcaggaggccctgggtttggtgggctctgtctgtag

SEQ ID NO: 56786 - DNA, 80 bp, synthetic construct
  misc_feature 1..80: note = Artificially Synthesized Probe
  source 1..80: mol_type = other DNA
cggggcctttgcgtggctgcctggcctgacgcacctcgcgccgtgccaggacccgggcagggcagcaaaaggcatctgtg

SEQ ID NO: 56787 - DNA, 80 bp, synthetic construct; identical to SEQ ID NO: 25697
  misc_feature 1..80: note = Artificially Synthesized Probe
  source 1..80: mol_type = other DNA

SEQ ID NO: 56788 - DNA, 80 bp, synthetic construct
  misc_feature 1..80: note = Artificially Synthesized Probe
  source 1..80: mol_type = other DNA
ggcatgcaccaccatgtccagctaatttttttgtatttttgcccagctaattttttgtatttttagtagagacaaggttt

SEQ ID NO: 56789 - DNA, 80 bp, synthetic construct
  misc_feature 1..80: note = Artificially Synthesized Probe
  source 1..80: mol_type = other DNA
aagcttggaaatggtgtcctggagcttaagggagttggaaaccatggcttatgttccatggtgacatggttcttgagggt

SEQ ID NO: 56790 - DNA, 80 bp, synthetic construct
  misc_feature 1..80: note = Artificially Synthesized Probe
  source 1..80: mol_type = other DNA
tccctttccttgctgctgtattcagtgatttgcagagagaaaggcgtggagctccacaagcacctcggacggcagcagga

SEQ ID NO: 56791 - DNA, 80 bp, synthetic construct; identical to SEQ ID NO: 25698
  misc_feature 1..80: note = Artificially Synthesized Probe
  source 1..80: mol_type = other DNA

SEQ ID NO: 56792 - DNA, 80 bp, synthetic construct
  misc_feature 1..80: note = Artificially Synthesized Probe
  source 1..80: mol_type = other DNA
cagggttctgcagtgtcctgggggcagaggcctgacgcactcagctgctcgcccagggccctcctgttgggcatttggat

SEQ ID NO: 56793 - DNA, 80 bp, synthetic construct
  misc_feature 1..80: note = Artificially Synthesized Probe
  source 1..80: mol_type = other DNA
aggcccagagaggggtctgcatgctgcccacacacccctcccccagcccggagagaactcaggctccaggccacccgcag

SEQ ID NO: 56794 - DNA, 80 bp, synthetic construct
  misc_feature 1..80: note = Artificially Synthesized Probe
  source 1..80: mol_type = other DNA
tggtgctggggggagggtagggcttaaggaggcctcatgtcgggaccctggcaggccaccccacctcccgcagtgcccgg

SEQ ID NO: 56795 - DNA, 80 bp, synthetic construct
  misc_feature 1..80: note = Artificially Synthesized Probe
  source 1..80: mol_type = other DNA
tgggaggccctctctgcagggcggagagccaggtgaggaggtgtgtggcgcaggtaaacacgcctggagcgcagctctgc

SEQ ID NO: 56796 - DNA, 80 bp, synthetic construct; identical to SEQ ID NO: 25699
  misc_feature 1..80: note = Artificially Synthesized Probe
  source 1..80: mol_type = other DNA

SEQ ID NO: 56797 - DNA, 80 bp, synthetic construct
  misc_feature 1..80: note = Artificially Synthesized Probe
  source 1..80: mol_type = other DNA
agccccttcccgcctcctgcccgtcggtttccattgctcaggcactgcctcgcccgcgcctctttctcccagacctgagc

SEQ ID NO: 56798 - DNA, 80 bp, synthetic construct
  misc_feature 1..80: note = Artificially Synthesized Probe
  source 1..80: mol_type = other DNA
cgggctcgggggccagtcagtctcatgaggacggggtgggtctgacttgtggcatcgcggcctctccatcggtgctgctg

SEQ ID NO: 56799 - DNA, 80 bp, synthetic construct
  misc_feature 1..80: note = Artificially Synthesized Probe
  source 1..80: mol_type = other DNA
tgtgctgtgagtgcagtgtgaccgcgtccacctgtctccctggacacgcctgtcagagccccagactgggctcccctgga

SEQ ID NO: 56800 - DNA, 80 bp, synthetic construct; identical to SEQ ID NO: 25700
  misc_feature 1..80: note = Artificially Synthesized Probe
  source 1..80: mol_type = other DNA

SEQ ID NO: 56801 - DNA, 80 bp, synthetic construct
  misc_feature 1..80: note = Artificially Synthesized Probe
  source 1..80: mol_type = other DNA
acactgttttccaaagcaaagccagagcgccaagggctctcgggattcacgagatccacatttatcccaagttagaacag

SEQ ID NO: 56802 - DNA, 80 bp, synthetic construct
  misc_feature 1..80: note = Artificially Synthesized Probe
  source 1..80: mol_type = other DNA
ccccgccccgccccctcctgcttccccaccttttcacagttgcctggctggggcgtaagtgaattgacagcatttagttt

SEQ ID NO: 56803 - DNA, 80 bp, synthetic construct
  misc_feature 1..80: note = Artificially Synthesized Probe
  source 1..80: mol_type = other DNA
gcccgccaccacacctggctaatttttgtgtttttagtagagatggggtttcaccatgttggccaggctggtctcgaact

SEQ ID NO: 56804 - DNA, 80 bp, synthetic construct
  misc_feature 1..80: note = Artificially Synthesized Probe
  source 1..80: mol_type = other DNA
ctgaggcccagtttgctgatttgcacatttttttctggccaagaatgatgcatctttccatgtctctgtgctacacttga

SEQ ID NO: 56805 - DNA, 80 bp, synthetic construct; identical to SEQ ID NO: 25701
  misc_feature 1..80: note = Artificially Synthesized Probe
  source 1..80: mol_type = other DNA

SEQ ID NO: 56806 - DNA, 80 bp, synthetic construct
  misc_feature 1..80: note = Artificially Synthesized Probe
  source 1..80: mol_type = other DNA
ccagcaggtttgggagcttgtggctgcatcctcctgcagacacttgcccattctggggcctcctctctgtcttttctcct

SEQ ID NO: 56807 - DNA, 80 bp, synthetic construct
  misc_feature 1..80: note = Artificially Synthesized Probe
  source 1..80: mol_type = other DNA
ttctcagccctgctgtcccagggctgcactccagcagggcagactcctgaggtgcagacaccccagcttcacgctcacac

SEQ ID NO: 56808 - DNA, 80 bp, synthetic construct; identical to SEQ ID NO: 25702
  misc_feature 1..80: note = Artificially Synthesized Probe
  source 1..80: mol_type = other DNA

SEQ ID NO: 56809 - DNA, 80 bp, synthetic construct
  misc_feature 1..80: note = Artificially Synthesized Probe
  source 1..80: mol_type = other DNA
cccgcctggcactgaccagactgtgtgcccgggtgccgtgcccatgggctccgcctcccccaggcaggccccctcttgct

SEQ ID NO: 56810 - DNA, 80 bp, synthetic construct
  misc_feature 1..80: note = Artificially Synthesized Probe
  source 1..80: mol_type = other DNA
ggtggccagtgctctgggtgcctttgccagacaactggtctgccgggccgagcattcatgctggtcgccatcacgtgact

SEQ ID NO: 56811 - DNA, 80 bp, synthetic construct
  misc_feature 1..80: note = Artificially Synthesized Probe
  source 1..80: mol_type = other DNA
ggacttccctgcttgttctgtcctgggagatgttgtccctggccctgcagagccgggaggacacgaggcctcctgggtca

SEQ ID NO: 56812 - DNA, 80 bp, synthetic construct
  misc_feature 1..80: note = Artificially Synthesized Probe
  source 1..80: mol_type = other DNA
ggcggcgtctgggcctgggggctctcagagtttgaggagcgtgtggtgagggtggcctcgggcctcaaagacgcagcgct

SEQ ID NO: 56813 - DNA, 80 bp, synthetic construct; identical to SEQ ID NO: 25703
  misc_feature 1..80: note = Artificially Synthesized Probe
  source 1..80: mol_type = other DNA

SEQ ID NO: 56814 - DNA, 80 bp, synthetic construct
  misc_feature 1..80: note = Artificially Synthesized Probe
  source 1..80: mol_type = other DNA
tgggccatcacgcagccaccgcccggccccaagaacctgcgagtccactttccacctctggatcggcggttctggacgtt

SEQ ID NO: 56815 - DNA, 80 bp, synthetic construct
  misc_feature 1..80: note = Artificially Synthesized Probe
  source 1..80: mol_type = other DNA
ctgcaatctctcctctggtggatttgtgtgtgcgaaacagccgtgacccccaagaggtgcttgtagtcagtgcttcagag

SEQ ID NO: 56816 - DNA, 80 bp, synthetic construct
  misc_feature 1..80: note = Artificially Synthesized Probe
  source 1..80: mol_type = other DNA
aatagtccaccatagattctctacgttttaaagcatgttttatgtgcctgaaatgtctctgcactcgagactatagcttg

SEQ ID NO: 56817 - DNA, 80 bp, synthetic construct
  misc_feature 1..80: note = Artificially Synthesized Probe
  source 1..80: mol_type = other DNA
cttttgcctcagcctcccgagtagctgggactataggcgcgccaccccacccggccaatttttttgtatttttagtagag

SEQ ID NO: 56818 - DNA, 80 bp, synthetic construct
  misc_feature 1..80: note = Artificially Synthesized Probe
  source 1..80: mol_type = other DNA
ctcctggacgtgctcgcgcccctggtcctgctgctcggggtccgcgcggcctccgcggagccaggtaagacccgggcggg

SEQ ID NO: 56819 - DNA, 80 bp, synthetic construct; identical to SEQ ID NO: 25704
  misc_feature 1..80: note = Artificially Synthesized Probe
  source 1..80: mol_type = other DNA

SEQ ID NO: 56820 - DNA, 80 bp, synthetic construct
  misc_feature 1..80: note = Artificially Synthesized Probe
  source 1..80: mol_type = other DNA
tgattggcagtgcccgcccattccatcattcagtcacccactgtgcacccagcacccaggctcggctgcatagaacatgg

SEQ ID NO: 56821 - DNA, 80 bp, synthetic construct
  misc_feature 1..80: note = Artificially Synthesized Probe
  source 1..80: mol_type = other DNA
gacaggctctggcagcccctgtcagcatcctctccagggcatgtgaaagccagtgtgtcctcagctgccagtgccccctc

SEQ ID NO: 56822 - DNA, 80 bp, synthetic construct
  misc_feature 1..80: note = Artificially Synthesized Probe
  source 1..80: mol_type = other DNA
gccctctcattggggaccccccgtctccctagcgccctctcgtcctctcctgcatgtgctgtgtctgtgaagcggggtca

SEQ ID NO: 56823 - DNA, 80 bp, synthetic construct; identical to SEQ ID NO: 25705
  misc_feature 1..80: note = Artificially Synthesized Probe
  source 1..80: mol_type = other DNA

SEQ ID NO: 56824 - DNA, 80 bp, synthetic construct
  misc_feature 1..80: note = Artificially Synthesized Probe
  source 1..80: mol_type = other DNA
atggcaggaggggcctgcctgccacccgggtcctctgctgcctgctgcttgctggggagggggctcgagactgggatcct

SEQ ID NO: 56825 - DNA, 80 bp, synthetic construct
  misc_feature 1..80: note = Artificially Synthesized Probe
  source 1..80: mol_type = other DNA
gtggagatggcgcgtctcggcccggggtctcgtggctggtctgggagaacttgcctttatttctaggcaggaggctgcac

SEQ ID NO: 56826 - DNA, 80 bp, synthetic construct; identical to SEQ ID NO: 25706
  misc_feature 1..80: note = Artificially Synthesized Probe
  source 1..80: mol_type = other DNA

SEQ ID NO: 56827 - DNA, 80 bp, synthetic construct
  misc_feature 1..80: note = Artificially Synthesized Probe
  source 1..80: mol_type = other DNA
gcggcttatctgggctgtcaggcaggcctgggagggagcctgcctctgtgctctccaagggtgggcgacggacagacagg

SEQ ID NO: 56828 - DNA, 80 bp, synthetic construct
  misc_feature 1..80: note = Artificially Synthesized Probe
  source 1..80: mol_type = other DNA
atgcatgtcctgcccctgctcaccactaggacctcctcctgtctggtggtcagcacagagcccagtgatgtgggtacaag

SEQ ID NO: 56829 - DNA, 80 bp, synthetic construct
  misc_feature 1..80: note = Artificially Synthesized Probe
  source 1..80: mol_type = other DNA
gcaggacccggcggcccaggggaggggggcaggcaggacccggcggcccaggggaggtgggcaggcaggacccggcggcc

SEQ ID NO: 56830 - DNA, 80 bp, synthetic construct
  misc_feature 1..80: note = Artificially Synthesized Probe
  source 1..80: mol_type = other DNA
gcccacaggagggtggactcattctgaccgattcctggaagcccccggaaagtggtgatgttctggagggcccagcagac

SEQ ID NO: 56831 - DNA, 80 bp, synthetic construct
  misc_feature 1..80: note = Artificially Synthesized Probe
  source 1..80: mol_type = other DNA
cgggggtaccaggcgggtgagtgggtgggtggtcactgctcctgccaagggcagccctggtttggtttgcacttgctgcc

SEQ ID NO: 56832 - DNA, 80 bp, synthetic construct; identical to SEQ ID NO: 25707
  misc_feature 1..80: note = Artificially Synthesized Probe
  source 1..80: mol_type = other DNA

SEQ ID NO: 56833 - DNA, 80 bp, synthetic construct
  misc_feature 1..80: note = Artificially Synthesized Probe
  source 1..80: mol_type = other DNA
ccgctgagggaccccccacttcatgttgtgggtgatgtggtccattgattgcctccaggtttaaatcaggtggatattta

SEQ ID NO: 56834 - DNA, 80 bp, synthetic construct
  misc_feature 1..80: note = Artificially Synthesized Probe
  source 1..80: mol_type = other DNA
atttttcatcacccactttttgggtgagaaccccctcgagtcctaacatctgccgcatctcagagcctgtggctccagtc

SEQ ID NO: 56835 - DNA, 80 bp, synthetic construct
  misc_feature 1..80: note = Artificially Synthesized Probe
  source 1..80: mol_type = other DNA
ccttgaaatgtctctgggcacgtggctctgtgggtcagggtgggacatggccccgtagcaggctgtcctacagcaaaagc

SEQ ID NO: 56836 - DNA, 80 bp, synthetic construct; identical to SEQ ID NO: 25708
  misc_feature 1..80: note = Artificially Synthesized Probe
  source 1..80: mol_type = other DNA

SEQ ID NO: 56837 - DNA, 80 bp, synthetic construct
  misc_feature 1..80: note = Artificially Synthesized Probe
  source 1..80: mol_type = other DNA
agatgtggacagaaagtttggatgataggacagaacatttagttcaatctttccacttacggctcttaaaagccctttat

SEQ ID NO: 56838 - DNA, 80 bp, synthetic construct
  misc_feature 1..80: note = Artificially Synthesized Probe
  source 1..80: mol_type = other DNA
tgagcagggccacagagcaccaagaaaataccagggactttgcaggtctcgggtggattcaggttgatccaacagatgcc

SEQ ID NO: 56839 - DNA, 80 bp, synthetic construct; identical to SEQ ID NO: 25681
  misc_feature 1..80: note = Artificially Synthesized Probe
  source 1..80: mol_type = other DNA

SEQ ID NO: 56840 - DNA, 80 bp, synthetic construct; identical to SEQ ID NO: 25709
  misc_feature 1..80: note = Artificially Synthesized Probe
  source 1..80: mol_type = other DNA

SEQ ID NO: 56841 - DNA, 80 bp, synthetic construct
  misc_feature 1..80: note = Artificially Synthesized Probe
  source 1..80: mol_type = other DNA
tttttgtgcacggtgggaaagagaccatcaggggcggaggggaatgaacacccaccctttgggggctcaggtgccaaaca

SEQ ID NO: 56842 - DNA, 80 bp, synthetic construct
  misc_feature 1..80: note = Artificially Synthesized Probe
  source 1..80: mol_type = other DNA
ccagaaacccagaggcagtggcttcaccggggggtggtgatattcaagctcttgcaggagggggttgtggcagggcagga

SEQ ID NO: 56843 - DNA, 80 bp, synthetic construct
  misc_feature 1..80: note = Artificially Synthesized Probe
  source 1..80: mol_type = other DNA
aggtgagagagtctgtgcatgagacctactttccttgctctctccgggggggtttgcagcagttctgagcatcaggccag

SEQ ID NO: 56844 - DNA, 80 bp, synthetic construct; identical to SEQ ID NO: 25710
  misc_feature 1..80: note = Artificially Synthesized Probe
  source 1..80: mol_type = other DNA

SEQ ID NO: 56845 - DNA, 80 bp, synthetic construct
  misc_feature 1..80: note = Artificially Synthesized Probe
  source 1..80: mol_type = other DNA
cggtcctagaccaggccctggttcctgtgatgctgacaggctgtggcttgagagcctgggtcgggaaagcccagtcagag

SEQ ID NO: 56846 - DNA, 80 bp, synthetic construct
  misc_feature 1..80: note = Artificially Synthesized Probe
  source 1..80: mol_type = other DNA
aacccgccctcctggggacagatatagggatgccgggatgccgcactgcaggtgtgagtcctgggaagtgggtagggggt

SEQ ID NO: 56847 - DNA, 80 bp, synthetic construct
  misc_feature 1..80: note = Artificially Synthesized Probe
  source 1..80: mol_type = other DNA
ccagctgtttggtccatgggtgggttggttaggtctgggttcagaagccccttcagtgtaggtgctcagctgggccatgg

SEQ ID NO: 56848 - DNA, 80 bp, synthetic construct
  misc_feature 1..80: note = Artificially Synthesized Probe
  source 1..80: mol_type = other DNA
cccacttcacctgctgctgctccatttaaaagtgcaaggcacatgcatacacgggcatgcacaattgtgcacacaggtgc

SEQ ID NO: 56849 - DNA, 80 bp, synthetic construct
  misc_feature 1..80: note = Artificially Synthesized Probe
  source 1..80: mol_type = other DNA
gtcagaggttggctggggcagaggtggggtcagggagcaggaagtgagcgtttgcccactggggtagacgctgggtggat

SEQ ID NO: 56850 - DNA, 80 bp, synthetic construct; identical to SEQ ID NO: 25711
  misc_feature 1..80: note = Artificially Synthesized Probe
  source 1..80: mol_type = other DNA

SEQ ID NO: 56851 - DNA, 80 bp, synthetic construct
  misc_feature 1..80: note = Artificially Synthesized Probe
  source 1..80: mol_type = other DNA
tcttctgggtgcgtttataaagccagcacaatgtgcagcgtttgcagacagtatcctctgtgagcaagagcatgtttaaa

SEQ ID NO: 56852 - DNA, 80 bp, synthetic construct
  misc_feature 1..80: note = Artificially Synthesized Probe
  source 1..80: mol_type = other DNA
tgtacagcagtgtcacagcaaagcagccaccctcacccggggcccatccagcgtgtgcagtgggcagaagcctgcgtgag

SEQ ID NO: 56853 - DNA, 80 bp, synthetic construct; identical to SEQ ID NO: 25712
  misc_feature 1..80: note = Artificially Synthesized Probe
  source 1..80: mol_type = other DNA

SEQ ID NO: 56854 - DNA, 80 bp, synthetic construct
  misc_feature 1..80: note = Artificially Synthesized Probe
  source 1..80: mol_type = other DNA
tgtggcttggcggggaagctgtggagggagggagctgtggctactggggagctgtggctgggggagtgccgtgcctgggg

SEQ ID NO: 56855 - DNA, 80 bp, synthetic construct
  misc_feature 1..80: note = Artificially Synthesized Probe
  source 1..80: mol_type = other DNA
ttcctgtacatagtgaaggtgggttctattgccaaggttctgcaggtgagggtgtgtgctgttcacaccacagcatcaca

SEQ ID NO: 56856 - DNA, 80 bp, synthetic construct
  misc_feature 1..80: note = Artificially Synthesized Probe
  source 1..80: mol_type = other DNA
acacacactcacacactcagacacacaggcactctcctgcacacacacacactcacacaggcactctcctgcacacacac

SEQ ID NO: 56857 - DNA, 80 bp, synthetic construct; identical to SEQ ID NO: 25713
  misc_feature 1..80: note = Artificially Synthesized Probe
  source 1..80: mol_type = other DNA

SEQ ID NO: 56858 - DNA, 80 bp, synthetic construct
  misc_feature 1..80: note = Artificially Synthesized Probe
  source 1..80: mol_type = other DNA
atccacacaaagtcttcctccctcagagtgccttgttctgtcttcacctggattgttgaaaaggctgggggctgggttct

SEQ ID NO: 56859 - DNA, 80 bp, synthetic construct
  misc_feature 1..80: note = Artificially Synthesized Probe
  source 1..80: mol_type = other DNA
acacacacactcacacactcagacacaggcactctcctgcacacacacacactcactcacacacagacacacaggcactc

SEQ ID NO: 56860 - DNA, 80 bp, synthetic construct
  misc_feature 1..80: note = Artificially Synthesized Probe
  source 1..80: mol_type = other DNA
acacactcacacactcagacacacaggcactctcctgcacacacacactcactcacacacagacacacaggcactctcct

SEQ ID NO: 56861 - DNA, 80 bp, synthetic construct
  misc_feature 1..80: note = Artificially Synthesized Probe
  source 1..80: mol_type = other DNA
acacacactcacacactcagacacacaggcactctcctgcacacacacacactcacactcagacacacaggcactctcct

SEQ ID NO: 56862 - DNA, 80 bp, synthetic construct; identical to SEQ ID NO: 25714
  misc_feature 1..80: note = Artificially Synthesized Probe
  source 1..80: mol_type = other DNA

SEQ ID NO: 56863 - DNA, 80 bp, synthetic construct
  misc_feature 1..80: note = Artificially Synthesized Probe
  source 1..80: mol_type = other DNA
tccactgaggctcaggacgcctctgcagggtgccagggccacgcaagctccacagcacgtggacaaaggcgcatctaatc

SEQ ID NO: 56864 - DNA, 80 bp, synthetic construct
  misc_feature 1..80: note = Artificially Synthesized Probe
  source 1..80: mol_type = other DNA
gaggggctgctgtgggtctgtgtggagatggataccgaaagccacaggacgtgcttagggacttgcatggcaatttggca

SEQ ID NO: 56865 - DNA, 80 bp, synthetic construct
  misc_feature 1..80: note = Artificially Synthesized Probe
  source 1..80: mol_type = other DNA
tacagtgctgtaatcagcaaacgtgttccttggtcatttccgcaacagaacacagtgggaggggcctgctcttccgcagc

SEQ ID NO: 56866 - DNA, 80 bp, synthetic construct; identical to SEQ ID NO: 25715
  misc_feature 1..80: note = Artificially Synthesized Probe
  source 1..80: mol_type = other DNA

SEQ ID NO: 56867 - DNA, 80 bp, synthetic construct
  misc_feature 1..80: note = Artificially Synthesized Probe
  source 1..80: mol_type = other DNA
gcaggcagcccagagagaggggcccccacaacaccctccccagcccccgctgattgtgtgggggcagggagtatgcaggc

SEQ ID NO: 56868 - DNA, 80 bp, synthetic construct
  misc_feature 1..80: note = Artificially Synthesized Probe
  source 1..80: mol_type = other DNA
gctccagacgtcctgggccaagtcctgtgcgcggggcctccgggtctgcgagctgcggccgtgttcagagcgtgttttgc

SEQ ID NO: 56869 - DNA, 80 bp, synthetic construct
  misc_feature 1..80: note = Artificially Synthesized Probe
  source 1..80: mol_type = other DNA
agtccattacagtctccggctgtgaatgtagcaaggagtgggaactaggcctgggagatgggagtgtttgtctgatgact

SEQ ID NO: 56870 - DNA, 80 bp, synthetic construct
  misc_feature 1..80: note = Artificially Synthesized Probe
  source 1..80: mol_type = other DNA
aacgtctccggcctagcccccgacgctcggggatgtaagggcaagggctgcggggtcggaacgtcggctgtggctgtggc

SEQ ID NO: 56871 - DNA, 80 bp, synthetic construct; identical to SEQ ID NO: 25716
  misc_feature 1..80: note = Artificially Synthesized Probe
  source 1..80: mol_type = other DNA

SEQ ID NO: 56872 - DNA, 80 bp, synthetic construct
  misc_feature 1..80: note = Artificially Synthesized Probe
  source 1..80: mol_type = other DNA
ggggtttgagccacgttccccggaagcagtcggggcctgctggggtttgagccacgttccccggaagcagctggggcctg

SEQ ID NO: 56873 - DNA, 80 bp, synthetic construct
  misc_feature 1..80: note = Artificially Synthesized Probe
  source 1..80: mol_type = other DNA
ccagacctggagctaggaactggcccctggccatgggcccaggcagggtgaggtttcccagcaccctgggtgatctgaac

SEQ ID NO: 56874 - DNA, 80 bp, synthetic construct
  misc_feature 1..80: note = Artificially Synthesized Probe
  source 1..80: mol_type = other DNA
gacacccgcctttccgctccaagctctgcccaccgcctcacatggccctgggaattacaacagactttcccatctcccca

SEQ ID NO: 56875 - DNA, 80 bp, synthetic construct; identical to SEQ ID NO: 25717
  misc_feature 1..80: note = Artificially Synthesized Probe
  source 1..80: mol_type = other DNA

SEQ ID NO: 56876 - DNA, 80 bp, synthetic construct
  misc_feature 1..80: note = Artificially Synthesized Probe
  source 1..80: mol_type = other DNA
gtcctccagtcctgctgcccggtggctctggccatggttcccgtcccgggctgttcatgttccccctgctcctctccgtg

SEQ ID NO: 56877 - DNA, 80 bp, synthetic construct
  misc_feature 1..80: note = Artificially Synthesized Probe
  source 1..80: mol_type = other DNA
acctctgatatgcaactatttccagcagaaaatgtcccatgtccttaaaggatggagcacgctgctgggaacacggctct

SEQ ID NO: 56878 - DNA, 80 bp, synthetic construct; identical to SEQ ID NO: 25682
  misc_feature 1..80: note = Artificially Synthesized Probe
  source 1..80: mol_type = other DNA

SEQ ID NO: 56879 - DNA, 80 bp, synthetic construct
  misc_feature 1..80: note = Artificially Synthesized Probe
  source 1..80: mol_type = other DNA
cacagtcactgtgtggggttcagcccaggggaggtcacctcgccctcatccacgcagtcctgcggggaggcccatttgcc

SEQ ID NO: 56880 - DNA, 80 bp, synthetic construct; identical to SEQ ID NO: 25718
  misc_feature 1..80: note = Artificially Synthesized Probe
  source 1..80: mol_type = other DNA

SEQ ID NO: 56881 - DNA, 80 bp, synthetic construct
  misc_feature 1..80: note = Artificially Synthesized Probe
  source 1..80: mol_type = other DNA
cctccactcctggacatcgtagtctctgtcgccgggtagtagcagggccggaccccttcggatgagcacgcccaggccca

SEQ ID NO: 56882 - DNA, 80 bp, synthetic construct
  misc_feature 1..80: note = Artificially Synthesized Probe
  source 1..80: mol_type = other DNA
tggtgtgggcagcggggctggtgtgggcagcggtgctggtgtgggcggcggtcctggtgtgggcggtggtggtgctggtg

SEQ ID NO: 56883 - DNA, 80 bp, synthetic construct
  misc_feature 1..80: note = Artificially Synthesized Probe
  source 1..80: mol_type = other DNA
tgctggtgtgggtggcggtgctggtgtgggcggcggtgctgatgtgggtggtggtggtgctgatgtgggcggcggtgctg

SEQ ID NO: 56884 - DNA, 80 bp, synthetic construct; identical to SEQ ID NO: 25719
  misc_feature 1..80: note = Artificially Synthesized Probe
  source 1..80: mol_type = other DNA

SEQ ID NO: 56885 - DNA, 80 bp, synthetic construct
  misc_feature 1..80: note = Artificially Synthesized Probe
  source 1..80: mol_type = other DNA
tcggcatcgcagcagagtcccggtggtggagatgctttgccactggccacccagagctaggagcctcggccaagggctcc

SEQ ID NO: 56886 - DNA, 80 bp, synthetic construct
  misc_feature 1..80: note = Artificially Synthesized Probe
  source 1..80: mol_type = other DNA
ccagggaggcctccgtgaaaacacaaatcaagtgccaatttcctggtgaagagtctttatgagagcaatgcggccccgtg

SEQ ID NO: 56887 - DNA, 80 bp, synthetic construct
  misc_feature 1..80: note = Artificially Synthesized Probe
  source 1..80: mol_type = other DNA
ctgcctgtcctcttttgggtggccaggatgtcacagggcgagtaggtgtctggccctaccactggggggccatgttgcca

SEQ ID NO: 56888 - DNA, 80 bp, synthetic construct; identical to SEQ ID NO: 25720
  misc_feature 1..80: note = Artificially Synthesized Probe
  source 1..80: mol_type = other DNA

SEQ ID NO: 56889 - DNA, 80 bp, synthetic construct
  misc_feature 1..80: note = Artificially Synthesized Probe
  source 1..80: mol_type = other DNA
ggggcactggaccatgcagagaaggggccaccccagtgcctgccagggccagtcagagctgccaccctccaggctgtctg

SEQ ID NO: 56890 - DNA, 80 bp, synthetic construct
  misc_feature 1..80: note = Artificially Synthesized Probe
  source 1..80: mol_type = other DNA
tgatgtgcggggttgtggtgaggcgtagggctggggtcagctggtcgtccggacttttggttttctggctgtaaaatgca

SEQ ID NO: 56891 - DNA, 80 bp, synthetic construct
  misc_feature 1..80: note = Artificially Synthesized Probe
  source 1..80: mol_type = other DNA
ggggagtggaggctgtgagccagggaggaaacactactccacgtgttaggaggaagccacgtgctcctcgaacatgctgg

SEQ ID NO: 56892 - DNA, 80 bp, synthetic construct
  misc_feature 1..80: note = Artificially Synthesized Probe
  source 1..80: mol_type = other DNA
aatggaattaataagaaatcaagcagcattaaggattgcgtggtttggaaaatgtgatgtgggtctcccttgattgtttt

SEQ ID NO: 56893 - DNA, 80 bp, synthetic construct
  misc_feature 1..80: note = Artificially Synthesized Probe
  source 1..80: mol_type = other DNA
ctccagtcctggccaccggtcatctcctttctgtccctgggttccgtcttctgagcttccatacgaattaaaccatggaa

SEQ ID NO: 56894 - DNA, 80 bp, synthetic construct; identical to SEQ ID NO: 25721
  misc_feature 1..80: note = Artificially Synthesized Probe
  source 1..80: mol_type = other DNA

SEQ ID NO: 56895 - DNA, 80 bp, synthetic construct
  misc_feature 1..80: note = Artificially Synthesized Probe
  source 1..80: mol_type = other DNA
atcacttgtttttctctgactttttgtttccagcccatgttgggtgtaaagcagtgtcttgtggttttcatttgcatttt

SEQ ID NO: 56896 - DNA, 80 bp, synthetic construct
  misc_feature 1..80: note = Artificially Synthesized Probe
  source 1..80: mol_type = other DNA
ttcctcacatatatgattcgcaaatatcttctcccattctgtgagatgtcatttcactttcttgatggtgtcctttgagg

SEQ ID NO: 56897 - DNA, 80 bp, synthetic construct
  misc_feature 1..80: note = Artificially Synthesized Probe
  source 1..80: mol_type = other DNA
aaattttaatagctgcatgtggtgtgaagtagggatccagcttcgcccttttgcgtgtatctgttcgttggcccagcacc

SEQ ID NO: 56898 - DNA, 80 bp, synthetic construct; identical to SEQ ID NO: 25722
  misc_feature 1..80: note = Artificially Synthesized Probe
  source 1..80: mol_type = other DNA

SEQ ID NO: 56899 - DNA, 80 bp, synthetic construct
  misc_feature 1..80: note = Artificially Synthesized Probe
  source 1..80: mol_type = other DNA
gtgaagaggttgaattagtaatccaaaaacacccataaagaaaagccaaggaccagagagcttcccagctaaattctacc

SEQ ID NO: 56900 - DNA, 80 bp, synthetic construct
  misc_feature 1..80: note = Artificially Synthesized Probe
  source 1..80: mol_type = other DNA
acattgccaaaaaaagaaaattgcagactagtttatcttacgaattatggacacagaaatccttggtagactactagtaa

SEQ ID NO: 56901 - DNA, 80 bp, synthetic construct
  misc_feature 1..80: note = Artificially Synthesized Probe
  source 1..80: mol_type = other DNA
atgcatgttgggcgcccttatacgatgatgatatttggtacattttgaaatactgtggcccatgaagatcctgaaagcag

SEQ ID NO: 56902 - DNA, 80 bp, synthetic construct; identical to SEQ ID NO: 25723
  misc_feature 1..80: note = Artificially Synthesized Probe
  source 1..80: mol_type = other DNA

SEQ ID NO: 56903 - DNA, 80 bp, synthetic construct
  misc_feature 1..80: note = Artificially Synthesized Probe
  source 1..80: mol_type = other DNA
agaagaaataaaagacatccagattggaaaggaacaagtaaaactgtatttttagaggccagatcttatatatatatata

SEQ ID NO: 56904 - DNA, 80 bp, synthetic construct
  misc_feature 1..80: note = Artificially Synthesized Probe
  source 1..80: mol_type = other DNA
attagaaccaataaatgagctcaacaaggttgcagggtataaaatcagtatagaaaaatctattgtatttattttgcaat

SEQ ID NO: 56905 - DNA, 80 bp, synthetic construct
  misc_feature 1..80: note = Artificially Synthesized Probe
  source 1..80: mol_type = other DNA
cctaaatcaactagagtccacacaactcctgccagaatccccactggctatagaaattgtcaaagtgaccccaatactta

SEQ ID NO: 56906 - DNA, 80 bp, synthetic construct; identical to SEQ ID NO: 25724
  misc_feature 1..80: note = Artificially Synthesized Probe
  source 1..80: mol_type = other DNA

SEQ ID NO: 56907 - DNA, 80 bp, synthetic construct
  misc_feature 1..80: note = Artificially Synthesized Probe
  source 1..80: mol_type = other DNA
caaggctttgaaggcatgcaggaataacacccacacagagccccaggggacatggatcgaggtctgaaaagcatttcttc

SEQ ID NO: 56908 - DNA, 80 bp, synthetic construct
  misc_feature 1..80: note = Artificially Synthesized Probe
  source 1..80: mol_type = other DNA
tgcattgacgttgatacgatgatcagaaaacgctcatacacaccttccattcgactcacaagcaaacacttgccacattt

SEQ ID NO: 56909 - DNA, 80 bp, synthetic construct
  misc_feature 1..80: note = Artificially Synthesized Probe
  source 1..80: mol_type = other DNA
tacatacccatgcacacattcacacatgctcatctgtatgcacacataatccacatgcagtccacacacacagatatcca

SEQ ID NO: 56910 - DNA, 80 bp, synthetic construct; identical to SEQ ID NO: 25725
  misc_feature 1..80: note = Artificially Synthesized Probe
  source 1..80: mol_type = other DNA

SEQ ID NO: 56911 - DNA, 80 bp, synthetic construct
  misc_feature 1..80: note = Artificially Synthesized Probe
  source 1..80: mol_type = other DNA
aacgtggcagtccagctgggtttctatgggggtgtctgacccgcagcctggactcacccacctgcctgctcgtgtttagg

SEQ ID NO: 56912 - DNA, 80 bp, synthetic construct
  misc_feature 1..80: note = Artificially Synthesized Probe
  source 1..80: mol_type = other DNA
gctcatgacccttcaccagtgatccatctcctgtgtctctggcggccttcccaagggtgggccctggggctgcggtggag

SEQ ID NO: 56913 - DNA, 80 bp, synthetic construct
  misc_feature 1..80: note = Artificially Synthesized Probe
  source 1..80: mol_type = other DNA
agggccagcactgggcggtcacaggccagagccctgcaccaggcggtcataggccaggacctgtccaaggcagcggagtg

SEQ ID NO: 56914 - DNA, 80 bp, synthetic construct
  misc_feature 1..80: note = Artificially Synthesized Probe
  source 1..80: mol_type = other DNA
ggattggggttgaagacctcaggctccccacctcatagtccccaggctctgccgagcggtcagagggacaccagagcctg

SEQ ID NO: 56915 - DNA, 80 bp, synthetic construct
  misc_feature 1..80: note = Artificially Synthesized Probe
  source 1..80: mol_type = other DNA
gtaagctgggggtgggtgttagacagggtgtggccacactccctctgctaccgtaggtcttcaggtccatgtgtttggtg

SEQ ID NO: 56916 - DNA, 80 bp, synthetic construct; identical to SEQ ID NO: 25726
  misc_feature 1..80: note = Artificially Synthesized Probe
  source 1..80: mol_type = other DNA

SEQ ID NO: 56917 - DNA, 80 bp, synthetic construct
  misc_feature 1..80: note = Artificially Synthesized Probe
  source 1..80: mol_type = other DNA
aaccttgactggctgtgcctgcctgggggcgtgcccatgggcagtgggtactgggacctcagggcccaggtttcgctccc

SEQ ID NO: 56918 - DNA, 80 bp, synthetic construct
  misc_feature 1..80: note = Artificially Synthesized Probe
  source 1..80: mol_type = other DNA
tgggggcaaggacaagctcagggaatgaagagggtggctcaggtggggtctgccctgctccctcatccctgtcatcctcc

SEQ ID NO: 56919 - DNA, 80 bp, synthetic construct; identical to SEQ ID NO: 25727
  misc_feature 1..80: note = Artificially Synthesized Probe
  source 1..80: mol_type = other DNA

SEQ ID NO: 56920 - DNA, 80 bp, synthetic construct
  misc_feature 1..80: note = Artificially Synthesized Probe
  source 1..80: mol_type = other DNA
gtgggtggtctccctcgtcctctgaaactgcagccagtgcatgtgacctccccaccgcatctcaggcctccctcccggtg

SEQ ID NO: 56921 - DNA, 80 bp, synthetic construct
  misc_feature 1..80: note = Artificially Synthesized Probe
  source 1..80: mol_type = other DNA
gcttaggctccagggccctcgtggctgctccggcggtgccatcacctctggagacagggcccgactctgcaggacggcac

SEQ ID NO: 56922 - DNA, 80 bp, synthetic construct
  misc_feature 1..80: note = Artificially Synthesized Probe
  source 1..80: mol_type = other DNA
gccagcgggggccatggtaccacagcactgtagcctagcaacagaggagacccattttctcatcagggatagagcaggga

SEQ ID NO: 56923 - DNA, 80 bp, synthetic construct
  misc_feature 1..80: note = Artificially Synthesized Probe
  source 1..80: mol_type = other DNA
gacacagctgggtggctgtgttgtggggtgccgcctttccgggatcccacggggttggcgagccatgctcttccccagct

SEQ ID NO: 56924 - DNA, 80 bp, synthetic construct; identical to SEQ ID NO: 25683
  misc_feature 1..80: note = Artificially Synthesized Probe
  source 1..80: mol_type = other DNA

SEQ ID NO: 56925 - DNA, 80 bp, synthetic construct; identical to SEQ ID NO: 25728
  misc_feature 1..80: note = Artificially Synthesized Probe
  source 1..80: mol_type = other DNA

SEQ ID NO: 56926 - DNA, 80 bp, synthetic construct
  misc_feature 1..80: note = Artificially Synthesized Probe
  source 1..80: mol_type = other DNA
ctgccttcctgcagaccccaaggtccctcatgacgacacgtgtgtcctctgtctctggcaggcctgaggccgcactcacc

SEQ ID NO: 56927 - DNA, 80 bp, synthetic construct
  misc_feature 1..80: note = Artificially Synthesized Probe
  source 1..80: mol_type = other DNA
gggccctttacacagagctgggcaggggctgggaaggaggcctggatccctggccatgctgctagcaggacttgggcaac

SEQ ID NO: 56928 - DNA, 80 bp, synthetic construct
  misc_feature 1..80: note = Artificially Synthesized Probe
  source 1..80: mol_type = other DNA
gtgtatatatgtgagcttgtgtatgcatgtgagtactcacgtgtgacatgtgagcatatatgtacgtgtgtgtttctgta

SEQ ID NO: 56929 - DNA, 80 bp, synthetic construct; identical to SEQ ID NO: 25729
  misc_feature 1..80: note = Artificially Synthesized Probe
  source 1..80: mol_type = other DNA

SEQ ID NO: 56930 - DNA, 80 bp, synthetic construct
  misc_feature 1..80: note = Artificially Synthesized Probe
  source 1..80: mol_type = other DNA
tatgtgtggggcttgtgtatgcatgtgagtattcacatgtgacatgtgagcatgtatgtacatgtgtgtgagtattcaca

SEQ ID NO: 56931 - DNA, 80 bp, synthetic construct
  misc_feature 1..80: note = Artificially Synthesized Probe
  source 1..80: mol_type = other DNA
atgtatgacatgtaagcattatgtatgtgtgtgggcttgtgtatgcgagtattcacatgtgacatgtgtgagcatgtatg

SEQ ID NO: 56932 - DNA, 80 bp, synthetic construct
  misc_feature 1..80: note = Artificially Synthesized Probe
  source 1..80: mol_type = other DNA
tcccgcccattcattctccccgcggggtccgggccgggaggggtgcgcggtgcgagcggccggagtccccgcgcggggac

SEQ ID NO: 56933 - DNA, 80 bp, synthetic construct; identical to SEQ ID NO: 25730
  misc_feature 1..80: note = Artificially Synthesized Probe
  source 1..80: mol_type = other DNA

SEQ ID NO: 56934 - DNA, 80 bp, synthetic construct
  misc_feature 1..80: note = Artificially Synthesized Probe
  source 1..80: mol_type = other DNA
gtgcgatgctgtggaggtgcttggaggtgagggaaccccaatggtggacaggaagctctcaaagcacttagaggtggagg

SEQ ID NO: 56935 - DNA, 80 bp, synthetic construct
  misc_feature 1..80: note = Artificially Synthesized Probe
  source 1..80: mol_type = other DNA
ccattgctaggcgtaatcagttccttgtgcctggctctgcccaggaggtgtatattggggggcatgaatgtagggccagc

SEQ ID NO: 56936 - DNA, 80 bp, synthetic construct
  misc_feature 1..80: note = Artificially Synthesized Probe
  source 1..80: mol_type = other DNA
aggctgcaggggaagtgtctgtgccccgtgcctgcaggagcacgccttccccccgcagctcctccggcgcgggcaggccc

SEQ ID NO: 56937 - DNA, 80 bp, synthetic construct
  misc_feature 1..80: note = Artificially Synthesized Probe
  source 1..80: mol_type = other DNA
cagcagcagcagtcagttttcaagcaaagagacttctctgggcatctctgagacgagtttgagcagtgtggggattcgtt

SEQ ID NO: 56938 - DNA, 80 bp, synthetic construct
  misc_feature 1..80: note = Artificially Synthesized Probe
  source 1..80: mol_type = other DNA
tgacctggggacagctggggacaggttgtggggctgtttcgtcacagctgctgtcacattaactgaccccagccctgggg

SEQ ID NO: 56939 - DNA, 80 bp, synthetic construct; identical to SEQ ID NO: 25731
  misc_feature 1..80: note = Artificially Synthesized Probe
  source 1..80: mol_type = other DNA

SEQ ID NO: 56940 - DNA, 80 bp, synthetic construct
  misc_feature 1..80: note = Artificially Synthesized Probe
  source 1..80: mol_type = other DNA
ctggaatgttccagtctaaccggatccttttgtggacggggagactgaggccgggaaggagtatgcattcctgccctggt

SEQ ID NO: 56941 - DNA, 80 bp, synthetic construct
  misc_feature 1..80: note = Artificially Synthesized Probe
  source 1..80: mol_type = other DNA
gcagccattgcaacagtggaattggcactgcagcaagctgagcattttttcggttccaagtttcccacaacacaatggct

SEQ ID NO: 56942 - DNA, 80 bp, synthetic construct; identical to SEQ ID NO: 25732
  misc_feature 1..80: note = Artificially Synthesized Probe
  source 1..80: mol_type = other DNA

SEQ ID NO: 56943 - DNA, 80 bp, synthetic construct
  misc_feature 1..80: note = Artificially Synthesized Probe
  source 1..80: mol_type = other DNA
gaggccctcccgccgcccgcagctccagccgcactgccccgatggctccctacccctgtggctgccacatcctgctgctg

SEQ ID NO: 56944 - DNA, 80 bp, synthetic construct
  misc_feature 1..80: note = Artificially Synthesized Probe
  source 1..80: mol_type = other DNA
ggaatggttccacagagccagcgacagcccctggcagccctgagccaccctcagagctgctggaagatggccaggacacc

SEQ ID NO: 56945 - DNA, 80 bp, synthetic construct
  misc_feature 1..80: note = Artificially Synthesized Probe
  source 1..80: mol_type = other DNA
actgagagcttggccagggcggaaaccctggtcctggagactcctgtgggcccccttgccctcgctgggccttccagcac

SEQ ID NO: 56946 - DNA, 80 bp, synthetic construct
  misc_feature 1..80: note = Artificially Synthesized Probe
  source 1..80: mol_type = other DNA
tcttcaggtagagcttctctctcctccttgctgggcggggcccctccctggggaagcctgcaggacccagacagccaagg

SEQ ID NO: 56947 - DNA, 80 bp, synthetic construct
  misc_feature 1..80: note = Artificially Synthesized Probe
  source 1..80: mol_type = other DNA
ccttgtgatgggcagggcaggcaccagcaccaggctgggtggcggtttggctctcaccacgccggcttccagaaggccag

SEQ ID NO: 56948 - DNA, 80 bp, synthetic construct; identical to SEQ ID NO: 25733
  misc_feature 1..80: note = Artificially Synthesized Probe
  source 1..80: mol_type = other DNA

SEQ ID NO: 56949 - DNA, 80 bp, synthetic construct
  misc_feature 1..80: note = Artificially Synthesized Probe
  source 1..80: mol_type = other DNA
gggggcctgctgcagacgcactgccaccccttcctcgcctggttcttctgcctgctgctggtccccccatgcggcagcgt

SEQ ID NO: 56950 - DNA, 80 bp, synthetic construct
  misc_feature 1..80: note = Artificially Synthesized Probe
  source 1..80: mol_type = other DNA
ccggccccgatctccccaccctttcctttttgccttgccaggtaagtgtgggcggggctgacgtgagcctggtacaggtt

SEQ ID NO: 56951 - DNA, 80 bp, synthetic construct; identical to SEQ ID NO: 25734
  misc_feature 1..80: note = Artificially Synthesized Probe
  source 1..80: mol_type = other DNA

SEQ ID NO: 56952 - DNA, 80 bp, synthetic construct
  misc_feature 1..80: note = Artificially Synthesized Probe
  source 1..80: mol_type = other DNA
gaccctaccagcgtggggaccagggaggtctgcagggcccgtcctgagagggagcctttcatgtccccctccccatcctg

SEQ ID NO: 56953 - DNA, 80 bp, synthetic construct
  misc_feature 1..80: note = Artificially Synthesized Probe
  source 1..80: mol_type = other DNA
aaggaccccagcagatccctcctctgtgtccgggagtagacggggcccctgagctgtgcctgccccattcagattctgct

SEQ ID NO: 56954 - DNA, 80 bp, synthetic construct
  misc_feature 1..80: note = Artificially Synthesized Probe
  source 1..80: mol_type = other DNA
ggacctggaggtgggggtgcctgcagtggaaattctggtggacgcccacccaccaggctccgtgagggatgacgagcttg

SEQ ID NO: 56955 - DNA, 80 bp, synthetic construct; identical to SEQ ID NO: 25735
  misc_feature 1..80: note = Artificially Synthesized Probe
  source 1..80: mol_type = other DNA

SEQ ID NO: 56956 - DNA, 80 bp, synthetic construct
  misc_feature 1..80: note = Artificially Synthesized Probe
  source 1..80: mol_type = other DNA
tctcgtagggctggagctctctgaggcaggggccgtgcccacggctgttggcatctcatagggctggagctctctgaggc

SEQ ID NO: 56957 - DNA, 80 bp, synthetic construct
  misc_feature 1..80: note = Artificially Synthesized Probe
  source 1..80: mol_type = other DNA
cggagccacaccccacctggctactgttccccaccaagcatgtgggtagggcagccttgcaggagccgtactgactggag

SEQ ID NO: 56958 - DNA, 80 bp, synthetic construct; identical to SEQ ID NO: 25684
  misc_feature 1..80: note = Artificially Synthesized Probe
  source 1..80: mol_type = other DNA

SEQ ID NO: 56959 - DNA, 80 bp, synthetic construct
  misc_feature 1..80: note = Artificially Synthesized Probe
  source 1..80: mol_type = other DNA
cctgccagcccgagactgtctgggatcagctgagcactgtgagcaagcttcagcctcagggaaggtgccggtctcctggg

SEQ ID NO: 56960 - DNA, 80 bp, synthetic construct; identical to SEQ ID NO: 25736
  misc_feature 1..80: note = Artificially Synthesized Probe
  source 1..80: mol_type = other DNA

SEQ ID NO: 56961 - DNA, 80 bp, synthetic construct
  misc_feature 1..80: note = Artificially Synthesized Probe
  source 1..80: mol_type = other DNA
ggaggaggagggggagcccagcctgacccctcgggcagacttcgaggccccgaaagtgggggtgctgggctgtgatccgg

SEQ ID NO: 56962 - DNA, 80 bp, synthetic construct
  misc_feature 1..80: note = Artificially Synthesized Probe
  source 1..80: mol_type = other DNA
gtgtgtccaccccgccggcccacctcgaggagagtgtgggggacagtgcagccgtgctggggcgtggggggcgctcaaag

SEQ ID NO: 56963 - DNA, 80 bp, synthetic construct
  misc_feature 1..80: note = Artificially Synthesized Probe
  source 1..80: mol_type = other DNA
tgagcgagcggggcttgggcttgggctgcccgggacactgcctccaggaagccccctgggctgtctcagtgggactctgt

SEQ ID NO: 56964 - DNA, 80 bp, synthetic construct; identical to SEQ ID NO: 25737
  misc_feature 1..80: note = Artificially Synthesized Probe
  source 1..80: mol_type = other DNA

SEQ ID NO: 56965 - DNA, 80 bp, synthetic construct
  misc_feature 1..80: note = Artificially Synthesized Probe
  source 1..80: mol_type = other DNA
agcaccaggagaccagcaggcatccaccctcgtggtgcaggccatctgatgagggcagggaccagtgccgggatggatag

SEQ ID NO: 56966 - DNA, 80 bp, synthetic construct
  misc_feature 1..80: note = Artificially Synthesized Probe
  source 1..80: mol_type = other DNA
ccacccccatcactggacattcggaggtcagtgggaggccacgggagtgcacgtgaaggtcatgtcaccatgatggcccc

SEQ ID NO: 56967 - DNA, 80 bp, synthetic construct
  misc_feature 1..80: note = Artificially Synthesized Probe
  source 1..80: mol_type = other DNA
taactttggtttaagaagggagaagaccactctgggaaataactcatgcttatctctcaccgcttggcaacctacaaata

SEQ ID NO: 56968 - DNA, 80 bp, synthetic construct
  misc_feature 1..80: note = Artificially Synthesized Probe
  source 1..80: mol_type = other DNA
ctgccagcacagctgctcctgggggcaggagaggcactgtctgttttggggtgacgtgagctgatgggaaagccaggctg

SEQ ID NO: 56969 - DNA, 80 bp, synthetic construct; identical to SEQ ID NO: 25738
  misc_feature 1..80: note = Artificially Synthesized Probe
  source 1..80: mol_type = other DNA

SEQ ID NO: 56970 - DNA, 80 bp, synthetic construct
  misc_feature 1..80: note = Artificially Synthesized Probe
  source 1..80: mol_type = other DNA
tttgaagtgccatatgcgatacagtattctagctgtaatcaccatgtgtacattagacctctagaacttacttttcctgc

SEQ ID NO: 56971 - DNA, 80 bp, synthetic construct
  misc_feature 1..80: note = Artificially Synthesized Probe
  source 1..80: mol_type = other DNA
agaccttccctgcaggaaatggtccagtagtccaacaggcgaaatgaaaggacactactcagtaacagtaagtcaaggag

SEQ ID NO: 56972 - DNA, 80 bp, synthetic construct
  misc_feature 1..80: note = Artificially Synthesized Probe
  source 1..80: mol_type = other DNA
ctcttccttgtcctgcatctgctgcaatgctgaagagcagtctggagccaggctgctgggcccccctcgaggcttccttg

SEQ ID NO: 56973 - DNA, 80 bp, synthetic construct
  misc_feature 1..80: note = Artificially Synthesized Probe
  source 1..80: mol_type = other DNA
agtatttgcttctatgcctgccttatttcctttagtttaatatcctccaggttcattcataaaaagtgcagttacaaact

SEQ ID NO: 56974 - DNA, 80 bp, synthetic construct
  misc_feature 1..80: note = Artificially Synthesized Probe
  source 1..80: mol_type = other DNA
cctttattgagatcttcatttcttcatgtgacttactgttattgactagtgtcctttcattttacctgctggactccctg

SEQ ID NO: 56975 - DNA, 80 bp, synthetic construct; identical to SEQ ID NO: 25739
  misc_feature 1..80: note = Artificially Synthesized Probe
  source 1..80: mol_type = other DNA

SEQ ID NO: 56976 - DNA, 80 bp, synthetic construct
  misc_feature 1..80: note = Artificially Synthesized Probe
  source 1..80: mol_type = other DNA
tatttcttcagatagtctctctgcacctttctttttctcttctgtttgcagcttccacggcatgcatgcttccttgtctc

SEQ ID NO: 56977 - DNA, 80 bp, synthetic construct
  misc_feature 1..80: note = Artificially Synthesized Probe
  source 1..80: mol_type = other DNA
acttttcagttctgtaatttctttctggtttctttcaaggtttttatattgatatttccatgttgttcatacatcacttt

SEQ ID NO: 56978 - DNA, 80 bp, synthetic construct
  misc_feature 1..80: note = Artificially Synthesized Probe
  source 1..80: mol_type = other DNA
tgccttgtgattttgtgttaaaaagtgaacatttgaactcagtaatgtggctcttgaattttgcccttcaccagcgttcg

SEQ ID NO: 56979 - DNA, 80 bp, synthetic construct; identical to SEQ ID NO: 25740
  misc_feature 1..80: note = Artificially Synthesized Probe
  source 1..80: mol_type = other DNA

SEQ ID NO: 56980 - DNA, 80 bp, synthetic construct
  misc_feature 1..80: note = Artificially Synthesized Probe
  source 1..80: mol_type = other DNA
cctcaggaaccgagagagaccttccttccatgtttcaacttagacaacaggagactttgttttgggaggaatcactcaat

SEQ ID NO: 56981 - DNA, 80 bp, synthetic construct
  misc_feature 1..80: note = Artificially Synthesized Probe
  source 1..80: mol_type = other DNA
ttcccacaagctgtgtggctgctgctccaggaactcgtgcatggcacctgctatgggaatgggggtggaggatggatgtg

SEQ ID NO: 56982 - DNA, 80 bp, synthetic construct
  misc_feature 1..80: note = Artificially Synthesized Probe
  source 1..80: mol_type = other DNA
attcctggcgctttccatctgccatttaccagagtactccagaatcattttcaaacacgtttctttctgtcaagaaatca

SEQ ID NO: 56983 - DNA, 80 bp, synthetic construct
  misc_feature 1..80: note = Artificially Synthesized Probe
  source 1..80: mol_type = other DNA
gcctgtaatcctagctactcgggatgctgaggcaggagaactgcttgaacctgggaggtggaggttgtggtgagctgaga

SEQ ID NO: 56984 - DNA, 80 bp, synthetic construct; identical to SEQ ID NO: 25741
  misc_feature 1..80: note = Artificially Synthesized Probe
  source 1..80: mol_type = other DNA

SEQ ID NO: 56985 - DNA, 80 bp, synthetic construct
  misc_feature 1..80: note = Artificially Synthesized Probe
  source 1..80: mol_type = other DNA
ctcttcccaggatgggattttggggatgagatcttcctggtgggctggagtctgtcccagaagtcaacagcccaacctgg

SEQ ID NO: 56986 - DNA, 80 bp, synthetic construct
  misc_feature 1..80: note = Artificially Synthesized Probe
  source 1..80: mol_type = other DNA
tataggtatgtagcttcctattggcgactgtaagaaattgccacaaattcagtggcttaaaccaacacagctgtcttacc

SEQ ID NO: 56987 - DNA, 80 bp, synthetic construct
  misc_feature 1..80: note = Artificially Synthesized Probe
  source 1..80: mol_type = other DNA
ccttcaaagccaacggtgttggacaagtcctcatggtgccatcttttgtccttcgattttaaggctttgtgtggttagaa

SEQ ID NO: 56988 - DNA, 80 bp, synthetic construct; identical to SEQ ID NO: 25742
  misc_feature 1..80: note = Artificially Synthesized Probe
  source 1..80: mol_type = other DNA

SEQ ID NO: 56989 - DNA, 80 bp, synthetic construct
  misc_feature 1..80: note = Artificially Synthesized Probe
  source 1..80: mol_type = other DNA
cacagcctcgcctttgtttatcagacaccagctgagccaccccacctgtgcctggcgtgggttttgggtcagcgctgacg

SEQ ID NO: 56990 - DNA, 80 bp, synthetic construct
  misc_feature 1..80: note = Artificially Synthesized Probe
  source 1..80: mol_type = other DNA
caagatgtccccccgggcacttcactgcgtaagtgctatggtgtgatggagtgatgatggtggcgcactcttcaagctct

SEQ ID NO: 56991 - DNA, 80 bp, synthetic construct
  misc_feature 1..80: note = Artificially Synthesized Probe
  source 1..80: mol_type = other DNA
tctgcagtggctctgccttccccgatgccaggtgaccccatggagccagtgtctgtgacctcttccatgctggggctaaa

SEQ ID NO: 56992 - DNA, 80 bp, synthetic construct; identical to SEQ ID NO: 25743
  misc_feature 1..80: note = Artificially Synthesized Probe
  source 1..80: mol_type = other DNA

SEQ ID NO: 56993 - DNA, 80 bp, synthetic construct
  misc_feature 1..80: note = Artificially Synthesized Probe
  source 1..80: mol_type = other DNA
agcccactcccccgtgggtgaacgcggctcttggtggagagcccagtttggggagaagggacggtcttgtcctgggaggt

SEQ ID NO: 56994 - DNA, 80 bp, synthetic construct
  misc_feature 1..80: note = Artificially Synthesized Probe
  source 1..80: mol_type = other DNA
ataagggacccaaggggaggggcggggacgttccacactggtgtgagaacagcggagagtcccagccagaggtacccgct

SEQ ID NO: 56995 - DNA, 80 bp, synthetic construct
  misc_feature 1..80: note = Artificially Synthesized Probe
  source 1..80: mol_type = other DNA
ggaggtggtccagcaggaggggccgccccaccatacccaggaaggttgagctctcgcacccgggaaggctgagctctcgc

SEQ ID NO: 56996 - DNA, 80 bp, synthetic construct
  misc_feature 1..80: note = Artificially Synthesized Probe
  source 1..80: mol_type = other DNA
gagcccccaggagcttcgtggagaggagacgggacagctttggaaagggcgttgctgtcactggggtccctggggccgcc

SEQ ID NO: 56997 - DNA, 80 bp, synthetic construct; identical to SEQ ID NO: 25744
  misc_feature 1..80: note = Artificially Synthesized Probe
  source 1..80: mol_type = other DNA

SEQ ID NO: 56998 - DNA, 80 bp, synthetic construct
  misc_feature 1..80: note = Artificially Synthesized Probe
  source 1..80: mol_type = other DNA
ctggcacggcaggtgtgctgggaagtcactctgagcagggtctgcccttgagtgggtgctgcccccctcccgtgggcagg

SEQ ID NO: 56999 - DNA, 80 bp, synthetic construct
  misc_feature 1..80: note = Artificially Synthesized Probe
  source 1..80: mol_type = other DNA
ggcatttgcacggagcagcggggctggtggggagactgtggcacgttggcaggtacgtcaggcatgcagcccctccaagg

SEQ ID NO: 57000 - DNA, 80 bp, synthetic construct
  misc_feature 1..80: note = Artificially Synthesized Probe
  source 1..80: mol_type = other DNA
acccggcctttgattcctttttcctgtgtgcatttttgagcaccttctgtgtgcgagaggccgtgcctgcccgagaagag

SEQ ID NO: 57001 - DNA, 80 bp, synthetic construct
  misc_feature 1..80: note = Artificially Synthesized Probe
  source 1..80: mol_type = other DNA
gcagccactctgggcgacgccccgtagccgaggcttcgaagaacactggggtgtggggtcagcctccctccttccctgtg

SEQ ID NO: 57002 - DNA, 80 bp, synthetic construct; identical to SEQ ID NO: 25745
  misc_feature 1..80: note = Artificially Synthesized Probe
  source 1..80: mol_type = other DNA

SEQ ID NO: 57003 - DNA, 80 bp, synthetic construct
  misc_feature 1..80: note = Artificially Synthesized Probe
  source 1..80: mol_type = other DNA
caggggatcagggcaggctgccaggcacgtggagagccctcccagactcagtttctcctttctgcccctgcctggctgcc

SEQ ID NO: 57004 - DNA, 80 bp, synthetic construct
  misc_feature 1..80: note = Artificially Synthesized Probe
  source 1..80: mol_type = other DNA
gctggcctacgtctttgggccagatgccaacagtggccaagtggcccggtaccacttccccagcctcttcttccgtgact

SEQ ID NO: 57005 - DNA, 80 bp, synthetic construct; identical to SEQ ID NO: 25746
  misc_feature 1..80: note = Artificially Synthesized Probe
  source 1..80: mol_type = other DNA

SEQ ID NO: 57006 - DNA, 80 bp, synthetic construct
  misc_feature 1..80: note = Artificially Synthesized Probe
  source 1..80: mol_type = other DNA
gggggactggagcagctgggatggggtggggtgggggtggccactgggacagggacggagctgtggccggaagaggagag

SEQ ID NO: 57007 - DNA, 80 bp, synthetic construct
  misc_feature 1..80: note = Artificially Synthesized Probe
  source 1..80: mol_type = other DNA
ggtagccctgggcttccatggtttctctgagaccccgaggcccagcccaggagggccctctttgaacgactttgtaacta

SEQ ID NO: 57008 - DNA, 80 bp, synthetic construct
  misc_feature 1..80: note = Artificially Synthesized Probe
  source 1..80: mol_type = other DNA
gctggggtccttgttgaaaacgatgaacgatccaaagctggcggcagcagggtgttgatcccagcagggttctcctgtgg

SEQ ID NO: 57009 - DNA, 80 bp, synthetic construct
  misc_feature 1..80: note = Artificially Synthesized Probe
  source 1..80: mol_type = other DNA
ggaagtccctccagtgggccttcatttcttggggttgggggggtggacagatccctaaacccatgtggggtctgtgtcca

SEQ ID NO: 57010 - DNA, 80 bp, synthetic construct; identical to SEQ ID NO: 25747
  misc_feature 1..80: note = Artificially Synthesized Probe
  source 1..80: mol_type = other DNA

SEQ ID NO: 57011 - DNA, 80 bp, synthetic construct
  misc_feature 1..80: note = Artificially Synthesized Probe
  source 1..80: mol_type = other DNA
gagaggcaatttgttgtgtgagtccccagccgtttcttggtggaataaagtggcccacaagtgccgtacatctttaacac

SEQ ID NO: 57012 - DNA, 80 bp, synthetic construct; identical to SEQ ID NO: 25685
  misc_feature 1..80: note = Artificially Synthesized Probe
  source 1..80: mol_type = other DNA

SEQ ID NO: 57013 - DNA, 80 bp, synthetic construct
  misc_feature 1..80: note = Artificially Synthesized Probe
  source 1..80: mol_type = other DNA
cgtgtgtaggaagagggggtctgggtgtttaattttgcatttcttggactgtgaagatagactttcattttgtcacttgt

SEQ ID NO: 57014 - DNA, 80 bp, synthetic construct; identical to SEQ ID NO: 25748
  misc_feature 1..80: note = Artificially Synthesized Probe
  source 1..80: mol_type = other DNA

SEQ ID NO: 57015 - DNA, 80 bp, synthetic construct
  misc_feature 1..80: note = Artificially Synthesized Probe
  source 1..80: mol_type = other DNA
ctaatttttgtatttttagtagagacggggtttcaccatattggtcaggctggtctcgaactcccgacctcaggtgatcc

SEQ ID NO: 57016 - DNA, 80 bp, synthetic construct
  misc_feature 1..80: note = Artificially Synthesized Probe
  source 1..80: mol_type = other DNA
agctagagggccctgggtctggccctgggctggggccctgctgggcgtgggtggcgtgcagcaggccgtgtgctgctggg

SEQ ID NO: 57017 - DNA, 80 bp, synthetic construct
  misc_feature 1..80: note = Artificially Synthesized Probe
  source 1..80: mol_type = other DNA
cttgtgctgctgggcgtgggtggcgtgcagcaggccgtgtgctgctgggcgtgggtggcgcgctatgggccgtgtgctga

SEQ ID NO: 57018 - DNA, 80 bp, synthetic construct; identical to SEQ ID NO: 25749
  misc_feature 1..80: note = Artificially Synthesized Probe
  source 1..80: mol_type = other DNA

SEQ ID NO: 57019 - DNA, 80 bp, synthetic construct
  misc_feature 1..80: note = Artificially Synthesized Probe
  source 1..80: mol_type = other DNA
ggagcattggttgtgttcctcgtcctaagagtccttgggcgttgttggtcttttcaggttcactttcttgagtcaggttt

SEQ ID NO: 57020 - DNA, 80 bp, synthetic construct
  misc_feature 1..80: note = Artificially Synthesized Probe
  source 1..80: mol_type = other DNA
catgctcttccctcacagaattcctgtgagctctgtttcaggtgtctccggatttcataactttcagtccgaagtccctt

SEQ ID NO: 57021 - DNA, 80 bp, synthetic construct
  misc_feature 1..80: note = Artificially Synthesized Probe
  source 1..80: mol_type = other DNA
tctcaggagagcgctgtggccacctgtgggggggtcagggcctcacgggcctctctggacagtgcatgtctgtgtgggga

SEQ ID NO: 57022 - DNA, 80 bp, synthetic construct
  misc_feature 1..80: note = Artificially Synthesized Probe
  source 1..80: mol_type = other DNA
tgcggctcactgcaagctctgcctcccgggttcacgccattctcctgcctcagcctcccaagtagctgggactacaggcg

SEQ ID NO: 57023 - DNA, 80 bp, synthetic construct
  misc_feature 1..80: note = Artificially Synthesized Probe
  source 1..80: mol_type = other DNA
aaccttgctaatttggttgatggaaaatatcatctcagagttctgttttgtgagtccccattgccatgcgggcaaacatt

SEQ ID NO: 57024 - DNA, 80 bp, synthetic construct; identical to SEQ ID NO: 25750
  misc_feature 1..80: note = Artificially Synthesized Probe
  source 1..80: mol_type = other DNA

SEQ ID NO: 57025 - DNA, 80 bp, synthetic construct
  misc_feature 1..80: note = Artificially Synthesized Probe
  source 1..80: mol_type = other DNA
ctgtgggaaacccagggggcccacagggtccacacccccccacgcatgagctcacacgcgtgcatacgtgatctcatgtt

SEQ ID NO: 57026 - DNA, 80 bp, synthetic construct
  misc_feature 1..80: note = Artificially Synthesized Probe
  source 1..80: mol_type = other DNA
ccagccggcatggggagccccaggctccagctggcctcgcttggctctgaaatctaggccaggatgcagaacccgcagtg

SEQ ID NO: 57027 - DNA, 80 bp, synthetic construct
  misc_feature 1..80: note = Artificially Synthesized Probe
  source 1..80: mol_type = other DNA
gcgccctcctgtgtccttgcccagcatccccggcctgcatctcaccaggcaccgccggccgcgccagggcccgagagggc

SEQ ID NO: 57028 - DNA, 80 bp, synthetic construct; identical to SEQ ID NO: 25751
  misc_feature 1..80: note = Artificially Synthesized Probe
  source 1..80: mol_type = other DNA

SEQ ID NO: 57029 - DNA, 80 bp, synthetic construct
  misc_feature 1..80: note = Artificially Synthesized Probe
  source 1..80: mol_type = other DNA
gccctcaggtggcccatcagctgcctcagatgagccaagtctgagggagcagcctccgcccagccgggtgctttccacat

SEQ ID NO: 57030 - DNA, 80 bp, synthetic construct
  misc_feature 1..80: note = Artificially Synthesized Probe
  source 1..80: mol_type = other DNA
gccacctcaggaccgctggtgacccctttctctgtctgcatttagggggtgatcgctgagctgaaggtgcgcagggaccc

SEQ ID NO: 57031 - DNA, 80 bp, synthetic construct
  misc_feature 1..80: note = Artificially Synthesized Probe
  source 1..80: mol_type = other DNA
ctgggaagctgcgataccatttctgtgctctcctgtagcacctcagagcccttccttgccctgaactttcccataaaaac

SEQ ID NO: 57032 - DNA, 80 bp, synthetic construct; identical to SEQ ID NO: 25752
  misc_feature 1..80: note = Artificially Synthesized Probe
  source 1..80: mol_type = other DNA

SEQ ID NO: 57033 - DNA, 80 bp, synthetic construct
  misc_feature 1..80: note = Artificially Synthesized Probe
  source 1..80: mol_type = other DNA
gtgttgtgtggcgtgtgtgttggtggggtgtgtggaatcacgtggtacccaaggggagaatcccccagccccaggtgtga

SEQ ID NO: 57034 - DNA, 80 bp, synthetic construct
  misc_feature 1..80: note = Artificially Synthesized Probe
  source 1..80: mol_type = other DNA
ttgtctgttgatgctttcagctctggatgtcctattttgcgtacttttattgtttatggtcagcctttaactgggggtat

SEQ ID NO: 57035 - DNA, 80 bp, synthetic construct
  misc_feature 1..80: note = Artificially Synthesized Probe
  source 1..80: mol_type = other DNA
tgtgggcagtgtgtgaacatccatgttactttcatgctttttctttattttgcccaataagcccgttgtttttgcctgga

SEQ ID NO: 57036 - DNA, 80 bp, synthetic construct
  misc_feature 1..80: note = Artificially Synthesized Probe
  source 1..80: mol_type = other DNA
tcaggggtcagtagcggtccctgaggatgtttctcctccgggttttcctgaagtttaaaacatccagccgccttggcgcg

SEQ ID NO: 57037 - DNA, 80 bp, synthetic construct; identical to SEQ ID NO: 25753
  misc_feature 1..80: note = Artificially Synthesized Probe
  source 1..80: mol_type = other DNA

SEQ ID NO: 57038 - DNA, 80 bp, synthetic construct
  misc_feature 1..80: note = Artificially Synthesized Probe
  source 1..80: mol_type = other DNA
tggcagcgggctcggggacgcccgggagcttctcagggaggagacggtgagtagccggacggggcccagcccacgctgca

SEQ ID NO: 57039 - DNA, 80 bp, synthetic construct
  misc_feature 1..80: note = Artificially Synthesized Probe
  source 1..80: mol_type = other DNA
cctgcctggccgccgcgtgtctctggtgagaggatattcctttaaaacgaggtcctgccctgcacactccttggtcttcg

SEQ ID NO: 57040 - DNA, 80 bp, synthetic construct
  misc_feature 1..80: note = Artificially Synthesized Probe
  source 1..80: mol_type = other DNA
gggcggggagtggggaggccccagccgcgggactgaggcgcggtgctgtccgtgagagacgggtgcgggaacgtgttccc

SEQ ID NO: 57041 - DNA, 80 bp, synthetic construct; identical to SEQ ID NO: 25754
  misc_feature 1..80: note = Artificially Synthesized Probe
  source 1..80: mol_type = other DNA

SEQ ID NO: 57042 - DNA, 80 bp, synthetic construct
  misc_feature 1..80: note = Artificially Synthesized Probe
  source 1..80: mol_type = other DNA
tggaggcagcagcacggaagattccagaagtgaagaagtcgaggagcagaccacggtggcttcgttaggaggtaagctct

SEQ ID NO: 57043 - DNA, 80 bp, synthetic construct
  misc_feature 1..80: note = Artificially Synthesized Probe
  source 1..80: mol_type = other DNA
gtgtttgatgtgtggtgtgtgatgtgcatgtttgtgacatgtgtgatgtttatgtgatgtgtatgtagtgtgtatggtgc

SEQ ID NO: 57044 - DNA, 80 bp, synthetic construct
  misc_feature 1..80: note = Artificially Synthesized Probe
  source 1..80: mol_type = other DNA
gggctcaagcgattctcctgcctcagcctcctgagtagctgggactacaggtgtgggccaccacgcctggctaatttttt

SEQ ID NO: 57045 - DNA, 80 bp, synthetic construct
  misc_feature 1..80: note = Artificially Synthesized Probe
  source 1..80: mol_type = other DNA
agtgtgcgtattgtgtgtatgtgtgtgatgtgcatgtgtaatgtacatgtgtgtgatgtgtattatgtgttttgtgtgtg

SEQ ID NO: 57046 - DNA, 80 bp, synthetic construct; identical to SEQ ID NO: 25755
  misc_feature 1..80: note = Artificially Synthesized Probe
  source 1..80: mol_type = other DNA

SEQ ID NO: 57047 - DNA, 80 bp, synthetic construct; identical to SEQ ID NO: 25679
  misc_feature 1..80: note = Artificially Synthesized Probe
  source 1..80: mol_type = other DNA

SEQ ID NO: 57048 - DNA, 80 bp, synthetic construct
  misc_feature 1..80: note = Artificially Synthesized Probe
  source 1..80: mol_type = other DNA
agtgtccagccgggctccaggactgaaagcgtttgggctgccggggccgtctggggtgccgagagcagagctggggccac

SEQ ID NO: 57049 - DNA, 80 bp, synthetic construct
  misc_feature 1..80: note = Artificially Synthesized Probe
  source 1..80: mol_type = other DNA
gcacctgtggccttttgggccactcactggtgagccctgatgaagcccctctgtgcccgtgcctcctttgtgcccagcac

SEQ ID NO: 57050 - DNA, 80 bp, synthetic construct
  misc_feature 1..80: note = Artificially Synthesized Probe
  source 1..80: mol_type = other DNA
aggggagccaggtgttccgggcccacctggccgggcaggccccccaggatccccatgcctacctggtcccccgggtctcc

SEQ ID NO: 57051 - DNA, 80 bp, synthetic construct
  misc_feature 1..80: note = Artificially Synthesized Probe
  source 1..80: mol_type = other DNA
ggggcttgggtaggagggggagaggctgcggccgacatgggagtgagctgagctgggatcggggcaggtcagcagcctcc

SEQ ID NO: 57052 - DNA, 80 bp, synthetic construct; identical to SEQ ID NO: 25756
  misc_feature 1..80: note = Artificially Synthesized Probe
  source 1..80: mol_type = other DNA

SEQ ID NO: 57053 - DNA, 80 bp, synthetic construct
  misc_feature 1..80: note = Artificially Synthesized Probe
  source 1..80: mol_type = other DNA
ttttgtaaagaaaagatgagtgtaactgttgatgggaaatagcagttatgcatttgtgttgagacatttgggccacaact

SEQ ID NO: 57054 - DNA, 80 bp, synthetic construct
  misc_feature 1..80: note = Artificially Synthesized Probe
  source 1..80: mol_type = other DNA
agcagttatgcatttgtgttgagacatttgggccacaactaccatgaagaaggaaaggaagtgagaaaaggcagagcttc

SEQ ID NO: 57055 - DNA, 80 bp, synthetic construct
  misc_feature 1..80: note = Artificially Synthesized Probe
  source 1..80: mol_type = other DNA
caccgtttccaagcacagtaatgacgtgatcgactgcgaataaagacctgggaacagcctgcccagcaaatggtaacact

SEQ ID NO: 57056 - DNA, 80 bp, synthetic construct; identical to SEQ ID NO: 25686
  misc_feature 1..80: note = Artificially Synthesized Probe
  source 1..80: mol_type = other DNA

SEQ ID NO: 57057 - DNA, 80 bp, synthetic construct; identical to SEQ ID NO: 25757
  misc_feature 1..80: note = Artificially Synthesized Probe
  source 1..80: mol_type = other DNA

SEQ ID NO: 57058 - DNA, 80 bp, synthetic construct
  misc_feature 1..80: note = Artificially Synthesized Probe
  source 1..80: mol_type = other DNA
acattacacaccacacgtggacacatgcacacacattacacacatgtgtgcacacaccacacattacaccacacgtggat

SEQ ID NO: 57059 - DNA, 80 bp, synthetic construct
  misc_feature 1..80: note = Artificially Synthesized Probe
  source 1..80: mol_type = other DNA
gtgcacacatgtgcacaccatggattatgcacaccatacatgcacactcacacatcacacatacatatcacacatgtaca

SEQ ID NO: 57060 - DNA, 80 bp, synthetic construct
  misc_feature 1..80: note = Artificially Synthesized Probe
  source 1..80: mol_type = other DNA
aggcgggagacagtctgctgggcctggcgccctcgtactttccgggccccagagactcccctgaagggctcagctcccgt

SEQ ID NO: 57061 - DNA, 80 bp, synthetic construct
  misc_feature 1..80: note = Artificially Synthesized Probe
  source 1..80: mol_type = other DNA
tctccgtggctgggtggggccccttcctgtgttggcccttggctcaaggtgggggctgtgtgcgtgcccagggtatgata

SEQ ID NO: 57062 - DNA, 80 bp, synthetic construct; identical to SEQ ID NO: 25758
  misc_feature 1..80: note = Artificially Synthesized Probe
  source 1..80: mol_type = other DNA

SEQ ID NO: 57063 - DNA, 80 bp, synthetic construct
  misc_feature 1..80: note = Artificially Synthesized Probe
  source 1..80: mol_type = other DNA
taggccaggcggggggccgagctcagggcaacgtgtctctccggctcttttcctcagaccttcattgacatggagggatc

SEQ ID NO: 57064 - DNA, 80 bp, synthetic construct
  misc_feature 1..80: note = Artificially Synthesized Probe
  source 1..80: mol_type = other DNA
cctggtgggtgccacatgggctgtgactatctgtgttcgcccacgtccagggtcctcgaggcttccctggacctcccgga

SEQ ID NO: 57065 - DNA, 80 bp, synthetic construct
  misc_feature 1..80: note = Artificially Synthesized Probe
  source 1..80: mol_type = other DNA
gccctgtctgctgggagtgaggggtgaacaccccacatgggagcccctgccccgcctcaggcctccccagtccccgcctc

SEQ ID NO: 57066 - DNA, 80 bp, synthetic construct; identical to SEQ ID NO: 25759
  misc_feature 1..80: note = Artificially Synthesized Probe
  source 1..80: mol_type = other DNA

SEQ ID NO: 57067 - DNA, 80 bp, synthetic construct
  misc_feature 1..80: note = Artificially Synthesized Probe
  source 1..80: mol_type = other DNA
ggcacctgtcagctgttagcgtcttgactctgcctttgtggatatggaattagagatgcttctcacagtagtggctaaac

SEQ ID NO: 57068 - DNA, 80 bp, synthetic construct
  misc_feature 1..80: note = Artificially Synthesized Probe
  source 1..80: mol_type = other DNA
actggcagcaggtgcagacgtggctgctgtaattgggtcatgctgcactggcatcccgtggcctggggtcactcggtagc

SEQ ID NO: 57069 - DNA, 80 bp, synthetic construct
  misc_feature 1..80: note = Artificially Synthesized Probe
  source 1..80: mol_type = other DNA
cagaatccattctgaggggaatttgggcttaaagaacatgcctaatccatattcacgcatgtggccagactgcctctcag

SEQ ID NO: 57070 - DNA, 80 bp, synthetic construct; identical to SEQ ID NO: 25760
  misc_feature 1..80: note = Artificially Synthesized Probe
  source 1..80: mol_type = other DNA

SEQ ID NO: 57071 - DNA, 80 bp, synthetic construct
  misc_feature 1..80: note = Artificially Synthesized Probe
  source 1..80: mol_type = other DNA
gcagaaaggcagcctggtaagtcttccctcgagtccagggtgagtgggaaccagcaccacaccatgtggcccgggtccgg

SEQ ID NO: 57072 - DNA, 80 bp, synthetic construct
  misc_feature 1..80: note = Artificially Synthesized Probe
  source 1..80: mol_type = other DNA
aattcataaccctgtgatgatgagtggactcacgggttttaagaacatgggcaccctgcgagatctgagatcttactcca

SEQ ID NO: 57073 - DNA, 80 bp, synthetic construct
  misc_feature 1..80: note = Artificially Synthesized Probe
  source 1..80: mol_type = other DNA
tttggactgagcaggggacgcgggctgtaaatgcccctcactgctctaagcctgtggctgagctgaagggcccttcttgg

SEQ ID NO: 57074 - DNA, 80 bp, synthetic construct; identical to SEQ ID NO: 25761
  misc_feature 1..80: note = Artificially Synthesized Probe
  source 1..80: mol_type = other DNA

SEQ ID NO: 57075 - DNA, 80 bp, synthetic construct
  misc_feature 1..80: note = Artificially Synthesized Probe
  source 1..80: mol_type = other DNA
gggctggccttgacccccactcctgccatctgtccatccgtcctgccggaatcgcgggcagcagcctctgtcactctggc

SEQ ID NO: 57076 - DNA, 80 bp, synthetic construct
  misc_feature 1..80: note = Artificially Synthesized Probe
  source 1..80: mol_type = other DNA
gctgggccacagcaggtggagaggctgcccgtggcctggggagggccctgagctgggccccccaacatccccccataggg

SEQ ID NO: 57077 - DNA, 80 bp, synthetic construct
  misc_feature 1..80: note = Artificially Synthesized Probe
  source 1..80: mol_type = other DNA
tcaccctctccgtgtcttggtctctaatctgtgcctggggatggtggagcgtcatggggccatacaggaaggatgggaca

SEQ ID NO: 57078 - DNA, 80 bp, synthetic construct
  misc_feature 1..80: note = Artificially Synthesized Probe
  source 1..80: mol_type = other DNA
cgggcagcctgaggtctgggccacagcctgcttgaccagacaatttatctgacacccccccaacgacccacttcctcctt

SEQ ID NO: 57079 - DNA, 80 bp, synthetic construct; identical to SEQ ID NO: 25762
  misc_feature 1..80: note = Artificially Synthesized Probe
  source 1..80: mol_type = other DNA

SEQ ID NO: 57080 - DNA, 80 bp, synthetic construct
  misc_feature 1..80: note = Artificially Synthesized Probe
  source 1..80: mol_type = other DNA
tgtacacatgcacacacacacctctccagcatatgtacacatgcacacacacctctccagcatatgtacacatgcacaca

SEQ ID NO: 57081 - DNA, 80 bp, synthetic construct
  misc_feature 1..80: note = Artificially Synthesized Probe
  source 1..80: mol_type = other DNA
atgtacacacacacacacttctccagcatatgtacacacacacacctctccagcatatgtgcacacgcacacacacctct

SEQ ID NO: 57082 - DNA, 80 bp, synthetic construct
  misc_feature 1..80: note = Artificially Synthesized Probe
  source 1..80: mol_type = other DNA
atatgtgcacacacacacctccagcatacatgcacacacatgcacacacacatctccagcatatgtgcgcacacacatac

SEQ ID NO: 57083 - DNA, 80 bp, synthetic construct
  misc_feature 1..80: note = Artificially Synthesized Probe
  source 1..80: mol_type = other DNA
catagccagcacatgtgcacacagctctcatgtatgtgcacgtgtatctctagcatacatgcacacatgtatctggtgta

SEQ ID NO: 57084 - DNA, 80 bp, synthetic construct; identical to SEQ ID NO: 25763
  misc_feature 1..80: note = Artificially Synthesized Probe
  source 1..80: mol_type = other DNA

SEQ ID NO: 57085 - DNA, 80 bp, synthetic construct
  misc_feature 1..80: note = Artificially Synthesized Probe
  source 1..80: mol_type = other DNA
tgaagaaaaaagggatgaaattagaaagaggttttcaacaaacctttttttggagacagagtctccgcagtggtgcagtc

SEQ ID NO: 57086 - DNA, 80 bp, synthetic construct
  misc_feature 1..80: note = Artificially Synthesized Probe
  source 1..80: mol_type = other DNA
tcagctcactgcaatctctgcctcccggtttcaagtgagtctcctgcctcagcctcccgagtaactgggactacaggcat

SEQ ID NO: 57087 - DNA, 80 bp, synthetic construct
  misc_feature 1..80: note = Artificially Synthesized Probe
  source 1..80: mol_type = other DNA
cacactcggcctaaacaaacttttttataggcactttttaaagatcaaaaattagatgaggctggacacgatggctcaca

SEQ ID NO: 57088 - DNA, 80 bp, synthetic construct; identical to SEQ ID NO: 25764
  misc_feature 1..80: note = Artificially Synthesized Probe
  source 1..80: mol_type = other DNA

SEQ ID NO: 57089 - DNA, 80 bp, synthetic construct; identical to SEQ ID NO: 25687
  misc_feature 1..80: note = Artificially Synthesized Probe
  source 1..80: mol_type = other DNA

SEQ ID NO: 57090 - DNA, 80 bp, synthetic construct
  misc_feature 1..80: note = Artificially Synthesized Probe
  source 1..80: mol_type = other DNA
gtgggggacatgggaagcaggaaggacccttccccacagagggggtttccttcctccagctgggcctgtgaccatatcaa

SEQ ID NO: 57091 - DNA, 80 bp, synthetic construct
  misc_feature 1..80: note = Artificially Synthesized Probe
  source 1..80: mol_type = other DNA
agctgggccacgtcacagcgggacccctgcctcagggcctccctccctcacgccccccacaccgggctctcacctcacac

SEQ ID NO: 57092 - DNA, 80 bp, synthetic construct
  misc_feature 1..80: note = Artificially Synthesized Probe
  source 1..80: mol_type = other DNA
tctccccttgcctgccggggagccagggctggtcccagggtcctgagcctcctctcctctctcctctcttctcccctcgc

SEQ ID NO: 57093 - DNA, 80 bp, synthetic construct
  misc_feature 1..80: note = Artificially Synthesized Probe
  source 1..80: mol_type = other DNA
cccagggtcctgagcctcctctcctctctcctctcttctccccttgcctgcccgggagccagggctggaggtaacgaggg

SEQ ID NO: 57094 - DNA, 80 bp, synthetic construct; identical to SEQ ID NO: 25765
  misc_feature 1..80: note = Artificially Synthesized Probe
  source 1..80: mol_type = other DNA

SEQ ID NO: 57095 - DNA, 80 bp, synthetic construct
  misc_feature 1..80: note = Artificially Synthesized Probe
  source 1..80: mol_type = other DNA
gaccaggactccccgctggatttgtgagtaccgcctacacctgaccccctggagagccgggggctgccgttgccccagcc

SEQ ID NO: 57096 - DNA, 80 bp, synthetic construct
  misc_feature 1..80: note = Artificially Synthesized Probe
  source 1..80: mol_type = other DNA
ccccagcacccgtgccctgaccaagagcgaatgagctgacccgagacgggctgccccgggggggctccacccaggccctg

SEQ ID NO: 57097 - DNA, 80 bp, synthetic construct
  misc_feature 1..80: note = Artificially Synthesized Probe
  source 1..80: mol_type = other DNA
gacatggaaggctccggggggcccttctggtcaacagcccgaagcgctgatgggccacaggtagtgttgtgagctgggcg

SEQ ID NO: 57098 - DNA, 80 bp, synthetic construct; identical to SEQ ID NO: 25766
  misc_feature 1..80: note = Artificially Synthesized Probe
  source 1..80: mol_type = other DNA

SEQ ID NO: 57099 - DNA, 80 bp, synthetic construct
  misc_feature 1..80: note = Artificially Synthesized Probe
  source 1..80: mol_type = other DNA
aatctccactttcttctactgttaacatgtatactgctcagggttagagccagcaaggagtgaccaaaatcccaaaacaa

SEQ ID NO: 57100 - DNA, 80 bp, synthetic construct
  misc_feature 1..80: note = Artificially Synthesized Probe
  source 1..80: mol_type = other DNA
ctcccgctacgacccctcggctgtcaggagacttctgagaaagccgggcctcttttgccccagcgaggagctttcttgtg

SEQ ID NO: 57101 - DNA, 80 bp, synthetic construct
  misc_feature 1..80: note = Artificially Synthesized Probe
  source 1..80: mol_type = other DNA
ccccggggccacagccctgcccaagagacacgtggggtggctgaagccacagcgtccagcttcatgctcagagactcagc

SEQ ID NO: 57102 - DNA, 80 bp, synthetic construct; identical to SEQ ID NO: 25767
  misc_feature 1..80: note = Artificially Synthesized Probe
  source 1..80: mol_type = other DNA

SEQ ID NO: 57103 - DNA, 80 bp, synthetic construct
  misc_feature 1..80: note = Artificially Synthesized Probe
  source 1..80: mol_type = other DNA
ctcgggttttctgatggcaggagtaggatgaattcatcctgggaagtttgcaaaatacagcaaaaaagcctgacagggaa

SEQ ID NO: 57104 - DNA, 80 bp, synthetic construct
  misc_feature 1..80: note = Artificially Synthesized Probe
  source 1..80: mol_type = other DNA
tgggccgaaaagaggggcataggggaagaactcagggtccccacctcagcctcagggacaggtggactcctgggctcagg

SEQ ID NO: 57105 - DNA, 80 bp, synthetic construct
  misc_feature 1..80: note = Artificially Synthesized Probe
  source 1..80: mol_type = other DNA
ccagggcaggtgcctgagcagggagcctggagcctcctctcctaggccctgggcagcagccgcctttcaccccgctgcgt

SEQ ID NO: 57106 - DNA, 80 bp, synthetic construct; identical to SEQ ID NO: 25768
  misc_feature 1..80: note = Artificially Synthesized Probe
  source 1..80: mol_type = other DNA

SEQ ID NO: 57107 - DNA, 80 bp, synthetic construct
  misc_feature 1..80: note = Artificially Synthesized Probe
  source 1..80: mol_type = other DNA
gggagggcggtgagatgcatcctgggtaactcacccttcccttcacccggggtggacgctgcctgaggactgggctggcc

SEQ ID NO: 57108 - DNA, 80 bp, synthetic construct
  misc_feature 1..80: note = Artificially Synthesized Probe
  source 1..80: mol_type = other DNA
cttccccgctcttcctgccactgctttgtttctttataattgaagacgtgctggtttcaaaggcaacccccaggataccc

SEQ ID NO: 57109 - DNA, 80 bp, synthetic construct
  misc_feature 1..80: note = Artificially Synthesized Probe
  source 1..80: mol_type = other DNA
cctcccccacttgcccctcccccacacctcctccccgacttccccctcccccacttccacctgccccacacctcctcccc

SEQ ID NO: 57110 - DNA, 80 bp, synthetic construct
  misc_feature 1..80: note = Artificially Synthesized Probe
  source 1..80: mol_type = other DNA
ccctccccctgactcccccctcccccactcctccatccctccacagcccctgctcaggcccacaggggtgagagagagaa

SEQ ID NO: 57111 - DNA, 80 bp, synthetic construct; identical to SEQ ID NO: 25769
  misc_feature 1..80: note = Artificially Synthesized Probe
  source 1..80: mol_type = other DNA

SEQ ID NO: 57112 - DNA, 80 bp, synthetic construct
  misc_feature 1..80: note = Artificially Synthesized Probe
  source 1..80: mol_type = other DNA
ttggggtccctctgccagccctgcacatccttgtccctgggcactgagggaagcaaaggccccgccagccatgcccagca

SEQ ID NO: 57113 - DNA, 80 bp, synthetic construct
  misc_feature 1..80: note = Artificially Synthesized Probe
  source 1..80: mol_type = other DNA
tctcaggtccctgggcctccgtgtgccctcccgggtccctgggccttcgtgtgccctcccaggtctctgggcctccgtgt

SEQ ID NO: 57114 - DNA, 80 bp, synthetic construct
  misc_feature 1..80: note = Artificially Synthesized Probe
  source 1..80: mol_type = other DNA
gaaccatttccttcctgtctctccaggggccaaagggagacagaggcagccggggagaaaaggtgagtgtccctggggcg

SEQ ID NO: 57115 - DNA, 80 bp, synthetic construct
  misc_feature 1..80: note = Artificially Synthesized Probe
  source 1..80: mol_type = other DNA
cgtccctgttggagcctgccctgcctggcagggggctccaaggccacagtccacagccccgggcgcctcctcacccaccg

SEQ ID NO: 57116 - DNA, 80 bp, synthetic construct; identical to SEQ ID NO: 25770
  misc_feature 1..80: note = Artificially Synthesized Probe
  source 1..80: mol_type = other DNA

SEQ ID NO: 57117 - DNA, 80 bp, synthetic construct
  misc_feature 1..80: note = Artificially Synthesized Probe
  source 1..80: mol_type = other DNA
gaggggagggcctgcacaggggccagtgtttttacgtcaaaggctcccattgggctcactccctgtgtccttgacactgt

SEQ ID NO: 57118 - DNA, 80 bp, synthetic construct
  misc_feature 1..80: note = Artificially Synthesized Probe
  source 1..80: mol_type = other DNA
catcccactggtccctgtgccaccctggcctcacagaggcagacgcatctccgcccagccacatggaacacagggaccaa

SEQ ID NO: 57119 - DNA, 80 bp, synthetic construct
  misc_feature 1..80: note = Artificially Synthesized Probe
  source 1..80: mol_type = other DNA
tgacactggacaagttacctaacccttgtgctccagctccccacctaggaggtgggactctaacagtcttgagaggaggg

SEQ ID NO: 57120 - DNA, 80 bp, synthetic construct; identical to SEQ ID NO: 25771
  misc_feature 1..80: note = Artificially Synthesized Probe
  source 1..80: mol_type = other DNA

SEQ ID NO: 57121 - DNA, 80 bp, synthetic construct
  misc_feature 1..80: note = Artificially Synthesized Probe
  source 1..80: mol_type = other DNA
ttttgttgatctgtaagtcgctcgagtccagttgaattttaaacgcggctctttgtttccgatttttccttttgctcgtg

SEQ ID NO: 57122 - DNA, 80 bp, synthetic construct
  misc_feature 1..80: note = Artificially Synthesized Probe
  source 1..80: mol_type = other DNA
cggccgggtttcgcaggctttcccgtgagtaacctggtgccagagctgcatgctgcccggctggggaggggtctccacct

SEQ ID NO: 57123 - DNA, 80 bp, synthetic construct
  misc_feature 1..80: note = Artificially Synthesized Probe
  source 1..80: mol_type = other DNA
gagctgggaggcgtcttctagtataaattctcatttcagctaaacagcttgccctctccaagcccgtgtgcacctgaacc

SEQ ID NO: 57124 - DNA, 80 bp, synthetic construct
  misc_feature 1..80: note = Artificially Synthesized Probe
  source 1..80: mol_type = other DNA
gcacctgcagaggcctgcagtgtccagagtgaggctggggccgggaggtgtcctggtgggggtcacctgcggaggcctgc

SEQ ID NO: 57125 - DNA, 80 bp, synthetic construct; identical to SEQ ID NO: 25772
  misc_feature 1..80: note = Artificially Synthesized Probe
  source 1..80: mol_type = other DNA

SEQ ID NO: 57126 - DNA, 80 bp, synthetic construct
  misc_feature 1..80: note = Artificially Synthesized Probe
  source 1..80: mol_type = other DNA
ccagtcacagcggccctgccttcggggctctgggtgaggctttgtggggaaggagctggccctgactctgctggacctcc

SEQ ID NO: 57127 - DNA, 80 bp, synthetic construct
  misc_feature 1..80: note = Artificially Synthesized Probe
  source 1..80: mol_type = other DNA
cctgagggtctggctcctgatgcacgagcctctcccaagcagggctctaccatccaggcctggccctggtggcccctcct

SEQ ID NO: 57128 - DNA, 80 bp, synthetic construct
  misc_feature 1..80: note = Artificially Synthesized Probe
  source 1..80: mol_type = other DNA
aggctgtaccagctcagcctcagcaggtttctggctgcccctccagcctcttcctgggggccctgatgctgtgggcaggg

SEQ ID NO: 57129 - DNA, 80 bp, synthetic construct; identical to SEQ ID NO: 25773
  misc_feature 1..80: note = Artificially Synthesized Probe
  source 1..80: mol_type = other DNA

SEQ ID NO: 57130 - DNA, 80 bp, synthetic construct
  misc_feature 1..80: note = Artificially Synthesized Probe
  source 1..80: mol_type = other DNA
ctgcgccttggggacggcccagtgcacccaaagggaccacagcggcccttagggaggctatcaggtggggcacaagccgc

SEQ ID NO: 57131 - DNA, 80 bp, synthetic construct
  misc_feature 1..80: note = Artificially Synthesized Probe
  source 1..80: mol_type = other DNA
catgacggcccccaaggacacggtcgcccgcggctgctgagcttgtgctgtgcggcccagggctcatctccctagtgcag

SEQ ID NO: 57132 - DNA, 80 bp, synthetic construct; identical to SEQ ID NO: 25774
  misc_feature 1..80: note = Artificially Synthesized Probe
  source 1..80: mol_type = other DNA

SEQ ID NO: 57133 - DNA, 80 bp, synthetic construct
  misc_feature 1..80: note = Artificially Synthesized Probe
  source 1..80: mol_type = other DNA
taccccacgaggggccagtacccaggaggaagccctggaggcagacagggcagtgggcctgtgtgtgctaggctcagtca

SEQ ID NO: 57134 - DNA, 80 bp, synthetic construct
  misc_feature 1..80: note = Artificially Synthesized Probe
  source 1..80: mol_type = other DNA
cctggctttgctgctgccctgcctcttgctaggaggccatggtgtgcctgtgcctggcaggcagtgttgctgctgacctc

SEQ ID NO: 57135 - DNA, 80 bp, synthetic construct
  misc_feature 1..80: note = Artificially Synthesized Probe
  source 1..80: mol_type = other DNA
agtccccaccccctgtgctccgccccagggtcgccccgggatgaacggattgaaaggagagaaaggggagccgggagatg

SEQ ID NO: 57136 - DNA, 80 bp, synthetic construct
  misc_feature 1..80: note = Artificially Synthesized Probe
  source 1..80: mol_type = other DNA
catgccatacccatgcacagtcatacatgtccacacacgcacacgtgtgcccaaacatgcatgcacatatatggccgtac

SEQ ID NO: 57137 - DNA, 80 bp, synthetic construct; identical to SEQ ID NO: 25775
  misc_feature 1..80: note = Artificially Synthesized Probe
  source 1..80: mol_type = other DNA

SEQ ID NO: 57138 - DNA, 80 bp, synthetic construct
  misc_feature 1..80: note = Artificially Synthesized Probe
  source 1..80: mol_type = other DNA
atgcatacacaccaatacacatatatgcacacatgtgcacccatatacacacatacaacaggcccctgtggattctcagc

SEQ ID NO: 57139 - DNA, 80 bp, synthetic construct
  misc_feature 1..80: note = Artificially Synthesized Probe
  source 1..80: mol_type = other DNA
gtcttttgagccaagagctttgtctccctgatgtcagcagggtggggcattttcagtcacctttttacctgagacgcaga

SEQ ID NO: 57140 - DNA, 80 bp, synthetic construct
  misc_feature 1..80: note = Artificially Synthesized Probe
  source 1..80: mol_type = other DNA
gatttttctgatttttctgaactgtctctgctcccagctgctgcctgacaggcaggccataagcctaacagctctctgcc

SEQ ID NO: 57141 - DNA, 80 bp, synthetic construct; identical to SEQ ID NO: 25776
  misc_feature 1..80: note = Artificially Synthesized Probe
  source 1..80: mol_type = other DNA

SEQ ID NO: 57142 - DNA, 80 bp, synthetic construct
  misc_feature 1..80: note = Artificially Synthesized Probe
  source 1..80: mol_type = other DNA
ctgctctccgtacccctgttccctcccgtctctgactgggggaggctgctatgtggcctcatacaggggctggtgcttct

SEQ ID NO: 57143 - DNA, 80 bp, synthetic construct
  misc_feature 1..80: note = Artificially Synthesized Probe
  source 1..80: mol_type = other DNA
tgaagggatgctccagagccccaccttccttcccgtgccagcagcagtgagactcccccagtggcccaaggccagtgcta

SEQ ID NO: 57144 - DNA, 80 bp, synthetic construct
  misc_feature 1..80: note = Artificially Synthesized Probe
  source 1..80: mol_type = other DNA
ctgttggtcagcacgtgccctgcaggtgtggcctggcccccacatggcctgctgacggggacccagggcgcccctgctct

SEQ ID NO: 57145 - DNA, 80 bp, synthetic construct; identical to SEQ ID NO: 25688
  misc_feature 1..80: note = Artificially Synthesized Probe
  source 1..80: mol_type = other DNA

SEQ ID NO: 57146 - DNA, 80 bp, synthetic construct
  misc_feature 1..80: note = Artificially Synthesized Probe
  source 1..80: mol_type = other DNA
cctccaggacccaagggcgccaaaggagaagtgggcccccccggaccaccaggtgagcaactctggacatcccaggcagg

SEQ ID NO: 57147 - DNA, 80 bp, synthetic construct; identical to SEQ ID NO: 25777
  misc_feature 1..80: note = Artificially Synthesized Probe
  source 1..80: mol_type = other DNA

SEQ ID NO: 57148 - DNA, 80 bp, synthetic construct
  misc_feature 1..80: note = Artificially Synthesized Probe
  source 1..80: mol_type = other DNA
cccagcacccctgctcccccaaaggacaagaattcccccctgagccccacctccattgagggtggcagggctgcttggat

SEQ ID NO: 57149 - DNA, 80 bp, synthetic construct
  misc_feature 1..80: note = Artificially Synthesized Probe
  source 1..80: mol_type = other DNA
cagggtcccctctcaccgccagggttccctctcgccaccacggtcccctctcgccgccagggtcccctctcgccgccagg

SEQ ID NO: 57150 - DNA, 80 bp, synthetic construct
  misc_feature 1..80: note = Artificially Synthesized Probe
  source 1..80: mol_type = other DNA
caggcaggcagaggccgagtctgggccgggacatccttaaggcctgtggaggcaaaggcaggcagaaagcaagcgggaag

SEQ ID NO: 57151 - DNA, 80 bp, synthetic construct; identical to SEQ ID NO: 25778
  misc_feature 1..80: note = Artificially Synthesized Probe
  source 1..80: mol_type = other DNA

SEQ ID NO: 57152 - DNA, 80 bp, synthetic construct
  misc_feature 1..80: note = Artificially Synthesized Probe
  source 1..80: mol_type = other DNA
aggctcagagcattcccctcattcgaaggatcaacaattagagtgacgagatttctcaacaaaacgggagaagccagaag

SEQ ID NO: 57153 - DNA, 80 bp, synthetic construct
  misc_feature 1..80: note = Artificially Synthesized Probe
  source 1..80: mol_type = other DNA
gagtgacgagatttctcaacaaaacgggagaagccagaagaccataaatggtttccaaaatatccaagaaagtcaattgc

SEQ ID NO: 57154 - DNA, 80 bp, synthetic construct; identical to SEQ ID NO: 25779
  misc_feature 1..80: note = Artificially Synthesized Probe
  source 1..80: mol_type = other DNA

SEQ ID NO: 57155 - DNA, 80 bp, synthetic construct
  misc_feature 1..80: note = Artificially Synthesized Probe
  source 1..80: mol_type = other DNA
tgggctgccccgcatggcatcccaggaacagtggggtcagaggctcccgcaggaaccggcacaggctgcacagcatggtg

SEQ ID NO: 57156 - DNA, 80 bp, synthetic construct
  misc_feature 1..80: note = Artificially Synthesized Probe
  source 1..80: mol_type = other DNA
aacacacagagtagatccaaaagaaggcaaaacatgagagaaaaaggaatgcagaacacgtgggatgaatagaaactagg

SEQ ID NO: 57157 - DNA, 80 bp, synthetic construct
  misc_feature 1..80: note = Artificially Synthesized Probe
  source 1..80: mol_type = other DNA
ctgtaagtatgacgagggtagatacatccattgaaggacagacattgtcaatgggatatggctaaaccatgtgccgctta

SEQ ID NO: 57158 - DNA, 80 bp, synthetic construct
  misc_feature 1..80: note = Artificially Synthesized Probe
  source 1..80: mol_type = other DNA
cagcctcccagaccagaaaacagccctgcccgccagtgagagggcagacagatggacactaatgtccccgaacctaagaa

SEQ ID NO: 57159 - DNA, 80 bp, synthetic construct
  misc_feature 1..80: note = Artificially Synthesized Probe
  source 1..80: mol_type = other DNA
gggggtgtatagtgtgggtgtgtgtggagtgtgtgtggctgggttgggtgtatagtgtggaggtgtgagggggtgtgtgg

SEQ ID NO: 57160 - DNA, 80 bp, synthetic construct; identical to SEQ ID NO: 25780
  misc_feature 1..80: note = Artificially Synthesized Probe
  source 1..80: mol_type = other DNA

SEQ ID NO: 57161 - DNA, 80 bp, synthetic construct
  misc_feature 1..80: note = Artificially Synthesized Probe
  source 1..80: mol_type = other DNA
ggtttggtgtgtgttgggtgtgtagtgtgggggtgtggtttggtgtgtgtgtgttgggtgtgtagtgtgggggtgtggtt

SEQ ID NO: 57162 - DNA, 80 bp, synthetic construct
  misc_feature 1..80: note = Artificially Synthesized Probe
  source 1..80: mol_type = other DNA
ggtgtgtagtgtgggggtgtgttttggtgtgtgtgtgttgggtgtgtagtgtgggggtgtggtttggtgtgtgtgtgttg

SEQ ID NO: 57163 - DNA, 80 bp, synthetic construct
  misc_feature 1..80: note = Artificially Synthesized Probe
  source 1..80: mol_type = other DNA
agtatatcctggagtaagaaacatggtcaaaaataaatgttcattgagacaacggagcaagtctaccagagaaattgagt

SEQ ID NO: 57164 - DNA, 80 bp, synthetic construct
  misc_feature 1..80: note = Artificially Synthesized Probe
  source 1..80: mol_type = other DNA
tcattgagacaacggagcaagtctaccagagaaattgagtaattctacatttctatgcatctaatgagatagcctcaaga

SEQ ID NO: 57165 - DNA, 80 bp, synthetic construct
  misc_feature 1..80: note = Artificially Synthesized Probe
  source 1..80: mol_type = other DNA
tccaaccccgggacccagttccccaccacctgctaaccggggcctcctgcctccagccagcccagcagaggcccggggga

SEQ ID NO: 57166 - DNA, 80 bp, synthetic construct; identical to SEQ ID NO: 25781
  misc_feature 1..80: note = Artificially Synthesized Probe
  source 1..80: mol_type = other DNA

SEQ ID NO: 57167 - DNA, 80 bp, synthetic construct
  misc_feature 1..80: note = Artificially Synthesized Probe
  source 1..80: mol_type = other DNA
ggcctccacagccggtcacctccctctgcagaaggacccccaggggctccacagccggtcacctccctctgcagaaggac

SEQ ID NO: 57168 - DNA, 80 bp, synthetic construct
  misc_feature 1..80: note = Artificially Synthesized Probe
  source 1..80: mol_type = other DNA
ctgcagaaggacccccaggggctccacagccggtcacctccctctgcagaaggaccctcaggggcctccgcagccggtca

SEQ ID NO: 57169 - DNA, 80 bp, synthetic construct
  misc_feature 1..80: note = Artificially Synthesized Probe
  source 1..80: mol_type = other DNA
tgaggctcaggatcaggtgcagatgaccctggattatcaggtgggccccacgtcattacgagggtccttatagagaaggg

SEQ ID NO: 57170 - DNA, 80 bp, synthetic construct
  misc_feature 1..80: note = Artificially Synthesized Probe
  source 1..80: mol_type = other DNA
cccagcccgagagggagcacgggtcctgacagcagcagtgacctccaaccccagggacggctcctgtgggatggggggcc

SEQ ID NO: 57171 - DNA, 80 bp, synthetic construct
  misc_feature 1..80: note = Artificially Synthesized Probe
  source 1..80: mol_type = other DNA
tcatctccgttgacaaaattacagctttaagtagtacctgtttctacacatcagcctaagatgttaaagaacaaacagca

SEQ ID NO: 57172 - DNA, 80 bp, synthetic construct; identical to SEQ ID NO: 25782
  misc_feature 1..80: note = Artificially Synthesized Probe
  source 1..80: mol_type = other DNA

SEQ ID NO: 57173 - DNA, 80 bp, synthetic construct
  misc_feature 1..80: note = Artificially Synthesized Probe
  source 1..80: mol_type = other DNA
ctgcctgcccaccctgggaggaggcagaggagagatgggaagggcaggacgctgggaggaaagaagcgcgttgctctttt

SEQ ID NO: 57174 - DNA, 80 bp, synthetic construct
  misc_feature 1..80: note = Artificially Synthesized Probe
  source 1..80: mol_type = other DNA
accagatggaagggcagtctagaaaaaccaccaccgagtcctaagcaattaaaaatgaagttttaaaaaggcaccattgt

SEQ ID NO: 57175 - DNA, 80 bp, synthetic construct; identical to SEQ ID NO: 25783
  misc_feature 1..80: note = Artificially Synthesized Probe
  source 1..80: mol_type = other DNA

SEQ ID NO: 57176 - DNA, 80 bp, synthetic construct
  misc_feature 1..80: note = Artificially Synthesized Probe
  source 1..80: mol_type = other DNA
atggggttgtttgtggcacatatacaccatggaatactacgcagccataaaaaatgatgagttcatgtcctttgtaggga

SEQ ID NO: 57177 - DNA, 80 bp, synthetic construct
  misc_feature 1..80: note = Artificially Synthesized Probe
  source 1..80: mol_type = other DNA
gggggagggatagcattgggagatatacctaatgctagatgacgagttagtgggtgcagcacaccagcatggcacatgta

SEQ ID NO: 57178 - DNA, 80 bp, synthetic construct
  misc_feature 1..80: note = Artificially Synthesized Probe
  source 1..80: mol_type = other DNA
aaagtatcggttaactaggaagaacctaattaaatacgcgatctctaccgcgaaatggctagaagggcctcaggcaaacc

SEQ ID NO: 57179 - DNA, 80 bp, synthetic construct; identical to SEQ ID NO: 25689
  misc_feature 1..80: note = Artificially Synthesized Probe
  source 1..80: mol_type = other DNA

SEQ ID NO: 57180 - DNA, 80 bp, synthetic construct
  misc_feature 1..80: note = Artificially Synthesized Probe
  source 1..80: mol_type = other DNA
ggtcctgtacatcccgctgggtggctgctcccaatttctcgccccatccggcccaagcccccttcctgttcagccctgcg

SEQ ID NO: 57181 - DNA, 80 bp, synthetic construct; identical to SEQ ID NO: 25784
  misc_feature 1..80: note = Artificially Synthesized Probe
  source 1..80: mol_type = other DNA

SEQ ID NO: 57182 - DNA, 80 bp, synthetic construct
  misc_feature 1..80: note = Artificially Synthesized Probe
  source 1..80: mol_type = other DNA
tgtgcaggcagagcccatgtcccaggggtctgggtgcaggagccgagggcaggtccagcccggccttcgacacccgcgaa

SEQ ID NO: 57183 - DNA, 80 bp, synthetic construct
  misc_feature 1..80: note = Artificially Synthesized Probe
  source 1..80: mol_type = other DNA
ctctgctcctgggccgggtcaggtcagatcagggtttaggcccatcagtcctgaaagactccagagagccatgggcccca

SEQ ID NO: 57184 - DNA, 80 bp, synthetic construct
  misc_feature 1..80: note = Artificially Synthesized Probe
  source 1..80: mol_type = other DNA
ttggcagctgcagccccacaagcttgcccgcccccagtccagggcacgaggtaaccaggaagcgtctcttgtcgccgtcc

SEQ ID NO: 57185 - DNA, 80 bp, synthetic construct
  misc_feature 1..80: note = Artificially Synthesized Probe
  source 1..80: mol_type = other DNA
gcagcctcggtctctgggcggcggcggcggcccactctgccctggccgcgctgtgtggtgaccgcaggccccagacatga

SEQ ID NO: 57186 - DNA, 80 bp, synthetic construct; identical to SEQ ID NO: 25804
  misc_feature 1..80: note = Artificially Synthesized Probe
  source 1..80: mol_type = other DNA

SEQ ID NO: 57187 - DNA, 80 bp, synthetic construct
  misc_feature 1..80: note = Artificially Synthesized Probe
  source 1..80: mol_type = other DNA
gcctggagctgacggggaggcggggagaccagggagctcgggaccatctggagacgaggtgaggagcttcacagccccca

SEQ ID NO: 57188 - DNA, 80 bp, synthetic construct
  misc_feature 1..80: note = Artificially Synthesized Probe
  source 1..80: mol_type = other DNA
atggcctcagcttctgatcctctttgctcggggtctactccacgtccctgagaccaaatgcagtgtgtccaccagactaa

SEQ ID NO: 57189 - DNA, 80 bp, synthetic construct
  misc_feature 1..80: note = Artificially Synthesized Probe
  source 1..80: mol_type = other DNA
atggcctcctgcccaagacaaatgggtttcttcacccacacgtccaggatgcctcttcccacagtctcagagcgggtggg

SEQ ID NO: 57190 - DNA, 80 bp, synthetic construct
  misc_feature 1..80: note = Artificially Synthesized Probe
  source 1..80: mol_type = other DNA
tctctccactcagggtggccctggagagagaggaccacgggggaccccaggcacgcggggaccaagaggagaccctgtga

SEQ ID NO: 57191 - DNA, 80 bp, synthetic construct; identical to SEQ ID NO: 25805
  misc_feature 1..80: note = Artificially Synthesized Probe
  source 1..80: mol_type = other DNA

SEQ ID NO: 57192 - DNA, 80 bp, synthetic construct
  misc_feature 1..80: note = Artificially Synthesized Probe
  source 1..80: mol_type = other DNA
gagccgagatgccggcggcctcagaggccaccccccaccttcagctccgtggaccgtgggcctcgctaggccaccccaca

SEQ ID NO: 57193 - DNA, 80 bp, synthetic construct
  misc_feature 1..80: note = Artificially Synthesized Probe
  source 1..80: mol_type = other DNA
agaatgccctagtgtgcccagccgagctgccaggcctcagaggcagcgcccccgggtgcccccttgtccgagaatcaaga

SEQ ID NO: 57194 - DNA, 80 bp, synthetic construct; identical to SEQ ID NO: 25806
  misc_feature 1..80: note = Artificially Synthesized Probe
  source 1..80: mol_type = other DNA

SEQ ID NO: 57195 - DNA, 80 bp, synthetic construct
  misc_feature 1..80: note = Artificially Synthesized Probe
  source 1..80: mol_type = other DNA
ccttccagagtgagctggtttgagaccctgctcgcgggggtggcacctgttcagcagggccgaggtgacagtgaggctga

SEQ ID NO: 57196 - DNA, 80 bp, synthetic construct
  misc_feature 1..80: note = Artificially Synthesized Probe
  source 1..80: mol_type = other DNA
ccaggaggagctgccggcctcctgaatgaagatagccatagccagccacgccgatggccacgcacgtgggccgaggaaac

SEQ ID NO: 57197 - DNA, 80 bp, synthetic construct
  misc_feature 1..80: note = Artificially Synthesized Probe
  source 1..80: mol_type = other DNA
tggcccgcagggtgatcagggaagagaaggccccgttggtgtccctggagacccggtaggaagcgctgtggggttggggg

SEQ ID NO: 57198 - DNA, 80 bp, synthetic construct
  misc_feature 1..80: note = Artificially Synthesized Probe
  source 1..80: mol_type = other DNA
ggtgtggattgttgagagcaggcccagcgcccgggggcctgacgctgagacgctcagcccaggtggagaagcgctgtctg

SEQ ID NO: 57199 - DNA, 80 bp, synthetic construct; identical to SEQ ID NO: 25807
  misc_feature 1..80: note = Artificially Synthesized Probe
  source 1..80: mol_type = other DNA

SEQ ID NO: 57200 - DNA, 80 bp, synthetic construct
  misc_feature 1..80: note = Artificially Synthesized Probe
  source 1..80: mol_type = other DNA
aagtctgtgctcccgagcttgtctgcttctgtggacaaatcgaccttacggctccatgtgcgcagctgcccacacaccga

SEQ ID NO: 57201 - DNA, 80 bp, synthetic construct
  misc_feature 1..80: note = Artificially Synthesized Probe
  source 1..80: mol_type = other DNA
ggtgaaatcgtgcttttgtggtgccaacgggtgttacacagctgttaaaaatacctgtgtcatagatgaggaccagggca

SEQ ID NO: 57202 - DNA, 80 bp, synthetic construct
  misc_feature 1..80: note = Artificially Synthesized Probe
  source 1..80: mol_type = other DNA
atctgacctcccatgtggtcacccaggacagggccaggtgcagggcacagtgcgtggaagaggccatgcagccagtggca

SEQ ID NO: 57203 - DNA, 80 bp, synthetic construct; identical to SEQ ID NO: 25808
  misc_feature 1..80: note = Artificially Synthesized Probe
  source 1..80: mol_type = other DNA

SEQ ID NO: 57204 - DNA, 80 bp, synthetic construct
  misc_feature 1..80: note = Artificially Synthesized Probe
  source 1..80: mol_type = other DNA
cagggcaccatgtgacccatgactcacagttgcctggctgaggcaggcacttgttcacctggagcctccctggggccttt

SEQ ID NO: 57205 - DNA, 80 bp, synthetic construct
  misc_feature 1..80: note = Artificially Synthesized Probe
  source 1..80: mol_type = other DNA
ccctgtgtggatgccagaagcagttgggccctcagggctggtcccaggaggtgcccccagtgaggtgctctgcagaaact

SEQ ID NO: 57206 - DNA, 80 bp, synthetic construct; identical to SEQ ID NO: 25795
  misc_feature 1..80: note = Artificially Synthesized Probe
  source 1..80: mol_type = other DNA

SEQ ID NO: 57207 - DNA, 80 bp, synthetic construct
  misc_feature 1..80: note = Artificially Synthesized Probe
  source 1..80: mol_type = other DNA
agactaacccctgttgaaccccaagtttggtgagcttctggacctccttgaggcccgtgtgcaaagtccccagtcaagtg

SEQ ID NO: 57208 - DNA, 80 bp, synthetic construct; identical to SEQ ID NO: 25809
  misc_feature 1..80: note = Artificially Synthesized Probe
  source 1..80: mol_type = other DNA

SEQ ID NO: 57209 - DNA, 80 bp, synthetic construct
  misc_feature 1..80: note = Artificially Synthesized Probe
  source 1..80: mol_type = other DNA
gaagggcagggactcgccgctggagttgtccacggagcaggccctcaaaggtgggagctggggccagctctggaaataga

SEQ ID NO: 57210 - DNA, 80 bp, synthetic construct
  misc_feature 1..80: note = Artificially Synthesized Probe
  source 1..80: mol_type = other DNA
gggctaaggggaccaggccaggcccaaaggggaccatgagggagggcagtctggggccactctgataggagaaggggcag

SEQ ID NO: 57211 - DNA, 80 bp, synthetic construct
  misc_feature 1..80: note = Artificially Synthesized Probe
  source 1..80: mol_type = other DNA
ctccgtgggggcctgaggcaccagctgggcgcccaccgaagggcttcaacacttgtgcccaggcccttcgtgcaggccct

SEQ ID NO: 57212 - DNA, 80 bp, synthetic construct; identical to SEQ ID NO: 25810
  misc_feature 1..80: note = Artificially Synthesized Probe
  source 1..80: mol_type = other DNA

SEQ ID NO: 57213 - DNA, 80 bp, synthetic construct
  misc_feature 1..80: note = Artificially Synthesized Probe
  source 1..80: mol_type = other DNA
cctctcccggccccaggagggccctgcttccctccaaggtcaccatgctaagcctgctcccctcacgcctcctcttcctc

SEQ ID NO: 57214 - DNA, 80 bp, synthetic construct
  misc_feature 1..80: note = Artificially Synthesized Probe
  source 1..80: mol_type = other DNA
ccctgaccgggccgggagtgcccgcagcatcactggctcctggccacagtcggcacctgagccagaggccgcctcggcag

SEQ ID NO: 57215 - DNA, 80 bp, synthetic construct
  misc_feature 1..80: note = Artificially Synthesized Probe
  source 1..80: mol_type = other DNA
cggtgacggctactctgctcccccagggagaagacggccccgctggaaatggcaccgagggcttccccggcttccccgta

SEQ ID NO: 57216 - DNA, 80 bp, synthetic construct; identical to SEQ ID NO: 25811
  misc_feature 1..80: note = Artificially Synthesized Probe
  source 1..80: mol_type = other DNA

SEQ ID NO: 57217 - DNA, 80 bp, synthetic construct
  misc_feature 1..80: note = Artificially Synthesized Probe
  source 1..80: mol_type = other DNA
aacacacggggtacacaggcacccacggctgccccactgtctgtggccacagccccagttggcatcggctcctgcaggcc

SEQ ID NO: 57218 - DNA, 80 bp, synthetic construct
  misc_feature 1..80: note = Artificially Synthesized Probe
  source 1..80: mol_type = other DNA
gcttagccggcgtaggaacccccgtcctccttgaccctgctgactggccgctgggccggagcctcccgccaccagaaggg

SEQ ID NO: 57219 - DNA, 80 bp, synthetic construct
  misc_feature 1..80: note = Artificially Synthesized Probe
  source 1..80: mol_type = other DNA
gtgtggtgggggaagggaagagaagagtgcctctcttatctttatttttttccttttaaaatttccacttcctaaaaaca

SEQ ID NO: 57220 - DNA, 80 bp, synthetic construct
  misc_feature 1..80: note = Artificially Synthesized Probe
  source 1..80: mol_type = other DNA
ggcccttgaagggcagtggaccaggacccgcttggggaggcctcatgggccccggctgctggatgctctgtggacggggc

SEQ ID NO: 57221 - DNA, 80 bp, synthetic construct; identical to SEQ ID NO: 25812
  misc_feature 1..80: note = Artificially Synthesized Probe
  source 1..80: mol_type = other DNA

SEQ ID NO: 57222 - DNA, 80 bp, synthetic construct
  misc_feature 1..80: note = Artificially Synthesized Probe
  source 1..80: mol_type = other DNA
ccctcacagcaccgtcactggaggacgaggggctgggtagggagggaccgggcaggggtgggcttgatgaggggcagggc

SEQ ID NO: 57223 - DNA, 80 bp, synthetic construct
  misc_feature 1..80: note = Artificially Synthesized Probe
  source 1..80: mol_type = other DNA
gcttccatcccttggggtgtgggtcctgtccatgggtgctcctgtagacgctgctcacgggggggtgggttgtggacaaa

SEQ ID NO: 57224 - DNA, 80 bp, synthetic construct
  misc_feature 1..80: note = Artificially Synthesized Probe
  source 1..80: mol_type = other DNA
atggagggggacatgtgaggatcatgggggacccgtgaggatcatgggggacccgtgtgaggatcatggggggggacgtg

SEQ ID NO: 57225 - DNA, 80 bp, synthetic construct
  misc_feature 1..80: note = Artificially Synthesized Probe
  source 1..80: mol_type = other DNA
gcccaaaccccgccctgtgggggccccagggagggtgacctggagatccagcagcccacagtccccgctgggaggggctg

SEQ ID NO: 57226 - DNA, 80 bp, synthetic construct; identical to SEQ ID NO: 25813
  misc_feature 1..80: note = Artificially Synthesized Probe
  source 1..80: mol_type = other DNA

SEQ ID NO: 57227 - DNA, 80 bp, synthetic construct
  misc_feature 1..80: note = Artificially Synthesized Probe
  source 1..80: mol_type = other DNA
gcctttctgacgtgcgcaggacgcggccctgactggtctaactgactctttctcttctcctcagcttgctgtggtgagac

SEQ ID NO: 57228 - DNA, 80 bp, synthetic construct
  misc_feature 1..80: note = Artificially Synthesized Probe
  source 1..80: mol_type = other DNA
ggtgttgggctgggccccgccctctttcacccataactgaaataaccaggagcaggcttgggggggtccctgctccatca

SEQ ID NO: 57229 - DNA, 80 bp, synthetic construct
  misc_feature 1..80: note = Artificially Synthesized Probe
  source 1..80: mol_type = other DNA
gcggccgcgtggcccagcgtcccccgagtcgcccttgttgcctttactcagtctccccatgactcagtttcccacctgtg

SEQ ID NO: 57230 - DNA, 80 bp, synthetic construct
  misc_feature 1..80: note = Artificially Synthesized Probe
  source 1..80: mol_type = other DNA
gggccagggcggtggaggggaggggccagggcactggaggggaggggcgtgctctgctgacaccgcccccgcctgcagaa

SEQ ID NO: 57231 - DNA, 80 bp, synthetic construct
  misc_feature 1..80: note = Artificially Synthesized Probe
  source 1..80: mol_type = other DNA
aagcccaggtgcaccccgaccctgccggccgcccctgcccgcgccagacctcagcctcccgaggccaccgctgcatccct

SEQ ID NO: 57232 - DNA, 80 bp, synthetic construct
  misc_feature 1..80: note = Artificially Synthesized Probe
  source 1..80: mol_type = other DNA
tgtgggcttgtccctcgtggacagaacccaggagggcttcatccaccaaggaagattgctttgcagggtacccaggtccc

SEQ ID NO: 57233 - DNA, 80 bp, synthetic construct
  misc_feature 1..80: note = Artificially Synthesized Probe
  source 1..80: mol_type = other DNA
acccttgggaagcttatgcggacctggggcagcactcgcgtcctgaccccggtgccggtcccacagttcgagccagggca

SEQ ID NO: 57234 - DNA, 80 bp, synthetic construct; identical to SEQ ID NO: 25814
  misc_feature 1..80: note = Artificially Synthesized Probe
  source 1..80: mol_type = other DNA

SEQ ID NO: 57235 - DNA, 80 bp, synthetic construct
  misc_feature 1..80: note = Artificially Synthesized Probe
  source 1..80: mol_type = other DNA
aacgtgctctgcagccccggcatccaggtggggtggccacccccaggctgcacctgccccgcctagggcgccccgccagc

SEQ ID NO: 57236 - DNA, 80 bp, synthetic construct
  misc_feature 1..80: note = Artificially Synthesized Probe
  source 1..80: mol_type = other DNA
cccagggccggcccggcctctcgctggtcaaggagaactatgcagagctgctggaggatgccttcctgaagaatgtcacc

SEQ ID NO: 57237 - DNA, 80 bp, synthetic construct
  misc_feature 1..80: note = Artificially Synthesized Probe
  source 1..80: mol_type = other DNA
gtcccagatctgtgtaggtgcgcgcaggcgcccagggctgtcccagaggcctcctcccagctcactgttacctccagggg

SEQ ID NO: 57238 - DNA, 80 bp, synthetic construct; identical to SEQ ID NO: 25815
  misc_feature 1..80: note = Artificially Synthesized Probe
  source 1..80: mol_type = other DNA

SEQ ID NO: 57239 - DNA, 80 bp, synthetic construct
  misc_feature 1..80: note = Artificially Synthesized Probe
  source 1..80: mol_type = other DNA
cactgcggctgcatcaccagggcctcatgctaacggctgcccaccccgccccgcagtcacgttctcctccccggctgaca

SEQ ID NO: 57240 - DNA, 80 bp, synthetic construct
  misc_feature 1..80: note = Artificially Synthesized Probe
  source 1..80: mol_type = other DNA
cagcgagggggctgctcagatccccggggtgcctccttcccccactgtcatgctgccccactgcaggcccaaggacccca

SEQ ID NO: 57241 - DNA, 80 bp, synthetic construct
  misc_feature 1..80: note = Artificially Synthesized Probe
  source 1..80: mol_type = other DNA
gcagcgcccagagcgggcgtcgctgcagttcctgcagaactacacggccctggccagtgccgtcgatgccatggacttta

SEQ ID NO: 57242 - DNA, 80 bp, synthetic construct
  misc_feature 1..80: note = Artificially Synthesized Probe
  source 1..80: mol_type = other DNA
gcgggcaggcatcgagatcttcgtggtggtcgtgggccgccaggtgaatgagccccacatccgcgtcctggtcaccggca

SEQ ID NO: 57243 - DNA, 80 bp, synthetic construct; identical to SEQ ID NO: 25816
  misc_feature 1..80: note = Artificially Synthesized Probe
  source 1..80: mol_type = other DNA

SEQ ID NO: 57244 - DNA, 80 bp, synthetic construct
  misc_feature 1..80: note = Artificially Synthesized Probe
  source 1..80: mol_type = other DNA
cctgcacagggccctctgaggctcagccctgagctggcgtcacctgtgcagggccctctggggctcagccctgagctggc

SEQ ID NO: 57245 - DNA, 80 bp, synthetic construct
  misc_feature 1..80: note = Artificially Synthesized Probe
  source 1..80: mol_type = other DNA
gtccccatagctggtttttcccaccaatcctcacctaacagttactttacaattaaactcaaagcaagctcttctcctca

SEQ ID NO: 57246 - DNA, 80 bp, synthetic construct
  misc_feature 1..80: note = Artificially Synthesized Probe
  source 1..80: mol_type = other DNA
accttggccctacagccctggaggccgctgctgaccagcactgaccccgacctcagagagtactcgcaggggcgctggct

SEQ ID NO: 57247 - DNA, 80 bp, synthetic construct; identical to SEQ ID NO: 25817
  misc_feature 1..80: note = Artificially Synthesized Probe
  source 1..80: mol_type = other DNA

SEQ ID NO: 57248 - DNA, 80 bp, synthetic construct
  misc_feature 1..80: note = Artificially Synthesized Probe
  source 1..80: mol_type = other DNA
cgacgttttatcaaaggccccctttctatgttcatgttagttttgctccttctgtgtttttttctgaaccatatccatgt

SEQ ID NO: 57249 - DNA, 80 bp, synthetic construct
  misc_feature 1..80: note = Artificially Synthesized Probe
  source 1..80: mol_type = other DNA
cagcctgtccatctgggtgacgtcgcgccctgggacgggtagcgatggcgccaggggccgcccgcctcacgcccgccgtg

SEQ ID NO: 57250 - DNA, 80 bp, synthetic construct
  misc_feature 1..80: note = Artificially Synthesized Probe
  source 1..80: mol_type = other DNA
cggggtcccctcccacgcgtggaactgcagactgggggcctggagcccctgaaccccactccccgctcggggcggctgca

SEQ ID NO: 57251 - DNA, 80 bp, synthetic construct; identical to SEQ ID NO: 25796
  misc_feature 1..80: note = Artificially Synthesized Probe
  source 1..80: mol_type = other DNA

SEQ ID NO: 57252 - DNA, 80 bp, synthetic construct
  misc_feature 1..80: note = Artificially Synthesized Probe
  source 1..80: mol_type = other DNA
cagaaacagggagaaacagacacagagagagacagagacagagagagatagagacagagacagagagagacagagacaaa

SEQ ID NO: 57253 - DNA, 80 bp, synthetic construct
  misc_feature 1..80: note = Artificially Synthesized Probe
  source 1..80: mol_type = other DNA
gagagacagagagacagagacagagacagacaaacagagacagagagacagaaacagggacagagacagaaagagagaga

SEQ ID NO: 57254 - DNA, 80 bp, synthetic construct
  misc_feature 1..80: note = Artificially Synthesized Probe
  source 1..80: mol_type = other DNA
cagagacagagacagcgaaacagagacagaaacatacagagacagagagacagagagaagcagagacagacagaggcaga

SEQ ID NO: 57255 - DNA, 80 bp, synthetic construct; identical to SEQ ID NO: 25797
  misc_feature 1..80: note = Artificially Synthesized Probe
  source 1..80: mol_type = other DNA

SEQ ID NO: 57256 - DNA, 80 bp, synthetic construct
  misc_feature 1..80: note = Artificially Synthesized Probe
  source 1..80: mol_type = other DNA
ccccggagtgtccagaggggaacgtggcctccccacacccagcccttcacgaggcctcaggatcccagtgggggtacccg

SEQ ID NO: 57257 - DNA, 80 bp, synthetic construct
  misc_feature 1..80: note = Artificially Synthesized Probe
  source 1..80: mol_type = other DNA
ttggagtctcaggaagtcgtccgctgtctgcagggggtgcatgggggatgtggccacacacgtcagagtgcggccccctg

SEQ ID NO: 57258 - DNA, 80 bp, synthetic construct
  misc_feature 1..80: note = Artificially Synthesized Probe
  source 1..80: mol_type = other DNA
cgccctgttgtttgctcatcacacccatttcctgcaagagccacggtgaccgagcagccttgagttgaggcagcttgtgg

SEQ ID NO: 57259 - DNA, 80 bp, synthetic construct; identical to SEQ ID NO: 25798
  misc_feature 1..80: note = Artificially Synthesized Probe
  source 1..80: mol_type = other DNA

SEQ ID NO: 57260 - DNA, 80 bp, synthetic construct
  misc_feature 1..80: note = Artificially Synthesized Probe
  source 1..80: mol_type = other DNA
cctgaaggagaataagtacctgattgtggtgaccgacgggcaccccctggagggctacaaggaaccctgtggggggctgg

SEQ ID NO: 57261 - DNA, 80 bp, synthetic construct
  misc_feature 1..80: note = Artificially Synthesized Probe
  source 1..80: mol_type = other DNA
cacctggcagtgagtccagacgcacggcccccccgacccccgttctagaagaagtcgtgcgctgctggttctgaatccag

SEQ ID NO: 57262 - DNA, 80 bp, synthetic construct
  misc_feature 1..80: note = Artificially Synthesized Probe
  source 1..80: mol_type = other DNA
cgggagggtgtgggttctccagccggccacccttgcccctgagaggccagcccctcctgctgaggagcctggagcgcccc

SEQ ID NO: 57263 - DNA, 80 bp, synthetic construct
  misc_feature 1..80: note = Artificially Synthesized Probe
  source 1..80: mol_type = other DNA
gagccgcgacgcagaggaggccatcagccagaccatcgacaccatcgtggacatgatcgtgaggcccctgcccaggagac

SEQ ID NO: 57264 - DNA, 80 bp, synthetic construct; identical to SEQ ID NO: 25799
  misc_feature 1..80: note = Artificially Synthesized Probe
  source 1..80: mol_type = other DNA

SEQ ID NO: 57265 - DNA, 80 bp, synthetic construct
  misc_feature 1..80: note = Artificially Synthesized Probe
  source 1..80: mol_type = other DNA
ccgtggctttcccactgactcgtctccatgctttccccccacagtgctgctccttcgaatgccaggtgagtgtgcccccc

SEQ ID NO: 57266 - DNA, 80 bp, synthetic construct
  misc_feature 1..80: note = Artificially Synthesized Probe
  source 1..80: mol_type = other DNA
tgggagtgggggtggcaggaccaaagcctcctgggcacccaagtccaccatgaggatccagaggggacggcgggggtcca

SEQ ID NO: 57267 - DNA, 80 bp, synthetic construct; identical to SEQ ID NO: 25800
  misc_feature 1..80: note = Artificially Synthesized Probe
  source 1..80: mol_type = other DNA

SEQ ID NO: 57268 - DNA, 80 bp, synthetic construct
  misc_feature 1..80: note = Artificially Synthesized Probe
  source 1..80: mol_type = other DNA
ggaggggacgtcggggctccagatggaggggacggcgggggtccagatggaggggacggcggggtccagatggaggggac

SEQ ID NO: 57269 - DNA, 80 bp, synthetic construct
  misc_feature 1..80: note = Artificially Synthesized Probe
  source 1..80: mol_type = other DNA
acgtcggggctccagatggaggggacggcggggtccagatggaggggatgtcggggtccagatggaagggacggcggggt

SEQ ID NO: 57270 - DNA, 80 bp, synthetic construct
  misc_feature 1..80: note = Artificially Synthesized Probe
  source 1..80: mol_type = other DNA
tcacataggatgaccttaaacgttagaattagctgctgataattaaaacttgccatgaggctgctcatggacctcagatt

SEQ ID NO: 57271 - DNA, 80 bp, synthetic construct
  misc_feature 1..80: note = Artificially Synthesized Probe
  source 1..80: mol_type = other DNA
aattaaaacttgccatgaggctgctcatggacctcagatttctggcttctcctaaaaaccatcaaacccagcagctgtgg

SEQ ID NO: 57272 - DNA, 80 bp, synthetic construct; identical to SEQ ID NO: 25801
  misc_feature 1..80: note = Artificially Synthesized Probe
  source 1..80: mol_type = other DNA

SEQ ID NO: 57273 - DNA, 80 bp, synthetic construct
  misc_feature 1..80: note = Artificially Synthesized Probe
  source 1..80: mol_type = other DNA
tgctgccttttcccgggagagcctctccgggcccggggctctgtgctgcaggcgctgggctggccgggagggcaggccca

SEQ ID NO: 57274 - DNA, 80 bp, synthetic construct
  misc_feature 1..80: note = Artificially Synthesized Probe
  source 1..80: mol_type = other DNA
tggaggcggggaacgactaggcctcggaaacttccggaagagtggctgggttctgagtgccaaagtcacactgcctgttc

SEQ ID NO: 57275 - DNA, 80 bp, synthetic construct
  misc_feature 1..80: note = Artificially Synthesized Probe
  source 1..80: mol_type = other DNA
gcccaaatcctatccatagacttccctcccccagctccaccttggagggcctcggcaccatgggccccgtgcagcagggc

SEQ ID NO: 57276 - DNA, 80 bp, synthetic construct
  misc_feature 1..80: note = Artificially Synthesized Probe
  source 1..80: mol_type = other DNA
acgtgccccccctttcctggcccgagcccggtggtgccctcagccttgcacagcactaacaagccttcctcttcctcttc

SEQ ID NO: 57277 - DNA, 80 bp, synthetic construct
  misc_feature 1..80: note = Artificially Synthesized Probe
  source 1..80: mol_type = other DNA
gaggacagtgtccctgacaggagaccacgtgtcctgcagacccgctccaccgcccctcgccgtcccctccatctggaagg

SEQ ID NO: 57278 - DNA, 80 bp, synthetic construct; identical to SEQ ID NO: 25802
  misc_feature 1..80: note = Artificially Synthesized Probe
  source 1..80: mol_type = other DNA

SEQ ID NO: 57279 - DNA, 80 bp, synthetic construct
  misc_feature 1..80: note = Artificially Synthesized Probe
  source 1..80: mol_type = other DNA
ctgacctgcatctgactcctgccttcgttttcccgcctcacagggagagaagggcaagcgtggcatcgacggggtggacg

SEQ ID NO: 57280 - DNA, 80 bp, synthetic construct
  misc_feature 1..80: note = Artificially Synthesized Probe
  source 1..80: mol_type = other DNA
gatggggtgaggtgatcccggcaggagggacagggaggagtggggtggacggtgtgaaggtgaccccaggggggtgtctg

SEQ ID NO: 57281 - DNA, 80 bp, synthetic construct; identical to SEQ ID NO: 25803
  misc_feature 1..80: note = Artificially Synthesized Probe
  source 1..80: mol_type = other DNA

SEQ ID NO: 57282 - DNA, 80 bp, synthetic construct
  misc_feature 1..80: note = Artificially Synthesized Probe
  source 1..80: mol_type = other DNA
ggcccctggaggaccagggccttcacggttggccaagcgctgaattggaaacctctcctggaagcaagtcctggtccgag

SEQ ID NO: 57283 - DNA, 80 bp, synthetic construct
  misc_feature 1..80: note = Artificially Synthesized Probe
  source 1..80: mol_type = other DNA
gtcccccgcacctgccgctcgctcggcacagatgggaccccaccgcgtcactcctagcctgcgagccgcagcccagaatg

SEQ ID NO: 57284 - DNA, 80 bp, synthetic construct; identical to SEQ ID NO: 25794
  misc_feature 1..80: note = Artificially Synthesized Probe
  source 1..80: mol_type = other DNA

SEQ ID NO: 57285 - DNA, 80 bp, synthetic construct
  misc_feature 1..80: note = Artificially Synthesized Probe
  source 1..80: mol_type = other DNA
ctgagtctgccgttgctggtgttttctctggagtttctttgttgaagctgaagtgttggggaagacaaaggcgaatgctg

SEQ ID NO: 57286 - DNA, 80 bp, synthetic construct
  misc_feature 1..80: note = Artificially Synthesized Probe
  source 1..80: mol_type = other DNA
ctgcttactcggcgcccgcgcctcgggccgtcgggagcggagcctcctcgggaccaggtgagcgcctcccggaccccgca

SEQ ID NO: 57287 - DNA, 80 bp, synthetic construct; identical to SEQ ID NO: 25828
  misc_feature 1..80: note = Artificially Synthesized Probe
  source 1..80: mol_type = other DNA

SEQ ID NO: 57288 - DNA, 80 bp, synthetic construct
  misc_feature 1..80: note = Artificially Synthesized Probe
  source 1..80: mol_type = other DNA
actcttaaaagggtccatgaccacaaagataagaaccactattttagctttttgtgtaaaatatgatgtgagctcttgat

SEQ ID NO: 57289 - DNA, 80 bp, synthetic construct
  misc_feature 1..80: note = Artificially Synthesized Probe
  source 1..80: mol_type = other DNA
taatgtattccctagtgtttgtggcaacactgtactttaacttcatattatagttctggtatagtggtccttaatatgct

SEQ ID NO: 57290 - DNA, 80 bp, synthetic construct
  misc_feature 1..80: note = Artificially Synthesized Probe
  source 1..80: mol_type = other DNA
gtgtgcaagacagagaagctttattgagtgttaggggagctcacaggagacccgcagggggcagcccctctctgtaggcg

SEQ ID NO: 57291 - DNA, 80 bp, synthetic construct; identical to SEQ ID NO: 25829
  misc_feature 1..80: note = Artificially Synthesized Probe
  source 1..80: mol_type = other DNA

SEQ ID NO: 57292 - DNA, 80 bp, synthetic construct
  misc_feature 1..80: note = Artificially Synthesized Probe
  source 1..80: mol_type = other DNA
aagaaagcaccttgagttcccctctggtccgtaggacgggcaacccggcccccaggcttcaggcctgccccagcctgaag

SEQ ID NO: 57293 - DNA, 80 bp, synthetic construct
  misc_feature 1..80: note = Artificially Synthesized Probe
  source 1..80: mol_type = other DNA
ttggagggggccaagtcagcagggggctggcatgtcagcactgccacaagcatgcacccacccggccaggctgtgacagt

SEQ ID NO: 57294 - DNA, 80 bp, synthetic construct
  misc_feature 1..80: note = Artificially Synthesized Probe
  source 1..80: mol_type = other DNA
ccccgtctctactaaaaatacaaaaaaaaattagccgggcgtggtggcaggcacctgtaatcccagctaatcgggaggct

SEQ ID NO: 57295 - DNA, 80 bp, synthetic construct
  misc_feature 1..80: note = Artificially Synthesized Probe
  source 1..80: mol_type = other DNA
gggcagctgaaactgcaccaggagtgggggctggctcctgcctcctccatggagcagaaggcccagatccacagccacga

SEQ ID NO: 57296 - DNA, 80 bp, synthetic construct
  misc_feature 1..80: note = Artificially Synthesized Probe
  source 1..80: mol_type = other DNA
ctggggcagggtctccagacctgggccagcatcccagacaggggcaacaccgccgtgagctccccttcacccagcacacc

SEQ ID NO: 57297 - DNA, 80 bp, synthetic construct; identical to SEQ ID NO: 25830
  misc_feature 1..80: note = Artificially Synthesized Probe
  source 1..80: mol_type = other DNA

SEQ ID NO: 57298 - DNA, 80 bp, synthetic construct
  misc_feature 1..80: note = Artificially Synthesized Probe
  source 1..80: mol_type = other DNA
atgaagtgcttgtccttgaagctgtgaaactcacccacaaactgcctgagctggcacctttgggaacggacttcattcct

SEQ ID NO: 57299 - DNA, 80 bp, synthetic construct
  misc_feature 1..80: note = Artificially Synthesized Probe
  source 1..80: mol_type = other DNA
aatccctgcattacccctggaactgcacgctctgaaccaggcccggtgccctttctgcccagctgcccggctgctgccag

SEQ ID NO: 57300 - DNA, 80 bp, synthetic construct; identical to SEQ ID NO: 25831
  misc_feature 1..80: note = Artificially Synthesized Probe
  source 1..80: mol_type = other DNA

SEQ ID NO: 57301 - DNA, 80 bp, synthetic construct
  misc_feature 1..80: note = Artificially Synthesized Probe
  source 1..80: mol_type = other DNA
ctccacccagccctggaggacatggaagggcctcaaccatccaaatcccacccaaaactgagcccagaggcacccactaa

SEQ ID NO: 57302 - DNA, 80 bp, synthetic construct
  misc_feature 1..80: note = Artificially Synthesized Probe
  source 1..80: mol_type = other DNA
gtgccaggggagaggcactgggggtgtctgagcgacccccacccctgttgcaggacttcagggccacaggtgctgccaag

SEQ ID NO: 57303 - DNA, 80 bp, synthetic construct
  misc_feature 1..80: note = Artificially Synthesized Probe
  source 1..80: mol_type = other DNA
ttgggaccagtacccaggtgccaggggtcgggggccgggggctctgggcatttggggggcagttgggaccagtacccagg

SEQ ID NO: 57304 - DNA, 80 bp, synthetic construct
  misc_feature 1..80: note = Artificially Synthesized Probe
  source 1..80: mol_type = other DNA
aaaaaaggaaagaaaggcccggtgagatgctttctcttaaacacggccctgcacgttgagttgctgcctcctgtggccta

SEQ ID NO: 57305 - DNA, 80 bp, synthetic construct; identical to SEQ ID NO: 25832
  misc_feature 1..80: note = Artificially Synthesized Probe
  source 1..80: mol_type = other DNA

SEQ ID NO: 57306 - DNA, 80 bp, synthetic construct
  misc_feature 1..80: note = Artificially Synthesized Probe
  source 1..80: mol_type = other DNA
tctacctggaccaggtggcgctgagctggcgctacggcggcctgcacttctctgaccaggtggaggtgttcagcccaccg

SEQ ID NO: 57307 - DNA, 80 bp, synthetic construct
  misc_feature 1..80: note = Artificially Synthesized Probe
  source 1..80: mol_type = other DNA
tcaccggcagcccctgcgggggcatcaagctgcaggccgagcgggcccgcgaggagggcatccggctcttcgccgtggcc

SEQ ID NO: 57308 - DNA, 80 bp, synthetic construct
  misc_feature 1..80: note = Artificially Synthesized Probe
  source 1..80: mol_type = other DNA
accgtccacgcgccaggggtggccacggtgggccgtccacccactccgggcctcactttacccctctgtgagtgcggagg

SEQ ID NO: 57309 - DNA, 80 bp, synthetic construct
  misc_feature 1..80: note = Artificially Synthesized Probe
  source 1..80: mol_type = other DNA
tcccttcctgccagtgctggccggcagctgacccagcagagatgaccgcgccaggctgccgactcctggcgcctccaggc

SEQ ID NO: 57310 - DNA, 80 bp, synthetic construct; identical to SEQ ID NO: 25833
  misc_feature 1..80: note = Artificially Synthesized Probe
  source 1..80: mol_type = other DNA

SEQ ID NO: 57311 - DNA, 80 bp, synthetic construct
  misc_feature 1..80: note = Artificially Synthesized Probe
  source 1..80: mol_type = other DNA
caaatggtgcctccctcaccagtgccccttgctcttccatccttttgtaaaatttattcttttatatttgtttttttaga

SEQ ID NO: 57312 - DNA, 80 bp, synthetic construct
  misc_feature 1..80: note = Artificially Synthesized Probe
  source 1..80: mol_type = other DNA
caggcacctgccaccatacctggtgtgcgcatgtagttccagctacttgggaggctgaggtgggaggatcgctttcgtat

SEQ ID NO: 57313 - DNA, 80 bp, synthetic construct; identical to SEQ ID NO: 25834
  misc_feature 1..80: note = Artificially Synthesized Probe
  source 1..80: mol_type = other DNA

SEQ ID NO: 57314 - DNA, 80 bp, synthetic construct
  misc_feature 1..80: note = Artificially Synthesized Probe
  source 1..80: mol_type = other DNA
ctgaggaatgtcccacccatgcaaccttctgtctctgcttcctcgtttcagtgctacaaggtgagctgcctggaaatccc

SEQ ID NO: 57315 - DNA, 80 bp, synthetic construct
  misc_feature 1..80: note = Artificially Synthesized Probe
  source 1..80: mol_type = other DNA
gcggcccttcctggcctgcagtggaggctgtaatgggcaggggtggtgggaatcccagctcacagggcgcctgctcttag

SEQ ID NO: 57316 - DNA, 80 bp, synthetic construct
  misc_feature 1..80: note = Artificially Synthesized Probe
  source 1..80: mol_type = other DNA
cgggcggatcacaacgtcaggagatcgagaccatcctggctaacatggtgaaaccctgtctctactaaaaatacaaaaat

SEQ ID NO: 57317 - DNA, 80 bp, synthetic construct
  misc_feature 1..80: note = Artificially Synthesized Probe
  source 1..80: mol_type = other DNA
aaaagaaaagaaagccacatttaaggccagctgtatctcaaattgtctcaacacttctgtccctggagaaactaaaactc

SEQ ID NO: 57318 - DNA, 80 bp, synthetic construct; identical to SEQ ID NO: 25835
  misc_feature 1..80: note = Artificially Synthesized Probe
  source 1..80: mol_type = other DNA

SEQ ID NO: 57319 - DNA, 80 bp, synthetic construct
  misc_feature 1..80: note = Artificially Synthesized Probe
  source 1..80: mol_type = other DNA
aggatgttactgctacgtagcttcgtgtttttctaaatttggataacagctgtctagaccagtaggtatctggatgtact

SEQ ID NO: 57320 - DNA, 80 bp, synthetic construct
  misc_feature 1..80: note = Artificially Synthesized Probe
  source 1..80: mol_type = other DNA
ttgggggggccactggaagctgccacagggatcactgtggttagagtttgaggggtggcaaggtgccaagcggagcccag

SEQ ID NO: 57321 - DNA, 80 bp, synthetic construct
  misc_feature 1..80: note = Artificially Synthesized Probe
  source 1..80: mol_type = other DNA
aataaagttctgtatcataggttaaaattttaattccaagagagtgtaacctttatgtggtgttctgaagtcctgatctg

SEQ ID NO: 57322 - DNA, 80 bp, synthetic construct; identical to SEQ ID NO: 25836
  misc_feature 1..80: note = Artificially Synthesized Probe
  source 1..80: mol_type = other DNA

SEQ ID NO: 57323 - DNA, 80 bp, synthetic construct
  misc_feature 1..80: note = Artificially Synthesized Probe
  source 1..80: mol_type = other DNA
caagggcaacatgggtgagccgggagagcctggccagaagggaagacaggtgagtgtccttgccccacgcccgccccgcc

SEQ ID NO: 57324 - DNA, 80 bp, synthetic construct
  misc_feature 1..80: note = Artificially Synthesized Probe
  source 1..80: mol_type = other DNA
ccccagcccagcctcggcctcagcctctacgaccctccccccagttaccaaggaacagaagcacctcgataacttgatgg

SEQ ID NO: 57325 - DNA, 80 bp, synthetic construct; identical to SEQ ID NO: 25819
  misc_feature 1..80: note = Artificially Synthesized Probe
  source 1..80: mol_type = other DNA

SEQ ID NO: 57326 - DNA, 80 bp, synthetic construct
  misc_feature 1..80: note = Artificially Synthesized Probe
  source 1..80: mol_type = other DNA
ctctctcctcctgcccccagggcgttcctggcttcaaaggagagaaggtgaggctcttgccctgacagacctcagacctg

SEQ ID NO: 57327 - DNA, 80 bp, synthetic construct
  misc_feature 1..80: note = Artificially Synthesized Probe
  source 1..80: mol_type = other DNA
gcccatgatgctttgaggcaccgagctcactgcgccggctttcctcctacacagggtgaatttggagccgacggtcgcaa

SEQ ID NO: 57328 - DNA, 80 bp, synthetic construct; identical to SEQ ID NO: 25837
  misc_feature 1..80: note = Artificially Synthesized Probe
  source 1..80: mol_type = other DNA

SEQ ID NO: 57329 - DNA, 80 bp, synthetic construct
  misc_feature 1..80: note = Artificially Synthesized Probe
  source 1..80: mol_type = other DNA
agcctacccactcccaggtcaaaccacaggacagccccacccactccttccatggctccccgtgggaacatcctctgtgc

SEQ ID NO: 57330 - DNA, 80 bp, synthetic construct
  misc_feature 1..80: note = Artificially Synthesized Probe
  source 1..80: mol_type = other DNA
ccgggtgggctgtgtcttggtcgttggcacacatggaccccagaaccccgccctgagactcctcctgcccccttctcctt

SEQ ID NO: 57331 - DNA, 80 bp, synthetic construct
  misc_feature 1..80: note = Artificially Synthesized Probe
  source 1..80: mol_type = other DNA
ggcagcccagcagccccagcccagcagccccagcccagcattctgccgggtcggagtcatgtgaggaactccccctggga

SEQ ID NO: 57332 - DNA, 80 bp, synthetic construct; identical to SEQ ID NO: 25838
  misc_feature 1..80: note = Artificially Synthesized Probe
  source 1..80: mol_type = other DNA

SEQ ID NO: 57333 - DNA, 80 bp, synthetic construct
  misc_feature 1..80: note = Artificially Synthesized Probe
  source 1..80: mol_type = other DNA
tggaaacactggtcagtgaggagccaatggccgtgggatgtggtggagggtgccctgcccgttgcttcatcagcttctaa

SEQ ID NO: 57334 - DNA, 80 bp, synthetic construct
  misc_feature 1..80: note = Artificially Synthesized Probe
  source 1..80: mol_type = other DNA
agacagggtcttgctctgtcacccaggctggagtgtggtggtgctatcactgctcactgcaatctgcacatccctggctc

SEQ ID NO: 57335 - DNA, 80 bp, synthetic construct
  misc_feature 1..80: note = Artificially Synthesized Probe
  source 1..80: mol_type = other DNA
gccccgcccctggcggccccaggatccccaagggcttttttctgggagcttggacttagggcttcccactttctgtccac

SEQ ID NO: 57336 - DNA, 80 bp, synthetic construct
  misc_feature 1..80: note = Artificially Synthesized Probe
  source 1..80: mol_type = other DNA
tcccaagcccgaccgtgggtcctgcccccgcagcgggcatcctgcaccccccttcccctgccaaaagacgtgaggctgat

SEQ ID NO: 57337 - DNA, 80 bp, synthetic construct; identical to SEQ ID NO: 25839
  misc_feature 1..80: note = Artificially Synthesized Probe
  source 1..80: mol_type = other DNA

SEQ ID NO: 57338 - DNA, 80 bp, synthetic construct
  misc_feature 1..80: note = Artificially Synthesized Probe
  source 1..80: mol_type = other DNA
tctgggtgactgtgctgtcctctccttcttcaggggtatcaaggcaacagtggagccccaggaagtcctggtgtgaaagg

SEQ ID NO: 57339 - DNA, 80 bp, synthetic construct
  misc_feature 1..80: note = Artificially Synthesized Probe
  source 1..80: mol_type = other DNA
cagccaggcccccatcctcccaagaagtggacccggaccaccccacgggaccccccagagctggacttagaggtaaagcc

SEQ ID NO: 57340 - DNA, 80 bp, synthetic construct; identical to SEQ ID NO: 25840
  misc_feature 1..80: note = Artificially Synthesized Probe
  source 1..80: mol_type = other DNA

SEQ ID NO: 57341 - DNA, 80 bp, synthetic construct
  misc_feature 1..80: note = Artificially Synthesized Probe
  source 1..80: mol_type = other DNA
agcccccaccctccacaggctctgggcttggactcagccccctccctcacccacacgcctgttctctgcaggggcgcagg

SEQ ID NO: 57342 - DNA, 80 bp, synthetic construct
  misc_feature 1..80: note = Artificially Synthesized Probe
  source 1..80: mol_type = other DNA
cctcactctccagagttcactctctgcagagtctgggaatgcagccctgagatccccacaccccattctctgctgaggaa

SEQ ID NO: 57343 - DNA, 80 bp, synthetic construct
  misc_feature 1..80: note = Artificially Synthesized Probe
  source 1..80: mol_type = other DNA
aagggctgtgtggtaaaaccccggccaccagctccccttgacatcaggtgaaggggcttcctcccaggaagtggacgagg

SEQ ID NO: 57344 - DNA, 80 bp, synthetic construct
  misc_feature 1..80: note = Artificially Synthesized Probe
  source 1..80: mol_type = other DNA
gccacacccgcctctcacatgggacccaggccggaggcctcagctgagacccgtggggcctcccttcccttcccacaggg

SEQ ID NO: 57345 - DNA, 80 bp, synthetic construct
  misc_feature 1..80: note = Artificially Synthesized Probe
  source 1..80: mol_type = other DNA
ttttattgatttgaaaaagctttattttcccgaattttttattgtggtatacaatataaaatgtactgtcttaaccattt

SEQ ID NO: 57346 - DNA, 80 bp, synthetic construct; identical to SEQ ID NO: 25841
  misc_feature 1..80: note = Artificially Synthesized Probe
  source 1..80: mol_type = other DNA

SEQ ID NO: 57347 - DNA, 80 bp, synthetic construct
  misc_feature 1..80: note = Artificially Synthesized Probe
  source 1..80: mol_type = other DNA
tactccactcagtgtgctcagggctgaaggtcaagtggagccacagcctccggggagggtcataggggccggggccagac

SEQ ID NO: 57348 - DNA, 80 bp, synthetic construct
  misc_feature 1..80: note = Artificially Synthesized Probe
  source 1..80: mol_type = other DNA
aaagcaggtcagtgtcagtgcaggaggccggtgccctctgaccccacgggtgggtctcccctatccatgtggggacagcc

SEQ ID NO: 57349 - DNA, 80 bp, synthetic construct; identical to SEQ ID NO: 25842
  misc_feature 1..80: note = Artificially Synthesized Probe
  source 1..80: mol_type = other DNA

SEQ ID NO: 57350 - DNA, 80 bp, synthetic construct
  misc_feature 1..80: note = Artificially Synthesized Probe
  source 1..80: mol_type = other DNA
ctcaggacagccaggccccaaggtacgtgcccctcccccagcaggacgtattaggggttcggggcagctgcctgaggagc

SEQ ID NO: 57351 - DNA, 80 bp, synthetic construct
  misc_feature 1..80: note = Artificially Synthesized Probe
  source 1..80: mol_type = other DNA
atccttcctgaggcagggcctgagggcagctacgtggcctgagtagggtcctccccgcgtgtgggcaggcttcgggtctc

SEQ ID NO: 57352 - DNA, 80 bp, synthetic construct
  misc_feature 1..80: note = Artificially Synthesized Probe
  source 1..80: mol_type = other DNA
ccatgctgaccgactcaacgtcctcctccagggagaccccggcaggcctggattcagctacccaggaccccgaggagcac

SEQ ID NO: 57353 - DNA, 80 bp, synthetic construct
  misc_feature 1..80: note = Artificially Synthesized Probe
  source 1..80: mol_type = other DNA
tgcccctgtggctccgcgtctctgggtccgaccctcgggcgcgcgacttggggccacctccccgcggcctcctctggggc

SEQ ID NO: 57354 - DNA, 80 bp, synthetic construct; identical to SEQ ID NO: 25843
  misc_feature 1..80: note = Artificially Synthesized Probe
  source 1..80: mol_type = other DNA

SEQ ID NO: 57355 - DNA, 80 bp, synthetic construct
  misc_feature 1..80: note = Artificially Synthesized Probe
  source 1..80: mol_type = other DNA
gcccacccagggtgggggtctgcacgcccaattgctgggaacacaatgcccaccgtcactgacaggaccacccctgtctt

SEQ ID NO: 57356 - DNA, 80 bp, synthetic construct
  misc_feature 1..80: note = Artificially Synthesized Probe
  source 1..80: mol_type = other DNA
atgctcccgtttaaaggaccccaaaatgccagatcgatttttccacataaaaatctcactggtgtccctggtagagacag

SEQ ID NO: 57357 - DNA, 80 bp, synthetic construct
  misc_feature 1..80: note = Artificially Synthesized Probe
  source 1..80: mol_type = other DNA
tatgtttccaggaatttggccatttaggtgactcatatgagtgaaatcgtatgaaatgtctccttttgtgactggcttat

SEQ ID NO: 57358 - DNA, 80 bp, synthetic construct
  misc_feature 1..80: note = Artificially Synthesized Probe
  source 1..80: mol_type = other DNA
gctgagcgtgtgcatctatgagtacaggagaacgccaggcagcttggccccagccatgagcaccacccccaccttcctaa

SEQ ID NO: 57359 - DNA, 80 bp, synthetic construct
  misc_feature 1..80: note = Artificially Synthesized Probe
  source 1..80: mol_type = other DNA
ccactacagcatcccccaccagggtcccctccccagcgaccccaacatagcatcccctccagagtcccctcccccaaaag

SEQ ID NO: 57360 - DNA, 80 bp, synthetic construct; identical to SEQ ID NO: 25844
  misc_feature 1..80: note = Artificially Synthesized Probe
  source 1..80: mol_type = other DNA

SEQ ID NO: 57361 - DNA, 80 bp, synthetic construct
  misc_feature 1..80: note = Artificially Synthesized Probe
  source 1..80: mol_type = other DNA
gtgggcgagtgtgtggttagatgatggatggctgaatggatgagtggggggatggatgggtgagtgggtgtatgtatgga

SEQ ID NO: 57362 - DNA, 80 bp, synthetic construct
  misc_feature 1..80: note = Artificially Synthesized Probe
  source 1..80: mol_type = other DNA
atagatgggtatgtgagtgagtggggggatgggtaggtgggtggatggatggttaggtgaatgagtggatggacagacgg

SEQ ID NO: 57363 - DNA, 80 bp, synthetic construct; identical to SEQ ID NO: 25845
  misc_feature 1..80: note = Artificially Synthesized Probe
  source 1..80: mol_type = other DNA

SEQ ID NO: 57364 - DNA, 80 bp, synthetic construct
  misc_feature 1..80: note = Artificially Synthesized Probe
  source 1..80: mol_type = other DNA
tgggccaggctctgacggtggccactcatggcctttctagctctggtgccagcatagggaaggaggaggcacagccttgt

SEQ ID NO: 57365 - DNA, 80 bp, synthetic construct
  misc_feature 1..80: note = Artificially Synthesized Probe
  source 1..80: mol_type = other DNA
aggccctcgggggccaagaggagtcccaggacccgaggtaggttggtggccagtccccatgccctccccccaacctgcca

SEQ ID NO: 57366 - DNA, 80 bp, synthetic construct
  misc_feature 1..80: note = Artificially Synthesized Probe
  source 1..80: mol_type = other DNA
cacggtaggtgtcacatggggcagaaccagtgtccttctcctgccaaaactagacaccaagagcagcaggggtgggggaa

SEQ ID NO: 57367 - DNA, 80 bp, synthetic construct
  misc_feature 1..80: note = Artificially Synthesized Probe
  source 1..80: mol_type = other DNA
tgcctccacacgtgggctggaatgtcccgggacccccaggccaggaccttgctgtggaaactcttctggggccccggggg

SEQ ID NO: 57368 - DNA, 80 bp, synthetic construct
  misc_feature 1..80: note = Artificially Synthesized Probe
  source 1..80: mol_type = other DNA
actgtgaatgatgtggccatgaacacaccacacagatacctcttggagatcccactttcacttcttttgagtatgttccc

SEQ ID NO: 57369 - DNA, 80 bp, synthetic construct; identical to SEQ ID NO: 25846
  misc_feature 1..80: note = Artificially Synthesized Probe
  source 1..80: mol_type = other DNA

SEQ ID NO: 57370 - DNA, 80 bp, synthetic construct
  misc_feature 1..80: note = Artificially Synthesized Probe
  source 1..80: mol_type = other DNA
gtgcagcattgcggggggccgggcggggcgtgggaggcgatgagatgggagaagtccagacgcgtccctccaacgagggc

SEQ ID NO: 57371 - DNA, 80 bp, synthetic construct
  misc_feature 1..80: note = Artificially Synthesized Probe
  source 1..80: mol_type = other DNA
aaggaggctgtcaagaacctcgagtggattgcgggcggcacctggacaccctcagccctcaagtttgcctacgaccgcct

SEQ ID NO: 57372 - DNA, 80 bp, synthetic construct; identical to SEQ ID NO: 25847
  misc_feature 1..80: note = Artificially Synthesized Probe
  source 1..80: mol_type = other DNA

SEQ ID NO: 57373 - DNA, 80 bp, synthetic construct
  misc_feature 1..80: note = Artificially Synthesized Probe
  source 1..80: mol_type = other DNA
gtgggtgggaaggggtcgggccctctcggggctgcagggcagaggccagctgcaccctgagcctgtctaggcagatcagt

SEQ ID NO: 57374 - DNA, 80 bp, synthetic construct
  misc_feature 1..80: note = Artificially Synthesized Probe
  source 1..80: mol_type = other DNA
cttcctcctcgagggccgggctgggggaggggccgtgcagggacccggggggcggcggagccactgcggaggctgctcct

SEQ ID NO: 57375 - DNA, 80 bp, synthetic construct
  misc_feature 1..80: note = Artificially Synthesized Probe
  source 1..80: mol_type = other DNA
cttgcagtctccctcagctgccgcccagctcccatgggctggccgtgcatgtgccactcggaggaagccctggattcagt

SEQ ID NO: 57376 - DNA, 80 bp, synthetic construct
  misc_feature 1..80: note = Artificially Synthesized Probe
  source 1..80: mol_type = other DNA
tgggggtgccgtccaggctctgctggacgtggtgctgcccccatggtgcactgctgcaccgtacctgggcccacaggagg

SEQ ID NO: 57377 - DNA, 80 bp, synthetic construct; identical to SEQ ID NO: 25848
  misc_feature 1..80: note = Artificially Synthesized Probe
  source 1..80: mol_type = other DNA

SEQ ID NO: 57378 - DNA, 80 bp, synthetic construct; identical to SEQ ID NO: 25820
  misc_feature 1..80: note = Artificially Synthesized Probe
  source 1..80: mol_type = other DNA

SEQ ID NO: 57379 - DNA, 80 bp, synthetic construct
  misc_feature 1..80: note = Artificially Synthesized Probe
  source 1..80: mol_type = other DNA
ggcgtcctcccccagggtccacatcagcagcaggggcacctggaccctgagggcaggaaccagaccttggctcctccacc

SEQ ID NO: 57380 - DNA, 80 bp, synthetic construct
  misc_feature 1..80: note = Artificially Synthesized Probe
  source 1..80: mol_type = other DNA
atcgtgagtgggtgggtgctgcgtctgtggatgtcacgtgacctttcctctttagcctatcattgtagttgggagttagt

SEQ ID NO: 57381 - DNA, 80 bp, synthetic construct; identical to SEQ ID NO: 25849
  misc_feature 1..80: note = Artificially Synthesized Probe
  source 1..80: mol_type = other DNA

SEQ ID NO: 57382 - DNA, 80 bp, synthetic construct
  misc_feature 1..80: note = Artificially Synthesized Probe
  source 1..80: mol_type = other DNA
aacccctcccctcctctcggccgccctgacacctcatccccgacactcagagctcatcctccttcccagctgtttccaat

SEQ ID NO: 57383 - DNA, 80 bp, synthetic construct
  misc_feature 1..80: note = Artificially Synthesized Probe
  source 1..80: mol_type = other DNA
gtccaccccaaagcccagccaccctgggcctgcagcaggcctgtggagttctcagttgcgtggggaccagagggtgctgg

SEQ ID NO: 57384 - DNA, 80 bp, synthetic construct
  misc_feature 1..80: note = Artificially Synthesized Probe
  source 1..80: mol_type = other DNA
agaggactcacatcccagagaggctgaggaagggtttaccaccgcaagctttctcaggcgggctcttgaggggtggctgg

SEQ ID NO: 57385 - DNA, 80 bp, synthetic construct
  misc_feature 1..80: note = Artificially Synthesized Probe
  source 1..80: mol_type = other DNA
ttatatatctcttgggagaaatatctgtttaagtccttgacctatttttgaatcaagttgattgttttttgttgttgaat

SEQ ID NO: 57386 - DNA, 80 bp, synthetic construct
  misc_feature 1..80: note = Artificially Synthesized Probe
  source 1..80: mol_type = other DNA
cttcctgtccctgtgctcactgcccccacgcctcctgccaaggccgagccacacacccgctccacctgcatttcctctac

SEQ ID NO: 57387 - DNA, 80 bp, synthetic construct; identical to SEQ ID NO: 25850
  misc_feature 1..80: note = Artificially Synthesized Probe
  source 1..80: mol_type = other DNA

SEQ ID NO: 57388 - DNA, 80 bp, synthetic construct
  misc_feature 1..80: note = Artificially Synthesized Probe
  source 1..80: mol_type = other DNA
ctggccctctgctaaagcccgggcacccgcccagccgggctgggccctccctgccacactagcttcccagggctgccccc

SEQ ID NO: 57389 - DNA, 80 bp, synthetic construct
  misc_feature 1..80: note = Artificially Synthesized Probe
  source 1..80: mol_type = other DNA
tggccgctctctttataagaaccctggtcattgaatttaaggcccaccccaagtccagaatgacctcgcaagacccttaa

SEQ ID NO: 57390 - DNA, 80 bp, synthetic construct; identical to SEQ ID NO: 25851
  misc_feature 1..80: note = Artificially Synthesized Probe
  source 1..80: mol_type = other DNA

SEQ ID NO: 57391 - DNA, 80 bp, synthetic construct
  misc_feature 1..80: note = Artificially Synthesized Probe
  source 1..80: mol_type = other DNA
ccagcagccctgatcccggggtgtctgcacccttccagcccaacctctgggtctccaaaagcacagtcgggggagcatcc

SEQ ID NO: 57392 - DNA, 80 bp, synthetic construct
  misc_feature 1..80: note = Artificially Synthesized Probe
  source 1..80: mol_type = other DNA
ccgggcacggctgtgaccatttctcagggccaggttctcgtccccacacccactgcacagggcaggccaggctggtcttc

SEQ ID NO: 57393 - DNA, 80 bp, synthetic construct
  misc_feature 1..80: note = Artificially Synthesized Probe
  source 1..80: mol_type = other DNA
tgccccttgcatgtctgtctccatatgtttggtgacagcagtgaaaatgttattagttttgagggggtttgggaagccca

SEQ ID NO: 57394 - DNA, 80 bp, synthetic construct; identical to SEQ ID NO: 25852
  misc_feature 1..80: note = Artificially Synthesized Probe
  source 1..80: mol_type = other DNA

SEQ ID NO: 57395 - DNA, 80 bp, synthetic construct
  misc_feature 1..80: note = Artificially Synthesized Probe
  source 1..80: mol_type = other DNA
tgtgacgacgtccaggggttgggctgagaagcagacacccttggggaaactggctctgtccctcccctcccccatcccag

SEQ ID NO: 57396 - DNA, 80 bp, synthetic construct
  misc_feature 1..80: note = Artificially Synthesized Probe
  source 1..80: mol_type = other DNA
gctggtgaccacccaggcaggtgggggccccacttggtaacagagtcatagggcagaacccacctgggctgccacagaag

SEQ ID NO: 57397 - DNA, 80 bp, synthetic construct
  misc_feature 1..80: note = Artificially Synthesized Probe
  source 1..80: mol_type = other DNA
ctattttttcttattgtcatacccaagaaatcattgctcagtcccatgtcacgaaggtgttaccttatgttttcttctaa

SEQ ID NO: 57398 - DNA, 80 bp, synthetic construct
  misc_feature 1..80: note = Artificially Synthesized Probe
  source 1..80: mol_type = other DNA
ggtcctccttaagtacctcccacactacacagacagtggcccttttgtgggcagcaaattcttgagccatgaaaggatgc

SEQ ID NO: 57399 - DNA, 80 bp, synthetic construct; identical to SEQ ID NO: 25853
  misc_feature 1..80: note = Artificially Synthesized Probe
  source 1..80: mol_type = other DNA

SEQ ID NO: 57400 - DNA, 80 bp, synthetic construct
  misc_feature 1..80: note = Artificially Synthesized Probe
  source 1..80: mol_type = other DNA
ttccacaaggcccggcgcttcgtggagcaggtggcgcggcggctgacgctggcccggagggacgacgaccctctcaacgc

SEQ ID NO: 57401 - DNA, 80 bp, synthetic construct
  misc_feature 1..80: note = Artificially Synthesized Probe
  source 1..80: mol_type = other DNA
gtgcgcagcccgcgtggcggggcccggaggcacgcagagctgtccttcgtgttcctcacggacggcgtcacgggcaacga

SEQ ID NO: 57402 - DNA, 80 bp, synthetic construct
  misc_feature 1..80: note = Artificially Synthesized Probe
  source 1..80: mol_type = other DNA
ggcttcttcgaccgcttcatccgctggatctgctagcgccgccgcccgggccccgcagtcgagggtcgtgagcccacccc

SEQ ID NO: 57403 - DNA, 80 bp, synthetic construct; identical to SEQ ID NO: 25854
  misc_feature 1..80: note = Artificially Synthesized Probe
  source 1..80: mol_type = other DNA

SEQ ID NO: 57404 - DNA, 80 bp, synthetic construct; identical to SEQ ID NO: 25821
  misc_feature 1..80: note = Artificially Synthesized Probe
  source 1..80: mol_type = other DNA

SEQ ID NO: 57405 - DNA, 80 bp, synthetic construct
  misc_feature 1..80: note = Artificially Synthesized Probe
  source 1..80: mol_type = other DNA
gctattcgaggtcccttgagattccatctaaattttaggatttattcactatttctgaaaaaaaaaacaatcactgggat

SEQ ID NO: 57406 - DNA, 80 bp, synthetic construct
  misc_feature 1..80: note = Artificially Synthesized Probe
  source 1..80: mol_type = other DNA
tcctaagtcaatttttaagtattttattatttttgatactatagtaaatagaattgttttcttaatttcctttggattgt

SEQ ID NO: 57407 - DNA, 80 bp, synthetic construct
  misc_feature 1..80: note = Artificially Synthesized Probe
  source 1..80: mol_type = other DNA
tctttccaatttgaatgcctttaatttctttttcttgcccaattgctctggccagaacttccagtacagtgttaaataga

SEQ ID NO: 57408 - DNA, 80 bp, synthetic construct; identical to SEQ ID NO: 25822
  misc_feature 1..80: note = Artificially Synthesized Probe
  source 1..80: mol_type = other DNA

SEQ ID NO: 57409 - DNA, 80 bp, synthetic construct
  misc_feature 1..80: note = Artificially Synthesized Probe
  source 1..80: mol_type = other DNA
ggatttttgcatcaatgttcataaggaagactggattgtagttttcttttcttgcaatatctttgtctggtattggtatc

SEQ ID NO: 57410 - DNA, 80 bp, synthetic construct
  misc_feature 1..80: note = Artificially Synthesized Probe
  source 1..80: mol_type = other DNA
gctgggacctccgggggcgcagggcctctccccgggccggacggaaggggcggcggggcggggggaggaggggctttcgg

SEQ ID NO: 57411 - DNA, 80 bp, synthetic construct
  misc_feature 1..80: note = Artificially Synthesized Probe
  source 1..80: mol_type = other DNA
gccatcaggtccagaggttgtttgtcaggagatttttgagtattgattcaatctccttactagttatgtctattcagatt

SEQ ID NO: 57412 - DNA, 80 bp, synthetic construct
  misc_feature 1..80: note = Artificially Synthesized Probe
  source 1..80: mol_type = other DNA
cacttataattttagtaatttgagtttcttctttttttcttagtctagaatctagcttaaggctggtcaattctgttatc

SEQ ID NO: 57413 - DNA, 80 bp, synthetic construct
  misc_feature 1..80: note = Artificially Synthesized Probe
  source 1..80: mol_type = other DNA
gtcttttttaatataagcatgtatagccatcagtttcccccttagcactgctttcactgtcgaacaagtttttaaatttg

SEQ ID NO: 57414 - DNA, 80 bp, synthetic construct; identical to SEQ ID NO: 25823
  misc_feature 1..80: note = Artificially Synthesized Probe
  source 1..80: mol_type = other DNA

SEQ ID NO: 57415 - DNA, 80 bp, synthetic construct
  misc_feature 1..80: note = Artificially Synthesized Probe
  source 1..80: mol_type = other DNA
tatgtggagaaaataaaaaagtcattgcacatgctcaggggaagtcacgggcttagaaaagacctaagaagaccttaagt

SEQ ID NO: 57416 - DNA, 80 bp, synthetic construct
  misc_feature 1..80: note = Artificially Synthesized Probe
  source 1..80: mol_type = other DNA
ttatactttatgctgatccttagcacagagacagcaacaatcaaaattataaaaacaagaaaaaccagcaaactctgggg

SEQ ID NO: 57417 - DNA, 80 bp, synthetic construct
  misc_feature 1..80: note = Artificially Synthesized Probe
  source 1..80: mol_type = other DNA
gaaagaactatcttaaagatactcaaataactaagggaaaatgtggagaaagtgaaagaaaatgtaggaacaaatgaaaa

SEQ ID NO: 57418 - DNA, 80 bp, synthetic construct; identical to SEQ ID NO: 25824
  misc_feature 1..80: note = Artificially Synthesized Probe
  source 1..80: mol_type = other DNA

SEQ ID NO: 57419 - DNA, 80 bp, synthetic construct
  misc_feature 1..80: note = Artificially Synthesized Probe
  source 1..80: mol_type = other DNA
gacccacactgaaacattctaatcaaattgtcaaaacccaaagacaaagattttgaaaacagcaagaaagaatgattcat

SEQ ID NO: 57420 - DNA, 80 bp, synthetic construct
  misc_feature 1..80: note = Artificially Synthesized Probe
  source 1..80: mol_type = other DNA
aattaacacattcttagatcaacaaaagctgagaatgttccttaccactagacctgccctataggaaacgccaaagggag

SEQ ID NO: 57421 - DNA, 80 bp, synthetic construct
  misc_feature 1..80: note = Artificially Synthesized Probe
  source 1..80: mol_type = other DNA
aacttgagcccaggagttcaagaccagcctgagcaatatagggagaccctatctctataaaataaaaatatttttaaaaa

SEQ ID NO: 57422 - DNA, 80 bp, synthetic construct
  misc_feature 1..80: note = Artificially Synthesized Probe
  source 1..80: mol_type = other DNA
ccgcagcccctgccgggccgcccacacccgccctgggactccgccggggcgctggtggaaccgctgggcctgggtctcca

SEQ ID NO: 57423 - DNA, 80 bp, synthetic construct
  misc_feature 1..80: note = Artificially Synthesized Probe
  source 1..80: mol_type = other DNA
gcctgggcaacagagcaagaccttatctcaaaataaataaataaataaatatctcagtaaaggtaaatatatagacaatt

SEQ ID NO: 57424 - DNA, 80 bp, synthetic construct; identical to SEQ ID NO: 25825
  misc_feature 1..80: note = Artificially Synthesized Probe
  source 1..80: mol_type = other DNA

SEQ ID NO: 57425 - DNA, 80 bp, synthetic construct
  misc_feature 1..80: note = Artificially Synthesized Probe
  source 1..80: mol_type = other DNA
gtttcaccatcaaaaaaattaattaaacacaagacagtgatactggaaattaaggacaaaaaaatccataaggtatacag

SEQ ID NO: 57426 - DNA, 80 bp, synthetic construct
  misc_feature 1..80: note = Artificially Synthesized Probe
  source 1..80: mol_type = other DNA
ccaaatccaactatatgctctctacaagagatgcactttagatccagaaacataaatagattgacagtgaaaggatgggc

SEQ ID NO: 57427 - DNA, 80 bp, synthetic construct
  misc_feature 1..80: note = Artificially Synthesized Probe
  source 1..80: mol_type = other DNA
tatgcacctaataacagtccatcaaaatatttatatcttacactgggaagattgttgctggctctcagtctgcttccagt

SEQ ID NO: 57428 - DNA, 80 bp, synthetic construct; identical to SEQ ID NO: 25826
  misc_feature 1..80: note = Artificially Synthesized Probe
  source 1..80: mol_type = other DNA

SEQ ID NO: 57429 - DNA, 80 bp, synthetic construct
  misc_feature 1..80: note = Artificially Synthesized Probe
  source 1..80: mol_type = other DNA
agatacttccttttcctggagtttatttgggagcaccatgtgaggtagtacctttatttctagtcacagggtgagccctc

SEQ ID NO: 57430 - DNA, 80 bp, synthetic construct
  misc_feature 1..80: note = Artificially Synthesized Probe
  source 1..80: mol_type = other DNA
tctattttttattttgctcaactcttcttgctttttctaccaagtaaaacttggattcattttgcaaactcctatctaca

SEQ ID NO: 57431 - DNA, 80 bp, synthetic construct
  misc_feature 1..80: note = Artificially Synthesized Probe
  source 1..80: mol_type = other DNA
gagtttttttcataagtcctgcacatttttattcagttgattccttgggtttatgttgtttttcttactagtgtaaatag

SEQ ID NO: 57432 - DNA, 80 bp, synthetic construct; identical to SEQ ID NO: 25827
  misc_feature 1..80: note = Artificially Synthesized Probe
  source 1..80: mol_type = other DNA

SEQ ID NO: 57433 - DNA, 80 bp, synthetic construct
  misc_feature 1..80: note = Artificially Synthesized Probe
  source 1..80: mol_type = other DNA
agattaaccgagagtctagcagcttttaaaggtctcagtaggaaacacttgtcattgattgtctctaagggcagccacta

SEQ ID NO: 57434 - DNA, 80 bp, synthetic construct; identical to SEQ ID NO: 25818
  misc_feature 1..80: note = Artificially Synthesized Probe
  source 1..80: mol_type = other DNA

SEQ ID NO: 57435 - DNA, 80 bp, synthetic construct
  misc_feature 1..80: note = Artificially Synthesized Probe
  source 1..80: mol_type = other DNA
acctgtagcctggaagccatctctccccgctttgaattttcctgcctttctggattaaaccaatgtatttcttaaatgta

SEQ ID NO: 57436 - DNA, 80 bp, synthetic construct
  misc_feature 1..80: note = Artificially Synthesized Probe
  source 1..80: mol_type = other DNA
ctcttttcatcaatgatatatttttctaagtggctcactaaattttctctccctaatctcccctcctttctctttctttc

SEQ ID NO: 57437 - DNA, 80 bp, synthetic construct
  misc_feature 1..80: note = Artificially Synthesized Probe
  source 1..80: mol_type = other DNA
ctggtctccaactcctgagctcaagccatcctcccgcctcggcctcccaaagtgttgggattaccggcgtgagccaccgt

SEQ ID NO: 57438 - DNA, 80 bp, synthetic construct; identical to SEQ ID NO: 25856
  misc_feature 1..80: note = Artificially Synthesized Probe
  source 1..80: mol_type = other DNA

SEQ ID NO: 57439 - DNA, 80 bp, synthetic construct
  misc_feature 1..80: note = Artificially Synthesized Probe
  source 1..80: mol_type = other DNA
tgctgggattacaggcgtgagccactgtacccggccgttattttatttatttatttatttgtttgttattttatttattt

SEQ ID NO: 57440 - DNA, 80 bp, synthetic construct
  misc_feature 1..80: note = Artificially Synthesized Probe
  source 1..80: mol_type = other DNA
atttttagtcaagacagggttttatcatattggccaagatggtctcgaactcctgacctcaggttatcagcccacttctg

SEQ ID NO: 57441 - DNA, 80 bp, synthetic construct; identical to SEQ ID NO: 25857
  misc_feature 1..80: note = Artificially Synthesized Probe
  source 1..80: mol_type = other DNA

SEQ ID NO: 57442 - DNA, 80 bp, synthetic construct
  misc_feature 1..80: note = Artificially Synthesized Probe
  source 1..80: mol_type = other DNA
tcagctcaccacaacctccgcctcctggattcaagcgattctcctgcctcagcctcctgagtagctgggattacaggcat

SEQ ID NO: 57443 - DNA, 80 bp, synthetic construct
  misc_feature 1..80: note = Artificially Synthesized Probe
  source 1..80: mol_type = other DNA
atttcctacctgccttttctccttaattgttgccttctttgaactgttgctcccttggcctctctctttctggtcttatc

SEQ ID NO: 57444 - DNA, 80 bp, synthetic construct
  misc_feature 1..80: note = Artificially Synthesized Probe
  source 1..80: mol_type = other DNA
tttttgagatggagtctcactctgtcgccaggctggagtacagtggctgcaacttccgcctcctgggttcaagcaattct

SEQ ID NO: 57445 - DNA, 80 bp, synthetic construct
  misc_feature 1..80: note = Artificially Synthesized Probe
  source 1..80: mol_type = other DNA
gtctccgcttgccgcgtcctcccatcccctagtctgcaggcctggtgcccttgaattcacccgcttctgttgcgttgcgg

SEQ ID NO: 57446 - DNA, 80 bp, synthetic construct; identical to SEQ ID NO: 25858
  misc_feature 1..80: note = Artificially Synthesized Probe
  source 1..80: mol_type = other DNA

SEQ ID NO: 57447 - DNA, 80 bp, synthetic construct
  misc_feature 1..80: note = Artificially Synthesized Probe
  source 1..80: mol_type = other DNA
cgatctctgctcactgcgagctccgcctcccgggttcatgccattctcctgcctcagcctcctgagtagctgggactaca

SEQ ID NO: 57448 - DNA, 80 bp, synthetic construct
  misc_feature 1..80: note = Artificially Synthesized Probe
  source 1..80: mol_type = other DNA
gcatcttcattttaacgtgttcaagcccagctcatgatcctcctttttttttttttgagacagggtctccctgtcaccca

SEQ ID NO: 57449 - DNA, 80 bp, synthetic construct
  misc_feature 1..80: note = Artificially Synthesized Probe
  source 1..80: mol_type = other DNA
tcaccatgttgcccaggctggtctcaaactcgtgggctcaacgatccgtctgtctttgcctcccaaagtgctggcattac

SEQ ID NO: 57450 - DNA, 80 bp, synthetic construct; identical to SEQ ID NO: 25859
  misc_feature 1..80: note = Artificially Synthesized Probe
  source 1..80: mol_type = other DNA

SEQ ID NO: 57451 - DNA, 80 bp, synthetic construct
  misc_feature 1..80: note = Artificially Synthesized Probe
  source 1..80: mol_type = other DNA
agttgctttctgcaccaatagctgaggcgttcagggttgtccagggacgctaccctcacgtgtctggttccgagtgctgc

SEQ ID NO: 57452 - DNA, 80 bp, synthetic construct
  misc_feature 1..80: note = Artificially Synthesized Probe
  source 1..80: mol_type = other DNA
gggctacaggcatccgccaccacgcctggctaatttttgtatttttagtagagacagggttttgccatgttggccaggct

SEQ ID NO: 57453 - DNA, 80 bp, synthetic construct
  misc_feature 1..80: note = Artificially Synthesized Probe
  source 1..80: mol_type = other DNA
tagacagcaggattatgtctgttagttggttttatgtcacttttctagccaagctgtaccatcctgtttttgttggttgg

SEQ ID NO: 57454 - DNA, 80 bp, synthetic construct
  misc_feature 1..80: note = Artificially Synthesized Probe
  source 1..80: mol_type = other DNA
tgttttgttcactattgcatgcacagcttggggccatttcaaacctcagatttcaaacctgaacacaatcctttctcatc

SEQ ID NO: 57455 - DNA, 80 bp, synthetic construct; identical to SEQ ID NO: 25860
  misc_feature 1..80: note = Artificially Synthesized Probe
  source 1..80: mol_type = other DNA

SEQ ID NO: 57456 - DNA, 80 bp, synthetic construct
  misc_feature 1..80: note = Artificially Synthesized Probe
  source 1..80: mol_type = other DNA
atgccaccatgcgtggctaatttaaaaaaaaattttttttgtggggacagggtctcactatgttgcccaggctggtctca

SEQ ID NO: 57457 - DNA, 80 bp, synthetic construct
  misc_feature 1..80: note = Artificially Synthesized Probe
  source 1..80: mol_type = other DNA
gtcctgataagtggctctccggggcacccttcgtgcatatcggctatccagctccacctcttgaccgctttcacttcctg

SEQ ID NO: 57458 - DNA, 80 bp, synthetic construct
  misc_feature 1..80: note = Artificially Synthesized Probe
  source 1..80: mol_type = other DNA
ttttaagtgtctctgcctacagtgctgagagccattaagtggagagcaagctgccaaaaactaaaaatagggccctctta

SEQ ID NO: 57459 - DNA, 80 bp, synthetic construct
  misc_feature 1..80: note = Artificially Synthesized Probe
  source 1..80: mol_type = other DNA
ggagtgcaatgatgcgatctcggctcaactgcaacctctgcctctgggattcaagcaattctcctgtctcagcctccgag

SEQ ID NO: 57460 - DNA, 80 bp, synthetic construct
  misc_feature 1..80: note = Artificially Synthesized Probe
  source 1..80: mol_type = other DNA
ctgagtagctgggactacaggcgcgcactgccatgcccagctaattttttgtatttttagtagagacagggtttcaccat

SEQ ID NO: 57461 - DNA, 80 bp, synthetic construct; identical to SEQ ID NO: 25861
  misc_feature 1..80: note = Artificially Synthesized Probe
  source 1..80: mol_type = other DNA

SEQ ID NO: 57462 - DNA, 80 bp, synthetic construct
  misc_feature 1..80: note = Artificially Synthesized Probe
  source 1..80: mol_type = other DNA
ccaccttggcattctgaacacagtcttgcctttcactgcagtttctgtcagtcttcgtgcagcttgcacataccccaacc

SEQ ID NO: 57463 - DNA, 80 bp, synthetic construct
  misc_feature 1..80: note = Artificially Synthesized Probe
  source 1..80: mol_type = other DNA
gaaaccccatctctactaaaaatacaaaaaattagctgggtgtggtggcgggcgcctgtagtcccagctactcgggaggc

SEQ ID NO: 57464 - DNA, 80 bp, synthetic construct; identical to SEQ ID NO: 25862
  misc_feature 1..80: note = Artificially Synthesized Probe
  source 1..80: mol_type = other DNA

SEQ ID NO: 57465 - DNA, 80 bp, synthetic construct
  misc_feature 1..80: note = Artificially Synthesized Probe
  source 1..80: mol_type = other DNA
gacccagtaagtttctttttagcctgtgggataggttcttagtgttgggtttagaacgtagaattaatactgtagaaggt

SEQ ID NO: 57466 - DNA, 80 bp, synthetic construct
  misc_feature 1..80: note = Artificially Synthesized Probe
  source 1..80: mol_type = other DNA
ttcctagagagaataattcactgcaaatgtttcatttctgctacctccattagttccctcctagctagaaaaactgatgc

SEQ ID NO: 57467 - DNA, 80 bp, synthetic construct
  misc_feature 1..80: note = Artificially Synthesized Probe
  source 1..80: mol_type = other DNA
gtagaaaaactgggcggtgtggtggtacacacctgtagcgtcagctacttgggaggctgaggtgggagggtggacttcag

SEQ ID NO: 57468 - DNA, 80 bp, synthetic construct; identical to SEQ ID NO: 25855
  misc_feature 1..80: note = Artificially Synthesized Probe
  source 1..80: mol_type = other DNA

SEQ ID NO: 57469 - DNA, 80 bp, synthetic construct; identical to SEQ ID NO: 25863
  misc_feature 1..80: note = Artificially Synthesized Probe
  source 1..80: mol_type = other DNA

SEQ ID NO: 57470 - DNA, 80 bp, synthetic construct
  misc_feature 1..80: note = Artificially Synthesized Probe
  source 1..80: mol_type = other DNA
attcaatctgtctttgtaggggacaagatgccaactggcaagcagctagctgacattggctataagaccttctctacctc

SEQ ID NO: 57471 - DNA, 80 bp, synthetic construct
  misc_feature 1..80: note = Artificially Synthesized Probe
  source 1..80: mol_type = other DNA
catgctgtggagagacttcacctgccaccatttccaggtcaacaggactagagcgttgatggttttcaaaccctgttgga

SEQ ID NO: 57472 - DNA, 80 bp, synthetic construct
  misc_feature 1..80: note = Artificially Synthesized Probe
  source 1..80: mol_type = other DNA
cagtttgacagtttatggaggcttttgaatcgtaatagcaatgtgagggtgaggtacacctacagacattaaataatttg

SEQ ID NO: 57473 - DNA, 80 bp, synthetic construct
  misc_feature 1..80: note = Artificially Synthesized Probe
  source 1..80: mol_type = other DNA
ttccgcttcctgtccgactgtggtgtctttgctgagggtcacattgagctgcaggttgaatccggggtgcctttaggtga

SEQ ID NO: 57474 - DNA, 80 bp, synthetic construct
  misc_feature 1..80: note = Artificially Synthesized Probe
  source 1..80: mol_type = other DNA
cctctagaatagaggttggcacacagcaggtacctgtggatattggttgaacaaacaggtgggcaaagtgaggaagataa

SEQ ID NO: 57475 - DNA, 80 bp, synthetic construct
  misc_feature 1..80: note = Artificially Synthesized Probe
  source 1..80: mol_type = other DNA
ccaggatggtgaagggggacctggtacccagtgatccccaccccaggatcctaaatcatgacttacctgctaataaaaac

SEQ ID NO: 57476 - DNA, 80 bp, synthetic construct
  misc_feature 1..80: note = Artificially Synthesized Probe
  source 1..80: mol_type = other DNA
ttgctgtatcgcccaggctggagtacaatggcacaatctcggctcactgcaacctccgcctcttgggttcaagtgattct

SEQ ID NO: 57477 - DNA, 80 bp, synthetic construct; identical to SEQ ID NO: 25865
  misc_feature 1..80: note = Artificially Synthesized Probe
  source 1..80: mol_type = other DNA

SEQ ID NO: 57478 - DNA, 80 bp, synthetic construct
  misc_feature 1..80: note = Artificially Synthesized Probe
  source 1..80: mol_type = other DNA
gattacttcaaaattgtatttttttttttttttgagacagtgtttttgctctgttgcccaggttggagtgcactggcaca

SEQ ID NO: 57479 - DNA, 80 bp, synthetic construct
  misc_feature 1..80: note = Artificially Synthesized Probe
  source 1..80: mol_type = other DNA
tcctgacctcaggtgatccacccccctggcctcccaaagtgctaggattacaggcgtgagccaccgcacccggcgaaaat

SEQ ID NO: 57480 - DNA, 80 bp, synthetic construct
  misc_feature 1..80: note = Artificially Synthesized Probe
  source 1..80: mol_type = other DNA
ttgggaggccaagccgggcagatcatttgaggtcagaagttggagagcagtctgaccaacatggtaaaaccttgtctaaa

SEQ ID NO: 57481 - DNA, 80 bp, synthetic construct; identical to SEQ ID NO: 25864
  misc_feature 1..80: note = Artificially Synthesized Probe
  source 1..80: mol_type = other DNA

SEQ ID NO: 57482 - DNA, 80 bp, synthetic construct; identical to SEQ ID NO: 25866
  misc_feature 1..80: note = Artificially Synthesized Probe
  source 1..80: mol_type = other DNA

SEQ ID NO: 57483 - DNA, 80 bp, synthetic construct
  misc_feature 1..80: note = Artificially Synthesized Probe
  source 1..80: mol_type = other DNA
cgcctggcatgtagtaagcactcagtgagtgttagctcatgttatttggggaccaggcttgattttgctgaggagttgta

SEQ ID NO: 57484 - DNA, 80 bp, synthetic construct
  misc_feature 1..80: note = Artificially Synthesized Probe
  source 1..80: mol_type = other DNA
gggcccctgctgacacccactcctttcgcctccaggattcagcaccatggcggaagacatggagaccaaaatcaagaact

SEQ ID NO: 57485 - DNA, 80 bp, synthetic construct; identical to SEQ ID NO: 25867
  misc_feature 1..80: note = Artificially Synthesized Probe
  source 1..80: mol_type = other DNA

SEQ ID NO: 57486 - DNA, 80 bp, synthetic construct
  misc_feature 1..80: note = Artificially Synthesized Probe
  source 1..80: mol_type = other DNA
ctcaagaggtccccctacctcagcctctcgagtagctgggaccacaggcccacactactgtacttggctaatttttttgt

SEQ ID NO: 57487 - DNA, 80 bp, synthetic construct
  misc_feature 1..80: note = Artificially Synthesized Probe
  source 1..80: mol_type = other DNA
tgcgtactgtaacatgtacagaaagcacataacaaacatgtacagctaaatgaataattctaaagtgaaccccttgtgca

SEQ ID NO: 57488 - DNA, 80 bp, synthetic construct
  misc_feature 1..80: note = Artificially Synthesized Probe
  source 1..80: mol_type = other DNA
caagcaattctcctgcctcagtcccccaagtagctgggattacaggcacctgccaccacacccagctaattttttgtatt

SEQ ID NO: 57489 - DNA, 80 bp, synthetic construct; identical to SEQ ID NO: 25868
  misc_feature 1..80: note = Artificially Synthesized Probe
  source 1..80: mol_type = other DNA

SEQ ID NO: 57490 - DNA, 80 bp, synthetic construct
  misc_feature 1..80: note = Artificially Synthesized Probe
  source 1..80: mol_type = other DNA
ctaattttttgtatttttttttttttttagtaaagacaaggtttcaccatgttgatcaggctgatcttgaactcctgacc

SEQ ID NO: 57491 - DNA, 80 bp, synthetic construct
  misc_feature 1..80: note = Artificially Synthesized Probe
  source 1..80: mol_type = other DNA
gcccaagttggagtgcaatggcacgatctcagctcattgcaacctctgcctcccgggttcaagtgattctcctgcctcag

SEQ ID NO: 57492 - DNA, 80 bp, synthetic construct
  misc_feature 1..80: note = Artificially Synthesized Probe
  source 1..80: mol_type = other DNA
ttgcctgggccgcagcctggctcccgggtgtccagtccatcctcccttttggacgttggaggggccgcagcgtcatctcc

SEQ ID NO: 57493 - DNA, 80 bp, synthetic construct
  misc_feature 1..80: note = Artificially Synthesized Probe
  source 1..80: mol_type = other DNA
ctgcctcagcctgccgagtagctgggattacagtcgcctgccaccatgcctggctaattttttttttttgtatttttagt

SEQ ID NO: 57494 - DNA, 80 bp, synthetic construct
  misc_feature 1..80: note = Artificially Synthesized Probe
  source 1..80: mol_type = other DNA
gctggagtgcagtggtacaaccttggctcactgcaacctccgcctcccgggtttaagcaattctcctgcctcagcttcct

SEQ ID NO: 57495 - DNA, 80 bp, synthetic construct; identical to SEQ ID NO: 25869
  misc_feature 1..80: note = Artificially Synthesized Probe
  source 1..80: mol_type = other DNA

SEQ ID NO: 57496 - DNA, 80 bp, synthetic construct
  misc_feature 1..80: note = Artificially Synthesized Probe
  source 1..80: mol_type = other DNA
gacctcgtgatctgcctgcctcggcctcccaaagtgctgggattacaggcatgagccactaggtccagccacttttttgt

SEQ ID NO: 57497 - DNA, 80 bp, synthetic construct
  misc_feature 1..80: note = Artificially Synthesized Probe
  source 1..80: mol_type = other DNA
tatacatactgtgtgtattcttttgtgtttggattttttcattcagtaccttctcagatccatacatgctgtggcatata

SEQ ID NO: 57498 - DNA, 80 bp, synthetic construct
  misc_feature 1..80: note = Artificially Synthesized Probe
  source 1..80: mol_type = other DNA
tttgggaggccgaggtgggcagatcaagaccagcctggccaacatggcgaaaccctgtctctactaaaaatacaaaaatt

SEQ ID NO: 57499 - DNA, 80 bp, synthetic construct; identical to SEQ ID NO: 25870
  misc_feature 1..80: note = Artificially Synthesized Probe
  source 1..80: mol_type = other DNA
